United States Patent Application Publication US 2011/0183924 A1 - sequence listing, part 210

SEQ ID NO: 514554 - DNA, 962 bp, Homo sapiens
  misc_feature (21)..(21): n is a, c, g, or t
  misc_feature (103)..(103): n is a, c, g, or t
  misc_feature (211)..(211): n is a, c, g, or t
  misc_feature (257)..(257): n is a, c, g, or t
  misc_feature (525)..(525): n is a, c, g, or t
  misc_feature (566)..(566): n is a, c, g, or t
  misc_feature (568)..(568): n is a, c, g, or t
  misc_feature (572)..(572): n is a, c, g, or t
  misc_feature (624)..(624): n is a, c, g, or t
  misc_feature (641)..(641): n is a, c, g, or t
  misc_feature (656)..(656): n is a, c, g, or t
  misc_feature (673)..(673): n is a, c, g, or t
  misc_feature (712)..(712): n is a, c, g, or t
  misc_feature (734)..(734): n is a, c, g, or t
  misc_feature (739)..(739): n is a, c, g, or t
  misc_feature (753)..(753): n is a, c, g, or t
  misc_feature (764)..(764): n is a, c, g, or t
  misc_feature (782)..(782): n is a, c, g, or t
  misc_feature (805)..(805): n is a, c, g, or t
  misc_feature (813)..(813): n is a, c, g, or t
  misc_feature (834)..(834): n is a, c, g, or t
  misc_feature (842)..(842): n is a, c, g, or t
  misc_feature (850)..(850): n is a, c, g, or t
  misc_feature (863)..(863): n is a, c, g, or t
  misc_feature (879)..(879): n is a, c, g, or t
  misc_feature (882)..(882): n is a, c, g, or t
  misc_feature (898)..(898): n is a, c, g, or t
  misc_feature (943)..(943): n is a, c, g, or t
gagtcagacccaggccccagntctcgggaagcgcacagtgtgaaaataggtaactacaaaaacacagccaatgagtgccttgaaacaagggagaacaaaaaanagaggttgtgtgcgaaaacctggaatcaaaaactaaccgcggagaaagggaggaggatgtgctagactcccagagaagagcgggggaacatccagaaaggctctggcngccgacacagccacaccccctaggtctctggagtgcactgcagggnggcccatggcagggaggggtagaccaccttaccaccaggctgcggagaacagaggagcggggtctttctgacgcgggtgccaaggcgcccagcagccaccagggctgggagtgggagggtgtgctcaggggcccagcactgagcgaaaaaatgggcgtggaagcggagggggtgaccaggatagaccagggagtcaccgccgaacttgccagcgcgcactgaggaagaagcctcgctcccacaggcctctgtggagactgtggcgcanacgtgggcggggcggccggcgtggggccagtgtttagactngnacangccagttcagggggcctggccttgaccggtcgaggcctggcagttgccagcnggacaaggagagcaganctgggcaagggggcnaccccaattagagggtnctgcttgggaagacgaggggccagcttcctcctgctctnccgaagcctgggcatcactggncttancctctttggcagcntggctcgagcnggcctcctggcttgagcnggcccctgaagcctgttctagtntctgcttnttagcagcctggccctccgtnatcttctncaggagcncctgaagacgggncttccgggccttaacngcnaaggcgctctgctccnggaagctcttctcttgctggcgctttaaggatgttagggccaggntgttgtgccgagagttttg

SEQ ID NO: 514555 - DNA, 564 bp, Homo sapiens
gtggatcataacaccagaaccacaacgtggcaatggcctaccatggaatctgtccgatattgtgaacagtggcaatctcggatggaagcaattgcacgggaggctatgcacaccagtttaaccaatgatacctctattcggattcaatgttagctgcagagacacatgacccttatggacctttgccaccaggctggaaaacaagatgtggattctgcagaccaggggtcctcactttgtgaatcatacacataaaaactatgccagtgtgaaatgatccaatgaattcaaggctttactggaatgatgaacccctgccagaaggcttgggaaattagatatactcgtgatatgtgtacaggtacttatgttgagtcattaacgacaatgaacaaacaacgattcaactggatgcctcgcaatggtgaagtcactctgtaaatcttcaaggtgcgtccacagaattgtttacttgaacgcgggttgcatgtggaaaggcttgatccacttccgattatttgttgcgaagtcctaagtgcattaccttagttcctgtaaaaagtc

SEQ ID NO: 514556 - DNA, 161 bp, Homo sapiens
tctgtgatgcaaagtgttgtaagtcgatggagctgtgaagctccttttcacaggtgcagaagagacctggtgctgcggattgatctggcccaccataaggaccaggattcaccattgcaaataaaaccccaatgtcccagctgggcactttgcatccagag

SEQ ID NO: 514557 - DNA, 408 bp, Homo sapiens
tactccacaggcgaagtctactagctaactcgggctaactcatccaactggatgccggttagtttttttctcttgcctgatttctctggctaggactttcagtacaatattgaataggaatggtgaaggtggataactttgtcttgttccagttcttagaggataggctttcagatatttccctattcagtgtgatgatagttatgggtttgttgtatgtggcctttattattttcagatatgctctttctatgcctagttttgtgagagtttttatcatgaagggatgttgaattttatcaaattttcttctacatttgtcgagataataatatgatttttgtcctttattctgttgatttgatgtatcatgtttattgattcacttatgttgaaccatttttgaat

SEQ ID NO: 514558 - DNA, 306 bp, Homo sapiens
aaaaggggaggaaattgaaactgagtggaccacgatgggaaggaggggaaagcccaggtgtacaggaggcctctgggtgaaggcagaggctagcactggggttcggagcgacctgtggccgttggcctgaccatctttggtgctgtctgtcggtctactatcgatcgatcgtgcgtatcacctgcgtcctgactgctgccattaacgaagacggtgccgcggcgacgcaacgtccaggtggtcaccgagacgaccacatccaccgacgtgtggtgcatgccccgttatcactcagcctccaagtgt

SEQ ID NO: 514559 - DNA, 245 bp, Homo sapiens
  misc_feature (43)..(43): n is a, c, g, or t
  misc_feature (108)..(108): n is a, c, g, or t
  misc_feature (135)..(135): n is a, c, g, or t
  misc_feature (139)..(140): n is a, c, g, or t
  misc_feature (159)..(159): n is a, c, g, or t
  misc_feature (164)..(164): n is a, c, g, or t
  misc_feature (166)..(166): n is a, c, g, or t
  misc_feature (175)..(175): n is a, c, g, or t
  misc_feature (182)..(183): n is a, c, g, or t
  misc_feature (209)..(209): n is a, c, g, or t
  misc_feature (214)..(214): n is a, c, g, or t
ggagactggctctcactcctccattgctgcccattgggatggnatgaacttcacagctctggtttcctctgttcttctctcagctgcaggtgatttaagcttgttggntttatataacattgggaaatggtaaantgtnnaaatttgctatgttttccnggggnangttatttanggaaggnnatttttaactcgagtgctagaagtgntaaancattataataaattcatgctattcagacttt

SEQ ID NO: 514560 - DNA, 1118 bp, Homo sapiens
ttcttttgtttcttcgtcttctctctcttgttcttcgcgttgtgtctcctcgtcttcctggcttgtctcttcgcttttgttcgtttgtcgttctgtgccgtggtgttctttgccctttcttcttccttcccctcctcttctcttcttccgctctgttcttcttccttgtcattcgcctgtccccctctgtctcctctcttctctcgtcttcttctatgtccgtccctcctgtcgttgtccttgttcccttccttgtcgtgcttctttttccttctctgtgtttccttgcccccttgtctcctttcttctgtttgtctctctccgctctccgctcgtcgcggttgcctcttgccccttcttgccctctctggtttcttctccctcctgccgttgcccctgctgttctgttccctctcctctcgtggtttcccttgtggctcatccttttctttctctggcttgcctctgtcttctttgctccgctctgcccctgccttctcgccgtgtcccttttcctccctctctatttctctttgcgccctctctctattgttggcctcgtctcctctcttgtctcacttgatgtgttacttcttcctgtttctctggttttttcgtactctcagtctccgctcttgcttctgtgtatcctctttctcttccttttttgttgcccctgttcatggcatgcctttgtttattcctggacgttcctgtgtgtagatatgtcccttgggcatgatctatatgttgtgcatgtctgatagtacttttgggtgtatttgtgtatgctattgtatcgtgtgttatctgggatggttcccggctcatccttgtctgtaaggagatcttttgtttgcttctccctgcccgccggaatccatcagtgtctctgcttctctgtgtcgccccgcccagccaccctggtgtggagggaggggtctcgtttgtgcgctgtgggtgtagctttgtgcatcctctcccagtggagcgatcatcctgtgcctcccctcctccctttgtttgctcctgtgtggttggtaaggagggatgtgagggaaataggaccccccgacttgccctcctgcctcagtcttcattacaccgggtcttcatgt

SEQ ID NO: 514561 - DNA, 987 bp, Homo sapiens
ccacgcgtccgactagttctagatcgggagcggccgcaccttgtcatgtaccatcaataaagtaccctgtgctcaaccaaaaaaaaaaaaaaaaaaaaaaaaaaaaaaaaaaaaaaaaaaaaaaaaaaaggggggggcgcggccacgcagaaaacttctccctccgggggggcgccgcaggatctacgcaccgcgcccccacgttgtttgttgtcaagagagggggcgccccgataagagggaggcgattattatataagcagtagcgtgcgcgcggggcgcgcgagcgtcgtatacaaaacacggcgctaggagatccggggagaagaaacgcgcggcgcactctggggagagccttctgtgggagaaaggaagcaccacttaattctcggggggggggaggagaacaatattgaggagagagacaacctctcctctataggaagagatttataaaagccttctgtggggggagaaatatattaaacatatttatagacgaggggattataaggggggggtctaaacaaaaagacaggggcaaaataatgatggatagggagagcggagagagaaaaaaaaattatgtggcacataactgagagaggaaaatatgtatttataatgttagaaaacagaatatttatttatatccagcgggggagtacttttctttgttatatataaataaaactaaaagaaaagaaaaacagcaaggaaaaagagagaagaaaaaagaagaaaaacaaaaacaagagacaacaaaacaacaaaaagacaacaacaaaaaagatgaaccgagaaaacacagaagaaacagcaaaaaaaaaacaaaagaggagaaaaaaggagaaaggaagaggaaaaaggaaagaagaagagaacaacaaaacaaaacaaagaacaaagcaaaagaaaaagacaaaagaaaacaccaacagaatgaaagaaaaacaaacagacaaaaagacaaaaaagacaaaagac

SEQ ID NO: 514562 - DNA, 566 bp, Homo sapiens
ccctgcatgcttgctgctgcacgtctgagtcttgaggatcccctacttttcacgggaggaaagagctgattcacgagagtctgaaacgacagtctctatatacaactgtcatagtgttgatagaagagcagtgaagttgtcctgggttttaataccttggtgaagcacggtttcattcattgagatagaaaacacagaacgagtatgctggattgaagttggggaagtgatgttttgaacttgtctcgtgactgacattcgcctcacatgtcagataagatttcaaggctggagatgcagatttacaatggaatcaatggcatataggtggtagtagaagaaaacagaagatgagctgccacagggcaaacgtgcagaatgagcagagggctgagggctgaactgtaggggaggctaaggtttgagaggaagggaggacagtagagagaagtccaaatatagagcagctggacaagaaagaaactgaggagacatggataactcagaaaacaggtgggcaacattttaaggagcagagagtggtcaagaacaccaaatgttgtgca

SEQ ID NO: 514563 - DNA, 360 bp, Homo sapiens
  misc_feature (44)..(44): n is a, c, g, or t
  misc_feature (65)..(65): n is a, c, g, or t
  misc_feature (129)..(129): n is a, c, g, or t
  misc_feature (171)..(171): n is a, c, g, or t
  misc_feature (180)..(180): n is a, c, g, or t
  misc_feature (192)..(192): n is a, c, g, or t
  misc_feature (215)..(215): n is a, c, g, or t
  misc_feature (344)..(344): n is a, c, g, or t
aaagggttaaggggaaggtcctccctgccgggggttggcctctnaaaacctcaggggttcctaancctgttgaaatatacccccccctggtggtggccccctccgatgtcccccactgatggctctganaccgtgttggtggcgatgtccccagaaaatcccacccagganagcccaganatccctaactgnttcgctggtggctcatctcgaanatccacgccagcctttctggggcggccacccaggccgcctgcccgtctgtcctccctccagcagcaccccctggcccctggagtggtggggccatggcaagagacaccgtggcgtctcatgtgaacttncctgggcactgtggtt

SEQ ID NO: 514564 - DNA, 314 bp, Homo sapiens
cctttgggccccccccgtttttccctttttttttttgggccccctcttttggggccccgggctttccggcccctgcttccggggggttgggtttggcccccttttcccccctgcccccttttcccccccccccggtttccccccgcgggggccccccccccggtggggcccccccccgggggggggcgcccccggggccccggcggtggcgcccgggtttcccctggggccgggcctggggggccggcctccggcgcgggggggccccccgccccggggcccccccccacccacaacaccaaaaaaaaacccca

SEQ ID NO: 514565 - DNA, 759 bp, Homo sapiens
agtatctatgttatcagtttgggtactggagccataaattaaaaaaaggttctgtttggttaggtgcttttcgctgtaatcttgtataaaaaacattggttattttttaaaagagcatttacaaataaagcaaattgctttattttataaaacttttttaaaaaatgcaatttccttaattacattaaaaatttaactataaaattgggtaaccacatgtttttcttagttctgaagcctgcatattaaactgaggcgtatgttggatttgtcttttcctttccagttttataattgataggctatattggtagtgacagaaagtacttccatgctaaatataaaactaaaaaggcaaagtactcaaaattatttaaaagagtactagattataaaattagctttagtttacacatatgccagttatagcggtagatggctttgaatctttacaatgcaaatacttttaaatatgtctttttttggtcgaaaagttctgtcctgtcagaatcacaatgtattaggaatgtttcacatcacctgaaacactccagccacagaatcgcagatgtgtgagaatggatgccctgttattaaaagctacaagggttagttgctcagacaaaagagtcactaactatcttcacaacggcttgtatctccatattcttcatgtaatttgccgcgtctccaagtctgacccgtacactttgcttcaaagcttttcagctaattccctcatggttcaatacgtggtaa

SEQ ID NO: 514566 - DNA, 112 bp, Homo sapiens
ctatcaggacccgttgcagcgaagctggtcagacagccgtggctccagcttcccggccctcttctcgtggttggggacaatgcaccggacaaaactggggttggtgttgctg

SEQ ID NO: 514567 - DNA, 300 bp, Homo sapiens
acggcgttatgcatggctccatctcggctcatcccacctgtcacccgggctggagtgcagtggcgccatctcggctcatcccaccctgtcactcgggctgcagtgcagtggcacaatctcggctcactgcgtcctcaaaattccaggctcaagccatcctcccacctcagcctcctgagcagctgtaaccacaggcgcatgccaccatgcctggctcacttaaatcttctgtagaggcagggtcttgctatgctgcccaggatggtcttaaaccccttggttccagccattgcactccgg

SEQ ID NO: 514568 - DNA, 671 bp, Homo sapiens
  misc_feature (72)..(72): n is a, c, g, or t
  misc_feature (527)..(527): n is a, c, g, or t
  misc_feature (578)..(578): n is a, c, g, or t
gtcactcccagactccttgcggagttcgccgcctgattctaggctggtcactactccgagcctgtgacgttngcggcagccaggccgtcgacgatgcccagtgaaactctctgggaaattgcaaaagctgaaggtggaaaaaaggggaattaagtggaagtgaaggtgatggagctgaaattgcagaaaaatgtgttttcttcattggcagtaacaatctgggggaaagactactattattctagaggtgtcttgacagagatgaaccaccaaaaccaaccttagctttggcaatatacatatggaagaagagcaaaagggcacaacacaccaaaaagatatcgctcacttgtgggaactcgggtggaggaacctctttattggacttaatcagcatacccatcacaggtgacaccttacggacgtttactctgtgttctcgtgctggatctttcaaaaccctaagtgatctctggcccaccatggaaaatctcttgcaagccaacaaaaagccatgttagaccaangtgataatgaacactggggaaagaccaaagtgctaaagcggtttctgaacntgagacacgacgaatctgcactactctggccgccggatcttctcagggaccatgacttctttgacccactccggtacctctggtcatattgga

SEQ ID NO: 514569 - DNA, 948 bp, Homo sapiens
  misc_feature (188)..(188): n is a, c, g, or t
  misc_feature (282)..(282): n is a, c, g, or t
gatcgttctgtgcgccatattgctgcccctggtgtgttgcgttgtgtagtgtctagtagtaccttgctgttcacgcttctgggaatactagccaggatgacaagggaagttccgtgtctattgatgtatcaggcttatgacaagtacaccactagtcggcgttacgcgtatcctcgagacgtctggtnccctccacatgatgagccgatgtggcctttgcgcgttcggcttctgcttacaacacgctgcatgttcaacacagtataatagctcttggaaagngattcttggcaacctgagaatagacgacactcccattccaagagctgataagtagatacactatcatctactacgtcacctgatgtctccaggggtgatcagtatgtaacatcggtgcactcagtgggcttgctaactgctgctggctgagatgggaccagtctaccactctgaagctgactctgcacgacccccggatggactatcatgtgatctggtcatggcatgtctaatgtgtgagatgcccacacaggcatattccacattatgaggatgtatagcgcatgctaggtccaccttatctggattcacagattcgactatactcacattcaagacaacactgtggctcgaggctgttgttgtggaatccggcgacgctggtggcctctcggtgctgattcctggggtctcttctcgtctcctctgacatggtgtgtcgtgctcttcgtggatatgcagtacgggcccgggcatcgtgttcagtcgtctccctgtgtagagcgtcagcacgtgcccttggttccccggcttggcggatgtgtgccgtcccctcgtttctctgcctggtgtccgacgcattgcgcgagggtccttgcttggggggttttccggcttggggcgcccgtgcggttttggattcccccgggcgtccggggcgggctg

SEQ ID NO: 514570 - DNA, 217 bp, Homo sapiens
aggcgtatcccataatcatacaaagccccagcccaataggatcctcccgaatcaaccctgaccccactccttcataaattattcagcttcctacactattaaagtttaccacacaccaccacccctatcatacatctttcaccacacagcaccaatacctcacctcctatcgcttaacccctactacaaacactacaccaagtcacctccccccacc

SEQ ID NO: 514571 - DNA, 312 bp, Homo sapiens
gaagttagttttttggcccggggcctttaatttttttaatcaccctaattacatcaggatagaggtagagtttttgtaaaaaaaaagacattaagagttcctgaaatttatatttggcatacggataggcttatattcaaaacattttagtcatacgcccataaattaaaagtggagtccctaaatagtttgcagtacgtttttaaaataagggtaggggggtatcaaaccaagacaaatgctgttcagggaaaaaagttggcaagcttaaggttaaacaaaaataaaattacatgggttttccccttccta

SEQ ID NO: 514572 - DNA, 702 bp, Homo sapiens
  misc_feature (72)..(72): n is a, c, g, or t
  misc_feature (527)..(527): n is a, c, g, or t
gtcactcccagactccttgcggagttcgccgcctgattctaggctggtcactactccgagcctgtgacgttngcggcagccaggccgtcgacgatgcccagtgaaactctctgggaaattgcaaaagctgaaggtggaaaaaaggggaattaagtggaagtgaaggtgatggagctgaaattgcagaaaaatgtgttttcttcattggcagtaacaatctgggggaaagactactattattctagaggtgtcttgacagagatgaaccaccaaaaccaaccttagctttggcaatatacatatggaagaagagcaaaagggcacaacacaccaaaaagatatcgctcacttgtgggaactcgggtggaggaacctctttattggacttaatcagcatacccatcacaggtgacaccttacggacgtttactctgtgttctcgtgctggatctttcaaaaccctaagtgatctctggcccaccatggaaaatctcttgcaagccaacaaaaagccatgttagaccaangtgataatgaacactgggcataagcacgaagatggctcaaaggccagttttctggacaatgcagtaccagagagatctgggcaagttagtatgccgcaagggatcagtcctggatcatggagattaggttgacccatttccggtaacctctggtcatgattggagagtaaatatg

SEQ ID NO: 514573 - DNA, 312 bp, Homo sapiens
  misc_feature (8)..(8): n is a, c, g, or t
  misc_feature (13)..(13): n is a, c, g, or t
  misc_feature (140)..(140): n is a, c, g, or t
  misc_feature (205)..(205): n is a, c, g, or t
aagatggngttcnactgtagaacacaggccattggagaaactgacttatctgattataggcattgtccatttgtctctctcggaattctcacttgcttctcttctcactctgataccttgttctccagcaaaaatcttanctgatagaaccaagattctgaccttgtgagtattatttctgaagcgcagggacagtgataagtgnaaagtcagtatcttctactgattttgagtttactttggattatgtttgatcaaaagctacatgtggcattgtgattcaaataaataattgttttatgtcttgtatgt

SEQ ID NO: 514574 - DNA, 133 bp, Homo sapiens
aagctttttttttttactaggatggatttagcaaggttcctgcttcattctgttactactttctttatcagaaagggttcagacaggaaatagatggtgggctccaagtggctgtcaaagagagttttaagaa

SEQ ID NO: 514575 - DNA, 833 bp, Homo sapiens
ggctgagcaaagttcagcaagtagagcagagtttggcaggcaggtgccatggaactccccttcttcctggagtgccttcattgaggaaggaaatctggcccttgggtttcctggttccactgctactgacccagaggggaatgagggctgagttatgaaaagataacttcatgaagacttaactggcccagaaagctgattttcatgaaaatctgaccattcagggttctgggatgaaggcttgtcagtcacttccagttttagaacgtcaagtgtttgctagagagcatatatggcgtgtttgtattatgatgagtaaaaggagcaatagagaaaaggcatcacttttgctggatccaggactaatttggtaaaccaatcaaagtgacaaaaagacaaacaaacgaaaaaaaggaagaatgtcatgtgaggttgaaccagtttgcattcccctaatgtggaaagaagtaagaggactactcagcactgtttgaagatgtgcctcttctacagcttctgagaatagtgtgattacactggccaagtgaaggagccccctcccaatatgtcgcgaggtcaagccctatgcatggtcctgtcaccaggcaagcaggaaacctgtgacttgtggacctcacccgatactgagacggtcttggttaagctccagcgattctcctatccatgagatagatcccataataatcatagtcaatcaactagggtgctactcaatggatgggtttggaccagtcccttctttgggttaaaacggaaaattcgtttctcttaccgcaaggctgggccttctgtggaaggttcctactgtattt

SEQ ID NO: 514576 - DNA, 790 bp, Homo sapiens
aaccgttacagccacaaccaaagtcccggtggatccgtgatgtaacacatggattgacgcgaatcggtgcccactcccacatcctggggactggtgtgtcttggactgatgccttggagcctcgtgcaggcttcgcaagggtcattggtgggctcagctggcggcacgcgcgggcggctgcgcgtggtgctggatgatgatccgtggaagggaagattgccggtcgtgcagtccttattgctggccagcccgggccacggtggaaagacggccatcgccattgggccatggcgcagtgccctggagcccttgacaacgccatatcacagccatctgccggagcagtgaaagtctttctcccctggagattgagcaagaccgaggccgcttgacgccagggccattaccggggagggtccaatcggaccagttcggcaattccacagggaggcgaagacacgaagtattccatcccgaaacgagtcgccagattatggttgccagacacccccaggcattgggattccggacccaggcaacccacgagcgaacggagcttccatagggttggcggccaaaatggtggtgccccctacaagggacccaaccagaacgaattgagaagaccccgatcttaaccgaacctttggtgcacccaaaggataggagttgaaggtccccttcccccaagggaacaacagtgtcccatgttgccgaggactttggttccccatttggaaaagaggcgactgggcaaagaatctcaaacgttgggccgcatcctttcaca

SEQ ID NO: 514577 - DNA, 255 bp, Homo sapiens
aatttaggggcgccccccgcggccccccctttaagggaaaatttttccttttgttggggaaccgccttttccgggggcccccaaatttggggggaaacccctggggtttttttttgccccccttggtttggggggggcttggcccccccccccttctgggggtttttttgggggaggggccccttttttttgttccccttccctttggcggggttaagggaaaccccccaaaatttttttttttttttttttcca

SEQ ID NO: 514578 - DNA, 1388 bp, Homo sapiens
gggttttatgggctgtaagttatattcaatgcaaaaaaatcactctccaatttatacggaggttggctgaccacgttccacgaaccaaatccgccgtctaaacgtggaattcgggtgtgctgacccagccccagcctcggacttctctgtggtcggcaccagggtggcacagcactccggtcgtggtagggtatctcgtggtaagctttccccatcttgggtgagtcttcgcaggtttcgctcacccctccaaaccttataggccgaggccgtgccagtcttcgtggacggtatacggggttaagggtgggcagtggcacaacatcctccgggggtgcaagatagaagggtaactcccgggagagaatactgggaatacccctcattgggataagggtaccaggataagaacaggtcctccagggcacaactctgtgtgatacgtcgtgtgtaccacatatacccgtgcgcgttattcaccgttctaaggggccccttggcaactcgggtgtgagatgtgtggagaaacagggtgtccacaaaatatatcctgtgcgccatattgtacagacagacgctccctaaaagcgccctagaagacatagcgcgcgcaacgggcgaacaccacaccacgcggggccacaagacgagaaactcccgggcgagtccacaataaacgcctctaaaggggggaccaacaaaacggggtagccgccgagccgcatcattaacgcctttgcccctgtataagaaaataccaccctttctacgggacacgaccacatagcatcaataatcagcagtcgtgggggcgcaagaaacgcggcacccgcttgcagcacaggctctctcggcacagccgccctttcacaggccatcattcctcaaggtgcaagcacggcacaggtgcgccctcccaccggacggggtcgcgacggattaagacaatgtccacgaccagtgggagaatcacagtggtcgacgcaaacatctcacggtggaggggagcgcccacaacacacctcttcaaacaaacgcgaacaaaacagacatctgagtgcgagcacaacaaggagaccccaaaaagagcgaaggaacaatcacgtggaggcaccccaagccaacgagggaccacacgcgccaaccaaagacggacgacacacccgccaaccccgggagtctgcaccccagactagttgagacaaaccggggacgcaccacatcgtggagcacttgagcacccccagcgaagacaaccacaaacaacgggcaaaacagagctacacaaacaactaactgtggcgaacacggaccaccaccaatccctcgcggaccccaccagaaacgcgccgccccgggctcacccccgggggacacacatcacacat

SEQ ID NO: 514579 - DNA, 154 bp, Homo sapiens
ccccatttatatgcggatagggttagtgggtcatgtcaggctgaagtcaggccgcgtaggggaagcggagcaacagcccttcgtgaggctccagtttcaggcgtccagctcaagaggggagcctcctcacggcctgggtgggtgctgagcagga

SEQ ID NO: 514580 - DNA, 399 bp, Homo sapiens
cttgaaagccttcatgtatctgagcctcggaattctctgtaaggttgaaattcaggccctccagaatttcatcgtaagtgtcagccttggtccccaggaagagcattgcaaagcctgaaccaatgctcatctgggagagaagaagatattggtcctgttgaactggtgtgccacctgccggtatagcctgaagccgaactcagccaggttggggtgtgatcttgttaaaggttggtgtgatcctgatcatggtggaatgtatctgtcttctggacagcatctccttggggatccacagacagggacacagggccgagacagcacaggcctgacagcaggagatatgccccgcgagacagaacgcggcagtgtatattctctgtcacaggtcagttgtcg

SEQ ID NO: 514581 - DNA, 296 bp, Homo sapiens
gggaaaaaccccccctttttccctttggggggggggagggacccccctaaaaggggggtcccaaaggaaaattttggggccgatggcctttttttttttccctttcccgacttccctttttttccagggggggggaggggaaaaaaaaagcgggggggggggcggggccccagggggtgttccccccccccctgggtcccttcctttgttttcccccggggaaaaaaaattccgggggggggggtttttttgggaaaagccctttttttttttttgatgtaaaaaaatttttttta

SEQ ID NO: 514582 - DNA, 911 bp, Homo sapiens
gagaccggcggaacagttgcggtggggaagctcccgtggcgctcccgtgctgtgcaggcggcatgggattcctggcggaaaatgctgatctcagtcgcaatgcttggggcagcgggctggcgttgagtacgcgctctcagtatcgtgaccccgggagagcggcgggaacgccagggaaatgttacaggagatgcactggggggaccccaagtgagcagggaggaggcggcccgggacccaagcagataattgggtggcaatctgcaagggagggcaagggccccaacgcccaggaagaacgtggccgtgagagacgacctgggcatcggatgggggccgaaagatacgggcgaccaacgcagggcgagggtccccccggtgaaaaacgagaattatgccatcccgtgtggaccgacggaaaccttttggctttgtgggcagacaggaacttccaggaggccaaggcagtatcatcttgcggtgggcccagggaaagaagtcgcggaaccgaagaataccagtgccacaggacactcctacggcggacccgtgacgcatgcccgtaggtggtgagcaccgtttcagcacaaaacccttgaacgtgacctggttaaaggtccggaagggggacagggcaggaaacgacgagcgacaagtggctgacctgaaagcacccatgacagccatgtcgctccgagaacaatacaaacgacatcacaaaaatgtggggcggccacgcacgaagagttcacaaaactctggggcgcgccccaactcaagacgtgcaagcgccaggaaccgggtgaacaggcgggctaccaaaaacgccgagcgggccacaccagcagtggccccgcacaagcgcggcaaacccggagagagacacgcagccgccaccgacagcccgcgcc

SEQ ID NO: 514583 - DNA, 1344 bp, Homo sapiens
tacggcagcactttaatttttccttacacaaggacgtgtggctgggggcctaaggttctcacataacagtaaaaaaccaaaatttggtgtggtcatctcttcaaaagaatcagaaaataggcggtacaaaacaaaaccttactataaattaaagaatgagaatactatttacagggcgtgtaaatggcaaaccggtttccaactcaaagcaatgtaacaggcccacgggggtcctgggccaaaagaaattcaggcataaagaaagggaaactgggtgtccatacgggcttggagacttctcacaaccccttggacagagacccggcaaagacaaaaccaacgtgggttcttggcgcagcgcctcataagaagaaatccacaagaaacacctacagcccctggaacaccgtgttaattaccacaaggtggagaaacaggtataatcttacaagtaccacaggggtcacaaatcagcgaaaaagtgtctctataacaaatcacagagggcgtggaatattcacagatatacaaggctttcaagggaacaaattccttttctcagaaggggcattatattctcacaagttctcggtagggggcttaagcattgagagggtggggggcgccttttggcacagggggggcaaaattttctcatattgtcctcaaatgttacacccattgtgcacgacaccatgtgcgtacccgccatttctgtgcgtgaagctccgggttataaaaaggcatttttggggggggggggcacagacgtgggcaggggggccccagaaacttggcacgaagacacaccccggtgaaggggagaaaaaatcccaacactcttgggccggggaacaggtgggggaccactgctgaaaggccccacgggactggagacacccccacggacgtcccacacaccagaagagcacaacttgggagccacctgagggcgagtgagccaccagagacacatgagagaaacaccacaagggggaggcgatgagagcgcccacagggggagcggagagaaaaccctcccactgtcggagcaacccgtagaggagaacaataggcgccggggggaaacacgcggcggtgaagccacgcccagaagaagacccggcgtatgtggggacacacggggccctagcggagaataagtccacgagaaaaccctacagagacggagagagaagaggagcgcacgagcagaagacaccagcaaagagaacaccaccgagcaagaagcgatgtaaacaaccacctagagctgaggaacacagaagcgctaggagaagcggacacaagagcagagcatcgtcttcagacagagagacacgg

SEQ ID NO: 514584 - DNA, 850 bp, Homo sapiens
  misc_feature (590)..(590): n is a, c, g, or t
  misc_feature (594)..(594): n is a, c, g, or t
  misc_feature (629)..(629): n is a, c, g, or t
  misc_feature (633)..(633): n is a, c, g, or t
  misc_feature (639)..(639): n is a, c, g, or t
  misc_feature (642)..(642): n is a, c, g, or t
  misc_feature (654)..(654): n is a, c, g, or t
  misc_feature (658)..(658): n is a, c, g, or t
  misc_feature (841)..(842): n is a, c, g, or t
ggtaccgacgttggatatcatgcagattatgtatggaatatccagttcatgtatactcttatacatcgacgcacagggacaccagaggctctacaattgtacgctagcaactaacttacagtgcttatatagagtcagtggtaaaatatctggccggtcgtcggaagatacacgcgctatgaagagttccagcagcttagcgcaggcatcgcgggaggatcactgtgagcctcatgaggtgccagaccaagcactaggcaatgtagtgacacctcatttctatttattttaaaaaaaagagagagtaactacagaagaactttaaaaataaaaataagcttaccttggattcttggcttagagtagaggttttttttaagttatggaggaaacatttttgtaaaagtttaatgacccactttagatgctccaagaacaagcatcccttccatgtatgtcttgagaaagaaatcacagaagcatttctcaccaatactctttggcttaaaatgttcagcagaattgggcagtgggggtgacttttcttatattaataatatttacatccaatacactgaatcttcctttanaggnaagactttaatatctatactgtaaatatttggttnattnggcacnacngtaaggttggtnttcncaaagctcttattatgaagcaaaataaaaattctagtttcctggatgaatttttggactcattcaatcctggtaagccgcccaaaaataaaagggccaaattggatatttttaaaaaccaatttaaaataaaaatttgaaggttttccggtctccaaaaaaccccatccttttagggttattnnatccgcca

SEQ ID NO: 514585 - DNA, 364 bp, Homo sapiens
cccagctaatttttgtatttttagtagagatggggtttcaccatgttgtccaggatggtctcaatctcctgacctcatgatctgctcacctcggcctcccagagtgttgggattacaggtgtgagccaccacgcccggcctgtgctactcccattttcttacctccagcaaccaagctggatggagaacccaagccctgtccccggcagctttcgaatgtcttagagagcctcccctcctctccagcttcatggcctccactctagttcaagtctcagcatcattcttcagcacttgcctccttgccagtctcctgacctccagcctcacctttgctaactaacttggcctgaagctccagaca

SEQ ID NO: 514586 - DNA, 324 bp, Homo sapiens
atgagcagtcagcgggcgtcatgtgttacttcgccatctgctgctgcctcctgctggttggctcctccttacccccagctcttctcaagcggcagtccagcgggtctggttctggatggttcccccaagggacgccgcagtggagagcatcccagtgtttggggcactgtgttcctcttcgtccctgcaccagagccgggtgcaagcctcgtggactaacagttcccagggtgggagaacaggagctagtttgcaataaacccagctggatgcaggagcccagtgtcttcatgcagaggagctcaatgtcgtggggtaggaggt

SEQ ID NO: 514587 - DNA, 172 bp, Homo sapiens
gccccccccccccccccctttggggttggggggggggggggcccccccccccccccccgggggggggttttttttctccgttgtgggggccggggtttcccccccccgcggggggggtttttttttttcgccccccgtttttttttttttttttataggggtggggggggga

SEQ ID NO: 514588 - DNA, 1361 bp, Homo sapiens
  misc_feature (1138)..(1138): n is a, c, g, or t
aaggatttcaataaagtaggtttggcggcagagatttaggaagagtccaacttaagagataatgggctcttaaaacatgtgcacacacagtttagttccaaagtccccaacatgttaggttcaacaggtcaatgcctctttctattgcactcacaattctagcacaagggcagcagaggtggtctgcacagctaagtaaatacaagtacaaccgaagcatgtcatatcatcggctggcttcaacacaacagacaacatcaaaaccaccacccaaatttaaccctgtgtaacaagccgttgcagtcaagggcattcacgcaacgcactgtggcagcaacactatgggcagccacgcacaaacacagcagcttcgggcaagcaggcaagcaactgggagcaaatctcccagagcaacacgtcccagagaacatctgtgcaagtccaacaagtgtggcaagggcacacagggcacagtgtgcattcaggctgggcattacagcaagggctcaacaagataccacttctcatcatgcagcaagcagcttcagcacggtccaggagcagccacaaatgcttgcaggggtctcgtcccgcgctttatatatttcctcctctggaacactttggacgacaaggaggaccacggacacgatgactacgagggcgccatagtacggttcttacaggtccctccccaaagccccccacaacaagcaagctcattttactgacgcatgagcagacaggggcagacaacgctcccttccggtctggatgcttcggagcctttatccagggacaacccttgcagcagcaaatttccaagcttgaatccttccggctttcagacggttgactgacggttgggggcctcacacaccatctcggacttggacaaacgacactcggggggctccagcacaccaccggcgggccccctaaacgccttgcggatacccacagcctaacctttcccggacaacatcagccatcagggaactgccaaacaaaacgtcatcggcgcggaatgcgcaccgcacacaccaaacacgcggcgggcgcgcccaacgaaatcccaccccgcgcgaggacccaagcgtagggagcaccacaggcctcgtcgtcacccaggcgtgcncccaacatgaggcgcgccgcatcacaacgaagaacgggcgcatcaaccagcaccgcggcaaacaccaacagtcgcatgagtgagacccacctgtgacgaacctgacaccaaaacaacacggcccacacacgtatagagacgaagtccgtgactcgtgacaacacaacacgcacagcgagccgtcagagctgagcagcacctgaccagccatccaaccacgcga

SEQ ID NO: 514589 - DNA, 367 bp, Homo sapiens
tcttgactaatctgtgcactttccctaccaaacttctggtccagtgtgctgtaacactcatttggcccaattaactgctaaatttgatttgtagtgttttcagccctacagaaactttttgattttttttttcctcttgagacagagtctcagactgttgcgcaggctggagtgtgcaatgatgcgatctcagttcactgcaacctccgcttcccgggttcaagccattcttctgcctcagcttcccaagtagctgagattacaggcatgtgccacgatgcctaattttggtattttttggtagagacgaagatttgccatgttggccaggctgctctcgaactcctgacctcaaatgatccaccca

SEQ ID NO: 514590 - DNA, 123 bp, Homo sapiens
ggggggggttccccccggggggggtttttttgcccccccggggttccacccctgggccctggggtttttcccccccccccccccccgggggggtttttttgggccttttttttttttggggga

SEQ ID NO: 514591 - DNA, 122 bp, Homo sapiens
ttgcgacaactcatccggtcgaactgctcgaagattgcgccgatcaccaccgtgcagcgttcgcgagcagtacctaggtcttcacgtgcttagtgttgatcgcgatgccggcaggtatggtc

SEQ ID NO: 514592 - DNA, 122 bp, Homo sapiens
ggcacgaggcatcaagaagatcttcgagttcaaagagaccctcggaaccggggccttttccgaagtggttttagctgaagagaaggcaactggcaagctctttgctgtgaagtgtatcccta

SEQ ID NO: 514593 - DNA, 680 bp, Homo sapiens
  misc_feature (27)..(27): n is a, c, g, or t
  misc_feature (38)..(38): n is a, c, g, or t
  misc_feature (237)..(237): n is a, c, g, or t
  misc_feature (629)..(629): n is a, c, g, or t
  misc_feature (636)..(636): n is a, c, g, or t
aggttcgatctagaggacccccacgcngcaccgcggtncaaaacacagaaccaccggtgtggcgtgctgggaaaaatcaaggtagagtctgcctttcacacccccacaggtgacgtcagaaggcatggaggcccagacacaaagctccgtcactctacagtgcagtttggagaatacacaagacccggtttagcatcttggtcgggaggcacaagctcagaacaaaaatctgacaanaaggaaacatgtgttcaccaaacctgtcatgacaatggaaaaaatgaccagcatgagacaaggaaagaatatgtatgtcggcatgggatcctcagaacttagagagagaatatgtatatgggatcctcagaacttagagagagaatatgtatatgggatcctcagaacttagagagagaatatgtatatgggatcctcagaacttacagagagtatatgtatatgggatcctcagaacttacagagaaccctgcaaatcaatgggaaaggaatgatgcctgcactaggagaggagcgcgtgacgagcgttcctggaaaacgagccaaaaacggccagaacaggaacgcaaagccccaacaggctcagaatgtggcatgtcagcaagccacgncgcagancccgcgcagattaaggagtctgtgggaaacaaaagcggatctta

SEQ ID NO: 514594 - DNA, 524 bp, Homo sapiens
ctgggccagtattatcaggcatggagatgctactgatgtcaggggcatcattcagaagatagtggacagtcacaaagtaaagcatgtggcctgctatggattccgcctcagttcacctgcggtcagaggaggttcactggcttcacgtggatatgggcgtctccagtgtgagggagaagtatgagcttgctcacccaccagaggagtggaagtaagatacaaacctgctttggtgtgatgcacacttgatttcttttgctttttaaaaacatgcacaagataacaaatgtatatgtttaattttcacactgcttgtcattacaactctggtataaataaaattcgttagtaattattaacgaatgatctcttctagacctctagtctagcttttgggtattattaattatactttgagccatctgatttccgttttctgtgatggtcttttgctagctaatttctcatcagtgctactttgtttcaacctttgctcccaataaaactcaaatcataaaaaaaaa

SEQ ID NO: 514595 - DNA, 108 bp, Homo sapiens
taggacatggaaggaatatgtaaagaaaagaaaaaacatgtttcttataatgggaaagtgcttgtagtatgtgtggagaaattctgatgcacataagggggtatccta

SEQ ID NO: 514596 - DNA, 1017 bp, Homo sapiens
  misc_feature (115)..(115): n is a, c, g, or t
  misc_feature (159)..(159): n is a, c, g, or t
  misc_feature (244)..(244): n is a, c, g, or t
aaaagagctaatcctcaagtcggcgtggcttttcctcatatcaaggcataactatgagtgtttatgtgtatgtgcagctgcctttcatggaagacttgcggcaatacatgttttnatccttgaaaaacagtaagaaatatgctcccaccgaggcacagntgaatgctgttgatgctttgattgactccaatggagcttggcgaaagcaagagatgagatcatactagacgacccgtatggaagnactatgtttcctaaccgatccgaatagatccccaagatccctcgcacttgcagagattatatcagtgtctgctgcacagagctcttacatccccagggatgcgcatcttactcaccctaatttcgagcaagaccatcatcttggtaatcatcgctcgtacatccttccccgttggagagctgcactactgcatagacgtcaagcattccatcatcatcttaaaaaataaaagaacccttgtgttccgtctgatgtgcaagcgccaagaagaaaggcatcaaagtgactgctcaggaacatttttccacatgaagacatcgcaatgtagagaatgggacgctgaacaggctaaagaaacctaaaaactgagtcaaggggtgagcctcaccttcacgtggtcttgcacaggtacgtcggacgtagatcgtgcagtgctcacctcttgattggaacgtgtgaatcctgctgaaaacttccgtgttctagtgaaaacagaagaaggccagctttgaggaagcgagtaaaccaagctcataacagtcacatcgaaccagtgttttggatactaattgaaacaccgtattttatgaacgagcatagactgcagtccgagccttccgggaagaagccattaagttcacagaaggagcagcgctttagcaacgttcctgaaaagcccttcacgaagaaagtgggacataaaacacatttggtcattttctgggaaactcgttgtccaggactggaattacatctgatcaccacaagaggga

SEQ ID NO: 514597 - DNA, 279 bp, Homo sapiens
  misc_feature (218)..(218): n is a, c, g, or t
ctgggccagtattatcaggcatggagatgctactgatgtcaggggcatcattcagaagatagtggacagtcacaaagtaaagcatgtggcctgctatggattccgcctcagttcacctgcggtcagaggaggttcactggcttcacgtggatatgggcgtctccagtgtgagggagaagtatgagcttgctcacccaccagaggagtggaaatatganttgagaattcgttatttgccaaaaggatttctaaaccagtttactgaagataagccaactt

SEQ ID NO: 514598 - DNA, 397 bp, Homo sapiens
  misc_feature (115)..(115): n is a, c, g, or t
  misc_feature (159)..(159): n is a, c, g, or t
aaaagagctaatcctcaagtcggcgtggcttttcctcatatcaaggcataactatgagtgtttatgtgtatgtgcagctgcctttcatggaagacttgcggcaatacatgttttnatccttgaaaaacagtaagaaatatgctcccaccgaggcacagntgaatgctgttgatgctttgatgaagtttgatttcaagtacttgagttttcataatttaaagctatttgtttatagagagaatgtgaatcaaatatttggatgtcactattgctatatatggtattaagtatggtgaccatagtttgtaactccaactgactgcagacaggaaactttgtgttagcaaggcattttttcttactgtttgaattttttgatactagataccatacagag

SEQ ID NO: 514599 - DNA, 677 bp, Homo sapiens
  misc_feature (2)..(2): n is a, c, g, or t
  misc_feature (83)..(83): n is a, c, g, or t
  misc_feature (124)..(124): n is a, c, g, or t
  misc_feature (132)..(132): n is a, c, g, or t
  misc_feature (134)..(134): n is a, c, g, or t
  misc_feature (167)..(167): n is a, c, g, or t
  misc_feature (175)..(175): n is a, c, g, or t
  misc_feature (220)..(220): n is a, c, g, or t
  misc_feature (227)..(227): n is a, c, g, or t
  misc_feature (260)..(260): n is a, c, g, or t
  misc_feature (273)..(273): n is a, c, g, or t
  misc_feature (401)..(401): n is a, c, g, or t
  misc_feature (416)..(416): n is a, c, g, or t
  misc_feature (424)..(424): n is a, c, g, or t
  misc_feature (474)..(474): n is a, c, g, or t
  misc_feature (478)..(479): n is a, c, g, or t
  misc_feature (509)..(509): n is a, c, g, or t
  misc_feature (520)..(520): n is a, c, g, or t
  misc_feature (528)..(528): n is a, c, g, or t
  misc_feature (581)..(581): n is a, c, g, or t
  misc_feature (589)..(589): n is a, c, g, or t
  misc_feature (595)..(595): n is a, c, g, or t
  misc_feature (612)..(612): n is a, c, g, or t
  misc_feature (659)..(659): n is a, c, g, or t
anacagggtctcactttgtcacccaggctggagtcacagagcgagactccagatctcaaaaaaaaaaaaaaagggaggaccantcacaggaggcaaatgttcccaaggggagactgaaataaangggcagangnagaagaaacaagaggggggaagaaaaaagcatnagtgggangaattcatggaagcaggcgaaaaccatgggggcgatgaaggaaangcccacngggggaggagtcccagcgggggaatattcgttntttgggctcacancgctgggcactgtcctgccattggggtccttcacaacgaaaacgccttcgctgaccggcagccgttccacccaattcaccttccgccccaggggattataaacgaagacctggaagcgcgccgccgtntggctgagcgggcanatgctgangatttagctgttggcaaaaggatgaagatgatctttgaagcctcttagcngcgnnaccgtttgactcagaagaacctagcaaggnccccagcctgncgcaagcnggcgcgcgttgtcgttaggccacgtgctggcgggaggggccgctgacggcgtngtgatgcnggagcncagccatcgcctcattnaggggtgcactgtctccggagccatagggtcccacgtaggccgccanccaaccagcacctacagc

SEQ ID NO: 514600 - DNA, 165 bp, Homo sapiens
tgtgcacaacctgaatgacacatgagcggcatcgtgaaaccacagggctccagagagctggctttacagagccactgtctccagtgagattggggccattcaaacaaagtaaggttccaacaccagaaggagcttcttccccactcattaccttacacaagagga

SEQ ID NO: 514601 - DNA, 491 bp, Homo sapiens
caattgagctcatcaatggatacaggcttctttagtttttaatttcaaagaccctatcacttgggacaaggtctcccactcaaaaggaatccagtaaatagtggtggaagtaaggtacttacgacaataattaagatcagaggaatatggttaatcattcaaggttaatagttaaatattggattttggataaccatttacggaataattcacctaacaccccataaactaattaacaaagagtgtcttcataaagggggtggatatcacatcaagagtgctaccgagtgtaaaattaggattttaaaattagtgtatgtcccttaagggcttcggtgactttaaggttcctctaaggtttatttaactttaatccacttaaatttctttaaaagttacccattatacataaggtaatcggactccaaatttcggattattatataaaatccaaagataggtagggataccacgtggggggaccctctaga

SEQ ID NO: 514602 - DNA, 153 bp, Homo sapiens
ttacttacaaattcattaaatctaacttttcttctccctcaccagtgccatcttttcaggtaggctcttctgtcagttatattctaaaagaatcctaacttatcctcctgctatcacactctcctccttaagaactgacttgaggggatcctc

SEQ ID NO: 514603 - DNA, 433 bp, Homo sapiens
caaataagactgcaggcctgaacccatgcactatgtacagtgtggaggaagagaggcacccgctcagatgctccttcttagatgaaaggagtgcctcagttgagccccggaataggaagggcctgcctactgagcctcctgcctcactattaacagcgctgctgtcaatactgtgagccaggttctgacagctgacttgaattaaatctcataaggcccacaggacacacgtccgtgggaaggaaggcattcctctgatcttaaatcagcagaggcagaggccccgagaggttaagtgacttgcctgaggtcacacagcctgaagggggtggagtcaggattcaaacctaggttccagggatggtgtgttgacaagcctgcactcatctgactgtatctcccttcagtcttctccaacatccccttgggggtc

SEQ ID NO: 514604 - DNA, 233 bp, Homo sapiens
ctatagctagacacgatctgctagaaaacaaacaaacaaaaaacaataaaaaaacccccaaaaaaagcaacaaaccagcttgggatggtggtagcgtgcctgtggtcccagctgtctcaagaagctagaagcgggaggatagcttgagcccaggagatcaaggctgcacttagctatgatcgcaccatcgcactctagcctgggataacagaatgagaccctgtctcaaaaaa

SEQ ID NO: 514605 - DNA, 101 bp, Homo sapiens
tggtaggacttggaggagaaatcccctggactttcactaaccctttgacaaactccccccacccagttgatggctttccgtaataaaaagattgggatttc

SEQ ID NO: 514606 - DNA, 277 bp, Homo sapiens
taaatctggatatcaaaagattgctgaagttcttctaatcagctcctaggatcttactggaggacggcctcgggagtcattcaagttagacgatcaatatcgtcggacatccagtgacattttgactacctctatatacgctattggtatctcctttatttctttgctcttcacttattgctctgggtaggcatcttccagtactcatgttgaagagtgagtggtgtacagtgggacttccttgtcttactattctagttctccacaggaaatggct

SEQ ID NO: 514607 - DNA, 107 bp, Homo sapiens
gctcctcttcatcagatcaagagtcacatgtcatcatcatctatactatctgtagctccacttctgtagtgtctaccacatcggcaggaccatatttggcccaaagc

SEQ ID NO: 514608 - DNA, 1239 bp, Homo sapiens
cagtgtaaataacaaagcattggataggtgtcacttatggtagaaaaaacttcctacaccagatgcacagtgagccagatggttacaatcgaacattctggaagggtgaacaccacacccgtaagcccaggatttgtgtacccgcgttttgcaagagtggccaagttcgttcgtgtctcccaccccagaccagaagcacatgtgcagccaacatgctcaagtgcacaaagccagtcacaacgcagccggcttcagcgctcatcagcgcagtttccaaccgtccacatcatgcagggtgcacagcattccgagattcacaatctcagcagccacttcaaggttcgtttcgcaagtgttttctaccgtaagcgaacaaggttccgtgagatccagatactttacaatacttacagacactagccagatcaggtgttcatacaacctcactctatagtagctgctgtatcctcttcaccagatagggaggagggcccatgcgcgattcgccataagcaagttacgctgcatcacataggggtatgcaaccaaagtttcctatcgcagattccctttcctctccattcagcgtatggacagtactgcacaagagtcgaggccatcttgggaggactcttccgaggcccattcaaatcgtgtgaaccatatcataccaggctatctacgccccatggtcgtccctttatccttcacgaaggggaaaaggttcaccatcgccaaggactaaacattgccgtctcccaaatcctggactgccttacgaagaatcagggcatagcctgctccacacgtcatggacctagtctccaatgtgggcaccctaggacgccaataaggcagcaccatcaagcacacggtccacaagcacatcactgaaccagcccataccgaaaacccaccaggtgccaaccgcgaaacctgggcacaggcaccaccgggaaccagacccaggcccccgtgacccattgaaacgagggggacaaagcaagacatcccacgcaccacaagaaagaacacacaacatgaggccccagagaagacgagaaacccacgaaaaaggagcccacacaccgacagcaaggagaaacacaaaaaaaagcgaagagacaacaaggagaacaagaagggaacaaggcagaacagcagcgaaccaacaggacagaacagcagcaaagaaacacaaagaggcacaccaccacaaaacgcgcccacgcccgacag

SEQ ID NO: 514609 - DNA, 149 bp, Homo sapiens
ctctggatgcaagtgtctaattctatatacagaagatccttcatggtgcaagaaagtataggagtcggtgggaagtagaaagacaaggtgaaaggctatatgattgagacgctttcttttggtctacagactcctgcaaagtattacgg

SEQ ID NO: 514610 - DNA, 182 bp, Homo sapiens
ttggggttggggtttgtggttgaaagccctgtatgagcccgggtgtggtggctcacatctgtaatcccagctacttgggaggatgaggcacgagaatcgcttgagcccgggaggcagaggttgcagtcagctgagatggcaccactgcactccagcctagatgatagagtaatatccctctc

SEQ ID NO: 514611 - DNA, 258 bp, Homo sapiens
cacgaggcccggacaccggcctcgggcagtgcgcgcagcagtcgttccagccagcgcgggccctcgtaccaccattgcccgaacagctcggtgtcgaaggcggcaacgacatgcgccggcctgccgatgcgttcggattcctcgcgcagccggcggtgcaccacgccgacgaaatccgcgacatgcttgtcgatcgccctgtcggggcgctcgggctcgtatggggccttggcctccgagggcacgttgcgacccgtg

SEQ ID NO: 514612 - DNA, 369 bp, Homo sapiens
  misc_feature (19)..(19): n is a, c, g, or t
  misc_feature (59)..(59): n is a, c, g, or t
  misc_feature (77)..(77): n is a, c, g, or t
  misc_feature (102)..(102): n is a, c, g, or t
  misc_feature (109)..(109): n is a, c, g, or t
  misc_feature (126)..(126): n is a, c, g, or t
  misc_feature (166)..(166): n is a, c, g, or t
  misc_feature (177)..(177): n is a, c, g, or t
  misc_feature (327)..(327): n is a, c, g, or t
aaaaatttaagtaatattntagtttaaatggatttggattaaggtttatggttattttngggatgggagttggattnatatattaagtgataagtttatttnaatattngtttttagaatggtttngatttagttgtgttaggtaatagaatagggttagattttngttttgttatnggtttgaagattaggattttaaaggggttggaggtagggaatatttgaaaatttagattggaattttaggttaaaagtttaagattattagtttttttttttgtttggaaaaataagtttttgtgaaagattgatttattatgtataatngtgattgtgaatgttgttgagtaaatttttagatttttttta

SEQ ID NO: 514613 - DNA, 1202 bp, Homo sapiens
tggaaagagagtcttactcggccgcccaaagcgggagtgcaggggcacaatctgggctcacgtgcaaccttctaccttccgtgggtttcagggtgattctctttgcctcagcctcccgagttggcgtgggatatacaggcagtgggggcgatgagcctggtggtcctagctgctcaggaggctgaggcaggaaaatagccgtaaaccgtgggaaactcggaggtgtgcagaagccaagaatcgccccacgtgcactccagccgtggcaaatagaccgagaacctccgtctccaaaaaaaaaaaaaaaacaattataaatttctcttttacaatttattaaagtaaagttaagaggatattattaaaagagggtttgggaacaaaaaatatctctcgatgaagatccgggagaaatattcaaagccaaaaaatttaaacaccgtgataaaactaactttaaagtgtggtgggagaaaaattttggtgctctgagaaacattttacaaaacttgtggttaccacagaatgaagagaattaaaagggattaaaaccaagagggttcaaaatataaaactccaattataactttttaaaactcgttgtaaataaaaaaggtctataactataaaaccaatttgtgggtaaaacttcttgttcacccacatggtaaatggggtaaacatgtggtaaagtgggaaaaaaagaggtttaaaaatccattggaaattatgatgaaaagaagattaccaccggggattataaaacttcaaccagggtttggaaccagacaaaacactgggcataatatacacccctaatgataacaaaaaacaccaaaagggtcaccaagaacactactacacaacgcggttaaacccaaaatcacagcgtagcaggcagtgttaacaggccacacacaacgaaccaccaaggacgggaaaatgaggggaaaaaagttataaacgaaagtagcatcaaagggaatgaagaagtgcacaaacacgtgcccggcccggggtcttaacaacgcgccaacgaccccttccagagacaaacatccacaagcacacacaggacagcaacaaaaggaacacggtgctaccaagacggaaaaaagaaagaagaagagtaacacaagccgaaagacggcaacagggccgacccgcaaagccgacaccgacagcgtaccacgacgaagagc

SEQ ID NO: 514614 - DNA, 1429 bp, Homo sapiens
agcggagaggcgcccctcacctcccggacggggagtgctggccgggcgggggggctgaccccgcccgagtctccgctcccggacggtggcggctggccgggcgtgggtggctgatcacccccagctcgcctcccggactggggcgtgctggccgcgctgagtgggctcctcacttgccatgctacggggcgtcctgggcggatggcgccccctcacctcccggacggggcgccggccctgcccccagcaccaccaagcagggcattgaactaccccctccctcctcccaaccacacgacctgatccacctaacgcgctcgcgcccccagctcggattccgaacccacccgcgccgctcaccccctaaccgctcacacacaccacgccgtctcgaacacccgccaccaagcggccaggacacttccgtcacctccaccatcgaaggacctcgcacggcaccactgtgcacgacgaaggctatcaacgggttgcagcatgaccaggcgggcgccactcaaagcacaggggcacgcacacgagacgaaacaacagagcaacgtaggcacagtggacaccacgcgacgcagacccaaaacctcacggcaacacaacaagacattcgcagcggggcaagcacgaagacgcgcacggacagaagcggcggacgaacgagtcagcaccacgcgttctggcgacgtcgacaaacatatgacaccaccagataaatacaccccgatctgtctctgaatcactctaccactcgataccactttgcggctgtcacctattcccctctcatgtggcagccactcaccaaagtaaccataaaaagcaacatataaaaaccacaacacatacccaccccacccacacaccgcaccactcacacacacacgccgcgacacaccacacacacacaactcaccactaaccactcgcacgcaacacctccgcacgatccacccaccccaaacactgcacctcactccaccacatcaccccccgccacgacatcggccactcactacagcagttacatcacctcatcaacccacgtgctaccgactcaacacagtctcaccgctgctcaccatctcgagcacagctacgaacacagctacatacaagcacaaatcgctcgccacagccgatctagcacatcataaaacacagaacacagacattcaatccctaccctcttcgcatgcctactcaaccgcaaatgtagactcgcaccgttcgctgatctactggttcacctcacccagacacacaagcttatcgcttaacaccaaccagcaatcatttcctatccccaacacattctcatacactactaccaatctcaaccaccaacaaacactaatctacaatctccaacgcaaacacgccacatagcgtcacacatacaacaacccacaaaagccca

SEQ ID NO: 514615 - DNA, 1460 bp, Homo sapiens
ggctgtggtaggacacggtgagacttggcggtgacggtcgcagtactgtaaaacgagactgaggcaacagctcgggttgcccggacacgtgcgctgggagtgtccgtgcggttgcttgtgctcgatgcggcactgcttgaaagtggccttgtccggatcatagtcctcacgactggagccccgaggggctgtgttggtgcgtcgagtgtgccgggatcccgaggatagtctgtcgttggtcatctctctcgtcggaccgctcgttgcgtctttgactctgtgtgtgcactggatcccgtgtttcggacagcagggcttcgcgtattgccatcctggtcaacttgttctcaaggttacccttgctgaccgctgcgacggttgcgcttttcgctcgtggatgcttgtgtcgctgctgtccctctggggggggttccatatctcgccatgccagtgcttcgacgcctcatcgtcgctccgcgtggtgtcccgacttcgcgcgtggagcgatggatgcgggtgggttgcttcctgtttccgccccgtgtcgctgcggggttccatgttgcccggtatcgacgcccgacccaggtcatgtcctgcagtctcacggttagctggacgcagaggacgcatgcgcgctttgtggcccaccggtgtgtttccaggtcgtagctgatcacttgcttttccattgtcgtggctcacgtgtggcaccctattcagtgtcatatctcgcttcgagcgttgacttgtgttgcgccgtcgtggaggtcgcctagggcccatcgggcccgccgaccgttggttgtctgtcgggcccatcgcggtcgttgccttaactggggctcgtctgtgtatcggcataccggtcgtgaccaatacgttattttccatagcctctctagggtatacttggctggttctcttgtcgccgactaggcgatgcaattcctccacgccaagggcgttttgattgcccgtacagaaataccccgcggagaaaaaagccatttcggttaacccacagccacaacgtggaaacacgaattggcctagcagcagtggattggcgaacgacgttacggaccgaggagaacttctttcgcacaagtttcacttggccggtattccaaccttcggggatcgagatggttgccccacagcgaaattctagggcgcggtcccatagctgggttccgttgctcctcggtggcctttccgtttggttttggccaccccttgtggatgggcccttccggtccgacccgcgcgatggtgcagtgcctcccaggtccgcaaacagggagcgtttcccaggcgcctgttatgtgtcgcgcatgccacagactttgtgtctttgggtcgcgacgggaacccgggtatgtcccccggcccgttttcgcgtgagcattcgcctggttcacacaattggcgttcgagatggagccatggctatagtg

SEQ ID NO: 514616 - DNA, 366 bp, Homo sapiens
  misc_feature (4)..(4): n is a, c, g, or t
  misc_feature (41)..(41): n is a, c, g, or t
  misc_feature (71)..(71): n is a, c, g, or t
  misc_feature (118)..(118): n is a, c, g, or t
  misc_feature (306)..(306): n is a, c, g, or t
  misc_feature (353)..(353): n is a, c, g, or t
gagntggcaataaaagttaagttgtcacctcatgggatganctgcccatcctcaaatttccctttcctgantttccctgcttttaaaaaataccccattcaagccccaggaatggtgnctcatgcctgtggtcccggcactttgggaggcccagggtggggggagtgcttgggcccaggagtttgagactagactgagcatcatggtgaaaccccatctctacaaaataaaaaataaaaaaagttagctgggtgtggtgatgcacgcctgtggtctcagctgctcggggggctgaggcaggaggancgctggagcttaggagtttcgggctgcagtgggccgtgaatcgcgcnctgcactgcagcc

SEQ ID NO: 514617 - DNA, 548 bp, Homo sapiens
agggtgagtacttacggacggagggttgtgggaagaacagaggacagagggtggtaagtgtggacggatgtagacggatgctgagtacaatgtgggtcgggtaagattactgattagctggagacctagagacagtgtaacttgacaagaatgaaaatggggtgagaataaacattcattatgaaaaatgtaagcacctctgcttacaagaaaggaagcatggtaaatagcatgtggttagcagtgataactgcagattcactgacagacatacacagtgcacgtacactgacagacagacagtacaagcgagttgtatagagtaaattagaaaagtcccattagatgctcattacaagcaatatttctttaagaaacatatataacgttatagtcactgagagacacaaaagctgtgactatattgactttgagataatattgatttccagcatcagtaagatagctatacaaggacaatacaattttaaattgatatgtaactagtataccattaaaatctaataagcaaaagaaaagaaaaaaaa

SEQ ID NO: 514618 - DNA, 105 bp, Homo sapiens
attatggggattaccatctaaaactaggtgctatatgaaacttctaaaactagggctattgaaacttctaaaactaggtgctataagaaacttctaaaactagcg

SEQ ID NO: 514619 - DNA, 133 bp, Homo sapiens
tatcaaatacataaaggaaaagtcccacttggcacatctcccacaccagatgtaaattattcatactgcatgactgaggatttgggaggcagagagagattcatctgcaatattgggaacaccactggaggta

SEQ ID NO: 514620 - DNA, 318 bp, Homo sapiens
agtactcagatccccccaagtaggtggaaggatggggagacagtgggcaaaaagctcaagggccgggcaaaagtggggtttcccctgccaggggaaaagccaacttttgctagcccagtgaccctgctccccccctgggcagccctttcatggtgggccccctgtcccctgtgctgtcataaaaaatccccccaagggagtgccccttggatggtaagggatgagctacgtttttaagttatcggatttacttttcccttttactttagcccaggccggctctcctgttatgctgccctattaaaatttaaaactata

SEQ ID NO: 514621 - DNA, 482 bp, Homo sapiens
gtctaagatccctgctgtctgctctgtatgtactaaatatactttgaagtataagatatatctaatagtatgactaaggatataaaggcaattacaacagaataggctggaggggaaaaaaaagagaactgctcagaggttactcttcgagagaatgaagacggtagtctggattaaagtcatgacagaaggaaaagagattgactaaatctaaacaacattggaaaaagatgacaatggagagctctttaaaggattaaaatatgagacatacaggagaaaaattaaagataaaccaaaagtttcactgggtatgtgggggttactccctgtgggaacgatgaagccgtggtagaaagaactggcttggggacaaaaataaattctgttaaataaataaatagaaaagacaaatgtcctgtagagaagaatcacaaataatttatgtagatactttccctgtccagaggcaggacaagcag

SEQ ID NO: 514622 - DNA, 557 bp, Homo sapiens
tgctcctcaatctgcatgtaaattatactagcattaccatctcacttctaggactactagtatatcgctcacacctcatatcctccctactatgcctagaaggaataactactatcgctgtcattatagactactctcataaccctcaacacccacatccctcttagccaatattgtgcctattgccatactatggatctttagccgctgtcgaaacgcccaggtgggcctagccctactagtctcaattctcacaacacatatggcctagacattacgtaacaattaccctaacacctactccaactgctaaaactaattagtcccaacaattatattacctaccactgacaatgacttcccaaaaaaacacataatttgaattcaacataacacccacagactaatatatcagacatcaatccctctacatatttaataagacagataataaaaacaacctatatagctgtccccccaacctatcctcgaacaccataacaaacccccctcctaatactaacttaactgactcctaccactcacaatccatgcaa

SEQ ID NO: 514623 - DNA, 601 bp, Homo sapiens
ccgatgtggtccctgactgagttggtgaagtctgtggtacggtgggaaaatggcggatatctcagagtacggtggaggagaatactgcccgtcattcaagtaacaagcttatagactactaagtcgatcccacatggagtgccacgatggtgatcaatcgactcatgttacaggaatccgtcgaggaccacttataataataatcaggagaaagaggcaaagccgtgctgcgttccagactccttcagtttcctgcaggccgatgttctgtatagtctatattataatccaagccagcaagaaccgtcttagtagcatactggtcgttcataggactcagtagccgttcagagactcaccaccaggtgtttccaaactttgtatgcaatatctaagtccgtcttacattcccactgtacatcatacccatcccagcctttgttctgacactgtatgacttttggggtataagaatcacaaccagctgtgcctccaacacatttcaactgtgggatgggatccagcctgcgggaggtggtatagcggtcatagtggagggtaaagcttttacatcccgcagcaacattctgtcaggatcgta

SEQ ID NO: 514624 - DNA, 311 bp, Homo sapiens
tctctccacacggtcacactgggaaggagttgagcacattagcaacaatgtacattaagtttggattttcattttcatgttttattttgtaaatattatctgatgtttggagcttgagatatacagcactgtaatatatagttcttgatattatgtactaagttctgtattctgtttgcctgtatagcacttagaatgtgcaactgcagacacatatctaacgtgtgtagtggtaactcttgcattcacgtgagcttgttagtcgaacgcaggtaaaatataataagaggtacagccgagtgtggagagag

SEQ ID NO: 514625 - DNA, 707 bp, Homo sapiens
  misc_feature (416)..(416): n is a, c, g, or t
  misc_feature (423)..(423): n is a, c, g, or t
  misc_feature (425)..(425): n is a, c, g, or t
  misc_feature (431)..(431): n is a, c, g, or t
  misc_feature (556)..(557): n is a, c, g, or t
  misc_feature (563)..(563): n is a, c, g, or t
  misc_feature (565)..(569): n is a, c, g, or t
ccgatagccgacagagaactccccgactaacccgacagagaactccccgactagcccgacagagcgattaccgtggtgagctccgcctcccgtcacagcattaccgtgtgagctccgcctcccgtcagagcattaccgtgtgagctccgcctcccgtccgagcattaccgtgtgagctccgcctcccgccagagcattaccgtgtgagctccgcctcccgtcagagcattaccgtgtgagctccgcctcccgtcagagcattaccgtgtgagctccgcctcccgtcacagcattaccgtgtgagctccgcctcccgtcacagcattaccgtgtgagctccgcctcccgccagagcattaccgtgtgagctccgccccccgacagagcattaccgtgtgagctccgcctcctgtcancattacngngtgagntccgccccctgtcgggctagtcggggccccgactagcccgacagggctgtttgtagctgtcgagatggttttagggctcttcgagaggataatgcctactgtgaagacatcgatgagtgtgctgnngggcgncnnnnntgtcgggctagtcggggagtcggggctgtcgggctagtcggggagtcggggctgtcgggctagtcggggagctgtcgggctagtcggggagctgtcgggctagtcggggagcggtcgggctagtcgggggggtaccga

SEQ ID NO: 514626 - DNA, 174 bp, Homo sapiens
aaaaagggaaaaaggggggtttaaaaagggtgggaaaaaaaagccttttaaaccaaaccctttttccccctttttgggttttttaacccccgtttggggggataggtcctgtaaaaaagaaaaaacccttgttttaccccttttagtttaaaagtaaaaaaaatattgggttta

SEQ ID NO: 514627 - DNA, 407 bp, Homo sapiens
  misc_feature (382)..(382): n is a, c, g, or t
ccgatagccgacagagaactccccgactaacccgacagagaactccccgactagcccgacagagcgattaccgtggtgagctccgcctcccgtcacagcattaccgtgtgagctccgcctcccgtcagagcattaccgtgtgagctccgcctcccgtccgagcattaccgtgtgagctccgcctcccgccagagcattaccgtgtgagctccgcctcccgtcagagcattaccgtgtgagctccgcctcccgtcagagcattaccgtgtgagctccgcctcccgtcacagcattaccgtgtgagctccgcctcccgtcacagcattaccgtgtgagctccgcctcccagccacagcaataccgtggcggcatcgactggganactctagatcgaccaacagcagcaa

SEQ ID NO: 514628 - DNA, 183 bp, Homo sapiens
acagcctcacacatacccgagaggcaaatacaagtgcaacttacacaacaacccatagacgaaaccaaactagctacacaaaggcaacacacacaaaccaaaattaaacctgcacagctttgtgaaactaagacagaaatatatctgcaagaaagttctgcactggtcctcccaccacaaacg

SEQ ID NO: 514629 - DNA, 564 bp, Homo sapiens
  misc_feature (273)..(273): n is a, c, g, or t
  misc_feature (280)..(280): n is a, c, g, or t
  misc_feature (282)..(282): n is a, c, g, or t
  misc_feature (288)..(288): n is a, c, g, or t
  misc_feature (413)..(414): n is a, c, g, or t
  misc_feature (420)..(420): n is a, c, g, or t
  misc_feature (422)..(426): n is a, c, g, or t
ccaccgtcgagcgcacggtcattaccgtgtgagctccgcctcccgccagagcattaccgtgtgagctccgcctcccgtcagagcattaccgtgtgagctccgcctcccgtcagagcattaccgtgtgagctccgcctcccgtcacagcattaccgtgtgagctccgcctcccgtcacagcattaccgtgtgagctccgcctcccgccagagcattaccgtgtgagctccgccccccgacagagcattaccgtgtgagctccgcctcctgtcancattacngngtgagntccgccccctgtcgggctagtcggggccccgactagcccgacagggctgtttgtagctgtcgagatggttttagggctcttcgagaggataatgcctactgtgaagacatcgatgagtgtgctgnngggcgncnnnnntgtcgggctagtcggggagtcggggctgtcgggctagtcggggagtcggggctgtcgggctagtcggggagctgtcgggctagtcggggagctgtcgggctagtcggggagcggtcgggctagtcgggggggtaccga

SEQ ID NO: 514630 - DNA, 160 bp, Homo sapiens
  misc_feature (80)..(81): n is a, c, g, or t
  misc_feature (101)..(101): n is a, c, g, or t
gcacagcaaaaaggtgcagagctggattccaactctgcctccagactccattgacatggaagaggaagcctggtgacaanncccctgcttaccaacttttnacaggtgacccttccaggctgccctgttccaaggaagtctatatccaagaacccccaat

SEQ ID NO: 514631 - DNA, 444 bp, Homo sapiens
  misc_feature (108)..(108): n is a, c, g, or t
  misc_feature (159)..(159): n is a, c, g, or t
  misc_feature (239)..(239): n is a, c, g, or t
agagtatcagagatctcgacttacctcggacttactcagagtcttaccggagcttacctggtgctgagagagagaggcactccatgtggtctagaacacgtggtcatnagcccagcgtctgtgccggtccaggtgcctgctctgggtgtgtgagtgggnactttgctccctggctcatcctagagaggccctggtgcctagtgctgaggcctctggggctggaaagcctccagcagaanggaggcactactgagcaactatgcattgtcattgtcgggtttggggctttcggtggttccttggtgactgggaattgcttgtgtgcatgtgttgggtgcatgcttccgggtctcagctggcccaggaccggaaaggcaagcccttcccatccaaagccattggtggagcttctctggaatcatttgccaaaagcccaaggcagaa

SEQ ID NO: 514632 - DNA, 111 bp, Homo sapiens
ttccacgtcatcagagagtgatgagcctcaccattctacagaatgaaaggccagcacgagcaccaccaccgctcatggcaataagagaagacacaaacaaatagaaaaaca

SEQ ID NO: 514633 - DNA, 473 bp, Homo sapiens
tcaggtgagggacaggaaagaaggaaatatggggaaatggggtgaacatcagtggatcagagagacacagtcatgggggtcaggtgtggtatcaggaataatgtgggaggccagattgaagtccgggccagaaacaatggtagttgtgggacttaaagagtgagttcagctgaaggagctggggagcagaaagtatatgcgtcaggtatgaggaagaaaatagattttggaagttacgagaaatgtagagagtgagttgagcatagtttgtgattttttagggcctctaacagtattaaagcagcggcagccgctgcatgcagacatgagggctaggctaagacagtaaggtcaatttgtttggacagaaaggctacacggtgtggtcctggctcttgtgtaagaattctgaccacactaaccatgcctaggaaggaaaggagttgttgttttgtaagggattgaggttttgg

SEQ ID NO: 514634 - DNA, 232 bp, Homo sapiens
gttaacactcaccgcgaggtccgcggcttcatttttgaagtcagtgagaccacgaaccaaccacttcgggacacataccaactctttcatgccaggagaggctccttaaaaaatttcggtgattacaggtaaatatcacttaccacctgtgctaaactaaccagttattacgtgtactacagggtattctgctgaaaatatgggcaaatataggtgtgtaaaagtccagtat

SEQ ID NO: 514635 - DNA, 1180 bp, Homo sapiens
cgggtggagttatggttccacgatagcgcgaaggttagtctgctgagaatgttactcatgtgcaaaaacaggggtcttagtgccgtgtacccggtatcttggatgtgcagagcatgcgtgatacacatgaggctcagtcgttgcaagtatccgccatggccaaactctgggaaacccgggtgtctaacgtcatattaggatacacctagctgtgtgattgtgttggtgcccgtatcttcagctaactttggaaggttaaggcatggagaatcacgtgagccccaagatgtcgagttcgcagtgacccaaaaatcaagccactgcactctagcctggatgacagagcaagactctctcggagagagaatacaagtaacctctgtgcttagtgtaacttattgctaaattccgtgtctttgtcttcttggaacagtcttctacttgttacaggatctgtccctatcttttggattcttatattagtttgtaatagtgcaatgaatatagttctatacctatatagcccactgacatggctgttagctgacctcagttccttgcatgacttggccagagccttcagtttcatgatctctagtaagaggtaatgtgtctcatcctctagggcaaggctgtgactagactggcttctcccagagggaatgatgtcgtgagagaagcagggagacgtaagaagtcaagacaaaactgcagtcttttatacccatcactacttgccatattctctttggtcacacagcccaacgcctggtatgatatgggaggctactaagctccatggggatgggatatctgggcaccatcttgaaggctcagctgacacagattattttgatgcgcgtgtcgcctagtcaatgaatttttcatggaccagagcgatcgatggactcacgcattataatcccagcactttggtgagagcgagatgaggtgagctcacgatgcgatcgggatgttcgagaccagcctggtaaagatggtgaaaccgccatctctactgaaatacataaacttagccaggcatggtggacaggggcctgtggtactcagctactcgggaggctgaggcgggagaatcgcttgagcttcgggggtacggaggttgcagtgagccgaatgacgccatacactgggctgcgacgtagttcccccccgccca

SEQ ID NO: 514636 - DNA, 239 bp, Homo sapiens
ggtgggttgcttggctgaaccagccttctgatggaacctctttgctggcaggtgctggagaaaattaggtatctacctaaggccattaaggcgtggaataacccgtccccacgtgtaaaatgtgtccttggcagagctcaagggcgttacatgcgagaaacaggtgtgtaactaggtaaccgggatctgcgttatctctaggatagagggtaacagcctcattgcaacacggtctctca

SEQ ID NO: 514637 - DNA, 1197 bp, Homo sapiens
cggtttttggtcgctgcacatcgcatcgctgtttgtggttacgctgactcgagtgggcgcgccggcgacgttggtgttattaatctccttcgtcctcccctcctgcactactgtgtgttttgtgttccgcggccgggcggggacggtccgtcgtggtttgttctgcacggtgcgcgcggtgcggtggggggggtgcctcgttctctgcccctcgccttgctagcttttatggatggctgcgacctggtttgtgttgtttgtttttcttacgcctccgcgcgcgcggtggggtgccgcccacaccctccgctggttattgattggattgcttctcctcgtcattactgcgccctccatcgcccacgtcggcgtcggcggtctgtccttgctgctcacgccgtccacgtgactcgtctccctctcctgtccggcgtgtgtatggctgcgtccctctcatctcatttcttcgtcgcgggtgtgggtgctcgattctccgctcgctctgcccgctggcgtgggggtcgtgctcactctccccccgcgagctgggaggacggacaccctctcgctccgcacgcacgtcgctctgtttcctcctcttctcgcgcgcggtgtggatgcgacgcgtcacttctcctcgactccacgacgcgacgacctctctctttcgtgtcttcgtgtctcgtgttcgcatcactctctctgtcgtgggcgccgctgttctctctcctctccaccgctctcttatctgtcgtggcgcgccgccgccctctcgcgctcgcggctggcccgtcctccacctctactccctcaggtgatccttgttgtcttcgctctcgcttcgtggcggcctgcctccctctctctctctctctctctcccctccgtcttctcttgtcagagttcgcgcggtctgggtgcagagcgagcctcgccgtctctctcttcttctctctccgcgcgcgcgccttcttttatctaataatgtgctggtggggggcgccccccctcttctcttgttctcccctgcgacagatgggccgggtctctctccctcgtctcccctccccccccccgccgctgcggtctgctctccctccgaccccccccccccgcggggggggagggagcagagagggatgtattattttttgtttttttttttgtttataaaaaaaaaagaacaagagaaccaca

SEQ ID NO: 514638 - DNA, 596 bp, Homo sapiens
gcttgggttctctccgtctctcttgttcccactcgcgtggtgctttctcctacagttccgttggtatcgttcacgagatatgcctccagccgtgctcttttcacatccccgcgcccgctgtagcattgtgtttcgtttgttgtggtcactgtaaatcccggagtcacttctgggcaccgatgcttcatggatcttgctatatttggtgatcaatttccgcgcttactcaccccgctcatggtggggtcctattgctcgaacgtggtcccaatctatggcgttgtctaacgacctctgcgttcctcgccgggcttccacggtttgtttctttacccactcttgtagattctttcctgtggattgtgatcggttgacaacgttgtcctggctctgttgtcttttgtgttaatatagtgcacctgtctcccgtatctaatgtcttcgctgctatgtaacaacccacgtttctcgttatctgaacatcctcccggcgattccttttgcctttgtcaactgtttgaactccaatgttcatgggtgcgccattcctttgggaagtgttcattgccatagttgcgggatttcccaacgttttt

SEQ ID NO: 514639 - DNA, 1442 bp, Homo sapiens
gtgaaaagcgacgacacggccgtctattattgtgttagagatggtagaggctggtcctttgacctctggggccagggagcccgggtcaccgtctcctcagcatccccgaccagccccaaggtcttcccgctgagcctctgcagcacccagccagatgggaacgtggtcatcgcctgcctggtccagggcttcttcccccaggagccactcagtgtgacctggagcgaaagcggacagggcgtgaccgccagaaacttcccacccagccaggatgcctccggggacctgtacaccacgagcagccagctgaccctgccggccacacagtgcctagccggcaagtccgtgacatgccacgtgaagcactacacgaatcccagccaggatgtgactgtgccctgcccagttccctcaactccacctaccccatctccctcaactccacctaccccatctccctcatgctgccacccccgactgtcactgcaccgaccggccctcgaggacctgctcttaggttcagaagcgaacctcacgtgcacactgaccggcctgagagatgcctcaggtgtcaccttcacctggacgccctcaagtgggaagagcgctgttcaaggaccacctgagcgtgacctctgtggctgctacagcgtgtccagtgtcctgccgggctgtgccgagccatggaaccatgggaagaccttcacttgcactgctgcctaccccgagtccaagaccccgctaaccgccaccctctcaaaatccggaaacacattccggcccgaggtccacctgctgccgccgccgtcggaggagctggccctgaacgagctggtgacgctgacgtgcctggcacgcggcttcagccccaaggacgtgctggttcgctggctgcaggggtcacaggagctgccccgcgagaagtacctgacttgggcatcccggcaggagcccagccagggcaccaccaccttcgctgtgaccagcatactgcgcgtggcagccgaggactggaagaagggggacaccttctcctgcatggtgggccacgaggccctgccgctggccttcacacagaagaccatcgaccgcttggcgggtaaacccacccatgtcaatgtgtctgttgtcatggcggaggtggacggcacctgctactgagccgcccgcctgtccccacccctgaataaactccatgctcccccaaaaaaaaaaaaaaaaaaataaaaaaaatctcggagggcgatcatattgtcgggggcgcgggagaaaaggggggtatgtagaatgggggacactgggggcaatagggcgtggtttccttggacccaagttttttttgtaacaaggtgggggtaagattcgtggcgggagtcctcccaatatatgggaggccggatataaaatatcggataaggccagtgttaccctgggtttattgg

SEQ ID NO: 514640 - DNA, 922 bp, Homo sapiens
  misc_feature (897)..(897): n is a, c, g, or t
tggctcacaacagcctcaacctcctgggctcaagtgatcctccagcctcagcctcctgagtggctgtgactggaggcgcaccccactacactgggctaattttttaattttttatataaacaaagtctccctatgttgctaaggctgaactcctgggctcaagcgatcctctcacctcattatccaactttaaaattttgcaatctgggctgggcgtggtggctcaggcctgtaatcccagcactttgggaggctgaggtgggtggatcatgaggtcaggagatcgagaccatcctggctaacaccgtgaaaccccgtctctactaaaaatacaaaaaattggccaggtgtggtggcacgcgcctgtagtcccagctactcaggaggctgaggcaggagaattgctagaacctgggaggtggaggttgcaatgagccgagatcgcaccactgcactccagcctggcgacagagcgagactctgtctcaaaaaaaaaaaaaattggcactctgatcggggggacaccatggcttttcacttcaaattgggcttaattatcgggaactaaactgtggcttcatataaaacttttttaccttgttttattttcctatgaacctccattctgacccatgcggtccatatgttggtaacaatactcatggatggggagcatgaaatagagccctcctttctgttgcctaaccgttaaccttttaaagaaatggggcgtgtaaaaagggggtgcttttcttagggagaaacacctcggggaaatacactatcttccccaacaacgggtggggaattacccctttcaccccaatgatatgttccgagcctccccagacatccggagtggcaaatcgtcaagaagaacggctcaacagactatgngctgacatattaccactcatatccg

SEQ ID NO: 514641 - DNA, 1429 bp, Homo sapiens
cgaaggaagggacaactactagtggctggtacggtagttttgactactggggccagggaacctggtcactggtcaccgtctcctcagcatccccgaccagccccaaggtcttcccgctgagcctctgcagcacccagccagatgggaacgtggtcatcgcctgcctggtccagggcttcttcccccaggagccactcagtgtgacctggagcgaaagcggacagggcgtgaccgccagaaacttcccacccagccaggatgcctccggggacctgtacaccacgagcagccagctgaccctgccggccacacagtgcctagccggcaagtccgtgacatgccacgtgaagcactacacgaatcccagccaggatgtgactgtgccctgcccagttccctcaactccacctaccccatctccctcaactccacctaccccatctccctcatgctgccacccccgactgtcactgcaccgaccggccctcgaggacctgctcttaggttcagaagcgaacctcacgtgcacactgaccggcctgagagatgcctcaggtgtcaccttcacctggacgccctcaagtgggaagagcgctgttcaaggaccacctgagcgtgacctctgtggctgctacagcgtgtccagtgtcctgccgggctgtgccgagccatggaaccatgggaagaccttcacttgcactgctgcctaccccgagtccaagaccccgctaaccgccaccctctcaaaatccggaaacacattccggcccgaggtccacctgctgccgccgccgtcggaggagctggccctgaacgagctggtgacgctgacgtgcctggcacgcggcttcagccccaaggacgtgctggttcgctggctgcaggggtcacaggagctgccccgcgagaagtacctgacttgggcatcccggcaggagcccagccagggcaccaccaccttcgctgtgaccagcatactgcgcgtggcagccgaggactggaagaagggggacaccttctcctgcatggtgggccacgaggccctgccgctggccttcacacagaagaccatcgaccgcttggcgggtaaacccacccatgtcaatgtgtctgttgtcatggcggaggtggacggcacctgctactgagccgcccgcctgtccccacccctgaataaactccatgctcccccaaaaaaaaaaaaaaaaaaataaaaaaaatctcggagggcgatcatattgtcgggggcgcgggagaaaaggggggtatgtagaatgggggacactgggggcaatagggcgtggtttccttggacccaagttttttttgtaacaaggtgggggtaagattcgtggcgggagtcctcccaatatatgggaggccggatataaaatatcggataaggccagtgttaccctgggtttattgg

SEQ ID NO: 514642 - DNA, 757 bp, Homo sapiens
tatctctgaccccctggagccatggagaagtgtaaggatccggattggccaatccattgtgggtccaacttcaaccgcaggcactggagatgatcctcacaagcccggactccagtaccagcctgtttgccacccggtagaatgtcatcccgtatttccagccggagttaattgctagatttcttgccagtcgaaagatattgttctggttgcctatagtgctctgggattctcacgagaccaaacgatgggtggacccggactccccggtgctcttggaggacccccgtcctttgtgccttggccaaaaagcacccagcgaatcccccgccctgagttgccctgcgctacccgctgcacgcgtggggttgtggtcctggcccagagctacccatgaggcacgcgcactcatgacacgaacgtgcacggtttttgagttccacgttgactgcacgaggaccactgaaagccactatgagtggcctagaccacgaaatctccacctattttaaccacgtggatagttttgctagccacccctaattatccactattcacgatgaataattaaccactggagagctttgcctgatgtctacccacgaagccctgtgtgtggatggtgaccccgaggacgtttttatgccggtgactggacatatcacctttacttaaatccgtcctgtttagcgacttcagtcaactaccgctgagtccctaggcccgaaagaccataaatttttctccttttgaaata

SEQ ID NO: 514643 - DNA, 1745 bp, Homo sapiens
  misc_feature (89)..(89): n is a, c, g, or t
gccgtgtattacttgtgcgcgagggggctacgattttcggaggcctaaattctactactatagcatggacgtctggggccaagggaccncggtcaccgtctcctcagcatccccgaccagccccaaggtcttcccgctgagcctctgcagcacccagccagatgggaacgtggtcatcgcctgcctggtccagggcttcttcccccaggagccactcagtgtgacctggagcgaaagcggacagggcgtgaccgccagaaacttcccacccagccaggatgcctccggggacctgtacaccacgagcagccagctgaccctgccggccacacagtgcctagccggcaagtccgtgacatgccacgtgaagcactacacgaatcccagccaggatgtgactgtgccctgcccagttccctcaactccacctaccccatctccctcaactccacctaccccatctccctcatgctgccacccccgactgtcactgcaccgaccggccctcgaggacctgctcttaggttcagaagcgaacctcacgtgcacactgaccggcctgagagatgcctcaggtgtcaccttcacctggacgccctcaagtgggaagagcgctgttcaaggaccacctgagcgtgacctctgtggctgctacagcgtgtccagtgtcctgccgggctgtgccgagccatggaaccatgggaagaccttcacttgcactgctgcctaccccgagtccaagaccccgctaaccgccaccctctcaaaatccggaaacacattccggcccgaggtccacctgctgccgccgccgtcggaggagctggccctgaacgagctggtgacgctgacgtgcctggcacgcggcttcagccccaaggacgtgctggttcgctggctgcaggggtcacaggagctgccccgcgagaagtacctgacttgggcatcccggcaggagcccagccagggcaccaccaccttcgctgtgaccagcatactgcgcgtggcagccgaggactggaagaagggggacaccttctcctgcatggtgggccacgaggccctgccgctggccttcacacagaagaccatcgaccgcttggcgggtaaacccacccatgtcaatgtgtctgttgtcatggcggaggtggacggcacctgctactgagccgcccgcctgtccccacccctgaataaactccatgctcccccaagcaaaaaaaaaaaaaaaaaaaaaaaaaaaaagaatacaaaaaaaagagaaaaaaaaaaaaaaagaggggggggggggaataatcaaggaccgccggaggaggggaccaccaggttacgcgaggcccccacgactcgtgcgaacagggggggcccacaaaagggagaggcctatcatatagaacgagagagcagagagagggtacaacacggcgggaacaggggacaccgagcacaaacggggagattatggtgcggaaggacgagacccactacatagcacgagcggggggggggcaacgataatatatggggggagacaaaatctaaagcgtataaggagaatttcttaacgccgtccctatgaggggaagaagtcttacagcaaacattctagtagtagggtttatatataaggggtagatcaacacaacagcgggcataagaaacttgtgtcggcgagataagagggaaaaaatctgcgccacccgaggaatatatacataagaagaagacaattattatctacgcag

SEQ ID NO: 514644 - DNA, 1082 bp, Homo sapiens
tggcgtggtcatggcgccccgagccctcctcctgctgctctcgggagtgcctggccctgacctgagacctgtgtgcctgctcccacatccatgagtgtatttctgacacctgcctgtgtccctgtgccctggcctgctggagatgcccctgcttcatctcatgtgtggctacgtggacgacacgcagttctgtgcggttcgacagcgacgccgcgagtccgagatggggagcctgcgggcgccgtgggtggagcaggaggggccggagtatttgggaccgggagacacagaaggtacaatgctgccagggcacatggctgacccgagtgagcctgctggaaccttgcgctggctactacaaccagagctgaggacgggtctcaacacaccatccagaggatgtctggctgcgacctggggcccgactgggcgcctcctccgcgggtatgaccagtccgcctacgacggcaaggattacatcgccctgaacgaggacctgcgctcctggacctgcgtggacaccgcgagtcagatcacccagcgcaaggttggaggcgggcctgtgcaggcggagcagatgagaagcctacctggaggggcacgttgcgtgagtggctccgcaagataccttggagaacggggaaggagacgctgagcgcggaagaaacaccaaagacacacgtgaccaacaacccatctctgacctgaggccaccctgaagtggctgggccctgggctttaccctgggagatccactgactgacagcggatgggagacagaccaggaaacgagttgtgaacaaggcagcagaaaggaggttcaaagtggcactgtgtgggctctgagagagcggattagttacaattgaaagagtttataacctacagagtgagagattaggaaacaatagtgatataagagaagagagaaaagcaaggaggaaatataatgagaacaaagaggagcaagagagacacgaagagaagacagaagagcagaataagtaagggtatagacgccgtctttttcgcgaagaaaagaaatcaaaagaaatagacatagaaggtaaaagagaaagaaa

SEQ ID NO: 514645 - DNA, 321 bp, Homo sapiens
atcatgaatttttgtccttgtgcagattgctgtggagtctctgtcacgacatcctgccaggtctatgtccataatgatatttcctaggttttcttctaaggtttacacagtcctgggctttacctttaagtctgtagtccatcttgaatcgatttttgtatacagtgaaaggaaggggcctagtttcaatcttctgtatatacaaaaattctaaacttgaatgtacttaataaaataggctcaaaaatgtataaagcaaaacatgaatagaattaaaacaaatgatcagactaccatcactgtgtgagacaaagggaaaca

SEQ ID NO: 514646 - DNA, 1415 bp, Homo sapiens
ttgcatttactccatggaccaaaactggatacttcaccactggggtaggaaaccctggtcaccgtctcctcagcatccccgaccagccccaaggtcttcccgctgagcctctgcagcacccagccagatgggaacgtggtcatcgcctgcctggtccagggcttcttcccccaggagccactcagtgtgacctggagcgaaagcggacagggcgtgaccgccagaaacttcccacccagccaggatgcctccggggacctgtacaccacgagcagccagctgaccctgccggccacacagtgcctagccggcaagtccgtgacatgccacgtgaagcactacacgaatcccagccaggatgtgactgtgccctgcccagttccctcaactccacctaccccatctccctcaactccacctaccccatctccctcatgctgccacccccgactgtcactgcaccgaccggccctcgaggacctgctcttaggttcagaagcgaacctcacgtgcacactgaccggcctgagagatgcctcaggtgtcaccttcacctggacgccctcaagtgggaagagcgctgttcaaggaccacctgagcgtgacctctgtggctgctacagcgtgtccagtgtcctgccgggctgtgccgagccatggaaccatgggaagaccttcacttgcactgctgcctaccccgagtccaagaccccgctaaccgccaccctctcaaaatccggaaacacattccggcccgaggtccacctgctgccgccgccgtcggaggagctggccctgaacgagctggtgacgctgacgtgcctggcacgcggcttcagccccaaggacgtgctggttcgctggctgcaggggtcacaggagctgccccgcgagaagtacctgacttgggcatcccggcaggagcccagccagggcaccaccaccttcgctgtgaccagcatactgcgcgtggcagccgaggactggaagaagggggacaccttctcctgcatggtgggccacgaggccctgccgctggccttcacacagaagaccatcgaccgcttggcgggtaaacccacccatgtcaatgtgtctgttgtcatggcggaggtggacggcacctgctactgagccgcccgcctgtccccacccctgaataaactccatgctcccccaaaaaaaaaaaaaaaaaaataaaaaaaatctcggagggcgatcatattgtcgggggcgcgggagaaaaggggggtatgtagaatgggggacactgggggcaatagggcgtggtttccttggacccaagttttttttgtaacaaggtgggggtaagattcgtggcgggagtcctcccaatatatgggaggccggatataaaatatcggataaggccagtgttaccctgggtttattgg

SEQ ID NO: 514647 - DNA, 1413 bp, Homo sapiens
tagagatcgggctttgacggctacccctcaggagatgactggggccaggaacccggtcaccgtctcctcagcatccccgaccagccccaaggtcttcccgctgagcctctgcagcacccagccagatgggaacgtggtcatcgcctgcctggtccagggcttcttcccccaggagccactcagtgtgacctggagcgaaagcggacagggcgtgaccgccagaaacttcccacccagccaggatgcctccggggacctgtacaccacgagcagccagctgaccctgccggccacacagtgcctagccggcaagtccgtgacatgccacgtgaagcactacacgaatcccagccaggatgtgactgtgccctgcccagttccctcaactccacctaccccatctccctcaactccacctaccccatctccctcatgctgccacccccgactgtcactgcaccgaccggccctcgaggacctgctcttaggttcagaagcgaacctcacgtgcacactgaccggcctgagagatgcctcaggtgtcaccttcacctggacgccctcaagtgggaagagcgctgttcaaggaccacctgagcgtgacctctgtggctgctacagcgtgtccagtgtcctgccgggctgtgccgagccatggaaccatgggaagaccttcacttgcactgctgcctaccccgagtccaagaccccgctaaccgccaccctctcaaaatccggaaacacattccggcccgaggtccacctgctgccgccgccgtcggaggagctggccctgaacgagctggtgacgctgacgtgcctggcacgcggcttcagccccaaggacgtgctggttcgctggctgcaggggtcacaggagctgccccgcgagaagtacctgacttgggcatcccggcaggagcccagccagggcaccaccaccttcgctgtgaccagcatactgcgcgtggcagccgaggactggaagaagggggacaccttctcctgcatggtgggccacgaggccctgccgctggccttcacacagaagaccatcgaccgcttggcgggtaaacccacccatgtcaatgtgtctgttgtcatggcggaggtggacggcacctgctactgagccgcccgcctgtccccacccctgaataaactccatgctcccccaaaaaaaaaaaaaaaaaaataaaaaaaatctcggagggcgatcatattgtcgggggcgcgggagaaaaggggggtatgtagaatgggggacactgggggcaatagggcgtggtttccttggacccaagttttttttgtaacaaggtgggggtaagattcgtggcgggagtcctcccaatatatgggaggccggatataaaatatcggataaggccagtgttaccctgggtttattgg

SEQ ID NO: 514648 - DNA, 221 bp, Homo sapiens
cggacgcgtgggcggacgcggtgtgagctaagcaatgattagtagccatgtcaatatgaataacatgttgacgcactagtgattgggctagctggagttcacctagacttaaagctaacgtcgagtgataataatcgattatcactaggtagtggctcatagccatataccgacagaaggagccctgtgatcgccaaacacaagttgactgtgcgtggggc

SEQ ID NO: 514649 - DNA, 1592 bp, Homo sapiens
  misc_feature (89)..(89): n is a, c, g, or t
  misc_feature (1233)..(1233): n is a, c, g, or t
  misc_feature (1237)..(1237): n is a, c, g, or t
gccgtgtattacttgtgcgcgagggggctacgattttcggaggcctaaattctactactatagcatggacgtctggggccaagggaccncggtcaccgtctcctcagcatccccgaccagccccaaggtcttcccgctgagcctctgcagcacccagccagatgggaacgtggtcatcgcctgcctggtccagggcttcttcccccaggagccactcagtgtgacctggagcgaaagcggacagggcgtgaccgccagaaacttcccacccagccaggatgcctccggggacctgtacaccacgagcagccagctgaccctgccggccacacagtgcctagccggcaagtccgtgacatgccacgtgaagcactacacgaatcccagccaggatgtgactgtgccctgcccagttccctcaactccacctaccccatctccctcaactccacctaccccatctccctcatgctgccacccccgactgtcactgcaccgaccggccctcgaggacctgctcttaggttcagaagcgaacctcacgtgcacactgaccggcctgagagatgcctcaggtgtcaccttcacctggacgccctcaagtgggaagagcgctgttcaaggaccacctgagcgtgacctctgtggctgctacagcgtgtccagtgtcctgccgggctgtgccgagccatggaaccatgggaagaccttcacttgcactgctgcctaccccgagtccaagaccccgctaaccgccaccctctcaaaatccggaaacacattccggcccgaggtccacctgctgccgccgccgtcggaggagctggccctgaacgagctggtgacgctgacgtgcctggcacgcggcttcagccccaaggacgtgctggttcgctggctgcaggggtcacaggagctgccccgcgagaagtacctgacttgggcatcccggcaggagcccagccagggcaccaccaccttcgctgtgaccagcatactgcgcgtggcagccgaggactggaagaagggggacaccttctcctgcatggtgggccacgaggccctgccgctggccttcacacagaagaccatcgaccgcttggcgggtaaacccacccatgtcaatgtgtctgttgtcatggcggaggtggacggcacctgctactgagccgcccgcctgtccccacccctgaataaactccatgctcccccaaaaaaaaaaaaaaaaaaaanaaanaaaaaaaaaaaaaaaaaaaaaaaaaaaaaaaaaaaacaaaaaaaaggggggcggcgcgcgccgcctccgctgtctagattctccctcccgcggggcccgccccccttctctcgccgccgtccccctcctcttgtttgtcaacgagaggggcccccccccggcgggggcgcgcttctttatatcatcctggcggagcggcggggcgcgccccctgtcttcttcaccagcccctctcgctgggcggcaacactcctcgtctgctggcgcggtgcctcttctctcggcgggggcgcccccctccttcccccgtgggggggcggccgccactctcgtggccgcccgctcccctgctcga

SEQ ID NO: 514650 - DNA, 773 bp, Homo sapiens
agcggactgcgagtcctcgcctactcccagaaaacacccgggtgcatacgcggtgcggccgctgattcaggtcggcgggctccaggagacatgtgtgggcagcgtcgccgttactccttcttgggcagtatattcccagacgccacgcggaggtgggccatatgagctctgatttccaggactgggtcactattcaggacacggtccagcgcaatgccgcgtaccatgtctcagggatgagtgaacatccaagcatgtggccatggacaactccaaggaaaagtggagattcctgaacccatgcatcagaggagagaggtaagagcaacctgagagccaaggagcaatgatcagaacattgggcagactggaactagccacaacgaaaatcgggagaatacacgaggagcgcagaaaaaaggaaagcatgcgcggtgacaataaagcgcacaaaggcagacgataaaaggaacaaatgaccagatgtgaaagtgtgccagaggaaacaagagacatagaatcatggcaagagaaggcaaagtgaagtgacagcataagacaccgtggaagaccaggagaataaacaaggtcaccagaagacgctaatgtcaaggcaatgcaggcaacatgaacacgcgcaacacagagggcaggattgacccccgataggaagaaaaacaatagaagacaacagacaacgcacagaagcggtgacatggccgcaaaacagccacgcccgagaaactcagaacgacgaacagcactcaaagaaa

SEQ ID NO: 514651 - DNA, 1400 bp, Homo sapiens
  misc_feature (41)..(41): n is a, c, g, or t
  misc_feature (45)..(45): n is a, c, g, or t
tgggttgctagctgctttctacccctgatacctcagtatgntctngactcataggataaccatgcgccgctccccaaggtcttcccgctgagcctctgcagcacccagccagatgggaacgtggtcatcgcctgcctggtccagggcttcttcccccaggagccactcagtgtgacctggagcgaaagcggacagggcgtgaccgccagaaacttcccacccagccaggatgcctccggggacctgtacaccacgagcagccagctgaccctgccggccacacagtgcctagccggcaagtccgtgacatgccacgtgaagcactacacgaatcccagccaggatgtgactgtgccctgcccagttccctcaactccacctaccccatctccctcaactccacctaccccatctccctcatgctgccacccccgactgtcactgcaccgaccggccctcgaggacctgctcttaggttcagaagcgaacctcacgtgcacactgaccggcctgagagatgcctcaggtgtcaccttcacctggacgccctcaagtgggaagagcgctgttcaaggaccacctgagcgtgacctctgtggctgctacagcgtgtccagtgtcctgccgggctgtgccgagccatggaaccatgggaagaccttcacttgcactgctgcctaccccgagtccaagaccccgctaaccgccaccctctcaaaatccggaaacacattccggcccgaggtccacctgctgccgccgccgtcggaggagctggccctgaacgagctggtgacgctgacgtgcctggcacgcggcttcagccccaaggacgtgctggttcgctggctgcaggggtcacaggagctgccccgcgagaagtacctgacttgggcatcccggcaggagcccagccagggcaccaccaccttcgctgtgaccagcatactgcgcgtggcagccgaggactggaagaagggggacaccttctcctgcatggtgggccacgaggccctgccgctggccttcacacagaagaccatcgaccgcttggcgggtaaacccacccatgtcaatgtgtctgttgtcatggcggaggtggacggcacctgctactgagccgcccgcctgtccccacccctgaataaactccatgctcccccaaaaaaaaaaaaaaaaaaataaaaaaaatctcggagggcgatcatattgtcgggggcgcgggagaaaaggggggtatgtagaatgggggacactgggggcaatagggcgtggtttccttggacccaagttttttttgtaacaaggtgggggtaagattcgtggcgggagtcctcccaatatatgggaggccggatataaaatatcggataaggccagtgttaccctgggtttattgg

SEQ ID NO: 514652 - DNA, 1436 bp, Homo sapiens
  misc_feature (81)..(81): n is a, c, g, or t
cgagagatcgagtcggcgagagggattcttctggctggtccccggcccacaacggtatggacgtctggggccaagggaccncggtcaccgtctcctcagcatccccgaccagccccaaggtcttcccgctgagcgcagcaccccccagatgggaacgtggtcatcgcctgcctggtccagggcttcttcccccaggagccactcagtgtgacctggagcgaaagcggacagggcgtgaccgccagaaacttcccacccagccaggatgcctccggggacctgtacaccacgagcagccagctgaccctgccggccacacagtgcctagccggcaagtccgtgacatgccacgtgaagcactacacgaatcccagccaggatgtgactgtgccctgcccagttccctcaactccacctaccccatctccctcaactccacctaccccatctccctcatgctgccacccccgactgtcactgcaccgaccggccctcgaggacctgctcttaggttcagaagcgaacctcacgtgcacactgaccggcctgagagatgcctcaggtgtcaccttcacctggacgccctcaagtgggaagagcgctgttcaaggaccacctgagcgtgacctctgtggctgctacagcgtgtccagtgtcctgccgggctgtgccgagccatggaaccatgggaagaccttcacttgcactgctgcctaccccgagtccaagaccccgctaaccgccaccctctcaaaatccggaaacacattccggcccgaggtccacctgctgccgccgccgtcggaggagctggccctgaacgagctggtgacgctgacgtgcctggcacgcggcttcagccccaaggacgtgctggttcgctggctgcaggggtcacaggagctgccccgcgagaagtacctgacttgggcatcccggcaggagcccagccagggcaccaccaccttcgctgtgaccagcatactgcgcgtggcagccgaggactggaagaagggggacaccttctcctgcatggtgggccacgaggccctgccgctggccttcacacagaagaccatcgaccgcttggcgggtaaacccacccatgtcaatgtgtctgttgtcatggcggaggtggacggcacctgctactgagccgcccgcctgtccccacccctgaataaactccatgctcccccaaaaaaaaaaaaaaaaaaataaaaaaaatctcggagggcgatcatattgtcgggggcgcgggagaaaaggggggtatgtagaatgggggacactgggggcaatagggcgtggtttccttggacccaagttttttttgtaacaaggtgggggtaagattcgtggcgggagtcctcccaatatatgggaggccggatataaaatatcggataaggccagtgttaccctgggtttattgg

SEQ ID NO: 514653 - DNA, 137 bp, Homo sapiens
ggctatcacacggtatatacatcttgatccctatttccacaacttgaaaagaaccaagtccatatagatgcataataaagatgaaagtgtaaaaagtaaatttatggttaaaaaaggaaagtgtcttcatttacttg

SEQ ID NO: 514654 - DNA, 589 bp, Homo sapiens
ttctttaaagggacttttccctttttcccatcgaaacaagtgcagattttgccctgtgtagaatttccactggggtgggctgttccagctaccgaaccagcttccgaactcagaggcacatggcaccagtggcattgaaatgcacgctccagcttacctgaaaggaattgttaatatttctgttcagtatacctaattagctctggagtactgaaatttcacagaagtaaaatttgatatatgtccatgaattcctattaatttcccaaaaaggagtccctcttactatatccaaaatttttgcatcttttacattttcattgaaaaaccactttaaaaaaaagttacatgccaatttctaagatgtttcctcacaatcagaaaaatgttgttactgtaacatccaatacaccatttccttctgactcctggggaactcgctgttggtataaaagtggaattttcaagctgtttagttgaaatagaacattttgttaagtgaagtcctaaaggggaatcccacgtataaaaccaaccagaggtgagtagctgtgactgaatcactgtgggagcatctctgtctccaaac

SEQ ID NO: 514655 - DNA, 1419 bp, Homo sapiens
tggtgctgtgagacttgagaacggctgtctattcatgtgtgaaagactttagaggcggtatagtggaaggtccctttgatcactggggccagggaccctggtcaccgtctcctcagcatccccgaccagccccaaggtcttcccgctgagcctctgcagcacccagccagatgggaacgtggtcatcgcctgcctggtccagggcttcttcccccaggagccactcagtgtgacctggagcgaaagcggacagggcgtgaccgccagaaacttcccacccagccaggatgcctccggggacctgtacaccacgagcagccagctgaccctgccggccacacagtgcctagccggcaagtccgtgacatgccacgtgaagcactacacgaatcccagccaggatgtgactgtgccctgcccagttcccccacctcccccatgctgccacccccgactgtcgctgcaccgaccggccctcgaggacctgctcttaggttcagaagcgaacctcacgtgcacactgaccggcctgagagatgcctcaggtgtcaccttcacctggacgccctcaagtgggaagagcgctgttcaaggaccacctgagcgtgacctctgtggctgctacagcgtgtccagtgtcctgccgggctgtgccgagccatggaaccatgggaagaccttcacttgcactgctgcctaccccgagtccaagaccccgctaaccgccaccctctcaaaatccggaaacacattccggcccgaggtccacctgctgccgccgccgtcggaggagctggccctgaacgagctggtgacgctgacgtgcctggcacgcggcttcagccccaaggacgtgctggttcgctggctgcaggggtcacaggagctgccccgcgagaagtacctgacttgggcatcccggcaggagcccagccagggcaccaccaccttcgctgtgaccagcatactgcgcgtggcagccgaggactggaagaagggggacaccttctcctgcatggtgggccacgaggccctgccgctggccttcacacagaagaccatcgaccgcttggcgggtaaacccacccatgtcaatgtgtctgttgtcatggcggaggtggacggcacctgctactgagccgcccgcctgtccccacccctgaataaactccatgctcccccaaaaaaaaaaaaaaaaaaataaaaaaaatctcggagggcgatcatattgtcgggggcgcgggagaaaaggggggtatgtagaatgggggacactgggggcaatagggcgtggtttccttggacccaagttttttttgtaacaaggtgggggtaagattcgtggcgggagtcctcccaatatatgggaggccggatataaaatatcggataaggccagtgttaccctgggtttattgg

SEQ ID NO: 514656 - DNA, 775 bp, Homo sapiens
gggactggccaggcccccaaacctccaagacccatcgtgctggatgcctgtggataagcgaggggagagctgactagtgccctgtctgcggggtaccttcggcgaggagaggcgacgaaggtctgcaccagacgatggcactggacatgtgcatgcacgggtgcatacatgaaaactgctgtaaaacgaacgaacgtttgtcgggtagttattatttatgttgatcttgtgttgtcttgggacggacttgtgggagaccccacaagaatctacattaggggaagcaaggaggacgcgagcgtctctcagccagaacgagatggctcataggggggtgaaatccacgtggatcgtgcgggaaaaaatgtcagagcgttcctcgagtagagagcggggctctatgtggcgcgatacaggtgtgaaatgctggggatagccacaggaaaagagggagtgtaatatagcgcgtgggaggacaggaaggacaacagctgtgcgcagagtcaccgtgtggctcgcacgcaagtgggggacggtgtattacgaagagtgttgggttgggacagatgatgtgggagagctgcatgcgggaaggggagtgtctacaagaagtaatgtaagggggcgcatgttggagcaggttgttgtaatgaaattaccgcaccgcgtggggactatatgtggggggagaagcgccgatattttacagagtcgttgcttagcagaggttgtgtggtgatgtagaaagagagacaatgtaggatgttgttcgagt

SEQ ID NO: 514657 - DNA, 859 bp, Homo sapiens
aaggctaggtaacgaggctggtttagagggagagcggaccagagagccttagcagccaccgcccgcggcggctagttaccatcacaccccgggaggatgccttgcatgctgccgcagcgtgccccagtcaccatcacctgcaaccatgagcagctgaggccgagacccagcagccgctgtgaaaaagagtaggacagtcagtgcatgatatgatcaccagagacccggctacataacgtgacaaggtggtagacacatttgatggaagataacagctagaggaactcaccagtcgagcagcgacatagcagagaagagaaacaacgaaagagtgatctgaaaaagaagtgctaaggacactcagataagaatgtacacagattgtaatatgagaaggggtataatgagattagacaccaacgtggtagaatgagcgagacaaagggaaagagatgagagtgtgatatagaaatagaaatgtcaaattaaaacaaagcaagataaacatgcaggcaaagataacagatgtatagatagaagaattattggagaaggaaaatattggaataatagacagccagaagagagagcgaattgaaataagtgggattgagagagcaagagacaggtggaaaagagttgcgttacagaagtggaacacaatagataaagtgatgtgtaatagtcaagtagaagatggaactaggcagagaacttgagagaggagtacacaatgaaacgagttttaatcagactgcaagtttatatagcataagaatagcagacatatatacaaagcacagaaaagaacagatagagattagctaataaattaggtaatagttgatggcataatagg

SEQ ID NO: 514658 - DNA, 1566 bp, Homo sapiens
  misc_feature (118)..(118): n is a, c, g, or t
  misc_feature (120)..(120): n is a, c, g, or t
  misc_feature (137)..(137): n is a, c, g, or t
  misc_feature (171)..(171): n is a, c, g, or t
ggccagacgtacgggcatgcaggccctcccctccagcccctcagcatccagccacatctgtggacacagccagcgcggcggagcagggctctgctaaggacagacggcatcaaggcangncctgggccgggccaggnctccctccccacagcagccctcttggcaggcagncagacgcccgtgagggtggacctgccatgagggcctgcacgccggaggccgcccactcagcactgcgggccctccggtcaccgtctcctcagcatccccgaccagccccaaggtcttcccgctgagcctctgcagcacccagccagatgggaacgtggtcatcgcctgcctggtccagggcttcttcccccaggagccactcagtgtgacctggagcgaaagcggacagggcgtgaccgccagaaacttcccacccagccaggatgcctccggggacctgtacaccacgagcagccagctgaccctgccggccacacagtgcctagccggcaagtccgtgacatgccacgtgaagcactacacgaatcccagccaggatgtgactgtgccctgcccagttcccccacctcccccatgctgccacccccgactgtcgctgcaccgaccggccctcgaggacctgctcttaggttcagaagcgaacctcacgtgcacactgaccggcctgagagatgcctcaggtgtcaccttcacctggacgccctcaagtgggaagagcgctgttcaaggaccacctgagcgtgacctctgtggctgctacagcgtgtccagtgtcctgccgggctgtgccgagccatggaaccatgggaagaccttcacttgcactgctgcctaccccgagtccaagaccccgctaaccgccaccctctcaaaatccggaaacacattccggcccgaggtccacctgctgccgccgccgtcggaggagctggccctgaacgagctggtgacgctgacgtgcctggcacgcggcttcagccccaaggacgtgctggttcgctggctgcaggggtcacaggagctgccccgcgagaagtacctgacttgggcatcccggcaggagcccagccagggcaccaccaccttcgctgtgaccagcatactgcgcgtggcagccgaggactggaagaagggggacaccttctcctgcatggtgggccacgaggccctgccgctggccttcacacagaagaccatcgaccgcttggcgggtaaacccacccatgtcaatgtgtctgttgtcatggcggaggtggacggcacctgctactgagccgcccgcctgtccccacccctgaataaactccatgctcccccaaaaaaaaaaaaaaaaaaataaaaaaaatctcggagggcgatcatattgtcgggggcgcgggagaaaaggggggtatgtagaatgggggacactgggggcaatagggcgtggtttccttggacccaagttttttttgtaacaaggtgggggtaagattcgtggcgggagtcctcccaatatatgggaggccggatataaaatatcggataaggccagtgttaccctgggtttattgg

SEQ ID NO: 514659 - DNA, 126 bp, Homo sapiens
atcaactcgcaaggccttgtgaaggagtcttacctaaaaccgaagaaatatcagggacttttgttgactatttacacctcagttttacatttaaattccaggcagtgttaatatgccaaggtaggg

SEQ ID NO: 514660 - DNA, 196 bp, Homo sapiens
atgctcagattagacaaatggaaggggccccagggagggggggggtggtttaagtaacagtttttccccagagactttgattcagctggtttggggcaaagcccaggaatccgcattttttcccagccccccccttgattttgacgcgggcaatccaaaaatgaatttggcccttaaaacaaaatttttcttttta

SEQ ID NO: 514661 - DNA, 453 bp, Homo sapiens
ctaggctgagaactggatcagaaatcaagtaccctcgaccaatcaatacagccagtgttggcagtattttctgcaaaaggtctgtgacatgcccctgcttgttgacatggagattgctgcctgttcaccgtgggcacctcacctggccagaggagaccgctgttgagcctgggttacagtggcagtgaggagagcgagcactggcctgaacacggtcgtcatggggaccctgccctacacaccctgaggccagtaaccgctaaggagagtgggcacagggcacgtgttcaggaggcccggggaacctaacagccatggcctgtcctgaggccatctttgccttcatgtgcctggggtggccctcaggtttccctgaggagctggaaacggtcttcaggctgacctgcaccacccctgtcccagcctcctcctctgagcgtcagtgtcctccct

SEQ ID NO: 514662 - DNA, 243 bp, Homo sapiens
  misc_feature (81)..(81): n is a, c, g, or t
  misc_feature (103)..(103): n is a, c, g, or t
  misc_feature (168)..(168): n is a, c, g, or t
  misc_feature (184)..(184): n is a, c, g, or t
ttgggtggacccggtcaacttcaagctcctaagcactgcctgctggtaccctggcgcccacctccccgccgagttcacctnggtgacgcctccctgacaagtncctgcttctgtgagaccgtctgcctccaaataccgttaagtggagcctcggtagccgttcctccnggctgcctccaacggncctcctcccctccttgaccgcccttcctggctttgaataaagtctgagtgggcggcaaa

SEQ ID NO: 514663 - DNA, 1093 bp, Homo sapiens
acatgttaggatggctcgccagagcttcagtgggcggggactacgacaggtgactccataccaaggaggatgagatgactgtcactggaatagagcggatgagggaagcagctcctacgaagttccctctgtggctgctgcatgatctggaggagggtgctggtccgactagtgagcttgcaatgacagcccactccaaagatgttcacaaagggtgtaggaggcatcatcttatccaccacatcagcgattttagacttgagtgaaagtggtctgtgccagtattggaggagggtcttaaagaatccacacagacattccaaacaaattgcatcatgaaaagagaaatgccctgatgtgatgaattcctcaaagcattaactattcaggtatgattcacgaaccaccttgactatgtgcatggtaaccactcacggttacaaatcagacacttcaaaggcggcattacatatcctggggaaatacggaagaactccaaccgcagacacattatatgacaacacgtataggccataatcagaacaaggacgaagatcacgttaattcaacagaaagttgatacacccaatggatgaggaaaggacatgagtgataaatgaccggatacagccccaacagacctaggataatggacaagacgtggtagacgctataaaagaagatgagtggcccacatcgatgggaaaaatttaacaccagtaccacaatcaagacgatcaagatttagtagccaatgacaagaggggaaattagggggacagtggaaaataacatccaccaagaaaggacaataacaccagttgcaagggaaaaattgtggagagagccacaaacaacaaacaaccaacaattgataacgttagcaccacataagatatagtgccacgaagcaaagacatacaagagtaaacggggcaataccaaaaacacgtggagatatacaagacagaagaacaatggaaaaaccccaatacgcggagaatgagaaccgacaaacacaacagcaaaaacaacacaaaggaacaaaatggaacagaagaattggcactaatggagaaacaatagcacagaa

SEQ ID NO: 514664 - DNA, 190 bp, Homo sapiens
agggacagtgcagcatggcacgggttgtcggtggcatgtgtaatgtgtggccattttagtggttcctgcacagcagccccaatcattggccaatgtcatcacctgtggcagacagcccaggcccaaggtcatagctttgcaaactgtcattcaagcaacagcaaccatcacatttatccagcacattcat

SEQ ID NO: 514665 - DNA, 174 bp, Homo sapiens
cttccccattttttccaattccctttccccaactttccagttccaaaggccccaggcctggaaggatccagtgcatatttaaaggggggccctttgaaaaccgttaaaaggaatatatgtttgttttcccccttaagaaaaaatggccagcttacccaatgtttaactttccga

SEQ ID NO: 514666 - DNA, 837 bp, Homo sapiens
  misc_feature (283)..(283): n is a, c, g, or t
  misc_feature (288)..(288): n is a, c, g, or t
  misc_feature (290)..(290): n is a, c, g, or t
  misc_feature (292)..(292): n is a, c, g, or t
  misc_feature (295)..(295): n is a, c, g, or t
  misc_feature (298)..(298): n is a, c, g, or t
  misc_feature (300)..(300): n is a, c, g, or t
  misc_feature (303)..(303): n is a, c, g, or t
  misc_feature (306)..(306): n is a, c, g, or t
  misc_feature (309)..(309): n is a, c, g, or t
  misc_feature (312)..(312): n is a, c, g, or t
  misc_feature (314)..(314): n is a, c, g, or t
  misc_feature (351)..(351): n is a, c, g, or t
  misc_feature (384)..(384): n is a, c, g, or t
  misc_feature (391)..(391): n is a, c, g, or t
  misc_feature (461)..(462): n is a, c, g, or t
  misc_feature (529)..(529): n is a, c, g, or t
  misc_feature (578)..(578): n is a, c, g, or t
  misc_feature (786)..(786): n is a, c, g, or t
tttataaaaggttatgggagagctttatttaaaaaaccccccccaggggaagggacccccccaaaattttttaaaggcccttccacgataggaggggtcaccaaaagccccccggtagctttcgcccactcagaatgacacgggcacttaacttcagaatttccgttacttagtggcatgtatatcctagttatcgtcataaagtgcatggctacatatctactacagatagaagtatttctcatgagtcagaacatggttcattcacaataccatcatgctnacacntntnagncanancanganagnagngngatctatgtgtactaagatgttctgtttgtaatatgngtgtgtgtgtttatgttgcttaagagatcaaanctgaaanatgagaatcagaaatgctcttgttattttttgctgtgttacagcttgttaatgctctactgtctttgttnnaagagagatttgttcactgcccagctcgttttgtgtcctgagccctatgcccagcccaccttataantcatgcctgtttagatgtttgattttgttctgtttgctattgttatctnaaaggtgtataactctgacatgccagacatcaaattaagctcaaattaagctctcgtttaaatgtttaaacacctaatttatattctaattgatcccagccactgatgcatgtactttagctacttctgctaaataagcatattaattttccacatcaggccatcagatcttgagaaccaacagttatctagtccgtgtctacttgtncacctgcatgcagccttcattaattttgtagcaaaatataaagtgatcatt

SEQ ID NO: 514667 - DNA, 399 bp, Homo sapiens
  misc_feature (74)..(74): n is a, c, g, or t
  misc_feature (117)..(117): n is a, c, g, or t
  misc_feature (159)..(159): n is a, c, g, or t
  misc_feature (223)..(223): n is a, c, g, or t
  misc_feature (225)..(225): n is a, c, g, or t
  misc_feature (319)..(319): n is a, c, g, or t
  misc_feature (349)..(349): n is a, c, g, or t
aaaaaaaaaaacttagctgggcgtggtggcaggcgcctgtaatcccagctgcccaggaggctgaggcgggagantggcatgagcccgggaggtggaggttgcagtgagccgagattntgccactgcactccaggctgggcaacagagtgagactctgtntcaaaaaaaaaaaaaacaaaaaagagctaaaagaccagactgggcaacatggcaaaaccctgtntntaccaaaattacaaaattttagccaggagtggtcatctgtgcctgtggtcccagctgctcgggaggctaaggtgggaggttccacatgggcttnggggaggcagaggtttacaaatgaaactgnagattgttgctaacttacactccaccctggggtgacagaggggacccagg

SEQ ID NO: 514668 - DNA, 344 bp, Homo sapiens
  misc_feature (45)..(45): n is a, c, g, or t
  misc_feature (48)..(50): n is a, c, g, or t
  misc_feature (136)..(136): n is a, c, g, or t
  misc_feature (272)..(273): n is a, c, g, or t
  misc_feature (275)..(275): n is a, c, g, or t
  misc_feature (278)..(278): n is a, c, g, or t
  misc_feature (282)..(285): n is a, c, g, or t
  misc_feature (287)..(287): n is a, c, g, or t
ctcgtgccgaattcggcacgctaccttgaaaagtgcattgcttangcnnngagccatgatcaggcattggttggggataagtcgctggcattttggttgatggatgccgaaatgtatacaaacatgagtgtcctgnctccttttactccagttattgatcgtggaatacagcttcattgattcgactcattacgcatgggcttggtggagaaggctatctcaatttcatgggtaatgaatttgggcatcctgaatggttagacttcccaagnnangancttnnnngntacaagttcctaaataattttgacagggatatgaatagattggggattggttggctt

SEQ ID NO: 514669 - DNA, 839 bp, Homo sapiens
  misc_feature (283)..(283): n is a, c, g, or t
  misc_feature (288)..(288): n is a, c, g, or t
  misc_feature (290)..(290): n is a, c, g, or t
  misc_feature (292)..(292): n is a, c, g, or t
  misc_feature (295)..(295): n is a, c, g, or t
  misc_feature (298)..(298): n is a, c, g, or t
  misc_feature (300)..(300): n is a, c, g, or t
  misc_feature (303)..(303): n is a, c, g, or t
  misc_feature (306)..(306): n is a, c, g, or t
  misc_feature (309)..(309): n is a, c, g, or t
  misc_feature (312)..(312): n is a, c, g, or t
  misc_feature (314)..(314): n is a, c, g, or t
  misc_feature (351)..(351): n is a, c, g, or t
  misc_feature (384)..(384): n is a, c, g, or t
  misc_feature (391)..(391): n is a, c, g, or t
  misc_feature (461)..(462): n is a, c, g, or t
  misc_feature (529)..(529): n is a, c, g, or t
  misc_feature (578)..(578): n is a, c, g, or t
  misc_feature (838)..(838): n is a, c, g, or t
tttataaaaggttatgggagagctttatttaaaaaaccccccccaggggaagggacccccccaaaattttttaaaggcccttccacgataggaggggtcaccaaaagccccccggtagctttcgcccactcagaatgacacgggcacttaacttcagaatttccgttacttagtggcatgtatatcctagttatcgtcataaagtgcatggctacatatctactacagatagaagtatttctcatgagtcagaacatggttcattcacaataccatcatgctnacacntntnagncanancanganagnagngngatctatgtgtactaagatgttctgtttgtaatatgngtgtgtgtgtttatgttgcttaagagatcaaanctgaaanatgagaatcagaaatgctcttgttattttttgctgtgttacagcttgttaatgctctactgtctttgttnnaagagagatttgttcactgcccagctcgttttgtgtcctgagccctatgcccagcccaccttataantcatgcctgtttagatgtttgattttgttctgtttgctattgttatctnaaaggtgtataactctgacatgccagacatcaaattaagctcaaattaagctctcgtttaaatgtttaaacacctaatttatattctaattgatcccagccactgatgcatgtactttagctacttctgctaaataagcatattaattttccacatcaggccatcagatcttgagaaccaacagttatctaagaaatttcccgtggtcttactaaatggttttcaccctgccatggccagcccttcatttaatttttggnc

SEQ ID NO: 514670 - DNA, 228 bp, Homo sapiens
gtgagggggatacaggtgtatacaccacgcctagctaattctttattttgttgtgtagggacagtgtcttactagtgttgcccacgctggtctcaaattcctgcttcaagccatcctcctacctcggtctcccaaagtgctgaggttacaggcgtgagccagcacacctggccttacatcatttgtgaaaagaagaggagcctgtctttgctcctgcgaaccatataa

SEQ ID NO: 514671 - DNA, 450 bp, Homo sapiens
agctgtggacaattatttggttctttacgtacatgcataattctagcaaaaataaaaactaaattcgaagaaaaaaagaaggaaggaatcaaggggcaaaagctgccacaggaactgaggatgttcccaaagatgtgatcccacacccacaaggcctgggagagtgttaggttgcagaggcgcaaagatcccgcataggacacctgctggcttccctgctttcatgggcatgcctcaggcagaggtgatgcctgcatgcctgggaggatgagagcgtcgttcctcttctggcaggagaatctgttctgtgcactttcagaatgactgttaggagggaggatcaaactaaatgaaagatgacccagccctctccacacctttttaaatggaaggttctttgctaaaagctccagcgtattttcatgcatggccagggttgcatgggtaccg

SEQ ID NO: 514672 - DNA, 204 bp, Homo sapiens
ttttctggtacattcgtctccttagaaggagacattagaagcagtaaacatcccagagatagtaactttcttcttcagaactttttccaacaaatcactcgcattggctgatgaagaagaagatgactgaaaaggtttatactttctgggagtaccactatcttgcgctgtaattcctgtaggtatttctggacttcatatggc

SEQ ID NO: 514673 - DNA, 189 bp, Homo sapiens
ctacgacataatggcagctgcctccactgagcttcaggacgtcatcctgatctccgtgggaacattttcgttgctgtcggtgctggcaggatgctgtttcttcctggtcctgaattatggaggcctgatttactactggtttcatactaccacgaagccatccctattactagatagaagagttattta

SEQ ID NO: 514674 - DNA, 836 bp, Homo sapiens
tatggtttgagggggaatgctggaaattgtaaggggtatggagacatgtcatataagtaatgctagggtgagtggtaggaagtttttaacataggaggtgtatagagtgggtcgtagctggaactcagggggtatgctagtccggaattcatcaaaaacatgggaggttaaaagtcagggctctggtggtgcaacacaacatattgttgtgttgtacgacgtttcacgtggggacgagttgcgtcatattgtttgtccctaagtgaagatttgtcagttgggttgaggggtgtatcattcatacataaaagtgttgtggtgtatacggctatgacaaaatagtggcgaaagggcgcctgcggcgtatccgatgttagcaagccttgagactagttcggactccccttcggccaaggtcagaaagggggtcacgagagtggtctactgactagttgttggagataaatcattatatatggccaagtgggtcatagaaggcgcaaggggaagtaaactccagagggtggtccctctgctagctggcagaccacggggctggacagacgtgttaaaaggagcccactatataaaaacagtgtcgcaatagtaaaatttgcgtggctaagggttgcacttcattattgaagatggtcgcggggctactagctcccgaatgtgcagccgacaaaggcgaacattggcttcggatgctacccctgaatccaaagggattggctacaacggcaaggacaagggggttcgaaaacatgtgagcccggtgcaggttacccgggatagtaaaggagaggagcacacaaacgtatgaaacaaccagg

SEQ ID NO: 514675 - DNA, 104 bp, Homo sapiens
ctcggtaccacatttctaggggagtgggtccgctccaccagtatgccagcaccggggcagtgcagctcagtagccctgtggcggactacagtgacctggggtat

SEQ ID NO: 514676 - DNA, 855 bp, Homo sapiens
ggacgatcaaagctactgtcctcaaggttggaacaggcacgagagtgtcgcgagtcctctatctagatagcacggaatggcagtgtatatgggctacctagcgtggacacgagcaagggcggcatacacggatgcttgataaccgttgagaatgccagcgtgtgtcgcaagtatcgtctgagtcaggcatgcagaaccgtgagggtggtgacgtggactgtcacagctactatagcaaacgcatactcccgaggccctctatgtaggagccaaggccattcagctagaacagtaatagtgattcaagctctgcgtacgtctcaaggggaggcagcacgttagtgaatcatgggccaggagatccacaggaagcgaagtaagtccacgtttcgtggcacggcccatacggcgtcgcaccttgctcgcttagatcgttatggaacggtcttagtcgaagtgttagcttgagcctccaagcatgtattacgaagaagcaatggtaatggctaacaacgtagtacaacaactctggggagcaaatgcagcagaaccttaccctgttagccagccgtgggtcttgaagagccagtgacacaggagaaagccaaaagcgattgataagatagaagccctgagccaggaggccatgattacatcaaaggctgtggtgaaaaaacgcagaactacttagcagagaacagaactatgacgatggaattgcttatgctgaggaacgcactggctaatcagagtgactggtgtcctgcatcggatcctaggagaattccttgtaagctgtccactgagtatcaggaggcacatggaccgtatagtataagacctaagaaggaccca

SEQ ID NO: 514677 - DNA, 990 bp, Homo sapiens
gcgattttcaagattctaaagctcaatgcaacgtgacacagttaagtgataaactccagatctgatcaagagtccggattctaacagtcctatgctgggggggtgtgctgacaactgaggctcaggtgccttacatctttgttctaatcacagtgtggcatatgagcctgccctcactccctctgcaggaatccctttagcgacctgagaccctactgaagctggctgtgtagaaataaggggcctgcagttggaggattatcaggtatcacgatttgcatggattcccttctgggcttcatgactggaaactttggtgagggctgctttttcttaagtgcccacatatgatggacgcggtggaacataacttgtgaatgtataagagtcgataagattctcagggtctacacatcagggagtgacaagaaatgggggctccttgtgttagatgggcgtgaatttttacctcggtgagtatgagggaagatgtctctggggctgcattctcctcgttgataatggtgattccctcacaatgtatggccaccctgtgaacaggcggtaaaaacacaacggcgaggtggggccatttggttactgcccggatgttaaaacggccatgggccttcataccaaaccgatgtgttgacccaacctgtacgtgggccgggtggtataccgcttgcggaaagtgccgcttactgctaattggacggggcccagtgtttactcgcttcgtgtcaaaagggggggcataatatattcagctggaccatacccgtaagagaggggcaatgtttcggaaggcaattgacctaatgcgtttggagaacaagccattataggggactcccttgaatgaacaaggaaattgctcgacaacgaacctgaagaatattctttaaataaattcgggaagatgtccccaccctgaaacttgagtatgcccggtgtagttcgccaagattgcgtgttacataagctata

SEQ ID NO: 514678 - DNA, 547 bp, Homo sapiens
  misc_feature (22)..(22): n is a, c, g, or t
gggtttggaacaacccccctgncttcccggcgagggccccaaccagaagtgtggcccatccgcttcctgaatgctgggaaggcgcagaaattccaacccaagtttgaagaatgccggaaagggttcgaaaagaaaaaaaaaaaagggtccggccaaaattgtccttcccaaaaaggggcggaaaagctaaaagctctctcggttaaggaggagccccaggaggatgctgaggagaaaccataaatcgtctttttttatttttttttcccctccttccccccccctttttaaaaaaattttaccccgcccccctttttcgggttggttttattttttcctttttcaaaggggcgttaaataaaaaactggaccccaccctccgggtggttttttttttggttttaaggttttgccccattgaaaaaggcttcagaaaatcccttcccccgtcatgaaaaagggctgggctaacctttttttccatagtgggaacccttttttatagtcctccaaaatagtgaataaaaaacccctttgggacctggga

SEQ ID NO: 514679 - DNA, 157 bp, Homo sapiens
tgcacacatcaagacgtctacatcataagcatcctacaaagccaatatgacattccataagacatggtttcggcccactctccattcagtcgtaactaataaaatatatgttgggtcgaaaccatctcaaatggatttcatatagggaaagaaggct

SEQ ID NO: 514680 - DNA, 171 bp, Homo sapiens
acctgatgcctctgattactctcatcgctacctccctggacagcgcctatagcgctcgaataattcttctcaccctaacaggtcaacctcgccttccccacccttactaacattaacgaaaataagccccaccctactaaaccccattaaacgcctggcagaagcaggaag

SEQ ID NO: 514681 - DNA, 329 bp, Homo sapiens
gcagtcaggtgaatgcataaggggcttacctccttgtgtggagcacaggatgatgaagtgcgtcattctatctctgttgacgtacacagaaggtgctgcgcattccgcctatgtgatcatatgcgatattggttgttctctgtggagaatatatcttaaaaacccatggggtttcttctatccccgaatcccccgggatgaagcttttgggggctactaccaggagcaagttaatctccaggaacggaggaaatacctgaaacacaggctcattgtggtctctaatagacaggtggattaactggaaaaaacggcgtttgaaagacgca

SEQ ID NO: 514682 - DNA, 697 bp, Homo sapiens
ggtagacccacaaccttgggacctaccactccgcgtagtaatataatgaaaatatacttcaaatcccgttttcttctttctcctaaacaacttctgtgtcgccggacagccgctctgtcgcggtggtgcgtaccaatgcccaccattgttctcactactgcatagggtcttctcacccacagagtatctaatcctcgtatcgaagagagagctggtcgtgtgcagtgtgctgagagaagcgtgtcccactgcacccatgtggggccctcctcagaggagacgtcgttcacacaggcgtccacacactgggtagcacctcgtggcgacttctcttacccctcgactctcgcgtcacactccccctacgtttctgggtttatgattcacttggggtatcacttgttgttattgagaatatgagaaaagatgaagagtataaagattgatctgtgttaggtaattgttagtcctggagacagtactcttcaaagtagatattgggaggttttgtcacgctgtgacgtgtcaggcatttacccttaagattaaagtcggggtttccaataaataaataattatttttgttagtaatttgtcaggtgtggtgatgcatgcatgtagtcccaaatacattaggaggctgaggtggaaggatacatgaggcaaggaaggtcaatacaacagggactgtgatatg

SEQ ID NO: 514683 - DNA, 1203 bp, Homo sapiens
gagctcggtacccccccgactagcccgacaggatgcctccggggacctgtacaccacgagcagccagctgaccctgccggccacacagtgcctagccggcaagtccgtgacatgccacgtgaagcactacacgaatcccagccaggatgtgactgtgccctgcccagttccctcaactccacctaccccatctccctcaactccacctaccccatctccctcatgctgccacccccgactgtcactgcaccgaccggccctcgaggacctgctcttaggttcagaagcgaacctcacgtgcacactgaccggcctgagagatgcctcaggtgtcaccttcacctggacgccctcaagtgggaagagcgctgttcaaggaccacctgagcgtgacctctgtggctgctacagcgtgtccagtgtcctgccgggctgtgccgagccatggaaccatgggaagaccttcacttgcactgctgcctaccccgagtccaagaccccgctaaccgccaccctctcaaaatccggaaacacattccggcccgaggtccacctgctgccgccgccgtcggaggagctggccctgaacgagctggtgacgctgacgtgcctggcacgcggcttcagccccaaggacgtgctggttcgctggctgcaggggtcacaggagctgccccgcgagaagtacctgacttgggcatcccggcaggagcccagccagggcaccaccaccttcgctgtgaccagcatactgcgcgtggcagccgaggactggaagaagggggacaccttctcctgcatggtgggccacgaggccctgccgctggccttcacacagaagaccatcgaccgcttggcgggtaaacccacccatgtcaatgtgtctgttgtcatggcggaggtggacggcacctgctactgagccgcccgcctgtccccacccctgaataaactccatgctcccccaaaaaaaaaaaaaaaaaaataaaaaaaatctcggagggcgatcatattgtcgggggcgcgggagaaaaggggggtatgtagaatgggggacactgggggcaatagggcgtggtttccttggacccaagttttttttgtaacaaggtgggggtaagattcgtggcgggagtcctcccaatatatgggaggccggatataaaatatcggataaggccagtgttaccctgggtttattgg

SEQ ID NO: 514684 - DNA, 135 bp, Homo sapiens
cttcgattacgtaaactacctttgcttagtgatggctagctcgtccttgtgcttctgcaggtcttttccattcagctctgttcccataacttcttccgctccctatttgccgtccgtcatcgaagcaaccattag

SEQ ID NO: 514685 - DNA, 177 bp, Homo sapiens
accgatattgacgcgtctcctgggttgggccggatccaccctgtaaggtacatcacgcgcccggagctggcctccagcgaggggttccagacggcccagcgaaccatgtgcatgcaggccaaggtggacgaggcggtgaccgacgctgcctagaaggggaacaaggcacaccagtcg

SEQ ID NO: 514686 - DNA, 1438 bp, Homo sapiens
tggtgctgtgagacttgagaacggctgtctattcatgtgtgaaagactttagaggcggtatagtggaaggtccctttgatcactggggccagggaccctggtcaccgtctcctcagcatccccgaccagccccaaggtcttcccgctgagcctctgcagcacccagccagatgggaacgtggtcatcgcctgcctggtccagggcttcttcccccaggagccactcagtgtgacctggagcgaaagcggacagggcgtgaccgccagaaacttcccacccagccaggatgcctccggggacctgtacaccacgagcagccagctgaccctgccggccacacagtgcctagccggcaagtccgtgacatgccacgtgaagcactacacgaatcccagccaggatgtgactgtgccctgcccagttccctccctcaactccacctaccccatctccctcatgctgccacccccgactgtcactgcaccgaccggccctcgaggacctgctcttaggttcagaagcgaacctcacgtgcacactgaccggcctgagagatgcctcaggtgtcaccttcacctggacgccctcaagtgggaagagcgctgttcaaggaccacctgagcgtgacctctgtggctgctacagcgtgtccagtgtcctgccgggctgtgccgagccatggaaccatgggaagaccttcacttgcactgctgcctaccccgagtccaagaccccgctaaccgccaccctctcaaaatccggaaacacattccggcccgaggtccacctgctgccgccgccgtcggaggagctggccctgaacgagctggtgacgctgacgtgcctggcacgcggcttcagccccaaggacgtgctggttcgctggctgcaggggtcacaggagctgccccgcgagaagtacctgacttgggcatcccggcaggagcccagccagggcaccaccaccttcgctgtgaccagcatactgcgcgtggcagccgaggactggaagaagggggacaccttctcctgcatggtgggccacgaggccctgccgctggccttcacacagaagaccatcgaccgcttggcgggtaaacccacccatgtcaatgtgtctgttgtcatggcggaggtggacggcacctgctactgagccgcccgcctgtccccacccctgaataaactccatgctcccccaaaaaaaaaaaaaaaaaaataaaaaaaatctcggagggcgatcatattgtcgggggcgcgggagaaaaggggggtatgtagaatgggggacactgggggcaatagggcgtggtttccttggacccaagttttttttgtaacaaggtgggggtaagattcgtggcgggagtcctcccaatatatgggaggccggatataaaatatcggataaggccagtgttaccctgggtttattgg

SEQ ID NO: 514687 - DNA, 151 bp, Homo sapiens
aggactcactgagtagcgtactgtctgcggaaaaataaggatcggcatggtacgccacatacatgcccggtaccagacggaaaatttctgataaatcccaggctccggaatcgcggatcatctgatggtcaatgacggtgactgcaacggg

SEQ ID NO: 514688 - DNA, 1445 bp, Homo sapiens
tggtgctgtgagacttgagaacggctgtctattcatgtgtgaaagactttagaggcggtatagtggaaggtccctttgatcactggggccagggaccctggtcaccgtctcctcagcatccccgaccagccccaaggtcttcccgctgagcctctgcagcacccagccagatgggaacgtggtcatcgcctgcctggtccagggcttcttcccccaggagccactcagtgtgacctggagcgaaagcggacagggcgtgaccgccagaaacttcccacccagccaggatgcctccggggacctgtacaccacgagcagccagctgaccctgccggccacacagtgcctagccggcaagtccgtgacatgccacgtgaagcactacacgaatcccagccaggatgtccagttccctcaactccacctaccccatctccctcaactccacctaccccatctccctcatgctgccacccccgactgtcactgcaccgaccggccctcgaggacctgctcttaggttcagaagcgaacctcacgtgcacactgaccggcctgagagatgcctcaggtgtcaccttcacctggacgccctcaagtgggaagagcgctgttcaaggaccacctgagcgtgacctctgtggctgctacagcgtgtccagtgtcctgccgggctgtgccgagccatggaaccatgggaagaccttcacttgcactgctgcctaccccgagtccaagaccccgctaaccgccaccctctcaaaatccggaaacacattccggcccgaggtccacctgctgccgccgccgtcggaggagctggccctgaacgagctggtgacgctgacgtgcctggcacgcggcttcagccccaaggacgtgctggttcgctggctgcaggggtcacaggagctgccccgcgagaagtacctgacttgggcatcccggcaggagcccagccagggcaccaccaccttcgctgtgaccagcatactgcgcgtggcagccgaggactggaagaagggggacaccttctcctgcatggtgggccacgaggccctgccgctggccttcacacagaagaccatcgaccgcttggcgggtaaacccacccatgtcaatgtgtctgttgtcatggcggaggtggacggcacctgctactgagccgcccgcctgtccccacccctgaataaactccatgctcccccaaaaaaaaaaaaaaaaaaataaaaaaaatctcggagggcgatcatattgtcgggggcgcgggagaaaaggggggtatgtagaatgggggacactgggggcaatagggcgtggtttccttggacccaagttttttttgtaacaaggtgggggtaagattcgtggcgggagtcctcccaatatatgggaggccggatataaaatatcggataaggccagtgttaccctgggtttattgg

SEQ ID NO: 514689 - DNA, 106 bp, Homo sapiens
cgcccttttatctcattttccaaatcttttttatattctttctccctcagaaggttggtgatgtactttacatgtaaaaattctggagtcttgtctaaatccagtg

SEQ ID NO: 514690 - DNA, 311 bp, Homo sapiens
cgtcggattagcgaagccaatatccagctgatcgttgccggccgctcgatgctgccagagcctgctgtcgaccaaccatgccgcgcgcgaacaggcaaccactccagccaaggcagcgcttgagaaaacccgtgcactgatcctcaaggcacgcgccagctttatcaccaaagaaggcatggcccagatcgaccaactggaaacgccgctcaagaactacgaaaacctgctgctgcaggtgttgaccctgcatcagctatccagcctattgcaggataccagcgacgtcaccgagctggcttatccgacca

SEQ ID NO: 514691 - DNA, 1533 bp, Homo sapiens
tggtgctgtgagacttgagaacggctgtctattcatgtgtgaaagactttagaggcggtatagtggaaggtccctttgatcactggggccagggaccctggtcaccgtctcctcagcatccccgaccagccccaaggtcttcccgctgagcctctgcagcacccagccagatgggaacgtggtcatcgcctgcctggtccagggcttcttcccccaggagccactcagtgtgacctggagcgaaagcggacagggcgtgaccgccagaaacttcccacccagccaggatgcctccggggacctgtacaccacgagcagccagctgaccctgccggccacacagtgcctagccggcaagtccgtgacatgccagcgatagacatgtcaacttactgctgaattctcacgactaaggagtgatgacatgtagccctatgccacaattcccatcaatctcacagctataacctcctaatcatctcctcaaagtcgtatcatatgctgctaatcatcctctcattgctagtgatctcgcctgattgatcacgtgcacgcgtatcacgtgacgcttctgaagtgatcacttgactcattatgtgattcagcaaggcagacatcactcgactgatgcacactgaccggcctgagagatgcctcaggtgtcaccttcacctggacgccctcaagtgggaagagcgctgttcaaggaccacctgagcgtgacctctgtggctgctacagcgtgtccagtgtcctgccgggctgtgccgagccatggaaccatgggaagaccttcacttgcactgctgcctaccccgagtccaagaccccgctaaccgccaccctctcaaaatccggaaacacattccggcccgaggtccacctgctgccgccgccgtcggaggagctggccctgaacgagctggtgacgctgacgtgcctggcacgcggcttcagccccaaggacgtgctggttcgctggctgcaggggtcacaggagctgccccgcgagaagtacctgacttgggcatcccggcaggagcccagccagggcaccaccaccttcgctgtgaccagcatactgcgcgtggcagccgaggactggaagaagggggacaccttctcctgcatggtgggccacgaggccctgccgctggccttcacacagaagaccatcgaccgcttggcgggtaaacccacccatgtcaatgtgtctgttgtcatggcggaggtggacggcacctgctactgagccgcccgcctgtccccacccctgaataaactccatgctcccccaaaaaaaaaaaaaaaaaaataaaaaaaatctcggagggcgatcatattgtcgggggcgcgggagaaaaggggggtatgtagaatgggggacactgggggcaatagggcgtggtttccttggacccaagttttttttgtaacaaggtgggggtaagattcgtggcgggagtcctcccaatatatgggaggccggatataaaatatcggataaggccagtgttaccctgggtttattgg

SEQ ID NO: 514692 - DNA, 1224 bp, Homo sapiens
  misc_feature (89)..(89): n is a, c, g, or t
  misc_feature (1211)..(1211): n is a, c, g, or t
gccgtgtattacttgtgcgcgagggggctacgattttcggaggcctaaattctactactatagcatggacgtctggggccaagggaccncggtcaccgtctcctcagcatccccgaccagccccaaggtcttcccgctgagcctctgcagcacccagccagatgggaacgtggtcatcgcctgcctggtccagggcttcttcccccaggagccactcagtgtgacctggagcgaaagcggacagggcgtgaccgccagaaacttcccacccagccaggatgcctccggggacctgtacaccacgagcagccagctgaccctgccggccacacagtgcctagccggcaagtccgtgacatgccacgtgaagcactacacgaatcccagccaggatgtgactgtgccctgcccagttccctcaactccacctaccccatctccctcaactccacctaccccatctccctcatgctgccacccccgactgtcactgcaccgaccggccctcgaggacctgctcttaggttcagaagcgaacctcacgtgcacactgaccggcctgagagatgcctcaggtgtcaccttcacctggacgccctcaagtgggaagagcgctgttcaaggaccacctgagcgtgacctctgtggctgctacagcgtgtccagtgtcctgccgggctgtgccgagccatggaaccatgggaagaccttcacttgcactgctgcctaccccgagtccaagaccccgctaaccgccaccctctcaaaatccggaaacacattccggcccgaggtccacctgctgccgccgccgtcggaggagctggccctgaacgagctggtgacgctgacgtgcctggcacgcggcttcagccccaaggacgtgctggttcgctggctgcaggggtcacaggagctgccccgcgagaagtacctgacttgggcatcccggcaggagcccagccagggcaccaccaccttcgctgtgaccagcatactgcgcgtggcagccgaggactggaagaagggggacaccttctcctgcatggtgggccacgaggccctgccgctggccttcacacagaagaccatcgaccgcttggcgggtaaacccacccatgtcaatgtgtctgttgtcatggcggaggtggacggcacctgctactgagccgcccgcctgtccccacccctgaataaactccaattataanccaagcagcaaat

SEQ ID NO: 514693 - DNA, 90 bp, Homo sapiens
gccctgtatctctgtgccagcagccaattgactagcgggggcagtagcgatgaacagttcttcgggccagggacacggctcaccgtgcta

SEQ ID NO: 514694 - DNA, 424 bp, Homo sapiens
tctttatctgatataccaagcgccaagaaacatcctgtaatatgagggagagatctgcctatacttcccagtaggatttctagggaattcttattattctgatattccgtgcaaaacagttctattcgctctcgtgtcaaatttacagtcttctagatgagtgcttagagttgacttgtcaagctcggtgctttcctgcctctagtatgtcagttgcagctgctgcctgacaatgttgtaaaaccactgggtcgatatgtttcaagtctggatgatctaacacggactcgtccggctgggtgtccaggagactctggaatgccgcccggagtcgaagcgtgaaggcgttggagtcgaaggaagcggggatcccgacagcatctggaagcctttctgcacagagtccgagaagacccattgtgag

SEQ ID NO: 514695 - DNA, 244 bp, Homo sapiens
cggaaagtgaatagaggcaggtcttactatgtgcccaggctcgtctcaaattccggggctcaagtgatcctcatgcctcctaaagtgcggaattacaggtataagccacctcacccagcctgattcactatactatttttatttttatatgagatggagtctcgctctgtcacccaggctagagtgcagtggtgtgatcttggctcactgcaacctctgcctcccaggttcaagcgattctccg

SEQ ID NO: 514696 - DNA, 422 bp, Homo sapiens
atcccatcatttatccgaggatcaagccgggcgggcagatccaagtccagagccaacttcaaatggcgtgcggggcgtggctcgtatccaacgccacgcacgtgcttgagagcgagacgcccaatggccaatggtttaccggcattcttgggagtctgaaaattggctgatacacaggaaaacgcctacctcggggctgccaatcaggccaccggagcggaccccaacaatctgcaatctttcctgatctggcagattctgcggtcgataagcggcgccaaactcgtcaaggtggttggcaccaagaacaacggcggcgtgagcccggtcggcttcgtcgacgtgcagcccttggtcaaccagcttgacggatggaataacgcgacgcctcacggcaccgtttatcacctaccgtacttccg

SEQ ID NO: 514697 - DNA, 1347 bp, Homo sapiens
  misc_feature (89)..(89): n is a, c, g, or t
gccgtgtattacttgtgcgcgagggggctacgattttcggaggcctaaattctactactatagcatggacgtctggggccaagggaccncggtcaccgtctcctcagcatccccgaccagccccaaggtcttcccgctgagcctctgcagcacccagccagatgggaacgtggtcatcgcctgcctggtccagggcttcttcccccaggagccactcagtgtgacctggagcgaaagcggacagggcgtgaccgccagaaacttcccacccagccaggatgcctccggggacctgtacaccacgagcagccagctgaccctgccggccacacagtgcctagccggcaagtccgtgacatgccacgtgaagcactacacgaatcccagccaggatgtgactgtgccctgcccagttccctcaactccacctaccccatctccctcaactccacctaccccatctccctcatgctgccacccccgactgtcactgcaccgaccggccctcgaggacctgctcttaggttcagaagcgaacctcacgtgcacactgaccggcctgagagatgcctcaggtgtcaccttcacctggacgccctcaagtgggaagagcgctgttcaaggaccacctgagcgtgacctctgtggctgctacagcgtgtccagtgtcctgccgggctgtgccgagccatggaaccatgggaagaccttcacttgcactgctgcctaccccgagtccaagaccccgctaaccgccaccctctcaaaatccggaaacacattccggcccgaggtccacctgctgccgccgccgtcggaggagctggccctgaacgagctggtgacgctgacgtgcctggcacgcggcttcagccccaaggacgtgctggttcgctggctgcaggggtcacaggagctgccccgcgagaagtacctgacttgggcatcccggcaggagcccagccagggcaccaccaccttcgctgtgaccagcatactgcgcgtggcagccgaggactggaagaagggggacaccttctcctgcatggtgggccacgaggccctgccgctggccttcacacagaagaccatcgaccgcttggcgggtaaacccacccatgtcaatgtgtctgttgtcatggcggaggtggacggcacctgctactgagccgcccgcctgtccccacccctgccctgacgctgtaaactgccctgacgctgtaaactgccctgacgctgtaaactgccctgacgctgtaaactgccctgacgctgtaaactgccctgacgctgtaaactgccctgacgctgtaaactgccctgacgctgtaaactgaggtgaacagc

SEQ ID NO: 514698 - DNA, 153 bp, Homo sapiens
  misc_feature (7)..(7): n is a, c, g, or t
  misc_feature (11)..(11): n is a, c, g, or t
  misc_feature (19)..(19): n is a, c, g, or t
  misc_feature (49)..(49): n is a, c, g, or t
  misc_feature (57)..(57): n is a, c, g, or t
  misc_feature (136)..(136): n is a, c, g, or t
ggaaagngggnccttgggnccccccctccccccttttttttcccccccnttaaaggntttaagggtttttgtttccccgggggggggggggggccccccggggtttccttttcccttttttttggcccgttttatnaaaggggccccccttta

SEQ ID NO: 514699 - DNA, 1248 bp, Homo sapiens
  misc_feature (89)..(89): n is a, c, g, or t
gccgtgtattacttgtgcgcgagggggctacgattttcggaggcctaaattctactactatagcatggacgtctggggccaagggaccncggtcaccgtctcctcagcatccccgaccagccccaaggtcttcccgctgagcctctgcagcacccagccagatgggaacgtggtcatcgcctgcctggtccagggcttcttcccccaggagccactcagtgtgacctggagcgaaagcggacagggcgtgaccgccagaaacttcccacccagccaggatgcctccggggacctgtacaccacgagcagccagctgaccctgccggccacacagtgcctagccggcaagtccgtgacatgccacgtgaagcactacacgaatcccagccaggatgtgactgtgccctgcccagttccctcaactccacctaccccatctccctcaactccacctaccccatctccctcatgctgccacccccgactgtcactgcaccgaccggccctcgaggacctgctcttaggttcagaagcgaacctcacgtgcacactgaccggcctgagagatgcctcaggtgtcaccttcacctggacgccctcaagtgggaagagcgctgttcaaggaccacctgagcgtgacctctgtggctgctacagcgtgtccagtgtcctgccgggctgtgccgagccatggaaccatgggaagaccttcacttgcactgctgcctaccccgagtccaagaccccgctaaccgccaccctctcaaaatccggaaacacattccggcccgaggtccacctgctgccgccgccgtcggaggagctggccctgaacgagctggtgacgctgacgtgcctggcacgcggcttcagccccaaggacgtgctggttcgctggctgcaggggtcacaggagctgccccgcgagaagtacctgacttgggcatcccggcaggagcccagccagggcaccaccaccttcgctgtgaccagcatactgcgcgtggcagccgaggactggaagaagggggacaccttctcctgcatggtgggccacgaggccctgccgctggccttcacacagaagaccatcgaccgcttggcgggtaaacccacccatgtcaatgtgtctgttgtcatggcggaggtggacggcacctgctactgagtctcggcgccggccactttttaacaaacccaggcgggcgctttgatattaaaaatcttcccattggctcccttatgtct

SEQ ID NO: 514700 - DNA, 1222 bp, Homo sapiens
tgggttgttctcctggagttttgctgaagtgtcagtgctggtgcaaggagctccgggggacgaagacggccgtgcacaatggagctgggtgagaactgagctcgcagtgctgcagtgcctggacatgtgatgtcgggccgcaggccatgcagtaccaggtcctgaatgaggtggtgatattgacagaggcccctcctcctacctgtaccaatgtggatgtctacctggacggacacctcatcaccatggtgcagggcgacggagtgatacgtgtacaccccgactgggcagcaaggatgtatgacggacgcgagacgggagactccatgcatccaacccaacgtgcctggaccatcatagatacacgcccatactagacacccaactacgcatgatccataacacgagaaccaatacgatggaaccaccgaaaaggaagatcagcagcagtagaagaatcaatgcaatgaccaccatgacagcacacggacaacaacagaaacttgggcatgaaccaataatgacccggcgcacagggacacgacagaccaacgacgcatacaagcacaatagagcagaacaagcgatcccagacaatccaccgaaaccaacaatgagactccacacaacataccgcccacccactcctcggtgtagccgggagacaccgcagaaagaacgacacgccccaggggacaggacagaaagacccaacgcacgaaagacggcactagcaaatagtgcacaacagattacaggagacagacaccggcaaaagagcccgacacaacgaagggacgagacgggagcgaacacagcgaaggcaggcgacggaacgagcgcacacaagggaaacaaaagcacaaccaaataccaagagtaccagaacaacgaaccgacacccgccaacaacagcagcacacagcgagaaccactacagaaggagacacagcaaccacaaacccagggaaaaccaggaacgagggaaaaaccgcacagttcgcaccaagacgggcgcacaggccacaaatcaaccatagagacaagagaaagccaccgaaacaaagaagacacgggggcaacacgccgccagaagggacccaccaaaacagcacaaacaacaaaaaaaagaaccgaacacaaagatagaagaagcacaacacacaaaacgaacaacgaacaacaaaacacaaagcaaaggacaagaccaggcagaacgaag

SEQ ID NO: 514701 - DNA, 1837 bp, Homo sapiens
  misc_feature (89)..(89): n is a, c, g, or t
  misc_feature (1453)..(1453): n is a, c, g, or t
  misc_feature (1478)..(1478): n is a, c, g, or t
  misc_feature (1482)..(1482): n is a, c, g, or t
gccgtgtattacttgtgcgcgagggggctacgattttcggaggcctaaattctactactatagcatggacgtctggggccaagggaccncggtcaccgtctcctcagcatccccgaccagccccaaggtcttcccgctgagcctctgcagcacccagccagatgggaacgtggtcatcgcctgcctggtccagggcttcttcccccaggagccactcagtgtgacctggagcgaaagcggacagggcgtgaccgccagaaacttcccacccagccaggatgcctccggggacctgtacaccacgagcagccagctgaccctgccggccacacagtgcctagccggcaagtccgtgacatgccacgtgaagcactacacgaatcccagccaggatgtgactgtgccctgcccagttccctcaactccacctaccccatctccctcaactccacctaccccatctccctcatgctgccacccccgactgtcactgcaccgaccggccctcgaggacctgctcttaggttcagaagcgaacctcacgtgcacactgaccggcctgagagatgcctcaggtgtcaccttcacctggacgccctcaagtgggaagagcgctgttcaaggaccacctgagcgtgacctctgtggctgctacagcgtgtccagtgtcctgccgggctgtgccgagccatggaaccatgggaagaccttcacttgcactgctgcctaccccgagtccaagaccccgctaaccgccaccctctcaaaatccggaaacacattccggcccgaggtccacctgctgccgccgccgtcggaggagctggccctgaacgagctggtgacgctgacgtgcctggcacgcggcttcagccccaaggacgtgctggttcgctggctgcaggggtcacaggagctgccccgcgagaagtacctgacttgggcatcccggcaggagcccagccagggcaccaccaccttcgctgtgaccagcatactgcgcgtggcagccgaggactggaagaagggggacaccttctcctgcatggtgggccacgaggccctgccgctggccttcacacagaagaccatcgaccgcttggcggattggcagatgccgcctccctatgtggtgctggacttgccgcaggagaccctggaggaggagacccccggcgccaacctgtggcccaccaccatcaccttcctcaccctcttcctgctgagcctgttctatagcacagcactgaccgtgaccagcgtccggggcccatctggcaacagggagggcccccagtactgagcgggagccggcaaggcacagggaggaagtgtggaggaacctcttggagaagccagctatgcttgccagaactcagccctttcagacatcaccgacccgcccttactcacatgccttccaggtgcaataaagtggccccaaggaaaatgnaaaaacaaaaaaaaaaaaaaaaaanaaanaaaaaaaaaaaaaaaaaaaaaaaaaaaaaaaaaaaacaaaaaaaaggggggcggcgcgcgccgcctccgctgtctagattctccctcccgcggggcccgccccccttctctcgccgccgtccccctcctcttgtttgtcaacgagaggggcccccccccggcgggggcgcgcttctttatatcatcctggcggagcggcggggcgcgccccctgtcttcttcaccagcccctctcgctgggcggcaacactcctcgtctgctggcgcggtgcctcttctctcggcgggggcgcccccctccttcccccgtgggggggcggccgccactctcgtggccgcccgctcccctgctcga

SEQ ID NO: 514702 - DNA, 1410 bp, Homo sapiens
  misc_feature (89)..(89): n is a, c, g, or t
  misc_feature (1339)..(1340): n is a, c, g, or t
  misc_feature (1348)..(1349): n is a, c, g, or t
  misc_feature (1352)..(1352): n is a, c, g, or t
  misc_feature (1362)..(1362): n is a, c, g, or t
  misc_feature (1376)..(1376): n is a, c, g, or t
  misc_feature (1379)..(1379): n is a, c, g, or t
  misc_feature (1382)..(1382): n is a, c, g, or t
gccgtgtattacttgtgcgcgagggggctacgattttcggaggcctaaattctactactatagcatggacgtctggggccaagggaccncggtcaccgtctcctcagcatccccgaccagccccaaggtcttcccgctgagcctctgcagcacccagccagatgggaacgtggtcatcgcctgcctggtccagggcttcttcccccaggagccactcagtgtgacctggagcgaaagcggacagggcgtgaccgccagaaacttcccacccagccaggatgcctccggggacctgtacaccacgagcagccagctgaccctgccggccacacagtgcctagccggcaagtccgtgacatgccacgtgaagcactacacgaatcccagccaggatgtgactgtgccctgcccagttccctcaactccacctaccccatctccctcaactccacctaccccatctccctcatgctgccacccccgactgtcactgcaccgaccggccctcgaggacctgctcttaggttcagaagcgaacctcacgtgcacactgaccggcctgagagatgcctcaggtgtcaccttcacctggacgccctcaagtgggaagagcgctgttcaaggaccacctgagcgtgacctctgtggctgctacagcgtgtccagtgtcctgccgggctgtgccgagccatggaaccatgggaagaccttcacttgcactgctgcctaccccgagtccaagaccccgctaaccgccaccctctcaaaatccggaaacacattccggcccgaggtccacctgctgccgccgccgtcggaggagctggccctgaacgagctggtgacgctgacgtgcctggcacgcggcttcagccccaaggacgtgctggttcgctggctgcaggggtcacaggagctgccccgcgagaagtacctgacttgggcatcccggcaggagcccagccagggcaccaccaccttcgctgtgaccagcatactgcgcgtggcagccgaggactggaagaagggggacaccttctcctgcatggtgggccacgaggccctgccgctggccttcacacagaagaccatcgaccgcttggcggattggcagatgccgcctccctatgtggtgctggacttgccgcaggagaccctggaggaggagacccccggcgccaacctgtggcccaccaccatcaccttcctcaccctcttcctgctgagcctgttctatagcacagcactgaccgtgaccagcgtccggggcccatctggcaacagggagggcccccagtactgagcgggagccggcaagccaggagagtgtggggacctnnggaaaacnngtntgttgcaaancagcccttaagttngancgnctataaaggtccagagaaaaaggcccgg

SEQ ID NO: 514703 - DNA, 1318 bp, Homo sapiens
  misc_feature (89)..(89): n is a, c, g, or t
gccgtgtattacttgtgcgcgagggggctacgattttcggaggcctaaattctactactatagcatggacgtctggggccaagggaccncggtcaccgtctcctcagcatccccgaccagccccaaggtcttcccgctgagcctctgcagcacccagccagatgggaacgtggtcatcgcctgcctggtccagggcttcttcccccaggagccactcagtgtgacctggagcgaaagcggacagggcgtgaccgccagaaacttcccacccagccaggatgcctccggggacctgtacaccacgagcagccagctgaccctgccggccacacagtgcctagccggcaagtccgtgacatgccacgtgaagcactacacgaatcccagccaggatgtgactgtgccctgcccagttccctcaactccacctaccccatctccctcaactccacctaccccatctccctcatgctgccacccccgactgtcactgcaccgaccggccctcgaggacctgctcttaggttcagaagcgaacctcacgtgcacactgaccggcctgagagatgcctcaggtgtcaccttcacctggacgccctcaagtgggaagagcgctgttcaaggaccacctgagcgtgacctctgtggctgctacagcgtgtccagtgtcctgccgggctgtgccgagccatggaaccatgggaagaccttcacttgcactgctgcctaccccgagtccaagaccccgctaaccgccaccctctcaaaatccggaaacacattccggcccgaggtccacctgctgccgccgccgtcggaggagctggccctgaacgagctggtgacgctgacgtgcctggcacgcggcttcagccccaaggacgtgctggttcgctggctgcaggggtcacaggagctgccccgcgagaagtacctgacttgggcatcccggcaggagcccagccagggcaccaccaccttcgctgtgaccagcatactgcgcgtggcagccgaggactggaagaagggggacaccttctcctgcatggtgggccacgaggccctgccgctggccttcacacagaagaccatcgaccgcttggcggattggcagatgccgcctccctatgtggtgctggacttgccgcaggagaccctggaggaggagacccccggcgccaacctgtggcccaccaccatcaccttcctcaccctcttcctgctgagcctgttctatagcacagcactgaccgtgaccagcgtcgggccatctggcaagaggaggcccagtactgacggagcggcaagccaggagagt

SEQ ID NO: 514704 - DNA, 485 bp, Homo sapiens
gtaacaatttgcaggggtggttcatttgggatggtttttggccatctaggcccggaaagacgtacaaaaggtcccttaccagagctggcttctggtaatttccatagtaccacccgtatccccttctctccgggacctggtcatgtggcgagacacagcacgggggacacctttggaggtagtggctggtgaagaaggctgattggcagttaaagtccatgcgagtcgtgaccccaagggctgtcgaaggcaatctcctactccgggagctggattagacggtccggggaggagagaggggggcgcaggcgcggggccactggagggcacacaggccaatggctggtggatggccatggctggcccacgctggccggagctcggggcggacggggcactccgatctgggtagctcaggggaagggtctgaggccgggcatagtagtagggggtggagggggcatctctaggtaagagccgggcaa

SEQ ID NO: 514705 - DNA, 297 bp, Homo sapiens
  misc_feature (21)..(21): n is a, c, g, or t
cttttcgtggttccagtgggnagagaagaggaagtaggagcggggtggcaggggggggaccgccgcggctgctgccaccgccgccaccaccgcctctgctcgtggcgtgggaaaggaggtgtgagtcccgggcgcgagccggcggcggcgccgctgcgggagggtcggcggtgggaaggcgatggcggatttagataaactcaacatcgacagcattatccaacggctgctggaagtgagagggtccaagcctggtaagaatgtccagcttcaggagaatgaaatcagaggactgtg

SEQ ID NO: 514706 - DNA, 119 bp, Homo sapiens
ctctcacgtgggggcaaggggaaatgccccttgtgttgtccaccctcattcgtccccttccctccccagaaatggccactggttgccctaggaaccacccaggctcttcccaaaggacc

SEQ ID NO: 514707 - DNA, 307 bp, Homo sapiens
tcgagtctgctccagtagattgaagatctggcgataaacctccatgacagcagaatatcttctcatccacgaggttgagtttatctaaatccgccaccaccgcctctgctcgtggcgtgggaaaggaggtgtgagtcccgggcgcgagccggcggcggcgccgctgcgggagggtcggcggtgggaaggcgatggcggatttagataaactcaacatcgacagcattatccaacggctgctggaagtgagagggtccaagcctggtaagaatgtccagcttcaggagaatgaaatcagaggactgtg

SEQ ID NO: 514708 - DNA, 177 bp, Homo sapiens
  misc_feature (1)..(1): n is a, c, g, or t
  misc_feature (11)..(11): n is a, c, g, or t
nttcagtgaanccaaatttcatcctcatctgttagtcatactcccgttcaccgttctcaactactcatacatgcccgtgctcttctttacactgccggtttacactgtttctccaagacatcacagctgatatctcctggtgctatccccaaactgccactctaaactcttgaagta

SEQ ID NO: 514709 - DNA, 205 bp, Homo sapiens
tttctttcccaaaaatggttaattacaacttgttaaattgttgaacatttaagttgaggcacaagaacaattgcgccaaggcaattgttctttcttattattgtggatctcttaccctcggccaaaccaattccttaatttaatccctcaaaggccttaccccttgtggaggggaaggcccttaatagagggggaggaacaccaa

SEQ ID NO: 514710 - DNA, 468 bp, Homo sapiens
ctacatatttacatttagccatgtacgtagggatatattccttaactctgtcctcaaatttaagatcctccacaaatttttaattttctacactggttacagttaagaaaaactgtaaacatctttgggaaaggtggcataatagaatggttagatcacagactctggcttggcttggtggtgcaggcctattgtcctagctactagtgaagccgaagcaggagaatcacttgagcccaggagttcttggctgtagcacgcaacgagcgttgggtgtcctcagtttggcatcaatatggtgaccccacaagagccagggaccaccatgttacctaaggaggtgtgaagcggctcaggtcagaaatggagcaagtcaaaactcccatgctcaccagtaatgggatcatgcctgtgactaacactgtactccagcttgggcaacacagcaagaccctctctccgtgaaaa

SEQ ID NO: 514711 - DNA, 126 bp, Homo sapiens
atgagctcatctccataattgaccctccacgggctggcgttcctgagtgccgtgggcaaatgtcgaagtgctggggagaaagaagagggtggtcactaacttgtctcttgtataaaacatacacaa

SEQ ID NO: 514712 - DNA, 272 bp, Homo sapiens
gattttggatgccatcgacttaagtgaagttgcccgggctgaggtggagattatacatccatgtcacctttcttggattgatcaaaaaattgtccgcgtacaccagcaagatatgtttttggtcccaaaattgagaaattcacattcaggtctgcaatcaaattatgtccaaggtttgcctgggatatcccatgtgttgaagttgcagatgcgcacaactttgcaatgtttaaccgaaagctgtgagttgaagcaagcatttcctttattga

SEQ ID NO: 514713 - DNA, 358 bp, Homo sapiens
  misc_feature (43)..(43): n is a, c, g, or t
  misc_feature (353)..(353): n is a, c, g, or t
  misc_feature (355)..(356): n is a, c, g, or t
ccccatcctgtgggttgtgttttccacctttatccgataatgncccttagaccatataataaatttgtattttaaaagtgacttgatttggctgtgcaaggtgctcacgcttgtaatccccagcactttgggagactgaggtgggtggatcatatgaggaggctaggagttcgaggtcagcctggccagcatagcgaaaacttgtctctactaaaaatacaaaaattagtcaggcatggtggtgcacgtctgtaataccagcttctcaggaggctgaggcacgaggatcacttgaacccaggaggaggaggttgcagtgagctgagatcatccagggcaacagaatgagactnannat

SEQ ID NO: 514714 - DNA, 188 bp, Homo sapiens
  misc_feature (59)..(59): n is a, c, g, or t
  misc_feature (86)..(86): n is a, c, g, or t
aaaaaagccatgaaagaagttagaaggaagaggtggaaccgtcccaaaatgtcctcgcnggagcagcaggaattctcgcgggagcngcaggaattctcgcgggagcagcaggaattctcgcgggagcagcaggaattctcgcgggagcagcaggaattctcgcgggagcagcaggaattctcgcgggg

SEQ ID NO: 514715 - DNA, 232 bp, Homo sapiens
cgatccttaagaatctgctgctaatctcccctgggctatccccggggaatctctctgccatcctgcgaggtctaggccctttaaggaagctccgtctctttttccccaacagactgtcttcacccttgggctttgaaagccagacaaagcagcaggaattctcgcgggagcagcaggaattctcgcgggagcagcaggaattctcgcgggagcagcaggaattctcgcgggg

SEQ ID NO: 514716 - DNA, 170 bp, Homo sapiens
gaggacccgatcatcctgctgctgctgctgctgctgctgctgctgctgctgctgctacggtggtggcggcggcggtggtggcggtagcagcaggaattctcgcgggagcagcaggaattctcgcgggagcagcaggaattctcgcgggagcagcaggaattctcgcgggg

SEQ ID NO: 514717 - DNA, 782 bp, Homo sapiens
cagccattgctgtacattgagctccatagatgacagcgccggaggccatgtgacgagccgtggacggcactgtcgcgactctgtcgcctcgctgcatggatatataattagactaattgcatgggcaggaggagtatccctaagcataaggccgagacggcccaaatgtcgatccactcatgccttgttgttgtgcaccctagttcgtggcgtgcgcttcagtacttcgagctcccagatgcttcagtcaacgtcctcagtaggtttatcatagatgaagtgctcagcaagaccgatgcgaaagaccatgctcttgctaagacgagaacaggagcacttgtgaagatatggtcaaagcggactatgtccgtgtatgaaggagagactgaatgaccttattacttcccttcccaaagggcgcatacaagagatcagactgttcagaggatcccaattggcatccgagaggcctccttcggccttctgtcctcttctgactctgagtatctgcccatagaagtcacatggagaactatccctggcctgtcctattgcgtggatttttgcgaataaaactgggagcagaatgtggtcataaacacttgcttgccggatgaccaaggcagcccttatgaacaagaggctggcgacagctgacgtgaactctaccgcccatgtatttttgctgccatttcgagctaaaggaaacccttatggggcaaacaaacgggagtgtcaggggtaaaaacgctgaatgcaggaatggccggccttgtaatcag

SEQ ID NO: 514718 - DNA, 217 bp, Homo sapiens
ttacaaaaaactgaaaaattagccaggtttggtggcatgcacctgtggtcccagttactctggaggctgaggcggggggattgcttggcctgggagattgaaggctgcgttgagctaggatcatgccactgcactccagcctgggcaacaaagcaagaccctgtttccaaaaagaaatctacgtttatgaagataagtttgtttcccaagtttaaaa

SEQ ID NO: 514719 - DNA, 605 bp, Homo sapiens
taataatctttctaatctttctacgctcagattttccactttgagaagtttgcaaggtgtctcttcagatagacctggttagatagtggtcccaactacttttcagctgtgaggctttgggctcaagttacttaatatccctgcacttccattttctcatatgtaaaattaggattttttcttcttagagctgttatgaggattaaatgagataaagtatataaagtgtctcagctgctgatgtaaatttagttattatcattagacgtgtccaatgtctacctcattagtggcaacactaggaccaaaatcctagtctccaaattcatttacagctttcttggcactgtactaataagtgacagtggtgacttaaggatggatggtaacaaagagatgatctcaggtattggaaggcctgttatgtgctgtgtgtacatccaggctagacttggtgcaggtaagggagagggtggcaggttgcacaaccatattggacattgtctagttagttcctttcctgggaacttgtcttcttcactccttaatctctcctcctacttggcttgtgtttcaggagctacagaaggcccaaaaaaaaaaaa

SEQ ID NO: 514720 - DNA, 356 bp, Homo sapiens
cggtccaggtctttccctcaatgatcatagacaagaagcaaaggcaatacagggggaaagacagtcttgtcaacaaatgatgctagaacaactggaaatctgcattagaaaaaatgaatctagacgaaggctttaaactcttcacaaaaatttactcagatagatcacaaaactaaatttaaaacacaaaacaataaaattcctagcaagataacataggagaaaaatctagatgacttagggtttggtgctgactttttacatacaacaccagagacatgatccatgaaagaaagaactgataagctaaactttattaaaattagaaatttctgcttagaggggaaaagaccctg

SEQ ID NO: 514721 - DNA, 1236 bp, Homo sapiens
actggccctgcgtctgtaggccatgagcccctgacatcagcccctttagtgtgtgctcgccggctgtcatgggattgtggggtgtatgccatgccccggaggactcgtgcttcccctgctaaccctgacctgccgcacccacccagtgccagtgtcagagcagtccaccatgggatgggtgactgggggtggagtgctgcacccctgctgcccacccatccaccatgcagccgtcttatcgcctgctgtggtcacctgttgtcatttctctggcctcctgctggacctccttggacttcacgctgctgctgcccctgctgcccgtgctgtttgagacgagccactggcctgtgcccactgaaccccatctattggctcctggcaagggcaggggtggacatggttatgccagactgccatcggaagatgccagtgtgacaacgaggtccacacaatgtgtacccttggacagaacgtgtctccatttgggacatcgcgacatttcatcatgatagcatgacagacaccaggtgatgtcggccacatcaacttggaggtgccaatactcatgcaccttgacttatccgagacaggacaccacgcatgacatgcttgctgctgacctgaaatggccctatggccccaaattacataattgccaagtcctggggcaccacgcccatcgtctggtaaccattttgcctgagccgctattacctgtgagcacttcaccaggggcgcttggacttagctgcgggccacactaccatcacgagtggggtgaacggatcacagcacgcacaatcccacagtgtgccacatcttgtctagcatgaaacccgtgggggcataccacacatcgattgggtccccagacagaaaagtggcacttggagtaggaacaaaacggacaggttaggaacaagtaagcaacactggacctgatacaaccgaatgtgagccaccatcttgagaaacgaaagcccaaacccatgaagccacaccggggataaaccagtagaagcgaactggagccgaaagagcgcagagcgaacactagacgagagagcagcgcgaaacaacatgaacaagaagaacgacacaagcaggagaacaaggcgcacaagaagaacggtgacccacaggaagcagaaacaggaaggcagacacagaaaaaacgtacatatgacgacacacaaaagaaatgagaaaggatatagaaaggcaaaacgacca

SEQ ID NO: 514722 - DNA, 328 bp, Homo sapiens
acctagaggatccgtgatgtatcgcccaacacacactggctaattttgtatttcagtagagacggggttcacgatgttggtcaggctgatctcaactcttgactcaattggatcacccacttggctcttccagtgctggattacaggtgtgagccaccacgcccagccaaatttcttaaaagtttctaaaaggttttctggatagaggtgtggatttttgtccaatatatttttttgcatcagtggagatgattatatattttttttctttccattaaatgcgatattattcatcaattgtttttcttggtgttgggggataacatca

SEQ ID NO: 514723 - DNA, 204 bp, Homo sapiens
acgccaggcgatcgatgttggaagatcctttaggggatcaaaacagaccacatatttggccgttttctacggttgcactatgcccgcgtgtttatcttcttctgacacgagaacacacgtggcaaaggatgactttaacatgttcataaccaggtcgttggagaggacgtccagcttcttaacttgatcgccttggcgttgtag

SEQ ID NO: 514724 - DNA, 890 bp, Homo sapiens
cacttcaatccagaaagcatgagaagataccataggagggaatgagaaggtgcagaagcgaagaagactgtaccatgatctctagaagctgaggcacggcggcagagcggctggtgcaacaggaagtctcagtgtggaaggggtcttttctctccactgccaatgtgagtagaatgtcctagattcagtaggagagggcgctgtatgacaatataccacggtgctctactgcttttaagttataggaactgttacgtgtgtagatttccgatgtaatcgattggaggttatcgacctcaaataagaaagacatattgtgtgatcagtgtacggttctaattgcaaagcattccagtagtatcgaacacaataatgtctactgtggtatagtccacttgaataagaaagtagaggcagttttaactatgttgccgttaggctggataggaatgtgggttgttcgttgagcaaatatatcagcatctaattgaaatgacgaaatagcattcttagagttgtgtattatgaatataattgatatttagatgaatgtcttgtacacatatgtgtactttcatatctgatacaaaatcgtacatttataaccgtgtaatggatattcctagtttaaacggagatagaacagccaatatacgctagatatggtcactgaatgataacgattttgcagctttagaccaataatcatctctagaggattcacaacgttaactgtcttgataagaagtgaaggggctgaaattggcctttaccgtcatactgagatctttagaacttggacacggttacttgtggacttccctggtgagaataccctgaatttccttcggacaaaaaaataactgacctaagctgcggacagcgttaaa

SEQ ID NO: 514725 - DNA, 102 bp, Homo sapiens
  misc_feature (79)..(79): n is a, c, g, or t
aatatggatggcatgttacttaatgtaagttgtacactgtcatgttgcatttcgaattgaacacatagatgcttgcctngtctgcttgggtgaatgcctctt

SEQ ID NO: 514726 - DNA, 305 bp, Homo sapiens
aagccatttgaatttttaaaaaatttcaaacaggcaatgggatatagatagggatatcccccatataatatatatggtaaaggataaaggggaataataatggcaataaacaaacccctgggggcctaccaccccccttattgcctttcctttgagggaccggggggggtttcctgaacctatttttatccctgtttgaaaaagggaacccctggattgaactttgggttggccaaagcctttttgttttttatccctttatttccagggatggatccttaaagaataataaatgggatttaact

SEQ ID NO: 514727 - DNA, 952 bp, Homo sapiens
  misc_feature (89)..(89): n is a, c, g, or t
  misc_feature (887)..(887): n is a, c, g, or t
  misc_feature (916)..(916): n is a, c, g, or t
  misc_feature (927)..(927): n is a, c, g, or t
  misc_feature (945)..(945): n is a, c, g, or t
gccgtgtattacttgtgcgcgagggggctacgattttcggaggcctaaattctactactatagcatggacgtctggggccaagggaccncggtcaccgtctcctcagcatccccgaccagccccaaggtcttcccgctgagcctctgcagcacccagccagatgggaacgtggtcatcgcctgcctggtccagggcttcttcccccaggagccactcagtgtgacctggagcgaaagcggacagggcgtgaccgccagaaacttcccacccagccaggatgcctccggggacctgtacaccacgagcagccagctgaccctgccggccacacagtgcctagccggcaagtccgtgacatgccacgtgaagcactacacgaatcccagccaggatgtgactgtgccctgcccagttccctcaactccacctaccccatctccctcaactccacctaccccatctccctcatgctgccacccccgactgtcactgcaccgaccggccctcgaggacctgctcttaggttcagaagcgaacctcacgtgcacactgaccggcctgagagatgcctcaggtgtcaccttcacctggacgccctcaagtgggaagagcgctgttcaaggaccacctgagcgtgacctctgtggctgctacagcgtgtccagtgtcctgccgggctgtgccgagccatggaaccatgggaagaccttcacttgcactgctgcctaccccgagtccaagaccccgctaaccgccaccctctcaaaatccggaaacacattccggcccgaggtccacctgctgccgccgccgtcggagggaagcttgggcccttgaaacggaggttgggtgaaggttgaagttgccttgggaatttggggttttnaagccccaaagggttgttggttgggtttnggttggggttngaaaggggttgaaaaggnagttttt

SEQ ID NO: 514728 - DNA, 460 bp, Homo sapiens
  misc_feature (7)..(7): n is a, c, g, or t
  misc_feature (66)..(66): n is a, c, g, or t
  misc_feature (88)..(88): n is a, c, g, or t
  misc_feature (102)..(102): n is a, c, g, or t
  misc_feature (104)..(104): n is a, c, g, or t
  misc_feature (112)..(112): n is a, c, g, or t
  misc_feature (140)..(140): n is a, c, g, or t
  misc_feature (145)..(145): n is a, c, g, or t
  misc_feature (150)..(150): n is a, c, g, or t
  misc_feature (153)..(153): n is a, c, g, or t
  misc_feature (161)..(161): n is a, c, g, or t
  misc_feature (166)..(166): n is a, c, g, or t
  misc_feature (174)..(174): n is a, c, g, or t
  misc_feature (212)..(212): n is a, c, g, or t
  misc_feature (241)..(241): n is a, c, g, or t
  misc_feature (271)..(271): n is a, c, g, or t
  misc_feature (281)..(281): n is a, c, g, or t
  misc_feature (458)..(458): n is a, c, g, or t
ctttggnaacatgattatgttatacaaagccttggcaaatccaacagcatacagtgcactgggacnttccccaagggtctgggaggtnttgccgatggggtngntggggatngggggcgaggggggggggagtttggggnctggnggggntgngctccgcnttcangcgagtgngcatagccaagtgccccatccaccagcgaggtgcttcngtgctgaggacgcacgcatagccaggggngtgacgggcaaacgtgacatcaaatccganggcggctgtnggctcccttcctgccagccccagcgggcaccccgtcaagttctcgctctgtaggcagctggagtctcaggctcctcagaacgatcactgggctctggcacctctccccacacctgtttcaaccactggtccgcctcgctctcctccctcaggtagcaccagatgatcagcgccacgngg

SEQ ID NO: 514729 - DNA, 1389 bp, Homo sapiens
tggtgctgtgagacttgagaacggctgtctattcatgtgtgaaagactttagaggcggtatagtggaaggtccctttgatcactggggccagggaccctggtcaccgtctcctcagcatccccgaccagccccaaggtcttcccgctgagcctctgcagcacccagccagatgggaacgtggtcatcgcctgcctggtccagggcttcttcccccaggagccactcagtgtgacctggagcgaaagcggacagggcgtgaccgccagaaacttcccacccagccaggatgcctccggggacctgtacaccacgagcagccagctgaccctgccggccacacagtgcctagccggcaagtccgtgacatgccacgtgaagcactacacgaatcccagccaggatgtccagttccctcaactccacctaccccatctccctcaactccacctaccccatctccctcatgctgccacccccgactgtcactgcaccgaccggccctcgaggacctgctcttaggttcagaagcgaacctcacgtgcacactgaccggcctgagagatgcctcaggtgtcaccttcacctggacgccctcaagtgggaagagcgctgttcaaggaccacctgagcgtgacctctgtggctgctacagcgtgtccagtgtcctgccgggctgtgccgagccatggaaccatgggaagaccttcacttgcactgctgcctaccccgagtccaagaccccgctaaccgccaccctctcagctggccctgaacgagctggtgacgctgacgtgcctggcacgcggcttcagccccaaggacgtgctggttcgctggctgcaggggtcacaggagctgccccgcgagaagtacctgacttgggcatcccggcaggagcccagccagggcaccaccaccttcgctgtgaccagcatactgcgcgtggcagccgaggactggaagaagggggacaccttctcctgcatggtgggccacgaggccctgccgctggccttcacacagaagaccatcgaccgcttggcgggtaaacccacccatgtcaatgtgtctgttgtcatggcggaggtggacggcacctgctactgagccgcccgcctgtccccacccctgaataaactccatgctcccccaaaaaaaaaaaaaaaaaaataaaaaaaatctcggagggcgatcatattgtcgggggcgcgggagaaaaggggggtatgtagaatgggggacactgggggcaatagggcgtggtttccttggacccaagttttttttgtaacaaggtgggggtaagattcgtggcgggagtcctcccaatatatgggaggccggatataaaatatcggataaggccagtgttaccctgggtttattgg

SEQ ID NO: 514730 - DNA, 1163 bp, Homo sapiens
  misc_feature (89)..(89): n is a, c, g, or t
gccgtgtattacttgtgcgcgagggggctacgattttcggaggcctaaattctactactatagcatggacgtctggggccaagggaccncggtcaccgtctcctcagcatccccgaccagccccaaggtcttcccgctgagcctctgcagcacccagccagatgggaacgtggtcatcgcctgcctggtccagggcttcttcccccaggagccactcagtgtgacctggagcgaaagcggacagggcgtgaccgccagaaacttcccacccagccaggatgcctccggggacctgtacaccacgagcagccagctgaccctgccggccacacagtgcctagccggcaagtccgtgacatgccacgtgaagcactacacgaatcccagccaggatgtgactgtgccctgcccagttccctcaactccacctaccccatctccctcaactccacctaccccatctccctcatgctgccacccccgactgtcactgcaccgaccggccctcgaggacctgctcttaggttcagaagcgaacctcacgtgcacactgaccggcctgagagatgcctcaggtgtcaccttcacctggacgccctcaagtgggaagagcgctgttcaaggaccacctgagcgtgacctctgtggctgctacagcgtgtccagtgtcctgccgggctgtgccgagccatggaaccatgggaagaccttcacttgcactgctgcctaccccgagtccaagaccccgcgagaagtacctgactgtgccacgaggccctgccgctggccttcacacagaagaccatcgaccgcttggcgggtaaacccacccatgtcaatgtgtctgttgtcatggcggaggtggacggcacctgctactgagccgcccgcctgtccccacccctgaataaactccatgctcccccaaaaaaaaaaaaaaaaaaataaaaaaaatctcggagggcgatcatattgtcgggggcgcgggagaaaaggggggtatgtagaatgggggacactgggggcaatagggcgtggtttccttggacccaagttttttttgtaacaaggtgggggtaagattcgtggcgggagtcctcccaatatatgggaggccggatataaaatatcggataaggccagtgttaccctgggtttattgg

SEQ ID NO: 514731 - DNA, 809 bp, Homo sapiens
  misc_feature (89)..(89): n is a, c, g, or t
gccgtgtattacttgtgcgcgagggggctacgattttcggaggcctaaattctactactatagcatggacgtctggggccaagggaccncggtcaccgtctcctcagcatccccgaccagccccaaggtcttcccgctgagcctctgcagcacccagccagatgggaacgtggtcatcgcctgcctggtccagggcttcttcccccaggagccactcagtgtgacctggagcgaaagcggacagggcgtgaccgccagaaacttcccacccagccaggatgcctccggggacctgtacaccacgagcagccagctgaccctgccggccacacagtgcctagccggcaagtccgtgacatgccacgtgaagcactacacgaatcccagccaggatgtgactgtgccctgcccagttccctcaactccacctaccccatctccctcaactccacctaccccatctccctcatgctgccacccccgactgtcactgcaccgaccggccctcgaggacctgctcttaggttcagaagcgaacctcacgtgcacactgaccggcctgagagatgcctcaggtgtcaccttcacctggacgccctcaagtgggaagagcgctgttcaaggaccacctgagcgtgacctctgtggctgctacagcgtgtccagtgtcctgccgggctgtgccgagccatggaaccatgggaagaccttcacttgcactgctgcctaccccgagtccaagaccccgcatcgctaggcgatctcatatttcgcacgttcatgggttttcctacaggagaacagtatac

SEQ ID NO: 514732 - DNA, 717 bp, Homo sapiens
  misc_feature (89)..(89): n is a, c, g, or t
gccgtgtattacttgtgcgcgagggggctacgattttcggaggcctaaattctactactatagcatggacgtctggggccaagggaccncggtcaccgtctcctcagcatccccgaccagccccaaggtcttcccgctgagcctctgcagcacccagccagatgggaacgtggtcatcgcctgcctggtccagggcttcttcccccaggagccactcagtgtgacctggagcgaaagcggacagggcgtgaccgccagaaacttcccacccagccaggatgcctccggggacctgtacaccacgagcagccagctgaccctgccggccacacagtgcctagccggcaagtccgtgacatgccacgtgaagcactacacgaatcccagccaggatgtgactgtgccctgcccagttccctcaactccacctaccccatctccctcaactccacctaccccatctccctcatgctgccacccccgactgtcactgcaccgaccggccctcgaggacctgctcttaggttcagaagcgaacctcacgtgcacactgaccggcctgagagatgcctcaggtgtcaccttcacctggacgccctcaagtgggaagagcgctgttcaaggaccacctgagcgtgacctctgtggctgctacagcgtgtccagtgtcctgccgggctgtgccgagccaaccgtggaatagtggtaccgagctcc

SEQ ID NO: 514733 - DNA, 223 bp, Homo sapiens
  misc_feature (16)..(16): n is a, c, g, or t
  misc_feature (26)..(26): n is a, c, g, or t
  misc_feature (56)..(56): n is a, c, g, or t
  misc_feature (169)..(169): n is a, c, g, or t
  misc_feature (176)..(176): n is a, c, g, or t
  misc_feature (210)..(210): n is a, c, g, or t
gcgctagcggcattantgaacgattnccttacacatcagtctgggagaagcaaggncttctttattcctcagagcagaagagtgaaaggtaacaactctgaaataattcccagtaaagtccctggaggaaaaagccaccatatgctgagccctgctgttctttggacantgctcantggagccctcttcctgacactggtcgttcacttnatgccgctagcgc

SEQ ID NO: 514734 - DNA, 142 bp, Homo sapiens
  misc_feature (16)..(16): n is a, c, g, or t
  misc_feature (44)..(44): n is a, c, g, or t
agaagacgacagaagngacggctgcgagaagacacagagggtangctgcgagagacgacgagggtacgctgcgagaaccgacagaaggacgctgcgagaagacgacagagggtacgctgcgagaagacgacagaaagggtac

SEQ ID NO: 514735 - DNA, 733 bp, Homo sapiens
  misc_feature (89)..(89): n is a, c, g, or t
gccgtgtattacttgtgcgcgagggggctacgattttcggaggcctaaattctactactatagcatggacgtctggggccaagggaccncggtcaccgtctcctcagcatccccgaccagccccaaggtcttcccgctgagcctctgcagcacccagccagatgggaacgtggtcatcgcctgcctggtccagggcttcttcccccaggagccactcagtgtgacctggagcgaaagcggacagggcgtgaccgccagaaacttcccacccagccaggatgcctccggggacctgtacaccacgagcagccagctgaccctgccggccacacagtgcctagccggcaagtccgtgacatgccacgtgaagcactacacgaatcccagccaggatgtgactgtgccctgcccagttccctcaactccacctaccccatctccctcaactccacctaccccatctccctcatgctgccacccccgactgtcactgcaccgaccggccctcgaggacctgctcttaggttcagaagcgaacctcacgtgcacactgaccggcctgagagatgcctcaggtgtcaccttcacctggacgccctcaagtgggaagagcgctgttcaaggaccacctgagcgtgacctctgtggctgctacagcgtgtccagtgtcctgccgggctgtgccgagccatgaaccatgggaagtcttgctggtggaaggtaccagctcata

SEQ ID NO: 514736 - DNA, 257 bp, Homo sapiens
gagatcgaaccatcgcattccagccttggcgacagaatgagacactgtttcaaaaaaaaaaaggaggaagaggaagaagaagaccaaagaaggaaggggggttaatgagcagggggggcctaagcaaaggcactggctttcagccaggtggagggtctcggtgagaggactgaggttgaggaatggaagcccgcccggtctgagggatagggcctagtgagagatgcggcacagtggaatgggagtcacttgcagac

SEQ ID NO: 514737 - DNA, 320 bp, Homo sapiens
ggggccctgcccgctaggtcatgcatgtgcttgaggcgaccaaccttaacctaagtgtgggagatttcttgcgagccatgaaattggtgtctggggagtctgaaagcaaagtgactgcccatggtaaattttttaacacccttcaatcttaaggtgggaaagacttccttttttgtaacccttttagaggggcagcttcagaacggtattcaggctggcattattgctttagaaagaatcaaacccgggacttgtttgcctgaatttcttttaaggcctcaagctttactagggaccttccaattcacaccttaaggatt

SEQ ID NO: 514738 - DNA, 797 bp, Homo sapiens
  misc_feature (89)..(89): n is a, c, g, or t
  misc_feature (619)..(619): n is a, c, g, or t
  misc_feature (699)..(699): n is a, c, g, or t
  misc_feature (718)..(718): n is a, c, g, or t
  misc_feature (730)..(730): n is a, c, g, or t
  misc_feature (751)..(751): n is a, c, g, or t
  misc_feature (782)..(782): n is a, c, g, or t
gccgtgtattacttgtgcgcgagggggctacgattttcggaggcctaaattctactactatagcatggacgtctggggccaagggaccncggtcaccgtctcctcagcatccccgaccagccccaaggtcttcccgctgagcctctgcagcacccagccagatgggaacgtggtcatcgcctgcctggtccagggcttcttcccccaggagccactcagtgtgacctggagcgaaagcggacagggcgtgaccgccagaaacttcccacccagccaggatgcctccggggacctgtacaccacgagcagccagctgaccctgccggccacacagtgcctagccggcaagtccgtgacatgccacgtgaagcactacacgaatcccagccaggatgtgactgtgccctgcccagttccctcaactccacctaccccatctccctcaactccacctaccccatctccctcatgctgccacccccgactgtcactgcaccgaccggccctcgaggacctgctcttaggttcagaagcgaacctcacgtgcacactgaccggcctgagagatgcctcaggtgtcaccttcacctgggacggccttcaagtggggaaggagcgntgtttcaagggaccaacttgagcgttgaacttttgttgggttgttaacagggttttccagtttttcttgccggggttttncctaggccatgggaaccangggggaaggacntttatttttgcatttgtttgntttaaccccgagtttcaaaggaccccgtttntaccggcaacttttt

SEQ ID NO: 514739 - DNA, 156 bp, Homo sapiens
ctagaggatccccaagcgatacatcgggcccaaccgagggcctagctccaaaacggcaaaaaaccctctgctaggagctgcattctgcaaagggaaaccgtgctcggggattaaacctcagccccgatgcagcttggctcaggatcgcagcgcttg

SEQ ID NO: 514740 - DNA, 631 bp, Homo sapiens
  misc_feature (89)..(89): n is a, c, g, or t
  misc_feature (613)..(614): n is a, c, g, or t
gccgtgtattacttgtgcgcgagggggctacgattttcggaggcctaaattctactactatagcatggacgtctggggccaagggaccncggtcaccgtctcctcagcatccccgaccagccccaaggtcttcccgctgagcctctgcagcacccagccagatgggaacgtggtcatcgcctgcctggtccagggcttcttcccccaggagccactcagtgtgacctggagcgaaagcggacagggcgtgaccgccagaaacttcccacccagccaggatgcctccggggacctgtacaccacgagcagccagctgaccctgccggccacacagtgcctagccggcaagtccgtgacatgccacgtgaagcactacacgaatcccagccaggatgtgactgtgccctgcccagttccctcaactccacctaccccatctccctcaactccacctaccccatctccctcatgctgccacccccgactgtcactgcaccgaccggccctcgaggacctgctcttaggttcagaagcgaacctcacgtgcacactgaccggcctgagagatgcctcaggtgtcaccttcacctggacgcccatcgtgcggggatcnntagagtcaccgtgggaa

SEQ ID NO: 514741 - DNA, 762 bp, Homo sapiens
  misc_feature (81)..(81): n is a, c, g, or t
cgagagatcgagtcggcgagagggattcttctggctggtccccggcccacaacggtatggacgtctggggccaagggaccncggtcaccgtctcctcagcatccccgaccagccccaaggtcttcccgctgagcgcagcaccccccagatgggaacgtggtcatcgcctgcctggtccagggcttcttcccccaggagccactcagtgtgacctggagcgaaagcggacagggcgtgaccgccagaaacttcccacccagcccggcaggagcccagccagggcaccaccaccttcgctgtgaccagcatactgcgcgtggcagccgaggactggaagaagggggacaccttctcctgcatggtgggccacgaggccctgccgctggccttcacacagaagaccatcgaccgcttggcgggtaaacccacccatgtcaatgtgtctgttgtcatggcggaggtggacggcacctgctactgagccgcccgcctgtccccacccctgaataaactccatgctcccccaaaaaaaaaaaaaaaaaaataaaaaaaatctcggagggcgatcatattgtcgggggcgcgggagaaaaggggggtatgtagaatgggggacactgggggcaatagggcgtggtttccttggacccaagttttttttgtaacaaggtgggggtaagattcgtggcgggagtcctcccaatatatgggaggccggatataaaatatcggataaggccagtgttaccctgggtttattgg

SEQ ID NO: 514742 - DNA, 566 bp, Homo sapiens
  misc_feature (429)..(429): n is a, c, g, or t
  misc_feature (441)..(441): n is a, c, g, or t
tggtgctgtgagacttgagaacggctgtctattcatgtgtgaaagactttagaggcggtatagtggaaggtccctttgatcactggggccagggaccctggtcaccgtctcctcagcatccccgaccagccccaaggtcttcccgctgagcctctgcagcacccagccagatgggaacgtggtcatcgcctgcctggtccagggcttcttcccccaggagccactcagtgtgacctggagcgaaagcggacagggcgtgaccgccagaaacttcccacccagccaggatgcctccggggacctgtacaccacgagcagccagctgaccctgccggccacacagtgcctagccggcaagtccgtgacatgccacgtgaagcactacacgaatcccagccaggatgtgactgtgccctgcccagttccccnacctcccccatnttgtcaccctcgactgaggcttgaccggcccgccctttgtggatctgttttttaggttcaaaagcgaactctaatgtgcacaacttgatcgttttttgtgataaagccctttgggggtccatcca

SEQ ID NO: 514743 - DNA, 177 bp, Homo sapiens
ctagaggatcccttggatcgtgatactcaaatatgttcccaatttccttgctttgtctccctctctttcagggatggcaatgaatcacatattttgtctctttacataatcccatatttctcagaggtttggtttattcgctttttattcttttttttcttttttctggactggagc

SEQ ID NO: 514744 - DNA, 547 bp, Homo sapiens
  misc_feature (185)..(185): n is a, c, g, or t
cccccttttttttacccaagtggtccccccccaatgtgtccttccccctttagggagaggtttttccccccattttttttcccccccccagaggtttttcccccaaaataaggggggccccgggtttgttttttttttttccctttcacaaagagaccccccccccccccttttcttcttagaanaccccccaaaaaagaaagggccccgggggttttttttcaccagcgcccccccccccctttttaaggggtttttccccccaaaagggggaacccccttggggggggtgggcccccctttgggtttttttccccccccggcccgggggcccaaaggggaatatttttttcccccttttatttttttttaacgttttttttgcgccccccttttttgaaaaccccccccccccttttttttttggtttttgggaaaaatttttttttttggggaaattttttggggggggggggtggttggggggtttttttttttttttttttcccttttggccccccccccaaatttacccccccttttttta

SEQ ID NO: 514745 - DNA, 193 bp, Homo sapiens
tggggacccaaacttttggccccagggttggcccccccagccccaccccctatatctccgtgtgctcctgggtgttacttccctttcatataaggggacccagccccgggggaagggaggagggggtgggcatgggcccaaaggcttttccagtgggtataaatccatgaaaataaaccccccctgcccccca

SEQ ID NO: 514746 - DNA, 270 bp, Homo sapiens
ccaagcgtacccactgaatgtagttactacatatgagagtcattatatgcatatgcattctacctttcctgctttatgagtagtgtgaaagctatttagttacaaggttatatgcagaaaatatttcccagatataagtgatacatctgtagacctaagaaactattttcgtctatgtagattcctcttcccagtctacccaatatactacagacgaaatgttttctacattggccactatcagggattcgtcatctattggagtgactc

SEQ ID NO: 514747 - DNA, 911 bp, Homo sapiens
gcttctcttctctgccttcccctttaaaagttgtccggggaagaatctggggaccttgaagcatgtatatgaaggattggggacatctgcctttcacagattgagcagttattttcggtgacttctcttcaatattatcataaaagctttgcagctgttgaacactaaaatgagacttctctactacagcagcatagtattatggagaaaataattggattgtttctaggcaatatgtcagatggtgtggcaataactcattcttggaatgagtagagtgaagctgaatggtaactgctttcatccttgtttccttgtacatggaaggatatgattggggaaattttcctgaaggtagaagagtgaccagtctagagataattttacttagctcgtagtgagtggatcatgctctgcgtgtagacattatcacattacattataattatctgtctcctcctctcaagtgataattccttgaggaccatgctgttcattttgtatttccagtgcctagaagaatgcttagcatgtagtaagtattcaatgaatgtttcggaaataaaagactttaatattatactttcactgcattttctttttctaaaagcaacccattagggttggttaagaacacattgtttattctcactggtggtcctcttaaaaaacaaaaaattgcttgggcaatctgttatgttaacagtgggcctttacttggtgaaattctccactctacgaactgtcctctaacctcgggtgtgttgcaagggggacacaggactctacatccgccaacacatggtcgccagtgtgacagagaagctatcaacacggcggaccagtactcaaagaacagcgggtttctcaacagagggattcgcacggcgattattcaaaaggcttcagac

SEQ ID NO: 514748 - DNA, 340 bp, Homo sapiens
  misc_feature (15)..(15): n is a, c, g, or t
  misc_feature (91)..(91): n is a, c, g, or t
  misc_feature (98)..(98): n is a, c, g, or t
  misc_feature (133)..(133): n is a, c, g, or t
  misc_feature (187)..(187): n is a, c, g, or t
  misc_feature (206)..(206): n is a, c, g, or t
  misc_feature (216)..(216): n is a, c, g, or t
  misc_feature (221)..(221): n is a, c, g, or t
  misc_feature (226)..(227): n is a, c, g, or t
  misc_feature (243)..(243): n is a, c, g, or t
  misc_feature (248)..(248): n is a, c, g, or t
  misc_feature (251)..(251): n is a, c, g, or t
  misc_feature (255)..(255): n is a, c, g, or t
  misc_feature (309)..(309): n is a, c, g, or t
gtggtcggcggggancttggggctaggcatcctaattgtaattccatatcttaaagaagcaattctaaatataggaaatgcttcacaaatntggttgntttttgcagagttacctataaaagcaaaaagttanaaacactgtaaaaccaaccataggaaactatgttaattaaggtacattcacttnttagactatcatacagcantaaaatgatntttanaaagnncttataacaatatggnggggnggntttngccatattgttaagtaggaaaataactgaatacaaaatcaaatatgttacatcnccattcaaaggtataataatgacaataaaaa

SEQ ID NO: 514749 - DNA, 884 bp, Homo sapiens
ggctgcctttgatgattagccccaggtctgcggagctgctggccgatgagcccggatgagccttcctgtgtgagtgcagttcggggccgagcccgagctggccgtgatcagctgcctgggccgcgtcaacctcatcggtggaacacacggactacaaccagggcctggatgctgcctatggctctggagctcatgacgtgtgctggtggtgcaagcacccgcaatggatgtggctgagtgtctcgtcactcaccacactctgaggtgtgccagagtgagccccatgctgcgcatgcaagtttatccacatgacccacagacaccagctgctctggctgtgagccattgtgtgaccttcctcctggatggggcacaaagctattgatccacagtgagacagtcgatatcaagtggtaccgttaccaccatgcatgaccacaccaccctacacacattggggacctatacaaggagtggcaaagaggggtgaggatccaaaggcattccaaggatagaccctccaatgaagagtgagggggatgtggccattgggtccccaatgccgtaccaaagcgcaacttcccgttatgcgacaaatgataggtgacccacagagtataccgaacacccttaatccacgatacgcgacgagcaaggggacataccttggattcacaacgaaaaccattacggaggtgacaacgaaaagtaaacggacctagggagccacctgcaggaccacccaaagcgagatggcatggattcgcaggacacaggcgagccctggaagaccaccaagacatattctgacaagtggggaatttggcaccctggagtggacaacataccaattgggaccccaagattataaatacgtcaacaaa

SEQ ID NO: 514750 - DNA, 262 bp, Homo sapiens
  misc_feature (156)..(156): n is a, c, g, or t
cgcagcggcttcctagtttgggggcgccccggtgggtttcagctttaggggttgcaggaacggctttggcattctcttggagcttacgaagcgggaagagccccgccccagttctgccccttcaaagctttcggcggggggtggaggtaggttatnaccttgtccctacccccgcctttccctccgccgcagggattcgggacccgcccccgcggagaggacggggggcttcggggaggggctgttcggggagcgggcggga

SEQ ID NO: 514751 - DNA, 478 bp, Homo sapiens
acaacggataagaaaatgtggcacatatacaccatggactagcataaaaaaggatgagttcatgtcctttgtagggacatggatgaagctggaaactatcattctcagcaaactaacacaggaacagaaaatcaaacactgcatgttctcactcataagtgggagttgaacaatgagaacacatggaaacagggaaggaaacatcacacaccggggcctgtcagggttgggggctaggggagggatagcattaggacaaatacctaattcatgcagggcttaaaacctagatgatgggttgataggtgcagcaaaacaccatggcacacatttacctatgtaataaacctgcacatcctgcacatgtaccccggaacttaaaagaaaatgttgaacaacgggtagagaagagtgatttacatacttcattttccaattagtgcatgtgaaaatcattcatcttggcagtattgtccag

SEQ ID NO: 514752 - DNA, 485 bp, Homo sapiens
acaaaacaagaagggcctttatcagacacacacaagcttcatgatgacctggattgaagagcagacacaggtgcacacggtgctgtgtacctctcagcaccatgtatgatcccaacagcacataaagtgtgtttgaggtgttgacaagaaaaggctggacctggctgtgatgttggattgactgctagttctgggtggtgtaaacgattcaagaatcgttatgtcattagataatgggagagtggtgagttggtgagtgctgatgtaaaggcagcggaagaatttggggaaactctagattagctgagtctggaggaaaatcacttgccagaacgaagattttcaatatggatgaaacctttctattctggaaacagatgcctgacaggacttggatccatgaggtagaccaaagctatgacaggcttcaagtcttttagggactggatgacagtcttgcttgggggcgatgttgccggtcacaa

SEQ ID NO: 514753 - DNA, 630 bp, Homo sapiens
agcggagatctttcgtggttctgtcagggagacccttaggcactccggactaagatggcggcgacggccaggcggggctggggagctgcggctgttgccgccgggctgcgcaggcggttctgtcatatgttgaagaatccatacaccattaagaaacagcctctgcatcagtttgtacaaagaccacttttcccactacctgcagccttttatcacccaggcagttatttaggattgaaggagtaaaaagtgtcttctttggaccagatttcatcactgtcacaaaggaaaatgaagaattagactggaatttactgaaaccagatatttatgcaacaatcatggacttctttgcatctggcttacccctggttactgaggaaacaccttcaggagaagcaggatctgaagaagatgatgaagttgtggcaatgattaaggaattgttagatactagaatacggggttatggatgatgaatcagatgaaaaagaagcaaactcaccttaaaataatctggattttctttgggcataacagtcagacttgttgataatatatatcaagtttttattattaatatgctgaggaacttgaagattaataaaatatgctcttcagagaatgata

SEQ ID NO: 514754 - DNA, 939 bp, Homo sapiens
agcggagatctttcgtggttctgtcagggagacccttaggcactccggactaagatggcggcgacggccaggcggggctggggagctgcggctgttgccgccgggctgcgcaggcggttctgtcatatgttgaagaatccatacaccattaagaaacagcctctgcatcagtttgtacaaagaccacttttcccactacctgcagccttttatcacccagtgagatacatgtttattcaaacacaagataccccaaatccaaacagcttaaagtttataccaggaaaaccagttcttgagacaaggaccatggattttcccaccccagctgcagcatttcgctcccctctggctaggcagttatttaggattgaaggagtaaaaagtgtcttctttggaccagatttcatcactgtcacaaaggaaaatgaagaattagactggaatttactgaaaccagatatttatgcaacaatcatggacttctttgcatctggcttacccctggttactgaggaaacaccttcaggagaagcaggatctgaagaagatgatgaagttgtggcaatgattaaggaattgttagatactagaatacggccaactgtgcaggaagatggaggggatgtaatctacaaaggctttgaagatggcattgtacagctgaaactccagggttcttgtaccagctgccctagttcaatcattactctgaaaaatggaattcagaacatgctgcagttttatattccggaggtagaaggcgtagaacaggttatggatgatgaatcagatgaaaaagaagcaaactcaccttaaaataatctggattttctttgggcataacagtcagacttgttgataatatatatcaagtttttattattaatatgctgaggaacttgaagattaataaaatatgctcttcagagaatgata

SEQ ID NO: 514755 - DNA, 298 bp, Homo sapiens
  misc_feature (7)..(7): n is a, c, g, or t
  misc_feature (14)..(14): n is a, c, g, or t
acttganaccgtanacttgacgtagaggtgcaggggcagcgtctcgttggcatcgtgggacagctttggggtccgaaaggcgaaggtcccagattcctgcatggtcaccggctccatgaacttgagcaagtcactgcccacgtgcagggaggaaccctgtgtctgcagaagcctctgaacgtcctctgtgggtttcccacggccacctccaccactcatccacaccttcacggtgtccaggttcttgccctggaagttcacatctgtcttacggtttcaagtgtaaggaatccgtgac

SEQ ID NO: 514756 - DNA, 1200 bp, Homo sapiens
  misc_feature (183)..(183): n is a, c, g, or t
gaccctgtattgttgtggaacttcgggtagcgtgtttgttggaatcctggtgatgaactccaggcgatactcgagaacatgatcgtctgtgtgttccacgtatacatctacacaacatatttatatccatttcggtatcacagctaatgtaaccaggtctactggcatgagattgccatttancattgcatgcgtagtatgcgcggattctatacacacattcggcaacaagtatgactagggtctacgtttcacatcgaaatgagtatttcaatgactttatctccatgtggagttacaaagactccgttggtccccggcacatcattaacttagttaccagacatattcaggtggctcatacttgctttagactacttgattccgtttaaacatccaagactaattaggacatcgtgaattatcgcatcactaatactgctcacagtatcgggacagaagctcctcttagaccataggtatcggttggtccctcacttgacattttctgtagcttcagttgctcgctcactaaaaattatcaccaaattgaaccttccctcgaatgagatttgcgagccaatataagtacggccaaaagaacctctagcggtcttcgttctcaaacgcaaaaagcgccacatagttaagtctggggagacagagtttgcggtccttacaatcaagaggttcagatttacagtgtgctaaatattggcgtactaaattctctttggggtcccagtcgtgagtgccctggagggactacttccaagaaaaaacgtctacgcaaaaacgttgttttccgtgagtagcgcaattatacggtactacgaattgctttctataaacatagttattaaccctaagaggcatcgaatcccgaggttggtttttcaacttttcaactctttctagtgaaacgttccacgaatttgtctattccccttttgattgtttccggaaaagttggaggatgtgcaccttccatctcaacttgggatccgtatgagcctcgtggcaagcttggcccttacttttaaaattgggttgcctttggaagtttgaatggccctggggcatgcttctttgcaccttggtgggagccgaaataaagtgagcaagcttcccgtaagtgatttctcccatagggtaatgggaaggattcctcgaggactgtggaatcccggaggtgtcccg

SEQ ID NO: 514757 - DNA, 264 bp, Homo sapiens
acgtgaacagtcccggggtgacatgagaattatactatatgtactagtgtcgactctttgaatctctgatgtggtgtatcatcaccatttatttaggggatcttaatttcatcactagttttctagcttttcacgtaaacaacgtactgacatttgttagactttatacctaaaatgttctttttattgttgatttcattagtgttcattagctaatatatagaacatacattcattaacggccaggtgcagtggctcacacca

SEQ ID NO: 514758 - DNA, 1029 bp, Homo sapiens
agcggagatctttcgtggttctgtcagggagacccttaggcactccggactaagatggcggcgacggccaggcggggctggggagctgcggctgttgccgccgggctgcgcaggcggtaggtgacgagcctggagctccgaataggtgtgccgctgggcttagccagcggagcggtcgccgccttgcagaccctctctcgaggcgggttctgtcatatgttgaagaatccatacaccattaagaaacagcctctgcatcagtttgtacaaagaccacttttcccactacctgcagccttttatcacccagtgagatacatgtttattcaaacacaagataccccaaatccaaacagcttaaagtttataccaggaaaaccagttcttgagacaaggaccatggattttcccaccccagctgcagcatttcgctcccctctggctaggcagttatttaggattgaaggagtaaaaagtgtcttctttggaccagatttcatcactgtcacaaaggaaaatgaagaattagactggaatttactgaaaccagatatttatgcaacaatcatggacttctttgcatctggcttacccctggttactgaggaaacaccttcaggagaagcaggatctgaagaagatgatgaagttgtggcaatgattaaggaattgttagatactagaatacggccaactgtgcaggaagatggaggggatgtaatctacaaaggctttgaagatggcattgtacagctgaaactccagggttcttgtaccagctgccctagttcaatcattactctgaaaaatggaattcagaacatgctgcagttttatattccggaggtagaaggcgtagaacaggttatggatgatgaatcagatgaaaaagaagcaaactcaccttaaaataatctggattttctttgggcataacagtcagacttgttgataatatatatcaagtttttattattaatatgctgaggaacttgaagattaataaaatatgctcttcagagaatgata

SEQ ID NO: 514759 - DNA, 1739 bp, Homo sapiens
gaggaggcggaaagttgaaaagtgatggacggttgacagttgctgatttttgactttgcttgtagctggctccccgacactcgccgtactttcgcgtgatcggcgaccggcactggtagatttaacaggaaacttccaagaatggaaacttatgtcgtttgccccagtatagtaagtgtaagcgtgtagattgtgatgtcatatgtcgcaagtaagatcttaacgaggagctgatggtaagaaagcctcaccaagaatgatctttatccgaagatccaaagcctgaagtcattgcacatgatctacatgagagccttacaaatagtatatggaattcgactggaacatttttacatgatgccagtgaactctgaagtcatgtatccacagtttaatggacggcttcttaccattcagcaatttacgtgtactcatctggactcattttgcctatctgcgggtgaatgactttgagactgctgatatgctatgtccaaaagcaaaaaggacaagtccggcttcaagtggcattatcaactttattcacttccggagaaggatggccggaaacctatatggcacttcttgcggcaattaattcctctgtgcgcagcacatggcaccagtttaacagccggcaccaggaggctaatgcactcggcgcaactgataccgtcccctggaagcgcaaggtcaagccttctcacgtctgccggcgaacacacacttcatccgtttctcacaccaacggtggcgaagtacacaagaattcatatcacacagcgcgtcgacactgcctcttcacacacaagccccttaaccataccttctttcttttctctgttttttattttttttgtatctctactctccccgaccaccactaccaccccaccccacctccacctccccccctcctcatcccctccccacaccccctaacctcactccccacccccacaccctcccacccacaccaccacccaccctcaccaaccaccgagcgcggcacacctggacgcccacaacaagcacacacagaccgaccaaccagcaggcaccccgcgaaacgcaggagagcaggaagaccacaccaagagacgcacacacagcaagcagaggcaggcggaagcaagcacggacgaggtagcgacgatgcaagacgagcgcgacaagagcgaacaggagcagcgagacagaccgagtcgcgagccacagcaagacaagagaggcgcgagcgagaaagcacggagacacgcagcccgcatgaaccgagcacacacgacgagtgaaagagagagacacaacaaacgaccgagaccacacagagaggaggaagagacggcaggaacgacgagaacgcagcgaaacgggacgaaggaaagatccagcggacgcgacagcgcgggcgaggacggccgcgcacaaggaaagtggacgcaaaggagcatgacgaacggcaggccagcgtcgacctaggacacggagcgaccgactgacgaagggacgaaagaggaaacacacacgagcgcaaagcaggcggacgcacgaagcgtagggctgcagacatgcgccgcaggcgtgcacggtgggactgaggcagacgcatcgaaaacagacgtcaaggaagaagatcaacggcacgccgaagcagaacagcacacgaacacgaataccgaacggacaaacagcacgacagagcgcgcagccagcagcacaccatagaccagcccacacac

SEQ ID NO: 514760 - DNA, 1513 bp, Homo sapiens
  misc_feature (1029)..(1029): n is a, c, g, or t
agcggagatctttcgtggttctgtcagggagacccttaggcactccggactaagatggcggcgacggccaggcggggctggggagctgcggctgttgccgccgggctgcgcaggcggttctgtcatatgttgaagaatccatacaccattaagaaacagcctctgcatcagtttgtacaaagaccacttttcccactacctgcagccttttatcacccagtgagatacatgtttattcaaacacaagataccccaaatccaaacagcttaaagtttataccaggaaaaccagttcttgagacaaggaccatggattttcccaccccagctgcagcatttcgctcccctctggctaggcagttatttaggattgaaggagtaaaaagtgtcttctttggaccagatttcatcactgtcacaaaggaaaatgaagaattagactggaatttactgaaaccagatatttatgcaacaatcatggacttctttgcatctggcttacccctggttactgaggaaacaccttcaggagaagcaggatctgaagaagatgatgaagttgtggcaatgattaaggaattgttagatactagaatacggccaactgtgcaggaagatggaggggatgtaatctacaaaggctttgaagatggcattgtacagctgaaactccagggttcttgtaccagctgccctagttcaatcattactctgaaaaatggaattcagaacatgctgcagttttatattccggaggtagaaggcgtagaacaggttatggatgatgaatcagatgaaaaagaagcaaactcaccttaaaataatctggattttctttgggcataacagtcagacttgttgataatatatatcaagtttttattattaatatgctgaggaacttgaagattaataaaatatgctcttcagagaatgatatataaatattgcaaaaaaatcgagcatatcgacctaaccaaccgtcttggtcgttggcagtctgccctgacgtgcgccggaccctccgancacatgcaattagtcgcgtcgcgcccgtcgtgccctccgtccccccccattcggaactccttctgcgagcctcgttctgtagcggtccgcgattaaaataacgccgtcggttcacatgttaatgatgaggacgaccatctcctactaaagctcgtccaatacctcaatacggggctcgctatgtcgcccgcaaacggtctgtggtagcgcgacggtgaactttggtgtccccctctcgacaagatccgcgaactctgtataaagaggatgcggtagcttccacctcgatatggctatgactagcgtgccacacaaaatgaacccatgaacggttggccggaccacacgcccccagatatcaatgagggttcgtcagcgagaacgataatgagcctcctctagcaactccacgccgcgggtaccgagtacgccctgtctcttcgagagtgccgcgctcctacaagcggaccagtagtcgtgtgcg

SEQ ID NO: 514761 - DNA, 1128 bp, Homo sapiens
  misc_feature (465)..(465): n is a, c, g, or t
tgcctttttgtctcaaagtttccatcaaaatcagtttcttttctctgatactttcaatccttgagaacagagaatgtctgcatatttactggcttaaaatttcataccctaacatcattagcatatcgaaatgttttagtgtactcatctttatcaccagatgttgagttgattggtattccctaatttttcttcagataatcaaatgaatgtttctgtcatcaatttcccaaaatatatctccataccaagttacatgttctttctatagttttatgtttttaatgaaccatgtagttaaaatcattctgttttaatactcgtacttgcatggctataaaatttctactcttgatgtttttatatgtaattatttctaggatctgaagaagatgatgaagttgtggcaatgattaaggaattgttagatactagaatacggtacgtgctcctctctctacctgnattcagtgctttggaggcatttttcattatagcaatatagttttagttggccatgagattatagtagattttcaaaataagtgcaagttaatgtaaaccacaacaggtagccgtgacaattgaatttaaagcctgtatcttctctacatttactcaaaattttaaaacatccaatttatttaaacatattcaatgaagaaatgtattcttcacagtctcaatttagatttgatattgttataataccaaatttcttaaaaagaaaaaaaaagacttaatgtttggcaaggttgtgaagagagaatgagtacctattttcagtatattgcccatacagaataaatgttaagtgagtggagaacagcaggcttctacttttgcttgtagcagaccaatagtcatgctgagaactcccagaaaagctggataaagtacaataaaaagaatttgtttgaaagcattagatagctgccagagcaagcaagatgtgatggaaacaagaatgaccatagaataaggaatttgagtgcggtacccttgatagcacaatctcgcagcgacagcagagatgtaagtttatcagcagacgtgcaacccgcggctgggagatgggatccaagatatgttactcgagattgtcttaatgtgaggtcaaaccatcat

SEQ ID NO: 514762 - DNA, 555 bp, Homo sapiens
gtcctgtgtgaattggttctccaccatgtgtccactcgtcatccactacacattaaaaacatccaatttatttaaacatattcaatgaagaaatgtattcttcacagtctcaatttagatttgatattgttataataccaaatttcttaaaaagaaaaaaaaagacttaatgtttggcaaggttgtgaagagagaatgagtacctattttcagtatattgcccatacagaataaatgttaagtgagtggagaacagcaggcttctacttttgcttgtagcagaccaatagtcatgctgagaactcccagaaaagctggataaagtacaataaaaagaatttgtttgaaagcattagatagctgccagagcaagcaagatgtgatggaaacaagaatgaccatagaataaggaatttgagtgcggtacccttgatagcacaatctcgcagcgacagcagagatgtaagtttatcagcagacgtgcaacccgcggctgggagatgggatccaagatatgttactcgagattgtcttaatgtgaggtcaaaccatcat

SEQ ID NO: 514763 - DNA, 114 bp, Homo sapiens
tagctcggtaccctgtgatccccccacctcggcctcccaaagtgctgggattacagtcgtgagccactgcgcccggcctcaaagtccacttttaagcacgcaatattatgaata

SEQ ID NO: 514764 - DNA, 116 bp, Homo sapiens
  misc_feature (31)..(31): n is a, c, g, or t
cagcagccggcctgagaggagcgtggctgtntcctttctccgccatgggtgtgctcgccactgatatcggtgtactccgaaaaggggggaggtcatcttggcaaaaaatgtcactt

SEQ ID NO: 514765 - DNA, 702 bp, Homo sapiens
  misc_feature (26)..(26): n is a, c, g, or t
  misc_feature (84)..(84): n is a, c, g, or t
  misc_feature (86)..(86): n is a, c, g, or t
  misc_feature (100)..(100): n is a, c, g, or t
  misc_feature (102)..(102): n is a, c, g, or t
  misc_feature (113)..(113): n is a, c, g, or t
  misc_feature (130)..(130): n is a, c, g, or t
  misc_feature (135)..(135): n is a, c, g, or t
  misc_feature (143)..(143): n is a, c, g, or t
  misc_feature (153)..(153): n is a, c, g, or t
  misc_feature (168)..(168): n is a, c, g, or t
  misc_feature (172)..(172): n is a, c, g, or t
  misc_feature (194)..(194): n is a, c, g, or t
  misc_feature (208)..(208): n is a, c, g, or t
  misc_feature (210)..(210): n is a, c, g, or t
  misc_feature (229)..(229): n is a, c, g, or t
  misc_feature (255)..(255): n is a, c, g, or t
  misc_feature (257)..(257): n is a, c, g, or t
  misc_feature (277)..(277): n is a, c, g, or t
  misc_feature (348)..(348): n is a, c, g, or t
  misc_feature (381)..(381): n is a, c, g, or t
  misc_feature (404)..(404): n is a, c, g, or t
  misc_feature (412)..(412): n is a, c, g, or t
  misc_feature (422)..(422): n is a, c, g, or t
  misc_feature (445)..(445): n is a, c, g, or t
  misc_feature (447)..(447): n is a, c, g, or t
  misc_feature (449)..(449): n is a, c, g, or t
  misc_feature (560)..(560): n is a, c, g, or t
  misc_feature (576)..(576): n is a, c, g, or t
  misc_feature (602)..(602): n is a, c, g, or t
  misc_feature (624)..(624): n is a, c, g, or t
  misc_feature (685)..(685): n is a, c, g, or t
agacgatgcgtgcgctccggaccganccgggctcctcctctgcgtgctgctgctggcggcgctgtctggaggcggcgctagggntncccgtaaagaatcngnggctccgcggnattacggcctggtatcntcaanatgctcgnagaggtactnagcctccccagattntatntttctgaaggaataggagtagncaccactgctcccnanaaaccacctgcaggcaganccacatccaacatggatgctggactntnactgagccagcagccatgancccaggcaacaccacccctcccaggaccccagaggttactccgttgcggctggagctgcagaagctgccgngattggccaacacaaccttgagtacccctaacnctgatacccaggcttcagcctcnccagatcntaggcctctnattggaagaggaagagacacgantncncaccagaacccacctgcaggtagagctattaccaacatggatgttggacatgtcactgagacagcagccctgaacccagggaatgccacgcctcccaggacacaggatagntactccattgctgctngagctgcagaagctgccagaattggnccacgcaaccttgagtaccccnaaccctgataaccaggtgaccatcaaggtggtggaggacccacaggccgaagtgtaaatcnacctataggctgcgaca

SEQ ID NO: 514766 - DNA, 893 bp, Homo sapiens
agcggagatctttcgtggttctgtcagggagacccttaggcactccggactaagatggcggcgacggccaggcggggctggggagctgcggctgttgccgccgggctgcgcaggcggtaggtgacgagcctggagctccgaataggtgtgccgctgggcttagccagcggagcggtcgccgccttgcagaccctctctcgaggcgggttctgtcatatgttgaagaatccatacaccattaagaaacagcctctgcatcagtttgtacaaagaccacttttcccactacctgcagccttttatcacccaggcagttatttaggattgaaggagtaaaaagtgtcttctttggaccagatttcatcactgtcacaaaggaaaatgaagaattagactggaatttactgaaaccagatatttatgcaacaatcatggacttctttgcatctggcttacccctggttactgaggaaacaccttcaggagaagcaggatctgaagaagatgatgaagttgtggcaatgattaaggaattgttagatactagaatacggccaactgtgcaggaagatggaggggatgtaatctacaaaggctttgaagatggcattgtacagctgaaactccagggttcttgtaccagctgccctagttcaatcattactctgaaaaatggaattcagaacatgctgcagttttatattccggaggtagaaggcgtagaacaggttatggatgatgaatcagatgaaaaagaagcaaactcaccttaaaataatctggattttctttgggcataacagtcagacttgttgataatatatatcaagtttttattattaatatgctgaggaacttgaagattaataaaatatgctcttcagagaatgata

SEQ ID NO: 514767 - DNA, 129 bp, Homo sapiens
  misc_feature (19)..(19): n is a, c, g, or t
agcacatttcactacgggntatgtgcattctgggcttagtaatgtcaaatcactcttctctccagcttggccattcctcattccttgcgggcctgccctgtagaccacaggctaatggaatgtcccggt

SEQ ID NO: 514768 - DNA, 1286 bp, Homo sapiens
  misc_feature (623)..(623): n is a, c, g, or t
agcggagatctttcgtggttctgtcagggagacccttaggcactccggactaagatggcggcgacggccaggcggggctggggagctgcggctgttgccgccgggctgcgcaggcggttctgtcatatgttgaagaatccatacaccattaagaaacagcctctgcatcagtttgtacaaagaccacttttcccactacctgcagccttttatcacccagtgagatacatgtttattcaaacacaagataccccaaatccaaacagcttaaagtttataccaggaaaaccagttcttgagacaaggaccatggattttcccaccccagctgcagcatttcgctcccctctggctaggcagttatttaggattgaaggagtaaaaagtgtcttctttggaccagatttcatcactgtcacaaaggaaaatgaagaattagactggaatttactgaaaccagatatttatgcaacaatcatggacttctttgcatctggcttacccctggttactgaggaaacaccttcaggagaagcaggatctgaagaagatgatgaagttgtggcaatgattaaggaattgttagatactagaatacggtacgtgctcctctctctacctgnattcagtgctttggaggcatttttcattatagcaatatagttttagttggccatgagattatagtagattttcaaaataagtgcaagttaatgtaaaccacaacaggtagccgtgacaattgaatttaaagcctgtatcttctctacatttactcaaaattttaaaacatccaatttatttaaacatattcaatgaagaaatgtattcttcacagtctcaatttagatttgatattgttataataccaaatttcttaaaaagaaaaaaaaagacttaatgtttggcaaggttgtgaagagagaatgagtacctattttcagtatattgcccatacagaataaatgttaagtgagtggagaacagcaggcttctacttttgcttgtagcagaccaatagtcatgctgagaactcccagaaaagctggataaagtacaataaaaagaatttgtttgaaagcattagatagctgccagagcaagcaagatgtgatggaaacaagaatgaccatagaataaggaatttgagtgcggtacccttgatagcacaatctcgcagcgacagcagagatgtaagtttatcagcagacgtgcaacccgcggctgggagatgggatccaagatatgttactcgagattgtcttaatgtgaggtcaaaccatcat

SEQ ID NO: 514769 - DNA, 164 bp, Homo sapiens
tggggatcacgacatttcttaaggagagtgagtgaagttcggattgcatttggtgtaactgacggatattccaattccaactgaagctagcaatgaagggcagacagtattcctgaacatgtgggaaatatcaagcttgaacctgttgtacaagcgtgcattgg

SEQ ID NO: 514770 - DNA, 766 bp, Homo sapiens
agcggagatctttcgtggttctgtcagggagacccttaggcactccggactaagatggcggcgacggccaggcggggctggggagctgcggctgttgccgccgggctgcgcaggcggttctgtcatatgttgaagaatccatacaccattaagaaacagcctctgcatcagtttgtacaaagaccacttttcccactacctgcagccttttatcacccagtgagatacatgtttattcaaacacaagataccccaaatccaaacagcttaaagtttataccaggaaaaccagttcttgagacaaggaccatggattttcccaccccagctgcagcatttcgctcccctctggctaggcagttatttaggattgaaggagtaaaaagtgtcttctttggaccagatttcatcactgtcacaaaggaaaatgaagaattagactggaatttactgaaaccagatatttatgcaacaatcatggacttctttgcatctggcttacccctggttactgaggaaacaccttcaggagaagcaggatctgaagaagatgatgaagttgtggcaatgattaaggaattgttagatactagaatacggggttatggatgatgaatcagatgaaaaagaagcaaactcaccttaaaataatctggattttctttgggcataacagtcagacttgttgataatatatatcaagtttttattattaatatgctgaggaacttgaagattaataaaatatgctcttcagagaatgata

SEQ ID NO: 514771 - DNA, 473 bp, Homo sapiens
acgtcttcatcatactacccttttcatgcatcatggttgtaacatttttctttgtactcagaatgccctaactggcaaaaattcccaggcttcaaaaaggcccttaaaaaataatggttccgggctctgttctgcctctttattgcacctgttgtaccatgatgacatatttcccgtctgcctcacctgtctgcattccttagggaaacttgtctgccttcgaaatcgtcagcggagcttttgaaagggcagatcgggtctccgacccaggagatcgattcagcaggtctgcggggactgaggcatggcagggaaactgcccaccatctcaagggtgaggctaggagttggctagtgtgtatgtattccatccagaaatatttagctaatgttcaccaaacaaaataaaaacacacaagaaagcatgaagcgtaatacccacggggtaagccagtcaggtaggtatgatgaag

SEQ ID NO: 514772 - DNA, 489 bp, Homo sapiens
tggtgctgtgagacttgagaacggctgtctattcatgtgtgaaagactttagaggcggtatagtggaaggtccctttgatcactggggccagggaccctggtcaccgtctcctcagcatccccgaccagccccaaggtcttcccgctgagcctctgcagcacccagccagatgggaacgtggtcatcgcctgcctggtccagggcttcttcccccaggagccactcagtgtgacctggagcgaaagcggacagggcgtgaccgccagaaacttcccacccagccaggatgcctccggggacctgtacaccacgagcagccagctgaccctgccggccacacagtgcctagccggcaagtccgtgacatgccacgtgaagcactacacgaatcccagccaggatgtgactgtgccctgcccagttccctcaactccacctacctcctcaggggatactctagaataactatcagcatcacggtgcactgc

SEQ ID NO: 514773 - DNA, 705 bp, Homo sapiens
  misc_feature (359)..(359): n is a, c, g, or t
gaggtattcccgagatgtgctgggtgcgtgggtggttggccccagagcgctgcgctggtgttgtgccagggtccagtgttgtcgtcgcggccagacgcgtgagtggaagttgtaaatggaccaaggttggctttggtgctgccgaaggacctgtagcgccagtgcctgactggaaaggtgaatgcatgaagcgtgagttgatggccgtggaggacaccacagctttgtggtagctacgacgtgggatcgctgcaccgtcaacggtgagtgaagcaggcgtgtgttggtttcttctgcactgcctggggacacaggattacgtttatacgaccagcctgtgtggttttgctgtgcaagtngcatcagttggagttatcgagccggatggccatgagctgtggtctctctcgcctcgaccctctgctttgattcttctcggtcacaacaatcatatattatacggacgacatggagcccatgatgatggccattattggaatcccctctatctcgacgtctgaaccccttaagaccgtcacaaagtaagacaaaagaatatacataaaacaaataaaaataataaataaataatataagaaaaacaaaaatgaatcataaattaaaacacatataataaaaaacaaacacaatcagaatgaattaatgcatgaaataaaaaatcaaaaaaacaacccatcatgtaca

SEQ ID NO: 514774 - DNA, 556 bp, Homo sapiens
  misc_feature (439)..(439): n is a, c, g, or t
tggtgctgtgagacttgagaacggctgtctattcatgtgtgaaagactttagaggcggtatagtggaaggtccctttgatcactggggccagggaccctggtcaccgtctcctcagcatccccgaccagccccaaggtcttcccgctgagcctctgcagcacccagccagatgggaacgtggtcatcgcctgcctggtccagggcttcttcccccaggagccactcagtgtgacctggagcgaaagcggacagggcgtgaccgccagaaacttcccacccagccaggatgcctccggggacctgtacaccacgagcagccagctgaccctgccggccacacagtgcctagccggcaagtccgtgacatgccacgtgaagcactacacgaatcccagccaggatgtgactgtgccctgcccagttccctcactgtagatntccttcccctcaacttcaagtcagcccaaatactacttcctattcccctagtcctcactgactttcaaggttctgatctcgtacctccatttgagagtactgttttatttttcagta

SEQ ID NO: 514775 - DNA, 1241 bp, Homo sapiens
cgtgacgcgtgggtcgacccacgcgtctgggaagctggagctgtatgcggggtccgcgtgtggaagtcttgtgcggtggagccatggtctggccaactgagcgagggggccattgcggccatcatgcagaagtggggatacaaacataaagcccatcctccaagctcatcaacatcctgtcccattactacggggaatagtccgtcgcgttatcgactgctcatgcagtgatggattgaacactctatcctctttcatgcttggcgacacagctcgcaaccctcctcgctggagcgaagaacaactccgtccagcaacctgctgtactgccacgacttcacagactcactcgctcgaacactcctgcaaccaccggaccgcgcaccacctacccactccttcgatgcgcactcccacagtcccccgcccctcacccctcgcccccaccccgccagctgaaccactcgcgcaactccacctgcccctactacccgcaccccgaccctccgcggccgccccgcccacgctaggccccctcccacccgcccatccagcccacgccccccaacccgcccagccagccaggcccccagcccggccacaccccggcacacgcatcgcgcgaactcgagggtccgtacctggccccctaaacgggccccactcgcgcgcctccccacaccaaccaccccggcacaaccgcctgcccccggcacccccagccccggctcaaccaccacatacactgccggcgcacccccacggcccaacacgctggccgcccccacaccagcccacgcccctcaccccccctcaaccccagtccccaccgacggcaccccacccacggccgccccccacgccacacccacacacaacaacggcacgcctccccgcacccccgcgcaggcacacctccccccaagcggcgcacacgcgaccacccacacgccccccagcaccgcggcaccccccagcccgacgagagcccccccacccaacccctccactctcaccacacctccccacctctcctcctccccctccacctcaccacctctctacccccccacccccccccccctcccacacccacctcccccccccacataccaccgccccccctccaccccacctccaacacctatcacacccccccaccccccccaccacccccccccatccccacaccccccacctccccccctcccacccacacaccccccacccctctacccaag

SEQ ID NO: 514776 - DNA, 471 bp, Homo sapiens
  misc_feature (432)..(432): n is a, c, g, or t
  misc_feature (439)..(439): n is a, c, g, or t
tggtgctgtgagacttgagaacggctgtctattcatgtgtgaaagactttagaggcggtatagtggaaggtccctttgatcactggggccagggaccctggtcaccgtctcctcagcatccccgaccagccccaaggtcttcccgctgagcctctgcagcacccagccagatgggaacgtggtcatcgcctgcctggtccagggcttcttcccccaggagccactcagtgtgacctggagcgaaagcggacagggcgtgaccgccagaaacttcccacccagccaggatgcctccggggacctgtacaccacgagcagccagctgaccctgccggccacacagtgcctagccggcaagtccgtgacatgccacgtgaagcactacacgaatcccagccaggatgtgactgtgccctgcccagttccctcaantccactnaccccactcctcgccagtccgtctctgctgag

SEQ ID NO: 514777 - DNA, 314 bp, Homo sapiens
ccggaatatgggacgtctggatctttataaagagcaaaaggcagacgcagtactctctcgagcttcatatttgtctacctggttaccatgaacctaaccataggacttgtgtcttatttgttaaatcttatacttaaaaaacaatagtagtttagattcatttccctttgtttttgacaggtgtcttattagctctcccagcatatcactttaaaatgcttcggcaaagaaagcatcacacacattgcattaggtttaatccacacccttggggcagtgagctaactttttaaagtatcctaattggaaataca

SEQ ID NO: 514778 - DNA, 237 bp, Homo sapiens
ccaaaatcgaattaagttgagatttaaaaaataactttaaaaaatttggctgggtatggtggctcatgcctatgatcccagcactttgggagaccgaggtgggaggatctcttgagcctaggagttcagtaccagccctggcagcatagtgagaccctgtctctacaaaaaaattaaaaaattagctgggggtggcagcacacacctgtagtcccagctacttggttggttgaggtg

SEQ ID NO: 514779 - DNA, 712 bp, Homo sapiens
tggtgctgtgagacttgagaacggctgtctattcatgtgtgaaagactttagaggcggtatagtggaaggtccctttgatcactggggccagggaccctggtcaccgtctcctcagcatccccgaccagccccaaggtcttcccgctgagcctctgcagcacccagccagatgggaacgtggtcatcgcctgcctggtccagggcttcttcccccaggagccactcagtgtgacctggagcgaaagcggacagggcgtgaccgccagaaacttcccacccagccaggatgcctccggggacctgtacaccacgagcagccagctgaccctgccggccacacagtgcctagccggcaagtccgtgacatgccacgtgaagcactacacgaatcccagccaggatgtactgtgccctgccgagttccccacctcccccatgctgccacccccgactgtcgctgcaccgaccggccctcgaggacctgctcttaggttcagaagcgaacctcacgtgcacactgaccggcctgagagatgcctcaggtgtcaccttcacctggacgccctcaagtgggaagagcgctgttcaaggaccacctgagcgtgacctctgtggctgctacagcgtgtccagtgtccagcctagacagtgcaccatgccacggaacaatggggagaccgttttcccgcactgcaagcgcaacacaccgga

SEQ ID NO: 514780 - DNA, 188 bp, Homo sapiens
gtctatagacgcagttctggggacctttccaccattggcacctacgaaagcaaatgatagataagccgggggcgccaactccaacgtgctcttcagtagttcgaacagacccaaatacaggaagttaaggatgacttcactatcatggaccagagcagggattgacttcattgacaagatcatctgag

SEQ ID NO: 514781 - DNA, 268 bp, Homo sapiens
  misc_feature (151)..(151): n is a, c, g, or t
ctgttcccccccctcccttttttccaccccacagttcctcctggaatctccccctccacttaattggagcctccatcccctagtagatccatcatgccacagctcctgctaactggtatgaacagtcacgctcacagctggtttcgcctgngccacccgagcgacgaggctgacactggaaaatgggtttttgcactgtttttttttggtttgtttttttgttcttttttgtttttttcctttaaaataaaaacaaagaaaagctctg

SEQ ID NO: 514782 - DNA, 686 bp, Homo sapiens
tggtgctgtgagacttgagaacggctgtctattcatgtgtgaaagactttagaggcggtatagtggaaggtccctttgatcactggggccagggaccctggtcaccgtctcctcagcatccccgaccagccccaaggtcttcccgctgagcctctgcagcacccagccagatgggaacgtggtcatcgcctgcctggtccagggcttcttcccccaggagccactcagtgtgacctggagcgaaagcggacagggcgtgaccgccagaaacttcccacccagccaggatgcctccggggacctgtacaccacgagcagccagctgaccctgccggccacacagtgcctagccggcaagtccgtgacatgccacgtgaagcactacacgaatcccagccaggatgtccacctcccccatgctgccacccccgactgtcgctgcaccgaccggccctcgaggacctgctcttaggttcagaagcgaacctcacgtgcacactgaccggcctgagagatgcctcaggtgtcaccttcacctggacgccctcaagtgggaagagcgctgttcaaggaccacctgagcgtgacctctgtggctgctacagcgtgtccagtgtcctgcctggcgtggcccagccagggaaacagtggcgaaaccacagccaaagggaaacatggcgaaagcg

SEQ ID NO: 514783 - DNA, 181 bp, Homo sapiens
tttttttcttgtctctcccgcagcgcgcgcctctcgcggcgctatctctcgctctctctcgctctctcgagctctcgagatatagccgagacacgagagctcgctctctcccgcgcgaagatctcacccccgcgcgctcgcgcgatatatatctcctcgcgcgcgcgccgagcgcgcccct

SEQ ID NO: 514784 - DNA, 891 bp, Homo sapiens
  misc_feature (6)..(6): n is a, c, g, or t
  misc_feature (53)..(53): n is a, c, g, or t
  misc_feature (55)..(55): n is a, c, g, or t
  misc_feature (67)..(67): n is a, c, g, or t
  misc_feature (73)..(73): n is a, c, g, or t
  misc_feature (97)..(97): n is a, c, g, or t
  misc_feature (102)..(102): n is a, c, g, or t
  misc_feature (116)..(116): n is a, c, g, or t
  misc_feature (229)..(229): n is a, c, g, or t
  misc_feature (231)..(231): n is a, c, g, or t
  misc_feature (248)..(248): n is a, c, g, or t
  misc_feature (250)..(250): n is a, c, g, or t
  misc_feature (252)..(252): n is a, c, g, or t
  misc_feature (254)..(254): n is a, c, g, or t
  misc_feature (276)..(276): n is a, c, g, or t
  misc_feature (278)..(278): n is a, c, g, or t
  misc_feature (280)..(280): n is a, c, g, or t
  misc_feature (299)..(299): n is a, c, g, or t
  misc_feature (325)..(325): n is a, c, g, or t
  misc_feature (337)..(337): n is a, c, g, or t
  misc_feature (386)..(386): n is a, c, g, or t
  misc_feature (397)..(397): n is a, c, g, or t
  misc_feature (400)..(400): n is a, c, g, or t
  misc_feature (414)..(414): n is a, c, g, or t
  misc_feature (431)..(431): n is a, c, g, or t
  misc_feature (458)..(458): n is a, c, g, or t
  misc_feature (462)..(462): n is a, c, g, or t
  misc_feature (503)..(503): n is a, c, g, or t
  misc_feature (518)..(518): n is a, c, g, or t
  misc_feature (520)..(520): n is a, c, g, or t
  misc_feature (655)..(655): n is a, c, g, or t
  misc_feature (657)..(658): n is a, c, g, or t
  misc_feature (707)..(707): n is a, c, g, or t
  misc_feature (723)..(723): n is a, c, g, or t
  misc_feature (735)..(735): n is a, c, g, or t
  misc_feature (751)..(751): n is a, c, g, or t
  misc_feature (810)..(810): n is a, c, g, or t
  misc_feature (813)..(813): n is a, c, g, or t
  misc_feature (818)..(818): n is a, c, g, or t
  misc_feature (888)..(888): n is a, c, g, or t
tccctncccaccatccctcttcagcatgctcggacgggaccctgaagctcaananagcagcctccanggaagnagatgtaaaaattgtaataaaaanagaantccaggaagaggangtggtggccacacccgtacatcctactgacctagaggctcacgggaccctgtttggaccaggccaagccacacggttcttccctagtcctgcccaggaaggagcctgggaaancnagggcagctccttcccnancnangaccctgtgctggggctgcganancncgcccggcctgaaaggganatgggtgagctcagtcctgctgtggnccaggaggaganccctcctggggactggctcttcggaggggtccggtggggctggaatttncggtgtaaacngcnagtgggcctgaacncgaggacggggcccgangggcttccttactcctccccggacaangganaggccatcttggaccccagccaggccccaaggccattcaangaaccctgtaaatanantggccggaccaaaggctttggccacaagacagggctgaagaagcaccccgcggcgccccccgggggccggcccttcacctgcgccacgtgtgggaagagcttccagctgcaagtcagcctgagcgcgcaccagcnanntgaggcgcgcccgacgggtcgggcccgggcacaggcgggtggcggcacnggcagtggcggcggcnggtggcggcacngctggggggcagcgcncgggcatggcagcgccctttcggtgtgggggagtgcggccgttgcttcacgcgccccgncancctcntccgccatcgcatgctgcacaccggcgagcggcccttcccctgcaccgagtgtgagaagcgcttcaccgnacg

SEQ ID NO: 514785 - DNA, 574 bp, Homo sapiens
tggtgctgtgagacttgagaacggctgtctattcatgtgtgaaagactttagaggcggtatagtggaaggtccctttgatcactggggccagggaccctggtcaccgtctcctcagcatccccgaccagccccaaggtcttcccgctgagcctctgcagcacccagccagatgggaacgtggtcatcgcctgcctggtccagggcttcttcccccaggagccactcagtgtgacctggagcgaaagcggacagggcgtgaccgccagaaacttcccacccagccaggatgcctccggggacctgtacaccacgagcagccagctgaccctgccggccacacagtgcctagccggcaagtccgtgacatgccacgtgaagcactacacgaatcccagccaggatgtacggtgaacgccctcagttccctcaactccacctaccccatctccctcaactccacctaccccatctccctcattgcgaaaacatcttcccaggattatgggaagtgcccaagatgtggttacgggtgtacaacagacagttggcttctgtgtagccactgcgccttaa

SEQ ID NO: 514786 - DNA, 438 bp, Homo sapiens
  misc_feature (383)..(383): n is a, c, g, or t
tggtgctgtgagacttgagaacggctgtctattcatgtgtgaaagactttagaggcggtatagtggaaggtccctttgatcactggggccagggaccctggtcaccgtctcctcagcatccccgaccagccccaaggtcttcccgctgagcctctgcagcacccagccagatgggaacgtggtcatcgcctgcctggtccagggcttcttcccccaggagccactcagtgtgacctggagcgaaagcggacagggcgtgaccgccagaaacttcccacccagccaggatgcctccggggacctgtacaccacgagcagccagctgaccctgccggccacacagtgcctagccggcaagtccgtgacatgccacgtgagagcancacacgtatcgctgacagtattgtgcctgtgtctaagcccaggcctacgaaatcg

SEQ ID NO: 514787 - DNA, 346 bp, Homo sapiens
cgaaggaagggacaactactagtggctggtacggtagttttgactactggggccagggaacctggtcactggtcaccgtctcctcagcatccccgaccagccccaaggtcttcccgctgagcctctgcagcacccagccagatgggaacgtggtcatcgcctgcctggtccagggcttcttcccccaggagccactcagtgtgaagaccttggggctggtcggggatgctgaaggagactcgtgaccagggttacctggccgccaggggtcgaggtagtaatgggggaaaagttgtttgtagacaaaggcgccaagggtgtacacgtaatacggaggctatatctg

SEQ ID NO: 514788 - DNA, 334 bp, Homo sapiens
ccccacttgatgcccctggatgcagttgggtggtagcagctaagagaatcactgtcttggtcccaaacaagatatattgtgagtttctaattttattcccttcttgagcctattattcagaaaaatgagaaccaaataggcttcatggcttttacttcgacttctttaccttcttttgacatggctggtcatgggacttcacacccgcaagactgtttctccccctctttctttctcatcgccatttgagatttaagtgatgatttgtattttcacttttgtctggggacagtcctagttttttgctcgttgtcccgcatccgagtgctcgatg

SEQ ID NO: 514789 - DNA, 309 bp, Homo sapiens
  misc_feature (81)..(81): n is a, c, g, or t
cgagagatcgagtcggcgagagggattcttctggctggtccccggcccacaacggtatggacgtctggggccaagggaccncggtcaccgtctcctcagcatccccgaccagccccaaggtcttcccgctgagcgcagcaccccccagatgggaacgtggtcatcgcctgcctggtccagggcttcttcccccaggagccactcagtgtgacctggagcgaaagcggacagggcgtgaccgccagaaacttcccacccagccagatgcctacacggggacccatgtacgagaaggggatacctcaagga

SEQ ID NO: 514790 - DNA, 168 bp, Homo sapiens
gaattacggacaagaggtaagtatctacgccatgtaaggacctccgggcacgtttacggagagtacaaggtgagttggttcgtctgcctgcccacccccaaatgccacacgccgcccctctaccgcatgcgaatctttgcgtctaataatgtcgtcggcaagtcccgc

SEQ ID NO: 514791 - DNA, 125 bp, Homo sapiens
catatcatgcatggggtggactctccttcacagtgtgcggcgacttccatggacaatttctatgacctccaagagctgttcagcagtaggtggcgacgtccctccgaccaactacctcttgcatg

SEQ ID NO: 514792 - DNA, 891 bp, Homo sapiens
ccgaggacagggggtcctctccgctgtcgcgtctgtctctgtgattcggtgtgttgtgttcgttttgagctggcgtgtctttcggtcgtgctgacgctttgtgagtggtttgttaggtccttctgtctggtgtgttgccgcgcttgtgttcgctcgctatgtttgttgtctctgtctctcgttgtccgctattggtggtgcggcgcggcgcgccatttttccgcggatcccccgcttctggggggacgccgttcgccccctctccgggggtttccccccccccggtgtttgtttacgcccccccctatgggctgtttttcccctcccgtggacccggggcgccgtatctcttggttgctgcagaccgccgcgataactttcttgtggcccgccaccctttaccgaaggttccctttgtccggtcccgcgacaatttccccgggttgttgcgccctttctgccgccggcccctgtcgccgtgggtgtcaatctgtgtcccccgcgcccctttgggagtagtatcaagcccggggtcttgctccccccggagcgcccccccttttgggcaggcctccccggagggactcccctctgggaacggggcgagatgtacgcttatcacaaaagggggggaccccccgcagcgcacagccgaccccggtcggggtgccccgacgcctggcctggccgagcaaatttctttcagaaggtccatttccaaccagcctgttcagaagcctcttttgggaccccgccgatcatttcattggccccccccctgaatcatacagggtttttcagagactcgcgttgcttccccccccccaaggacccgtttttaatccccccccttgggccccaaggaaaaaaacctttaacccccacaaaaca

SEQ ID NO: 514793 - DNA, 131 bp, Homo sapiens
aaaaggtttctttttttttccttttttgtctaagaaggtgccggttattttttttggcctggttgatggatgtgtgaaacaatgttgtccaaccataaacaggaattttattttgctgagttgttctaaca

SEQ ID NO: 514794 - DNA, 179 bp, Homo sapiens
tcagttagtcggggcagtgctcaccacaacccttggagcccccaagcatcccacgactgctccccagtacacccaactcactcttcttatgctgggcctgctgcaccgatgccctcaaggctgacctgatgctgccggtggagtgtgagccaaggtgccagtaccaaggttgagggtac

SEQ ID NO: 514795 - DNA, 261 bp, Homo sapiens
catgagttggcttggggtgatagggtatcaaggtatcgatagaatgagctcttcctgaatgtgctggaaagatgtgaacctgatcatgtccccacaagggttcgtgctgattgtccatatgtcggtgtgggtggtgaatagtatataggtgagtgttatgcctgaatgcaggtaggggatgaatgacgtgattgtcagagaacagcatgggcgaaggcacagctgatgaaacaagcaagagcgggaagcaatcaattgcca

SEQ ID NO: 514796 - DNA, 272 bp, Homo sapiens
ctcaagatgatcccgggttgttaagagagaaggagaggaatagcaacttggaaaatatatttgaggatatagtccatgaaaatttccctaatctcactacaaaaattgatatgcaaatccaggaaatacagagaaccctggttagatactatatgagacgaccatccccaaggcatgtactcatcagattcaccaaggtcaatgtaaaagaaaaaatcttaaaggcagctagagagaatggtcaagtcatatacagagagaacccaatcagg

SEQ ID NO: 514797 - DNA, 618 bp, Homo sapiens
  misc_feature (183)..(183): n is a, c, g, or t
  misc_feature (200)..(200): n is a, c, g, or t
  misc_feature (240)..(240): n is a, c, g, or t
  misc_feature (305)..(305): n is a, c, g, or t
  misc_feature (316)..(316): n is a, c, g, or t
  misc_feature (335)..(335): n is a, c, g, or t
  misc_feature (363)..(364): n is a, c, g, or t
  misc_feature (544)..(544): n is a, c, g, or t
  misc_feature (612)..(612): n is a, c, g, or t
agttcgacggagactctccgaagtaaccaggaagaagttgaatggctaaatagaccaataacaggctctgaaattgaggcagtaaataatagcttaccaaccaaaagaagtccaggaccagatggattcacagcgcggattctaccagagtgtacaaggcaggagctggtaccattccttctngaaactattccgatcangtagaaaaagggggaatcctccctaatctcattttatganggccagcaccatcctgtataccaagagcctggcatgagacagaaatcaaaagaagagaagtttcnagaccaagtanttccctgatgaactgtcgnatgcaaagaatccaagaataaaagtccnntggcaaagccaaatccagggcagcacatcaagaagagcttatccacgcacaagtgaagggttggcttcatccctgggatgcaaggctggtttaacatacgcaaatcaataaaagtaatccagcatataaacaggaccaaagataaaaaccacatgattatctcaatagatgcagaaaagngccttgacaaaattcaacagcgcttcatgctaaaaactctcaatatattagatattgagagtctccgncgaact

SEQ ID NO: 514798 - DNA, 133 bp, Homo sapiens
tatgtggtcgttgagggcatgccagccccagcgtcaaaagtggaggagtgggtatcgctgttgaagtcagaggagaccacctaggtgctcagtgtagcccagagatgccctattagaggggccctccgtacgc

SEQ ID NO: 514799 - DNA, 514 bp, Homo sapiens
  misc_feature (144)..(144): n is a, c, g, or t
  misc_feature (170)..(173): n is a, c, g, or t
gcagccacactcaaatttttaaagcatgagagaagatttaggattttatggcataatactttcttccgacatgggaaagattgttggtatgtgcacctcactttataaaccccgacatttaggtcaaaagaaacttgcccttgnggaaagagaatctgtacaagtccggnnnnaatttgcggggatggggaagggtttgggacactcactttggacatctaggttaatcagagttactgcataatggctccccttctattttgcttccctttatgtatgggtttgtttagacaaggagcagcatgactcttgtatgttgccatagcacatcaaataggaaaaaaaaatagcttgaagaagttggtgaggaaggagctatttaagtcagaactctcagagtgacaaactcaactaaaattaaatttcacaaaagtcaatttattagctttcataaacgataattgtaatctcctagggtgacagtggcctccggcatagctggatccagaagctc

SEQ ID NO: 514800 - DNA, 439 bp, Homo sapiens
acaaagagaaagacacaagaccatcacacagcaagtctccccaggacacacagaaagactctgcagcagtgaggtaggaaccctgccctagagggacaatcaacgtcacatgactatgccatctcctaatagagcaaaaagtggtcagtggctgtaaaaacctctacatctgacacagtgggacatggcggaagcattactactttttaaattattattatactttaagttctggggtacatgtgcagaacgtgcaggtttgtaacacaggtatacacgtgccacggtggtttgctagcacccaccaacccgtacatctacattaggtatctctcctaatagctctccctcccctaacaggcccatcaacaggcccggatgtgtggtgttctcctccctgtgtccatgtcttctcattgttcaactcccacttacgagt

SEQ ID NO: 514801 - DNA, 750 bp, Homo sapiens
  misc_feature (2)..(2): n is a, c, g, or t
  misc_feature (100)..(101): n is a, c, g, or t
  misc_feature (239)..(239): n is a, c, g, or t
  misc_feature (242)..(242): n is a, c, g, or t
  misc_feature (250)..(250): n is a, c, g, or t
  misc_feature (254)..(254): n is a, c, g, or t
  misc_feature (271)..(272): n is a, c, g, or t
  misc_feature (334)..(334): n is a, c, g, or t
  misc_feature (440)..(440): n is a, c, g, or t
  misc_feature (444)..(444): n is a, c, g, or t
  misc_feature (458)..(458): n is a, c, g, or t
  misc_feature (465)..(465): n is a, c, g, or t
  misc_feature (509)..(509): n is a, c, g, or t
  misc_feature (524)..(525): n is a, c, g, or t
  misc_feature (530)..(530): n is a, c, g, or t
  misc_feature (547)..(547): n is a, c, g, or t
  misc_feature (556)..(556): n is a, c, g, or t
  misc_feature (740)..(740): n is a, c, g, or t
gncatatcggtgcgggggtggctttgggggatgggggactcaggttcttcactggaacctggggtcatgtatcatgtaccaggtggggagaagtgtagcnnatctcagtgccaatttgaggggaagcccgtcattccaggagaagagctgggggggaagggctgttggctttcataatgcggtcttaattatcccgtccccctcctgccacatggcggaggccgggtggcggtggtggnggngggggggncccnaccccccgtctctggcnngcccccccgggaaaggggggctccgaaggcgtacgggtccgggtatcctcgagtttcttggncacttcgggtggggttcggtcccgttcttcaggggcgttcttttgtttgttgggttccctggaattgaactgctcccagaggtctccatccatcacattcttcccngggnagtagtaggggcgncagctgnggtggtcccgccccccgtgtgggggttgttcagaccgccgtgcntttccccctgctggnngaggncatgggcctcgtggggngtgggtggnacaaggatgccaattcctccagacaaggtggtatagacaagtgattctgagcctccagggatcagcgtggtcttctgcaaggacagcaccgtctccccgacatggtagttcatgatcacctctgccttctgggaggccccattgagcaagccacggtcccacagggctttgtttcctgtaggancctcatctac

SEQ ID NO: 514802 - DNA, 181 bp, Homo sapiens
actgatgtgttagcttccaggtctcccagtccaggtactttctgatcgtcctgtcgcttctcatagcccccagaagtccgtcagcgcctctctgcttacaaacgctccgggttttgtgatggctggcatacgcactgggtgaccattctccccttgacctcctgccgcagcactcccacca

SEQ ID NO: 514803 - DNA, 420 bp, Homo sapiens
  misc_feature (23)..(23): n is a, c, g, or t
atttggtcgcgtctgcggtcatntacaagttatagtgagcagaagtggtagagtgatgaatcatcatagaggacgtgctgagtgatgatgctccttccagcctcagctatgcttccaccttgcaggccaaccgagaagattccatgaatatcctggaccctgaggatgaggaggagcacactcaggaagaggacagcagtggccgttacgaggatgaggatgatagtcaggatgaagaggagtgaggaggaggaagatgaggaagatcatcaggaggatgatcaacgtgcaagcacgggagatgaagcactatgactactattgctctgagatggaatcggatgaggattatcctgatatgaacgcttctcccttggtccgatttgagcgctttgaccgggaggatgatctcatcattga

SEQ ID NO: 514804 - DNA, 422 bp, Homo sapiens
gccggtaccggcagcttgatctagagtgtactgctgcagagccctctccagaccatggatggacacagtcagaccatttaggatatagcctgcattaagggccttctgcttctgctccaggacatttaggtagaaggtggctcggtcccttacttcattgtcatcatgctcagctgattttttgtatttttagtagaaacggggtttcactatgttggttgggctgtacttagactcctggcctcgggtaaggtacatgcctcggcctcccaaagtgctgggactacaggcgtgagtcaccatgcccaacttatttatttttttctttttaatgagacagggcctcactatgttgcctagtctggtcttgaactcctgggctccaacagtcctcccacctgcctcctgagtagttgagatta

SEQ ID NO: 514805 - DNA, 359 bp, Homo sapiens
agcggacattagctagagcataatttattactaagaccccaaaagcaagtacaacaaaaataaaaataaataaatgtgatctgattaaatgaaaatgcttctgcacaggaaaagaaataatcatcaaagtatacagacaacccacagaaagggagaaaatatttgcgaactatacatctggcaaaggactaatatttagaatctacaaggaactcgaacaaattagcaaggaaaaaatcccatcaaaaagtgggcaaatcatatgaataaatatttctcaaaataagacatacaaatggccgaaaaacatataaaaaaatcaacatcactaattatcagggaaatgcaaatgtccgcgg

SEQ ID NO: 514806 - DNA, 222 bp, Homo sapiens
  misc_feature (1)..(1): n is a, c, g, or t
  misc_feature (78)..(79): n is a, c, g, or t
nggggggcccccgggggggggttaaagcccccccccccccccccttgggggggggccggggccaaaaaggggttaatnngccggggttcccccaaggggaccctttttttccccccccaatttaagggggcttaaaaaaaaaaaggggcctttaattttaaggggggccctttttggggaaaggggtttttttacttttttttaaaaaaattttccccccca

SEQ ID NO: 514807 - DNA, 394 bp, Homo sapiens
tggtgactctagaggacccccagacctaaccccacgagcctcgctttgcagcctacaccacagctcacggcaacgccggatccttaacccactgagcaaggccaggtatcgaacccacaacctcatcgttcctagtcggatttgtttccactgtggcacgacaggaacttctccgtgatctcttttctaaaaattgtattggagtagagttgacttataatgtcgtttaagttttaggtgtacaacaaagtgaatcagctatacatataaatatatccattattttccccgtgtaagtaattacaaactattaagtagattttcctatgctatccagtaggttcttattaatggtctgttttacacaggagtgtgtatgggggggttaggtctg

SEQ ID NO: 514808 - DNA, 595 bp, Homo sapiens
gctgctcctagaccccatttagttctatgagatcagcttctttactggttccacgagtcatgtctacacagcgtgttgctaacacatctacactagacaatgggtccacgtcctgctagctgcaagccgctgcagcttactctcttgctgtccgctcctgttccactagtatattatatgtctgcaggtagttcgcaatctctcatgctacatcttaatgcacagccacaagttacaatgcaacagcctgctgttcatgtacaaggtcaggatcctttgactgcgtccatgttggcatctgcccctcctcatagagcataagcaaatgttgggtgaatcggctgtttcctctgtattcaagccatgcaccctactcttgctggtaaaatcatctggcatgttgttggagattgataattcagaacttcgtcatatgctcgagtctccagagtcactccgttctaaggttgatgaagctgtagtctgtactacaagcccaccaagctaaagaggctgcccagaagcaggttaacagtgccactcggtgttccatactgtttataatattgactcagggaccatggcacgatacccc

SEQ ID NO: 514809 - DNA, 121 bp, Homo sapiens
caaatcgctgggtgactgccaccgtgtggccagtcactgggaagggagccccagagagccggctgtctgacatgatggctcagtgatggtcatccaggttgaaaactgacctgtgtgatgt

SEQ ID NO: 514810 - DNA, 768 bp, Homo sapiens
aacacctggaatttggttactccactgacatgtgatcgaccacattcatgctgtaatggaaaccacttacaccgttctacaacaatgaagacatccaaatctggcgtgaatgaaatataattggctgatcagtggaataatggagaataaacctaatgtattcataacagatgtatgtgaaagtgtacaatgagaatgttacttagggaatgacgtatgaactttgaaaaggaagactgtaagcatacaatgtttgtacgatttgtgggggaaacactattgaattttgtgcaaatggcaaagatcatcagcactgatataatgatacatgactgacactttgttacactaggtaataaaaagtgattcatacagtctaatgattatcaccgctgtaagggttgttataaaactgcatttatgaacaagatctatgacgcagatattctccgtgggtgctcctcgaaaggaactactattaaggttcgattgaaatgtttgtcaatcgattcgtccttgccctattgatcctgtctaatcgatgctgtttgactatctacacctaatattcagagggtaactgggcaaggtatgagggaaggaaaatacatatgaggataattgttatagaatgacacaaatttgagtttagtgaagccctgaacagcatggtcttaaggacgtgtatctggaacttggagaaaagcggagttgagagacagttctatagattaaatcctggttaggacaaagattggcattagaaga

SEQ ID NO: 514811 - DNA, 606 bp, Homo sapiens
gccgccgccggagccgcgcgcagccatggccgataaccccagcttggagaaccaccgctttaagagcttcaacgaacaaggtgccgctgatgtgtgataatcaatgcgatagacatagaaatgaagtgacagtggaactgcggaagaacacacgagatgaacacttattgtaaacaagagaaatgttccccaagaagaacagtctagacagattcagatgttgatgctgattttaaagcacaagatgtaaccctagaaggctatattgcagaatgccacaagtgataacccagttggtccaattgagtgctgtccagtgctagcaacgaacaactagttatccagttgacacgcaaatccagccgagttgatgacttaataaaatctgggatttgaccaattctagtcaaatgtctagaaagggcactgatcctcctacattacagctggcaagctgcttgcggcattaactaaccatagcatcaggaacttctgcacagactcaagctgtcgtgcagtactaatgcagtacctcttaacctgagacttcttcagacaaccagatccagaatgttagagaacaagcagatatgggcttagggaaac

SEQ ID NO: 514812 - DNA, 741 bp, Homo sapiens
gcaggttgtaaatccatgtggtcgggggcttggaccctggcggccaagcggcacgtgggcctcgcagatgtgcacgcgccggagcgagcggcgcaccagcccccggtccggcgccaccatcttcgcgctaagctctgggcaaggccgctgcggcatcgcagtgatccggatccatgcggccccggcagcggtgcacgccctccgaattctcaccgcaccccgagagctgcaccttgctcgcgcatgccagcctgcgcctgggtcaagctgattcccctgcttccggggtagcctctggaccgcgcactggtgctctggtttgcccaggtccccagagtttcagccggtgaggactggcgtggagttccactgtgcatggaggcccggtgagtggtgagcggtcgtcctgcaggccgttgggcagcgtgccggggcttcgaccgtgcggaggcaggcggagtacaccaggacgggccgttcgccactggcgaagctgaaacctgaccgaagctggagcgggctgggcggaccttatccacgctgtgagagcagaggcgcagcggtgcgggccaggccccgtccgggcagtctgggccggagaagcttgggtgcacctctgccgtggcttgggccgagacccgtcaccaagggcttctggcccggttggagggcctatagtcgatttcggcgacggctgactacctggatggatggggttccttggtggcagcggattgtgtg

SEQ ID NO: 514813 - DNA, 200 bp, Homo sapiens
cctggcagcttttctccaggcatcagggtcactaaaaactgattgtctaaaattattggattcgtattctgatattaagggggaaaatgtgatctgcgcctgatctttcatctgggattcttataacagctttggcttcagaaaaactcagaataaaaggccttgacttaaacagctgagacaaagaacaaaacaaaaaa

SEQ ID NO: 514814 - DNA, 1420 bp, Homo sapiens
actagttctagatcgcgagcggcgcccttttttttgttttttcgcaacggttttgccgccaaaacacaggtgtcgtgaaaactacccctaaaacccaaaatgggaaaggaaaagacctcatattcaaccattgtggtcgttcattgtggacacgttaaatttcgggacaagttccaccacatacgtggccagtcgtgactctataaagtgcgggtggcatcgacaaaagaaccattgaaaaatttgtgaaaaggaggcgtgctgagaatgtgggaaagggctccctttcaagttatgtgccgtgggctcctgggattaaacgtgaaaagctgagccgtgtgaccggtggtattcaccattgtgaatatcctccttgtgtgtggcacaatctggaagaaccgagccaaagtcacttatgttgaactaatccatggaatggccccccagggaaccacaagaagacacttttatatcccaaacacctattgtattcacggggggcactatctctcgaggccgtgaaaacgaggtgagcctgagaaccctgaagatatggttaagggcatggctggagtttgtatggggtgagaatttagagacaggctggggtatattcttccccaaaaatatgggggcaaagacccccgaaaaagccatgtgccccttttcttgggctattacaccatctggggtgtgtggacaaaccacaccttaaattggtggtccgggtagtttacaccagaaaatggtggatttctcccaactgtggaggccccaccctcataacacgccccaggcaaaagcaggatatatttgaaggacaaaatttggtatctaaccgcggaacgtctcaacggcaacctttactactcttgccagcaacacactttgggtccatacaaaacccccggaaacaacaaagtaagccacttgtgcggtgcccaaaatttaccggggctggggaaaactgtgaggcaacaacccgagtcccggggagccccaagaggcgctaaacaattcaccccggggtacacacgagcgagacggggcgacacactcaccccccgcgacagggagctaggcacaagcacgcagtgggcaacaaccacggcgatgtataagaggccacacgggaaagggaaacatcaacaacacaacacatcattgcccacgttgcgacaaaacctccagtgaccaaccgacaccacccacgggagatgctatacacacatagtgtggcgctcgagagcacaaaagacagacttgctgcacaccgaagaccaacacaggaggacaacaaacccgcggatgagaggaccacacacgccagcaaaaaagaaaggaaaaaaaccaagagaaacccagacaacaacgacagcaaatcgccgacaaccgagctcacacacaacaacgaacacac

SEQ ID NO: 514815 - DNA, 345 bp, Homo sapiens
gtttcctccttgccacccttccagcctttcagggtttgggggccatttagacagcccatcctgcctgccctgagtgggagggcaaaacatgactggctcaggatggcctgtcccccaagttgcctcaaaaaaaccagggacatcagtgcagttggatgcccagtgcagtaggttttggtaagtgcacacgggtgtgtacctgcccttccaaacctcacaggaaagaccaacccccccccccccccaggttatcactgttttggcccctgtcaccaaaaattaattttgccctttttgaaactttatgtcagtgaaaattaaagtttgtgttttgttgtttactga

SEQ ID NO: 514816 - DNA, 616 bp, Homo sapiens
  misc_feature (183)..(183): n is a, c, g, or t
  misc_feature (215)..(215): n is a, c, g, or t
  misc_feature (266)..(266): n is a, c, g, or t
  misc_feature (304)..(304): n is a, c, g, or t
cctcccaaagtgctgggattacaggcgtgagccaatgttcccaagcctattctttagtatttaacagaatgcggacaagtcacattatcaatgattcgttactttacacacagggaagtcttctgttatacaactggttgtgaacacccagaacaaagctcttacagcctttagatggccaanaaattctcaaagcctgggcatgttctgaaaanacttcaaccacatcttttaaaaaacatagactctcagtcgggtgcggtggnctcacacctgcaatcccagcactttgggaggccgatgngggcggatcacgaggtcaggagtttgagaatagcctgaccaacatggggaaaccctgtctctactgaaaatacaaaaattagccaggcttggtggtgcgcagctgtaatcccagctactcgggaggctgaggcaggacaatcgcttgaacccgggaggcggaggttgccgtgagccgagattgtgccactgcaccccagcctaggtgacagagcaagactccatctgaaacaaaacaaaacaaaaataacatacactctctccccgtttcagaggactgggtggaggctatgtccgcctcccctggaagccc

SEQ ID NO: 514817 - DNA, 1478 bp, Homo sapiens
gcaccgactaagtttgacagtcaaggatcaagccgacccatcgaggtcgctaagttagttatgccattcaagtacgcccaccttacgatagtatttgtatatatagccgacttctcgaagtagacaagcgcatagttatagacatggtctccgcgcaggagcctattcgcctttcgcgtaacccgccacgtaaaactacaccacgcagcgcgtacggtgacaattgaacgtgctaccttatcacatttgcgtacgccttaacctcgcactgtgcaaagcgaaagttccactcgaggcccagatagcccctaccaggctgtcacgtaccatatcaatttcaacatgggtcggaaagcatccacctttgattccgatcaggcaacaacaatcacacaaccgatacacttaacccccttctatcccttcaccttactctctcacacactacaatccaccacccttaaccataacaaattccattcaccaattataacaacatatacacctcacaagccataccttcttccaacaccatagcccaccagcccctaggaaatcaccgctaaacgttttcacaatttaattatgatgtcgagcacgttaactttcctcatcctccacatcactccagccacattacatagccgacacaccccacgcagacttattagtacttcgccagccactcaaaacccccattatcgcggtcccctttagtgtccaagattgcgcaaaacgcctcccaggtaaccattggaacggtaggcagataaattccccaaacggatactccgagtgtgaagactgctggcccgcccattggcaacacgccggcacttcagttgtggctccaatgctcatagttacagccgttacttaccgccgaataacgtattatgcgacttagaactatatagtgccgcagatgaacggtgccttaccgtgggagcaaattcctcaccaagtttgagtcccacacgccacattgaagtgcttccaaacgattccggagtccaaggccgttctacatccatctcttataagcaaacacactttcccaaagactctataacatccaaactccccacccaattataaggtagaccacataaccccacctctacaactacccactccacacctttctcccctaacatcatcctcacagcccctatcgctcacgtcagagtatccacttgtcctgacaaccatcgtatgtgagccaccacgccaacaagtcagtagggacaacacaagctgcccgtcgtcacgctgtctcgcacccgcaacagacgcagatgtacacccccacttaggcataccacgcctaccccacgcagccaccagccgctcaggagcgcggcagccacttattctagtacacatcgtttaacatatcttagcacacccatacgtataagcggcacctgttcgatagaaccccacccacaacaaccgcttacgacgcgccacgtctt

SEQ ID NO: 514818 - DNA, 234 bp, Homo sapiens
cttctgaacgaatatcaacgaaagctgtggtacttatatgcatagggtgttttgttgttttgtttagtggcgtgagattctgtgagctgctaattcaacaatctcgatagaaaacatgactggcagttagaggcctctgaccctagaattttaacagaagaatgtgtcacagaattaaacaaaagaagaatacatttcagaggggaaacttacacatagaaaaaaaagtcgacg

SEQ ID NO: 514819 - DNA, 758 bp, Homo sapiens
gccgcagcatggagggaggcggcggggcgggcggcggcggctcgggtggctgcgctgggagtgccggcggtgagaggctcgcacgcctccagcccggcctggcccccgggagggagagccgagcagcccggctctgggctacggactatgggcgaatagctctgaccaccggcgaaggtccccgtctgcgcaatcacggtgccaagcatagtgcagtgttgggcgaggacagatggcgcggatgacttctatcagctgaggatcctgaccctggaggagaggggggaccaaggccatagagagccaggaagagcggcagggcaagatgctgctggcgaaaccgagtactcactgtgtctctcctgacacacgcaggatggcgtggtgcaccaccacggctcttccaggaccgcacctgtgaaaatcgtggaggacacaagaattccagcccgggtggtccccgaagatgaaagaaggcgcatcttgcctcgtcctggactggcctcttgtgcatcatgacgttcagcgataaagaccgctgaacctcatccaaccttgcagcagctacgttcatcacgggacgacagaggccccgagcgacatgagacgactggggggaaatctctagcgaaacgtgagtccgcgtgggaggaggcccttggaccagaagggagttattcgtggagcgacgaagaccgtgggagttggagcaacatggtgccacacacaggagggcaacgtcggaaacacatcgcgcg

SEQ ID NO: 514820 - DNA, 547 bp, Homo sapiens
cggtaccagagaaccaacgtattctctcactggcctgtaacatttttctcatttcaaccttggtgaatctgacgattatgtcttggggttgtttttctcgaggagtatctttgtggtgttctctgtatttcctgaatttgaatgttggcctgtcttgctaggttgaagaaattctcctgtataatacactgcagtgtgttttccaacttggttccattctccccgtcactttcaagtacaccaatcaaacttaggtttggtcttttcacatagtccaacatttcttggaggctttgtttgttccttttcattcttttctctctaatcttgtcttcatgctttatttcattaagtccatcttctatttctgatatcctttcttccacttgattgaatcagctattgatacttctgtgtgctccatgaagttctcgtgctatgtttttcatctctcttaggtcatttatgttcttctctaaactggttattccagttagcgattcctctcatcttttatcaaggttcttagcctccttgcattggggtt

SEQ ID NO: 514821 - DNA, 271 bp, Homo sapiens
ttcgaagagtggactgtgcagtctgcacatatctttctttggatccattcttcccagcttgtttgctcaggctaggagcacactgtgtgtctccagttccttcaccacgaggacaggagaatcggagatgtgcagtttgcccctgggcctatgatcatctgcagagtcgacgagaaccattagaattctcggttccacatgtagtagaaaaagtctacgataatgtcgtcccgcatctttaatcataggtcatgcgatgctaccctcgcga

SEQ ID NO: 514822 - DNA, 83 bp, Homo sapiens
ctcgggccctgatatatcagctagcacgccgcatacgtggagaacgtgctagaatccactatgatgggacacatttcattctc

SEQ ID NO: 514823 - DNA, 195 bp, Homo sapiens
tgtctagtgactgagtatcgtaatacaatgccagtcaggccacctacggtgacaagaaagagggggcgagggctcagagcactgcacgcagatcctctcctatcgcttccgtggagtgtggcgagtcagctaaatactttgacgccggtggggatagcgctgattatggtagcgcactccaatcggggcatctca

SEQ ID NO: 514824 - DNA, 160 bp, Homo sapiens
tggctgagaaaccctggcccccagcatgacaagcggactctgattggcgacatggtgtgcttcttgttcataactcccgtggccaccatcttgggaacgtgcattccccgatgaagcttatcaccatcatggccatctcggtggtgtgcttcttcttcct

SEQ ID NO: 514825 - DNA, 469 bp, Homo sapiens
atcgtaaagagctatagagataagcctcagcattattaatcatcaggaaaatgcaaatctaaaccacattgaaatataatatcacctcacacctggtaggatggctgttatcaaaaagatcagagatcacgagtggtagtgagcatgtgggaacaagggaacccatgtacactgtaggaggaatgtaaattggtatagttgttaaggaaaacagtatgaaggtttctaaaaaaaataagatagaactcttctatgatctagcaatctcacttctgaatatatattccaaggaaacaaaattactgtctcaaagagatatttgcgctcccttatgctaaatgcagtaagtcagttacagaaagacaaatactgcatgacctcagtttcatataaaatctaaaaaagttgaactcctgtacagaaactgagagtagaagagtggttaccagggattttaggggggaccagg

SEQ ID NO: 514826 - DNA, 292 bp, Homo sapiens
gatcgaggaaacaagtataacaggcgctatcgttgctacatgttgcaaccaggtataacgggggtaccttttctaatgggagtcatatgggatggaatgggtgcccctctctgcatgatctagttgatgtgcatttagctgccatgcacctgtccccctttaatactgggcatgggaaagccatctcaagaggcatcttctacatgtggtgtacgcattaaaataatttcaaagatatctgagaaaagccgatatttgccattcttcctatatcctggaatatatcttgcat

SEQ ID NO: 514827 - DNA, 288 bp, Homo sapiens
  misc_feature (87)..(87): n is a, c, g, or t
  misc_feature (108)..(108): n is a, c, g, or t
  misc_feature (121)..(121): n is a, c, g, or t
  misc_feature (139)..(140): n is a, c, g, or t
  misc_feature (147)..(147): n is a, c, g, or t
  misc_feature (159)..(159): n is a, c, g, or t
  misc_feature (161)..(161): n is a, c, g, or t
  misc_feature (176)..(176): n is a, c, g, or t
  misc_feature (179)..(181): n is a, c, g, or t
  misc_feature (185)..(185): n is a, c, g, or t
  misc_feature (202)..(202): n is a, c, g, or t
  misc_feature (214)..(214): n is a, c, g, or t
  misc_feature (216)..(216): n is a, c, g, or t
  misc_feature (234)..(234): n is a, c, g, or t
atgggggggggggggggggggggggggggtttttttaacccgggtttttttttttccccccccttttcctggggggccccccccccnttttttttcccccctttaaanccccgggggcgtncccccccccggttttttnnttgggcnggggggggggtncnttttttccccggggnccnnntttnccctttggccctttttnggggcccctttnancccgtttttttccaaaancgggggggggccgggccgggttttcccgggttttttttcccccccgggccccca

SEQ ID NO: 514828 - DNA, 153 bp, Homo sapiens
caaactacagctcatgggccaaatccagcctgctgtctgcttttgtaagtaaagttttattggaacacagccacgtgcattggtgacacattgtctatgggggtgttcacactgtgacagcggagaccctgtgtgctgcgcagcctaaaaaat

SEQ ID NO: 514829 - DNA, 249 bp, Homo sapiens
actggcacccgcattgatctgggaggctggcgcccggccagaaccctttgctggcacagtgactatagagacagcaacaaccgagaatgaccacgatgcgcccgccagccaacctgcggtcatcaacaaatcatccccggaaggctgggagccactaccacaagccgccgacagcatagcggtctttgctccgccggccgcggcacgggctgagcctgatgtcatggaggacatgttggacgagagtag

SEQ ID NO: 514830 - DNA, 605 bp, Homo sapiens
ggctggtacgcctgcaggtactggtcggaatcccgggtcgacccacgctgtcgagattgcttgactcgggagcaaagccgaggtcgtaatggcgtcgtgggacaacctcggggagctctccaacatcgcgcagctcacggggctggacgccgtgaagctcatctccctcatcgtcagggcggtgtccagagcgcgggtgcacaagcgcaactgccgccgcttcgcgcagcacctcaagctcatcggcggcctgctggagcagctccgcgtgtcggagctccgcaagtacccggagacgcgggagccgctggagcagctcgaggacgcgctccgccggggataccttgctcgtcaactcctgccaggaccgctcctacctctacctcctcgccatgggctggaacatcgtctaccagttccgcaaggcggcagagcggagatcgacaattacctacgcctcgtcccgctcatcacgctcgtcggacaatgcccgcatacgggatcggcttgagtatattgagaggaccaaggtgaattattctttgacgaggacgacaagaaagtgcaagatgctcggtgaatcctgaccgtgcacgaatcctaca

SEQ ID NO: 514831 - DNA, 1120 bp, Homo sapiens
  misc_feature (300)..(301): n is a, c, g, or t
  misc_feature (304)..(307): n is a, c, g, or t
  misc_feature (464)..(464): n is a, c, g, or t
  misc_feature (567)..(567): n is a, c, g, or t
  misc_feature (782)..(782): n is a, c, g, or t
cgggggtggcggggggggaaggcggggttgcagcggagtggatgggtcggggcttggtgacaggcgggaagtgggggtggtggagtcgtgcgtagcgtaacgcgcagccaggttaggggcgggagctccaggggctgccaggcagttggccgtagtccgtgcgaccctgcagcagttaagagcctgtgcagggccttgtgctccagggcttccatggcaccgttttaatccttctctgaaagcaggcctgcaggctgcaggtggcgcggaccgtgagagggtccagagccttgccgctcnnttnnnnacagatagccacccgcaaggcctacgggcaggcactggccaagctgggccatgccagtgaccgcatcatcgccctggatggggacaccaaaaattccaccttctcggagatcttcaaaaaggagcacccggaccgcttcatcgagtgctacattgcngagcagaacatggtgagcatcgcggtgggctgtgccacccgcaacaggacggtgcccttctgcagcacttttgcagccttcttcacgcgggcctttgaccagnttcgatgcgcatctccgaagcaaatactctgcggtccactggggtccatcggggaagacgggccctcccagatggccctagaagatctgctatgttcggtcagtcccacatcaactgtctttacccaagtgatggcgtgctacagagaaggcagtggaactacgcaatacacgggtatctgtctcggaccagcgccaaaaatgcatcatctatanaacaatgaggactccagtcggacaagccaggtggtcctgaagagcaggatgacaggtgaccgttatcgggctggtgacctgacgaggccttgcgtgcactgctgagaagaaagatccatcggtgtgaccttacatagccggacgaaatatctcaaggccggcacaagagaccccgggggcaaataaaggctggagcggccgacaatgcgacggtagccccgaaacggccgtgacaacgaagggaacggcgcgcagagccacagaggaccggaaacggaccagaacagagaaaaagaaaaggaaagacgaagaaaaacaacacagaaaccgcccagggg

SEQ ID NO: 514832 - DNA, 910 bp, Homo sapiens
  misc_feature (648)..(648): n is a, c, g, or t
cattggccttcctcgtaaataatgtcactactaacgtttgtgcgcgcctaacactgtgcggttttgttaaaatacgtggttacaccaccaccccttcttgccgtaagtattaaaagcgctgttgaaaaaaccccgttggttaagagaaaaacaatttttgtctcccgcacagcatctcctttggggagccaaccccttggtttgtccacctggaaaccacaaaagtgtcttttttccgccaaatctatgtccccctcttttcaccgaacagtcacacccctcctgcacatataatggggggacaccaaatatatccaaaggttttgattcctttttgtgaagcacacctcccctctggcgcgaaaatgtgggggcaaaatattggtgtaatgcccccccctttggggggtctggaacagatggtgctacccacaggtcacagggggttaaggcacccccccggtgcccaccatcttgggggaacagcccccgctctgttctctttgtgaaaacaccccgaagttatcctccgccgcggcttgttgtggtgtacgccccaccccgacgactaccgcagtggtattctcagtagtcacacgaagggaggttgcagcacacgaagaaacaggcctcaaacaccctgagggnccgccgtgctggtccccacacgtgtgccgaaggttcaacggccccccgtgccaccacaacaacccctggcggcgacaaagacgacaacaatcccctcttccccaaaacgggaaatcgccccacccctagcactttgccccggcgctgtgggcacacaacctcgggagaacccaggacctctagggcgaacccgcgggggggaccccccggccccgggggcagccccccccggtaaccgggacccgttttcgcccacaaaaca

SEQ ID NO: 514833 - DNA, 1173 bp, Homo sapiens
  misc_feature (300)..(301): n is a, c, g, or t
  misc_feature (304)..(307): n is a, c, g, or t
  misc_feature (464)..(464): n is a, c, g, or t
  misc_feature (567)..(567): n is a, c, g, or t
  misc_feature (871)..(871): n is a, c, g, or t
cgggggtggcggggggggaaggcggggttgcagcggagtggatgggtcggggcttggtgacaggcgggaagtgggggtggtggagtcgtgcgtagcgtaacgcgcagccaggttaggggcgggagctccaggggctgccaggcagttggccgtagtccgtgcgaccctgcagcagttaagagcctgtgcagggccttgtgctccagggcttccatggcaccgttttaatccttctctgaaagcaggcctgcaggctgcaggtggcgcggaccgtgagagggtccagagccttgccgctcnnttnnnnacagatagccacccgcaaggcctacgggcaggcactggccaagctgggccatgccagtgaccgcatcatcgccctggatggggacaccaaaaattccaccttctcggagatcttcaaaaaggagcacccggaccgcttcatcgagtgctacattgcngagcagaacatggtgagcatcgcggtgggctgtgccacccgcaacaggacggtgcccttctgcagcacttttgcagccttcttcacgcgggcctttgaccagnttctgctatggcctgcatctcccgaagagcaactatcaagccgtctgctggcgtcccacgtgcgagcgtttcccatctggcggaacgacttgtggcccttcccatgattggcccgtagtaagatcgtcggcgtagtgtttcggagtcagtccccgatcatcaacttgttcttttaccctaaagtgattgtgcgttgcgtactacgagaatggcacgtggaacttagcccgccaaatacaagatggcgtatcgtgctttcattccggtaccagcctgcccatgaagatatgccagtcatctatanaacaatgaggactccagtcggacaagccaggtggtcctgaagagcaggatgacaggtgaccgttatcggggcttgggtgtgaccctgcactgaggccttggccgctgccgaactgctgtagagaaagaaaagatcaacatccgcgtgctggaccccttcacctatcaatgcccctgggacagacacacgtcagttctcgacagcgctcgtgccaccaagggcaggatcctcaccgtggaggaccattattatgcaaggtggcatttggtgagggtgtgtccagtgccagtactgggcagagc

SEQ ID NO: 514834 - DNA, 574 bp, Homo sapiens
aaatccgaatccaaggtttcccaaatcgtcccgcacatcctacttcatcccgacccagacaaaatcccgacccgtctctcctaggtgccgtcgacctaagcgacggttacccggatttaccttctcgtcgagaagtagaaaaatgaacccgaaccctacgaaccccggagaacccatcttcgttctgaaaagacctagccccccgccgacaaccgccccgatagtacccggaccctcagacctttctaccagcgcgactactctcgaccgcacccacctgcaagtacggtgacgtcaacacccagcgctccgcgccggaacctctaagtaccgaccaaaaccaccaccttaaaaacccggagagcccgacccctagaggatccgagacctcctccgacaataacgataataacaacgataaaaaccacatacccggatcgacctctatctctaccctatccctcgtcgtcgcaacgagtagtaacgacaacaaccccctcgtagaccccctttccccacactctctatcctctggcccatcatcccatagctcttcaccagaccagagcccatc

SEQ ID NO: 514835 - DNA, 675 bp, Homo sapiens
  misc_feature (300)..(301): n is a, c, g, or t
  misc_feature (304)..(307): n is a, c, g, or t
  misc_feature (464)..(464): n is a, c, g, or t
cgggggtggcggggggggaaggcggggttgcagcggagtggatgggtcggggcttggtgacaggcgggaagtgggggtggtggagtcgtgcgtagcgtaacgcgcagccaggttaggggcgggagctccaggggctgccaggcagttggccgtagtccgtgcgaccctgcagcagttaagagcctgtgcagggccttgtgctccagggcttccatggcaccgttttaatccttctctgaaagcaggcctgcaggctgcaggtggcgcggaccgtgagagggtccagagccttgccgctcnnttnnnnacagatagccacccgcaaggcctacgggcaggcactggccaagctgggccatgccagtgaccgcatcatcgccctggatggggacaccaaaaattccaccttctcggagatcttcaaaaaggagcacccggaccgcttcatcgagtgctacattgcngagcagaacatggtaggtgctggggccggcagggacaggtccacccaaggctgagggctgtggtctgaggggtgcggggcagccatgttggcagagccaggtgcctgctgtaggccagcccagggagactataagaaaagccaggacccagcgttaacccctgaccttgaacagccacagtttgggaggttctgcccaggtgcaaatgtcc

SEQ ID NO: 514836 - DNA, 227 bp, Homo sapiens
acctagtcttccccatcaccaagacctacttcccgcacttcgacctgagccacggctctgccccgcgttcagggccacggcacagccggtggccgacgcgctgaacaacgccgtggcgcaccgtggacgaaatgcccaactgcgctgtccgcccatgaagcgaccatgaacgcgcacaatgctatcggagtggacccaggtcaaccttcaatgctccataatgccac

SEQ ID NO: 514837 - DNA, 893 bp, Homo sapiens
  misc_feature (46)..(46): n is a, c, g, or t
  misc_feature (182)..(182): n is a, c, g, or t
  misc_feature (219)..(219): n is a, c, g, or t
  misc_feature (308)..(308): n is a, c, g, or t
  misc_feature (329)..(329): n is a, c, g, or t
  misc_feature (387)..(387): n is a, c, g, or t
  misc_feature (395)..(395): n is a, c, g, or t
  misc_feature (398)..(398): n is a, c, g, or t
  misc_feature (457)..(457): n is a, c, g, or t
  misc_feature (568)..(568): n is a, c, g, or t
  misc_feature (579)..(579): n is a, c, g, or t
  misc_feature (680)..(680): n is a, c, g, or t
  misc_feature (736)..(736): n is a, c, g, or t
  misc_feature (822)..(822): n is a, c, g, or t
  misc_feature (865)..(865): n is a, c, g, or t
gcgtctggctaactcataaaagtagcctgaagtgattgttaggggngtgtttgttgtcatttccatttgctgccacatcccttacattttcttcttgctaagcactgagaggcccagaatggacacatcaaactgtcaggggggacatttgggccactggcacctgccatggtttttttaanagcagagaatgcagagcagtcacagactccacttccnagccagggtgtgtggaggtctccggggaagagctctgcacaacaggtttcctgggggccagagggcctctcggggaggaacagaaaacnaccagccaggggtgctaccgnccagcctcagccagaatgctgtcagaccaaggccccacacatggcctggcctccgtgntctggggntgnccggtgtcacaagggggccccctggggggtggcgggggcccccgtgggggggccccatnctcttcctctctccgccgccgcagcggggtgtttttttttttcttgggccagctgtgggcctgggtgttctggggccaggtgggcacgtgctccttcttagcatttggggngagcacagggntgaatctgaaattcatgcttccttgttttatgaactcaatctgcatcattcgatgaatgtacttagtatgtaagccatgctcatcctcgtccagctgcgantcagcgccttccacgtcctgtttgtatttggggctgattgctacgattatcatcanggtcttatccctaaggtagcgctccatccatttaatgatatcaatgcctcggattctatcctcaaatatgtcaattgcagtttggnagccatttaccaacaaaaagttcacgaatttcaccacctccanagctgtgtccatcgaataagtgataaag

SEQ ID NO: 514838 - DNA, 355 bp, Homo sapiens
  misc_feature (225)..(225): n is a, c, g, or t
ggtacatgatatgttttggtacagggcatgtaatgtgaaataaggcacacattcatggagaattggacaacgaatctctatgagcatttatcctttgagttacaaacaattcaattatgctttttaagttttgtaaaaatatgcaattattattgactttcatagttaccctgttacgctatcagtttgttttattcattctttctatttgttttgtaaccattnaaacatcccctaccttcccccagccccctgctaccattcccagcctctgttaaccatccttctactctctatgtccatgagttcaactgttttgatttttagaacccacaaataagtgacaacatgtgaa

SEQ ID NO: 514839 - DNA, 4103 bp, Homo sapiens
cacgcgtccctcttgcaacttgctgagtttccctaagatcattattttgaattccttttctggcatttttatagatttccttttcttttgaatctgttactggagaattattgtgtctctttggaggtatcaaatttccttgctttttcatgtttcttgtgtccttacattgatatctattcagctagtggaagagttgcttcttccaattttatggattggctttcataaggaaagacttttttgtaggcatatctgtagttttggttgtgattaggatgttttggctttgattctggtgagcacaggagtgtaggctcaatgatttcttcagctgtaaccaatgtaactggtgtcatgtaaccatgtcactgtgagtcctcagtggcttaagttgccattgttagctgaggctgttgtgaggcttttctggggaaagggatgccagaggggccagtccctgggccttttggtggcatgggcaggctttagctgtggtggcgatgggctgggcatgctagtcctcaggaccccagctggtgtaagtgctggtagtggggggcccaggtgggctggtcctcaagcccccaggcagcatttatggtgctggcagtggcagtagcagcagtgggctagacactggactgtcaggtggcaatcatagctgttggcagtagctgtggcaggatgaatgggacagtttctagccccctaggtgatgcacttgggtgggcactggtggtaggtggggcaggcctgttcaggccttgggattgtgtgcgtgggcaccagtggtgttggatggggtgggccagtcgtcaggcccccctacagagcatataggcaccagtagtggcatgagggaaagatagcgctggagaacactggtgacagtgggtggagcaggcctgtctttaggttcttggatggcacatatggacatactggtcctcaggccccctgaaggtgcacacaggcatgctgttgccctgctgagaggggcaaggttctgttggtggcattggtgttgggaagatggctcccaggttctgggagcttcagctccctttttcctggggtagcctccctggtgtgctatactgcctgttccctgggatataagacacttcatgggtcagagtactggggacctggctgcactgctgggtgattgtgatactgcaaccttctggatggatgtgggaggatgttcttgggggtccagggatgtggactgcaggggcttattggaccccaagtgggcaggatataatctggtgggggctagcctcttaaaatggtgctgtgccacagcagcatgtttcttgggatgtgagtaggatccagtggaattccctttctggaagaacgcatttgcatggattccaggcagctccgtatactggactcagggcctgtgaaggctgacggcatcccctgtgggtgccagcatctgtgctgcgaatgtggaccactgcagttctttgacttttcttttcccagaaatgggattcccctcctgcttctgagccagtccaagacatgctggctgctttatttactgctccctttgtgcctcagaagttccctgttgaatagtgttctgtctttggtgctctacctgacatgtggttaactacttgcttttttggtcctttgttgtgcaggagttgagtgccaggctcacggttttttgattaccatagttttgtagtttttgaaattcagaagtgtgagacctccaactttttctttttcaagattattttggctgttgagtcaattatgattccatatgcattttagatggatttttctatttctggaattgtgccattaggagtctgatagatactgcattgaatctgtagagtgctttgggtagtattgacatcttcccactattaagtcttccagtacatgaacacatgcattttcctgatgactaatgatgttgtaccttttcatatgcttattggctatttgtagatcttcctgggagaaatgtctatgcagactttttgccaattttttaatttgtccatttaaaaatcagggttttttttgttgttgagttgtaggagttctttttgtattccttatactagtcccttatcagatatatgctttgcagatattttctcccaggtgggttgtcttcacttccttggtagtgtcttttaatacacaaagttttaaatttttatgaagtcaaatgtatctacatttttctttggttgctcatgcttttggtgttgcatctaagaatccactgccaaatccaaggtcatgaagatttactcctatgttttcttctaagaattttatagtttttgctattacataaggtctttgagccattaagatctttgacttaacttttgtatatgatgtaaagtcactgtcaaacatcattcttttgcatttggctgtcactgggttactgaggactgggtagcttagttgagtagataatcttttgttgtttcctccttgtaatatacaagccttggcttctgtgacatcatactctcctagatttccccctgtcactgtggcttcttctcagtctctgtccatccctggtgctcctgaaggttctgttctcagccttacacacattacctgggtgatctcattctctgccatgacttcacttgccatatatgtgctgattttccccaaattcctatttctcccgacctttacatctattttatttgcaggtcatatatctaataaggaattgatatccagtgtacatgtagaactcctgtaattcaatacagaaaccaaacagtccaattaataaatggagaagagatttgaatgaacatttttctaaagaacatctcaagctcaagatttcccagataacttttctttcttcaaaatctgcttctgtgtttcctcatctgtaggtggcacagcatacatctgatttcccaagccagaaacctcatagttattcttgactccaggaagaaatattattgagtttttaaaaactcagcttattgactcattgttttatataataaaatgcaacagttttaagtgtatatttcaatgagttttaatacatttatgtacttgtgtcactatcctcatagatagagacaaaacatttctatcacaccggcaatttcctatgtgtcccatcccaatcaatcctttcccctttgctggctccaaacaatgactctttcctatctttttagaaagattagaattgcttttctagagttccagtaatggaatcatacagtgtctaagtctgtttgtggtgctgtaacaaaatacctgagactgggtaatttataaattataggaatttatttctcacagttctggatgctgaaaagtttatgatcaaggcactagcaggtttggtgtctgagggcccagtttctaatttgaagatggtgctttaaacactgtcctcacatggtagaaggggcagatgggcaaaaaaaaaaaaaaaaaaaaagggcaaatgctgtgtgtagcccctctcataaagggcttaagctcattcaccagggaagagctctcatgacctaatcacctccaaagaccccacctcttaatactattgcattgcagattaagtttcaacatgaattttggagggatacaaatattcacaccatagaatatagtaatatagtatagtatatattttttgtgtctgtctgcttttgctcagtgtaatgtttttgaggttcatctatgttgttgcatgtattagtaggttgtatctattggtgcatagttattccattgtatgtatgtaccacactcttcatttacctgctgatggatattgcattgtttccagttttgggttattatgaataaaactgctgttaaccttaaaatataagtctttgtgtagacatatgttttcatttgtcttgagcaaatacctgattggtcagatggtcatatgtcagtatatgtttaatatcatgtacttccaactgtttaccaaagtagttgtgccattttattttcccactagcgatgtatgagttccatttgatccacttctttgccaacacttgttatttattttagcccattaaattttagctgtttta

SEQ ID NO: 514840 - DNA, 338 bp, Homo sapiens
agaggctgaatggcgtgaacccggtgaggcagagcttgcagtgagccaagattgcgacactgcactccagcctgggcgacagagcgagactctgtctcaaaaaaaaacaaacaaacaaaaacaaaaaaacactgtgcaaatgaaataagccagtcacaaaaggaaaatattgtatgattccatttatatgaaatatccagaataggcaaatccattgagccagaaagtagatcagaggttaccaggtgctgggagacagaggaccctgcggagtgggatgatgcagacagaattccgagcctctttgattctccaccatcagccccatcagcctctgt

SEQ ID NO: 514841 - DNA, 4214 bp, Homo sapiens
cacgcgtccctcttgcaacttgctgagtttccctaagatcattattttgaattccttttctggcatttttatagatttccttttcttttgaatctgttactggagaattattgtgtctctttggaggtatcaaatttccttgctttttcatgtttcttgtgtccttacattgatatctattcagctagtggaagagttgcttcttccaattttatggattggctttcataaggaaagacttttttgtaggcatatctgtagttttggttgtgattaggatgttttggctttgattctggtgagcacaggagtgtaggctcaatgatttcttcagctgtaaccaatgtaactggtgtcatgtaaccatgtcactgtgagtcctcagtggcttaagttgccattgttagctgaggctgttgtgaggcttttctggggaaagggatgccagaggggccagtccctgggccttttggtggcatgggcaggctttagctgtggtggcgatgggctgggcatgctagtcctcaggaccccagctggtgtaagtgctggtagtggggggcccaggtgggctggtcctcaagcccccaggcagcatttatggtgctggcagtggcagtagcagcagtgggctagacactggactgtcaggtggcaatcatagctgttggcagtagctgtggcaggatgaatgggacagtttctagccccctaggtgatgcacttgggtgggcactggtggtaggtggggcaggcctgttcaggccttgggattgtgtgcgtgggcaccagtggtgttggatggggtgggccagtcgtcaggcccccctacagagcatataggcaccagtagtggcatgagggaaagatagcgctggagaacactggtgacagtgggtggagcaggcctgtctttaggttcttggatggcacatatggacatactggtcctcaggccccctgaaggtgcacacaggcatgctgttgccctgctgagaggggcaaggttctgttggtggcattggtgttgggaagatggctcccaggttctgggagcttcagctccctttttcctggggtagcctccctggtgtgctatactgcctgttccctgggatataagacacttcatgggtcagagtactggggacctggctgcactgctgggtgattgtgatactgcaaccttctggatggatgtgggaggatgttcttgggggtccagggatgtggactgcaggggcttattggaccccaagtgggcaggatataatctggtgggggctagcctcttaaaatggtgctgtgccacagcagcatgtttcttgggatgtgagtaggatccagtggaattccctttctggaagaacgcatttgcatggattccaggcagctccgtatactggactcagggcctgtgaaggctgacggcatcccctgtgggtgccagcatctgtgctgcgaatgtggaccactgcagttctttgacttttcttttcccagaaatgggattcccctcctgcttctgagccagtccaagacatgctggctgctttatttactgctccctttgtgcctcagaagttccctgttgaatagtgttctgtctttggtgctctacctgacatgtggttaactacttgcttttttggtcctttgttgtgcaggagttgagtgccaggctcacggttttttgattaccatagttttgtagtttttgaaattcagaagtgtgagacctccaactttttctttttcaagattattttggctgttgagtcaattatgattccatatgcattttagatggatttttctatttctggaattgtgccattaggagtctgatagatactgcattgaatctgtagagtgctttgggtagtattgacatcttcccactattaagtcttccagtacatgaacacatgcattttcctgatgactaatgatgttgtaccttttcatatgcttattggctatttgtagatcttcctgggagaaatgtctatgcagactttttgccaattttttaatttgtccatttaaaaatcagggttttttttgttgttgagttgtaggagttctttttgtattccttatactagtcccttatcagatatatgctttgcagatattttctcccaggtgggttgtcttcacttccttggtagtgtcttttaatacacaaagttttaaatttttatgaagtcaaatgtatctacatttttctttggttgctcatgcttttggtgttgcatctaagaatccactgccaaatccaaggtcatgaagatttactcctatgttttcttctaagaattttatagtttttgctattacataaggtctttgagccattaagatctttgacttaacttttgtatatgatgtaaagtcactgtcaaacatcattcttttgcatttggctgtccaggtatcccagcattatttgttgaaatgcctacacttctttatattcccttgactcctctaaccaaggcagttggacctttgctactaccactgccctgaaactgctgtcactgggttactgaggactgggtagcttagttgagtagataatcttttgttgtttcctccttgtaatatacaagccttggcttctgtgacatcatactctcctagatttccccctgtcactgtggcttcttctcagtctctgtccatccctggtgctcctgaaggttctgttctcagccttacacacattacctgggtgatctcattctctgccatgacttcacttgccatatatgtgctgattttccccaaattcctatttctcccgacctttacatctattttatttgcaggtcatatatctaataaggaattgatatccagtgtacatgtagaactcctgtaattcaatacagaaaccaaacagtccaattaataaatggagaagagatttgaatgaacatttttctaaagaacatctcaagctcaagatttcccagataacttttctttcttcaaaatctgcttctgtgtttcctcatctgtaggtggcacagcatacatctgatttcccaagccagaaacctcatagttattcttgactccaggaagaaatattattgagtttttaaaaactcagcttattgactcattgttttatataataaaatgcaacagttttaagtgtatatttcaatgagttttaatacatttatgtacttgtgtcactatcctcatagatagagacaaaacatttctatcacaccggcaatttcctatgtgtcccatcccaatcaatcctttcccctttgctggctccaaacaatgactctttcctatctttttagaaagattagaattgcttttctagagttccagtaatggaatcatacagtgtctaagtctgtttgtggtgctgtaacaaaatacctgagactgggtaatttataaattataggaatttatttctcacagttctggatgctgaaaagtttatgatcaaggcactagcaggtttggtgtctgagggcccagtttctaatttgaagatggtgctttaaacactgtcctcacatggtagaaggggcagatgggcaaaaaaaaaaaaaaaaaaaaagggcaaatgctgtgtgtagcccctctcataaagggcttaagctcattcaccagggaagagctctcatgacctaatcacctccaaagaccccacctcttaatactattgcattgcagattaagtttcaacatgaattttggagggatacaaatattcacaccatagaatatagtaatatagtatagtatatattttttgtgtctgtctgcttttgctcagtgtaatgtttttgaggttcatctatgttgttgcatgtattagtaggttgtatctattggtgcatagttattccattgtatgtatgtaccacactcttcatttacctgctgatggatattgcattgtttccagttttgggttattatgaataaaactgctgttaaccttaaaatataagtctttgtgtagacatatgttttcatttgtcttgagcaaatacctgattggtcagatggtcatatgtcagtatatgtttaatatcatgtacttccaactgtttaccaaagtagttgtgccattttattttcccactagcgatgtatgagttccatttgatccacttctttgccaacacttgttatttattttagcccattaaattttagctgtttta

SEQ ID NO: 514842 - DNA, 1007 bp, Homo sapiens
  misc_feature (1007)..(1007): n is a, c, g, or t
aagaaaggcaaagagtcctgcccgggaccggcgccgcgtgggccaaacctgcgcccgtggaggggcgcgcagagggcaccgggcgcctgggagcatggcggcgcacgcaccagcattgtgttacgtgccgggaggccactgtgtcagacaagctgagagggaaactgaagcaagatgtcgggccggagttgggaagaagacaatgtccaaagctgtcccagttcagtctagcggcaggtgtcactcttatccagctgggcgaggtctgtatgcgttatctgaagaacaagggacgttcaaggtaccggatcagcgtgggcgcccctgtctacattggcggcagctcattgagtacctggcagcggaaattctagaattggccggcaatgccgcgagggacaacaagaaggcccggatagccccgagacacatcttgctggctagttgccgaatgacgaggagctcaaccagctgctacacacaggagtgaccatcgccagtggaggcgtcctgcgccagaattcaccccgaactgctggccaagaagcgagggaccaaaggcaagtcggaaacgatcctctccccaaccccagagaaaagaggcaggaaggccactgtcatggcaacgaagggggggcaagaaatccaaggctgtcaaaccacggacgtccatagaagtccaaaccaaaaggacagcgataaagaaggaacttcaaattccacctctgaagatgggccacggcgatggattcaccattctggtcttctaagagcgcttgttctggggacagaagctgtccttaatcccaagagtgacatcaggccatatttggtccatgagaagtggaggggcattgtcccaccccaacaacaaggcgacaattgaccttcaagaagatataggtaaagccttgggaaaaggtggggggaaaagagtcttggaaacggtaaaggagttcggaaatcccgaggccttggaaagtcgccgaaggcgcgtcagcaatcan

SEQ ID NO: 514843 - DNA, 1353 bp, Homo sapiens
tctgacctgcatgcagcagttacgaggaagtccagacatcggccatcgagtatctgctggatgccgcagcgacatgcgacagggaaaccgaaaactgtcatcagagtgtcgggacgctgcccagtaatccggctcctcgagagcgcagatggataccatgctcacagcgagaagtgtggacgagggaccatgggtgctggggatggacgggccctatgaaattgctcaaggcacagctccatccgcaaagaaaacatggtggcacgcgactgcttgtatgaatactgctgaaaccagatcaacaggacgcgtcgcgctgcagctgctacaaccttggcaaaacaggcctacaagtgactatcgtggcaacactgactttctgacctgcgaaacgagcttccccaggggcaccccgaagcacatggacagggtcgagaaagcttgtagttatgcatgatatcatggccctcgggtagcgaccagtagaaaacacacccgaaatgtcgctcctacagtggttaatccgctatggagacgtgagtccctttgcgaaaagcttccactgtggcaaactcgaggaaatgacggaagggcccaactacgcgtggtccccctgatttaagctttcattgagaactgaccgacattgtaacaaaccatttcccggcacgaacggcaagtggggcgagcacggcgtgagacgcgtaggtagccacagtaacactgacatgcaggtggactaatttagacacagcaagcaattgtagctccaatcggtccaataacaatgctcccccggcacagggcgaaatcccatctctccacggccacggacgcaagattctcagcctaggtgtaccttcaacccgaaaggaatgaaacgctgggcaccggcccgtggcacccgaaatcagcagcacaagaccgcaccaaacaacacacagaccggcacaaccgccccccaccacccaccccacgggaggaggcccaccccacaaacacacccccaccccccaccacggaacacgacaacccacaagcaccacgggcacagcccgctcaacacacccccacacacgccctaacccgctctggggacgccaagaacagccaccccaacggacaagaccagcgcaagcacacacagcggggagacagccgcggctgaggaagaaggacgcggcccccctcaagcacgacacgcaccaaccggaagcagaaccaccacgacgacacacaccgccgttgcgcgacgcccccacctgcgcgaccccgccgccgagccagggggcaccgacagggccgcctgtggcgcaagcgcacgcacaccacggccccacccgcgagacacag

SEQ ID NO: 514844 - DNA, 3528 bp, Homo sapiens
cacgcgtccctcttgcaacttgctgagtttccctaagatcattattttgaattccttttctggcatttttatagatttccttttcttttgaatctgttactggagaattattgtgtctctttggaggtatcaaatttccttgctttttcatgtttcttgtgtccttacattgatatctattcagctagtggaagagttgcttcttccaattttatggattggctttcataaggaaagacttttttgtaggcatatctgtagttttggttgtgattaggatgttttggctttgattctggtgagcacaggagtgtaggctcaatgatttcttcagctgtaaccaatgtaactggtgtcatgtaaccatgtcactgtgagtcctcagtggcttaagttgccattgttagctgaggctgttgtgaggcttttctggggaaagggatgccagaggggccagtccctgggccttttggtggcatgggcaggctttagctgtggtggcgatgggctgggcatgctagtcctcaggaccccagctggtgtaagtgctggtagtggggggcccaggtgggctggtcctcaagcccccaggcagcatttatggtgctggcagtggcagtagcagcagtgggctagacactggactgtcaggtggcaatcatagctgttggcagtagctgtggcaggatgaatgggacagtttctagccccctaggtgatgcacttgggtgggcactggtggtaggtggggcaggcctgttcaggccttgggattgtgtgcgtgggcaccagtggtgttggatggggtgggccagtcgtcaggcccccctacagagcatataggcaccagtagtggcatgagggaaagatagcgctggagaacactggtgacagtgggtggagcaggcctgtctttaggttcttggatggcacatatggacatactggtcctcaggccccctgaaggtgcacacaggcatgctgttgccctgctgagaggggcaaggttctgttggtggcattggtgttgggaagatggctcccaggttctgggagcttcagctccctttttcctggggtagcctccctggtgtgctatactgcctgttccctgggatataagacacttcatgggtcagagtactggggacctggctgcactgctgggtgattgtgatactgcaaccttctggatggatgtgggaggatgttcttgggggtccagggatgtggactgcaggggcttattggaccccaagtgggcaggatataatctggtgggggctagcctcttaaaatggtgctgtgccacagcagcatgtttcttgggatgtgagtaggatccagtggaattccctttctggaagaacgcatttgcatggattccaggcagctccgtatactggactcagggcctgtgaaggctgacggcatcccctgtgggtgccagcatctgtgctgcgaatgtggaccactgcagttctttgacttttcttttcccagaaatgggattcccctcctgcttctgagccagtccaagacatgctggctgctttatttactgctccctttgtgcctcagaagttccctgttgaatagtgttctgtctttggtgctctacctgacatgtggttaactacttgcttttttggtcctttgttgtgcaggagttgagtgccaggctcacggttttttgattaccatagttttgtagtttttgaaattcagaagtgtgagacctccaactttttctttttcaagattattttggctgttgagtcaattatgattccatatgcattttagatggatttttctatttctggaattgtgccattaggagtctgatagatactgcattgaatctgtagagtgctttgggtagtattgacatcttcccactattaagtcttccagtacatgaacacatgcattttcctgatgactaatgatgttgtaccttttcatatgcttattggctatttgtagatcttcctgggagaaatgtctatgcagactttttgccaattttttaatttgtccatttaaaaatcagggttttttttgttgttgagttgtaggagttctttttgtattccttatactagtcccttatcagatatatgctttgcagatattttctcccaggtgggttgtcttcacttccttggtagtgtcttttaatacacaaagttttaaatttttatgaagtcaaatgtatctacatttttctttggttgctcatgcttttggtgttgcatctaagaatccactgccaaatccaaggtcatgaagatttactcctatgttttcttctaagaattttatagtttttgctattacataaggtctttgagccattaagatctttgacttaacttttgtatatgatgtaaagtcactgtcaaacatcattcttttgcatttggctgtccaggtatcccagcattatttgttgaaatgcctacacttctttatattcccttgactcctctaaccaaggcagttggacctttgctactaccactgccctgaaactgctgtcactgggttactgaggactgggtagcttagttgagtagataatcttttgttgtttcctccttgtaatatacaagccttggcttctgtgacatcatactctcctagatttccccctgtcactgtggcttcttctcagtctctgtccatccctggtgctcctgaaggttctgttctcagccttacacacattacctgggtgatctcattctctgccatgacttcacttgccatatatgtgctgattttccccaaattcctatttctcccgacctttacatctattttatttgcaggtcatatatctaataaggaattgatatccagtgtacatgtagaactcctgtaattcaatacagaaaccaaacagtccaattaataaatggagaagagatttgaatgaacatttttctaaagaacatctcaagctcaagatttcccagataacttttctttcttcaaaatctgcttctgtgtttcctcatctgtaggtggcacagcatacatctgatttcccaagccagaaacctcatagttattcttgactccaggaagaaatattattgagtttttaaaaactcagcttattgactcattgttttatataataaaatgcaacagttttaaaaaaaaaaaaaagaaaaaaaaaaaaaagagaagagaaaaagaagaaaaagaaaaaaagaaaaaaaaaaaaaaagaaagagagaaaaaaaagagaggaaaaggagagaggagaaaaaaaaaagaaaagagagaagaaaagaagaaaagagagaggagagagagaacgcaagcagtagggaggagagggaggagcaacagagaaagggaccgaaagagaagagaaaaaaagaaaaagaaagagaaggcaaaaagaacagtgaggagagggagaaaaaggagagagagagagaagagaaaaagaagaaagggagacgcaacaagagaagcaaaaagagaagaggaggaaaggaagagaaagac

SEQ ID NO: 514845 - DNA, 215 bp, Homo sapiens
cacagatgtcaactactgatcacaaggccatagcaacatcatctcgcaaatgtgagtagacacagattctccatgtacgaaaacatgtctccactatagagactgggaaattttcctcttctgggtcacaaattatcaaggggaaagagtaaggatcacttttcaaactgcactgacaatcactcaccagtgtggagagaggggtaccgagctcg

SEQ ID NO: 514846 - DNA, 958 bp, Homo sapiens
tatcgatatagatccaccatgtttacccgaaaaatggtgacacgcccgtggtatccgctgtgttgtattatcttttaacgggtattgtctgttaagcccactgcggagggtccccacccaatagtggcctcgcccccgtgagcaagagggtgcactctgcacgccgcggctttgtttgaccccccccctcggaataatggctcgccaacacggccttgctaatgtggtcaaacatatggagttaaccggcctcccctgtgctgtcttgttacaaggaagctccccccatcattttttttcgcgccctcttgcgtgaacatctgtggcacactgttgactgcccgcggcagtttcaaaggcgtccatctgcgccgccgggaacctgcggtgtccacaacagaagtcctctgccaaggggttcctctggccgccagtgcaccccacaaggtacagagctcaaaaaacggggggtggtcactaaggccgcccgcacccaggaattatggccccgtgtgacgccggaaggcacaccaccaagacggtcctgggcagtatcaccactccacaagggcaaactctcctgggcactactagagcaaggaaaaaatattccacgcaaagagcgggagcacgcgaacaagatctgtccagaaacccgggtgtccgggtcacagacgacaccagcggcccctccccagggaagacccacggagtacgcgtaggaacccctagtcatgaaatgtgttattaagaaaaatggaaatacctgggggacgactgtctcccacgttacttggagacaatatttcgatgtgaagtaatgagcccccaaacagactgggtggaatgattgtgatgtagtagtaaatagatcggacaatccgatttctctgaagagtatggtaccccacattccagcccccctcaagacaaaaaaaaaacacgttctcacaaaaca

SEQ ID NO: 514847 - DNA, 1504 bp, Homo sapiens
atggggaaccgcagcaccgcggacgcggacgggctgctggctgggcgcgggccggccgcgggggcatctgcgggggcatctgcggggctggctgggcagggcgcggcggcgctggtggggggcgtgctgctcatcggcgcggtgctcgcggggaactcgctcgtgtgcgtgagcgtggccaccgagcgcgccctgcagacgcccaccaactccttcatcgtgagcctggcggccgccgacctcctcctcgctctcctggtgctgccgctcttcgtctactccgaggtccagggtggcgcgtggctgctgagcccccgcctgtgcgacgccctcatggccatggacgtcatgctgtgcaccgcctccatcttcaacctgtgcgccatcagcgtggacaggttcgtggccgtggccgtgccgctgcgctacaaccggcagggtgggagccgccggcagctgctgctcatcggcgccacgtggctgctgtccgcggcggtggcggcgcccgtactgtgcggcctcaacgacgtgcgcggccgcgaccccgccgtgtgccgcctggaggaccgcgactacgtggtctactcgtccgtgtgctccttcttcctaccctgcccgctcatgctgctgctctactgggccacgttccgcggcctgcagcgctgggaggtggcacgtcgcgccaagctgcacggccgcgcgccccgccgacccagcggccctggcccgccttcccccacgccacccgcgccccgcctcccccaggacccctgcggccccgactgtgcgccccccgcgcccggccttccccggggtccctgcggccccgactgtgcgcccgccgcgcccggcctccccccggacccctgcggccccgactgtgcgccccccgcgcccggcctcccccaggacccctgcggccccgactgtgcgccccccgcgcccggccttccccggggtccctgcggccccgactgtgcgccccccgcgcccggcctcccccaggacccctgcggccccgactgtgcgccccccgcgcccggcctccccccggacccctgcggctccaactgtgctccccccgacgccgtcagagccgccgcgctcccaccccagactccaccgcagacccgcaggaggcggcgtgccaagatcaccggccgggagcgcaaggccatgagggtcctgccggtggtggtcggggccttcctgctgtgctggacgcccttcttcgtggtgcacatcacgcaggcgctgtgtcctgcctgctccgtgcccccgcggctggtcagcgccgtcacctggctgggctacgtcaacagcgccctcaaccccgtcatctacactgtcttcaacgccgagttccgcaacgtcttccgcaaggccctgcgtgcctgctgctgagccgggcacccccggacgccccccggcctgatggccaggcctcagggaccaaggagatggggagggcgcttttgtacgttaattaaacaaattccttccc

SEQ ID NO: 514848 - DNA, 883 bp, Homo sapiens
  misc_feature (73)..(73): n is a, c, g, or t
  misc_feature (99)..(99): n is a, c, g, or t
  misc_feature (146)..(146): n is a, c, g, or t
  misc_feature (151)..(151): n is a, c, g, or t
  misc_feature (157)..(161): n is a, c, g, or t
  misc_feature (200)..(200): n is a, c, g, or t
  misc_feature (229)..(229): n is a, c, g, or t
  misc_feature (465)..(465): n is a, c, g, or t
  misc_feature (534)..(534): n is a, c, g, or t
  misc_feature (567)..(567): n is a, c, g, or t
  misc_feature (585)..(585): n is a, c, g, or t
  misc_feature (597)..(597): n is a, c, g, or t
  misc_feature (671)..(671): n is a, c, g, or t
  misc_feature (680)..(681): n is a, c, g, or t
  misc_feature (683)..(683): n is a, c, g, or t
  misc_feature (727)..(727): n is a, c, g, or t
  misc_feature (735)..(735): n is a, c, g, or t
  misc_feature (740)..(740): n is a, c, g, or t
  misc_feature (768)..(768): n is a, c, g, or t
  misc_feature (783)..(783): n is a, c, g, or t
  misc_feature (791)..(791): n is a, c, g, or t
  misc_feature (862)..(862): n is a, c, g, or t
agaagggaagttcttgagggtagttgggcagttttacaaatggcagtggccagcatgtcaattgaatgcctantaaataagcgtcatatatcatcatanatagataagtgactctgtgaggtcatattccttatcacccatttttntattntggttnnnnnttttggaggggtgagccatccaaaggcgcaaagccagtnagttatagagttaggtagaatcgtgagtntatccgactttaagttatccatagggattgcctggacaaggcccaggagcttctgtgtgccaactctacaacacttcagaattaccaaaattcgctttgaatgatgagagcccttagcgatacaaatgtttccaaaaaataccaaagaaataacttgtgcacccagtggttgaggactctctaagctacatatggtcctctaacacaggttttaagagaaacaatactcaaaagtnaaactaaccaaactgtatatgactgaataatgtctttgaaaatcccaaagagttagtaccatcatatgncatttaagacagacacatgctgagaaacgcatngttaggtgattttgtccntatgtgaacatngctgagtgccttacagaaaactcagtggtacagctgactacaccctggctatatggcacagcctatgctcctangctacaaanntnggcagcgtgtgactgtattaaatgctgtaggcaactgtaacacnatggtaantattntttttctaacatatctaacatagaaaangtacagtgaaaatanagcattanaattttatgggactactgacatatatgcagtctgtcattgaccaaaacatcatgtggtacatgacagtatnctgaaaaagtaaaagattaaa

SEQ ID NO: 514849 - DNA, 128 bp, Homo sapiens
gatcccccttccccttttgccagggtcataagcttcctggggcctccctggaagttgagcagaggccagccccaggcttccgggacatcctgcagaaccataagcacaattaaccctttttaataata

SEQ ID NO: 514850 - DNA, 183 bp, Homo sapiens
aactgggagctggaatcacggatgtccatgctgtagaagctatatgccccttcccaagatgcttgatcttacatgctgtctgatgtcgtctaggaatcttgatcctcttcagctccttcatgcagagctggccgtcccctgtctggctggcagtagtccaaggcccattctgggagactcctg

SEQ ID NO: 514851 - DNA, 1330 bp, Homo sapiens
tgtgtacatggttgtttgtctcctatggttgtttccagttagggtttggatgcgtatatgtggagcctgcttcttttgataacagttttcaggtggtttgtcttgtctttgtgttatctagtcttgggggtcgttagttgttgggtgaatctaggttcacaggttgttaagatgctagagcgtgttgatatgcggaaggtgtttgttgtgtgcgttgcgcggcgcgtgtgtccgggtgggggcagcccctctgttttgtgcttttgtggggtttccccttttttgtggcccgctgttgcccgtcgtgagttaggggccgccagtgttggggtgtctgtagggaccctgtaggggtcttctggggggtttcgatgtgtgcttgttgaccattcgtggggggccctgggaatgtgtttttgcccgcgattcctctggtttccttttagtataggggggctctctctgggggtgcgagtccgaagcactttttttggggaggaccccccaacatgttgacccaagtgggggcaaaactgtgcagactcttgccctaagctaccataggctcacccccgcgccatcgaggctcgggcccaagaggggggccacccacattcttgtggaggaccccgttgcttggcccagagttcttagctcccaggtaataccagaagtggtacctcccaaggggactccaaaggaaggggtacatttgcgtcgttgagagccccctcccctcgctctacttcctcagtccatctcagtggacccctagaaatggggcgccccagagcgtctcttctccatatggcccacagggcgttatccacccctatttcaaacaccgtgggccctttgttctaagaacccacgttctctcggagtcacggcggaagagggtcttcttgaggagcctcgatggaccctgctctaacccacacactggtgttctcccacctggccctgtctgcgtcttgctgctaacaagagaggggcacagggcctctccccaagcccaccgcttataggaaatgcttggcctttggcacaggcacaggcaagctgtaaccccatgctggtgggcaggggtgctggaaggcacccacggccttcacggaggagccccactagttccgccctgcacgtcctgtaaaccactcggctgggccctgcaaggcccaccaactcaacgccctcttgggtgatggttaccggtgggtgggtgggggctgacccccgacttcccggggactgtccctgtggacggcccaaatggcataactgagataaggtgtaataagtgaccaaattaagcccgttttttaaccag

SEQ ID NO: 514852 - DNA, 478 bp, Homo sapiens
gctagtgatcagtgatcagggattcacgggcggtggtactacatctgggaaaagatataaccatgatacgggtcagtggcgcgtgttgtaatccaggcaactcggtatgctgaagcaagagaatcactagaacgcagaaggtggagtgggaagtgaaatgaactcgcgccactgtatctccagcctccagcctgggcgacaggagcaagactctgtctcaaaaaaagaaatgacaggacgagaccatggatggcttgaatcactggtttatagcaaacatagttaagatatggcaaggcaaggatctgaaacctggtgtgcttagttgccaaagtctcactcttgtctgttgtacctcccgataaatttaggtttgacttccttcttcagcatcttgggcaatgtagtaatagaattgatgacaaatagtagtaacaattatagcccagctcagtctttgaccccttccgagcaccat

SEQ ID NO: 514853 - DNA, 797 bp, Homo sapiens
tccatcccagtacctgctttgagcacctggtgacacaaatgaagtgtgcggctccagtgagggacgtggtgaggccgtctaccagattgggtgtagaggacaatgggctgctggtgtggtgctggctgagtgagtgaccatgctgagcttctgctcaagaccctgcacctgtgatggcagatgaatgttgtttggtgggcagacataacctgttcttctgaggagctgagaagtggattattgatacgctgacattgcccctgtgaagatcacctgatgggtgctagtaactgaaagtgtcccgtgacaatccaaacagtttacctatggaaccatccctgtgttgtagcctgtcccattgggtttgacattgttggacttcttgtgggacaggtcaagctacttgctatggaggttccccttgaacactcatgaggaagaaggcttggacaagtgagagctggggagcccgggggctcggcttcagagccctttatcctggcacctttgcagttgaatcgattcatgtcttggacctgaagcctccaggcaatcagactttcgagaatcctggtcttttaacatgccaatgtgagatggttggttgaagattaccatggctggatctccaccgggaagtagcaggaaagcagatcctcgtcggaaggcatgctcgcaaaggatgaatcaggctatcaatcgagcatgggatgggcccacccatacagtagcttaacaacgcacacaactatgggctccaagtatactggcccgactgggccctgtctatgtggttc

SEQ ID NO: 514854 - DNA, 271 bp, Homo sapiens
  misc_feature (13)..(13): n is a, c, g, or t
  misc_feature (21)..(21): n is a, c, g, or t
  misc_feature (166)..(166): n is a, c, g, or t
  misc_feature (259)..(259): n is a, c, g, or t
ctggaaactgganagcgggancctggccaaaacttaccctcgcctggacatagagaaagagatggggtttcaccctgttgcccaggctagtctcaaattcctggactgaagctatcttacccgccttagtctcccaaagtgctaggattacagcgtgatctaccanacctggccaatcccaactactctggaagctgaggcggcaagatcacttgagcccaggagtttaagaccagcctgggcaacatagcaagacccntgtctctaaaga

SEQ ID NO: 514855 - DNA, 301 bp, Homo sapiens
tagcgacgcttatcatggaagctttcaaccaaaacaaaaaaacaaaaacaaaaatgaaagaaaggattaaaagggagatgatggctcattctccatctgcctgccaaatctaggaggttaacctattgttttcttcccttctctctttttctcttccccccctcttccctgtactccttcttctctcttttctctttctatcccctctctcttttcttcttgtgcttttttttttcatgttcagctttagtaacaaatgagcatctgtcagttttataaactgcaaccgtcgtttaatttt

SEQ ID NO: 514856 - DNA, 892 bp, Homo sapiens
  misc_feature (28)..(28): n is a, c, g, or t
  misc_feature (66)..(66): n is a, c, g, or t
  misc_feature (76)..(76): n is a, c, g, or t
  misc_feature (79)..(79): n is a, c, g, or t
  misc_feature (86)..(86): n is a, c, g, or t
  misc_feature (90)..(90): n is a, c, g, or t
  misc_feature (96)..(96): n is a, c, g, or t
  misc_feature (112)..(112): n is a, c, g, or t
  misc_feature (121)..(121): n is a, c, g, or t
  misc_feature (125)..(126): n is a, c, g, or t
  misc_feature (139)..(139): n is a, c, g, or t
  misc_feature (148)..(148): n is a, c, g, or t
  misc_feature (155)..(156): n is a, c, g, or t
  misc_feature (159)..(160): n is a, c, g, or t
  misc_feature (166)..(166): n is a, c, g, or t
  misc_feature (168)..(170): n is a, c, g, or t
  misc_feature (177)..(177): n is a, c, g, or t
  misc_feature (186)..(186): n is a, c, g, or t
  misc_feature (191)..(191): n is a, c, g, or t
  misc_feature (196)..(197): n is a, c, g, or t
  misc_feature (210)..(210): n is a, c, g, or t
  misc_feature (233)..(233): n is a, c, g, or t
  misc_feature (235)..(235): n is a, c, g, or t
  misc_feature (239)..(239): n is a, c, g, or t
  misc_feature (250)..(251): n is a, c, g, or t
  misc_feature (255)..(256): n is a, c, g, or t
  misc_feature (258)..(258): n is a, c, g, or t
  misc_feature (263)..(264): n is a, c, g, or t
  misc_feature (275)..(276): n is a, c, g, or t
  misc_feature (280)..(280): n is a, c, g, or t
  misc_feature (282)..(282): n is a, c, g, or t
  misc_feature (286)..(286): n is a, c, g, or t
  misc_feature (291)..(292): n is a, c, g, or t
  misc_feature (298)..(299): n is a, c, g, or t
  misc_feature (318)..(319): n is a, c, g, or t
  misc_feature (334)..(335): n is a, c, g, or t
  misc_feature (339)..(339): n is a, c, g, or t
  misc_feature (347)..(347): n is a, c, g, or t
  misc_feature (349)..(349): n is a, c, g, or t
  misc_feature (353)..(353): n is a, c, g, or t
  misc_feature (355)..(356): n is a, c, g, or t
  misc_feature (373)..(373): n is a, c, g, or t
  misc_feature (379)..(379): n is a, c, g, or t
  misc_feature (381)..(381): n is a, c, g, or t
  misc_feature (393)..(393): n is a, c, g, or t
  misc_feature (398)..(398): n is a, c, g, or t
  misc_feature (403)..(405): n is a, c, g, or t
  misc_feature (408)..(409): n is a, c, g, or t
  misc_feature (417)..(417): n is a, c, g, or t
  misc_feature (425)..(425): n is a, c, g, or t
  misc_feature (441)..(441): n is a, c, g, or t
  misc_feature (448)..(448): n is a, c, g, or t
  misc_feature (451)..(451): n is a, c, g, or t
  misc_feature (455)..(455): n is a, c, g, or t
  misc_feature (478)..(478): n is a, c, g, or t
  misc_feature (487)..(487): n is a, c, g, or t
  misc_feature (513)..(513): n is a, c, g, or t
  misc_feature (524)..(524): n is a, c, g, or t
  misc_feature (532)..(532): n is a, c, g, or t
  misc_feature (539)..(539): n is a, c, g, or t
  misc_feature (545)..(545): n is a, c, g, or t
  misc_feature (558)..(558): n is a, c, g, or t
  misc_feature (561)..(561): n is a, c, g, or t
  misc_feature (578)..(578): n is a, c, g, or t
  misc_feature (796)..(796): n is a, c, g, or t
  misc_feature (813)..(813): n is a, c, g, or t
  misc_feature (879)..(879): n is a, c, g, or t
agcctataagggtaatggacttttgggncaaaatgaaaaaaaaagcaaataaaaaaaagtattggnagggagaggnganaagtgtntccnggagantgaagcggaggagagnatgggaggnaagnnaggggtcccagcngcagagggnagaagcnnggnnaaagangnnnagggagnagatttgtntgagnagggnnagcaccaggaagnaagaagtaaaaaaaaaaggattnangggngtgggagaatnnaagnnantggtnncatagaaaganntgtntnatgnttggnnagaatnnactttggagaaaatggggnngtatgaaaggatggnntggngagggaananaggnannaagggtaaaagggggangaaaantnaccactgggatnagggnggagnnnagnngaatgganaataactncattacaaggacctgntcctggngcnaggntgtgccactaaactgctcatggncataagganattaaacttctatcctctcctccatnaggcccctatntgtgtggnctcagcnccggtnctcactatttggnggntatgatgcaggactctncaccctcttttggaacagtgttgcataaagaaagggagaatgttcttctagagggacaggaaaagaagagatgtccacatacttctctcactctaagaagccaggttaggtccctggtgcactccactctccacagatggttgggtcatagcatccgagaagctgttatggtgacgaagtcttcgaagctgagccgaatgttgccttgtacagctgtntccttctcccggaaggnctctgtaagcacctgcagctgggtgcacacctggatgaagcggtcaagctgcatggcaggattggnagagcgtgggcag

SEQ ID NO: 514857 - DNA, 264 bp, Homo sapiens
tgctgggtatgtaaacacaggtacattattgaggtacagcctaatgcaaaacagacaagtaaatatggagtatattacagaagatacattttgtagtaattatgtttcagtaatggctagaatattatctatacctatttgtattgtgtttgctgggtaccctagggattagcataggaatcttttacttaccttggtctacttacagttaagatagtgccaatttatgtatatgaagcttcacaataggatacagtagggaga

SEQ ID NO: 514858 - DNA, 1071 bp, Homo sapiens
ctttgacccactgagcagcacggggcagccagaagtacctggtgcgctgacctgtgccctgagactcacccagcagatgttttgatgccaagaacatgatggctgcctgcgaccccgcgaacatggctgctacctgactggtttgcctgacgtgttcagggtgcctgcatgtacatgaaggcaggtggatgagcaaatgcttaatgtccaaaacaaaaacagcagctatttatgttgagtggatccccaacaatgtgaacactggctgtctgtgacatcccacctcgtggggctaaaaatgtccgccaccttcatttgtgcaacatgcacaggacatccatggagactgtacaagcagcatctccgagcagttcacggccatgttcctggtgcaaggccttccgtgcactggtacacagggctgagggcatggaacgagatgagagttcaccagaggccgagagcaacctgacatgacctggtgtcctgagtaccagacagtaccaggatgccacagacgacggaggagggcgacgttcgcaggcaggcggcttgcggcacggcaggtaggctagaagcctaccagccacactgagggacaagccagcgcaatcagtgtgaaacttctttattacaactccacagaactgatcctgttggccttgtccccatagtgttgcacttgctgggaattccatggacccgatccaatgcttgttaccggaccgcacacaatcacacgcaatttccaacgctgaaaacaaaaacaggcgaaaaacaagacaaagaggcggagcagcacataaaggaacaccacaagagcgcccaactgcgcgggaccccagatctttgcaacaggaggggccacaaataaaggagccgcacaatcaaagcaacagcactaagcgcatgtattaaagaaggtatgtgagtgagaaaaagactcacgaagccaaagggagagagcataaattctgtggtcaataatgagcaaaccatacggggagcaagagtaggagaatagcctcgggattggcatcgcgtggcctaggaggaaagagacaatagtgt

SEQ ID NO: 514859 - DNA, 330 bp, Homo sapiens
gtcccgggtaaatcctcatattgaattgagaacctgttttcccattggggggggtttcctccgattgatcccaacccttcccctattttagggaaaccggccctttcctaattggtttttacactgctgggccccccttttgaggggggcctttgcatacttacaaatcagtcaacgtgttttccccctattttgagcccataaaagacccagattcaggtgcagtgaggagagaaatccccctgctgggggggttgggggcccctccctgcatcccctttcccctgagaggggtttttttggtcaataaaatttttttttccccctcca

SEQ ID NO: 514860 - DNA, 198 bp, Homo sapiens
attaagagaacgaaggaaggaaacgaaaagaatgaagaaacgacgaaagaaaggaaggaagagaacagagagagaagaaaagagagagagagaaagaaagaaagaaactgcagatttatgagaatgattgtgatttatcctacttaggctgagtttctaaagtagtaatacttctttgctgctgtgtcatctccagag

SEQ ID NO: 514861 - DNA, 241 bp, Homo sapiens
  misc_feature (86)..(86): n is a, c, g, or t
tgcgctcagtatcacatgtcagagctgtggagagaggacctcatgcaggtgacggtcagtgggcgtcgtcagagctgtggagaganacgctcatgcaggttgtatgtccagtggtcacattcagagcatggaaagaggacctcatgcagtgtggtggtccagtgtccagttgtcagagctgtggaaagaggacctcatgcagggtgatggtccagtggggcattcgtcagagctgtggaaa

SEQ ID NO: 514862 - DNA, 1377 bp, Homo sapiens
  misc_feature (316)..(316): n is a, c, g, or t
  misc_feature (353)..(353): n is a, c, g, or t
  misc_feature (363)..(363): n is a, c, g, or t
  misc_feature (443)..(443): n is a, c, g, or t
  misc_feature (465)..(465): n is a, c, g, or t
  misc_feature (473)..(473): n is a, c, g, or t
  misc_feature (709)..(709): n is a, c, g, or t
  misc_feature (786)..(786): n is a, c, g, or t
  misc_feature (812)..(812): n is a, c, g, or t
  misc_feature (843)..(843): n is a, c, g, or t
  misc_feature (886)..(886): n is a, c, g, or t
  misc_feature (948)..(948): n is a, c, g, or t
  misc_feature (961)..(961): n is a, c, g, or t
  misc_feature (981)..(981): n is a, c, g, or t
  misc_feature (1030)..(1030): n is a, c, g, or t
  misc_feature (1088)..(1088): n is a, c, g, or t
  misc_feature (1090)..(1090): n is a, c, g, or t
  misc_feature (1171)..(1171): n is a, c, g, or t
  misc_feature (1285)..(1285): n is a, c, g, or t
gatagaggaacgtgtcacgccaacttgcacagagcatcctgtgttctggcactactaatcatcggtccgcgaagagttgcgaacccacgagtacaccgtcatatttcatgctctacagccatacgggatgctgcaccaaggcgcccccgcaagaccctaacgagtaaacgcgcgtgtaagaaggagtgcaggaagcgtctctgcgaggtctcttgctgatcccgaaccagagtctgctcatggcgccatcaacgccatcccctcctgttactcaccctcattcggtcattcgtgccttccggcgacatgtggctcntgtctattctcgcacttagcggtctttccactaatcntttatgcttntgttcttggcgtatggctggcatggcgtcggtgtgacctaccaccattcctttctctggactctccctcttcggcgatgngcacttccttcaactcttgcanagcgttanagagaggggacgcccaaagggggtgcgaagatgtgaatcccccaccaagaccagaagattagatggacaccacgacccaccaaaatttgtaatgacacccaccattccaaaattacaaaaccacaaccgtatggaatacgaagcgccgcagccgcgaatctaaatatccggttccgttacgccggtgcccgtaggggaacaagcaacccacacgcagaaggagtgatgatgagacnattaggagaataagctgccgaagacggaggggatatgtaacgcaactgttggaccagcgaaaaattggcctactaancgctgccagcagacgaagctttattntggcttatactgttttggtatggtcaagacnagcacaggaacaacggcgttggtgttcagggagagaaacgtcnaaccgggtttgtcggagagcagcttttacgccatcagcgctaaaagaaatgtttaaagaggngaggggggaagantttcaaccggcaaagtgggnaaaatgacagaaggggttccatgaacaaaccaagattgaaatggcaaancgggaaacccgggaacacaaaggatctggttggtaaaatggagcaaaaccggcaagangngcaagcgtcaaataattaacgatagttttaaagttatagcttttttggagagtgtacacacaatataagtattttttgaantttttaaattcatacgcgagacggcgaaaaggcgacaaggtgaggcggaaagaagggggggacagcgcagagggcagagtagcaagagagaatttggcagacgagacagagagngtttagtgaagagggtggacaacaaccgccctggggcgaggagactatttggtggtgacctattttgggcgggccagggcggtggtttccaa

SEQ ID NO: 514863 - DNA, 388 bp, Homo sapiens
gttgatctcttagaggatacccaggcgttgcttgtgttattaaccaagaacaataaactaaagggatagcattgcttgaagagatgtttatgctgctctccttgttttgatacttgtatcgcgaaaatgggctgttgtaaacaggctgaagggtgtgtatggtcggccatttctgtctcacctctaggccctctgctggtgctgtggaggccaagaccccattaagcctaaaggtgatgggtcctcgcctaggcttagtgctaccatgtgggtttcgtttctttccttccttccttccttccttccttccttccttccttccttccttccttccttccttccttctttccttccttccttccttccttccttcctccctctctctttc

SEQ ID NO: 514864 - DNA, 1768 bp, Homo sapiens
gtgaatagacgtcagacgcacgagcatactttcatcgcatccgtctactcgatcatcatcgctatgctccatgcgtgtggtcaatggtatcatatgcttgacatcgtcgcagacatcgctacggtaagccgatctattagaagatgatctgtctgacaaggcgtgtctcgtagcccatagtgattctagtcttctctctttgcaccgctaccgttggaggccattgaattgtggccactccgataatttatgacaaaaaccgtacagtcgagctaataaccacttcgggatcctatcgatcggaccacggttgaacttagcgttctgttaaaccacgcacatatcgcaacgtattcgatcctcatccacatgagggaacctggtatttgtgcctagtctactaggcaggactcaccatctcatctagaatttgcgccctatattgtctacgggtacgccccgtagaggcaggagacatacagccgttgaggtgccgatgatcactagtccataattcatctgggcggtagaaatcgtaacttgttcattgggcatcaacgagctttcgtcgacccttatccggaaattgcccctgaccgttactcgcgactaacctcagagtgcatgctcccagattgtactcatagctatgcctcgtgtatgctcattccctttctcatatcagcagttacttatttatagtttcacagaatttgagtagcccggtgattttggggcaaggagcccaatattcaaagaagcctccaaaaatgccgagtggcacaatggtgcccccaccggcactcattccaaacccgtttaagccacccaaggcaagggagcgaaccccaccaggtcgcccccctggcccccttgccgaaacacaaaaaatgggcgccgccacaacactggcggcagacacccccgcaacggtcaccagccaggaggcaacgagccccccccgacgcacgcccccgcacacccctacccaccaccgcccgaccccccacccaccagcacgccgcacacagcgtacaggcaacagccggcacagaccaacgcagacatagcacaacacacgtgaaagagagcagcggcaggcagacgcggaggcagcagaagaccaagacgaggagaggacgcagacagaaataggcaaacagcaccggagagacagataggacacccggaggcaccgtccgaacaaacagccagatcgcacaccgacaagggacaacactcacgtcaccgaaacatactcgcaacacccagcaacaaccgccaacaccactcccccatcaaccacacatcacacactcccacatctatcaaaccctatacaccacagtgcacaagaccacacccctcaccccgcatagttaaaatatccagcgcctacccaacgcctaaccctcgcatacataatcatgacactcctactgctatgggcagctatatgatgggggtgacaccacgagtacccacacgcagataagcttggaagcagaggactgatagcgcagacggacacacaacgaagcgatgcacccaaggcacgcagaccagcgacgtctacacgagcgagagcagcaacgagccgcgcacgaccatgagacaacgacgcagcacctacagatacgactcgagacagagcgacacaaggagccacactgaagcagataaaccggtacatcacacgatgatccacaaacagcatggcacacaacattctgatggacgagcgggttgggtggcaggcctaccacga

SEQ ID NO: 514865 - DNA, 959 bp, Homo sapiens
gagcgggtctagtggtcgcgcaaccggtggctccgggccgccgttgtgaagtgagcgggcctctccctgctgcctgcggcctgcctgggcacctgccgcttggacccctgctgcccgaccctgtgcaggctgccccggaacttgcctgctcgggcaggtccgcggacggtttcggatttctggttcctaaagtccgatttttggacgctgaacaagggcaggcttgtgcgaggggccgagcggagtcctgggaaggcaaggcctgctctgtgcggagcacaaaacgcctttgtgcgaacagacaactaaattcccgcggaaacggccttgaacggtgggactttcaccatattctccacttgaaagcaaatgctgcaaacaaattgtgcattgccgttcaccaaagtgtcggtctttgatgctcataatatcattgctacctaactgctacaacgggacgactggggtcaccagtgtcaacaccgacaggtctacacttggtgttagtcccagtgctgagtcttcaaaggcttcctgggaccttcaaagcaattactttccacccttcagactttcccaaaaattgcttggagattaaccagcattggcagtcttggctctggtacgcccatgggcttgggaaggttgcaagatggacattgcgcaatcactcggcaaatcaactttggcgaaccttacgaggcgtcccccgctgggatttcaacaggttgcatacatacctgtggccgttcaggaccatccacaagagtaacgcctggtgcgcgacttaacataaaggccccccggttggcacaacccaattgccccaaggaccacctatgtttcaattcattgggaaacccctgatgagaatacccccgagttggaacccaggaatgcctttgcgaacacccttggcacaggtaacatcctttcagcgaattccctaaggcatgaac

SEQ ID NO: 514866 - DNA, 1173 bp, Homo sapiens
  misc_feature (366)..(366): n is a, c, g, or t
gacaaggaccctctagtaaatatccattgtgggagatccctcgtgaatatgcctgtcgcaacaggttgatggggtgttgtcgcccctcgcctggtgcaacaaccgtatcagtgcggtggtggaacaccccctctccttcgttgtttctggggtcgtctctctccttcgtctgctaatggaaagaaaggggtgttctcctccccacacgacgcataattggtgcagtaggagtgtgtgtgggctgcttctcatgcgagtccactgtgggcgcaccactggctcctctctagaccctcccggcgcactgtcggcccacacagattacgactctcacttcgtggcacgactgggtgctcgcccacagtntggtgtcgcacacacgacgagtcgctcccacgatctttttcctctagtggcactcccactattctcacacaccactcgcccacagtctgctgagagagtgtctcacattgagactcctcgagagaggaggccctcttctcactcacactgtgtgtcactgtctctctcttgtgggactctcacacagaaacctgctatgcgtggggctgggcgctctctctgcagagagagagatataacagcctcgcacacactgtgtgtgtgagacacacagctgtgtacacacactggtgcgcacacacttgtctccacacacactctctttatttctccgtgttctctctccacacacactctctcacagctgttatagcctctcatctctctccacacaaaccacacacacctctctcgcacaacaagactcttggagcaatcactcccacacacctccacgcatgattatctctccacagcgcacactctcacaatattatctcttttcactccgcctctttgcaccctcgccacactcgtgttcccaccgtaactctttctctcctctcttatattgtaagaccacactctcacgcctctctctcccacacccacacatctgtacacacacactcctccacagaaggcacccgacattctagaaggccatgaaagttgagtgtttgtgaaattcccacgaaaaggagtttcgcccccaggagttcgccccactcactcccacgcgtaagagatggcaggaatggattttgcatgagaattttaaaatataagaatggacacacccaatta

SEQ ID NO: 514867 - DNA, 335 bp, Homo sapiens
ttaaaagatgaaaacaccactatatttctaactcttgagagcttctgttacatttctgggcacttagcatttacttctcagcattttaagttataatttcactgtatatttttcttaatctcccaaagagagattgtacagctcctagcagagcaggtgcttgtactccagtgaatacgatttctctcattagcccagtgaatccaaatgatgaccatcagtgatacattgtcctcaccgagatctacggagctattggctcttctaaccaagcctttaggccacacgtagaacattctagtctagaacttattgcatactaatccccaagctct

SEQ ID NO: 514868 - DNA, 326 bp, Homo sapiens
ggggggaatttaatttttttcccaccacactttttcgcgcatcggggaggccccgaggttttgggggatacccccgagggataccccaccatggaacatcctatcattgggagggtcattcttttttttaacggggggaatattaataatttttttgttttgggaggccttgggtttgaagggaaaagtcttaatagtagaagacccctccataaacttgggggggttatatgggggcccccccccctcccccacatttgaagaaccgggataaataaatttttggcaaaaaagggaaccaaaaaagatacggcctttgattgtta

SEQ ID NO: 514869 - DNA, 244 bp, Homo sapiens
ctactgggataggtagactaaaggaaagatacctgattctagcaaagcagttagcacagggtgcaccctatgcattatataccagacatgccctactaaagaaagtggcactgagctagagagtgggaaaaatagagaaacagttaatttaggaagcgaagagtcttctaggacaacaggcagtgggcaggtcatgtaagatagccccaagtggtgaggcagcaagtacagtgctatctaggac

SEQ ID NO: 514870 - DNA, 370 bp, Homo sapiens
actactactaaaataggcggcggttcgaacgcattggtggctcatgccttgtcatcccaaaaactttgggaggccaaggggggaggattgcttgaggccaggagttcgagaccagcctgttcagcatggcaggacccccatctctacaaaaactaaacagattagctaggtgtggtggtgtgtgcctgtggtcctagctgcttgggaggctgaggcaggcggatagctcgagcacacggagttggaggctgcagtgagccatgattacaccactgcacttgagcctgggcagcagagtgagacctgtctttaaaaaaatagaaaacaaagagcgaaactccatctcaaaaaaaaagtcgacgcggccgcg

SEQ ID NO: 514871 - DNA, 389 bp, Homo sapiens
tactttcacagggattaaaagatttttctcaaaattatatagccaataacaagaagagtagaagtgatcttcaatgttgtccattattttattccccttcttttccacctctttaattaaaacacagccttcaagaccctgcttgaatcccacttcctctgcaaagctctccctccctcccccacagcacatgacatagagcctttcatataccagtatgcaataacagcttgatgactggtgatgatgatcaggtagcaactgtcagcctgtgtggatgccttgtgaccactggataaaggggcaactgcagtggtctggactcaggaaagaagtcccctaggaaggactaggctttgagccaggtcttgaagaaactggtagctgtg

SEQ ID NO: 514872 - DNA, 705 bp, Homo sapiens
gcaaagaaaaagagaagccctcctatgacactgaaacgagatcctagtgagggattgatgaatgttctagaagaaaatttagtgaagatggagacgatgatatgtaagcagaagccatgtagataaagcctgggtggaatcaagagagaagcattgtcgaaaggagactacggaattttgagacttataaaggtcgttgtggggaacgtgtgatgtgatgtggaaatactgatgtttccagttaagggaatatgggtgagctgctatatataaatttgaccaggatagcgtatttacatagccttctaaggtaaaggcaaagaattctccatatcctagctggagggatttatttagattacaagatatgcttatgtaatagcactcctgcaaggatggttgtattagtaccctggtcattctgttcgagggagggttatatgcattctcacgtgaaatatacaaaagcatagtctctgccctatatgaaagcgctagactgtgtgtattgttgtgtccagctaagaattggaaaaggcatcttgcttgccttggaagtagctgacatcagcttgaccagtgtagaacttgagtaaaaactgaagtttgcatggatgcaaatcggtgccggtgctgaaggtgctgtacagatctgaccctttataccaccttgagcagtgtatatgccaggtaccagcactaatc

SEQ ID NO: 514873 - DNA, 210 bp, Homo sapiens
acttacaacgataaaaatagaagttagtttcaataattatttttataattttttcagtgaaaatccacagacaagaacaaaactcatggttctcaaattatactcttatactgattatcagtagttttaggtgtttgggttctgaaattcaatgctaggactgggagtagaggattttattgctaatatatcaggattaggttttgctgc

SEQ ID NO: 514874 - DNA, 200 bp, Homo sapiens
tccccatacccttaagggctgtcaccttagttccaaaaactcatccacaaaggcatttttgcgtagatcaggagaaaaaccactcaaacaattcacacgaaacccagggaccctattattcggcttaggaactttgacgaacggaccaaaactcagcgccggggaccggcaccccaaaaggcggataggaaaaaggggtc

SEQ ID NO: 514875 - DNA, 421 bp, Homo sapiens
gggctgcaggaattgtcacgaggtgccacccacctcctgagctgtgtttgtgaaatgactgcggacaccaagttcttgctgttctccaatctcatcagacagtagaatgtgaggaaaaacttttgcccgactgagttttaaaaaggaaaaaaaaaaaggtttactatgtggccttccaaaataagtagtggttgcctatgtggaaacaacagcgaacttacacccagtgccagagtcctggatgtgccattgggttaagtggtcatgtgtctaatgaacacacgcttgttcaagaacaaacacttaaacgatttgagtataggctggtgtgcaccttttgtgacctgaggaatcccaagcctgtgagaaaagcgttcacattgcagcacatgatgcgcctagcactggtcgtctgtgctgg

SEQ ID NO: 514876 - DNA, 751 bp, Homo sapiens
tctgaggcttattgttcttttttcttaaaagagaaaacttcctcacacctgtaatcccagcactttgggaggccgaggcgggcggatcacgaggtcaggagatccagaccatcctggctaacatggtgaaacaccgtctctactaaaaataccaaaaaaaaaaaaaaaaaaaaaaaaaaactggggggcggcctctcgggccctccggaaaagcgcttttcaaagacccttccggtggggcgcgcgcggggcgcccatgaggggaaagggagacacggggccaaaacgcgggtccccaaagggaaacccggggccatagagacaaagggcgcgggggattctctcaccccaatataaaaaaacgccccggggcgcgcacccccgagaggggtcttcgagacaaaactctccacaagggcgggccccagagagggccaatccacgggcgcctcatatccaccacgggggagcgcccacaagcgcgagagcctctcggatatactacacaattacgcgccccccggctcctcgggggcgcccaccacatacaccccacccacccacacccacacacgccacacccacgaccacactccgcacgcaaagaaaaccaagaaacagtgaggccacaccaaagcactcacaaacaccacacaccaacccccccacacacaccccccacacacacaccccgcccacaaaccacaccacccacgcacaccacaacaccgcgcgaacccccccccgaccc

SEQ ID NO: 514877 - DNA, 827 bp, Homo sapiens
gatcccattacgacgcctctctccctactgttgctacagctagggaacctgagattgacctgcaagacgaacaccatgacagagacctgtatccttcttgcgcactccgtggccgccttgaatcggcttctaactttgtgttctcgaagtacacgagtgaagacgcctgggatcttatgaacttgattcccttcattagcatgggaagagttgctacctcagccttccatattccccttcacgaccaagaggaatgcgatgatgctagagtccagtgagtaggatccgtagaatcgcctctatatgcctgtccacgagctcaatagggactgcctgtgatgactacagactttgcgagaacgcatacgccatggtgtgtatgccaatactagattgctgcctataaatcgctacttcagtgaagcgcctgaaggggccataattgagactgagggaagaaaccaaatctctttttctctggaggctggcacctgattttgtatccccctgtagcagcattactgaaatacataggcttatatacaatgcttctttcctgtatattctcttgtctggctgcacccctttttcccgccccaagattgataggtacctcaaagtgcactgcaggtgtacggtcaccggagagtcaccatatgtgattgtcccataattaactctggtgtgatctttcatcttgtaactctgcttctttgggagccttcgccattttaaatcatggccacctaccaaatggagttctgtcccccattctagtttattgaaatactctaaagaggaacgaaagggcccaactaatttaaccc

SEQ ID NO: 514878 - DNA, 349 bp, Homo sapiens
  misc_feature (83)..(83): n is a, c, g, or t
  misc_feature (109)..(109): n is a, c, g, or t
  misc_feature (115)..(115): n is a, c, g, or t
  misc_feature (125)..(125): n is a, c, g, or t
  misc_feature (173)..(173): n is a, c, g, or t
  misc_feature (183)..(183): n is a, c, g, or t
  misc_feature (312)..(312): n is a, c, g, or t
tcagattgagatgtccacccatatctcactcagggagaagttaatccagtactgccagtccaaaggtcatcgtgggtgaccgncctacagccccctcggctcttcctgnacaggnccctgggcanagtcccgaggtacccttctcttcctgggagggatcccaggatcaaggncgatcgcagnccaagcacaataaaactacagcccaggtcctgatccggttccccatggcagaggaacttggtggtgatccccaagtctgtgacaccagaacgcattgctgagaactttaaggtctttgactttgaactnaggcagccaggatatgaccaccttactcagctacaac

SEQ ID NO: 514879 - DNA, 108 bp, Homo sapiens
tcagcctaaaggcatggacactgtaatatatcttaatgaaaggaccataatcccaatgcagcgtcatctatattctctgataacagccattatgtattcacaggatat

SEQ ID NO: 514880 - DNA, 257 bp, Homo sapiens
gatgggagccaagaaggattgttagcactgctagagtttgctgagagaagatgaaagtgaactatgtcttcatctcttcaggaagggcgagagacagagctcactcctgaggacctccagcttcttgggctttgagattgtacgtcaggccatccttgagtaagcaggtcgaccctcttctttacagctagtgttattctggcatttggtaagctggcttaatctgttaatgtatcagacatttaataggggcattg

SEQ ID NO: 514881 - DNA, 228 bp, Homo sapiens
cagatctcgagaatgagatagaacagatagtaaatgaaatatgtcagagttcagatagaaaagaaaacaggtagacatatggagtatagagataaaaatataaggcaatgttaaatagcactgaaaaaatgggaatattgtaccattttattttaaaagccccatcaatttaaatttctggtggtgcagaagttagaaggtaaagcttgagaagatgagggtgttacg

SEQ ID NO: 514882 - DNA, 500 bp, Homo sapiens
cggtgctgctctccccccccgtgtattcttccttgcccgggcgtcctctccgtttataggctgaggccctcccacatatgcggggggttttttctttaccccgccgcccaaccaaagcgccatctctggggactctctctctcccagcgtccacgcggcaaagggcgcctcccgtcagatgcgtgggggaccccaagagcaacttctggagttatcgcgaacaccgttggcctgtcgccaggtacacagggacgcagttccacaccgcgtggacgttctctccgctatgggttctcacggttcctccctgcctagtggacgtgcccttgtcgcgcgattttcccacaggagtctcccttgtgtgctcttggcttccccccggcagcaggttttgtcccccctggcccaccccccggcgggttaagcgggtctcctcccctcccccttttttttttcctgggggctcaccccaaaattttaaaaaactctgggaaaaaaaa

SEQ ID NO: 514883 - DNA, 148 bp, Homo sapiens
aagtggtgaccgtgagatctgccaggtccccaggctcacctccccgccccgatagtgtcatgatgaatgactgtcttcatgtggcctggggctgtgggtgtgccagtgaggctgggccatgtcacattttgtgtggcagcccaatcca

SEQ ID NO: 514884 - DNA, 152 bp, Homo sapiens
cggccactgtaacggtggggatagagaactccagaatttaatcatcagactccaatcagtccctaaatccacaaaggcagaaataggagctttttatttattcaagtacattttgtttctttcaacttaagcccaaaacgatagtttaatca

SEQ ID NO: 514885 - DNA, 357 bp, Homo sapiens
ttgtgccctcccttcgtcagtaaggctgggcataggatcggtatgaaaatctcatgagaatttgtcaaaaagatgataatgtcagagatgatctccagttttaagttaagcaattaggcaaatttttcttctcttcattatagaatattcatctcaagtttaacatctccagagataaattggatggtacgtacagccatacaacattaaagttatcaatgtgatgtacaaaatctcatcttgctattaacctaacctttactttctttttcttttatatttcactgcatataaaacaagcaggtgtcgagcaggacaggatgcaggaagtagtacctcggagtgctaccactatgt

SEQ ID NO: 514886 - DNA, 924 bp, Homo sapiens
  misc_feature (17)..(17): n is a, c, g, or t
  misc_feature (96)..(96): n is a, c, g, or t
  misc_feature (158)..(158): n is a, c, g, or t
  misc_feature (447)..(447): n is a, c, g, or t
  misc_feature (464)..(464): n is a, c, g, or t
  misc_feature (478)..(478): n is a, c, g, or t
  misc_feature (548)..(548): n is a, c, g, or t
  misc_feature (672)..(672): n is a, c, g, or t
  misc_feature (677)..(678): n is a, c, g, or t
  misc_feature (681)..(682): n is a, c, g, or t
  misc_feature (685)..(693): n is a, c, g, or t
  misc_feature (695)..(696): n is a, c, g, or t
  misc_feature (730)..(730): n is a, c, g, or t
  misc_feature (892)..(892): n is a, c, g, or t
tatggggggttttaaanttttatttcaaaagcttggatagcttcaatatccaggttgtggcaaaatcaggacacgtgtaaaataccttacaatacnttagattcccaaaaggtaccaaaaagtacagtaaaattaacatttccgttacaggaaatgtntgacgcaaataatataaaattaaaaggtgaaaaaaaggtgacactggtttctcctaagatacaatttactctttacaaccagggctccacaggctccaggctgcagagcggcagcaggaagcagagcctccttcacctgctttctgggggacctggtaataaaaatcagcccatgatggcgctagtggcctctcagacaccacacgctgcctaaacaccttagagctctggaaatagttcaacaggagagtgattcccatgggggaaattttaaattaagatgcacatnggacaggcaatagaaantttgccaagttaanatttggtacataattgtgttcactccatatccaaacaaagcatgttgtgcgatcagttggtcgctcctgntgccgcctcagtaatggcttgtagttattctgatggccaccacgtcgctggctcttgccgtagtttgtactaccctgatctccacctccaccaccacctccgctgcctcggttccctcggaaanaaaanncannaannnnnnnnncnnactgctgctgctgatagacttctttgggctgggncaccttgatctcacacttgcttccactgacagtatggaactttttctccagaaccttcttcacgggttcttcttctttaaaggtgataaacacaaaacctcgtctattgttcaactttggatccattgccattccatggcctcaatctccccaactcgccanagtactccctgatcttttcctcagtgcttcag

SEQ ID NO: 514887 - DNA, 1061 bp, Homo sapiens
gctgatctcttcttcttcttctgagagtgtgttctcgcacctgttgtataacacgtgcgtcggttctgcaccctgtttggggattccctgtgggttcccaccaccggggattccggatattccgcggggtgctccccccgttgtttggttctcccccgcccccttgttcccggtttttgttcccctccggagagttttccccgctttttcctagggaccttcccgtttccccctgtaggaaaattccccgatagccagtcttagctttccaatttgaaactgaactccttggaaaggacctggttcacggcttccttaatgcctgagtgaccgttccctatccggaaaattgactaaacgcctgtcctaagctatctctcaagggttcctaaggttttcatatcaaaatttaaagcctaaccactctggatcccctaccagtcacgaggtccgtatctcagcgtgtgaattatagaggcaataccacgagagcacctcttccccctttacctttcggtcccaatcaaatgcactggtgtgacccgaaagttgaagaatcgcggtttaggattggggctagctcgatgaccctaaggcccccacatcgcgggacctcgctttgggcccggatttcttaggacccctcgtttctagccggcccccttctgcccggggtccccgtggccggcattattttcctacgtttctttcttgtagacccctgaggtgcccgcccggggatctgtaggaaggggtccacgggggctaaggatgcacacctctgacgttttgcgccttcctaggagaatcttaacacatgtgttgagaatttcacaccagcacaatgcgagttgtaaaatacccagctctaccagaagctaggctctgtgcacggccatagtttctccagtagctttatccaccaataattccaccaatggagaattatatgaccatggtacgccagaaataggcccttttatgtgttgcttttattttacctccaattgtaaaaatcagggtaatccaataaaatccatccctgcctttctacaccctta

SEQ ID NO: 514888 - DNA, 465 bp, Homo sapiens
  misc_feature (92)..(92): n is a, c, g, or t
  misc_feature (102)..(104): n is a, c, g, or t
  misc_feature (106)..(108): n is a, c, g, or t
aactgctgatttctttggagaatcatccccataaacttctcataaagcatcaatgattttaccattcttccacccagcttcacactaatttnatgttggttnnncnnnaattttagtagaatttatgttgctctgacaggtgctcttttcaaacttacgtcttacctttttagtgcctcaaactacatcctgttcaggcatgttataacaagttagtatgagcttattttggtataaaaaatttggactccataattttttcataatatgcatttttcattaccttttggaagacaactcatatcaccttgagcttcttttcatatgcctattttccatatgtatatcttctttggtgaggtgtccttttcagatgtttgtacatttaaaaatcagttattacccactcccaccacttctattcaacatagtactggaagtactatcaagagagagcaattagac

SEQ ID NO: 514889 - DNA, 214 bp, Homo sapiens
ctaggtggaagtctgttctttctaaaagcaagtctctcaggttctcgctcaatctgttcttcaccagtaggacctcggtctccgtgccatggtttgagggcctgcgctgtgaagttgctgcagctcttaaatgctctcctggcccttggagcagagtatcagctgcgaatggaggacctgcggaaaaccggaggctgtggactcgtcccaaggg

SEQ ID NO: 514890 - DNA, 88 bp, Homo sapiens
ttttaaggaatgtacctgaccacagtgttaatatatatttcttcaaactaattaaatgtacatttctataataaatattttttaaact

SEQ ID NO: 514891 - DNA, 407 bp, Homo sapiens
  misc_feature (227)..(227): n is a, c, g, or t
  misc_feature (361)..(361): n is a, c, g, or t
  misc_feature (381)..(381): n is a, c, g, or t
  misc_feature (397)..(397): n is a, c, g, or t
agtctgggcaacatctccacagaaaataaaaaaattagacaggcatggtggcacacgcctgtggtcctgagtagctgggactacatgcaggcaccaccatgctcggctaattttgtatttttagtagagacagggtttctccatgttggtcaggctggtcttgatctcctgacttcaggtgatccacctgcctcggcctcccaaagtgctgggattacaggcgtacnctttcacctgggccaaaattctgcatttctaataagctcttagggtgatcatattttgaatagccagtccccaaacttcttcatacattaggatatggggttggggcctattatggaacattaccccagcttanttcattttgcctggatggantcagttttggatcccngttcccctaa

SEQ ID NO: 514892 - DNA, 225 bp, Homo sapiens
agtcaacatctgaaacacacatatcttatacagaacactccctaaacagagtgtgggggcgagtggacctggagcttactactgcctccaggacttcccagagacagtatgcttattggggagtggtcctcagtggccctgcaccctactctcattccagaaggcaaggcttagaagtggactcaactcctcaacgcgttctcacacgcgattagggttagtggt

SEQ ID NO: 514893 - DNA, 169 bp, Homo sapiens
atatgagctggctccgcttggcgtagcgcattgtggttaacagcgtgaagtgctgtatgaaaaatcgacaccgcgacgaacaccgacagcggcacgcccgccagcgccagcagcaaaaagaacgggatcgacgtcagcgacgaataccaggagttgcgcacccccagcg

SEQ ID NO: 514894 - DNA, 134 bp, Homo sapiens
  misc_feature (26)..(26): n is a, c, g, or t
  misc_feature (35)..(35): n is a, c, g, or t
  misc_feature (112)..(112): n is a, c, g, or t
ccttcatcggaaatgtgtcatccaantgacgtcancactcgcagcacattcagaaacaagtcaaatttatattctaccgcttgtgcaaaacatattcaacgcaaagaacatntacttacgtcgagtagtttttt

SEQ ID NO: 514895 - DNA, 419 bp, Homo sapiens
tattaagaatatggcgactgggcctgcggcggactccacgttgaaaccggcgactggggctgactccccttctgctagggcgaagagggatcatatggtctccgctggtgatgatagcaagaatattatggccaagggtcgtgatggcatgagggatcagaggtgtactgggcctctgataagggaggagaagataaaagagccacttatgaggaatgtttataatataatgagggctacggcgacttcatctcagatcgggggggctactgatcgcaatgctccccccaaggcgaagattgagtttgctgctcaccctgatcagaggatagaaaaaacgggtccgctcagacgttcagagacccagctaccaagctcaaatatggaaatatgggcataccgggtgacagtgtgaaacg

SEQ ID NO: 514896 - DNA, 133 bp, Homo sapiens
aattaatggactcggtacacaatctggtctacgcccagctgcacgttcaccgtacgacacagttgcgcggatacatcaaccgggcgttgacacccacaactcgtcatgaagcctggtgtgtggatcacgggca

SEQ ID NO: 514897 - DNA, 1127 bp, Homo sapiens
taacggcacgcctgcctcgactcgtccacgccctctgcccagaacgcaaacgcttagcacgccacgcgcctcagctagagacctacacggcgccgctgaactgagctgcggaacaggcgaaatgccgaccaattgcgctgccggcgggctgtgccacctacctacaacaacgcacacttaacactcacgcttccacaggttctcctctcggcactccctaaccccgccacagcacccagcacactgggcttcgccctggctctacgcgcgcccccccacctttcgctgccagcgaacacccccaccttcttcctttgcttcaacacgcaccttctgaagcctcacctgctcctccgaccctacaccacgcgcacaacacctccgcacgcacgttaacaactggccatgcctggtaccccgaaacccacttctccccgcatcttattggtagccccactactcaacagctcctactgcaccaccctccaaagactccaacggcaccatcctcttctcgcaacgcaaacgcccactacaacagctggaccccgtccccaagccctggggcaccccatatctataaactttctcacgaactttcttcatacccactttaggcctacgcttccacgcggaacgcttacttaaaccttctggaaaaccacccaagcccccttcaatggccccttcatcaacggcaccaattccccttcaactggcgcacgcgccccagaccccccaccgtcacgccgcctccccaatctcgagcccctgggggcacacctacgcaccacttaccccaaacagccctttcaaacgaaccgaacactactgcacccaccttcgccccctaacccaccaccggaaacccgccacaagtccaaacctcgccaccgcactggcgccttccaaccggacccacgcccggactcccggacacacagcaaacttcgcacaaagcacacaattaccgctgcacatctgacccccctaacagcgcgctacacctcacagaaatccatcactgtgttcacccaaccgcggccccctcaacagcacaggcctcctcccccacctggtccaccgccccctcccaacgaacatcctctggcaccccacgcacctca

SEQ ID NO: 514898 - DNA, 406 bp, Homo sapiens
ccacagtgtgtgcccatagcatctgtggtcactcaacacactgtgcaggacgtatgggccgattcacccatgcctctccgtggactgcgagcttcctgaggacagggagcttgccctgttcacctaggtggcccttgtcacctagtacaggacccagaacacaggaggtgctctgtgaaagctattggaatgacaagacaaatgtgcctcattcggacagctgggcccctagcacccccatttacttagtcaggagtgtgtgatgaaactggagaaaggctctccgggggcataggggcaaccgaagaaaacgggaataccctagatgggtgttatttgtcagatctaagagtatcctatctgtggatgcgattatggaactcaacttcctttgtgttgagggtgg

SEQ ID NO: 514899 - DNA, 433 bp, Homo sapiens
  misc_feature (395)..(395): n is a, c, g, or t
cacccgcatccgaaaaacccacgcagcgtttaccctgattgttgaccccgacaattcctcatcatcgcctacaacatgacctcgctatttacaatcgcgaatacctcttttggcggcgtgtcatatgcttttttaaaaacagagtagaaatattgcagcgatggataaccgcacatttgcgatatctcattgatcgacaaggtggttgaaatcagcagactgcgcgctttctccagcttctcggcatgaatcatggcatggatggtttcacccacctcttctttaaaacgcttctcaagattggagcgcgagatcccgaccgcatccagtacctgatccactttaatccctttacaggcgtgattacgaatgtaatgcatggcctgaataacggngggatcggtcagcgagcgataatctgttgagcgccggt

SEQ ID NO: 514900 - DNA, 1658 bp, Homo sapiens
  misc_feature (148)..(148): n is a, c, g, or t
  misc_feature (211)..(211): n is a, c, g, or t
atttgttcttcatcagcgagggggtgctcctcatactagtgttgttccacagctcgtccataccagccgcgcgggttggtgtcctacacctactcttcgtttgggaggtgagtccaccacccacgacagtttggtgtggccgcaccanacgttgtgggggcgcgggttgatgacgtatagaagtgtggtgcgtgctcaccacaccccctcnccgcgtgttattgcgccagccctctggtttgtgggcgacgcaccccgctctgttgttcgctctcgcccctactgtgtgtctcccccgcgatagttggtgggaagacccccccaccggtggggcgaccccaccggtacccctcttctggggaggataatattgccggccgtgtcgtggccgccccgtatcacttgttgggctgtggcaaaagaccaacgattaccagcagtggttgggtgtggtcccttcggcgcctcccctgggagaatgttcccccccaccattgtgtgccggaagaggggaagtcgctgtgtacaccaccccttgtgcgccaccgggaaccacgactgttgtggctgtgtgagcaacaacgggggtgtttctccccacccatcgtataggggaaacgacagttgtcgggaggaaaacgaccacatgtttctgtcgagacctctctcttctcattggggggtgtcgcccctcctgttgtgtgcgagtgggcccctcgggccagctgtgctttgccccaccaggggggtttaatatattttggggaacacccccccggtgttttgctaacacaccagcgtgcccactgcccccccacgtggagaccttcatattgtagaagccggtgcgcgttggcctcctaatatggtcttgtgcttctctctcttcatagttttgcgcgccctcgggggccacacacacagggtgacaccctcgcacaccggcgcgcacttgagcgcgagacacccttccctcggccacagatatccctgctctgttgtcccgacacactacacggcgcagcacttcgagcctcttcttttctcggtgtctctcccgacaatgtctccacgcataaattctctaacacacgcggcccacgcccctctcacacgcgagagagtaccaccgcttcttcgagctctcgtgtgggacacatatctgcagaggatatgacccacctcgcttgagatagagaagtgagaattatttctcgtgagctcttctctcttctctatgtaggggatgatacaccatcaagctggtgttcttcatgtgtgcctgcgttcttcaacaccttaccacacgctccacgcgtggtgtccacacccgcgtttctactagccccagcagcgtggagtacctgagaaacacacccgcgagaatctgtggagaatgttatataccacgcgttgccacgctggaacgtcacagaggtatgcttgataaacccacgccctctggttatctgctgccccacgccacttagctgccacgcgattctccacgcccacgctttacgccaccgctttaacctaggacacacacctcggaattctgggggctcactccacaaacacaactttattgcgaaaacagaaaacaaatattttggtcttttaaattgaatgaaaccctaaaccccctgattccatcc

SEQ ID NO: 514901 - DNA, 1193 bp, Homo sapiens
acaggcctaaggagaagcgagtaaccctgttaacccccgccggggccacaggcagcggtggtgtggacctcggtgggacagctaccaagggggaagataagcaggatcgccaacaaggcagaagaacagcaagcgctgagcaaggtggtaattcagaagattacctcccacttatgttctcacaggagcagcttcagtgaacatcttcaacctatgccgtgagcatgcattattttgcagtttattttctcaatgcatcacgcagtttgtaatacctcatatgtatgccaagagccatcacatccaacgtttaaacaaccgaagcaggcaccattcattatagttccagggcatcagcattatgcataggttactgtatatccttgcacagatcacaggtacaggacatatcccggctatagctagcaatttgcacgctttacaacaagagctgcgaaacacagcaagcacaaagcaaaagcagataccaacagtcgggacctatcgaatgatgatccagcaatctagcaacagtaacaaggacaagttatgccacagaataatgcgcaaaatgaccatctactccagagacactgctagaggcaaactcacaagccaccaaatagcagcaatacacacagctacaaaagacaagccccacctaaggagcttcctgcaaaaccaaggcagagaacgacacgaacgacaacagagaagaaaggaggaggcgagaactacgacacgcaacaggacaaggagcacgacagagcacgacgacaactgcgaccgcacagcacaagacacgccaccaggcaacgctataaaacagcctcccgcagaataaccagcactcacgcaacgggacacaactaaccgatgaccccacggatcaccagcgccacaacgccgcaaacgccagcccacaatgtgcacaccacgaccaagccgacatggacaccgagacgtcaagcgtaaaagagcacatacggcaacagaccaactgtcaagagatgagagaactaaccaagacagaccagacctcatactcatcggcaacacaagagacggaaggaaaacaacacaagcaactacaagagtgaacgaacatcgcaaaacagcaccacagcaacaccaagcggcacgaagaacatcaacgaaaccaagccagcaaagaactctacccacacacacac

SEQ ID NO: 514902 - DNA, 168 bp, Homo sapiens
tttttttaaatgagatgaagtgtcattatgttgaccaggctggtctcgaactcctgtcctcaggcaatccttccatcttggcctcccaaaatgctaaaattacaggcgtgacagccacgtccgggcatgatgacagtcttattttaaattattccttttttgtaacaa

SEQ ID NO: 514903 - DNA, 85 bp, Homo sapiens
ctggggaaggggaaagagggaggaaggggaggggcctccatctctaatttcataataaacaaacactttattttgtaaaaaaaaa

SEQ ID NO: 514904 - DNA, 103 bp, Homo sapiens
agtacaaaagcatacgtcttataaggtgaaaaaaaatagaaccatgatatccaactaacagtagcatgtaaatcatgtagagagtgattaaagccaaagtact

SEQ ID NO: 514905 - DNA, 2885 bp, Homo sapiens
ttttcactttaaagagttctgtgagtcagaagtcattttgactgccctcaataaaattagtaatgcaattggtcattttctctttacagattgttcagttcaagggaatgaagaattcagaataattttggtaaatggattccaatatggggaataagaataagctgaacagttgacctgctttgaagaaacatactgtccatttgtctaaaataatctataacaaccaaaccaatcaaaatgaattcaacattattttcccaggttgaaaatcattcagtccactctaatttctcagagaagaatgcccagcttctggcttttgaaaatgatgattgtcatctgcccttggccatgatatttaccttagctcttgcttatggagctgtgatcattcttggtgtctctggaaacctggccttgatcataatcatcttgaaacaaaaggagatgagaaatgttaccaacatcctgattgtgaacctttccttctcagacttgcttgttgccatcatgtgtctcccctttacatttgtctacacattaatggaccactgggtctttggtgaggcgatgtgtaagttgaatccttttgtgcaatgtgtttcaatcactgtgtccattttctctctggttctcattgctgtggaacgacatcagctgataatcaaccctcgagggtggagaccaaataatagacatgcttatgtaggtattgctgtgatttgggtccttgctgtggcttcttctttgcctttcctgatctaccaagtaatgactgatgagccgttccaaaatgtaacacttgatgcgtacaaagacaaatacgtgtgctttgatcaatttccatcggactctcataggttgtcttataccactctcctcttggtgctgcagtattttggtccactttgttttatatttatttgctacttcaaggtaagaaaactttttttctatcatttccatttttaccttctttacacagaattcctcatcaaatgagtgtttctatttaaacttttttcttccatagatatatatacgcctaaaaaggagaaacaacatgatggacaagatgagagacaataagtacaggtccagtgaaaccaaaagaatcaatatcatgctgctctccattgtggtagcatttgcagtctgctggctccctcttaccatctttaacactgtgtttgattggaatcatcagatcattgctacctgcaaccacaatctgttattcctgctctgccacctcacagcaatgatatccacttgtgtcaaccccatattttatgggttcctgaacaaaaacttccagagagacttgcagttcttcttcaacttttgtgatttccggtctcgggatgatgattatgaaacaatagccatgtccacgatgcacacagatgtttccaaaacttctttgaagcaagcaagcccagtcgcatttaaaaaaatcaacaacaatgatgataatgaaaaaatctgaaactacttatagcctatggtcccggatgacatctgtttaaaaacaagcacaacctgcaacatactttgattacctgttctcccaaggaatggggttgaaatcatttgaaaatgactaagattttcttgtcttgctttttactgcttttgttgtagttgtcataattacatttggaacaaaaggtgtgggctttggggtcttctggaaatagttttgaccagacatctttgaagtgctttttgtgaatttatgcatataatataaagacttttatactgtacttattggaatgaaatttctttaaagtattacgattcactgacttcagaagtacctgccatccaatacggtcattagattgggtcatcttgattagattagattagattagattgtcaacagattgggccatccttactttatgataggcatcattttagtgtgttacaatagtaacagtatgcaaaagcagcattcaggagccgaaagatagtcttgaagtcattcagaagtggtttgaggtttctgttttttggtggtttttgtttgttttttttttttttcaccttaagggaggctttcatttcctcccgactgattgtcacttaaatcaaaatttaaaaatgaataaaaagacatacttctcagctgcaaatattatggagaattgggcacccacaggaatgaagagagaaagcagctccccaacttcaaaaccattttggtacctgacaacaagagcattttagagtaattaatttaataaagtaaattagtattgctgcaaatagctaaattatatttatttgaattgatggtcaagagattttccattttttttacagactgttcagtgtttgtcaagctttctggcataaatatgtactcaaaaggcatttccgcttacaatttgtagaaacacaaaatgcgttttccatacagcagtgcctatatagtgactgatttttaactttcaatgtccatctttcaaaggaagtaacaccaaggtacaatgttaaaggaatattcactttacctagcagggaaaaatacacaaaaactgcagatacttcatatagcccattttaacttgtataaactgtgtgacttgtggcgtcttataaataatgcactgtaaagattactgaatagttgtgtcatgttaatgtgcctaatttcatgtatcttgtaatcatgattgagcctcagaatcatttggagaaactatattttaaagaacaagacatacttcaatgtattatacagataaagtattacatgtgtttgattttaaaagggcggacattttattaaaatcaatattgtttttgctttttctgaggagtctctttcagtttcattttttctcatcccatgacttccctccgatggt

SEQ ID NO: 514906 - DNA, 124 bp, Homo sapiens
tgtggagactggggtctcacaccctccagaggactgttgggctgcgagctggggccggacgggcgcctccttcgcgggtataaccagttcgcctacgacggtgcaacggattacactcgccctg

SEQ ID NO: 514907 - DNA, 841 bp, Homo sapiens
aaatattcagctcatggttctccccaaaaaaactaaaaagcagctaagcgctgggaacaaatctgacttattgcattttctcagtgggccaaagaaaggagggccgattgactgctttgactttttaaaggtcttctctttgttcacttataaagtgaggaaaacaaattctcggcactggcgtgagagttgagcgtcacaaaagaaagcaaaagaaaatattagtgccattattgtggcgaatttcatgtttcccagcgagccctttgattcctggtttgggctggcgctcgagctctccagccgggtatgacttcggccacaagatggcactgacctgcaaacaaagaaaagcacagtggcaccgactttttcaagcctcgggaaactgccctgccttccccggagtcgaggactgtggggattagggcttcctttcccctgcgcgggaggtctgtgtcgaataatgtgtggcttctgttggattgcttttctttccaaaattcctaggcaatgcttccccgaggtgtgcacctttgtgaggtgtttgtggggttgggggagcttcaggcgctactcgcgggacgacgtcacgtgatccgggatgaggtggagttcggctttaaggaggcgtctcttcctagcttcatcaaatctttaggatctgagcaggagaaataccagcggatcttccccactctgctcccttccattcccacccttccttctttaataagcaggagcgaaaaagacaaattccaaagagggtaagttgcgagtttatgcctttccagagacttctgcgaaatctctcattgacaaggtgaaggatgagagggga

SEQ ID NO: 514908 - DNA, 3466 bp, Homo sapiens
aaatattcagctcatggttctccccaaaaaaactaaaaagcagctaagcgctgggaacaaatctgacttattgcattttctcagtgggccaaagaaaggagggccgattgactgctttgactttttaaaggtcttctctttgttcacttataaagtgaggaaaacaaattctcggcactggcgtgagagttgagcgtcacaaaagaaagcaaaagaaaatattagtgccattattgtggcgaatttcatgtttcccagcgagccctttgattcctggtttgggctggcgctcgagctctccagccgggtatgacttcggccacaagatggcactgacctgcaaacaaagaaaagcacagtggcaccgactttttcaagcctcgggaaactgccctgccttccccggagtcgaggactgtggggattagggcttcctttcccctgcgcgggaggtctgtgtcgaataatgtgtggcttctgttggattgcttttctttccaaaattcctaggcaatgcttccccgaggtgtgcacctttgtgaggtgtttgtggggttgggggagcttcaggcgctactcgcgggacgacgtcacgtgatccgggatgaggtggagttcggctttaaggaggcgtctcttcctagcttcatcaaatctttaggatctgagcaggagaaataccagcggatcttccccactctgctcccttccattcccacccttccttctttaataagcaggagcgaaaaagacaaattccaaagaggattgttcagttcaagggaatgaagaattcagaataattttggtaaatggattccaatatggggaataagaataagctgaacagttgacctgctttgaagaaacatactgtccatttgtctaaaataatctataacaaccaaaccaatcaaaatgaattcaacattattttcccaggttgaaaatcattcagtccactctaatttctcagagaagaatgcccagcttctggcttttgaaaatgatgattgtcatctgcccttggccatgatatttaccttagctcttgcttatggagctgtgatcattcttggtgtctctggaaacctggccttgatcataatcatcttgaaacaaaaggagatgagaaatgttaccaacatcctgattgtgaacctttccttctcagacttgcttgttgccatcatgtgtctcccctttacatttgtctacacattaatggaccactgggtctttggtgaggcgatgtgtaagttgaatccttttgtgcaatgtgtttcaatcactgtgtccattttctctctggttctcattgctgtggaacgacatcagctgataatcaaccctcgagggtggagaccaaataatagacatgcttatgtaggtattgctgtgatttgggtccttgctgtggcttcttctttgcctttcctgatctaccaagtaatgactgatgagccgttccaaaatgtaacacttgatgcgtacaaagacaaatacgtgtgctttgatcaatttccatcggactctcataggttgtcttataccactctcctcttggtgctgcagtattttggtccactttgttttatatttatttgctacttcaagatatatatacgcctaaaaaggagaaacaacatgatggacaagatgagagacaataagtacaggtccagtgaaaccaaaagaatcaatatcatgctgctctccattgtggtagcatttgcagtctgctggctccctcttaccatctttaacactgtgtttgattggaatcatcagatcattgctacctgcaaccacaatctgttattcctgctctgccacctcacagcaatgatatccacttgtgtcaaccccatattttatgggttcctgaacaaaaacttccagagagacttgcagttcttcttcaacttttgtgatttccggtctcgggatgatgattatgaaacaatagccatgtccacgatgcacacagatgtttccaaaacttctttgaagcaagcaagcccagtcgcatttaaaaaaatcaacaacaatgatgataatgaaaaaatctgaaactacttatagcctatggtcccggatgacatctgtttaaaaacaagcacaacctgcaacatactttgattacctgttctcccaaggaatggggttgaaatcatttgaaaatgactaagattttcttgtcttgctttttactgcttttgttgtagttgtcataattacatttggaacaaaaggtgtgggctttggggtcttctggaaatagttttgaccagacatctttgaagtgctttttgtgaatttatgcatataatataaagacttttatactgtacttattggaatgaaatttctttaaagtattacgattcactgacttcagaagtacctgccatccaatacggtcattagattgggtcatcttgattagattagattagattagattgtcaacagattgggccatccttactttatgataggcatcattttagtgtgttacaatagtaacagtatgcaaaagcagcattcaggagccgaaagatagtcttgaagtcattcagaagtggtttgaggtttctgttttttggtggtttttgtttgttttttttttttttcaccttaagggaggctttcatttcctcccgactgattgtcacttaaatcaaaatttaaaaatgaataaaaagacatacttctcagctgcaaatattatggagaattgggcacccacaggaatgaagagagaaagcagctccccaacttcaaaaccattttggtacctgacaacaagagcattttagagtaattaatttaataaagtaaattagtattgctgcaaatagctaaattatatttatttgaattgatggtcaagagattttccattttttttacagactgttcagtgtttgtcaagctttctggcataaatatgtactcaaaaggcatttccgcttacaatttgtagaaacacaaaatgcgttttccatacagcagtgcctatatagtgactgatttttaactttcaatgtccatctttcaaaggaagtaacaccaaggtacaatgttaaaggaatattcactttacctagcagggaaaaatacacaaaaactgcagatacttcatatagcccattttaacttgtataaactgtgtgacttgtggcgtcttataaataatgcactgtaaagattactgaatagttgtgtcatgttaatgtgcctaatttcatgtatcttgtaatcatgattgagcctcagaatcatttggagaaactatattttaaagaacaagacatacttcaatgtattatacagataaagtattacatgtgtttgattttaaaagggcggacattttattaaaatcaatattgtttttgctttttctgaggagtctctttcagtttcattttttctcatcccatgacttccctccgatggt

SEQ ID NO: 514909 - DNA, 603 bp, Homo sapiens
gggagaattagaagtgaagtgtgggcgatagaagtaattctaatgaccaagcttctttatgtgatagagattttatttttgctgtttgcaaattacatacacacacagtatttaatatttgcaaatatatttagtctatagatcacaaaaatgtaaaaacccatattgcttaaaaggctattactactcagtgatatttgaaatctagtgaaaggcttggcaggtgatttggcttattaagtaacttcagagaaatcctattataacacgggtattaggatatgagattaatacctgattatgggctaaatcatttcatgcccagtttttagcagtttctctgctttgtggtctgtgacttgactagtaatatacccatgttttaattttataggaggactctactgtatttaaagttactactgtacctaacagtggtttatgtacttgtactccggggaaattgcaatgtcttcgacttgcaaaccagtctgtgttggtctggttaacctggaatgaattccttgacctcttcactgagtagtctgatagaccctgctatgttgtagttaatgcttgctcatcgtagctcacattttgaac

SEQ ID NO: 514910 - DNA, 3411 bp, Homo sapiens
aaatattcagctcatggttctccccaaaaaaactaaaaagcagctaagcgctgggaacaaatctgacttattgcattttctcagtgggccaaagaaaggagggccgattgactgctttgactttttaaaggtcttctctttgttcacttataaagtgaggaaaacaaattctcggcactggcgtgagagttgagcgtcacaaaagaaagcaaaagaaaatattagtgccattattgtggcgaatttcatgtttcccagcgagccctttgattcctggtttgggctggcgctcgagctctccagccgggtatgacttcggccacaagatggcactgacctgcaaacaaagaaaagcacagtggcaccgactttttcaagcctcgggaaactgccctgccttccccggagtcgaggactgtggggattagggcttcctttcccctgcgcgggaggtctgtgtcgaataatgtgtggcttctgttggattgcttttctttccaaaattcctaggcaatgcttccccgaggtgtgcacctttgtgaggtgtttgtggggttgggggagcttcaggcgctactcgcgggacgacgtcacgtgatccgggatgaggtggagttcggctttaaggaggcgtctcttcctagcttcatcaaatctttaggatctgagcaggagaaataccagcggatcttccccactctgctcccttccattcccacccttccttctttaataagcaggagcgaaaaagacaaattccaaagaggattgttcagttcaagggaatgaagaattcagaataattttggtaaatggattccaatatggggaataagaataagctgaacagttgacctgctttgaagaaacatactgtccatttgtctaaaataatctataacaaccaaaccaatcaaaatgaattcaacattattttcccaggttgaaaatcattcagtccactctaatttctcagagaagaatgcccagcttctggcttttgaaaatgatgattgtcatctgcccttggccatgatatttaccttagctcttgcttatggagctgtgatcattcttggtgtctctggaaacctggccttgatcataatcatcttgaaacaaaaggagatgagaaatgttaccaacatcctgattgtgaacctttccttctcagacttgcttgttgccatcatgtgtctcccctttacatttgtctacacattaatggaccactgggtctttggtgaggcgatgtgtaagttgaatccttttgtgcaatgtgtttcaatcactgtgtccattttctctctggttctcattgctgtggaacgacatcagctgataatcaaccctcgagggtggagaccaaataatagacatgcttatgtaggtattgctgtgatttgggtccttgctgtggcttcttctttgcctttcctgatctaccaagtaatgactgatgagccgttccaaaatgtaacacttgatgcgtacaaagacaaatacgtgtgctttgatcaatttccatcggactctcataggttgtcttataccactctcctcttggtgctgcagtattttggtccactttgttttatatttatttgctacttcaagatatatatacgcctaaaaaggagaaacaacatgatggacaagatgagagacaataagtacaggtccagtgaaaccaaaagaatcaatatcatgctgctctccattgtggtagcatttgcagtctgctggctccctcttaccatctttaacactgtgtttgattggaatcatcagatcattgctacctgcaaccacaatctgttattcctgctctgccacctcacagcaatgatatccacttgtgtcaaccccatattttatgggttcctgaacaaaaacttccagagagacttgcagttcttcttcaacttttgtgatttccggtctcgggatgatgattatgaaacaatagccatgtccacgatgcacacagatgtttccaaaacttctttgaagcaagcaagcccagtcgcatttaaaaaaatcaacaacaatgatgataatgaaaaaatctgaaactacttatagcctatggtcccggatgacatctgtttaaaaacaagcacaacctgcaacatactttgattacctgttctcccaaggaatggggttgaaatcatttgaaaatgactaagattttcttgtcttgctttttactgcttttgttgtagttgtcataattacatttggaacaaaaggtgtgggctttggggtcttctggaaatagttttgaccagacatctttgaagtgctttttgtgaatttatgcatataatataaagacttttatactgtacttattggaatgaaatttctttaaagtattacgattcactgacttcagaagtacctgccatccaatacggtcattagattgggtcatcttgattagattagattagattagattgtcaacagattgggccatccttactttatgataggcatcattttagtgtgttacaatagtaacagtatgcaaaagcagcattcaggagccgaaagatagtcttgaagtcattcagaagtggtttgaggtttctgttttttggtggtttttgtttgttttttttttttttcaccttaagggaggctttcatttcctcccgactgattgtcacttaaatcaaaatttaaaaatgaataaaaagacatacttctcagctgcaaatattatggagaattgggcacccacaggaatgaagagagaaagcagctccccaacttcaaaaccattttggtacctgacaacaagagcattttagagtaattaatttaataaagtaaattagtattgctgcaaatagctaaattatatttatttgaattgatggtcaagagattttccattttttttacagactgttcagtgtttgtcaagctttctggcataaatatgtactcaaaaggcatttccgcttacaatttgtagaaacacaaaatgcgttttccatacagcagtgcctatatagtgactgatttttaactttcaatgtccatctttcaaaggaagtaacaccaaggtacaatgttaaaggaatattcactttacctagcagggaaaaatacacaaaaactgcagatacttcatatagcccattttaacttgtataaactgtgtgacttgtggcgtcttataaataatgcactgtaaagattactgaatagttgtgtcatgttaatgtgcctaatttcatgtatcttgtaatcatgattgagcctcagaatcatttggagaaactatattttaaagaacaagacatacttcaatgtattatacagataaagtattacatgtgtttgattttaaaagggcggacattttattaaaatcaatattgtttttgctttttc

SEQ ID NO: 514911 - DNA, 3096 bp, Homo sapiens
aaatattcagctcatggttctccccaaaaaaactaaaaagcagctaagcgctgggaacaaatctgacttattgcattttctcagtgggccaaagaaaggagggccgattgactgctttgactttttaaaggtcttctctttgttcacttataaagtgaggaaaacaaattctcggcactggcgtgagagttgagcgtcacaaaagaaagcaaaagaaaatattagtgccattattgtggcgaatttcatgtttcccagcgagccctttgattcctggtttgggctggcgctcgagctctccagccgggtatgacttcggccacaagatggcactgacctgcaaacaaagaaaagcacagtggcaccgactttttcaagcctcgggaaactgccctgccttccccggagtcgaggactgtggggattagggcttcctttcccctgcgcgggagattgttcagttcaagggaatgaagaattcagaataattttggtaaatggattccaatatggggaataagaataagctgaacagttgacctgctttgaagaaacatactgtccatttgtctaaaataatctataacaaccaaaccaatcaaaatgaattcaacattattttcccaggttgaaaatcattcagtccactctaatttctcagagaagaatgcccagcttctggcttttgaaaatgatgattgtcatctgcccttggccatgatatttaccttagctcttgcttatggagctgtgatcattcttggtgtctctggaaacctggccttgatcataatcatcttgaaacaaaaggagatgagaaatgttaccaacatcctgattgtgaacctttccttctcagacttgcttgttgccatcatgtgtctcccctttacatttgtctacacattaatggaccactgggtctttggtgaggcgatgtgtaagttgaatccttttgtgcaatgtgtttcaatcactgtgtccattttctctctggttctcattgctgtggaacgacatcagctgataatcaaccctcgagggtggagaccaaataatagacatgcttatgtaggtattgctgtgatttgggtccttgctgtggcttcttctttgcctttcctgatctaccaagtaatgactgatgagccgttccaaaatgtaacacttgatgcgtacaaagacaaatacgtgtgctttgatcaatttccatcggactctcataggttgtcttataccactctcctcttggtgctgcagtattttggtccactttgttttatatttatttgctacttcaagatatatatacgcctaaaaaggagaaacaacatgatggacaagatgagagacaataagtacaggtccagtgaaaccaaaagaatcaatatcatgctgctctccattgtggtagcatttgcagtctgctggctccctcttaccatctttaacactgtgtttgattggaatcatcagatcattgctacctgcaaccacaatctgttattcctgctctgccacctcacagcaatgatatccacttgtgtcaaccccatattttatgggttcctgaacaaaaacttccagagagacttgcagttcttcttcaacttttgtgatttccggtctcgggatgatgattatgaaacaatagccatgtccacgatgcacacagatgtttccaaaacttctttgaagcaagcaagcccagtcgcatttaaaaaaatcaacaacaatgatgataatgaaaaaatctgaaactacttatagcctatggtcccggatgacatctgtttaaaaacaagcacaacctgcaacatactttgattacctgttctcccaaggaatggggttgaaatcatttgaaaatgactaagattttcttgtcttgctttttactgcttttgttgtagttgtcataattacatttggaacaaaaggtgtgggctttggggtcttctggaaatagttttgaccagacatctttgaagtgctttttgtgaatttatgcatataatataaagacttttatactgtacttattggaatgaaatttctttaaagtattacgattcactgacttcagaagtacctgccatccaatacggtcattagattgggtcatcttgattagattagattagattagattgtcaacagattgggccatccttactttatgataggcatcattttagtgtgttacaatagtaacagtatgcaaaagcagcattcaggagccgaaagatagtcttgaagtcattcagaagtggtttgaggtttctgttttttggtggtttttgtttgttttttttttttttcaccttaagggaggctttcatttcctcccgactgattgtcacttaaatcaaaatttaaaaatgaataaaaagacatacttctcagctgcaaatattatggagaattgggcacccacaggaatgaagagagaaagcagctccccaacttcaaaaccattttggtacctgacaacaagagcattttagagtaattaatttaataaagtaaattagtattgctgcaaatagctaaattatatttatttgaattgatggtcaagagattttccattttttttacagactgttcagtgtttgtcaagctttctggcataaatatgtactcaaaaggcatttccgcttacaatttgtagaaacacaaaatgcgttttccatacagcagtgcctatatagtgactgatttttaactttcaatgtccatctttcaaaggaagtaacaccaaggtacaatgttaaaggaatattcactttacctagcagggaaaaatacacaaaaactgcagatacttcatatagcccattttaacttgtataaactgtgtgacttgtggcgtcttataaataatgcactgtaaagattactgaatagttgtgtcatgttaatgtgcctaatttcatgtatcttgtaatcatgattgagcctcagaatcatttggagaaactatattttaaagaacaagacatacttcaatgtattatacagataaagtattacatgtgtttgattttaaaagggcggacattttattaaaatcaatattgtttttgctttttc

SEQ ID NO: 514912 - DNA, 1249 bp, Homo sapiens
cgacgctgctgtgtgtggtctcagaggctctgcttccttaggttacaaaacaaaacagggcagaggaaaaagcaaaaaaaaaaaaaaaaaaaaaaaaaaaacaccttggctgggcgcgcgcgccccggcgcctataagaatatccgggaaagcgcttctttaagacaccattccggtgtgggcgcgcgcgcggggccccaggtggtgtaggtggcaccggtgggccataaaggcgtggttccccaaaggagagaacccgggcgccatgagagctaaggtgcgcttgggggtttcctcaccaaattaaaaaaagccgccgggggggacacccacggagctctgttctgagaacaaatctcccagagtggggatgtcccggggaggggccataacaccggggtctcctcatcacacccgggggagcgctgcaacagcgggaaaagcgcctcgagaattatttagataatatttacccccccccccgtcccggtggagagtgccactcagccagacctgactaagacatgacaacctcacgacaaacatcgactaaccatacaacagtacaaacatcagtacaagacacaatcagcaagcaacgatacacacgagtagaagaaacactgatgaaatcagaaccacgactacgaacaatcgatcgacggcaagactaactcaaacgcaatcgcactcacgacacaacgaggagcaggagagcacaagcgagaagaaccagcgaagcgaaagaagaatagaccccggaacaagccaaagagacaggaagagaagacacagaaggaaaagaggcagacagaacgagacaccagaaaagagacgacagaggaaaaggacacacaaaagacagaaagacgaaacagcgaacgaagcggagacaaagaaggagacgagagaaaaaaacaggaaagacgagcaacgagagaacagaacaaaggcaggcaggaggagggacaggagccgaagaacaagacgagcagcaacacagcgcgaccagacagacacagcaaacgcaagaaagcaacgagacgaggaacacggggcgaggagcaacagaccacagagctagacacagggcgaaggcgaccgcagccaagaggcaaggcgccaacgtgccagaccaagacacagacgaagcagcgcggggcgagcccgagcacgagacgacagagagcaacaagacgacggaagcacacgaagcgcgcaggggagcgacagcgcagagacacgacag

SEQ ID NO: 514913 - DNA, 1770 bp, Homo sapiens
aaatattcagctcatggttctccccaaaaaaactaaaaagcagctaagcgctgggaacaaatctgacttattgcattttctcagtgggccaaagaaaggagggccgattgactgctttgactttttaaaggtcttctctttgttcacttataaagtgaggaaaacaaattctcggcactggcgtgagagttgagcgtcacaaaagaaagcaaaagaaaatattagtgccattattgtggcgaatttcatgtttcccagcgagccctttgattcctggtttgggctggcgctcgagctctccagccgggtatgacttcggccacaagatggcactgacctgcaaacaaagaaaagcacagtggcaccgactttttcaagcctcgggaaactgccctgccttccccggagtcgaggactgtggggattagggcttcctttcccctgcgcgggaggtctgtgtcgaataatgtgtggcttctgttggattgcttttctttccaaaattcctaggcaatgcttccccgaggtgtgcacctttgtgaggtgtttgtggggttgggggagcttcaggcgctactcgcgggacgacgtcacgtgatccgggatgaggtggagttcggctttaaggaggcgtctcttcctagcttcatcaaatctttaggatctgagcaggagaaataccagcggatcttccccactctgctcccttccattcccacccttccttctttaataagcaggagcgaaaaagacaaattccaaagaggattgttcagttcaagggaatgaagaattcagaataattttggtaaatggattccaatatggggaataagaataagctgaacagttgacctgctttgaagaaacatactgtccatttgtctaaaataatctataacaaccaaaccaatcaaaatgaattcaacattattttcccaggttgaaaatcattcagtccactctaatttctcagagaagaatgcccagcttctggcttttgaaaatgatgattgtcatctgcccttggccatgatatttaccttagctcttgcttatggagctgtgatcattcttggtgtctctggaaacctggccttgatcataatcatcttgaaacaaaaggagatgagaaatgttaccaacatcctgattgtgaacctttccttctcagacttgcttgttgccatcatgtgtctcccctttacatttgtctacacattaatggaccactgggtctttggtgaggcgatgtgtaagttgaatccttttgtgcaatgtgtttcaatcactgtgtccattttctctctggttctcattgctgtggaacgacatcagctgataatcaaccctcgagggtggagaccaaataatagacatgcttatgtaggtattgctgtgatttgggtccttgctgtggcttcttctttgcctttcctgatctaccaagtaatgactgatgagccgttccaaaatgtaacacttgatgcgtacaaagacaaatacgtgtgctttgatcaatttccatcggactctcataggttgtcttataccactctcctcttggtgctgcagtattttggtccactttgttttatatttatttgctacttcaaggtaagaaaactttttttctatcatttccatttttaccttctttacacagaattcctcatcaaatgagtgtttctatttaaacttttttcttccatagaataatacgctcgattatatggtacacactgtcagcccgcggtttcgcctggctat

SEQ ID NO: 514914 - DNA, 212 bp, Homo sapiens
  misc_feature (14)..(14): n is a, c, g, or t
  misc_feature (178)..(178): n is a, c, g, or t
gttaattttttccncagaatttatggactgaatctaatgcttccaaaaaatgttgtttgtttgcaaatatcaaacattgttatgcaagaaattattaattaccccccccccccataataacattgtggtttaagctgtactgaactaaatctgtggaatgcattgtgaactgtaaaancaaagtatcaataaagcttatagacttaaaaaaa

SEQ ID NO: 514915 - DNA, 788 bp, Homo sapiens
gacttccgcttccgatggtgaggtcctccatgcgctattcatgagtcgcctgcaagtttatcgatattggtatcaagttgattgagccgtatgttcagaggaagtttatatggggtggttcagaaggcatcaagatgacttacaggatgtaactacgggatgagcctgtcagagattggtgttaaaaagtttaggatgtacaggtggaaaatcgtacaatgatcagtaacaagatgcacgtgcaatgtggggtccacgaacagcagaagtaggtattgcgtcatatttctttttacccgaaaaagacaccacacagtgatcttaaggtaaatttcggaaggaagcttctttcgtggaacaacctggcttgtcaggatcatgctgttccaggctacccagatagggcgactggtcagtcctaacaaaggactgttgggtcgacacttctgacagcctgatataaacccttgaatatcttgcgactttcgacagccgagtttggctcaaatcgctggggctcgaaagagcacattagcacgggcacaacgtttggtgcgcacattcacggaagaaattcggctgagtccctttgacatttgtgcaccccggaaggtggccaggtctatcgggctccccccacagtagaattacctccaaagttccaacatactgttcggacaaacacccagattggacaccgggattccggaaactaaatcaaagatgtgtacccaaatgtgttcccatcccactgggtgcgagaaccttcaagcagtgcgtgaaagtac

SEQ ID NO: 514916 - DNA, 2250 bp, Homo sapiens
ctctgattttaatcagttctgcgtttgaaaggaaacccggtgatatccgacatccaaagcacgtccaacagacggatgtggctgcgacactggcgatagcacttggcttaccgattccaaaagacagtgtagggagcctcctattcccagttgtggaaggaagaccaatgagagagcagttgagatttttacatttgaatacagtgcagcttagtaaactgttgcaagagaatgtgccgtcatatgaaaaagatcctgggtttgagcagtttaaaatgtcagaaagattgcatgggaactggatcagactgtacttggaggaaaagcattcagaagtcctattcaacctgggctccaaggttctcaggcagtacctggatgctctgaagacgctgagcttgtccctgagtgcacaagtggcccagtacgacatctattcgatgatggtggggactgtcgtggttttggaggttctcaccctgctcctgctcagcgtcccacaggcactgcgcagaaaggctgagctggaagtcccactgtcatctcctgggttttctctgctcttttatttggtgatcctggttctttcggccgttcacgtcattgtgtgcacctcagctgaaagttcgtgctacttctgtggcctctcgtggctggcggcaggtggggtgatggtgctggcctcggcgctgctgtgtgtgattgtgtctgttctgaccaacgtgctcgtgggtggaaacaccccaaggaagaaccccatgcatcccagctcaaggtggtcagagctagaccttcttattctgttggggacggcgggccacgtcttgagcctgggcgccagcagcttcgtggaggaggagcaccagacctggtacttccttgtgaacaccctgtgtctagctctgagccaagaaacctacagaaactactttctgggagatgacggtgagcctccgtgtggcctctgtgtggaacaagggcatgacggggccacagcagcgtggcaggacgggcctggctgtgatgtcctggagcgagacaaaggccacggaagcccctctacctccgaagtgctcagaggccgcgagaagtggatggtgctggccagtccgtggctaatactggcctgctgccggctgctgcgctccctaaaccagacaggtgtgcagtgggctcaccggcctgacctcggccactggctcaccagctctgaccacaaagccgagctctctgtcctggctgccctctccctcctcgtagtttttgtgctggtgcagagggggtgctcccctgtgtccaaggctgccctggcgctggggctgctgggcgtctactgctaccgggcggccatcgggagtgtccggttcccgtggcggccggacagcaaggacatttccaagggtattattgaagctcgttttgtttatgtctttgtccttggcattctgttcacgggcaccaaagacttacttaaatctcaagtcattgctgcagacttcaaactcaagactgtaggtttatgggagatatatagtggattagttcttctggcagccttgctctttagaccacataatcttccggtcttagcatttagcctcttgattcagactctaatgactaaattcatctggaagcccctgagacacgatgcagctgagattactgtgatgcattattggtttggtcaagcattcttctattttcagggcaactccaacaacattgccaccgtggacatctccgcaggcttcgtgggcttagacacctacgtggaaatcccagccgtgctcctgacagcgtttgggacgtacgcagggcctgtgctgtgggccagccacttagtgcacttcctgagctcagaaacacgcagtggttcagcactgagtcatgcttgcttctgctacgcactgatttgttctattccagttttcacgtacatcgttttggtgacatctctgcgttatcatttatttatatggagtgtattttctccaaaacttctctacgagggaatgcacctgctcattacagctgctgtctgtgtattcttcacggcaatggatcaaaccagactcacacagtcttagactaagctgaacactggaaaaataatacatgcttaaagtctgctgttattctaaaatgaaagatatgaattcaacaaagttgatggataactttctttgactgctctacctgaatttagactaagcagtaaatagtttaataaaagatcactttaatata

SEQ ID NO: 514917 - DNA, 110 bp, Homo sapiens
ggccccctgattttaaatttttcattcttccctcgggccgaattcccacgggaaacagcagtgattaacctttagcaataaacgaaagtttaactaagctatactaacca

SEQ ID NO: 514918 - DNA, 495 bp, Homo sapiens
tgccctctactccaagggcaagagctactggagtctttttgaaaataaaagtgttgttacatgtgtgatatgtaagtggcatgtgctaatacacattttctttcttattaacacgcagtggttcagcactgagtcatgcttgcttctgctacgcactgatttgttctattccagttttcacgtacatcgttttggtgacatctctgcgttatcatttatttatatggagtgtattttctccaaaacttctctacgagggaatgcacctgctcattacagctgctgtctgtgtattcttcacggcaatggatcaaaccagactcacacagtcttagactaagctgaacactggaaaaataatacatgcttaaagtctgctgttattctaaaatgaaagatatgaattcaacaaagttgatggataactttctttgactgctctacctgaatttagactaagcagtaaatagtttaataaaagatcactttaatata

SEQ ID NO: 514919 - DNA, 4341 bp, Homo sapiens
ctgctgccccgggctccggaggccagcttcacagagttccagagggctgcagaataatgaacagagggggggccaatgggaaagggaggcggggcagcctcaatgccagcggacgaaggacacccccaaattgtgctgctgaggatatcaaagccagcccttcctccaccaacaaaaggaaaaacaagcctccaatggagctggacctgaactccagctctgaggacaataagcctggaaagcgtgtccgcacaaattccagaagcactcccactacccctcaagggaaaccagagactacttttttggaccaaggctgctcttctccagtgttaatcgactgtccccacccaaactgcaacaaaaagtacaagcacattaacggcctgaggtaccaccaggctcatgcacacttagacccagaaaacaagctggagttcgagcctgacagtgaggacaagatctcggactgtgaggaaggattgagtaatgtggcacttgaatgcagtgagccaagcacaagtgtatctgcttatgaccagttgaaggcaccggcatcccctggtgctggaaacccacctgggaccccaaagggaaagagagagctgatgagcaatggcccaggttccattattggtgctaaagctgggaagaattctggcaaaaagaagggccttaacaatgaactgaacaaccttccagtaatctccaacatgacggctgcgttagacagttgctcggcagcagacggcagtttggctgctgagatgcctaaactggaagcagaaggattaattgacaagaaaaatttaggagataaagaaaagggcaaaaaagctaacaactgcaaaacggacaaaaacctctctaaactgaaaagtgcccggcccattgcccctgccccagcccccactcccccgcagctaatcgctatacccactgcaacctttacaacgaccaccactgggacaatacccggactgccctccctcacaacaactgttgttcaggctacaccaaagagtcctccgttaaaacccattcaaccaaagcccacaattatgggagagcccatcaccgtgaacccagctctggtgtcactcaaagacaaaaagaaaaaggagaagcgaaagctaaaggacaaagaagggaaagagacgggaagcccaaaaatggatgccaagctggggaaactagaggactccaagggggccagcaaagatttacctgggcattttttaaaggatcatctcaacaagaatgaagggctggcaaatggactgtcggagtctcaggagagccgcatggccagtatcaaagctgaggccgataaggtttacactttcacagacaacgctcccagcccttccatagggagcgcctcgaggctggaatgcagcactttggtgaacgggcaggcaccaatggcacctctgcatgtgttgacccagaatggggcagagagttcagctgcaaagacaagcagcccggcctattcagacatatctgatgctgctgacgatggtggttctgacagcaggtcggagggtatgagatcaaaggccagttccccatcagatattatttctagtaaggacagtgttgtaaaagggcattcttcaactacagcacaatcatctcaactgaaagagtcccattctccctattaccacagctatgatccttattattctccaagttacatgcaccctgggcaggtcggtgcccctgcagctggaaatagtgggagcacgcagggaatgaagatcaagaaggagtctgaggaagatgctgaaaagaaagacaaggcagagcagttagattctaagaaagtggaccacaattctgcatccttacagcctcagcaccagtcggtgatcacacaaagacatcctgccctggctcagtcactttattatggccagtatgcatatgggctctatatggaccagaagtctctgatggccaccagccctgcctatagacagcagtatgagaagtactatgaggaccagaggactggcagagcagaaaatggcccagactgggagaggagactgtgaaaggaaaagtgagctccccttgaaagagctgggcaaggaggaaactaaacagaaaaatatgccatcggccacaatctcaaaagctccctctactccggagcctaacaaaaaccattctaaactagggccatcagtgcctaataaaactgaggagacaggtaaatcgcagcttctctccaatcaccagcagcagcttcaggccgacagcttcaaagctaagcagatggaaaaccaccagcttattaaggaggctgtagaaatgaagtctgtcatggactctatgaagcagacaggtgtagacccaacctcgagatttaaacaagacccagattcaagaacatggcatcattatgtataccagcccaaatatctggatcagcaaaagtcagaagaacttgatagagagaagaaattaaaagaggatagtccgaggaaaactcctaataaagagagtggtgtgcccagccttcctgtatcgttaacaagcattaaagaggagcccaaagaggccaagcatcctgattctcaatcaatggaggagagcaagctgaaaaatgatgatcgaaagactcctgtgaactggaaggactctcggggaacaagagtggctgtctcctcacccatgagtcagcatcagtcatacatacagtacttgcatgcttatccttacccacagatgtacgaccccagccatcctgcataccgggctgtttctcccgtcctaatgcacagttatcctggtacgtgttgtcggttctgactatattggaggaaagaggcgatgttcaaatattagctgttaaaaactcaagataaattagaagcttcaagagtgacatttgttttccttgtttttatgctgtttaaagtcccaaagataaaactgatttaatataagtttttttaatgaaatgtcaagaatcctcagccatagtttccatagtctctgatggtctgctatagctgttaggctgacagatactttattgcctataaaaatattctaagcacttactgtcataatcattatagttactattcctttcacttaagcggacacgtaaatgtatgaaatggctataagctcaattctgtttataacctcccttcatcaggatgaattaactgggagaagaaaattggagaagctagacacagtttaatgatgatgtagcccattcttaatgtaaccccctattttaagatctctttgactcttatcccaaattcatgtaacccaaatgattttttttaaagatatagcctgtaacttgatgtggcatttgttgtttatctgcaggggcatatctctctccaggatttcattatcctgtttatgggaagatgtcagggagagaagagacagagaaagtcaataccagccctagcgtcaacacgaaaacaaccactgaatctaaagcactggatttgctccagcagcatgctaaccaataccgcagcaagtctcctgctgtaagcctccttttgttgttatttaaaagtactgtgatttggggagaaaggggaacaagctagagaacagtcttgaaatataaatggtttcggaacccagctgtgatttcaggatgctgttttatcctaatacgtaaagaatggagcgttcaaaagtaagacgctttcacacatgagagaaaattgttaaagcacgtatggcagtagcaagcttttctgttgcaaaatctagtataccttgcttacccaggaggatggttgttaggtggaaatttaaattcataggaaccaacttttggtgcaaaatatgtttgataagacattgaggaattaggtaacagaggagtatattttatataattttggtaagtaagtagttcagaggctacaaactgttgactttttgggcaaatcaagcttttcaaaaaatgttttcttgcaggataccttttaaaaatcagacattttacatgcaagttcagatcacctctttctcttaagacaatagaaaatctgggccgggagtgagccactgcctgtaatcccagcactttgggaggccgaggcgggcagatcacctgaggtcaggaattcgagaccagcctggccaatatggtgaaactccgtctctactaaaaatacaaaaagtagcctagtggtagtgggcacctgtaatccaagttactcagaaggctgaggcaggagatttgcttgagcccgagaggcagaggttgcagtgagcagagattgtgccactgcactctagcgtgggcgacagagcaaggctctgtctcaaaaaaaaaaa

SEQ ID NO: 514920 - DNA, 450 bp, Homo sapiens
gggctgcctgctcccctgcagcgcaaatggctctttgctaaagtggtgggaacagcaagccgccaacacgcagtggttcagcactgagtcatgcttgcttctgctacgcactgatttgttctattccagttttcacgtacatcgttttggtgacatctctgcgttatcatttatttatatggagtgtattttctccaaaacttctctacgagggaatgcacctgctcattacagctgctgtctgtgtattcttcacggcaatggatcaaaccagactcacacagtcttagactaagctgaacactggaaaaataatacatgcttaaagtctgctgttattctaaaatgaaagatatgaattcaacaaagttgatggataactttctttgactgctctacctgaatttagactaagcagtaaatagtttaataaaagatcactttaatata

SEQ ID NO: 514921 - DNA, 941 bp, Homo sapiens
agcggggctctctgagcagcaccatggcggttggcaggaactagcgccttacgaaggggcggcagaacagggatgcctaacgaagataagtggtcgatccattttctaagaaacatggtgtatgtatgtgacataggcacgcgtgccttatggttctacactagtaaagaaagattatagggatataggacgtccgtcggtcgaccaggtagcccgaaggaagccatgaagtgtgcatctggagtggtctgcatgggtcgtgtgttgtgacagtgaggtcattggcgtgcattgtgcgagagatgtatgaagcttgcactattaggaaacatgtctgagctggatgtacgtgaaggatggttcagggttgagaaagaatgcctgcactaacctttccatggccgtatgggagtcctctagcgccagtgacgatggacagtgtgcttccattgggtcaactgagaattgcgcaagagcgaaatgcacttatgatagactcccatcggtgtgacttggtccaagcaaccttagcccggaggtggtggacgttggccgtatcggatcgtgggtgaccttgtgggtgccgggtctgtttgaactcagaaatagagaccgtcgaaactaatttcgaggagtaagcgcgcaagtacacgtcctttatggcgtgctaggcaagcgcaaatcgggcgtcgcagcccagagaatcgccgggggcaatggcaaacggaattgcagtcggggaaacatttgccagttggaaccccccgtacggaggagttggcgaatgttcggaacagtggaccgttggacaaactgcaaaggctggcgctccaagtgaaatctatgattttcgccctgatcaggcacttaggaaaaaacgaaccattaagtcacaacgggcctttggccggaaattcctaattttattcccttcgttccta

SEQ ID NO: 514922 - DNA, 217 bp, Homo sapiens
aaacagcacacttctaaataactctgggtcaaagaagaaatctcaagataaattttttaatattttgaactaaataaaagtgcaaacccaacttatcagaatttgtgggatacagttaaagcagtgattagagagaatttttatagcattggatgcatgtattagaaaacgagaaggttttaaaatcaatcatttaagcctcccccttacaaaacta

SEQ ID NO: 514923 - DNA, 4257 bp, Homo sapiens
ctgctgccccgggctccggaggccagcttcacagagttccagagggctgcagaataatgaacagagggggggccaatgggaaagggaggcggggcagcctcaatgccagcggacgaaggacacccccaaattgtgctgctgaggatatcaaagccagcccttcctccaccaacaaaaggaaaaacaagcctccaatggagctggacctgaactccagctctgaggacaataagcctggaaagcgtgtccgcacaaattccagaagcactcccactacccctcaagggaaaccagagactacttttttggaccaaggctgctcttctccagtgttaatcgactgtccccacccaaactgcaacaaaaagtacaagcacattaacggcctgaggtaccaccaggctcatgcacacttagacccagaaaacaagctggagttcgagcctgacagtgaggacaagatctcggactgtgaggaaggattgagtaatgtggcacttgaatgcagtgagccaagcacaagtgtatctgcttatgaccagttgaaggcaccggcatcccctggtgctggaaacccacctgggaccccaaagggaaagagagagctgatgagcaatggcccaggttccattattggtgctaaagctgggaagaattctggcaaaaagaagggccttaacaatgaactgaacaaccttccagtaatctccaacatgacggctgcgttagacagttgctcggcagcagacggcagtttggctgctgagatgcctaaactggaagcagaaggattaattgacaagaaaaatttaggagataaagaaaagggcaaaaaagctaacaactgcaaaacggacaaaaacctctctaaactgaaaagtgcccggcccattgcccctgccccagcccccactcccccgcagctaatcgctatacccactgcaacctttacaacgaccaccactgggacaatacccggactgccctccctcacaacaactgttgttcaggctacaccaaagagtcctccgttaaaacccattcaaccaaagcccacaattatgggagagcccatcaccgtgaacccagctctggtgtcactcaaagacaaaaagaaaaaggagaagcgaaagctaaaggacaaagaagggaaagagacgggaagcccaaaaatggatgccaagctggggaaactagaggactccaagggggccagcaaagatttacctgggcattttttaaaggatcatctcaacaagaatgaagggctggcaaatggactgtcggagtctcaggagagccgcatggccagtatcaaagctgaggccgataaggtttacactttcacagacaacgctcccagcccttccatagggagcgcctcgaggctggaatgcagcactttggtgaacgggcaggcaccaatggcacctctgcatgtgttgacccagaatggggcagagagttcagctgcaaagacaagcagcccggcctattcagacatatctgatgctgctgacgatggtggttctgacagcaggtcggagggtatgagatcaaaggccagttccccatcagatattatttctagtaaggacagtgttgtaaaagggcattcttcaactacagcacaatcatctcaactgaaagagtcccattctccctattaccacagctatgatccttattattctccaagttacatgcaccctgggcaggtcggtgcccctgcagctggaaatagtgggagcacgcagggaatgaagatcaagaaggagtctgaggaagatgctgaaaagaaagacaaggcagagcagttagattctaagaaagtggaccacaattctgcatccttacagcctcagcaccagtcggtgatcacacaaagacatcctgccctggctcagtcactttattatggccagtatgcatatgggctctatatggaccagaagtctctgatggccaccagccctgcctatagacagcagtatgagaagtactatgaggaccagaggactggcagagcagaaaatggcccagactgggagaggagactgtgaaaggaaaagtgagctccccttgaaagagctgggcaaggaggaaactaaacagaaaaatatgccatcggccacaatctcaaaagctccctctactccggagcctaacaaaaaccattctaaactagggccatcagtgcctaataaaactgaggagacaggtaaatcgcagcttctctccaatcaccagcagcagcttcaggccgacagcttcaaagctaagcagatggaaaaccaccagcttattaaggaggctgtagaaatgaagtctgtcatggactctatgaagcagacaggtgtagacccaacctcgagatttaaacaagacccagattcaagaacatggcatcattatgtataccagcccaaatatctggatcagcaaaagtcagaagaacttgatagagagaagaaattaaaagaggatagtccgaggaaaactcctaataaagagagtggtgtgcccagccttcctgtatcgttaacaagcattaaagaggagcccaaagaggccaagcatcctgattctcaatcaatggaggagagcaagctgaaaaatgatgatcgaaagactcctgtgaactggaaggactctcggggaacaagagtggctgtctcctcacccatgagtcagcatcagtcatacatacagtacttgcatgcttatccttacccacagatgtacgaccccagccatcctgcataccgggctgtttctcccgtcctaatgcacagttatcctggggcatatctctctccaggatttcattatcctgtttatgggaagatgtcagggagagaagagacagagaaagtcaataccagccctagcgtcaacacgaaaacaaccactgaatctaaagcactggatttgctccagcagcatgctaaccaataccgcagcaagtctcctgctcctgtggaaaaggctacagctgagcgggaacgggaggcagaaagggaaagggatcgccactcccccttcggccagcggcacctgcacacgcaccaccacacccacgttggcatgggttacccgctaatcccgggtcaatatgacccttttcaaggcttgacctctgctgcccttgttgcctctcagcaggtggctgcccaggcatctgcatctggaatgtttcctggacaaagaagataaagtcgcaaatggagacatttattttcataatgctaaagagaataacaagattggacatgtacattgtcatgtgactggatcacatggggaagcgctttatacagacatcagttccatggtgttaatttgaaatgccttaatggcaggcaaaaaccagtcatttcatttttgtaaattacagattttatcacagagtaacaaatgttgctgtaattaaacttctgttttatatatatatacgtatacatatctgtatatatacatatatatatatataaatataaatatattctttactttttgtatcagtaaccaggctcgcacacacagggtctgctgccacgtcgcaaaccactcagtaaaggaaattaaaaatgtatttgtcatgttaaaaagtgttagccacaaaaggctacttactttcttttccttttcctttaaaattataaataaataatgttatgtatcagtgtgcctgaaccttgcatatccttcacatatttcccataagcccctcagaaaggctaactgtgatgatgacactttggtacaatttagatgtctatttggtggctcctgttaaagacgcaccagtgtaaaatgttcctgtagtcactgtttgtacttgtgtattgtggaaaaagtacttttggaaggcatggggttgccagtaccacaaaaactgtgttgtatataatgtaaagattaaaatggggaaataatgagcatctgtgaataatgaggtgtcattttttgataatcttgaatggcaaataacccaatagcctgcgtaccagagacatctgtgattgttctattacttgaatagttctacagtcttttttttttttttaatgtttacaattatccagttttagaagagagagactttaacgccattgcctggttacttgttttatgctgtaatctagtttattttatgtaaaatgtatattgaatgctttccttttttatacctgccttaaataatttggcaatcagaattaaaaagtttttttttttttaaataaaaaaaaaaaa

SEQ ID NO: 514924 - DNA, 736 bp, Homo sapiens
ggaacaatggtgttgtccaggcattctctgctgtgagcaaggacttgacatgcagcaagatgtgtgtcgttatcagaccgtctcttacaaagtgcactttccttttcacagaaccccatgcatcccagctcaaggtggtcagagctagaccttcttattctgttggggacggcgggccacgtcttgagcctgggcgccagcagcttcgtggaggaggagcaccagacctggtacttccttgtgaacaccctgtgtctagctctgagccaagaaacctacagaaactactttctgggagatgacggtgagcctccgtgtggcctctgtgtggaacaagggcatgacggggccacagcagcgtggcaggacgggcctggctgtgatgtcctggagcgagacaaaggccacggaagcccctctacctccgaagtgctcagaggccgcgagaagtggatggtgctggccagtccgtggctaatactggcctgctgccggctgctgcgctccctaaaccagacaggtgtgcagtgggctcaccggcctgacctcggccactggctcaccaggtgagagcgtaggcccgtggccacaggccagactttctacggccgattggtcacctgccaagctcttctttttctaaattgagaccatttttcatattaagaatgggatagtatttgagatctgaagaattgggaaaatacactaaaaccagtgttttactggatactag

SEQ ID NO: 514925 - DNA, 108 bp, Homo sapiens
aatgcagcggactcggcacaattttctatatccgtttctcagattatcaggaacatcatccaagctttacattgcgagtaccatatatgaccctcagaacacaagttc

SEQ ID NO: 514926 - DNA, 4093 bp, Homo sapiens
ctgctgccccgggctccggaggccagcttcacagagttccagagggctgcagaataatgaacagagggggggccaatgggaaagggaggcggggcagcctcaatgccagcggacgaaggacacccccaaattgtgctgctgaggatatcaaagccagcccttcctccaccaacaaaaggaaaaacaagcctccaatggagctggacctgaactccagctctgaggacaataagcctggaaagcgtgtccgcacaaattccagaagcactcccactacccctcaagggaaaccagagactacttttttggaccaaggctgctcttctccagtgttaatcgactgtccccacccaaactgcaacaaaaagtacaagcacattaacggcctgaggtaccaccaggctcatgcacacttagacccagaaaacaagctggagttcgagcctgacagtgaggacaagatctcggactgtgaggaaggattgagtaatgtggcacttgaatgcagtgagccaagcacaagtgtatctgcttatgaccagttgaaggcaccggcatcccctggtgctggaaacccacctgggaccccaaagggaaagagagagctgatgagcaatggcccaggttccattattggtgctaaagctgggaagaattctggcaaaaagaagggccttaacaatgaactgaacaaccttccagtaatctccaacatgacggctgcgttagacagttgctcggcagcagacggcagtttggctgctgagatgcctaaactggaagcagaaggattaattgacaagaaaaatttaggagataaagaaaagggcaaaaaagctaacaactgcaaaacggacaaaaacctctctaaactgaaaagtgcccggcccattgcccctgccccagcccccactcccccgcagctaatcgctatacccactgcaacctttacaacgaccaccactgggacaatacccggactgccctccctcacaacaactgttgttcaggctacaccaaagagtcctccgttaaaacccattcaaccaaagcccacaattatgggagagcccatcaccgtgaacccagctctggtgtcactcaaagacaaaaagaaaaaggagaagcgaaagctaaaggacaaagaagggaaagagacgggaagcccaaaaatggatgccaagctggggaaactagaggactccaagggggccagcaaagatttacctgggcattttttaaaggatcatctcaacaagaatgaagggctggcaaatggactgtcggagtctcaggagagccgcatggccagtatcaaagctgaggccgataaggtttacactttcacagacaacgctcccagcccttccatagggagcgcctcgaggctggaatgcagcactttggtgaacgggcaggcaccaatggcacctctgcatgtgttgacccagaatggggcagagagttcagctgcaaagacaagcagcccggcctattcagacatatctgatgctgctgacgatggtggttctgacagcaggtcggagggtatgagatcaaaggccagttccccatcagatattatttctagtaaggacagtgttgtaaaagggcattcttcaactacagcacaatcatctcaactgaaagagtcccattctccctattaccacagctatgatccttattattctccaagttacatgcaccctgggcaggtcggtgcccctgcagctggaaatagtgggagcacgcagggaatgaagatcaagaaggagtctgaggaagatgctgaaaagaaagacaaggcagagcagttagattctaagaaagtggaccacaattctgcatccttacagcctcagcaccagtcggtgatcacacaaagacatcctgccctggctcagtcactttattatggccagtatgcatatgggctctatatggaccagaagtctctgatggccaccagccctgcctatagacagcagtatgagaagtactatgaggaccagaggactggcagagcagaaaatggcccagactgggagaggagactgtgaaaggaaaagtgagctccccttgaaagagctgggcaaggaggaaactaaacagaaaaatatgccatcggccacaatctcaaaagctccctctactccggagcctaacaaaaaccattctaaactagggccatcagtgcctaataaaactgaggagacaggacccagattcaagaacatggcatcattatgtataccagcccaaatatctggatcagcaaaagtcagaagaacttgatagagagaagaaattaaaagaggatagtccgaggaaaactcctaataaagagagtggtgtgcccagccttcctgtatcgttaacaagcattaaagaggagcccaaagaggccaagcatcctgattctcaatcaatggaggagagcaagctgaaaaatgatgatcgaaagactcctgtgaactggaaggactctcggggaacaagagtggctgtctcctcacccatgagtcagcatcagtcatacatacagtacttgcatgcttatccttacccacagatgtacgaccccagccatcctgcataccgggctgtttctcccgtcctaatgcacagttatcctggggcatatctctctccaggatttcattatcctgtttatgggaagatgtcagggagagaagagacagagaaagtcaataccagccctagcgtcaacacgaaaacaaccactgaatctaaagcactggatttgctccagcagcatgctaaccaataccgcagcaagtctcctgctcctgtggaaaaggctacagctgagcgggaacgggaggcagaaagggaaagggatcgccactcccccttcggccagcggcacctgcacacgcaccaccacacccacgttggcatgggttacccgctaatcccgggtcaatatgacccttttcaaggcttgacctctgctgcccttgttgcctctcagcaggtggctgcccaggcatctgcatctggaatgtttcctggacaaagaagataaagtcgcaaatggagacatttattttcataatgctaaagagaataacaagattggacatgtacattgtcatgtgactggatcacatggggaagcgctttatacagacatcagttccatggtgttaatttgaaatgccttaatggcaggcaaaaaccagtcatttcatttttgtaaattacagattttatcacagagtaacaaatgttgctgtaattaaacttctgttttatatatatatacgtatacatatctgtatatatacatatatatatatataaatataaatatattctttactttttgtatcagtaaccaggctcgcacacacagggtctgctgccacgtcgcaaaccactcagtaaaggaaattaaaaatgtatttgtcatgttaaaaagtgttagccacaaaaggctacttactttcttttccttttcctttaaaattataaataaataatgttatgtatcagtgtgcctgaaccttgcatatccttcacatatttcccataagcccctcagaaaggctaactgtgatgatgacactttggtacaatttagatgtctatttggtggctcctgttaaagacgcaccagtgtaaaatgttcctgtagtcactgtttgtacttgtgtattgtggaaaaagtacttttggaaggcatggggttgccagtaccacaaaaactgtgttgtatataatgtaaagattaaaatggggaaataatgagcatctgtgaataatgaggtgtcattttttgataatcttgaatggcaaataacccaatagcctgcgtaccagagacatctgtgattgttctattacttgaatagttctacagtcttttttttttttttaatgtttacaattatccagttttagaagagagagactttaacgccattgcctggttacttgttttatgctgtaatctagtttattttatgtaaaatgtatattgaatgctttccttttttatacctgccttaaataatttggcaatcagaattaaaaagtttttttttttttaaataaaaaaaaaaaa

SEQ ID NO: 514927 - DNA, 2318 bp, Homo sapiens
gagacggatcgtttggctcatgttagttgtagaaggtctaattcaagagtgagtaccatcttacactttctagaagtctgttacttaaaatgttttctttcttctaggtgatatccgacatccaaagcacgtccaacagacggatgtggctgcgacactggcgatagcacttggcttaccgattccaaaagacagtgtagggagcctcctattcccagttgtggaaggaagaccaatgagagagcagttgagatttttacatttgaatacagtgcagcttagtaaactgttgcaagagaatgtgccgtcatatgaaaaagatcctgggtttgagcagtttaaaatgtcagaaagattgcatgggaactggatcagactgtacttggaggaaaagcattcagaagtcctattcaacctgggctccaaggttctcaggcagtacctggatgctctgaagacgctgagcttgtccctgagtgcacaagtggcccagtacgacatctattcgatgatggtggggactgtcgtggttttggaggttctcaccctgctcctgctcagcgtcccacaggcactgcgcagaaaggctgagctggaagtcccactgtcatctcctgggttttctctgctcttttatttggtgatcctggttctttcggccgttcacgtcattgtgtgcacctcagctgaaagttcgtgctacttctgtggcctctcgtggctggcggcaggtggggtgatggtgctggcctcggcgctgctgtgtgtgattgtgtctgttctgaccaacgtgctcgtgggtggaaacaccccaaggaagaaccccatgcatcccagctcaaggtggtcagagctagaccttcttattctgttggggacggcgggccacgtcttgagcctgggcgccagcagcttcgtggaggaggagcaccagacctggtacttccttgtgaacaccctgtgtctagctctgagccaagaaacctacagaaactactttctgggagatgacggtgagcctccgtgtggcctctgtgtggaacaagggcatgacggggccacagcagcgtggcaggacgggcctggctgtgatgtcctggagcgagacaaaggccacggaagcccctctacctccgaagtgctcagaggccgcgagaagtggatggtgctggccagtccgtggctaatactggcctgctgccggctgctgcgctccctaaaccagacaggtgtgcagtgggctcaccggcctgacctcggccactggctcaccagctctgaccacaaagccgagctctctgtcctggctgccctctccctcctcgtagtttttgtgctggtgcagagggggtgctcccctgtgtccaaggctgccctggcgctggggctgctgggcgtctactgctaccgggcggccatcgggagtgtccggttcccgtggcggccggacagcaaggacatttccaagggtattattgaagctcgttttgtttatgtctttgtccttggcattctgttcacgggcaccaaagacttacttaaatctcaagtcattgctgcagacttcaaactcaagactgtaggtttatgggagatatatagtggattagttcttctggcagccttgctctttagaccacataatcttccggtcttagcatttagcctcttgattcagactctaatgactaaattcatctggaagcccctgagacacgatgcagctgagattactgtgatgcattattggtttggtcaagcattcttctattttcagggcaactccaacaacattgccaccgtggacatctccgcaggcttcgtgggcttagacacctacgtggaaatcccagccgtgctcctgacagcgtttgggacgtacgcagggcctgtgctgtgggccagccacttagtgcacttcctgagctcagaaacacgcagtggttcagcactgagtcatgcttgcttctgctacgcactgatttgttctattccagttttcacgtacatcgttttggtgacatctctgcgttatcatttatttatatggagtgtattttctccaaaacttctctacgagggaatgcacctgctcattacagctgctgtctgtgtattcttcacggcaatggatcaaaccagactcacacagtcttagactaagctgaacactggaaaaataatacatgcttaaagtctgctgttattctaaaatgaaagatatgaattcaacaaagttgatggataactttctttgactgctctacctgaatttagactaagcagtaaatagtttaataaaagatcactttaatata

SEQ ID NO: 514928 - DNA, 4215 bp, Homo sapiens
ctgctgccccgggctccggaggccagcttcacagagttccagagggctgcagaataatgaacagagggggggccaatgggaaagggaggcggggcagcctcaatgccagcggacgaaggacacccccaaattgtgctgctgaggatatcaaagccagcccttcctccaccaacaaaaggaaaaacaagcctccaatggagctggacctgaactccagctctgaggacaataagcctggaaagcgtgtccgcacaaattccagaagcactcccactacccctcaagggaaaccagagactacttttttggaccaaggctgctcttctccagtgttaatcgactgtccccacccaaactgcaacaaaaagtacaagcacattaacggcctgaggtaccaccaggctcatgcacacttagacccagaaaacaagctggagttcgagcctgacagtgaggacaagatctcggactgtgaggaaggattgagtaatgtggcacttgaatgcagtgagccaagcacaagtgtatctgcttatgaccagttgaaggcaccggcatcccctggtgctggaaacccacctgggaccccaaagggaaagagagagctgatgagcaatggcccaggttccattattggtgctaaagctgggaagaattctggcaaaaagaagggccttaacaatgaactgaacaaccttccagtaatctccaacatgacggctgcgttagacagttgctcggcagcagacggcagtttggctgctgagatgcctaaactggaagcagaaggattaattgacaagaaaaatttaggagataaagaaaagggcaaaaaagctaacaactgcaaaacggacaaaaacctctctaaactgaaaagtgcccggcccattgcccctgccccagcccccactcccccgcagctaatcgctatacccactgcaacctttacaacgaccaccactgggacaatacccggactgccctccctcacaacaactgttgttcaggctacaccaaagagtcctccgttaaaacccattcaaccaaagcccacaattatgggagagcccatcaccgtgaacccagctctggtgtcactcaaagacaaaaagaaaaaggagaagcgaaagctaaaggacaaagaagggaaagagacgggaagcccaaaaatggatgccaagctggggaaactagaggactccaagggggccagcaaagatttacctgggcattttttaaaggatcatctcaacaagaatgaagggctggcaaatggactgtcggagtctcaggagagccgcatggccagtatcaaagctgaggccgataaggtttacactttcacagacaacgctcccagcccttccatagggagcgcctcgaggctggaatgcagcactttggtgaacgggcaggcaccaatggcacctctgcatgtgttgacccagaatggggcagagagttcagctgcaaagacaagcagcccggcctattcagacatatctgatgctgctgacgatggtggttctgacagcaggtcggagggtatgagatcaaaggccagttccccatcagatattatttctagtaaggacagtgttgtaaaagggcattcttcaactacagcacaatcatctcaactgaaagagtcccattctccctattaccacagctatgatccttattattctccaagttacatgcaccctgggcaggtcggtgcccctgcagctggaaatagtgggagcacgcagggaatgaagatcaagaaggagtctgaggaagatgctgaaaagaaagacaaggcagagcagttagattctaagaaagtggaccacaattctgcatccttacagcctcagcaccagtcggtgatcacacaaagacatcctgccctggctcagtcactttattatggccagtatgcatatgggctctatatggaccagaagtctctgatggccaccagccctgcctatagacagcagtatgagaagtactatgaggaccagaggactggcagagcagaaaatggcccagactgggagaggagactgtgaaaggaaaagtgagctccccttgaaagagctgggcaaggaggaaactaaacagaaaaatatgccatcggccacaatctcaaaagctccctctactccggagcctaacaaaaaccattctaaactagggccatcagtgcctaataaaactgaggagacaggtaaatcgcagcttctctccaatcaccagcagcagcttcaggccgacagcttcaaagctaagcagatggaaaaccaccagcttattaaggaggctgtagaaatgaagtctgtcatggactctatgaagcagacaggtgtagacccaacctcgagatttaaacaagacccagattcaagaacatggcatcattatgtataccagcccaaatatctggatcagcaaaagtcagaagaacttgatagagagaagaaattaaaagaggatagtccgaggaaaactcctaataaagagagtggtgtgcccagccttcctgtatcgttaacaagcattaaagaggagcccaaagaggccaagcatcctgattctcaatcaatggaggagagcaagctgaaaaatgatgatcgaaagactcctgtgaactggaaggactctcggggaacaagagtggctgtctcctcacccatgagtcagcatcagtcatacatacagtacttgcatgcttatccttacccacagatgtacgaccccagccatcctgcataccgggctgtttctcccgtcctaatgcacagttatcctggggcatatctctctccaggatttcattatcctgtttatgggaagatgtcagggagagaagagacagagaaagtcaataccagccctagcgtcaacacgaaaacaaccactgaatctaaagcactggatttgctccagcagcatgctaaccaataccgcagcaagtctcctgctcctgtggaaaaggctacagctgagcgggaacgggaggcagaaagggaaagggatcgccactcccccttcggccagcggcacctgcacacgcaccaccacacccacgttggcatgggttacccgctaatcccgggtcaatatgacccttttcaaggcttgacctctgctgcccttgttgcctctcagcaggtggctgcccaggcatctgcatctggaatgtttcctggacaaaaaagagaataacaagattggacatgtacattgtcatgtgactggatcacatggggaagcgctttatacagacatcagttccatggtgttaatttgaaatgccttaatggcaggcaaaaaccagtcatttcatttttgtaaattacagattttatcacagagtaacaaatgttgctgtaattaaacttctgttttatatatatatacgtatacatatctgtatatatacatatatatatatataaatataaatatattctttactttttgtatcagtaaccaggctcgcacacacagggtctgctgccacgtcgcaaaccactcagtaaaggaaattaaaaatgtatttgtcatgttaaaaagtgttagccacaaaaggctacttactttcttttccttttcctttaaaattataaataaataatgttatgtatcagtgtgcctgaaccttgcatatccttcacatatttcccataagcccctcagaaaggctaactgtgatgatgacactttggtacaatttagatgtctatttggtggctcctgttaaagacgcaccagtgtaaaatgttcctgtagtcactgtttgtacttgtgtattgtggaaaaagtacttttggaaggcatggggttgccagtaccacaaaaactgtgttgtatataatgtaaagattaaaatggggaaataatgagcatctgtgaataatgaggtgtcattttttgataatcttgaatggcaaataacccaatagcctgcgtaccagagacatctgtgattgttctattacttgaatagttctacagtcttttttttttttttaatgtttacaattatccagttttagaagagagagactttaacgccattgcctggttacttgttttatgctgtaatctagtttattttatgtaaaatgtatattgaatgctttccttttttatacctgccttaaataatttggcaatcagaattaaaaagtttttttttttttaaataaaaaaaaaaaa

SEQ ID NO: 514929 - DNA, 5322 bp, Homo sapiens
ctctgattttaatcagttctgcgtttgaaaggaaacccggtgatatccgacatccaaagcacgtccaacagacggatgtggctgcgacactggcgatagcacttggcttaccgattccaaaagacagtgtagggagcctcctattcccagttgtggaaggaagaccaatgagagagcagttgagatttttacatttgaatacagtgcagcttagtaaactgttgcaagagaatgtgccgtcatatgaaaaagatcctgggtttgagcagtttaaaatgtcagaaagattgcatgggaactggatcagactgtacttggaggaaaagcattcagaagtcctattcaacctgggctccaaggttctcaggcagtacctggatgctctgaagacgctgagcttgtccctgagtgcacaagtggcccagtacgacatctattcgatgatggtggggactgtcgtggttttggaggttctcaccctgctcctgctcagcgtcccacaggcactgcgcagaaaggctgagctggaagtcccactgtcatctcctgggttttctctgctcttttatttggtgatcctggttctttcggccgttcacgtcattgtgtgcacctcagctgaaagttcgtgctacttctgtggcctctcgtggctggcggcaggtggggtgatggtgctggcctcggcgctgctgtgtgtgattgtgtctgttctgaccaacgtgctcgtgggtggaaacaccccaaggaagaaccccatgcatcccagctcaaggtggtcagagctagaccttcttattctgttggggacggcgggccacgtcttgagcctgggcgccagcagcttcgtggaggaggagcaccagacctggtacttccttgtgaacaccctgtgtctagctctgagccaagaaacctacagaaactactttctgggagatgacggtgagcctccgtgtggcctctgtgtggaacaagggcatgacggggccacagcagcgtggcaggacgggcctggctgtgatgtcctggagcgagacaaaggccacggaagcccctctacctccgaagtgctcagaggccgcgagaagtggatggtgctggccagtccgtggctaatactggcctgctgccggctgctgcgctccctaaaccagacaggtgtgcagtgggctcaccggcctgacctcggccactggctcaccagctctgaccacaaagccgagctctctgtcctggctgccctctccctcctcgtagtttttgtgctggtgcagagggggtgctcccctgtgtccaaggctgccctggcgctggggctgctgggcgtctactgctaccgggcggccatcgggagtgtccggttcccgtggcggccggacagcaaggacatttccaagggtattattgaagctcgttttgtttatgtctttgtccttggcattctgttcacgggcaccaaagacttacttaaatctcaagtcattgctgcagacttcaaactcaagactgtaggtttatgggagatatatagtggattagttcttctggcagccttgctctttagaccacataatcttccggtcttagcatttagcctcttgattcagactctaatgactaaattcatctggaagcccctgagacacgatgcagctgagattactgtgatgcattattggtttggtcaagcattcttctattttcaggtaggttttcattattatcatgggtagtagacttcatgttttacatatttattttaaatttttctttgagaaaatgttcccataagttggaaagtgactgtcagtgtggcatggtgaattacgctgaactctcgtgtattttataagacaaagtacagccggttgtttaagacacgcgtcccaggtgtggatgtgtgggtgcttaagacagcagactgctgctttgctgggccaggcctgggtttatttattacaagcagttcaggaagcacagacatcacgttgttcacttgcttcactgatgaatgtaataattgttctcgttcatgccctttgcccctggtgtcggggctgtccacactggggaccattggtgcccccatgattattagctccctgaagcctggtgggtcgtcagggcttctgtccggtgtttaaagacccatcccagacaagcccaaaccacctcagtttgaagagacatagagggacaggcagacggggcctcagagggatccagcctcatccagcctcccggcaacctcaggagagcaggccagatggggcctcagagggatccagcctcatccagcctcccggcaacctcaggagagcaggcacagccctgctggttcccttccagtgccgactcccaggctgagtcgctttgcagcagctgaacgtcgtggttgcattttggtctctaccgtgaggtctgtattttcttggtgtgcaccggtgtctgcctgtccgctgtctcgtacccaggaggcatgtgcagttctttgtgtccctacagggcctctcttccatcctcttctcctttcctggtgctcccagcctttcccatggaacagcccacagttgcaggattttctgtctttatgtctgtccccctgatcctgaagcccaaaggtggtaggcgtgaagttacagaagtctgtgtcttcaggtacaatgagtaggtggccaatggccagcttcttagccccgtcctggtgcttccccgacccttctgatccgctcaggcccctgtcctcctcgtacacagctgcagctctccctgccatgtccacgcaaggcacaagggtgtccccagcagaactgcaggcctggatgctggtatccagcacgttcaagccaggtggcctccggcaggctcttgccacaccttcgtttccttatctgtaaaccagggatagtggtctcccggcctccccaggacccagccctccctggtctccccacctccccgtggcccctgttttgaggctgagtccgctgcccctcagtgttagatctcctctgagaggaacctgtggctttgctgcccatccctacttcctgccctcgactgggcagttccttaacagatcagggatcaggaacatgactgcccttgctcatctgctggccctccacatttgcccagtccctgggtctctctgcctccgtttcctccctgtttgatgaggataatcacgaagcacatcaggactgttgggttagatgaagtcatgcaggtaaagctgctgtgcagctgcagacatgtcagcatggctggcagtctctgtgcttggctgagcctgctcagagccacagtgacctcctaggtgtcctcctcccctgctcccatcgtggcatctgggactctgtccccctgccaccctccagggtctcctactgcttctgcctgtttgctctctcctcagtctccctgcagaagagcttccaagtggaggagacacatgactggggtggcaccgtccaagagaggcagtagctgcgagtccagtgggtctcagggcaagccaagtcaaagggctggggcctaagacaacagggataggagtcaatgcacatctgtgagataatggggaagcagcatcaacatgacttggggaccccctgggcccacagctctctgcatggaaagggaggaaggagccaagctggtgagcacccagccagtgttttgtggacatgaacagttctggttctggagagggatcttcgttgagcttgatagagacatgtgctgtcggactgtagatgtcatgagtttctgaggaaaggtcagcatgacaggcaagtgacagacatcagagtcagtaaagatggagcgtggggaggcggggcctgggagcagagaggaggggcctaggaatggagaggtggggcctaggagtggaagggtgtggtcttggagtggagaggcggggcctgggagcagagaggaggggcctaggaatggagaggtagggcctaggagtggaaaggtgtggtcttggagtggagaggcggggcctgcgcggagaggcagggtctctcagaagacccctttttgggatccagaatcactaggagcagggtaagctgtgtggcatcagcgcttgcatcctgcagggagttacctaccagggctgggccgggactggccagaaccttgacagatgaagtttgaccagaccaagtgagtcctcatggtctgatacgtaagccagatgtgagttaccaatttgcaccaggggctgtgctcccccagtggctggcctgccctccaccatataacccactggcagcacctcaccgtagatgggacctggctgggtgcccgttctagtcttcagcccagctccccgcttggctgggcccagcagctggcctctcagggccctatgcgcccctcggatgggggtccttgaggggagcttcatgtgcttgtcttaagtcgatgggtctggacaagggtcttagatgtggcacagtcagccagccggtctgtgtgtgcgtccctcttcagagggggccccagcttctgcacggtccgctcacgtgcccttccgcagcctgggcactgcaggcagggggagggggtgccacccaggcaaggccagctcggcagtctgaaggaacggctgggcagccacctctgaccacacgtgtgtccgtgccggcgtggttatctgggctgcctacacagttcacgctaacatcgtagctcacgctaacatcgtggctgttgatgccacgtgttgtgaggcctttgtcagctcttctcctgtattccagggcaactccaacaacattgccaccgtggacatctccgcaggcttcgtgggcttagacacctacgtggaaatcccagccgtgctcctgacagcgtttgggacgtacgcagggcctgtgctgtgggccagccacttagtgcacttcctgagctcagaaacacgcagtggttcagcactgagtcatgcttgcttctgctacgcactgatttgttctattccagttttcacgtacatcgttttggtgacatctctgcgttatcatttatttatatggagtgtattttctccaaaacttctctacgagggaatgcacctgctcattacagctgctgtctgtgtattcttcacggcaatggatcaaaccagactcacacagtcttagactaagctgaacactggaaaaataatacatgcttaaagtctgctgttattctaaaatgaaagatatgaattcaacaaagttgatggataactttctttgactgctctacctgaatttagactaagcagtaaatagtttaataaaagatcactttaatata

SEQ ID NO: 514930 - DNA, 155 bp, Homo sapiens
gctctgtgcgtagttgtgttagtgggtttgtccgttgcgttcgtgctccgggttgttcttagtagtgcttgctctcttttggggcgtgcttctttttcgcttccttctcgggtgtgggtttcgggtttttgtccccctttgttcctgtttttctg

SEQ ID NO: 514931 - DNA, 178 bp, Homo sapiens
cgcatctcttgatagggggtggagttgccccatccacacctgatggggtgtactcggaaggtggaatgagagacttaggagagaaaacgacacagagacaaagtatagagaaagaaataaggggacccaggggaaccagacgctcaccaatagtggatggatcccggccagcgctctg

SEQ ID NO: 514932 - DNA, 4154 bp, Homo sapiens
ctgctgccccgggctccggaggccagcttcacagagttccagagggctgcagaataatgaacagagggggggccaatgggaaagggaggcggggcagcctcaatgccagcggacgaaggacacccccaaattgtgctgctgaggatatcaaagccagcccttcctccaccaacaaaaggaaaaacaagcctccaatggagctggacctgaactccagctctgaggacaataagcctggaaagcgtgtccgcacaaattccagaagcactcccactacccctcaagggaaaccagagactacttttttggaccaaggctgctcttctccagtgttaatcgactgtccccacccaaactgcaacaaaaagtacaagcacattaacggcctgaggtaccaccaggctcatgcacacttagacccagaaaacaagctggagttcgagcctgacagtgaggacaagatctcggactgtgaggaaggattgagtaatgtggcacttgaatgcagtgagccaagcacaagtgtatctgcttatgaccagttgaaggcaccggcatcccctggtgctggaaacccacctgggaccccaaagggaaagagagagctgatgagcaatggcccaggttccattattggtgctaaagctgggaagaattctggcaaaaagaagggccttaacaatgaactgaacaaccttccagtaatctccaacatgacggctgcgttagacagttgctcggcagcagacggcagtttggctgctgagatgcctaaactggaagcagaaggattaattgacaagaaaaatttaggagataaagaaaagggcaaaaaagctaacaactgcaaaacggacaaaaacctctctaaactgaaaagtgcccggcccattgcccctgccccagcccccactcccccgcagctaatcgctatacccactgcaacctttacaacgaccaccactgggacaatacccggactgccctccctcacaacaactgttgttcaggctacaccaaagagtcctccgttaaaacccattcaaccaaagcccacaattatgggagagcccatcaccgtgaacccagctctggtgtcactcaaagacaaaaagaaaaaggagaagcgaaagctaaaggacaaagaagggaaagagacgggaagcccaaaaatggatgccaagctggggaaactagaggactccaagggggccagcaaagatttacctgggcattttttaaaggatcatctcaacaagaatgaagggctggcaaatggactgtcggagtctcaggagagccgcatggccagtatcaaagctgaggccgataaggtttacactttcacagacaacgctcccagcccttccatagggagcgcctcgaggctggaatgcagcactttggtgaacgggcaggcaccaatggcacctctgcatgtgttgacccagaatggggcagagagttcagctgcaaagacaagcagcccggcctattcagacatatctgatgctgctgacgatggtggttctgacagcaggtcggagggtatgagatcaaaggccagttccccatcagatattatttctagtaaggacagtgttgtaaaagggcattcttcaactacagcacaatcatctcaactgaaagagtcccattctccctattaccacagctatgatccttattattctccaagttacatgcaccctgggcaggtcggtgcccctgcagctggaaatagtgggagcacgcagggaatgaagatcaagaaggagtctgaggaagatgctgaaaagaaagacaaggcagagcagttagattctaagaaagtggaccacaattctgcatccttacagcctcagcaccagtcggtgatcacacaaagacatcctgccctggctcagtcactttattatggccagtatgcatatgggctctatatggaccagaagtctctgatggccaccagccctgcctatagacagcagtatgagaagtactatgaggaccagaggactggcagagcagaaaatggcccagactgggagaggagactgtgaaaggaaaagtgagctccccttgaaagagctgggcaaggaggaaactaaacagaaaaatatgccatcggccacaatctcaaaagctccctctactccggagcctaacaaaaaccattctaaactagggccatcagtgcctaataaaactgaggagacaggtaaatcgcagcttctctccaatcaccagcagcagcttcaggccgacagcttcaaagctaagcagatggaaaaccaccagcttattaaggaggctgtagaaatgaagtctgtcatggactctatgaagcagacaggtgtagacccaacctcgagatttaaacaagacccagattcaagaacatggcatcattatgtataccagcccaaatatctggatcagcaaaagtcagaagaacttgatagagagaagaaattaaaagaggatagtccgaggaaaactcctaataaagagagtggtgtgcccagccttcctgtatcgttaacaagcattaaagaggagcccaaagaggccaagcatcctgattctcaatcaatggaggagagcaagctgaaaaatgatgatcgaaagactcctgtgaactggaaggactctcggggaacaagagtggctgtctcctcacccatgagtcagcatcagtcatacatacagtacttgcatgcttatccttacccacagatgtacgaccccagccatcctgcataccgggctgtttctcccgtcctaatgcacagttatcctggggcatatctctctccaggatttcattatcctgtttatgggaagatgtcagggagagaagagacagagaaagtcaataccagccctagcgtcaacacgaaaacaaccactgaatctaaagcactggatttgctccagcagcatgctaaccaataccgcagcaagtctcctgctcccccttcggccagcggcacctgcacacgcaccaccacacccacgttggcatgggttacccgctaatcccgggtcaatatgacccttttcaaggcttgacctctgctgcccttgttgcctctcagcaggtggctgcccaggcatctgcatctggaatgtttcctggacaaaaaagagaataacaagattggacatgtacattgtcatgtgactggatcacatggggaagcgctttatacagacatcagttccatggtgttaatttgaaatgccttaatggcaggcaaaaaccagtcatttcatttttgtaaattacagattttatcacagagtaacaaatgttgctgtaattaaacttctgttttatatatatatacgtatacatatctgtatatatacatatatatatatataaatataaatatattctttactttttgtatcagtaaccaggctcgcacacacagggtctgctgccacgtcgcaaaccactcagtaaaggaaattaaaaatgtatttgtcatgttaaaaagtgttagccacaaaaggctacttactttcttttccttttcctttaaaattataaataaataatgttatgtatcagtgtgcctgaaccttgcatatccttcacatatttcccataagcccctcagaaaggctaactgtgatgatgacactttggtacaatttagatgtctatttggtggctcctgttaaagacgcaccagtgtaaaatgttcctgtagtcactgtttgtacttgtgtattgtggaaaaagtacttttggaaggcatggggttgccagtaccacaaaaactgtgttgtatataatgtaaagattaaaatggggaaataatgagcatctgtgaataatgaggtgtcattttttgataatcttgaatggcaaataacccaatagcctgcgtaccagagacatctgtgattgttctattacttgaatagttctacagtcttttttttttttttaatgtttacaattatccagttttagaagagagagactttaacgccattgcctggttacttgttttatgctgtaatctagtttattttatgtaaaatgtatattgaatgctttccttttttatacctgccttaaataatttggcaatcagaattaaaaagtttttttttttttaaataaaaaaaaaaaa

SEQ ID NO: 514933 - DNA, 5366 bp, Homo sapiens
gagacggatcgtttggctcatgttagttgtagaaggtctaattcaagagtgagtaccatcttacactttctagaagtctgttacttaaaatgttttctttcttctaggtgatatccgacatccaaagcacgtccaacagacggatgtggctgcgacactggcgatagcacttggcttaccgattccaaaagacagtgtagggagcctcctattcccagttgtggaaggaagaccaatgagagagcagttgagatttttacatttgaatacagtgcagcttagtaaactgttgcaagagaatgtgccgtcatatgaaaaagatcctgggtttgagcagtttaaaatgtcagaaagattgcatgggaactggatcagactgtacttggaggaaaagcattcagaagtcctattcaacctgggctccaaggttctcaggcagtacctggatgctctgaagacgctgagcttgtccctgagtgcacaagtggcccagtacgacatctattcgatgatggttctcaccctgctcctgctcagcgtcccacaggcactgcgcagaaaggctgagctggaagtcccactgtcatctcctgggttttctctgctcttttatttggtgatcctggttctttcggccgttcacgtcattgtgtgcacctcagctgaaagttcgtgctacttctgtggcctctcgtggctggcggcaggtggggtgatggtgctggcctcggcgctgctgtgtgtgattgtgtctgttctgaccaacgtgctcgtgggtggaaacaccccaaggaagaaccccatgcatcccagctcaaggtggtcagagctagaccttcttattctgttggggacggcgggccacgtcttgagcctgggcgccagcagcttcgtggaggaggagcaccagacctggtacttccttgtgaacaccctgtgtctagctctgagccaagaaacctacagaaactactttctgggagatgacggtgagcctccgtgtggcctctgtgtggaacaagggcatgacggggccacagcagcgtggcaggacgggcctggctgtgatgtcctggagcgagacaaaggccacggaagcccctctacctccgaagtgctcagaggccgcgagaagtggatggtgctggccagtccgtggctaatactggcctgctgccggctgctgcgctccctaaaccagacaggtgtgcagtgggctcaccggcctgacctcggccactggctcaccagctctgaccacaaagccgagctctctgtcctggctgccctctccctcctcgtagtttttgtgctggtgcagagggggtgctcccctgtgtccaaggctgccctggcgctggggctgctgggcgtctactgctaccgggcggccatcgggagtgtccggttcccgtggcggccggacagcaaggacatttccaagggtattattgaagctcgttttgtttatgtctttgtccttggcattctgttcacgggcaccaaagacttacttaaatctcaagtcattgctgcagacttcaaactcaagactgtaggtttatgggagatatatagtggattagttcttctggcagccttgctctttagaccacataatcttccggtcttagcatttagcctcttgattcagactctaatgactaaattcatctggaagcccctgagacacgatgcagctgagattactgtgatgcattattggtttggtcaagcattcttctattttcaggtaggttttcattattatcatgggtagtagacttcatgttttacatatttattttaaatttttctttgagaaaatgttcccataagttggaaagtgactgtcagtgtggcatggtgaattacgctgaactctcgtgtattttataagacaaagtacagccggttgtttaagacacgcgtcccaggtgtggatgtgtgggtgcttaagacagcagactgctgctttgctgggccaggcctgggtttatttattacaagcagttcaggaagcacagacatcacgttgttcacttgcttcactgatgaatgtaataattgttctcgttcatgccctttgcccctggtgtcggggctgtccacactggggaccattggtgcccccatgattattagctccctgaagcctggtgggtcgtcagggcttctgtccggtgtttaaagacccatcccagacaagcccaaaccacctcagtttgaagagacatagagggacaggcagacggggcctcagagggatccagcctcatccagcctcccggcaacctcaggagagcaggccagatggggcctcagagggatccagcctcatccagcctcccggcaacctcaggagagcaggcacagccctgctggttcccttccagtgccgactcccaggctgagtcgctttgcagcagctgaacgtcgtggttgcattttggtctctaccgtgaggtctgtattttcttggtgtgcaccggtgtctgcctgtccgctgtctcgtacccaggaggcatgtgcagttctttgtgtccctacagggcctctcttccatcctcttctcctttcctggtgctcccagcctttcccatggaacagcccacagttgcaggattttctgtctttatgtctgtccccctgatcctgaagcccaaaggtggtaggcgtgaagttacagaagtctgtgtcttcaggtacaatgagtaggtggccaatggccagcttcttagccccgtcctggtgcttccccgacccttctgatccgctcaggcccctgtcctcctcgtacacagctgcagctctccctgccatgtccacgcaaggcacaagggtgtccccagcagaactgcaggcctggatgctggtatccagcacgttcaagccaggtggcctccggcaggctcttgccacaccttcgtttccttatctgtaaaccagggatagtggtctcccggcctccccaggacccagccctccctggtctccccacctccccgtggcccctgttttgaggctgagtccgctgcccctcagtgttagatctcctctgagaggaacctgtggctttgctgcccatccctacttcctgccctcgactgggcagttccttaacagatcagggatcaggaacatgactgcccttgctcatctgctggccctccacatttgcccagtccctgggtctctctgcctccgtttcctccctgtttgatgaggataatcacgaagcacatcaggactgttgggttagatgaagtcatgcaggtaaagctgctgtgcagctgcagacatgtcagcatggctggcagtctctgtgcttggctgagcctgctcagagccacagtgacctcctaggtgtcctcctcccctgctcccatcgtggcatctgggactctgtccccctgccaccctccagggtctcctactgcttctgcctgtttgctctctcctcagtctccctgcagaagagcttccaagtggaggagacacatgactggggtggcaccgtccaagagaggcagtagctgcgagtccagtgggtctcagggcaagccaagtcaaagggctggggcctaagacaacagggataggagtcaatgcacatctgtgagataatggggaagcagcatcaacatgacttggggaccccctgggcccacagctctctgcatggaaagggaggaaggagccaagctggtgagcacccagccagtgttttgtggacatgaacagttctggttctggagagggatcttcgttgagcttgatagagacatgtgctgtcggactgtagatgtcatgagtttctgaggaaaggtcagcatgacaggcaagtgacagacatcagagtcagtaaagatggagcgtggggaggcggggcctgggagcagagaggaggggcctaggaatggagaggtggggcctaggagtggaagggtgtggtcttggagtggagaggcggggcctgggagcagagaggaggggcctaggaatggagaggtagggcctaggagtggaaaggtgtggtcttggagtggagaggcggggcctgcgcggagaggcagggtctctcagaagacccctttttgggatccagaatcactaggagcagggtaagctgtgtggcatcagcgcttgcatcctgcagggagttacctaccagggctgggccgggactggccagaaccttgacagatgaagtttgaccagaccaagtgagtcctcatggtctgatacgtaagccagatgtgagttaccaatttgcaccaggggctgtgctcccccagtggctggcctgccctccaccatataacccactggcagcacctcaccgtagatgggacctggctgggtgcccgttctagtcttcagcccagctccccgcttggctgggcccagcagctggcctctcagggccctatgcgcccctcggatgggggtccttgaggggagcttcatgtgcttgtcttaagtcgatgggtctggacaagggtcttagatgtggcacagtcagccagccggtctgtgtgtgcgtccctcttcagagggggccccagcttctgcacggtccgctcacgtgcccttccgcagcctgggcactgcaggcagggggagggggtgccacccaggcaaggccagctcggcagtctgaaggaacggctgggcagccacctctgaccacacgtgtgtccgtgccggcgtggttatctgggctgcctacacagttcacgctaacatcgtagctcacgctaacatcgtggctgttgatgccacgtgttgtgaggcctttgtcagctcttctcctgtattccagggcaactccaacaacattgccaccgtggacatctccgcaggcttcgtgggcttagacacctacgtggaaatcccagccgtgctcctgacagcgtttgggacgtacgcagggcctgtgctgtgggccagccacttagtgcacttcctgagctcagaaacacgcagtggttcagcactgagtcatgcttgcttctgctacgcactgatttgttctattccagttttcacgtacatcgttttggtgacatctctgcgttatcatttatttatatggagtgtattttctccaaaacttctctacgagggaatgcacctgctcattacagctgctgtctgtgtattcttcacggcaatggatcaaaccagactcacacagtcttagactaagctgaacactggaaaaataatacatgcttaaagtctgctgttattctaaaatgaaagatatgaattcaacaaagttgatggataactttctttgactgctctacctgaatttagactaagcagtaaatagtttaataaaagatcactttaatata

SEQ ID NO: 514934 - DNA, 415 bp, Homo sapiens
cgtcgacggagaagctgaggaaggggagtgaccatgagtgcagctggggaggaggagtagctgaggcaggggagtgaccctgagtgcagctggggaggaggagaggagaagctgaggcaggggagtgactctgagtgcagctggggtggaggagaggagaagctgaggcaggggagtgaccctgagtgcagctggggtggaggagaagctgaggcaggggagtgaccctgagtgaacctggggaggaggagaggagaagctgaggcaggggagtgcagcgttcacatgagatgacggattctgggacttgccctgcaggtgaccatggccccaagccataacccattactatattttgagaaagttccagaagagggaggaaggagagggagaaggtcgacgcggccgcgaattt

SEQ ID NO: 514935 - DNA, 4587 bp, Homo sapiens
  misc_feature (391)..(391): n is a, c, g, or t
aatagaagcagcacaatgagagcatctgcggcgagagtaacagcaagggttgcggtcccgtcactgcagagaactcctgtaagaaatggcagcagaaggaaaagggaaatgcctagtcctagtaatgagggcacttccagttaaatgacagggtgtgacttcatacctgctgaggcagagaagcagaattgaatgacgagactcagtcttggtgagcacgtgaggattcctggggccacgttagtggcacagttcttttggaagatacttgtaagtttacatcagaagctgcgaaattacagattcttctgattaagtaattcttgtgggaggctaagcattaactaaattacgaaaacctcggttagccaagtcatcgcagatgggtccntctatctgcctgctgtgtgcctgcacgtttcctttccagagaagccccggagagggactttggttggtccccactccagagctctgaccacaaagccgagctctctgtcctggctgccctctccctcctcgtagtttttgtgctggtgcagagggggtgctcccctgtgtccaaggctgccctggcgctggggctgctgggcgtctactgctaccgggcggccatcgggagtgtccggttcccgtggcggccggacagcaaggacatttccaagggtattattgaagctcgttttgtttatgtctttgtccttggcattctgttcacgggcaccaaagacttacttaaatctcaagtcattgctgcagacttcaaactcaagactgtaggtttatgggagatatatagtggattagttcttctggcagccttgctctttagaccacataatcttccggtcttagcatttagcctcttgattcagactctaatgactaaattcatctggaagcccctgagacacgatgcagctgagattactgtgatgcattattggtttggtcaagcattcttctattttcaggtaggttttcattattatcatgggtagtagacttcatgttttacatatttattttaaatttttctttgagaaaatgttcccataagttggaaagtgactgtcagtgtggcatggtgaattacgctgaactctcgtgtattttataagacaaagtacagccggttgtttaagacacgcgtcccaggtgtggatgtgtgggtgcttaagacagcagactgctgctttgctgggccaggcctgggtttatttattacaagcagttcaggaagcacagacatcacgttgttcacttgcttcactgatgaatgtaataattgttctcgttcatgccctttgcccctggtgtcggggctgtccacactggggaccattggtgcccccatgattattagctccctgaagcctggtgggtcgtcagggcttctgtccggtgtttaaagacccatcccagacaagcccaaaccacctcagtttgaagagacatagagggacaggcagacggggcctcagagggatccagcctcatccagcctcccggcaacctcaggagagcaggccagatggggcctcagagggatccagcctcatccagcctcccggcaacctcaggagagcaggcacagccctgctggttcccttccagtgccgactcccaggctgagtcgctttgcagcagctgaacgtcgtggttgcattttggtctctaccgtgaggtctgtattttcttggtgtgcaccggtgtctgcctgtccgctgtctcgtacccaggaggcatgtgcagttctttgtgtccctacagggcctctcttccatcctcttctcctttcctggtgctcccagcctttcccatggaacagcccacagttgcaggattttctgtctttatgtctgtccccctgatcctgaagcccaaaggtggtaggcgtgaagttacagaagtctgtgtcttcaggtacaatgagtaggtggccaatggccagcttcttagccccgtcctggtgcttccccgacccttctgatccgctcaggcccctgtcctcctcgtacacagctgcagctctccctgccatgtccacgcaaggcacaagggtgtccccagcagaactgcaggcctggatgctggtatccagcacgttcaagccaggtggcctccggcaggctcttgccacaccttcgtttccttatctgtaaaccagggatagtggtctcccggcctccccaggacccagccctccctggtctccccacctccccgtggcccctgttttgaggctgagtccgctgcccctcagtgttagatctcctctgagaggaacctgtggctttgctgcccatccctacttcctgccctcgactgggcagttccttaacagatcagggatcaggaacatgactgcccttgctcatctgctggccctccacatttgcccagtccctgggtctctctgcctccgtttcctccctgtttgatgaggataatcacgaagcacatcaggactgttgggttagatgaagtcatgcaggtaaagctgctgtgcagctgcagacatgtcagcatggctggcagtctctgtgcttggctgagcctgctcagagccacagtgacctcctaggtgtcctcctcccctgctcccatcgtggcatctgggactctgtccccctgccaccctccagggtctcctactgcttctgcctgtttgctctctcctcagtctccctgcagaagagcttccaagtggaggagacacatgactggggtggcaccgtccaagagaggcagtagctgcgagtccagtgggtctcagggcaagccaagtcaaagggctggggcctaagacaacagggataggagtcaatgcacatctgtgagataatggggaagcagcatcaacatgacttggggaccccctgggcccacagctctctgcatggaaagggaggaaggagccaagctggtgagcacccagccagtgttttgtggacatgaacagttctggttctggagagggatcttcgttgagcttgatagagacatgtgctgtcggactgtagatgtcatgagtttctgaggaaaggtcagcatgacaggcaagtgacagacatcagagtcagtaaagatggagcgtggggaggcggggcctgggagcagagaggaggggcctaggaatggagaggtggggcctaggagtggaagggtgtggtcttggagtggagaggcggggcctgggagcagagaggaggggcctaggaatggagaggtagggcctaggagtggaaaggtgtggtcttggagtggagaggcggggcctgcgcggagaggcagggtctctcagaagacccctttttgggatccagaatcactaggagcagggtaagctgtgtggcatcagcgcttgcatcctgcagggagttacctaccagggctgggccgggactggccagaaccttgacagatgaagtttgaccagaccaagtgagtcctcatggtctgatacgtaagccagatgtgagttaccaatttgcaccaggggctgtgctcccccagtggctggcctgccctccaccatataacccactggcagcacctcaccgtagatgggacctggctgggtgcccgttctagtcttcagcccagctccccgcttggctgggcccagcagctggcctctcagggccctatgcgcccctcggatgggggtccttgaggggagcttcatgtgcttgtcttaagtcgatgggtctggacaagggtcttagatgtggcacagtcagccagccggtctgtgtgtgcgtccctcttcagagggggccccagcttctgcacggtccgctcacgtgcccttccgcagcctgggcactgcaggcagggggagggggtgccacccaggcaaggccagctcggcagtctgaaggaacggctgggcagccacctctgaccacacgtgtgtccgtgccggcgtggttatctgggctgcctacacagttcacgctaacatcgtagctcacgctaacatcgtggctgttgatgccacgtgttgtgaggcctttgtcagctcttctcctgtattccagggcaactccaacaacattgccaccgtggacatctccgcaggcttcgtgggcttagacacctacgtggaaatcccagccgtgctcctgacagcgtttgggacgtacgcagggcctgtgctgtgggccagccacttagtgcacttcctgagctcagaaacacgcagtggttcagcactgagtcatgcttgcttctgctacgcactgatttgttctattccagttttcacgtacatcgttttggtgacatctctgcgttatcatttatttatatggagtgtattttctccaaaacttctctacgagggaatgcacctgctcattacagctgctgtctgtgtattcttcacggcaatggatcaaaccagactcacacagtcttagactaagctgaacactggaaaaataatacatgcttaaagtctgctgttattctaaaatgaaagatatgaattcaacaaagttgatggataactttctttgactgctctacctgaatttagactaagcagtaaatagtttaataaaagatcactttaatata

SEQ ID NO: 514936 - DNA, 102 bp, Homo sapiens
tgtgcaaaggggtcttacgaagctgggaacctctatgtgagagattagcactgtagacattctggaagaatccaggcacacagattttcatacgaacctcgt

SEQ ID NO: 514937 - DNA, 792 bp, Homo sapiens
  misc_feature (9)..(9): n is a, c, g, or t
gatccccgngctgcaggattcggcacgagctgggcactgcaggcagggggagggggtgccacccaggcaaggccagctcggcagtctgaaggaacggctgggcagccacctctgaccacacgtgtgtccgtgccggcgtggttatctgggctgcctacacagttcacgctaacatcgtagctcacgctaacatcgtggctgttgatgccacgtgttgtgaggcctttgtcagctcttctcctgtattccagggcaactccaacaacattgccaccgtggacatctccgcaggcttcgtgggcttagacacctacgtggaaatcccagccgtgctcctgacagcgtttgggacgtacgcagggcctgtgctgtgggccagccacttagtgcacttcctgagctcagaaacacgcagtggttcagcactgagtcatgcttgcttctgctacgcactgatttgttctattccagttttcacgtacatcgttttggtgacatctctgcgttatcatttatttatatggagtgtattttctccaaaacttctctacgagggaatgcacctgctcattacagctgctgtctgtgtattcttcacggcaatggatcaaaccagactcacacagtcttagactaagctgaacactggaaaaataatacatgcttaaagtctgctgttattctaaaatgaaagatatgaattcaacaaagttgatggataactttctttgactgctctacctgaatttagactaagcagtaaatagtttaataaaagatcactttaatata

SEQ ID NO: 514938 - DNA, 5991 bp, Homo sapiens
ctctgattttaatcagttctgcgtttgaaaggaaacccggtgatatccgacatccaaagcacgtccaacagacggatgtggctgcgacactggcgatagcacttggcttaccgattccaaaagacagtgtagggagcctcctattcccagttgtggaaggaagaccaatgagagagcagttgagatttttacatttgaatacagtgcagcttagtaaactgttgcaagagaatgtgccgtcatatgaaaaagatcctgggtttgagcagtttaaaatgtcagaaagattgcatgggaactggatcagactgtacttggaggaaaagcattcagaagtcctattcaacctgggctccaaggttctcaggcagtacctggatgctctgaagacgctgagcttgtccctgagtgcacaagtggcccagtacgacatctattcgatgatggtggggactgtcgtggttttggaggttctcaccctgctcctgctcagcgtcccacaggcactgcgcagaaaggctgagctggaagtcccactgtcatctcctgggttttctctgctcttttatttggtgatcctggttctttcggccgttcacgtcattgtgtgcacctcagctgaaagttcgtgctacttctgtggcctctcgtggctggcggcaggtggggtgatggtgctggcctcggcgctgctgtgtgtgattgtgtctgttctgaccaacgtgctcgtgggtggaaacaccccaaggaagaaccccatgcatcccagctcaaggtggtcagagctagaccttcttattctgttggggacggcgggccacgtcttgagcctgggcgccagcagcttcgtggaggaggagcaccagacctggtacttccttgtgaacaccctgtgtctagctctgagccaagaaacctacagaaactactttctgggagatgacggtgagcctccgtgtggcctctgtgtggaacaagggcatgacggggccacagcagcgtggcaggacgggcctggctgtgatgtcctggagcgagacaaaggccacggaagcccctctacctccgaagtgctcagaggccgcgagaagtggatggtgctggccagtccgtggctaatactggcctgctgccggctgctgcgctccctaaaccagacaggtgtgcagtgggctcaccggcctgacctcggccactggctcaccagctctgaccacaaagccgagctctctgtcctggctgccctctccctcctcgtagtttttgtgctggtgcagagggggtgctcccctgtgtccaaggctgccctggcgctggggctgctgggcgtctactgctaccgggcggccatcgggagtgtccggttcccgtggcggccggacagcaaggacatttccaagggtattattgaagctcgttttgtttatgtctttgtccttggcattctgttcacgggcaccaaagacttacttaaatctcaagtcattgctgcagacttcaaactcaagactgtaggtttatgggagatatatagtggattagttcttctggcagccttgctctttagaccacataatcttccggtcttagcatttagcctcttgattcagactctaatgactaaattcatctggaagcccctgagacacgatgcagctgagattactgtgatgcattattggtttggtcaagcattcttctattttcaggtaggttttcattattatcatgggtagtagacttcatgttttacatatttattttaaatttttctttgagaaaatgttcccataagttggaaagtgactgtcagtgtggcatggtgaattacgctgaactctcgtgtattttataagacaaagtacagccggttgtttaagacacgcgtcccaggtgtggatgtgtgggtgcttaagacagcagactgctgctttgctgggccaggcctgggtttatttattacaagcagttcaggaagcacagacatcacgttgttcacttgcttcactgatgaatgtaataattgttctcgttcatgccctttgcccctggtgtcggggctgtccacactggggaccattggtgcccccatgattattagctccctgaagcctggtgggtcgtcagggcttctgtccggtgtttaaagacccatcccagacaagcccaaaccacctcagtttgaagagacatagagggacaggcagacggggcctcagagggatccagcctcatccagcctcccggcaacctcaggagagcaggccagatggggcctcagagggatccagcctcatccagcctcccggcaacctcaggagagcaggcacagccctgctggttcccttccagtgccgactcccaggctgagtcgctttgcagcagctgaacgtcgtggttgcattttggtctctaccgtgaggtctgtattttcttggtgtgcaccggtgtctgcctgtccgctgtctcgtacccaggaggcatgtgcagttctttgtgtccctacagggcctctcttccatcctcttctcctttcctggtgctcccagcctttcccatggaacagcccacagttgcaggattttctgtctttatgtctgtccccctgatcctgaagcccaaaggtggtaggcgtgaagttacagaagtctgtgtcttcaggtacaatgagtaggtggccaatggccagcttcttagccccgtcctggtgcttccccgacccttctgatccgctcaggcccctgtcctcctcgtacacagctgcagctctccctgccatgtccacgcaaggcacaagggtgtccccagcagaactgcaggcctggatgctggtatccagcacgttcaagccaggtggcctccggcaggctcttgccacaccttcgtttccttatctgtaaaccagggatagtggtctcccggcctccccaggacccagccctccctggtctccccacctccccgtggcccctgttttgaggctgagtccgctgcccctcagtgttagatctcctctgagaggaacctgtggctttgctgcccatccctacttcctgccctcgactgggcagttccttaacagatcagggatcaggaacatgactgcccttgctcatctgctggccctccacatttgcccagtccctgggtctctctgcctccgtttcctccctgtttgatgaggataatcacgaagcacatcaggactgttgggttagatgaagtcatgcaggtaaagctgctgtgcagctgcagacatgtcagcatggctggcagtctctgtgcttggctgagcctgctcagagccacagtgacctcctaggtgtcctcctcccctgctcccatcgtggcatctgggactctgtccccctgccaccctccagggtctcctactgcttctgcctgtttgctctctcctcagtctccctgcagaagagcttccaagtggaggagacacatgactggggtggcaccgtccaagagaggcagtagctgcgagtccagtgggtctcagggcaagccaagtcaaagggctggggcctaagacaacagggataggagtcaatgcacatctgtgagataatggggaagcagcatcaacatgacttggggaccccctgggcccacagctctctgcatggaaagggaggaaggagccaagctggtgagcacccagccagtgttttgtggacatgaacagttctggttctggagagggatcttcgttgagcttgatagagacatgtgctgtcggactgtagatgtcatgagtttctgaggaaaggtcagcatgacaggcaagtgacagacatcagagtcagtaaagatggagcgtggggaggcggggcctgggagcagagaggaggggcctaggaatggagaggtggggcctaggagtggaagggtgtggtcttggagtggagaggcggggcctgggagcagagaggaggggcctaggaatggagaggtagggcctaggagtggaaaggtgtggtcttggagtggagaggcggggcctgcgcggagaggcagggtctctcagaagacccctttttgggatccagaatcactaggagcagggtaagctgtgtggcatcagcgcttgcatcctgcagggagttacctaccagggctgggccgggactggccagaaccttgacagatgaagtttgaccagaccaagtgagtcctcatggtctgatacgtaagccagatgtgagttaccaatttgcaccaggggctgtgctcccccagtggctggcctgccctccaccatataacccactggcagcacctcaccgtagatgggacctggctgggtgcccgttctagtcttcagcccagctccccgcttggctgggcccagcagctggcctctcagggccctatgcgcccctcggatgggggtccttgaggggagcttcatgtgcttgtcttaagtcgatgggtctggacaagggtcttagatgtggcacagtcagccagccggtctgtgtgtgcgtccctcttcagagggggccccagcttctgcacggtccgctcacgtgcccttccgcagcctgggcactgcaggcagggggagggggtgccacccaggcaaggccagctcggcagtctgaaggaacggctgggcagccacctctgaccacacgtgtgtccgtgccggcgtggttatctgggctgcctacacagttcacgctaacatcgtagctcacgctaacatcgtggctgttgatgccacgtgttgtgaggcctttgtcagctcttctcctgtattccagggcaactccaacaacattgccaccgtggacatctccgcaggcttcgtgggcttagacacctacgtggaaatcccagccgtgctcctgacagcgtttgggacgtacgcagggcctgtgctgtgggccagccacttagtgcacttcctgagctcagaaacacgcagtggttcagcactgagtcatgcttgcttctgctacgcactgatttgttctattccagttttcacgtacatcgttttggtgacatctctgcgttatcatttatttatatggagtgtattttctccaaaacttctctacgagggaatgcacctgctcattacagctgctgtctgtgtattcttcacggcaatggatcaaaccagactcacacagtcttagactaagctgaacactggaaaaataatacatgcttaaagtctgctgttattctaaaatgaaagatatgaattcaacaaagttgatggataactttctttgactgctctacctgaatttagactaagcagtaaatagtttaataaaagatcactttaatatacagtttgtatcatattttcccccattgacaatcactctagaagcttctgaacttttaatttcctctgaataagctatggtgtgacccaaatatgtgtgtttaaatcaatgaatgaaaaggttctggactttgttagagtccaggagctctgtgggaggaggcacccagattaccttagggagcacagagctcttagaatcctacaaaccactgagggccccaaggcgctttggtttatgagggttacatgtatcagtgtttatggcatttgagatgaaaactaagataaaaaagtattcatttataaggaatctattgcatattaatgaaacacttgaaggaaaagtaactatattttccaaaacaaaaaaattcagtgagacccagcactttgggaggccagagtgggggtatcacttgagcccaggtgtttgagatcagcctgggaaacatagtgagaccctcatctctccaaaaacttcaaaaaattagctgggcgtgatggcacacacctgtggtcccagctactcaggtggctgaggaaagagtattgtttcagccgagttcaaggctgcagtgagccatgattgtaccactgtactccagccaggacaacagagtgagactcttgtctttaaaatgaaaaaataaatgtttaatgagaaaaaa

SEQ ID NO: 514939 - DNA, 919 bp, Homo sapiens
  misc_feature (331)..(331): n is a, c, g, or t
  misc_feature (376)..(376): n is a, c, g, or t
  misc_feature (491)..(491): n is a, c, g, or t
tggatgggtccagtggtttatttagaaacacctgggatttggttcaagaacagtgtggggggtgtgctttcacacctttttccagcggggaagtgggtgcgtgggagggtgaataggcgagcatttctcaccatttccttcgagcaacgagagagggtgagaggcttccttcaacctcgagcagagccacaaatatgtgtggagggcgacgaggtgtgggcgcgagggacacagagggcagaagaggacatatctcccaagagcgcaatatctcaatatacagaagagagaggtgtaaaacacagtgaacttcccacacacatattcactntacagagtggacagggtgtgcgggagctgcctgtgacgtgtgtgnctctcacgtgtggccctgtgcgtatacagtgtgctcactgttggctctctctctgtgtggggctcctctctctatacccacagctctctcacacctctctaaaagacatatctcnctatacaggtgaagatctctctcacacaggagtagacgcccaagccacgagggggacatatatatcccctatatacccatctagagcgggggcaacacatattacacacagagggacacacagcgcgccacagagagaggagagagagtggcacagaaagggcattaggcgagcgggcaagagagtcccagagagacaagagaccccaaactgttacccacagagaagagtgcccgcgcgagtgagaagaggctaccaaccagcagggtgtgagtgcgggtacacacacaagagggggagacacagaagcagacgatctacaccaccccacgaaggggggccccccaaaaaaaaccacaagaagaagtgtgtgccgcgtaagagaaggctcccaaaaagctactacagcatttcaacacttctgacgg

SEQ ID NO: 514940 - DNA, 713 bp, Homo sapiens
  misc_feature (182)..(182): n is a, c, g, or t
  misc_feature (196)..(196): n is a, c, g, or t
  misc_feature (202)..(202): n is a, c, g, or t
  misc_feature (205)..(205): n is a, c, g, or t
  misc_feature (207)..(207): n is a, c, g, or t
  misc_feature (211)..(211): n is a, c, g, or t
  misc_feature (217)..(217): n is a, c, g, or t
  misc_feature (228)..(228): n is a, c, g, or t
  misc_feature (275)..(275): n is a, c, g, or t
  misc_feature (618)..(618): n is a, c, g, or t
  misc_feature (707)..(707): n is a, c, g, or t
  misc_feature (711)..(711): n is a, c, g, or t
ttttttttgtatttttagtagaggtggggtttcaccatattggtcaggctggtctcgaactcctgacctcaggtgatccgcccacctcggcctcccaaagtgctgggattacaggcgtgaggcaccgtgcccggcctctattttcatattctattaaactattattggtcaggtacatgtgngttagatttattgnataatngantngtancacctntaaacatggtngaaaatgcttccaaatccaacatccttacatttcagagtactcttcncaatttaatattcttgatttgaccaagaatattaaatgggtttaggggttgccatctctacattatttttcagtctttaagtgtaatactctttatattcttaagattttagatttttaaagattatcttaatctttttaagatttaagattattggtaaaacttgaaatgtaagaaacacaatcaaaactgtgcactgtgtatttatacttaatataaatgtatcctacaacagaaacacaacacatttctccatgaagcatattgagatggaataaaaatggatagatctataactcgttagaacatcaacattcagactaatctcagaagcctttcttcntcaatatctccacataatttggatgtatactgacaaagaatgctgatagctttgagactgtggaggtacctcctctccgtggccgaatnctgnca

SEQ ID NO: 514941 - DNA, 338 bp, Homo sapiens
tgagggctcatagccgcatcagcgcaggccccgaccagggtagaccaaccggcccggcgtcattccagcggggggtgctgatgccctggggcgcagacttccccgatccgtgactgaattggcgtggaacgaggaatttggtgccctgaaaggcccacccggactcccgggcagatggagaccgtttgttaaggggcaatcatgttgcgggggccatgcgggtgttcaccacccccatgcacacgccatttgtgtaacttcagaatttgttatgtggctccatgtaacacacaatacatgcatgcactgtgaaaaaaaaaatgaatgtttaaaaagta

SEQ ID NO: 514942 - DNA, 428 bp, Homo sapiens
ctctatcatcggctgaaacgatggaaggtgtggaagagaagaacaaggaggctcctgctgggccagaaacgctttagaaaaagccaacgaattatccagagctgacaatcaagcgcctgagaaagaggttaggccaaatgatgctgtagaaggtacggaggaagcttatgtatcaagaagcaaagcactatcacaaggaataaaggcagacgtgcagaactgaaattagaatggcaaggatggcaaggctgaccacatatatggacctcgcaaacccatattggcgcttgtcatcagaatcagaagtatcaatggagtgagcccaaaggttcgaaaggtgttgcatatacttcgccttggtcaaatcttcaatggaacctttgggaaactcaacggcttccatcatgctgaggattgtagagccattc

SEQ ID NO: 514943 - DNA, 854 bp, Homo sapiens
  misc_feature (273)..(273): n is a, c, g, or t
gtccgtgatgtgaaaatcgactggaatgaagaatgcaagagccccaacgaagggtcggtgctctggccacatctctaagtgcccgaagttacgctcaggtagcgctcgcgcgatgagctcgacccagtccttccaccgactctcggtctgtgtgtatggcaacaatctccatgggcaacagtgaggtgaaccttcatggctggctagggaacctgggggtggagactctgggctccctgttccgtcactgaccatccatggacctaatcaggnactcgtggatgactacgtgggaggcgatcatacccgttttcgccaggaagcatagctgagaagacatcagtcaggctatccctggtgaaaggtcagtaacttcccgttacgtaacgacgcatgtggactggcacggaacggccacagcaccaagccaatcaagaccatcttcacgtacgagctcatcgtgagtccgagcaagcacacacgactgctgcactcaggtctccacgacgcgtttcatgtcccgcatgccacaatcgtgccgcaacttcgtcacgtcatatcaccgatcaccatgaggaacatcatgaggcagccacgcacgatcgacatgtcctttccagaatgacttgagcacataaccgtccgagcgtcccagtgtgccttccccgaacatcttgcaaagcccggtcgagcagcaagcaactgccgtggctccatggaaccggctcgccaaaacatggcttcaatgccctgatagtcggccgaaagaccatctgtgtcgcaaccatgtcccatcacagtcccttccttcgtcacagttcaaacgcacagcgcaggtacacaagagtcaggat

SEQ ID NO: 514944 - DNA, 993 bp, Homo sapiens
atgatcccaatatgtaaaagtaagcccggtaataaaattaacttgaagccgagctgcaattcattgcggagcctcgcacgcgatcccactccaacgatctgtccgcagtgagtgaatgcgtgttcgaggctcagatccattggcgcgcatgcggtgaatgcgcatccagagtcagccagcagagagtaatacgcatagtccatgtcactactcaccaggaggcgtcaaacgaggttctgcatcaaatcgcccacagtcactccgagacgtaaactatatgggctgaactcgatccgcgtaccttcgagcgccgaattggcagcgcgtcatatattctttatcgtgctctcttcgcttacacgatcgggcgaggtcctatagttacggatcagtttctcttactcatgaacactctgaaacgatctggcaattatcgctcctgctttgcaagctaatatgcaatcgagcctttgcatcaggctatgtcgctactccgatgcagggccagaatactcattcttgagggggaccacgagtagagttacaatacttactagtccgccgatcccgagtacacttgtggaccagaccataggttcaagtgaaatctgaaggaaggcgtactcagttatgacatggtccctaagcctgtcacacgtaattctaataccgttatcagcttgcagtcatggcgcacttcagtatagttggcaagccgcttagtcaggcatcgtaccaaggctccttatgtcgttgtgcacggaaaacgggggagtcaatgagagaacccacctaatgaaatacatccgttccccaatttcgcgaatttagaacgtcagcattttccagacaccttttaagttaacagcaaagtcatacaagtaacgtccccctcggggcgattaacttgtcgtctttccagtgtcattcatccgttaagtgaacactttgaagcactaaatgcctcaaccagaacactcctaagggacccaa

SEQ ID NO: 514945 - DNA, 675 bp, Homo sapiens
cctctgtacactgttgatggggatgtaaattagtacaaccactatggagaacagtctggaggtttctttaaaatcttgaaaatagagctaccatatgatccagcaatcctactgctgggtatatacccaaaggaaagaaaatcaggatattgaagagatatctgcactcctatgtttgttgcagcagtgttcacaatagccaagatttggaagcagcctaagtgtccgtcaacagatgaatggataaagaaaatgtggtacttatagacaaagcagtactattcagccacgaaaagaatgagatcctatcataatgacgtccagttccatccaacaacatggatgtcattacgttaagtgaaataagccaggcacagaaagacaaacattgcatgttctcagtcatttgtgggatataaaaatcaaaacaatagaactcgtggaactagaggatagaaggatggttacttacaggctggaaagtgtgggtggggagccatggggaggtgggaatggttaatgggggaaaaagtcggaaagaatgagtaagacctagtattgatagtacaacagtgggactatagtcagtaataattcattattcgtttaaagtactaaaagggtataatggggtgtagtaacataaagaataatgtctaagggatagatacccag

SEQ ID NO: 514946 - DNA, 251 bp, Homo sapiens
agtatgcttcgggattacaggcattagccattatagcctggctaaattttttctgtattttcagtacagactgtgttttaccatgttgcctaggcaggtctagaacttctgatctcaagtgatctgcctgcctcgagcctcccaaagtgttgggattataggcgtaagccaccatgcctcagccccaagtttggtaatattcatgtatcataccgagaagctgggagaagctgtggaggccgtggtaccga

SEQ ID NO: 514947 - DNA, 249 bp, Homo sapiens
agtcttgaaactaccatccgtatagagccggatctggacttgtgctgatttcccttcaaatgttaatatgcaactatgttggggtatgaaatacatcgctatggacagtattcttgaagaggatgttcgtgcgcaattactagtcgatgaaatgagcactatccagagcaatatgattacctacgcaactgcattcggtcagattaaagtcatgggtaaaatctcccataaacttaaaaagatgggact

SEQ ID NO: 514948 - DNA, 179 bp, Homo sapiens
  misc_feature (166)..(166): n is a, c, g, or t
gacagacaaggggactgagctgagccctgagtccctgaacctcccagctcagcccccacagcaggactgaactcaaagtcagagggtggagactccagaaccacccacacacggttggggacagacaggaaacagaaataccgtctgactgtcgtgcaggggatgncggccgcaagctc

SEQ ID NO: 514949 - DNA, 216 bp, Homo sapiens
tgtccatgtatctggatcgcagaatgaacgggagtgtgtatcagcaggaaggctttagattagatacaatgaagattatccattacaaaaattttatattcgactagccggtacagtgattcggaaaaaggagacttctgggctcagttttcactatatgtccaaggtcagtgggggataaatgcgattgtgattcactggtagggttttagaact

SEQ ID NO: 514950 - DNA, 139 bp, Homo sapiens
cgtggagtattagctcggaaaatccaaaaggtgacaacttggttggaccttttaaagctgaagagagttgtcactagctttttcctgtcgttgaaaatacagagctggctgtcttccatcgatgaaacagacaatacaa

SEQ ID NO: 514951 - DNA, 646 bp, Homo sapiens
ggttcctcaagtgattaactggataaacttgatacatgacgcaaattgttccctaacccaccctgaggcacagttaaagggaacactggtaggaggcacacgaggggctgaaagccttcctgggccctttcttcatagtcccggttcctgggaagccactggtttttttgggtgacaccagatggacccatattcccatgcaccttgatcatgaccgggacatggactgggtttccaaccccgctcccaggccacaagccaatgtccaccagtctgccttcaatgactggttcaagtggacacctccaacttcccagattgagcaccatctttttcccacgatgcctcgacaccattacccccaagtggctcccctggtgcagtccttgtgtgcccagcatggcatagagtacccagtcccagcccctgctgtcagccttcgccgacatcatccactccactaaaggagtcagggcagctctggctagatgcctatcttcacccataccacagccaaccctgccccgtttggaagaagaggaggaagacttttggagcccaagcagaggggagcttgagggaccatgcccctatagtttaatactcagagggggttgggtttggggacataaagcctctgactcca

SEQ ID NO: 514952 - DNA, 222 bp, Homo sapiens
aaaatatgaaacgagagagctgaacagtgagacgtggacgatagacaacacctgaggcgtgacagactacgatgataaccatctgcgagccagcaagagttggcgatgcagacgctgttaacagagagagtatataccatgcaaagtgtgtgagtagatagcatcgtgtaactgctgtgacctaacactgcaatagcgtacgagcgaagcatgcgactgtcg

SEQ ID NO: 514953 - DNA, 938 bp, Homo sapiens
cttgggcagatttgctgcccaccacacggggccgccagattccggccgacacaagctggggggggtgcacccaccaacaaaaggcaccaatggggtggcatatacccagggaccgcactgtgggaaaaacgttcgacgaaatcaccgagctaccagatcggggggagccaccaacaatcctgatctatctgggaggggggggaatgtaacacgtcgctccctaagttgcagcgcacaagggatctccgcccgccccggaatcctcccctcgccggtatgtcgggcgacaccaagaaaactcgcctgctgtggttcgccaaccgtgctctgcacaccagacgggctgatccaaaatctcacgccgggttccgcaggccaacatgttgggccaacagcgaggacgcacgcacaccgctggggcgaccacaaaggacccgccaattacttgaccggcggggggggaaaccaaaccacggagtggtctgggtcccgagatatccccacacggagggtatccacgggggcctcggcgagagagtgccctccttgcgcgagccacccggcgcggagggtggtgcgacgcaccccctcccccggcggagaggattatccgccacccaacaacattcgtcgtcggggcgatcccccgagggggggcacaaggagtttcccccccacggcgagatctcgtgtggccccccatggtgccaccacagcgaagcaggtcacccacaaaacagttattcccggggcaaagttgttgatgccccccaggaagaacaaggccccgcgaggtggtaacaccccacgggcgaatcaaaatacatcggcatgcgaataaaggacacaccccacttgaagctgccccccacggaagaaccccccggggccctcgcccctttttaacccaaaaaagcgccccggtcttccaaaaataa

SEQ ID NO: 514954 - DNA, 354 bp, Homo sapiens
tgggcggatggcttgagtccaggagtttgagaccaacctgggcagcatggcaagaccctgtctccacaaaaaatacacacacaaggccgggcacagtggctcacacctgtaatcccagtagtttgggaggctgaggcagttggatcacctgagcccaggagacagaggttgcagtgagccaagattgcaccactgcactccagcctgggcgacagagtgagaccctgcctcaaaaactaaaaataaaaaatgaacagtgtccaacaccttgaaagcgttccgcatgactgaacgatcactgttacgtgattaccaacatgacgaccccacttctcttggccttgccatatgcaa

SEQ ID NO: 514955 - DNA, 336 bp, Homo sapiens
tggagaggatccccccaatcgtgctcacaaatgacagtgaatttaatcaataaatgttgtgtgtgttctaactgttcccctgactggctattcccctgtctatctctctctcctctttggattttcctattacctgagacacaacaatactgaaattaggccaattaataaccctacaatggcccataagcattcaagtaaaaggaaatatcacatgtctctcattttaaatcaaaagctaaaaatgactaagctctgtgcggaggcatgttgaaaaccaagataggacaaaagctagacctcttgcattagttagccaagttgtgagagcgttgg

SEQ ID NO: 514956 - DNA, 885 bp, Homo sapiens
  misc_feature (62)..(62): n is a, c, g, or t
  misc_feature (154)..(154): n is a, c, g, or t
  misc_feature (160)..(160): n is a, c, g, or t
  misc_feature (165)..(165): n is a, c, g, or t
  misc_feature (177)..(177): n is a, c, g, or t
  misc_feature (192)..(192): n is a, c, g, or t
  misc_feature (207)..(207): n is a, c, g, or t
  misc_feature (219)..(219): n is a, c, g, or t
  misc_feature (228)..(228): n is a, c, g, or t
  misc_feature (235)..(235): n is a, c, g, or t
  misc_feature (239)..(239): n is a, c, g, or t
  misc_feature (310)..(310): n is a, c, g, or t
  misc_feature (314)..(314): n is a, c, g, or t
  misc_feature (319)..(319): n is a, c, g, or t
  misc_feature (347)..(347): n is a, c, g, or t
  misc_feature (354)..(354): n is a, c, g, or t
  misc_feature (372)..(372): n is a, c, g, or t
  misc_feature (378)..(378): n is a, c, g, or t
  misc_feature (450)..(450): n is a, c, g, or t
  misc_feature (469)..(469): n is a, c, g, or t
  misc_feature (471)..(471): n is a, c, g, or t
  misc_feature (474)..(474): n is a, c, g, or t
  misc_feature (480)..(480): n is a, c, g, or t
  misc_feature (523)..(523): n is a, c, g, or t
  misc_feature (525)..(525): n is a, c, g, or t
  misc_feature (527)..(527): n is a, c, g, or t
  misc_feature (543)..(543): n is a, c, g, or t
  misc_feature (549)..(549): n is a, c, g, or t
  misc_feature (660)..(660): n is a, c, g, or t
  misc_feature (707)..(707): n is a, c, g, or t
agcttccaaaaaattaaaaaaatgaaaaatatattattgctaatattgtgtgtttttctagntaagtcccaaggtgtcaagaaaatgaggagggtttcttcagtgcacgtggtcatcgaacccttgaggaagaagagagaagaggctcccaggntgaggnctgcnccaacgcccatnagtggaggtggctancgggctcgtccagcnaaagaagctgcnaatcaaaanaaagtanaaanaaaagcccctgatgctggaggctgtcttcacgctgaaccagacctgggggtgttgtgtcctaaaggatgtnagtngcaanaggctttgctaaaaaaggaaaggcaaanaagaaanagtgttgatgagttaaanaaaaangtggaagatgtttcccagaaatcctcttcttcctttcagtaaatgtatttgctgaaagaactgtggaaaaanaggaagaagaaagtaaaananaangaaaangtagtaaatgagtaatcctcagaaatggaaaagaacaaattanananagatgagaatgtgaanagaaanatcccaaataaacttcgtgtgcttcgttcaatcctggaaaacctgagaagcaaaatacaaaagttagaatctgatgtctcagctcaaatggaatattgtcgcaccccatgnactgtcagttgcaatattcctgtggtgtctggcaaagaatgtgaggnaattatcaggaaaggaggtgaaacatctgaaatgtatctcattcaacctgacagttctgtcaaaccgtatagagtatactgtgacatgaatacagaaaatggaggatggacagtgattcagaaccgtcaagacggtagtgttgactttggcaggaaatgggatccatataaacaggga

SEQ ID NO: 514957 - DNA, 210 bp, Homo sapiens
aacgggggcaggacccagcctgcctagttccctgttgtttgttcccctgctggggccattggtgccatttcctcccctggttgaaggcctccccccatgccctttgcccctcccatagggctctgtaaatattatcaggaggaaaaggcctctcagaggggggggtgctggggccaagggatttccccccataaaagctggttttttcca

SEQ ID NO: 514958 - DNA, 150 bp, Homo sapiens
atatcacggctgtgtgactgcgttttgattcctcactacggcctgcagtattgtggcatctatcactgtatctgtgtatgtctgcagcttgagcgccaccgctgctgtcgtacacttgttgtgtgcgatcgcactccccgtggatgctct

SEQ ID NO: 514959 - DNA, 432 bp, Homo sapiens
  misc_feature (363)..(363): n is a, c, g, or t
atatggttgttgtgagggatatacttctcccccacatatgaagcttagttgggctggatatgagattctgggttgaaaattcttttctttagagagtgttgaatattggcccccactctcttctggcttgtgtggtttctgccaagagatccactgttagtctgatgggcttccctttgtgggtaaccggacctttctctctgactgcccttaacattttttctttcatttcaaccttggtgaagtctgacaattatgtgtcttggagttgctcttctcgaggagtgtctttgtggtgttctctgtatttcctgaatttgaatgttggcctgccttgctaggttagggaacttctcctagatnatatcctgaagagtgttttctaacttagttccattctccccgtcactttccagtacaacctgccggtgg

SEQ ID NO: 514960 - DNA, 146 bp, Homo sapiens
agactcctccgcaggatcccaagaagagcagcagtgcaaggggcaggtgtcaacgagagcctgatcgccacactccagcactcgttgcagttgagcctcccaggcaaaagtggcagctcgccctcccaggttgccctgcccttcac

SEQ ID NO: 514961 - DNA, 387 bp, Homo sapiens
atctagttatagcatggagagtagagtatagagggtgggaccatgtagagtcaggttggtctcgaactccggagctcaggtgatctggcgcgcctcggcctcccaaagtgctgggattataggtgttaaccactgcgcccggccagtgctcacttctgaatacaatgcttatcaacctgtttaaattcatgcccctctggttaaatgctgaaaattctgccccatatattaaacactacatctttcacaggctttccagaccatccacgtagatcttaagtttaattcttctttatacatattatccatttttaacgtttcccaaatctgacagcatatcgcctatgcttccgaaaagtgcagtaggctttccacgagatttgggtc

SEQ ID NO: 514962 - DNA, 991 bp, Homo sapiens
cggcgtgctctgggcgctgttgtttggtctttatgcctgcgtgaggggcgttatctggagggcctgcgggtgcaggccgcagtgacacgggccgcttcgcccctgtctagtgctgcctgtctcccgcgtgccgtctgtgttcgcggccttgcatagcccaatcattggcggcagcgatggatgtcggacgttatccttgagtcctatgaaaccctgcggagtggtctaacgcactggcgatggatggcggctagacgcctggcgacgtgtgacgatgtgactaaaccagcttggacgactgaccggcctgtgattattttgcgtatcgccaccgccggaggaccctggacgcgcccgtactggacggcgactgtctccgtacttaggcaactgagtgaagcctgccgagcgtcgcgagtagcgtggatccgcgaaagccaggcacggctgcatcgctagtctcagtcatacccttttccaattgtgcccttggtgcagaatccaccgatctttccttcgagagtgcccgagatgacagtgaaggacatcgcaggtaccactaacccaatacacctgccgtccgatatatacgcttgtggtcccaactcgtgggcaagataccccgcgtgcgcccccggagtcagtcgcaccttcaccagtcaggggtggatcggctggggcgcctttccgtgcggctgtgagaaagggggggaataggtttcggtgcgacagccggcggacagagctgaaaacttccactggctcaggggcctccgaggacctgtgggtccccctttaccttaataacgtggagggggacattggaccactgggttgcccgtgttgccccctttgacagcaaccggtggtgtccccggagagcaactttgacctttgtcccccccggagggatccgcgattcatttggttggatttttgtcccccccggagatgttgggcgcttaggttaggcgggtgggctaggccaatg

SEQ ID NO: 514963 - DNA, 230 bp, Homo sapiens
tacccctcaaattggcctcgacctaccggaccacaaccaaaacccatcacccaagtgacgttttaccagaacggcatcggcactggctacggtggttggtaccaacagtacatcggcaagtacgtttctggtgctacgggcgaaggccttgcatttaatattcgtgaggcgtacaacttcatctgcagcaactatcacagggacgacgaggtcattctgctagggtttaa

SEQ ID NO: 514964 - DNA, 227 bp, Homo sapiens
agatagttatctgatatccagtagagacgggattcacgatgttgcccaagctggtctcgagtcctgagctcaagcaatccacctgcctcggcctcccaaaatgctgggattccaggcgtgagccaccatgcccggccattgtggtgcacgtctgtcatcccagcaaggcaggcgaatcgcttgaacccgggaagcggaggttgcggtgagccaggatcgtgccattg

SEQ ID NO: 514965 - DNA, 165 bp, Homo sapiens
atgggggttaggtaagtcaaagcagtcgggttaccggggggtcggtccaccttctgggatgctcagattctccagggggatgatccctcggggctctttgtcggtggtgtactcaaagtagtagaggcagtggtcggccattcaacttagggggtacggagctcg

SEQ ID NO: 514966 - DNA, 178 bp, Homo sapiens
  misc_feature (60)..(60): n is a, c, g, or t
  misc_feature (62)..(62): n is a, c, g, or t
  misc_feature (153)..(153): n is a, c, g, or t
ccctttctccccctctctctctcccttaggtctgtctccaccgcaggcccaaggtgaaantnctccccttgccggagcagtctggcagggcctttcgtggctggaagtggccagtttggttccggtgctgacccctaggccccagcgcaggcncttcccgtgctgtctgtcttcccct

SEQ ID NO: 514967 - DNA, 244 bp, Homo sapiens
tgtcatggctctagcggattcctgtcgttcctggaggcgctcgatggtctctggtggatcctggtcctcatgctctatacagtgtctaggtgttgcctatcgtgtcctcagaggcgtgctgatccccttcctcagtgacatcgaagcctggcctaattgtacctataggggatagagggtaggcatagaggaggtacccactatgcaaatactttctagagagagaacctcaggtacggagaaa

SEQ ID NO: 514968 - DNA, 105 bp, Homo sapiens
gacaagagacacatttgttgttggcttctgaagtggtcagtgccatggctgacacctccaggtcctgcctggcctgggacaccactgtggacatgcccaatgcag

SEQ ID NO: 514969 - DNA, 445 bp, Homo sapiens
gatccgcgccgccgccgccgccgcctgcctgccgccgccgcctccgccgcggaggaagacagctgccgcccagcgcaccgccagctgacacccctgcctgcagagtcccacctgccacacggcctcgggccagcggccaggatgctgccatcccgcatgccacacacaacaaacacaaaacaatcacagaaccacaacacccccaaacgaaacacaaacacaaccaccaacacaaaaacgagacacacacaacatgtcagctcaacctacacccacaaacacaaaccaccacaccagcgcccactctaccgcacctactcgatctatattgtcttcactctcacctcactccacttattctctctctcaaggtaaacattactacattctcaacaaccacatattccttcctcactctccccctccacattccctcctaccttat

SEQ ID NO: 514970 - DNA, 349 bp, Homo sapiens
tttataagcgtcttgtaaatgcaagtgatcacagcatgacaatgacatgtgctgcatattatacaatgtctgagactgcataatgtacaagtcacacttatgctgtttataacaggaggagaaagggacctcctttactattctcatcatcctaaaatctcacttctaatcagcttatcatctgttgcctgtacagctcagtgaaatgtactttcatcttataaaagttcagatatatgccagtgcctatttttgctgtaaaggagaaagtaaaaactccacagcgggaatctttaactttgcttttgaaaccaccattgaatcactatcgtatagcagacttagcaca

SEQ ID NO: 514971 - DNA, 227 bp, Homo sapiens
cgagatagcgttctagaggatacccgtctggatgcaatgtgtcacttcgagagcgaaatattaaacaagggagccgtaccccgctctatccccaatctagcggaggtaagaagaaaggcaaaatgaagaacgctcggccaagcaatggacagaagacctaatcgtggagactgcaaggagatggatctagaaccttagaggctagaagcacgtggctggcacatggc

SEQ ID NO: 514972 - DNA, 811 bp, Homo sapiens
acttggtgttgggactgctgatatagaagatgtcttcacgaacatgctaagatattggcgtaccctgcccccaacttcaaaagccacagctgttagtgccagatggtcgaagtattaacaggatatcacgcctgtcatgactactgaaggaaaatatgtgggtgtgcttcttttaccctcttgacttcacctataggtagtaggccccatcgtgagatcattagcatttcagtgactagggcgagataggaatttgaagaatagctcaacgtgcctaagatgattggtgcattctggtggattctcacttctgtcatctagcatggtgtcaatagacctgatagaaatcaaggagagactggggacaccatgaggcatgccattagttcatctcgacacctgaatcgcgccatttgctccaggattatagcgggtcttacaaggcttggattgataggtccatctcgttccagaggggcctacttatatctattagatcatgaagggtcatatcgtgtcgagcagatcaacatgtatgatgacctcccatgaaggtcgttctgtggatgcagacttagagtactagatatcagcgccttcgccatggtatcatctggacgaatacaatggtggaacgtggtgccctagactggttggaaagcctggcagtgataccatccacgcctgtatgtgcaaaagagccaagaatatttctccaagccgaaatgagcgctgtgctgttttaggtgccagggctgtggtgggcagccatgagaacaaaacctctactggattcctggccgttcaagta

SEQ ID NO: 514973 - DNA, 458 bp, Homo sapiens
gtacgattacgctctagaacgggatgaatgtgggtgaagcattgccagtcctccccgtgggagtgttcctctgaggggatgtgtagggatggagggagagtggagggccccttgggaggaagtaacagagcatataggacagtttgaggttagtgtctcttagtgaggtgaatagatggggggaggagaaatagggtgaaggagtaggtatgggggcgcacactgatatggaaggatgggtgaagagatgtcagaatttcttgggtctgctcttaggggaggacgagcttttgattttggactatccagtccccttgaaaggaggctccttgctgtatagcaaagcttactcggtgggagagtcctggggtaggatcgctgggataacaggacggagaggggcagaggcagaagaaagggaggcttcttttgctgcctcatcggcctttctgttgcct

SEQ ID NO: 514974 - DNA, 850 bp, Homo sapiens
tatagtaaatagctcttgttaccggaaataactgttcatttgttcactcctccctcctaggtcacacttttcagaaaaagaatctgcatcctggaaaccagaagaaaaatatgagacggggaatcatcgtgtgatgtgtgtgctgactttggtgactgtgtggagtcctgctcaggtgttaggtacacgtgtgtttagatcgtggtgtgcttgatggggaacccgcatgttcagtagttctgtgactgcggctggactctagagaagctgaccttggctgctcgtagcgccgggccttctctccatcgtactatcgatctcagtagcagctcagttaggtccgggagcgcagaagatgccccactcccagcctgtgatccatcacatcccgtgtcccaggcgtctacggggcccaggataggcagtcttggttctgcgtgatgtggactgcctggtgacccttgggggctaggagagccatccagagcacactctccggtacctggtgctccacctagcctccctgtagctgggactgctgtttaacggggtctgacgctggctgaggagctgcgccacatccactaccaggtaaccggggcagttacttgcgaaggacttgtgcagggactgcctggagtgccccctccggacgaggggccctgttgctgatgtcacatctatatgctactactccctcacaaaatgcaggcggaccgccttacttggatgctagcatacggacctagaggaatgaaatcctctggattaagggctgcacagtgagatctatgatgttaagcagggacaaactggcagaagaaggaaaaacgaaagaaggacgaaacca

SEQ ID NO: 514975 - DNA, 740 bp, Homo sapiens
  misc_feature (176)..(176): n is a, c, g, or t
ccatctttggggctaaacaaagtttgtctacacattcatttcccaaaaagggatcgcaaaaaatttctccccccccgggtaaatcaaacaaaaacaccgtgcacccacccaggtccccccacctgaaaaaaatcccctcacctaaaaatccccggaatgctctttcttgttatggnacaaaatagttccaaaccacagcccctattcttgtgacattttacttgccagaaatatttgtttcctttataacccccataccttaatggttgtttaaaggcacctatacccctgtactatcttgtggggcattcaaccccaaatccgaggggttcgtaaaatgagtttttagtaccaaggttcttaaacttctggcggcgttgtatttctccgcatgattaaaatcaaaatactcggaaaactaacgcccctgcttgaacccctcgtaaacatggaacaaaaatgctccaggggctcaccccaggcccccaccttcgagacagttaaaggtataacctctccggggaaagtacatctgttttcccccctcaagatatgtggacttaggtaaatagttttttccagtacgtccatcccgccaggtcagcctattaaaaatacattctccaagaaaaaagatgctgttaatctttatggggcagtcagattttcttccaaaatcttccttcctctcagaatcggtggttatgaagaggcaatcaatacggaattccttagccgga

SEQ ID NO: 514976 - DNA, 86 bp, Homo sapiens
ttaaacgagtctgacctgcactgtagatcgctccaacctgactgctgtcaccttcacgttccagtttttaaatcctgagtcaagcc

SEQ ID NO: 514977 - DNA, 718 bp, Homo sapiens
  misc_feature (12)..(12): n is a, c, g, or t
gcggcgtcaggncgaccagccgcgggccgcaagggcatggaccttcaggccgccggggccaggcgcagggggccgcggagccgtcatcggggcccgccgctgcctagcgcgcggggggcgccctcccagcccggaggctggctttgctacatgctgaccactccggtcaggagagagagactgagaaggctatggatcgatatagcccgtggaacacagagcattcctaagtgacagtcccgtgcccggggtgagggaacccattctgaagaggaaggctttgtcatggatgcacggagcgcatctctgaatggtaggaactgaatatcctgggtagtctgtcagcaagggatcaatactgtccacctccaacggtaatcagcctgtgcgactcttttcacactgaggaactgtggacctcggagtttgaaagcataatcaagggaactaccataatgatgcttgacgacatccaggagaagccatttgctcaggagcttaaagccttggggtgtgctgtgcccgcgagcgaaggcatgacatgatctatgaaccccagactggcgaaccatccgactgccactgtataccctattattccaggatggtcgttctgcacaagcaggacagttatgacgatgctggaagattgagtgtggagctttactggcttgtaggtgggtgggcctccacgtcgggatctctttccctgtcttgg

SEQ ID NO: 514978 - DNA, 111 bp, Homo sapiens
aatcgggcaaataaacgctaattccgaattagcggggaatttctggaagttaaaaatggggttggggatactgaagaattggcttaaattctaattaaaaattaatatttt

SEQ ID NO: 514979 - DNA, 723 bp, Homo sapiens
  misc_feature (174)..(174): n is a, c, g, or t
taaattgtttaacactgacatcttttaatgttactcttttcagattatttcaacaagcaaagtaagtgtcagcagtttttactataattgccaaatggtattaggaatattacctttcctcccttgcttacaacaaaaacaaatacaaaaattaaagttataggtaaagatatnttatcaaaggggatttttttttagacaagagtctcgctcttgtcaccaaggctggagtgcagtggcgcaatctcagctcactgcaacctccacctccggagttcaagcgattctcctgcctcagcctcctgagtagctgggattacaggctcccaccaccatgcctgtaatcccagctaattttttgtatttttactagagacagggtttcgcctgggtgacagagcgagacaccatctcaaagagtagtggctatcaacctacactgtacaggagcccttgggaattacttttttaaaaaagacactgtggtggaccctcatgcccctcatcaagaacagaactgggtactttcccagatgaggcccatgtgcagcgtgattaccttggacccattcggcttgaagttgggaggaaagaatccatttgtggtcccgcgagtttttgattaatttccggattagccattcctggcaagagacttaggggacctgctggcgtccaaatgtttcttctctgcaatgggcgattccgtccctcagactttgg

SEQ ID NO: 514980 - DNA, 394 bp, Homo sapiens
gaaatccccctgaatcctggaggccggaggttgcagtgagccgagattatgccattgcactccagcctgggcaacaggagcgaaactccgttgcaaaaaaaaaaaaaaaaaaaaaaattataatcacaactttttgcaatggagtgacttatatctgcagcttatatctgcagtgtttgtgttaggaacctagcttttataatgtgttaactttttaactcagtattctggctttgggattttttgttttgtttttggaaacatttcagaagtggaatgtagcctgttaaaggtgtgcacaaaaatattttgcatgtgttttttttttttgcctgtgtgaattctactttttagcaaaaataaagccccccaaaggatgtgcaaaaaaaaaaaa

SEQ ID NO: 514981 - DNA, 451 bp, Homo sapiens
  misc_feature (185)..(185): n is a, c, g, or t
  misc_feature (369)..(369): n is a, c, g, or t
atatcatgatcaagtagaattattccaggaaatttaaaggtgagttaacatcaggaaatcagctgggtgcagtggcttatgcccgtaaatcccagccactcaagaggctgaagtgcgaggatcacttgaggccaggagtttgataccagcctggataacatagtaagaccccaccactaaaagtntattattacctcagttcatacagaaaaagcagttgatagagatcactacttagttatgataaaagtttttgtcaaactaagaatataagaaaagtttctgagcttgataaaggttaaatctagaataaccatataattaatcttccaaattttcacacttcagttcaggattaataatgcatanggtaatgtcagctagaacaagaataagatagggttgttttgagcaaattagcatgagaaaggagggagggagggagagatgg

SEQ ID NO: 514982 - DNA, 333 bp, Homo sapiens
cgggctcccttgcccatttaagaattcctactgcacagccctgcacttcagctgtgtgtaatgaaaagggttgggatgagtcagggagagctagagagggggcagtttctaaagttgtcttcaaggaacagaaaggggagtggggaaaggatttaggatctatggggtcaactaggtttccttttgtgagtttatataatggttttgttaggatggcaaaaccaggtgtctaaaggtgaaagtatccaaccatgcccaggaaggaaggggttgttttgtagaagggttggggtttgagagattagtttggaccttggccgggagccccggggt

SEQ ID NO: 514983 - DNA, 150 bp, Homo sapiens
ctagccaacattgtgactactgtactcatcactgtcagtactgttgtggcatgctggagttccatagttcagctgatctcctgtttgagtgtgcttgctctaatacctcttacctgcctgctatgtgggggcgagagcctgtgtcagggg

SEQ ID NO: 514984 - DNA, 302 bp, Homo sapiens
caggactctccatagaatgaataggataacattgaagtcctagaaatcagccaaagtttgcatttgatgcggattgtgtcggcggatgtgccctacagcttccgctattggtgtctttagcagacctccatcctgagtggtgagatgttccgacgaactggtccgagattctgctcctagaggttatacccatattttgaacatcactcattggggtgtttgtaactcttcagatggaaataagggtaaacatttcagtaaacatgccaatcatagtcatctggtcccttctgtcgtcttct

SEQ ID NO: 514985 - DNA, 443 bp, Homo sapiens
gacgattagatgtagtgagcattaaggatatatggaaagtggtttgaagtaaaatgtatacagtataagagtcagaatcagccaggcgcggtggctcatgtaatcccagcacttcgggaggccgaggtgggcggatcacctgaagtcaggagttcgagatggcctggcaaaatggtgaaaccccatctctggtgaaaatacaaaaaaaaagccaggtgcggtggctcacgtctgtaatctcagcactttgggatgctggggcaggataatcgcttaaacctggaaggcagaggttgcagtgagctgagatcacgccactgcacaccaatctggggtacagtgaggctctgtctcaaaaaaaaatacaaaaaaagtagccagacatagtggcatctacttgtagtccagggtactcaggaggctgaggcaggagaatcacttga

SEQ ID NO: 514986 - DNA, 301 bp, Homo sapiens
cgcgtcatttcagtacagtgtattaatctagccgcagagcttatgcggagacgaatgtattcatgtaacttatactaaacattagtccttctatagggtgatagatgggcccaatggggtgtgaggagttcagtaatatgtaggggatatataaggtagtgggtgtagagcttgaacgctttctataatggggggctgcttataggcctactatgggtgtaaaattttttcactctctctacaaggttattacctagtgtccaaagagctgtccctcttgggactaacagttaacatttac

SEQ ID NO: 514987 - DNA, 156 bp, Homo sapiens
aagacgaggccagaaacaatgagacctgggctgagaataagagatagaaaaatggaatctaatgacacagaggggatggtgggcagaggcctcgaagagccagaaacgggtccctgcagttcgacatgcctaggcaggggcggtactggccgcact

SEQ ID NO: 514988 - DNA, 359 bp, Homo sapiens
  misc_feature (323)..(323): n is a, c, g, or t
  misc_feature (341)..(341): n is a, c, g, or t
aatagttccgggctcggtgtaaagtgagaattattgggcatgcagtcatggttctttcccaggtagtggggttttttttggtcggggctttatggagttttcggctttattcattcacatactggatattcagccaaaaagcttatgtgacccctattagtatttcgggagcttttctccagcgggattcttggtctcgggtactcggctttccaaattcggattaccacagcctagcaaacaccgattccatggtcctctactcagcaagatggccacacctggcgggggatgccctttctatactacactcggggaacggnctccaggtaggaaatggngggatcactggagccggg

SEQ ID NO: 514989 - DNA, 231 bp, Homo sapiens
cttatgaattaaaaaaaataaggagccatcaaaaaaaaagtccctggcagtggaggaggacatgatgttaggagccctgtttgcggaaggaatgttatcccaggtcatggatgccatttttgtcaatgattcgaacactgaaagttggcagattcaggatgaagcgtttctggggcccctcccaagaaatttcccttaaggggttccccttggccctcctccggtgaagaa

SEQ ID NO: 514990 - DNA, 328 bp, Homo sapiens
tcttctcctgacaggaatacaaaatgaaataccacgtgatctcacctatagtgggagctaaacactgggtactcatggacataaagatggaaagaataaacaccgggactactagaggggagaaggaggaaggcaaggtttgacaaactattgggtactatgctcatgtattaatctgttctcacactgctatatagaactacctgaggctgggtaatttataaagaaaagaggtttaactgactcacagttccacaggctgtacaggaaacatggctgggaggcttcaggaaacttataatcatggcagaaggtgtcaggagagaag

SEQ ID NO: 514991 - DNA, 102 bp, Homo sapiens
ttcgctgctcttcttgtaatggtgcgtcaggttctcctcagcctcgctgtcgcctgcctcttcatgtggaatggtggcatccgggaaccccccccgatgagg

SEQ ID NO: 514992 - DNA, 1137 bp, Homo sapiens
taaaacaaacgggtgctttatttcatcatcagaaaccgggggcatagtttaaaaaacaaacagaagccctggacagcctgggatgtggctggcagctcggagtcactggaaggatgtaagtaatgtctgggaggagctggcctgagcttcctggcttaggggccggcccccaccacaacagggatctatcccgtggactgtggcgggagggggtggggcgttcaggcgcagtgtgggacagggcgccctaaccataaggacctcccaacctctgtgcccgtgggtgccacaccaagcctgtgaggcaccaaggtgggcctacaagcttactctcagcgccctttgaacgcgtgctcttgggcgccggggggtaacttccacagcctctactggcacgagagggaacagaagggggacgcaaaaacaaacgccccgagacccaacggtgtggagagaaacgcagggccctgtgtggcccccggggcacacagccccaccgtaccacccgtgacacgcgggcccaacccaggggggggcccccccgacgaggccctcgtgggccagcgacgcaacacaaaagtgggctgtcgccgcccagcgcgatcacacccaaaatgtacccgggtgacccccctctctgtggcccccgtggacgagcacccccacaataaccccaaagggggaaccccaccggcgaagcgccacacgcggcacgcgcgcacacccaaccaaccgcgctgcgcggcgccaacaaacccgcagcctcgcgcacgccaacaccagcccccccccaagagccccacaacacaatcacggagcccacacaacaacaccgtatccccccacgcccccgcactccacgcgcaccgagacagtgccgcgggaccaccacaccacacccaagcacagggggccccacgatttcaacgcgcgcaacgaccaacctcttcaccccccgaccaacccggcggtcgcaactccccgaaccgggacgacacttaagagcacccccgtgcgacactggcacgcgcccccccctgccgcgtaaaggccccgtaacctgcaccgcgaaaaacaccttcctctacccacccgtgccgtgacaacgcacctcaacctcacccctcgacaaccccg

SEQ ID NO: 514993 - DNA, 141 bp, Homo sapiens
  misc_feature (1)..(1): n is a, c, g, or t
ntctagagttgtttagagttgtacgctagagttgttttaaggggtattttgttaatgttgaaaagtgcagaggcgttttgtctaaatcactgacgctcatgcacaagatttgccccctacttaatcttgatccagaattat

SEQ ID NO: 514994 - DNA, 307 bp, Homo sapiens
agcctctgcaggggccggcctcgatacaggcgcttccaccgtgccctttccctgcgaccattgcctaactacactaggaaaaactcagccactgctctttccagtctcaaaaaggcaaacggaaaacaacttggtattgtgtttcaaaaaggattaagttgatgaacagataaaaaatggggaaacaattcgttccggtgactctttgttttgccatagtttgggtttgagagatttgtcccgtatcagctggggaaaccagataccacttcagcgaagggtttctgcgtttaataattctcttttt

SEQ ID NO: 514995 - DNA, 639 bp, Homo sapiens
gcccgccccgtgtaccccgttatcgtttgtcgccccttccatgtcgcgatggaagtccctttttcttatcccgggcgggtgtttcggggcccctccccgtggcagcgacacgtcaatgggccccgcgcaggtgcgcgctgggcctcctaggtaatcactccggctgtacgtcgggacccgattttgtacagtcgtcacaccgttcccccctgttttcgtaaggctccagggccacttggagctcctcgtggacgtgttgacccccttagcgggggaagggtttcccctggcgtcgcgccccccctattgttaaaaatgcgtaagtgccaccgagaagggctgtgtgagttaactaggactggctcccccccacaaggggggttttcaacacggaagctcatatttctcccggagcttcttacaccaagacctacttattagcccagacacacgacgccggggggttagtccacgagcgccaagacttctgaaaactgttgcgagcacaaacaccaccaatgtttcaatgccccgtctgttgtcttcaagaaatagttgtcccccgctaatttttgataaaaggggccgctttttcccgattggctcccccttcaccccctattggggcccaaaaaaaaa

SEQ ID NO: 514996 - DNA, 1034 bp, Homo sapiens
tggcacgaggatggaaccaggggttagggactgcctgtaatagcactgggatttcgcctcccagccaaaatgctccaggtaggcagcaaagaagaaagagtgcgatatgagggtacagtgagttggcagtccaaattctgttctctgcagcctgtttttgagtagttgtgaataaagtcacccgcctacttgtctaagcacatgtgggtgtgtaactcagttcctggttctcggttctaaaaacagacttccaactgggaaacttttgggggaaattaactggacacctatctcggaggtttattttcttgcaaccagtgaagtcgtcctcctcccttccctggataactcttcagtttgactgtcactgttctggtgtcaactccagcgtcggcacaggcagaaggacttcagctggtggtctcattgggtccacatggcactatggtaatgtgggggtgcgcagagagagctcacagtgctccaatgatggatgcatccgaggacagactgggacggactccgggaaagaggctttctggggaagaagggacccaaggaggtacttcctcctcaattgatgccctcagggctgcatgtgtgggtgtgtacaagctgataaggtcagtttgggcggaaactaactgctagtcttgtgtcagggctgcagcctctttgtttcacttttgccccttcttgggagcatttgaccaaaataatcctcagttcatctgtgtacagtcccttggtaccccgcccaggtgggagggtgaatagggaattcaccgaagcactgggggagcaaggcaggacatgtgttaatgacgaatagggggccggggctggcaaaggaccagacacaccaggaattagggggacccctggaggacacagcacactcgaggaacaaagaaggcaaacgcagagaagagaacacaagcgacagggagaggagaaggaaacaaccaacgggcgacagagaaagacaaacaaaggagggagagcagaaaagagaggagaaaaaacacaggagg

SEQ ID NO: 514997 - DNA, 849 bp, Homo sapiens
tgaagttctaatgaactgtttctcccaaggttttaaatattgtcaagagttattctgtttgtttaaggaaaataagaaacctctttaatgcaatagcattttgcttgggttgttcttgtctatttagagaaagacgatacattacgtgtgacatggcaaggtccactgcttacacacagttcttcaaattcctctccgagatagacaccgagtgtgaaggaattctacaatcttggctgctcacggatcaataactagctgtaatttaggtagaagatcaagtgcatgtcgtaaagcttgaccaacgaaagagaaccctcagcagtagatatcaaaaactttgctcaggacatttgtaggtcaagattgaagacggaaaccggaaaccgttgtcttgtaagcccctagaggcagaatcatggtacatgcatacagtagttagagggataatggagagaactggtaacatgaacaacctcaatattatgcagatttatgccttattgttttatgcattgtattccaagagttgggtgctttctaggctgagttttaggtataagtattgaagatctgtatatgtttaacttaactgagtgatttaagttgtactatttacagctacaatgtaatcttattgcttgcgggtgatattctatttctttgcctatcatgttagtattgtaacagaccgttgtcatatcttcagaaatgttccgtgcgaaatcctattacaaagctttcacgcagggcaatatgtttttgcccttaataaaacactggtaagaaaatatacctagggatttgtgcccattaagatcctttggggaagctaaatgggggaacaag

SEQ ID NO: 514998 - DNA, 452 bp, Homo sapiens
tatggattatgtacgtacaacggtcaagaatattaacaaacattcatatccaaagttctgactagaaagacaacccaagatagtggcttacaaatgaatcagaggtccgtgatgctcatgtcatcacgcttgattcattccatcactttgggaggccgcattctacgtggcattggatcacgtgctaccgatcattgaaatatgctagaatgtgacttgtggccttaaagataacccacaaatcattacagttcattgtgataagcataatgtggcacataggatcttgtcaggctcatgtgtccttctccccaaggaggtataaaactgttttttacttgatactgaagattctaagatagttgtatgactttcaattaattatttcacttaatgtggtaacatgcattcttttcttgaaaagccaccattgaattgatgtatatacaaga

SEQ ID NO: 514999 - DNA, 453 bp, Homo sapiens
  misc_feature (158)..(158): n is a, c, g, or t
aattgatttgccaattcctgatgtttcatctgaataaaatcaggtaatatttgtctttttgtgcacttaatgctttcaaatttcacccacattataccatgtataagtacttctttctttgttatagctaaaaattgggtgtccatttatgagtcacnaagcatatggattgtttccacttttggactgtatgattattactgctgtaaatattcatgcacatgtttgttatttgagcacctatgttttgtaagattaacagctgacttaacagaaacaatggaaggcaagaggcagtagaataatatattcaaaagatgcaaaggaaaaaaaactgtcagccaccaattacttatccagcaattatttttcaaaaatgaagataacacaaagactttgccagataaacagaaatattaactgaagttgttgctgccagacctatcatcccaa

SEQ ID NO: 515000 - DNA, 177 bp, Homo sapiens
gagacgggggtctcacctcagcctgcatcagtgtccaccagtgagcttgtcaaaacacaggctgccggccccacgcccagagattctgatttactgggtctggggctgggggcatgagattttgtatttcttttatttctttttctctctctctctctcttttttttctttgagagg

SEQ ID NO: 515001 - DNA, 270 bp, Homo sapiens
  misc_feature (236)..(236): n is a, c, g, or t
gcgaaaaagctaaggcctgcgtgcggacaagggcagaactacttaggctacacacccgcatggcccgaaaaaaagggaaaagcaagggccccccccccgggataaagggcaaactaggtggaagcaaaaaaaagggcgtgcctgccggagaaagcgcccagggggccccctgaaaaggggggccgccccacgaaaaagttcgcaataaggcgaaggggcggcggggcaaaacgagncggcaaacacaagggcccgtttaaactgtgtctc

SEQ ID NO: 515002 - DNA, 170 bp, Homo sapiens
ctcaaaatctatatcagaggaattgtagagtactgcaacaggtacatcatccctcagccagagtattagttctacttacttccatgcgctgatgtgtctctcatctccttacaaggggtggcattctcttcacgttatacagccagcactggatatccactcagcacgta

SEQ ID NO: 515003 - DNA, 227 bp, Homo sapiens
gaggaggggcgaaactgagaatattgaatgctgagacccccggagcagtggtctagagccacagccgtgctcgcccagaaatgattctcacgggtgtcaccccaccaggcgcaagcctcactaataacttgacctttccaaaacctacagaggaaaagtgcaatgcgtgttgtacatacaagaggtaacctactcaataatttaagttggtggctgtcacgatttgt

SEQ ID NO: 515004 - DNA, 226 bp, Homo sapiens
gggcgcctagaggatccgacagcatcctaaccagacatatgcagagctggagacaacagatggtgaaactaggtccagcggtaaaatatctcaggtacccagttagatccagttattctggcatctgtggatttaaaagggtcatcatccacacgtagaatagactgggcccctgcatggctcagacaaatccacacgctggtctggattggacggcatacagaca

SEQ ID NO: 515005 - DNA, 175 bp, Homo sapiens
cacgcacatagccagcaccaatagacacttcacagagcagtcacaccaaagcgaatgatactcccagctggaggagccagtgaccttgaggagcttgagcagtttgctatgaccttcaaacaaagacgaatcaaacttggattcacttcaggggtgttgggcgataacatggtac

SEQ ID NO: 515006 - DNA, 419 bp, Homo sapiens
taacctgggcccatctttccctctctcacgccagtatgaaatgaggtggacatgtccaaagtagtaacagagggaatgtaaaagagagtgtaatttttaaattttattttattttattttatttttttgagacggagtcttgctctgttgccaggctggactacagtggcgcgatctcggcttactgcagcctccatcacctgggttcaggcgactctcctgcctcagcctcctgagtagctgggactacaggtgcgcaccaccatgcccagctaatttttgtatttttagtagagacagggtttcgccatgttggccaggatggtctcgatctcttggccttgtgatccacccgactcgggctcccaaagtgctgggattacaggcataagccactgcgcctggccaagagagtgtat

SEQ ID NO: 515007 - DNA, 572 bp, Homo sapiens
  misc_feature (183)..(183): n is a, c, g, or t
  misc_feature (250)..(250): n is a, c, g, or t
agccctccctgcctgtggctccaggcgcagcaggagagggttttgtccccgtagccaaagctctgcaggtcgaaccttatctgctatgggaaggccccgcatttttcagtgtgtgtgtgcgggggtgtggggtgtgtaaaccgcgcatgtgatgtgtgatgtttggcctccactgaatcctcntctgggagcccctagccccatgtcaagtgcggagaccggtagatcgtgggcgctcgtggcctgcagnaacccaatgtcggcttgcagactgtcgcccacgtgccctgctcaggtggacgcgggtcctccggtgacaagggctcttccctcgctgcctgagggattgccatggggcttgcgggagtcaaggcccacacacctcggccctgaaaaacccgtggggcccggcatccttcggaagccctgccgttgcgaccccgggccagtccccgggcaggagcggggaaaggctatgtctctcgtgctgccggggcctcctgggaagtggagaggaaagggctccccgtgagtgggcgaggacggattagcttccagtttcacccctcccc

SEQ ID NO: 515008 - DNA, 738 bp, Homo sapiens
agcggagggtgagttccaggtgggaaggcagttatgacagtcgagaagtagtagaagacacggaaggcacagaaggcagacttcgctcagcacacaagaattcttctgagtaaccatacgtggcaaaatgaactgggctgccttcggagggtctgaattcttcatcccagacaggcattcagatagattcgagatgcccactaagcagagaatatcacggaatggtaccatgactatggccttgcagtgcacagaaagctcccaatatgatgatgtgatgtattccaagaaaggagctgcctgggtgacgctgcagcacgggcaagacagaagtgatgcaatacagacttgtggaccatattcaccccggtccaaactcggagacacatgctgcctacgaatttcccaatgtcaagagatctagcatctgccagacatgcctgcctgaggagaaggttgctaccttgtcatgcatgatgtcacagaacacgactgtcagagaatactggacaacgtgtaataagagccaacatttgactgaggtttcaaacgatttcctctcatgctacattttgtgacacaggcaatgtcggtcccacatgactgccctagtgctgggctcctccacggcaggtgaacatcgtcggcgtgtgtgactaccatcctctacaaagctattctccggggtgctgatgccagctgtgctgcaggcatacctggacagcttaacatcagtga

SEQ ID NO: 515009 - DNA, 467 bp, Homo sapiens
aaaataaccccgggaccaagtttttgaacgtttaaacagcctgccaagcaggtaaatatgtttaaaatccaataaacaaaaccccggtccctaaataatagaaatttaaattattctggcaggtttttcgacatcccaacagatccctaaatccctaaatccctaaaaattagatacaaattttttcacccagtaccccgtggcaaaatttatttttaaatatgattttttaaacctgccagtaagaaatttttaattaaacccctttgttaaaggatatagggcccaagttatatggtggcccccctttgtcaaaacttagccttatgtttttcaaattatccaaaaaacaggtcaaaaatatttttatagggcccaaatataaaaaatatggatgatctatgtgaatcctaagtaaaaattttgttcccgaaaaggccaaaataataaaggtaaaaattttctat

SEQ ID NO: 515010 - DNA, 438 bp, Homo sapiens
tacaattcaggatgagattcgggtggggaaagagagtcacaccatatcgtgatcgtgctataataaagagatgcccacagtgtgtagcatcgaggcacagtgctcattaaccagttgtcctgccgtaattattaatagtatcccctttgcttacaaaagctgtcctagtttacaaaaagtatagacactggcaggacagcaatagtggttgcccaagataggaaacagggtcagggtaacgggtgcagaggtggatgtggttataaaaggcaacatgggacatctcgtagtgaaggaactgtttagtatctccactgtggtggtagatacccgaacctaaacatgtgaaaaatcgcatgaaactaaacacacacacaaacaagtacaagttaagttaggaaaatccaaataagatttctacattgtatcaataggtat

SEQ ID NO: 515011 - DNA, 259 bp, Homo sapiens
  misc_feature (201)..(201): n is a, c, g, or t
  misc_feature (225)..(225): n is a, c, g, or t
cagaggatacggggatcggcagacgccactcctcccttagatgcttccccgtccttccctccgcaggcctacgtctccgcaaaccccacgcttcggggtggcgcctcagacaggaccctgagtccgagactggggtaggggacctgccccgaatccttgtaaacaaaccctcgttgcttctgcacaattcgcctcccactnagcggtgactgtttgggtgtctanccttcccggttgtcccacttgagaagccgggctc

SEQ ID NO: 515012 - DNA, 130 bp, Homo sapiens
  misc_feature (69)..(69): n is a, c, g, or t
  misc_feature (119)..(119): n is a, c, g, or t
ccgcaacagcgcaccacatactaaatccaaggctggatacggtgtgagccaccgcgcccggcctatttncaattcttgaggaattacaatactcttctctatagtggctatactaactntgcatcccacc

SEQ ID NO: 515013 - DNA, 309 bp, Homo sapiens
  misc_feature (62)..(62): n is a, c, g, or t
  misc_feature (66)..(66): n is a, c, g, or t
caatgagaacacatggacacaggaagggaaacatcacacaccggggcctgttgtggggtggngggnggggggagggatagcattaggagatatacctaatgttaaatgacgagttaatgggtgcagcacaccagcatggcacatgtatacatatgtaactaacctgcacgttgtgcacatgtaccctaaaacttaaagtataataataataattttaaaaaagcctatttaaggataattattcctgggaaaagtctacttaacatgaatccacttaaatgggaagcaacattttacagcaaataatgg

SEQ ID NO: 515014 - DNA, 115 bp, Homo sapiens
agggccaaagcacagctgccatgccatgtctgagcggccagcagcctccagctctgaggggcaaggggctggctggagtctcagagcacagaggtaggagaactggggttcaagc

SEQ ID NO: 515015 - DNA, 196 bp, Homo sapiens
ccaccccaggtcctggaaacttacgtaaagcttgtgcccacggcagacctcccggccgtgggaaccccggacgtcatttgcagggacaaaaggggcaaggttttttttggggttcccactgtgggcagctactatgggggaccagggtgggggaagcccttatgagcccctttgtccaataaatgaatggccggga

SEQ ID NO: 515016 - DNA, 916 bp, Homo sapiens
tttcttttatcgtttgctttttgttttattttcttgagagacctcaaaattattaaatccaacagacgctgccggtcggtcagattattattaatattattgttgttgttaattattattattatttcatatgctgatgctttgtgagttcttttccactcctttaaagttgggaaaacttgattcgtggggcaggagattgtttcttcattcttctgacagcccccatctgacgcgtaactgcccattttaaggaaactcttggtgctacaaaaccctgaccagacacttggcaaatttacctctttcttcaaaagaaaaactttaagaaaatgagccaatgggcttcattctcagtcatgcccggagatcacccaggagaaataatacaaacaccaccactgtccagagagagtaaagaagcagaaagagaaagaatttgcaaccatgaggaatgttcccacctcccgacgggacgtgcatttggaaaacacagaatcagccctcagggtgcactccagccacctcagtgctctaagctcacagaagtgaaataatgtctgtgggttggcaatggctttgtgggatcatatgtcttggccaaagatgggaaaacctatgttgaagaggcagcccttgagtgttaatttgtcttctaaactgtgtaaggccccttcaagttcctcttgttggtttcaattatattaattataaaacaagtggatgtggtgaccatccacttgtgtttccctaatgatgggcagttggccagggcactgaccagagctgggaaatttgtatctccaaggcggctctgtctctgaaataaatggcatcaagtgcatgtgtgtatgcgacatgccctgcctgaacaggtgctcaataaatccaagtttccttctcttgaaaaaaaata

SEQ ID NO: 515017 - DNA, 347 bp, Homo sapiens
cgggagccttaacccttcagaaagatacctgcacttgcatgtttattgcagtgctcttcacaagagtgaagatatagaatcaacagattctatcaacagatgaagtgtccgtcaacagatgattgggcaaagaaaatgaggtatagatacacaatgaaatactattcagccataaaaaagaatgaaattgtatcctttgcagcaacatggatggaactggaaagttaagtgaaacaactcagaaacagaaagacaaatgccgcatgtttcacttatggtgggagctaaataacatgtacacacagacattgagtgtagactgatagacactggagacttggaagggt

SEQ ID NO: 515018 - DNA, 168 bp, Homo sapiens
gacacttacgttgaaaatttattaacaacagaccagctctggaagtgagtttattcttgtctgtatatcaccaatgttatttccaaatgtccgtgaaattatctatatatcctattctccttgactagcttagcgtacggagtaatagctaactaatatagccgatct

SEQ ID NO: 515019 - DNA, 982 bp, Homo sapiens
ggaaagagaaacagattgctaagcttgtgtgaatttacgctgtaactactttatcactaacatgtcctgccttattatctgtcagcatgcaaaggtactctgtgatgtagatcatcagcttcaggactttagttccgttagcattatttagttggtcatagctctggggtgaagcattattgttgtaaatgggctcaaccagcaacagtcccaaggttcatgcacgttgtcgagcaagatgggaacgtcgcttctgtagtgtattcagtgcttaatatacgctgtatatgttaccgttgttgctcataatcttagttggccacgttaactgtcatgttcaccatcaatataaatttatttctcaccccagaagtaagattgtatttattctctttcgtatccttcggaatatccgtaatagcttgtcatcactcaagagacaagttgtatgggtgactatagcacaaagagtagtgtattctgcgagatatagtctcgattgcgcgactatcctttttttttagattcccggtttcgtcacgtttggtgctggatatgacaagatcggtcatagttacccctttttttcggacccagtgtgtcttacgtagtcccatttggttgcttggtcctaggtaacatatggcatttggttttcactgcctgtaaggcttttagaccctttctggacggattgggcttccttgtctcatctggactttagtcatctgggcctctaagtttcgcaagtgcgtcttttgctccatcacctgtagtccaggttacctcgctagtgggacgccacctgttctcgtgggtggcactccattcgtcgtccttccacatccaggtgacctacctttgtttcttggccctgttagtttttccactacttattgcactcagggccgtgttcggccaaacaagggggggcggtcagaaccccgggggccccctacctcccgctttgtcgggggccttg

SEQ ID NO: 515020 - DNA, 796 bp, Homo sapiens
  misc_feature (796)..(796): n is a, c, g, or t
acacccacaaagtggacatggacaatgctcctgtgggggccagatcgggctggaggacttcatcttcgcccacgtgaaggggcagcgcaaggagtgtggagtgtgttcaagtcggaggatgcactcgtgtgctcaccatcacggacaacgtgtggctggctacgccttcatcaagctgcatcaaggagggcagctggtgatctgaccacatccacctcatcagctgtgggctgacatgatctgaggccatataacggggcagagcctgctgggctgcctggcactacagaggtggccctggctgctcaatggagctgccccgaggccgtaccttcacgctgaaagctcacggagcctcgcaaggccatatcgacatgatcagccagagtatcagcgggtggacacgacctggctctggcccacaacatgggcagtggccgagggaccctgcggcgtcctgatcccggggccccgacaaggtggaggatctgcctctgcctttgaatgagaaggccattgcagcaaggtggatgacctgctggagagtaacatgggtatcagggacacggagctggcaggcacccatggtgggagctgggacaagggcgagaaggaaaccggatgagctggactgagagcctggaagaacggatggggtgacattgccaaccctgaagagacgaataagacgtaaaggggcgcaatgggacgcaaagacggcgatataagatgaccggactgcagcaataacggcgcacaggagggcacagaggacagagagaacgacacagcagan

SEQ ID NO: 515021 - DNA, 118 bp, Homo sapiens
  misc_feature (25)..(25): n is a, c, g, or t
  misc_feature (92)..(93): n is a, c, g, or t
  misc_feature (98)..(98): n is a, c, g, or t
  misc_feature (103)..(103): n is a, c, g, or t
gcaggcccggggttggccggtgttnttaaggattggggagcgggcgcacacccctcctgcattaaggagagttctcagggtcacgctccganngaccntaganggagcggcggtgtcc

SEQ ID NO: 515022 - DNA, 995 bp, Homo sapiens
gggtcacagttccaggcgaaggcggagattctcgatgcttgtccccaggtagcacggacctctgaggcccgacaaggcgcagccgtgcgggcctcgtgcggggatgggagccttgagagggatatactgcagtctcagcagaagggaagacatggttaagaggttgttacggaatgaagttctacacgagggtatgatgaacatcgggagagggaagccatgttctagaggtatgggcaatccaaggtctggttgcggggctggtctcgatcgaggaacgaggttggcgtcttgtgatgatggatcctggtacagagtgtagctcgagggatgaccaccggagtttggtggattctagtgagttgagcgaatgcacaagtggggcactaggactgcaaagtcgtcgtcttgcgtgagtgtcgctgtactaaacgaagcaatgcgtagccctatgatgatacgaagggaagtaagtgggaatgctgggctataagctaacaaaggattgatccatgggacagttttaacgacttgggtggtctaaaggggcgctttggaatgtattgtgtatcgaggtcgatgagcgatgcggaagggatcgaaaactagggaaggacttgtgctcagccggagaggagggccccacataaaacccccacgtggtacgcgcataggggttggaagagatcctaggtgtacgggaaaggacattcatccgatttggtgcgccattttgacacacagtggagccaacattcactcgacgttggtctgctaagtgtgcccatgaattccgagtcggagtgcccaagagagaaaggtccgacaagggggttttttgagaacaccgatagtgggtgtgccgaacacgttaagagcggcaaccagctttggatagcgcgtttgtgcaccatttccgatcccacacatagcaaaagggttccttatctttgcaccatgtccacagatggaaaccacacctaggcgtggatgga

SEQ ID NO: 515023 - DNA, 421 bp, Homo sapiens
atagattcttatctatcactaggcctagtctttccaccctgaagaactacccttcacatttcttgtatggtaggtctaagggggcggggttctatatcaagtaaatctagtatagactggaaatctatcacatatacctatcatttttgaaggatatattctctggctatagaattcaaagtctgtgatgtatatactattgggcacttaaaaagatataggttcgcttaatacttcttgacctagcactagtatccaacagaaaggtctagctagtcatccttaaactattagtgcctactagtaagatactactgcctttatatcctatctagttatcatttaaacattatctattattaatacggttttagagcaatacaattatacaagtgccttaatgtaattttctaacatgttt

SEQ ID NO: 515024 - DNA, 278 bp, Homo sapiens
cggccagtcctaactggctcacggtgttcacaggaccctagagtatagctacctgcaagcaagagcccttggacgctgatgtcatcaggcatacagaataggcctgaatggcctccttatcctttgacgcccttaatactactactccaaaactacatacgcatctctcctagaagactaaccaagctactttatcgttgacattgaagccacataaaaatggttttacacggttcttcaatatgcaccaggcaaagaggaaaccaggaacggcacat

SEQ ID NO: 515025 - DNA, 393 bp, Homo sapiens
agatcgtgcgactgagcctttaaagaacaagagacgttgattattgaaccagagaaaaatgcatcccagtattgaatctctggaacaagaaaaggttgatgaatgaagaagaaggacaagacaggatgagtctagcgtgctctaagtgaagaagatgaggaagatgactcggaatcagaagctgaaacagataagacaaaacccctggactatcatgtaactaatgccaacactatctagatacacaatgcagctcctgatagactgttacaacacactactgctgatcatcagaatcaagacaacaacctacatcaccatattaaaaagtttccaaccacagactacaaaacatttctcccaacagaagacgagagaaaagatgagtctcct

SEQ ID NO: 515026 - DNA, 205 bp, Homo sapiens
tgtccaagcgtagtaccaagggcttcttcgaccccaacacgcacgagaacctcacgtacctgcagcttttgcagagggccaccctggaccctgagactggggctcctatttctttctctctctctacagtgactgtgcttcctccgtgcagttttctgcaaactcttggagaagtggaggcatactttgtgtgtcttgggttgta

SEQ ID NO: 515027 - DNA, 470 bp, Homo sapiens
cacgagggcggctcgagcaggatctcgcgccctccgagatcgagcacggtcggcgtgctgatcgcgagcgtgggaagcacgatcttggtgccggcgaaagcctcctcgccaagcgcttccttgttgatcgagaggtaccgatccgcccttgcgctgaggccgcgagcaagcttgtgatggccgacgaaggccggctgatcggcttcgaaagccgcgtttccgaacacgtggtccggatgcatgtgcgtgttgatgacgtagcggatcggcagcggcgtgatcgagcggatggcctggtgaagacgggccccgatacgggcgctgccgccggtgtcgatcaccgccacgggctcccgcccgacgatgaagccggcgttcgagatgtcgccctcgttggccggagcgtagagcccaatctgacctctgtgagcataagccccgggcgcgatttcggcgacaaatgagcccgg

SEQ ID NO: 515028 - DNA, 931 bp, Homo sapiens
  misc_feature (526)..(526): n is a, c, g, or t
  misc_feature (696)..(696): n is a, c, g, or t
ggacatcttggacgtttgctggcagggcagatccgctcgcgcgccgcctagtagatcgggcagtatccagcatgcagggcgaggctgtatcggcagtgtgcaggcaccacgaaggcctgtcagtcagtatgccaccactaggcgcagcggcgacgcgctggcagactcagggcccccgtggtccggccagcttgcgtgctggcctcgagcatagcgcgttctcatggtcgtagcactgatcgcccgagctggtcgatgtgctcaacgccccagggcgctagccgtgcggctcacgggcgcgtcgtccgtcttcaccgtcgtgcggtgatggcccctcgggtgaagtatgcggcgcacgagctgtcgtctggccttttcccgacttgccgaatcctttggccttgcacggaggcatggctgcattggcatgtcgcccagggagcgcgcgctcgacgacggcaggggcactagcgatttgaccggggggagcgcactctgtcgtgtcggcggggctcggggggacagnttgtgatcgggctggcgggtccccggggcgtttgaggtacgcagcttcgtcgagccgagttgggggcacttggtacagcgcggggtcgggcgtccttgatgtgctgcgcccccgtgaacatgcccggagaagcccgggccgtttggcaaacgtcggatggccgccgatgngtcactaagggcccgagcaaggaggtggctcgctagacgtaggtgatcgcgcaacgtttccctcgatgagttccaagcctcttgacatgaagccgaccatgcttgcacggccagaacgggggccaggagcgtcatagggccccaccgtaaagagcggtcgtccccattgggacgcaacttgtgaagcgatggaatcgtggggcattttaccgcacaatatcgtcagcaagacatt

SEQ ID NO: 515029 - DNA, 572 bp, Homo sapiens
gacgccgtgtgcagcggggtgtgtgcccggggtgccctgtgtgtgccctgggatggggaaccgcggtggcttccgcggaggtttcggcagtggcatccggggccggggtcgcggcctgtggacgtgggcctggggccgagtgccgcggagctctgcggagtgcaatggccgaggataaggatgtggatgcccgtcaccaatgttgggccgcttggtcaaggacatgaagatcaatgtccctgtgaggagatctatctcttctccctgcccattaatggaatcagagatcattgatttcttcctgggtggcctctctcaatggatgagtgttttgaagattatgccagtgcatgaagcaagaccctgtgcctggccagctgcaccaggttcaaggcattttgttgctatctggggactacaatggccacgtcggtctggtgtgttaagtgctccaatggagtgtggccacctgccatccgtggtggccatcatcctggccaagctctccatctgtccccgtgctgcagagtgctacttgggtggaacaagatcggcaagccccacactgtccc

SEQ ID NO: 515030 - DNA, 337 bp, Homo sapiens
  misc_feature (20)..(20): n is a, c, g, or t
  misc_feature (32)..(32): n is a, c, g, or t
  misc_feature (72)..(72): n is a, c, g, or t
  misc_feature (77)..(77): n is a, c, g, or t
  misc_feature (125)..(125): n is a, c, g, or t
  misc_feature (132)..(132): n is a, c, g, or t
attagcccttttgcaactcnacagacctaacngttacaatgaagaagaagcctagaattcaagcctgtgacntccanccttagactgattggccctaaaatgtgtagcttccggtcttgatgagnaaggaanggaacccttagcacctgggcccatagctgctgctcaccataattgggagaatgaacacattatggactgagagggtagcaccgacatatatacactaccatgtgtaaaacagatagccagctggaagctgccatatagcacagggagctcagctcagtgctctgcgatgacccagagggatgggatggggtgaagtgggagggag

SEQ ID NO: 515031 - DNA, 186 bp, Homo sapiens
aatgtatacctctggattaaaaactcttgtaaaatgattatcccctgcacatgcacaatataggacactgccatttgattcataagtaggaaccctctggtagttgcaatgacgtaatcagatacaccgatatcaatgggcaacaattaactgatccttagcactttcacattgctaattgccaga

SEQ ID NO: 515032 - DNA, 126 bp, Homo sapiens
aacttcttttatagtgctagtgtatactgactcccgagttcctggcccccagagcaataagctactgtcagagacaagaacatccaactgctgatatgcagcaatccccatcatgccccgcagctc

SEQ ID NO: 515033 - DNA, 112 bp, Homo sapiens
  misc_feature (51)..(51): n is a, c, g, or t
cactaagtgagtcaccattttttggttccatacatacgagtatctttacanctatactgcagtctattaagtgtgcaaaccattatgtctaaaacactacaggtactaccta

SEQ ID NO: 515034 - DNA, 357 bp, Homo sapiens
ccgttgtcagtactggggaacggtgtgagcaaaactgcagagaaggaaaagaatatggaacagttatgggtaaaggagttagagatgtatggctaacgaaagactccagtgcctacacacttgaaacacaagagtccaaattcctagtgaggtcacaattcagataataaaaacattctgaggatttgtttttctcctaccaaaaaagaaagccaaagtttgattcaaggtgtcacaaactgagatatcagcagtaaaggaccaatgcaaaataggcaagctaacagctaagcagcatgctccaccatagatcttaaggagatgaataagcagatgcacacactgacaacggggagt

SEQ ID NO: 515035 - DNA, 1377 bp, Homo sapiens
gctccctcaaggtgtgacgcgagctctgccctttaaccggaaacgtctccctgctcaccccacacccctgctgcatgactgcatgttgctgatgcaccacatgcgtacctgtgatcaaatgacgtgactgccctgtgatgctggatgttactggctgtgctactgtgatgcctgagtctttgtgctggccaatctgtggatgtccctgcgtgcggtgccacctggagaaactggaaggagcctggttcgagctcagcccctgagcgtaactgtgtgtggctcctcgctgccagaggcctcacctgcactgcccctgagccttccatgtcccaactgcctgtggtccctgaagccatccctacgccccgagctgcggcctccgcggccctggagctgcctctcgggcccgcacccgtgagcgtagcgccttcaggccgaagctgaagcgcgctccacaccaaggccccgccggctctagactcggtcccgagacgttccgccagcgtttccggcagttccgctaccaggatgcggcgggtccccgggaggctttccggcagcttcgggagctgtcccgccagtggctcggcctgacatccgcaccaaggagcagatcgtggagatgctggtgcaagagcagctgctcgccatcctgcccgaggcggctcgggcccgcggatccgccgccgcacggatgtgcgcatcactggctgagcggtggagctgcgggtggccagggccgggcgctctgtgcggactggggccatgatcgggcccgggggcctgagcctgggaccccaccccgtgttaatgaaaaatgagttttggcagcgaaaaaaaaaaaaaaaaaaaaaaaaaaaaaaaaacaaaaaaaaacaaaaacaaacaaaaaaaaaaacagtggtggggcgcgcgcgccgcgagccacagagaaagccttcttcaaaccacccgctggtggggggcggcgggagcccaaaagggtgaagaggaacacgggggccaaaggcggtgcccacagagagagacaccggggggccaagaacacgggggcgggggtttctcccaacaaaaaaaaacccccgggggggaaaccggcagggtttcaggaaaaaaaccacaagagggagcttgcgagaggaaaaagaggggagcaacaaacaagggggcacagagaggaagcaaaacaaaaataaccccccccgtgggtcaacaaggacacagacagacgagagggaaaaaaacaacgaaaaaagaaagaagcacaagaggaggaaacaaaaagaaaggagacaggcgcaagaacaggaaacaaaaacaagacggaacagcaagcagacacaaacgggagagagagcagaagaaagaaaagagaca

SEQ ID NO: 515036 - DNA, 1012 bp, Homo sapiens
  misc_feature (762)..(762): n is a, c, g, or t
ctgtgctgtttccccatggtgtaccccatgaagatcacaggaaccgtgctgtgatggcacttgtactacatctggcttcactcgctcatcggttgcctgccacccctgtttggttggtcatccgtggagtttgacgagttcaacatggatgtgtgtggttgtttgggaccgggagacctggctacacggccttctggcagatctggtgtgcccttcttcccctttcatggtcatgctggtgtgctatggcttcatcttccgctgttgggcaagggctcaaaggcacagcaaggtgcactgtggctcctagttcgtcatcgtggaggaggatgctcagaggaccgggaggaagaactccagtcatcctccacctccctcttcgaggctagcaggaggaagtgcctttcaggctgtggtctatttcggccaaccagtgcaaagccctcatcaccatcctggtggtcctcggtgccttcatggtcacctggggcccctacatggttgtcatcgcctctgaggccctctgggggaaaagctccagtcatccccgagtcctggagatcttgggcatgatggtctgtcctttgctcagcgatgtgtggcagcccctgatctatggagtctggaacaagatcagttcgcatgagaattagtgggcatgtgcttgggggaccggtattatcgggaagcatttgtgcaagtgactgtggacttccagggtcttcagcatttccaacatgatccacagacctgtgtctgtcncagagctcaatgggggcatggggaggtggaaagccctggggccaggacaggacgggtgcctggttcaggtgtcccggatccgggccgattaaagtggtggggagaccgcgtgtgaaaacctcccttcaaggtggcccccaaaaagggccggcgtgggggagggcacccaaaacgcgagacatctctgaagggcaactgtgacccttggcctgcggcaccattgggggcggggacacacggggggcgggat

SEQ ID NO: 515037 - DNA, 775 bp, Homo sapiens
taaaaacagtctcactctgttgcccaggtgggagtaaagggcaggggatgatctcggtcatggaacctccgcctccggggctcaagccatctttccttagcctcccaagtagctagaactacggggtgtgtaccaacacgttagtggctaattggtttgggtttttgggtgtgtgtggagacagggtttggccagtgttgcccaggtgggtctcgaacgcctaggctcaagtgatctgcccacctcagtctccctaagtgcggggattacagacgtgaaccacggggcccagcccaaaccttcaccttctaagggcacggggatgaacagaccgatcggcttgagggtgggcacaaggggtgtgggctaggttataaggaagtggtaccaaataacggtgtgcctgagttccaccgcaagattactaaaagcgggaccagaccagaaatgctaaagaacatggcctgttgacatgtcatgagtcacctgaccccaaagcatttttggtttttgataaaccctccaattcctgattctcaaggagtgtttcaccggttcgacaaatgcatagtgggatattttggggccctttcaatgtggaattgggcctctttaatggttattccaactttatcaatgttttttgttccccttttaccggggaaaggggaacatttttggcaggggttaattatttcctaggcggcccacagtttgtgcagggtaagggaagtttgttcgtgaccaactgacaaattttgtggccaaattttat

SEQ ID NO: 515038 - DNA, 161 bp, Homo sapiens
  misc_feature (47)..(47): n is a, c, g, or t
atcttactgcaggatctgccgaagaaaagaagtgctttgagttcttncctctgctgactagacatgatgttactacatgcttcaagctgaagaatctaaatgtcgtctatgactcacgtaccaaataatataatgctatactaattacttgtgaaaacaac

SEQ ID NO: 515039 - DNA, 395 bp, Homo sapiens
agagtgaaactctatctaaagcaaaacaaaacagacatacaagcagccaacagacgtaaaaaaatgctcaacgtcgccaatcatcagagaaatacaaatcaagaccacagtgagaccaattaatagctcacaccagtcagaatggcttttgttaaaagtgaaaagataatagatgttggtgaggctgtggagaaaagggaatgcttgtacacttttggtggaaatgtaagttagtttagccaccatggaaagcagtttggagatttctcaaagaacttaaaacagaactaccattcgacccagcaatctcattactgggtatatacccaaaggaaaataaaatcgttctatcaaaaagacacatgcatggcaccagggaactcgaaccccgtgag

SEQ ID NO: 515040 - DNA, 150 bp, Homo sapiens
ccaggtcacatgcagatctcatcctttgccaatttaagtgtctgtgatgggcgcaaagcgcgttttctctagagtggcgcgctctgtgttcgctcgctcccacgtctctcttcgctctggcgccacgactttgaagcgctctccgtatct

SEQ ID NO: 515041 - DNA, 387 bp, Homo sapiens
accgcccgcgccccgggaaggaaaaacactcgctcccggccatacttgggtgtgagttttgacccctggaggagcccctgtggaaacagagcaatccccatggagtttgtgattaagcaggctttaggaggggccaccaaggacatggggaaaattctggggggtgacgaggaaaaggacccaaacccccccaaaaaggaggaggagcggcaggaggccctgccccaggcggaggaggagggcatggcgccccgggccccgagtttaacttaaaccgtggtgtcctctgtccgtttgtcctgggcctgcgcctcctcctgcatgtcggggcccctgggtgtgttctctccggatggaatcccagccaataaaccccagtgatttcca

SEQ ID NO: 515042 - DNA, 386 bp, Homo sapiens
  misc_feature (326)..(326): n is a, c, g, or t
aaatatatttttttaactcttatttcaggttcaagggtacatgtgcaggtttgttatataggtttgtgtgtcttgtgggtttggggtttggtgtacacgattatttcaccacccagtaataagcatagtacctaatagggaggttttttggtttggtttggtttggtttggtttgtgacggagtcttgctctgtcgcccaagctggattgcagtggtgcgatctcgggtcactgtaaccttcgccttccaagttcgagggattcttctggctcagactccctattagctggaattacaggcatgtgccaccatgctgggctaattnttgtattttcagaagagaccgagtttcatcatgttggccacgctgtgctcgcccctgcct

SEQ ID NO: 515043 - DNA, 427 bp, Homo sapiens
aactagtggtgcacgaattctgcacgagacgccttcctgctactctgcaggcatgatctgttcattatagagagaagcgtgctatgtgacaccagtgcccatatgtcaaccttaaggactagctgttgtttcccagctgagacgctctgatctcagagatataagggtccgctgaagcccggggcacgcatcttctcctttgacggcaaagacgtgctgaggcaccccacctggccccacacgcgtgggatggctcggaccccaacgggcgcaggctgaccgagagctaatgtgagacatggccgacggaggctccctctgtcgccaagactcattctgttggggggcaagctcctggggcacagagccgcgagctgtcattacgcctacatagtgctttgtattgagcacatttatgctggcttcc

SEQ ID NO: 515044 - DNA, 321 bp, Homo sapiens
gtctatgagacggacactaacctcggtcgcccagggtggagtgtagtggcgtgctctcggcgcgctgcaatccctgcctcccaggttcaagcatgtcttctgcctcagcctcccaagtagctgggatagcaggtgtgcaccaccaggcctgatttttggtatttttagtagagacggggttcacctcgttagccaggatggtctcgatctcctgacctcgtgatctgcccatctcggcctcccaaagtgctgggattacaggcgtgagccaccgggcacggcccccagaatttcttaagaagataaaaactctgggctaaa

SEQ ID NO: 515045 - DNA, 589 bp, Homo sapiens
ccgtaacatggtcatagcctgttcctagaggtaaaacggcattgtgtttgcagctgctccaatggcaaaagcggccctcattctattcaatgtcacagagagatgacacagtaagctacacaatgttaaatctcgagaagccacgtcgagtgcccggcgcacatgattcagtcatcctgaatgtcctctatggcccggatgcccccaccatttcccctctaaacacatcttacagatcaggggaaaatctgaacctctcctgccacgcaggctctaacccacctgcacagtactcttggtttgtcaatgggactttccagcaatccacccaagagctctttatccccaacatcactgtgaataatagtggatcctatacgtgccaagcccataactcagacactggcctcaataggaccacagtcacgacgatcacagtctatgcagagccacccaaacccttcatcaccagcaacaactccaaccccgtggaggatgaggatgctgtagccttaacctgtgaacctgagattcagaacacaagctacctgtggtgggtaaataatcagagcctcccggtcagtcccag

SEQ ID NO: 515046 - DNA, 175 bp, Homo sapiens
acttgccattccagggctggctgggccggtttggggctggcgggcctggcgttggggtccccaggctgcagggtcatggttgtgtgtcttctcctgcggaacgtgtgaggtgctcccataaccatcatgactaccccgccgcaagggaaacagggtcctggatcatcctaagggt

SEQ ID NO: 515047 - DNA, 1614 bp, Homo sapiens
  misc_feature (736)..(736): n is a, c, g, or t
  misc_feature (996)..(996): n is a, c, g, or t
  misc_feature (1005)..(1005): n is a, c, g, or t
  misc_feature (1055)..(1056): n is a, c, g, or t
  misc_feature (1074)..(1074): n is a, c, g, or t
  misc_feature (1102)..(1102): n is a, c, g, or t
  misc_feature (1141)..(1141): n is a, c, g, or t
tggggtcccaaatttcttttttggaaggaatggtccaaatcaaaaaacttaaggggtttgtttgggtacaatcttataaaaagggtaagggaaccaccccaactatgcttgcactggccttggtgcaccagggaatgtcaccccagggttaatgggggaatattacgcccgaggtcttagctttcatttatcactggtctcccagggtggtcgcttgtcaacagagtattattccggccaaggccaaattcggggcgccccctattcttggccgcaatgttggtcgtcactgggtgtccccccaatttctttgagatgggtttacacaccctggtctccatcacagggtaaatggtgtgtctccaagtggacagtgtcacaccaaaagtgggggggtgtaacattatttggtccatgtgggccaaatttgtgtggtgcagagttccccagagtttgagtgtgacacgtgatatctcccaactttttttttctccccaagtgttttcatagtgcccacaactctccatatgtgccatattcagagcccccgtttatctctccccaagtctcaatatcaaaaagaggtcggtgggattctcggtggtgaaatatactccctgtgaaaaagggacagagatatctcgggggccccccacctcctcctggtggtggtgtttctctcagcagagctttctccaaatccagagattctccctcacagacagtgttgtttccnccctctctctcctctcaatatgacagcaaattgggcggtcgaaacacgaaagcgatcttattttcgggcgcacacaagaagtttctctttttccaaaaggaggccccgaaacattattacataatcgccgggcggggccccaaaaacaggtcttcgagctacaaaacgcacacactttggtgtgccaccgggctggcttaaacaacccgctgataacagcggaaggcggcggctgactaacagaatggtcctcccccagngcgtggttntcaagaacgcactatggggcgcgaccagtgtcgatagtcaagacatcatnnggacgacagcggcaggcnccactactttgagagaaggcatccaccntgggaggagagagaggggcaacaaaccatatcagtgtgngcggagcagcccacacccacttgtgcggcaagcaaacgatgtgtgggacgaccgcgccgggacgtcaccgcgaaatcaacatacagtggaggggcggggcccacaaaccagctaaccagggcgaaacaagaagcgccctcgacgatcgagaccagatcgcataaggtacgaagagtatagatatcactatgcagccggaggacagccgattgataaaaacgagcacgacgagcgagggtgggagcccgcatcgagtgctggggacacccacacccaaccagggtggttatcgtgagtgactaaacaacaacctgatgcaaacctgcagaacagggcgtcacgtacacataataatagtgccagcggccccgctagccagcgtgctggtggtggcgcaacaccacacgccgcgcacggaggtagtcccgagcccacacccaccagcgtgtggtcaccacagatactccaacaga

SEQ ID NO: 515048 - DNA, 923 bp, Homo sapiens
  misc_feature (2)..(2): n is a, c, g, or t
  misc_feature (114)..(114): n is a, c, g, or t
  misc_feature (165)..(165): n is a, c, g, or t
  misc_feature (168)..(168): n is a, c, g, or t
anggagcgcggggaggacgtaccttgtgagatgcgagccggccaacagcttgcaagcatgctccgctggacccgagcctggaggctcccgcgtgagggactcggcccccacggncctagcttcgcgagggtgcctgtcgcacccagcagcagcagcggcggccgnagngggctgccgagccagagcgcttctggacaagggaaggcagacctcccggaacgtacagatcatattttgcacgggcatcttcggcagacaaaacataacattcaactcacatcgccaagatcttggcaccagcagacaggccagtagggatgctgacggtggaattgctcgtaacacacaggatgacagaaccccacagacgcagacaatgagacatacgagaagtcatagagccagagaactgaaggaacctatcatgccaccagcatgggacctggtgccactgacgtcgatcagatatggcacacagacaatgaggcaggacaagacaaggcaatgatgcatggacactaacagaaggccagcagctggtggcaacgtctcactatgactgtcgactatcagccacagtggaaacagcacagagtgtctcaccaacataaagaaaaccatatgtggaaagacaatgagaggccatcgaacatcgcaggatgagctggaaccggaacccgatggcccgaacacactgacggcatgaaacagactccagaacaagacagtccaggaaaatgggacgtaacagcaagcaccctgagtcgaataaactgagataagggtaaacagggacgctcggcgcggacaggagaaccgaagcatgaccagacccaaagcaaggaacacaacagaggaacacaacaagacaggaaacaaacacacgaccaaaaacaaagccagaccgaagcaccaagcaagca

SEQ ID NO: 515049 - DNA, 648 bp, Homo sapiens
  misc_feature (2)..(2): n is a, c, g, or t
  misc_feature (114)..(114): n is a, c, g, or t
  misc_feature (165)..(165): n is a, c, g, or t
  misc_feature (168)..(168): n is a, c, g, or t
  misc_feature (290)..(290): n is a, c, g, or t
anggagcgcggggaggacgtaccttgtgagatgcgagccggccaacagcttgcaagcatgctccgctggacccgagcctggaggctcccgcgtgagggactcggcccccacggncctagcttcgcgagggtgcctgtcgcacccagcagcagcagcggcggccgnagngggctgcctgaggccggaggcctgcttcctgctttcctacgaggcttccttggatcggggagggcagccctcccggccgtcgtcttattttgcacggggctccttcggcaggcaaaactaancttcagactccgatcgccaaaggatccttggccccgaagcagacagggccggtacgggttgcctgactggttgggactcgcttccgtaaccactgtgttgacatgccctccaccaatgcccatgacaatgcagctaccgagaatcaatggaggccaaggaacccttgccatggaacccctttcttgcccccaagcttgggcccttgtgttgcccctgcagtcggtccgtatggcccagcagcattgggacggcacacacgaccatgccatggcttgctgggccactaacatgagtgccagaagcttggttggaaacggtctcatttgctggtacgaatatcaagccccagtggcaaaa

SEQ ID NO: 515050 - DNA, 204 bp, Homo sapiens
cacgagggggaatgacattacaacaaccacaaggggtcttcctgtgtccctcagacatcatatcactgcattacatcaccatatttctttctggacaaatgtccctggacaattcaccctgacataagtcacctgtcattcttgctcaacatgatgctgcggctttccagatgtggatgatgatatgccaaatcaacccttaga

SEQ ID NO: 515051 - DNA, 774 bp, Homo sapiens
ggattcagtggcagagaggtgctacagggcggcgaagctgggcacctggactggggaggtacgcgcccatggcctggagctggaccatcgtgttcctggacgcagacattgggggccgcgcgcagtaccacacgtgcccgcgtgatgccgtggccacgagccgcgaggtggcccgaagcccagccactgcagccgaggcacgtgagggctcatctgcgacgtggggatcggtgaacgtcgccttctaagtgacccctgtgtgtgactgcgtacccgcccctgtgggcgacaagaagtcatgcgtgacctccttctcttccatgagcggacaagaattgcttcctacaagcagcctgcagggaggcaaggggcagccccaacactgcctacagcagaggccaccctgcagaaggtgacgggcgggtgagcaggcccagcccccaggggaccaggagcctgaggctgtgctggcaatgctcaggtccctagacctggagggcatgcggagcacgctggccgagagcagcgaccacgtggagaagagtccgccagtccctcctgcaggacatgctggccacacgggaggcttccatgcagggggaacgaggcacgacagcgtactgagcagaagccagagtctgtccactggggcgtcaggaccaagggaggcagcaccatgtccttcctgtgggacacagcgagccaccagggctccagcccagacccggtggatgcctctggggaagcaaggacaaggagagaagcaaggtcaag

SEQ ID NO: 515052 - DNA, 239 bp, Homo sapiens
  misc_feature (82)..(82): n is a, c, g, or t
  misc_feature (215)..(215): n is a, c, g, or t
cgctgggtgatctagaggatctcctcgggttgacacgggtggctatgtggacagcaagagtcgttttcgcggaagcgactgncagcaggctgtcgggccccgatgctgcccatttcccttccagcaaactcactcggcaatccatgcacctaagataccagcacaagtcggttaatccctgtctggactgaggcctcggttggcttctgaaactncaatcctgcagctaaacccttcca

SEQ ID NO: 515053 - DNA, 338 bp, Homo sapiens
caaaaaaaaaaattggggggggggcccatttcaccccttgttttttgcccccggggggcccccggggccaaaaccaggaattccccccccgggggggggggggccccattgggggggccccccccccttttttaggggtttttccaagggttttaaaaaaatcgccccctttgttgcgggtccccctttggggcccccccgggttttaaaaaaaaggccccgggggggccccccccccgggcccggggccttttggggttttttttggtttttttgggggggggggggcccccccctttttttttccccccctccccggtttttgggggggggtttta

SEQ ID NO: 515054 - DNA, 523 bp, Homo sapiens
  misc_feature (136)..(136): n is a, c, g, or t
tatcactcgtccttacgttacagactcaacatactaggtcataggcttttcctgctgttacatatttaccacaacacaatggggctcactcacccaccacattaacaacataaaaccctcattcacacgagaaaanaccctcagttcatacacctagtcccgccagttctcctcctagtccctcaaccccgacaatcagttaccggggtttgtcctcttaaggaaaaaaaaaaaaagagaaaaagaagaacaaaagaaaaaaaaataaagaaaaaaaaagaatggggcggggggcggcgggcgagaagagaacactcttcgaagaacccaatgcgtgggggggcgccgcgggccacccagagggcgacgtacgaccaagctgggcacaaggtgtgtcccagggagaaaccgcgcggccccaagcatagatgcgggtgggttctccacgagatgaaaagaggcgggggggacaacgcgtcgtctgtgaaacaaccccggaggcggcgagcggaccctcgcgggc

SEQ ID NO: 515055 - DNA, 226 bp, Homo sapiens
  misc_feature (136)..(136): n is a, c, g, or t
tatcactcgtccttacgttacagactcaacatactaggtcataggcttttcctgctgttacatatttaccacaacacaatggggctcactcacccaccacattaacaacataaaaccctcattcacacgagaaaanacccagaacgacccaccgaagaacgacccaccgaagaacgacccaccgaagaacgacccaccaaagaacgacccaccgaagaacgaccca

SEQ ID NO: 515056 - DNA, 147 bp, Homo sapiens
gctgccgagtcatcgcgtctctccacgagaggcatccagcgaggctctgggggtaggggaggtgctccatgtgaagacagagtcctggcaccccgcacgtgtctcctgggagatgacccaagcatcctcatttgaaaccgtccagat

SEQ ID NO: 515057 - DNA, 930 bp, Homo sapiens
  misc_feature (321)..(321): n is a, c, g, or t
tggggttggactcaggtttaaaaaacgggaacggtgaaggtgacagcgtcgtttggagcgagcttcccccaaatttcacatggtggccagaggactttggatggcaccattggtggtttttttataaataagtcattcccaaattatgatgatgcttggtacaggagaatgtccctggccatcttaaaagccacccacatttctctctagggagaaggggcccagtcctctccacagggtccacacgggggcgggtgatacgcatggcttccgtgtaactttcttgtcgttgcaacactcttttaaatctccgcctaaaanaactttataattggggtctcattttggaatggatagagccttggggcccccctttcccctttttgtggtcccccactctggacgtctgtttcgagggctttgggtacccccctgggaagttgggttggcaggcacgccagggtttcacctggtacatctgacttgaagacactgttggaataacacgttgctaccctcaaaaaaaaaaacaaaacacacaaaacacaacttttgcggggctgccggcgcaagaaaaaagtttcaaaacaactgtggttggcgcgcgcggcccatagtgcaagtacccacggccacagtgggtgcccaaagaaaaccggggctcagcaacttgtggcggtctctacccaaaaaaaacccgcggcggagccggggttctgtagaccaaccagggtgggtcttgggcacctgtgcatcacccagagccaagggcgtattatccgcccccgtggtggaggaagaaaaaagagaagagcaacagacgagaaacgacacacacaacagcagcaacactacaaacgagtagagaggacacaaaaagaagaaacgagaagacgagagaggcaagcagaggaaagagacacacaccga

SEQ ID NO: 515058 - DNA, 351 bp, Homo sapiens
gcaagagaccgaaaaagcctaaggaaggaagaggtgggtccacgaaagcaagcagctcatcttgtactaaacaaccccccagatgccttccgatgggaggctgcaggacatacggaaaccaaagagaagggaggatgggtttagaattaacaggcatccccagcccaccccagctcactctgggggctctgtgtgcatcatctgagcagacaccctgagccacaaagtgcccaggtcagtgctgatggctaacacagagtacatacccagcacatagtacaggctgcccagcatgtagtacaggctgcccagcatgtagtacaggctgcacgctgctctcctggaatgggg

SEQ ID NO: 515059 - DNA, 192 bp, Homo sapiens
gtatcagaggtggtgggtgaggaatatgatcagatattgaaggtgggggatctcactaaactgacttagcaggattcttgctaaagctgaattctgccaggatggaaacggaagccagggagaggctgggtagagaagaggatccagaggagcctgactaaagtttggccagggagagagtctgtcaggggt

SEQ ID NO: 515060 - DNA, 918 bp, Homo sapiens
ggcaaagtggattgtgataatcatggtgcccctcggaacaactgtattgctgtggagcctcttgagtatgtggctccgggtgtggaagcgggtctgtgtccgggctcggatccaggccctgtgtagtgtgccgcgtccgtggctccgaacgctgggtagcttgctctttgctgcgatgaggtgctgcctggccgagcaggttcaatgctccgatggcccgggagaatctggtatgcccagagaccacaagaatacctataatcaatggatgatgagaatgtccaaactggcatactctaccgacaattgacccggcttgaagctctcggacagcaattgacgctttttgtcaaagccaacgtcgtatcatacaggaggaccatctggtaaagaacaagccataaaccttatatagctatatcgacatcacagggcacaagttggagatgatagctcacataggtacacggcacgatacgcaggggcgggctcgaaacagtactgcatcgtcaacatcaattgcccacctaggttcatggaccacgcgaagtaccgcaggtaaaatgatgtgtccactcttgaacgcgataacgatcacgggatggacacatgacacccagcgcaaaataattgtgttaacactggatatcctcaagttatggacaattaccaaacccggtgacgtcggatataatttgacaggtccagagaagaccaatgttgtgcgcccatagggccgaaggcatccttggtgaagaacaggtgcaaccgagtaatacacaggttaaattccccagagagacaggccgtacaactgttgaccacacagaattccagggtaagaacccaacttcggataaggtctggcgggcgcagatatagcatgctcaagcactgacgcccgggtgacaacaatcc

SEQ ID NO: 515061 - DNA, 84 bp, Homo sapiens
tttttttttatgtttaacaacaaaaaaaactttattgaattacaaatttttaaaatggatcacttaaaagtgagattattttat

SEQ ID NO: 515062 - DNA, 298 bp, Homo sapiens
ggtaccggatgagtggcagtgacgataaggagacaggtgtggccatgtgagaaatgctggtgtttcataccaggggatgatactggatttatagtaaaagctggaatcagtgcttggcttaggtggcatgtgaagtggtgtagtatttgcatataactatgcgaatgtatactttaaatatctctagattacttataatacctaatgcaatattactgttatatagttatactgtattttaaaaatttgtattttttattgtatttttaaaaatagtttttacctatggatgcagaca

SEQ ID NO: 515063 - DNA, 283 bp, Homo sapiens
ctagaggatcccccgatagcactactacaccagcctggacaacagagggagacccataatgtagaatcagatgtgcgttgttaagtcttgtccttcctgcgactggtatgttcccagctcctgtctgtgtggctccttgcggctccctcgctcacgggttggggacccctgctcgagtgcatccgaaaggagccttcccataccattcttcctaggaacgacatataaggcactctcccctgaattctacatcacatattttgtcgccgagccccagttgcgg

SEQ ID NO: 515064 - DNA, 308 bp, Homo sapiens
tacgaaggagtatgtttaatagtatttgtataaatttggaggttctgttattttattccgtttctgtcctgtgtagaggtaaaaactttacttatatttcaccataattgattttgagctccaatttgacatttcatatactgcccaaatcggaagtcagtcatgaattttactctttaactacaattcagtaattgttgatagggtcacttacctagatcatccatactcatattattcaaatatataggtggttcttgtgaaacaattacattggttctgttggttgaactgaggttcatgaatat

SEQ ID NO: 515065 - DNA, 111 bp, Homo sapiens
tatgagacgactctagaggctccctcattcgaacctctgcggaaagcaatataagaacccacataaacgcgttaattggctgtagtggtctactagtatacgggtttaggg

SEQ ID NO: 515066 - DNA, 318 bp, Homo sapiens
aaaaaactggggggggggggggggcccccccccggggggagcccctttaaaaaatttgaaagggggttaaattttgaaagaaattggaaaaaaattgggaattttatggcccgggagaaggggggtggggtttaaaaaaacccgttttaatttgcccacctaagcccttagggaagaaggggtaaagggtctttaaaagtttccaaagggttacccaaaaggatgtgggggggatggggccaaaagttcccaaatttaacgggggggccgggggggtccttgggcgggtttttttttttttccaaatggtttaaagga

SEQ ID NO: 515067 - DNA, 605 bp, Homo sapiens
  misc_feature (421)..(421): n is a, c, g, or t
  misc_feature (576)..(576): n is a, c, g, or t
ggggaagccctttcatttgaatgctgagaacgacgcgctcaaagaacccagcgaacaaaggagagggttggagcccacgcaaaacatgggtgtgataaagccacacgcgacctgagcccccaccctcagtaactactctccagcgcccaccgggaggaggggtccgcttttgtttttgggggggtctgcttctgcagaaaacatggctaccaacaggttctgaatccacctgcggaggggactgactgctctgttattcccccagcatctgtgaagaggctctaactggataaagaggtgatatagcgatcaccccaggcctagccaaccatggatggagaaaaggaaaaacgttttgaacctaggttttcggagctacccacaggaagctaggaggaaacgggaaaaagcccgcatatanggattaagccagtgcccaaattttcaaagatccttgtactgtaaaaaccggcaaaataaaaaaaaaaaacaggcaataaaaaacaagcggaaatagttctctgaacttgaggaaactttaacattccctcaaaatttttccatcaacaaaacaanaatgctaacaaggctgggtcccagaaaca

SEQ ID NO: 515068 - DNA, 347 bp, Homo sapiens
aagcggaatgcccgtgctcccttggtagcctgccgggatctcacgggtgttcctgacggacgtcatgatcattgttccgtcagcaaacttgactatctcgcccgcgccattccgtgcgttctgggtgtccagtcggcgccatggaacggttgtgccgttgattttgcctctgaagccgcagtagctcgcgtccgatgtcaacgcgaactgggtccagtttccggatgggatgtcgtatgccacggtagaaacggtgccgaaaccatcggttgggcggccgactgtcgaggggccgaaccggttaaattcagtgacggttggcgcctcgatgttatccctgtaaaccg

SEQ ID NO: 515069 - DNA, 400 bp, Homo sapiens
gcatgaattaaggtatgtggaatggcaaatcatctgcccctcttcatcctcgttaggcagaacatgtgtgtacttgatacttccctggtcatctattcaccatacagtccactcatcggaagccctcttcacgcattcatctttcagttgcagtggagtcttccaatagctctggagccatcatctttacccataaggggtttatctggttcagcatataggctacgttggtgtcgctaaacagttcgtgaggactggcacattgataccaagcgtgatgagtcagtaaccgcagacgtataatatacaggacatcaatgggcaccagtacgaggacaggggcttcggatgttcctccacaccagcgcaacctccttgggcgtgaaaatccaaactgcag

SEQ ID NO: 515070 - DNA, 163 bp, Homo sapiens
  misc_feature (48)..(48): n is a, c, g, or t
  misc_feature (68)..(68): n is a, c, g, or t
gtgaggcaatggccatgggagtttattactatcgtctcccttctcttncttttagcagagatggaacntaagaagatctccggaccccgcattaaatctgggagagatagttggttggtgccggcctgggttcaggtgtggcagaagcttgcagatgcgtccg

SEQ ID NO: 515071 - DNA, 396 bp, Homo sapiens
ctacaagagcgagatgctcggccatgtgcatggtatttaggtcaagtggcatgttctgtaccaatgcacacagcaaaggtcctcaggcactgattcacattacccaaagtcatcatattttagagttgtctccgtggctgacatttcttagccttgccctcaaacttggcaggagggaggcaagctcgtttaaagaagggagaggggaggagatccaggcaattggcctaggggttggctttgagagagaataggttgacccttcctcggaaagagggaagggggaagcagggagccacgaagagagagaggtgccacgggaactcctggctgccgactcccgtcttcttggtgaaggagtcaggattaggtgtgaaagtgggagatgaggggcat

SEQ ID NO: 515072 - DNA, 1055 bp, Homo sapiens
gagcggggtggggggtggggggtgggggggtgggtgcagaccataaagactcagctgagtgctgctgtccgggggccggctggctgcgccctcattggtcccattccctagctgctgcggtggccattgcttcgttgccgggttctggcatcaggcaccgtggatcgcagttgcacgagctttgctttatccggggcttgtgtcgcagggcgccggtctgggattccgccaatcttgcgacaatcctgaggacaagagaaaagctggcggtcgttgctgttgcacctcccaaggcttctcagtgttcccatcaccatccgaacaggactgaacagcccatcgtttctggcacgggggcattgtcgtggcactgttgactgcccagcttaatggcagtaggtaacggaaacgttccaagaccctagcgcaccggggcaacgggaatgctcagggagcgcagcggggcgctccgggctgaacaacctacttcaccgttctcgtgtctcctcaagggcccttccccaagggtgaacgcaccttgttgtgggccgtggatcgaacaaccgcaggaacacttcgttcaaataggtgtgccgtaaaacgggctgcaacaatttccctccaaggattggaatccggcggtgcaaacgcgctggaagatttgtgccacgacaacataattgtgcccaagaccgtttgctccctgccgtcgcggtataaattcctgcctactctgaacacaagtggaatccacacaacgcaagttccatcccccttaaggcccttaatgcgcaaaaaagcggtgttaccaccttaagacggggacaaccctcagcgtgaggggaaaacgccgctaactgcgttgcggcgggcccgcctgtccaaggagtggctgccgactaacgaccccgttggaacgcagcccccaaggccgggacagtaacttgggggcggcgacagaagcagagccggacataaacgggcaaccggacaaacgcgccatctgcactgcggggaggcacccaccggcgcagaataaccctcgcgcacggccc

SEQ ID NO: 515073 - DNA, 567 bp, Homo sapiens
  misc_feature (70)..(70): n is a, c, g, or t
  misc_feature (72)..(72): n is a, c, g, or t
  misc_feature (75)..(75): n is a, c, g, or t
  misc_feature (107)..(107): n is a, c, g, or t
  misc_feature (120)..(120): n is a, c, g, or t
  misc_feature (125)..(125): n is a, c, g, or t
  misc_feature (136)..(136): n is a, c, g, or t
  misc_feature (143)..(143): n is a, c, g, or t
  misc_feature (149)..(149): n is a, c, g, or t
  misc_feature (160)..(160): n is a, c, g, or t
  misc_feature (169)..(169): n is a, c, g, or t
  misc_feature (185)..(185): n is a, c, g, or t
  misc_feature (192)..(192): n is a, c, g, or t
  misc_feature (194)..(195): n is a, c, g, or t
  misc_feature (202)..(203): n is a, c, g, or t
  misc_feature (209)..(209): n is a, c, g, or t
  misc_feature (219)..(220): n is a, c, g, or t
  misc_feature (224)..(224): n is a, c, g, or t
  misc_feature (233)..(233): n is a, c, g, or t
  misc_feature (235)..(235): n is a, c, g, or t
  misc_feature (244)..(244): n is a, c, g, or t
  misc_feature (246)..(247): n is a, c, g, or t
  misc_feature (260)..(260): n is a, c, g, or t
  misc_feature (267)..(267): n is a, c, g, or t
  misc_feature (275)..(275): n is a, c, g, or t
  misc_feature (277)..(277): n is a, c, g, or t
  misc_feature (283)..(283): n is a, c, g, or t
  misc_feature (289)..(289): n is a, c, g, or t
  misc_feature (296)..(296): n is a, c, g, or t
  misc_feature (299)..(299): n is a, c, g, or t
  misc_feature (312)..(312): n is a, c, g, or t
  misc_feature (320)..(320): n is a, c, g, or t
  misc_feature (360)..(360): n is a, c, g, or t
  misc_feature (383)..(383): n is a, c, g, or t
  misc_feature (390)..(390): n is a, c, g, or t
  misc_feature (405)..(405): n is a, c, g, or t
  misc_feature (411)..(411): n is a, c, g, or t
  misc_feature (441)..(441): n is a, c, g, or t
  misc_feature (457)..(457): n is a, c, g, or t
  misc_feature (477)..(477): n is a, c, g, or t
  misc_feature (560)..(560): n is a, c, g, or t
gaattttcagagctgtcattccggatctcagagctggcccgggagccccgggggcccagagaacgcaagntntgntggctcagcggacggagaccctgtgcagattnacttcatccacanccatntccccggggangatcaanaccgangcactgtgganctgctctcnctgcttctctccttangagcacncnnccacccnnattaanccctggggcnngggncaggcgacnanggcaccaancnncaggcgggagganccggcangggaggancngcggcncccggncaccttncanctgtggcacggancgggaacngcggcagcagcagcagaccggcggcgtggggggccccgangaaggatagcctcttgaagccanggctcanggctgcttgtgggangggccnccgccgtgtccactcaagccatccacaacngctcccctaagtccantgcctcccaaccaggggctncagcggggcagggagcccccgcccctccccctgcctcccaagagccccttcccatagctggaccaggtgggacagggattttnggaggag

SEQ ID NO: 515074 - DNA, 659 bp, Homo sapiens
cctcattcatcacttgggacacatcgcctttgcattgtcttgtcacacctccctcacagatcttatagacacaatatacccaatatcagtcccccgctaatcgtgagggcttgggcccaatggtatggtcggaggaggagctcctgcctgcggttttgtgtatgtgtagtatgtgtgtgcgtgttgtgtgcgtgttacctccacaggggacactctacaccagtgtttgatctgctgtgaacagggccagccaggagtggcatggatctcaatctctctgtctctctttctctccttctacccttttggatgatatcgaaatattgtgatttgactaagagtaagggccttgaattatggaccaatattcgtcggtgtgttgctatggtctttacttctaggacaacaattaacaattgcagatggcccattcttgtcattctacacatatgatcctatacggggacatatgtataatatgataaatatatatatagaagccattcccctctgtccccttggcttcggatggaggccttgctgttgagctgaaatgcacctgcagctgggtgctgccagcagctttgcaggccccagccctgttccaatcaacgcagttgacccataaaggaatgagtatcgtccaaaaaaaaacaaaa

SEQ ID NO: 515075 - DNA, 1208 bp, Homo sapiens
tcctggcaggaagagattgagattgaggttgtgcagctgcaagaaacagattgcctgtggatgtgcacagtgagatcctgcgtactggacaaggatgctcatctgctacatgtgctgcctgtgcctgcctgaggcctgaggcccacctgcatccagcagatttgcctgatgggtgaaaatggtgaatgcatggtcctcttgtgcacatgtgcatgatgtgcttgatgacagatcctgcaaatatctggtggatgtgctgtgaatgctggcatgtcatcatgatgtgcgattggtgcaatggccagtatgtgcttgatgctgtgattgaatgctccaatggtcagaacgacactaccacgaacatacaggggattgcatgccaatgactggccttgtggttgctagatggcccttgccccaagataatgcttgccagaaatactgcttgtccaccactttacgcaatgtgtctgatgcagatttggtggtccatcacgttggatgacaacaatgtaatggtctacatcatgaatgtgaaccctgacatagcattggccatgaagcttgccttggcctcatgttgcatagccactccacacgtgcgttggaccctgatctacagatagccacattgatcagagacagtgccaccttggtgtagacaggatgtgagtgctcccttgcacatgtggcccaatctacttcagacagaccacccggtggcctcccctccacagcaaccacgtaataaatacccacgagaaacaactggggaacagttactggactacttggtgccttatcctcgaaagggaccacgacagtgcctgtgtgttacaggacatctctggctgtacttcctgtctcctccttgtatggtcaacatccataccttctaccacctccgtttaacccaaagtttcaccttgcaaatttcaactcaagggataggcggcagcaaaaatttccccctgcagcttgtcattttaccaccgttggacggtgctcttcgccttatcccaccccaagtggcgacactcagttgatcagattaaggccctgcagcaatttgctgtaatacaatctaacatcctgtttgcagcgtactttaacatgataggctccacaaagcaacatgcggctacactcaaagaactctcgagggactgaacaaaaccaccatatatgatactgtgtcacaatcaaat

SEQ ID NO: 515076 - DNA, 279 bp, Homo sapiens
cccggggccgttcccccccccgggttttttccttggccccggggggggttacctttttcccccgggaaccgcttttcccctttggccctttttggggcccccctaaacccagttttttccaaaaaaaccggggggggccgggccgggtttcccggggttttttcccccccccggccccgggggggttatttattttttacccttttttaaattttccccccggggggggggggggtttttttggggggttaatttttttttcccctttttttattttta

SEQ ID NO: 515077 - DNA, 217 bp, Homo sapiens
cctttgtggttctctctgtgaagtgcacattcttttaactgtattctcccatgagaccgttgatgttcacagttcctgataggctctgtggttccactgagcatcacatttggccattctttgccctggctgagagtacactcagtgccatgtttgatccaagaggacccggtgaacgctaaccatattcatttcgtccaggcaagctcttggtgat

SEQ ID NO: 515078 - DNA, 268 bp, Homo sapiens
taatttttaaaaagtagggtccacattttaaagttgtggattttttaaaatgtttaaatcccacatttaaaatggttaaatcccacatttaaacattgccaaccacgggtcttagcaacatctggatatttgaaagctcccaggtagccgagtgtggtggctcacgcctgttatcccagcactttgggagactgaggcgagaagattgcttgagcccaggacttcgagaccagcctgggcaacataagcaagaccctttctctacaaa

SEQ ID NO: 515079 - DNA, 893 bp, Homo sapiens
tttttactcttcgctttgtgaatttgtggtgttaggtgtttgttcttgtgtttgtacgtgttagttcttttagttaaatcttgttttcatatcactgtatctcatttggtgtgtgtgttagctaggtagtcgaagcaaggtgtcttgacttgtactgccgctctttcatgcgtatatggtttgggtattttatttctggggtggggttttttattctggttgtgttcaaaaagttgtgagatggttgtgactagatggggcttcgcttgttgttcgtagatctttggcacctgtttcgctttgaaaatttgtctctacgtggtttcccattactacgtccctggaacgcgcatcttagcgctatgcggccatgttcttcctgccccctgtccccaacctctcttcgtcgttgtcctcatagggatgcttactgacactatctctacgtctcggatgtctcttggacttggaacaactattggagtccatattgtggcctccttgaatgcaagctctcatcgtcctttaatccttccgtgttcacatctccattggaaacctcctagactggtgacacagtgcgtgaagccataaggagagctctgatagtcagtgatttgtgaagagtgcacgtgactggtcaacgaagtgacagacatttacggtagatctcacggaggcgtcaaagagtaacgcaaagtcagctgtgattgtgatttgatgttatttttcaaaaactccttgtacataacgtgatctaattattcagctcctgctgcacaagggctggactgtcggtagggataactgggattttgggccacgtggattttccctaaatttgtcccccctttactctgccctgctaagtttttctctccttagactccatc

SEQ ID NO: 515080 - DNA, 1002 bp, Homo sapiens
cgggacagcagcgagatccaagcccgagccgcaggcgccggtcgccatgcgctgggtccgggcgctgtagaagaatgcgtccctggcaggggcacccaagtacatcgagcacttcagcaggttctccccgtccccgtgtccatgaagcagttgtctagacttcggatccagcaatgcctgcgagaagacgtctattcactttcctccggcaggagactgcccgttcgcctggccaacatcatgaaagagatcaacctgcttcctgaccgagtgctgggcaccccatcggtgcagctggtgcagagctggtatgtccagagtctgctggacatcatggaattccgtggacaaaagaccccgaggaccaccggactctaagccagttcacagatgccctggtcaccatccggaaccggcacaatgacgtggtgcccaccatggcacagggagtgctggagtacaaggacacctatggagatgaccccgtctccaaccagaacatccagtacttcctggaccgtttctacctcagccgatctccatccgaatgctaatcaatcaaacacaacctcatctttgatggcagcaccaacccagccaccccgaaacacattgtggagcatcgatcccaatgcagcggtcttgatgtggtgaaagacgcctatgaatggcttaagcttctgtgtgaccagtattacatggttcccgtgaactgagaatccggaagtcaatgccccaacgcaacagccatcacatgtctatgtccttccactgtgacaagtgtcttgactcttaagaatgcctgcggccatggggaaagccgagcaagggtgagaccccccccaaagatatggggccgggaaaagatgtcatcaatgtgccggcggggtgccttagaaagaaggtgagacgtgcgcacacccacccgcggggatccagtggtggggagccacacaaagagagaggcatagggaaagaaagccaaggcgaagacacaggggc

SEQ ID NO: 515081 - DNA, 137 bp, Homo sapiens
gggtaaaaaaggtttccaaaggcccgggtatttgggaggggaaaaaggtggggggcaaggggaaatgcccccccctttccctggggggagggggggggattttttttccccaccattaaaaaagaaggggtttttta

SEQ ID NO: 515082 - DNA, 193 bp, Homo sapiens
gtgaaagaggaggagatctgagatctgatcttttctgtaggtattccatctccagagtgtcatatctttcccgattaccggatttatccacagacttaagctgagaaacgtcgccatccaggaggcgatcgatcagggctaccagctgctcggacacgatgtttcggaggttgctgtctgcctgtggataaga

SEQ ID NO: 515083 - DNA, 645 bp, Homo sapiens
gtttgcatctacataatacccccttttgactttctgatatagctgatattcatggtgttagcacacagtaggaccttgaacatgttgataagcactccttgaagaaattaacttttgagaggctttaaatatatagggaagtattttctgggttttgaagaatagcaagccatggattaattttattggacagattaatacattggcaacaattcaacacattctgattcaattgtgaaaggggaggcctttaagctaccaacaactatgagtcaggtaataaataaatgaggttggtaatgattagaggtctacagtgagggagtcaatattcaggctaatctgctgaacttgagcatactaatagtacgtttctagacctgggtcaagtaggcacatgtgtctaatcatgctgtatctgcatactgggggtctctgttgtattggacagtataggtactactgtcttactttgctctacgaaacagtggtatgcttagattcatttgactatgagtgataaatctagattatgttatttatgaggatttaagtgtaacaggtacttatagagctcttgccctagattgagcacatatggctagctttcgaagtggtatatccagtgtcaagcttgaaatatgt

SEQ ID NO: 515084 - DNA, 212 bp, Homo sapiens
cgagctgtagtacccctagttttagaagtttcaatagcagagatggggtttctccatgtggccaggctggtcttgaactcctgaccttaaatgatctgccccccaccccgccccggacctctggtttttgttctagagcaattgtaactttcatggcactagtaagatgccccaggaggtcaatgtgctagtgataactgtctaaaactagg

SEQ ID NO: 515085 - DNA, 928 bp, Homo sapiens
  misc_feature (711)..(711): n is a, c, g, or t
cgcggtggtcacagctgtagtcccagcagttggtgaggccgcgggcggcagatcacgaggtcgagagatcgagacatcctgtgaacgtggtgaatccctgtctctactaaaaatactcatagtcaataggttactagccatgtgcggcgttaggcgtcaaacagttgaaaacgtaggtattatagtgaggctaccgcttcgagggagggacactatgaacagttgataagagatacgcgtgtggccggcatggataaaccgtgttcctaggcactctgacggtgtgggaattgaaggcgttttacgctggtgtaccatggtgttgtgccacaaggaattttgggaggaaagttcctactgaaggccctggaattttattccccagtagaatgggggagatttgttgatatgatttacagtgaccgtgtgtctttatcctgccttaccaggttttatgtctaacatacgtggtgggggtagataacactctcactttttgcagtgcgactctttttaaaagatcgaggatttcgagccgctatgtttgtgtacaaggaccttgactactccatgacgcaggaagaaataaggggtcattttaagaggctaggtaagggccataactaaagtgcgagggaaatggcaaagcctcagtgccaagggccacggatgaacccagttggacgaagatagaccgtccggaggtgggcncttggacacccggagtcgtacggggggagcacgtatagtgggcaaactgtgcggcttggagccacaaccttcttttgcacacacagctacttgaccttgaagttggacgtagcaaaagcacttggaaacaaccggggatgtccttccaaatggcctaccctaggcatgcggttcaacgcacgcactggctacacaatccagtggcgcacaaaaaggc

SEQ ID NO: 515086 - DNA, 276 bp, Homo sapiens
  misc_feature (147)..(147): n is a, c, g, or t
  misc_feature (149)..(149): n is a, c, g, or t
aaacggattttttttttttccccggggggtttcagggtcctggggccaaaagggccccccccccccccttccaaaaggccaggccaaattttagttttttcccctccccccatgccccccaaaaggttttttaccctttaaaaaaangnccttccaaaattggtttttttggggggccagtttttttaaccggaaaatgtaaattcccccccaaaattttttttttcccggtcccccgaacaaaaacccccaaaaaagagggtttttggggtccca

SEQ ID NO: 515087 - DNA, 547 bp, Homo sapiens
tcggtaccagtcttacccttactgttagcatggtagcacaaaatgtggctgggtcgagttttagaaggctactctgatttctaggaaaatgaattgtacatagtcaagagagagagcacaacgaccagttaggtggacagttgctgtagttcttgcaagagatgacagtggcttgagttagggaattagcagtgaaggagggaaaaagagaccctgaaaatatattgtggttgcaaagccagcaaaccttgctggtagattggctgttgggatgagaaaatagaggaaacaagaatcatttgtaggtttggggcatggttgatggtggcaagtatatatatggcagaccaggaggggaagtgatgtagtagatggcaagtggaaatcaagagttttttgggccgtgttatgattgagatgcctactaaatgtccagttttaataagtcagcaggtacatcatgcgtgtctgaagccaggaaagaatcctgactagagtataaatttcagacattgcacaaagctgtcatttaatgacaagactacta

SEQ ID NO: 515088 - DNA, 731 bp, Homo sapiens
gccaagaatggcggcagggatggatgtggataccccgagcggcatccaagagcggtgacgtgcaagaagcgctttgaagtgaaaaagtggaatgcagtagttcctctgggcctgggatattgtggttgataactgtgccatctgcaggaaccacattatggatctttagacgggatctgcgcgtttggtatgccacaggtcgtggttctctgcacacttggcttcacagtgcatctctcctctactttggccttccgaacaatgttggcgcatctataggcgtgcacgccgacatgtggcttcgcgcgctgacatatttctcatagtcatccaactattccatgaaacgctaaagagagtagaacatcaaacaaaggcatagaatgtcgaaggctaaaccaaggcgtccgcttacttcagaagagtagtaactggttcagctatggaggagtcgtgtaaccatgctttttctagcttccactgtgatctctcgcatggctcagaaaggaagacaggtgtgtcgcatgtggacaacgagagagtgggaagttcctaacatagtatgggcactaggaaaagacgttcttccaatcaagcttaattgttttgttattgcatttaatgactttccctgggtgttaccataattacgaaattggatggaaactgtgtttttgttctgctttgtttgtgtcagtttggtgtttctggtagcatattgtattctgtgt

SEQ ID NO: 515089 - DNA, 335 bp, Homo sapiens
accctttttttttggggggggaaaacccaaaaaaaccgtccctttgccccccctcttcccccggccccgggggttaggggttttttttggccccccccccccgggggggggtttttttcccccccccccccccgggccccctttcccttttttgggggggggaggggggggaacccccggatttccccccccccccccccgggtttttaaaaaggggtttttttccccttctttttgcaaaattccccccccccttgggggggggggggggccttccccggggggtttttttttttttttttttctttggggcctaccccccttcccggggggga

SEQ ID NO: 515090 - DNA, 134 bp, Homo sapiens
gtggagcctacaccaaaatgcagatttacgtgaaagcccttacggggacagaccatcaccctagtgggtgaaccccttggatacgatagaaaatgtaaaggccaacgatccagggtatggaaggagttcctcct

SEQ ID NO: 515091 - DNA, 101 bp, Homo sapiens
tgtgagcctgcagtatgtgaccgagaaggtgctgctgctgtctacaaggctctgagtgaccaccacatctacctggaatgcaccttgctgaagcgcaacat

SEQ ID NO: 515092 - DNA, 237 bp, Homo sapiens
ttctccgaaaggcacatcccagagcttatcctgaaggaaggtttcgcacgctgtggtggactggtcgattgagtatacacccgggcgcagaaaagctgagggcggcagagaggtttgcaaagagcgcaggctgaagaatatggagagactatgttggctcccacagctaatttggaccaaaaggacaagcagtttgtagccccaggtgatgcaggttctgaatgctgatgccattgt

SEQ ID NO: 515093 - DNA, 87 bp, Homo sapiens
ggatcgtattactatggtccggggagttattataacgagcactactttgactactggggccagggaaccctggtcaccgtctcttca

SEQ ID NO: 515094 - DNA, 1208 bp, Homo sapiens
ggtgttgttagtacgacaaaagaaacgcacctcgcgtgtgaaaaagaaaatagtgaacactctgtggttctacttttggtacacagacagactacccggtttccttggaccactgtgtgatactttcttcctctggtggggggaaagatacagagggagtgttggttaaaagcaaggcaatacttgctgagggttctgtttacaagaaagaatttcctacagagaaaggcaaacattattcgtggtggtggacaaaggtgggccataagatcagaaatgtggcccctcacgaaagcttgtcagccgaccggtgtttccttcccgaggaggggaaagcacgatttctcaacacgcaagggggccaacgacctcttttcttttgtggtgtgagagaaacagcgcgcctggctctgttggtttcggtacggatgtggggagtatttctcccacagagagagaatttggaaagctgtgttcgcgcacgagggcgcgcgacgtgttgttgcccccctggttgtcgtgcacgcttaccctctgtgaactggccacaggccacacgtcacgctctctataacgcgagtgtctaccttcgagtaaacacgcgcctggcgaggcacaccaaacaagggggagatacgttgtgggtccacccccgtacatgttgtgagtgatagggctgaaaaattgaggagaaacacttgcggtaagaaagaagttttgcaaataaggccccctgcttggaggtttcttcgtaatttggggaaaatttctgcgcccggactgaagggggctcgttctcacagtggagtgcaaaactttgtccacagcttcttgctatgctgaccacgtagaagtgaaagaataaaactgttttttgagggaggaacacacctggcttttaataggtgtgcccccacggggaacctgagatcccccacgagatttttaaggcgcggtggagaggtttgggtagggccaccctctgtctttgtgctaaggagtcaccctaacttcttctcttcagtcgtgcatcgctttaaaagggccgggaacacattgtcggccgagccacgatggactaatgtgttagagggcacaagagttggaggttttattttagggaaattcaaggcccccacaaggcaaaaaaatccctggtttgttttcaacccaacgtaaaaaaagggtttatttttttgtttccccca

SEQ ID NO: 515095 - DNA, 119 bp, Homo sapiens
aggaggtgctcctgtaccctggccacagcccaatcctgccactgctgacatctggggagactttaccaaatctacaggatcaactttcagccagacccagccaggcacaggctggatcc

SEQ ID NO: 515096 - DNA, 490 bp, Homo sapiens
tactgagtcaaacaaacaaaccaacaaaataacaaaaaaaaaaccgaaaggcaaggcatttcaggatttcttctaataggatctcagactattctagggagttctgatttgtttgggatatcccagttctcctcctgggtatcttggaatgttgcactaagcccagagcagttccagaggagaatgacaggcagaactgggtcctctagctcattctcccccgctgaaaatcctgcatggccctggacctctttggattctcaggtggtaggcaaatgccttagcacttgctgttccttctacccctgaggctgcttgggttttagttggtatatttatttatttattagggacaaggtcttgctctgtcaaggagtgcaggctggagtgtagtggcgtgatcacgactcaggtggtgtacaccacctgagtccagagcccttgctcttaacagctatggtgaacagacaactttaatccccaggggtgg

SEQ ID NO: 515097 - DNA, 107 bp, Homo sapiens
cacatttcaacaccactatcaacatccatcacagtcaacacattgcacactcattctcacacagtgcacatttccacacacaacagcaccaagtggcgccatccatc

SEQ ID NO: 515098 - DNA, 353 bp, Homo sapiens
gaagggcaaacccattttattgagtggtcgtttaaactgttcaaaggcctttaaaaagggaggaggagaggaaacaggaggtgagggaaaaagagaagggaagggaggaaaaaaaggagggaaacttttcttgaaaaagttatctgtacattgcttgatggggattaaaattgcgatcactcctttaatacacccccaaatcaattgaaaccaacttatattcactaaaaatttcccagggaatgcttttaattgtttagcttgtcacagcactcacaaatctgaaactgacaaacctattatttcctctaaaaataaacatggaaaacaatttcctgaaggactgctgctga

SEQ ID NO: 515099 - DNA, 107 bp, Homo sapiens
  misc_feature (84)..(84): n is a, c, g, or t
ctgtgatacggtattcgccatgcatagttataaagtaccattacgggtcataggtcatagccattatgagtccgcgtacatacntcggtaatggccgctgcttgcgg

SEQ ID NO: 515100 - DNA, 313 bp, Homo sapiens
  misc_feature (117)..(117): n is a, c, g, or t
  misc_feature (170)..(170): n is a, c, g, or t
ccattagaaacaaatcagaaattcccttggcacaaaactctccattggttataaaaggactaagaggtggagactgttttatatattttatatacacaaagacatgtgtaaatgttnccagaatttgtcatagcttaactgaaagaaagtaaaaggatcacttagtgccntcttacagtgaagtataaggatcatttagtgtcttgtttacaatttagcaatagattatctggtagaatttggagcagaaaggactcagttcatctcatgggtaactcaaccctaatttgtcaaaaataaaaaaaagtgacgt

SEQ ID NO: 515101 - DNA, 966 bp, Homo sapiens
ggggcttgtcccgcttggcggtgcgccctggtgtcggcttgcaggttctttctgtgttgtctctgccctgcaagggcgtagagctggtgcgtgcggtagcggggctctccagagaagcctgactgccgggcggccaccaagtggtcaacctcactattctcctcttgaaggggcctaccgttggggggccactttaaccatccggcttgccttggggttgctggccaccaacatcgacacggtcatacccgaatgtgtggttggtccacaaacaatggtgtccccagggatggcccggtttcgaagacgcaggtggggctccttattgactccatgggcccacaacaacaggccatggggagcacaaaacttcgttggcccttcaaaatctaaggaagtgggatccggaattgggtaattggattgaggggagcccacgcttcttttaagctctttattgaaagaggttgtggggtacttgagtgggtttattccccttcttgcagtcttattggtgaatcaccacttgttggcgaggacttgggagggaaaacgggaggcacggtgaacgtccttggtgagttctacaagacacacagattgctggaaggttacggatacgaggggggtttaagaacaataacatgatgctgactttaggggagcaatagccggggaccagggcaagggcccctttggaccacactggacgcgaccttcattgggtagacttgcacgtccatcactggcagttccgtgtacacaacagaacagccgagaacaacgcgatggttggcgcgcggctcggaaaggttctaacacaacgtgggcgggggccgagtgagacagcgggcccctgtcccgaccgcgcggtgtgtggtcccaaaacggggcgccctcgaccacggtcgggacgcacaggcaggcgaacacccaggagaggacccacaacgaccacttgaggga

SEQ ID NO: 515102 - DNA, 997 bp, Homo sapiens
agtctaactagatacatactgtggcgcggggcccagaaggaaagtagtatgagtgaaaggtggaacatagaagtatcttgggcatgatatatgctgcatatcttgaataaagtaggtgcgaatgaaccgatgcggtcgagaatcaaagtgccagagtgaattgttgtggtaaattactggaattcatcgaggaagagagcgtagcttgagctcgatagtcataatttatgccctgccctcggtcggctccttgtaaccctctgaggccaataagacaaatttgttttccgaaaaaaaaaaaaaaaagaaaaaaaaaaatttttgtggcccggtcttggacctaaaaaaaaggttttaaaaaacaactctttggggggcgccggcgcccccaaaactgggtactggtcgaccggtgcccccaacacgtgtccccagtaggacacactccgtgactcgtaaaaaacgtcggcctgcagtgtcctaccaataaaaaaaaaacgcccggtggtacacaccgccgaacgttttggaaccaacaaactcccaagacaagggcggctcgcaagggcacaatgacagggcatcataaccaacggaggcgttcacaacaacacgtgccaaacatcaaaattaagcccgacgcccggtggaccactaaccagacacccattcacgctcgcctagcgaacctactgggtcattccggcacacctcccaacgaccataatcaagcacacacgcgaactcacaactatcaagacacctccggataccactaataccgccccacccacacatcaacgaccaacagaaaccacacagcgtccaactacacgaactctataacaacagcacaatatactcacgaacaccagcaatcatcacacacccctcgaacgcctacttgtataacaccctacctactaggccatcagcaacacaccgttcccttaccaatactctcttaccacaagagcaaacacaccacacactggat

SEQ ID NO: 515103 - DNA, 623 bp, Homo sapiens
gatccatatgcattagtggcctagaggagcttccagtgggacaagatctggaggtagaaaacagtgatgttgatcatactgaccctgtgtaggcctacgctagtatgtgcatttgtgtctttgtttttaacaacaacaaaaaagaaaattaaaaattaaaagatgtaaaattacaaaaaaatcttagagaataaggatataaggaaataaagtatttctggtgtacaatatgtgttttaagctaagtgtggttacaaaagagtcaaaaagttaaaagataagttaaaaagtttataaagtaaaaaagttcacggtaggataagttgaagtatctcggaaagaaataagtctcttgcataaatcttcataaatgcagggctcataaagtctacagttttgtacaaggatgccctaggcatttaggctcactcaccacttactcactaattctcccagaagcaattcctagccctgaaagcttcatttatagtaagtgcctaactcaggtatagcattttgatgttcgactggatttttactgtacttttttatgtttagatacccaaatatttaccgtgtgttgcagatgctaaagtattcagacagtaaatgtgaataggtcg

SEQ ID NO: 515104 - DNA, 841 bp, Homo sapiens
  misc_feature (152)..(152): n is a, c, g, or t
  misc_feature (580)..(580): n is a, c, g, or t
gtggcccgaagccaggaaggcccccatccaatgggggaagtggacaaatcccccccattgaacacagggaccccgaaaaggtttcttcggccgcacagggagccctccaacgaagcccaccggaataattctaaccccttgagagtcctttnttggtcaaacaatttaataaccaaggttttccttggccccacgaagggaccccagacgtcccgccccagtgtctcaacaccagggtttgtggtgtgaaaagagggttgtttttattgagatctcgcgccgccaaccccggcccgcacctcttgtgccccctgttctccccgcgagtgaatccccggagaagaattaagcccttctcctggcccggggaaaaaaccaaagccacggccacgtgtgttttggggacccaataaacctgagatgaatgtgcacgggttttctaaggagggtacacccacaacctgagaaggtaatgttgccacctgccgcgttgaccccagcccgggccccgcacagccgcattcctccacagggccagggggcacaagattcctccaccttttcgaggccacagcttggncccttggacttcccctcaaagggcttgttggccctctgttcctcgcttctcccggtgcctcgcaaagggccgaagaaggtgtaccggcactttcggccaaggccccacggaaccccgcaccacaccaccaccccaaccctaacgtccgctccaagggccggaaagtttcgagcgtgcccagaaggccgaacgggcccaccgaggctaccaaaactaaacctggatcctactcctttttatttaaaagatttttgctgacca

SEQ ID NO: 515105 - DNA, 200 bp, Homo sapiens
taccctatagtccagcagcacaagctactactccatctagtgatatcctcatctccagacaatgtggtacatagaaagacagaataaattctactctgggttcgtaccagtcatctcattccgggtttacgttctcctagattccccctttaaatccctgtgacgaattccagatataggtcttccaagtcatgctttcc

SEQ ID NO: 515106 - DNA, 163 bp, Homo sapiens
ctagagtatcccaatcgcacgacaaggagcattcagctgaaattcggagtagaaggaaaactggagtgtctcattcacttcactctgatttgaattttttatttggagacaagctcttgacctttgtggcccaggctgctgaattcgccgggaagcagagttt

SEQ ID NO: 515107 - DNA, 622 bp, Homo sapiens
  misc_feature (226)..(226): n is a, c, g, or t
  misc_feature (228)..(230): n is a, c, g, or t
  misc_feature (232)..(234): n is a, c, g, or t
  misc_feature (241)..(241): n is a, c, g, or t
  misc_feature (259)..(259): n is a, c, g, or t
  misc_feature (280)..(280): n is a, c, g, or t
  misc_feature (544)..(544): n is a, c, g, or t
atgacttttcagacactcaattcacacatttcatacaggtatttaaccctaaaaaaagctccaacaagcatcaccttccctccaaattgctccttagatgaaaagtgcagcacatgggctggagtggggtcaggttaagcagcctctatgaagctgcccaggacaccccacagcagccgaaatcagatctcacacttccccctctatgcttccagaacactcattnannncnnnctagtgntgttataagcccatcttnagccccgtatgtgccttcagnaaactttggtcataggaatgagaactccctgagagcaggaacagtgtcatattcattttctgcagaaaggtggagtgccttatgttcaataaatgtgtaatgcattacaatatcaggaagtgagaaaacccaagcccaagggggagatgacctggaggacacgggagaaagttgagagctcgacttggatcccagcaatgtagatttaagcagagcgggctgcgtgctaagcaccaagaaacgtccactgtaaaaagaggagtnagggttcccgatcatcctggagagactcaaagccttcctttctcactagaccatcctgtaccgcatggaatcccacgc

SEQ ID NO: 515108 - DNA, 1056 bp, Homo sapiens
agcggggagccggaagtggtgcctgggctcgcggctgtgccgcggctgactggcgggagccaggacgttggacgccgcgagctcgctgggcgagaccgcggggcgggggtctacggttcgacgcctcgagactccaacccgctccgttccaccggcagtcactatccgtacgaccgacgcgcttctggcactgcgtgcgtcgaacccgtcgcgcgccgcgaggtatggatgagcgggtcatcggggcacgtgagggctctggggacaacggcctccggaccgacttgagggctagtttttccgtggcaacttgcggcgcgggcagtgacggctgctccagccatcaccgctgcgtcatagcgatgaaccgctgctcgatccagtgtagggtcgatgagcccgatagcccccacagcacttgtggaccaatggttgcctggggatgtgcaaggatcctctgatcttgcctggagcttgcttcatcctacgctatagtacatcagtgcacccgtggcatgcgtaaggattacgggcttgttcctgagtggctgaggtactcccggtctgcatgtctcgaaccgaccactctctatcgtgctgactacggcgtgtagctactgaacgagaggtgttgtcgcgcatccacgaatggagcattgaagcagcgtttcctgagcaagaggaatgcactatgaacgacttccctggaatgacaacgttgctcgaaaggaagaccttcgcgtagctgagattgactgacttgccatgttgttgttgtcaccggcgagtgcttggggccaacccgcgctggatcgttgatctcgaaatgctgcttgcacttgggtccgaggtagtcgttggggtaaccgtgggccagggcacaaacggctacagctgtgtggtgccatggaagtcccccgattgggggcaactgattgctcagcaacaagcgaacagggggttgcctcgggaattcccttcgtacggcattatagtcccgttcatccttccgtgcgacgaaagcatacgaatatctctgtgacgcgcttcttaccc

SEQ ID NO: 515109 - DNA, 431 bp, Homo sapiens
  misc_feature (218)..(221): n is a, c, g, or t
  misc_feature (225)..(225): n is a, c, g, or t
  misc_feature (376)..(376): n is a, c, g, or t
cttcttatgacatttaaattctttaagtagtttttttggtccaataaactagacgttgtataatctaaattgagcccttgtatatctaaaactgatgagttgtttctaaattgttgattgtccatttacttgcctttggtattaagataatgcaagtaaagtttagtaagtcattggataatgaaatgattatgtttctgaagaccatattatatttnnnntttnagaggaatcatgccatcccccaaaaaatcaagaaatatttgaattttaaatataagttcatttgttaaaagacatttttacaaatgtctgaaaatcttaaaatactttacatctacctttaagtagtagaatacagagctgtaaatttccntgccttttttcctgatattaagttttatagtaaaaaagcaactagtgattgcaca

SEQ ID NO: 515110 - DNA, 676 bp, Homo sapiens
accgtacgttggcttctagatagtgtacgccgaactctgcttggtcctttcctctggacattcaacacatggatatcgagcattgatgaggagcttgaccagtggtaactgcagccagcatcatcgacggatgacgtagtggatgatagggtcagtgtgctggtcagagagctgctagcataactgatttctctgtctctaattattggtctcaatcaatcctatgtgatctatagggatccaagaaactatgagttatcgtgtttaaataggtctttgggaactcgagagtaatgaaggtcagaacaaatttgaggagaaatatttttaggtaggtagtatgacggtaggaatattgtaaattggaatttgtaatggatgggaaattagaagatgcgtgtaaaatgttaactgtatataagtgtaaattatttacgccttgaattgtttcgcactaatatgttggcatccgtagtactggatactgtttattacacctattattgtgtactaatgttaatcagtcgaggttgactcatttggggcaggtaatctcctagtggtagatacattcttatatgctaatataatatttgtttttttgacaataaagtaatattagctattgggaactagaggttaagaagtaggtaacatactgcaagtaatcattcta

SEQ ID NO: 515111 - DNA, 937 bp, Homo sapiens
gttatcttaataagtatactttgtctagggagaagttaattcatttccagtctagtacaatatatgtaaatatattaatgtcgtcatagtgtcgtgatgtaagtaaggagatgtacatacaaattcattggaggtatatagatactcatctgtctaggcagtgtcccaatgttctgaaggaatgttagacagcaaaagtttactagttctcgtttgtatgtaaatagtgacaacggtcaaacaatgtcacatcacaagaacactagttacatcgaattctctagcagtaataatacgacttgctgtaagtcattgttttctgatgccatacccttgtcgatacatattatttaaaagtgaccaatattagtgtatgaagtagacgaaaaaatttactcaaacttcattcagatcctatatctgtgatatatttatcgtgtctgtatattctaatttataagatccaaaatacatttgcatttttaacgctaattggtctcaaaatttgcttgatattttcggatcaggttacaagtcctgtggatcccctgaatgttattgtccctcttgattggtatcacttctgagctatacgtcaaaagacacataagcttcaaaagtccagacaaaacctcatttgccataaaaatcaagatattagatgtacctgtccgtaaactcccttgaaaacaacaatttttcacaggtctccattaatgaacctggtttcccatgcaaacttcagtttagcttacttaattggagtaatcccctttcctggtagctgaaagctcaagcattgtttccagcatttaagtaactgggaaccatccaacaacatgggcgaagaaggcccgctggggtgagtacaatggcaattataaaaaggattctgcaagatggaacaccaacctgacaccccctacgggaaaaacct

SEQ ID NO: 515112 - DNA, 136 bp, Homo sapiens
agggcgccgctggatgtccaccacaatgtccttccctttcagccggaagttcacacagaaatgggacctgccaggtccagctcctgacagggtcttgggtccagcgtgtaatttgggcagtgtcttgcccctgttg

SEQ ID NO: 515113 - DNA, 424 bp, Homo sapiens
aaaaaggggggcccaatttatgaactgggtattgtcttacaatatagacactcagggtacccgattctaatacgtcttacaggaactgatgccaggcaataactcctgtaataaggtttgtttgtcatgaactacacaacgtagagaaggtgtgttcacaatgcccaagtaaagtcgtagctaagaagagcttaaacgggaatttaatgaccatacattaacaggcggatctgaaaaagtgtgcatcgacagttattcgtgaaagaaagtgagtgtctgtgatgaagacgggatttgcgccaaaggcgggcatgataggggtggttctgtggtactgagacaaagcatgcctttggcaccaggagaagtatcaagacacccccatgagtacccagagctgcttgagaaccaaggcgggctaggc

SEQ ID NO: 515114 - DNA, 158 bp, Homo sapiens
agaccccaagggtcatgagatgattcctatgaagccaggacaagctctctaacaagtatttcacacacagacctatccaccagagagaaattgagaggctagaaggcagtttatggtatggaggagtaacatcgttccattttagtacataggagagg

SEQ ID NO: 515115 - DNA, 120 bp, Homo sapiens
tctcaaggaaatacgtgtgtgtatatgtagccacagagcatacataaatgcacacacacacacacacacacacacacacacacaccccaagtacataagcgcacactgactatggcagtt

SEQ ID NO: 515116 - DNA, 386 bp, Homo sapiens
tcccaggcccacattgaaaccaccaaggagcccggcctgttttaaggggtttttattaacgacagcttgggccaggcctccccaaagtttaagggggggtttttttgggaaatcaaaaaagctcaaagggccggggccttaggctttttttttttttttggccccccgggcccaaacagggccaggggagaggcattttgccccccccttggggggggattgggcagttttgtgcccttggcccgcatttggggtgggggaaatgttgcccctggggttggaaaattttggggggccccccccccccccctcggtggggggtcccctgtccctttttttccttttgggcccgggggggccctcctaataaaaaaactgttggttta

SEQ ID NO: 515117 - DNA, 329 bp, Homo sapiens
agcctgctgaggcaagagaatcacttgagctggagtttgaggctgcagtaagctatgatcacaccacttcactccaacctgggtgacagagcaagatctcatctcaaaaaaaaaaaaccagaggctgggggaaagaagggccaaaaggagggccttctggcagaggcagaaggatctctgacagaaggaatgggaccaagaaaaaggaggggtgaggtgtggggcctcacgcctgtaataccaacactttgggaggctgaagcagccagatcacctgaggccggaaattcgagaccagcctgaccaacatggagaacccctgtctttac

SEQ ID NO: 515118 - DNA, 155 bp, Homo sapiens
cgattacgctcctagacggaagtcagcttcagctgtataccatactcacaagggctgaccatgatgtgccctgtctctgcatgaggactcacaggacagccagggtcactgatgcctgcaggactgcatggccgacaagatgatgcacattttaa

SEQ ID NO: 515119 - DNA, 287 bp, Homo sapiens
ccggtcttgagggggaaatagaatgatcagtactgggtgggtaggcctaggattgtgggggcaatgaatgaagcgaacagatattcgttcatttatggttctcagggtttgttataattttttatttttatagggcttatggagtagtgtgtagtagtgtccagtgtagtgtagtagtagtagtagtaagtccacaactaggccagaactaccactaaacttaccaaggtttactcctactagctatacctatttccaagtggagacagatacagtagtagagacca

SEQ ID NO: 515120 - DNA, 105 bp, Homo sapiens
  misc_feature (19)..(19): n is a, c, g, or t
  misc_feature (76)..(76): n is a, c, g, or t
caggaagctgagacagtgngatagcgagcccaggaggtcgaggctgcagtgaaccatggcagcgctgcactccagncctgggtggatagagccaaatcctgtcgt

SEQ ID NO: 515121 - DNA, 278 bp, Homo sapiens
  misc_feature (207)..(207): n is a, c, g, or t
cagttgacactctgtatctagctgctctggtggagccttggagaacctttatgtctagctcagggattgtaaatacaccaatcggcactctgtatctagctcaaggtttgtaaacacaccaatcagcaccctgtgtttagctcaaggtttgtgagtgcaccaatctacactctatctaggctgctctgggtggggggccttgggagnaacttttgtgttcaatactctcgtatactcaactcaatctggatggggggacgtggggaggaaccttttgt

SEQ ID NO: 515122 - DNA, 1383 bp, Homo sapiens
  misc_feature (874)..(874): n is a, c, g, or t
tccgtaataaaatgtcacgttaatggctacagggctgttcatttccagggacaggtctctgaatccccctgtgaaagagggctggttttaaagtctcccaattcatctccagccagctgtgtgtgttgtgacaggttattcaatatattttcttttaaaaaaaattttttggaaaaccatctttgaggcacctcagaattcacacccccacacccccacaataattgtggtggttctcccgaggaacgcgtgggtggtttcttctcctctccttcggcgccgggggtgaatcctctgcgggagtgaaattctctatattgacaaaaaaagcgcaacgagttccacagagagggctaatgtggggcgcccacgtgtgcgccacccacaaagaccctaataggggcgcaggggccccggagagcgcaaaaacacaaagaggggagagagaggcgcaaagggttcccccttataaaagagagatctcaaaatctctcccccgaaaggggggcgcgccatgggggagaaacacgccacaacacggagaggaaaaagcgggaggacagagagtgcgaaccgcccgagaagaaaaaatggcgctctctacttcccgccttttcacgaggcctttgtgggcccttgagagaactatgggagggggcccaagaagatattacaccaggggcggccttctttgggcggctgtgggagcctttagtgggaggggtggtgtctcccccctttgtggggattttttttaccccctattgggggggggcccccccccagaggggtttcccccaagaaggggcccaaggtgcttgttggggggggaagacgaggggagggacctatccacgaggagaccaaatgctancccaagagaagaactccatacccgggggggggggggaggaacaaccacgagggggagagggggagaaagcttctcactccaagggaagagatgtttggggtggccacgaggggtggagggaacaaagacaatacgcccacatgaaccactttgaggaaacagggcgggggagcttttaaacccaaaagcggcacccaaaggccccacaagagggggcctccccacaaagcggggcccatacaaaatgtgagaagaggaaagagggcgccaactttaaaaacgggggcacacatgttgtaaagggctccccccaagaaggtgataatgaccacagggggcgccccaaaccctcgggggtggttcgctccacgaggatgttaacacaagagtgtggccccaaaaagaaattcgggaggtgtgggaaccagtggaccatatggggagatatccccccagggggagtaacacagacacacttgtccgaggatataaaaagaagccccaaaagg

SEQ ID NO: 515123 - DNA, 116 bp, Homo sapiens
  misc_feature (35)..(35): n is a, c, g, or t
aaaaatatatgtatatattgtatgtctccatcctnggtagcggttggcccattttcccacatggactttatttggtccccagtatttattgaacagctgtctatgccaggctctgt

SEQ ID NO: 515124 - DNA, 169 bp, Homo sapiens
cgctattctgtttctgcagccggaccaggaagggaaggagctgctcccgatctttattaataagccacagggatatttctaaatagtgctcgatagctgttttctaatacctcccttaaaagtctagcctgtgatcccagagacctgcaggagacctgagcaagccagg

SEQ ID NO: 515125 - DNA, 468 bp, Homo sapiens
ttgtctctccctcctccctggaaaacacatccacccttcctgcctccacttttcaccctttctcctctgctcttatcactttaagatctcagagactctaccctgcagttcactacatttcaccaaaaatggtcatcagaaaagcaccacttctctctttaacactggattgaatctgttggcttatagagttcccagcactcttgatagttgttactattttggaataacataactcattctcatccgcattatgcttatgaacttgtggaatgacacaggtttccttcacttatctgtttgaccttgggcaacctctttatccttctgaagcacagtttcctaacccctgaaatggacatagaagtgccttccttatgggttatagtgcaggttcagtgagggtgagcacagtgctgactcgcggagaagtgtctcataaatgttagctgctgctgctaattatga

SEQ ID NO: 515126 - DNA, 351 bp, Homo sapiens
  misc_feature (145)..(145): n is a, c, g, or t
  misc_feature (241)..(241): n is a, c, g, or t
  misc_feature (282)..(282): n is a, c, g, or t
tgaggttcgttataggttcgtcaacatcacgccagcctgaggtgggtgtcctggttggcaaaagaccggtcaagtttttacgtgaatgggctgacacttgcgggccagaacatgttcgtgtgataccgggactcactagctgcanggatggcggaatttatgcagtggactcctcgtacccaagatgcaccgtgtgtggccccctacctctcaagtgtcacgtgtctaccaagactggcanagacgctagtccgtgctgatgggcaaacgaaggtgtccacngcgtggtttgatcaaccaacgaaatggttatgaaatgcgcctcccaaccttcggcgttcccatgtacga

SEQ ID NO: 515127 - DNA, 180 bp, Homo sapiens
agaggaggtcatccttccaaaacttatattaatggaccattcactgtgagcgacacacttttctaagaactcgacctacaatttgttaacactgcaactcccatttcacagacgaagaacccgagtcacagttgattatctcaaggttacattcggaggttcattgttctttcacaaccc

SEQ ID NO: 515128 - DNA, 129 bp, Homo sapiens
gtgtgtgagcagacgtgcaggagccctgtgcttcctggccctgcgtaacgccgacaacagccgcaccatcgtggagggtggcgggctgtggcagcactcagggccatgaagcgacgcccgcagaaggcc

SEQ ID NO: 515129 - DNA, 112 bp, Homo sapiens
cgtggttgaatactatttgcgtggaggtgtatataggtcgtagcggaatcgggggtatgctgttcgaattcataagaacagggaaggttagaagcagggtcttgagtgagga

SEQ ID NO: 515130 - DNA, 514 bp, Homo sapiens
  misc_feature (12)..(12): n is a, c, g, or t
tgttattcgatntgagctctcaacagattgaatgatgcccactcacaataatgagggtagattttctttactaaagctaccaattcaaaggctcacctcctctggaaacaacctgcaagcatgttttaccagctatctgggcatcccttagcccagtcaagttgacacctaaaattggccatcacagcaggcaatcacattgaagcttctgctcatcctggtgtaagtcacatctgctcagattccattggcccgggctgacaacaaggtgtggaagcacaacctgcccccgtttatgggggtgatgtgaggtcacctgcaatgaacagggatgtctaatcctctctgacacagtggaggagtgaacagctgcagatgataaaaccatctaccatcaaatcttccagaggtttccactgagttttgtcagtgcagtcagccctctgtattcttgaggtcctcatcttcagattcaactagccacagatcaaaaatatttggaaaaagaacaatt

SEQ ID NO: 515131 - DNA, 150 bp, Homo sapiens
ttggggggggttttttccccttttatgtggggaatagtagtttcctgtgcccagaataattttgggataattttttttaaaatcccctctgaagctaattggtctaatttgagattgggtttgttcctaataaaagtgaaggggatttta

SEQ ID NO: 515132 - DNA, 122 bp, Homo sapiens
  misc_feature (111)..(111): n is a, c, g, or t
tccaggcccagtctctctcctcaaaaaaaaaaattctctcttaattttttttccctccctttcttaattagattttggggaccctctagagtcagaccctggacgggtctngcaagctctgg

SEQ ID NO: 515133 - DNA, 171 bp, Homo sapiens
tggtagagagaactgagggacacacattaggtgacagaagcagagggatccatgggactgctgaggctgactgggccaggagcatcttcaggggatgatggatgcctctggaagggcagcaatgtccagagtctggcctccagcaacccctgaagtctctcccaggccagg

SEQ ID NO: 515134 - DNA, 175 bp, Homo sapiens
  misc_feature (130)..(130): n is a, c, g, or t
cccctggtctgaggtgtccatgatggtcaatgctcactcaagttcctggtccagccaaactgccgcagcaaagagtcccaaatttagtatcaagttcctccggaagtcattcctatcagtggcaaagcgnagacgccccgaagccaatctcccacgtgtccggaatgttggccag

SEQ ID NO: 515135 - DNA, 628 bp, Homo sapiens
  misc_feature (593)..(593): n is a, c, g, or t
cgctggtggcggttggtgtggagaactctgcgagtctcttgggttttttgttttttgttttttccagcttctttccgcctctattctgcctgttctgtagggcgcagttatgggtcgcaagaagaagaagcagctcaagccgtggtgctggtattgtaacagagattttgatgatgagaagatccttatacagcaccaaaaagcaaagcattttaaatgccatatttgtcataagaaattatacacaggacctggtttagcaattcattgcatgcaggtccataaagaaaccatagatgcagtaccaaatgcaatacctgggagaacagacatagagttggaaatatatggcatggaaggtattccagagaaagatatggatgaaagacggcgacttcttgaacagaaaacacaagagagtcagaaaaagaaacaacaagatgattctgatgaatatgatgatgatgaatctgcagcctcaacttcctttcagccacagcctgttcaacctcagcaaggttatatcccaccaatggctcagccaggactgcctccagttccaggggcaccaggaatgcctccaggcatacctncattgatgccaggtgttcctcccctgatgccaggc

SEQ ID NO: 515136 - DNA, 271 bp, Homo sapiens
tatatgcaggattgcctcttggatacacaccaaggaggggaaatgcctaggctgttcaactttacaggatgaacaattgttttccaaagcgtttccaccaatcatactcccaccatggatccacatccactccaatttggtatgattaaactcactttttgccgatctagtggatctaaatggtatctcactagggcctaatttgcttttccagaagctgaaaatcttttatctgtttattggacaaccatgatacttctctgaaactgac

SEQ ID NO: 515137 - DNA, 1329 bp, Homo sapiens
  misc_feature (570)..(570): n is a, c, g, or t
  misc_feature (624)..(624): n is a, c, g, or t
gctccgattggagatgattgatcctagagatagcattgtatgatcaccaggcatcctcatccgactcctgggggacatcgaagagactgccaatttctactttgatccgccaaaggtgccgtattggtctagactggttcagcgtggtcttacgattgtctgcttatattacatacggataactcgcttaatctgtgacttgtgtcatatgctcgacctgaaaggcgagcttaagctcctcataacgcgtgtgcccgaagagactcctatacacgagctttccctgtgcgcacctgcaaaggcccaggcaaatgcctctccttggggccagtgcatcacggctcgtcagaatggggtgaattgtcgttgtctcgcacaaaacaaaacagatcccgaacatgtccgaaaggggaccaccactgttgccccctgacgttccggtgagtaagcctcttggtccctacaacatgtgactgattttgtagaaccgagggattccacaagcacggcctctctttaagcaatagcagaagtatagaaatacgctggagaatgagaggtgaggctcanccccttgtgctctgaccgcacttgcttagtggagttacagtgtagacagtttcnttgactatgtcgctgagttctcaaaggaacaaaccggtttatggaccctaataatctctaggaggtggggacctgccactttgaggctttctcatagccgaagtgttttcagcgcccttgagggagaacatcgtaattcgacattgagacattgttaggaatctacggaacacccacgacctcatgtggaccatggggacaggacacacggaatggtggcaacactacggacgcaactactcagcaccacccaattgtttaattccacgagctgttaatacctctgcgttatatagaggaacacggacacggcacctctatgttgtgtgccaaattgaacacggggggcgcttaactgaggcaccaatatactaagtggcccacgcgactccataaggttgaggcccgcgttgtgggaggaaagaaagaaccttaggctcctcgccaacagagggattatctaatagacaggaagggggcttttcaattcgattagccaattaactcctataccgtggggaagacatgcgcttatagcgcgttcatttgtatttggccctccgaaacatttacacaaagcaccccctaaggtttctagaaaaattggcaccaccgtctcccatatgtccgggttattcgacaccataagttcgcgcgattataccacggtcctcccacattcttgggtgttacggtaccacatat

SEQ ID NO: 515138 - DNA, 319 bp, Homo sapiens
cccagattcctgagatttgcaggttgttgtcgggaatctcccgaagccctgcgatcgtggcgacaccaccgaggcgtccttgcgctgtcccctgtgaccaaaaacgtgcatgcccattggaataggtgcaactggtgggcacgttgatgccccatatcgctatggaaggggaacggtaatgacccagccaggtactggttccgagaaacccgacaaccttggtgactccagctctcgtggtgagtccagtcctgcccaggacggaggcacgaatctgccatctggagccgagcttcagcctgaggactcccagcacgat

SEQ ID NO: 515139 - DNA, 342 bp, Homo sapiens
  misc_feature (10)..(10): n is a, c, g, or t
  misc_feature (32)..(32): n is a, c, g, or t
  misc_feature (81)..(81): n is a, c, g, or t
  misc_feature (321)..(321): n is a, c, g, or t
  misc_feature (325)..(325): n is a, c, g, or t
gcaaatcgcncggatgttgaagagccaaaaanacaagcacgctgggcgggcgttacgtttaaaccaagtcaacgtgttgcngggccaatagcaccatctgcccccaatccttgccatgcctgaaaacgtttaacggcttccaccagttcattatcgtaggcggcgcgaacggcaggcgcaggtttactacgagacgtcgtttgcttatccatcggcttagtttctgctgtttcaacagtaacagcggatgggctgactaccgcgtcagttggcgtgtcatcgccaggtagagtaattttcggccccccgtccaacatgccntgtngttgcaatatttcgcgc

SEQ ID NO: 515140 - DNA, 252 bp, Homo sapiens
agtgtgatgcagaaggctgcattcgaggctctccaggtgaagaaggacctggcgcatcggcagatcaggaaccagattaggctaatagaaactgagttactgcagctgacacagctggagttaaagaggaagtccctggacacagaggcgcttcaggagatggtctcagagcagcgctgggcactcagcaacctgctccagcaactactcaaagaaaagaagcagcgagaagaagaactccatgacatcctg

SEQ ID NO: 515141 - DNA, 236 bp, Homo sapiens
ggtcagtcgcctctatctataagatcttcccagtattttgagacatagaaggggtgtgctctttagctgttcttaggtagctcgtcaggtggcgggggtcttagctttggctctcctagcaaagtgatatctagttaattcattatgcagaaggtgtaggggttagtccttgactatattatgctaggtaataatttttcatctttccctatgcggtactatatctaatgtgagag

SEQ ID NO: 515142 - DNA, 447 bp, Homo sapiens
gtatgaaattttcactatttagatcctctcaagtttcatttcacttcaagatgttctgtttttgtttttagagaaaaccactccactcacttcagctttgaaattgtttaactttttggtccatgatttaaaaaattaaggtgctaaaggctcacaacgatcatgtagactgactttaaactgatacgttttctgctgagtttatttaagctaatttgtttttaattatttttaaatcacaggttctaaattagttccattctggagctggctacaaatgggtaaagacttactttttaaaaatggggcaaatgccagtggcacgagaggtctcttgcaaactcgaaataaaaaagaggtggttagcagtcttcagttgtgttcttatgcttcagtgtcacatttcatttcatttgaaactaaaattttaagtaaagctgaaataaa

SEQ ID NO: 515143 - DNA, 193 bp, Homo sapiens
atgtctgcgatgtatgtcacagccatttggtctggtcctgctcacgtcgggccctagcgatgcggtgctccgcggacccgcagagaagcccgactcttggggttcaacgaggtctcgctacgccgctctacatgatagcatcttcctagtagtcgactcagcgcatcccagcgagagatagggagtacgcttg

SEQ ID NO: 515144 - DNA, 150 bp, Homo sapiens
gtcctgggctaggcatacgcagcggtcggcggcacatccaaccacaccagttgattgggggtgacgccccagcgagccaactgcaggctaaacctgcagtcggcggcaggatttccgcgctgctgtaggccgccaacccttcatgttggt

SEQ ID NO: 515145 - DNA, 649 bp, Homo sapiens
  misc_feature (311)..(311): n is a, c, g, or t
gtgggtgttagcggtaatattttgtatatagtgaagaaaaaggtattttaatttttagttaaattagtaaaattattttagtaattgtactttaatgtaataacatgtacgttcttacaattataagttatgtgtgaacttaatattttattaagattttattaaatatttataaaattgtatttaataaagttagtatgttattaattttagcttattttattttacttactggtgtaggtaaaagatggtaatatactatttggtaatataatggataaatatttctagtaatcctttttgtcagtgantttaaactgcaaggaggttaaagaatgttcttataggttaaatatttatttctcatctaagtttatactttttaatttttgtggatacattgtatgtgtatatttatgccatatatagcacattttgatacagacatataatgtgtaataattacatcaggaaaaattaagtatccatcatctccagcatttatcctttgtattataaaccaattctacagttttagttttttttaatgtacaattgttattgactacagggctatttttatggttatgctaaaaattatatagaagtataaataaagtccacacattctgagtcctaaataagcatt

SEQ ID NO: 515146 - DNA, 1679 bp, Homo sapiens
  misc_feature (587)..(587): n is a, c, g, or t
  misc_feature (880)..(880): n is a, c, g, or t
tcgtgtgtgggggtctccctcgccccgccgtgtgttgtatttcccccggggcaccatttttggcttgtgacccacgtggaggtgctgtcccactcatgtacatacgggtggtggggtttgttgtcctcctgctccgcccgcgctctgtcgtgggggctcgtccctcgacatgtcgtccccccgctcttgtggaatgggagtttccctcacagcgtgatgtgttctcagttgtctgcggctcagtgctctccctctccgctcactgaaggggcgcggccgccacaaggatgtgattcacttccccggcgtgtgttgtctgggggataacttttcccgcgtgctgtgggtggccgtctcacctccgattgctgctttgtggggccgcctttccttaccaatggggtcgccacccacaccggttggtgtgtccgccgaagccgccaaggagaaatatgcgtggtgcgtagagtatttttacgggcgtcgaagaagcgcccccgaggggggagaggtttgcgatctgtgtacactcggcgatgatttctgcggggggcccgcgccccccatgtcgctgccgagcaaaatantttgggttcctccctcaccccctcgtccgccagtaatattatggccgtcttttctggtggtagatactccgggggaatcagcttctgtcgtacgtcgcgaagaaaagagtggtccctttatagccacgacttgtgtgtcgctgcgccacaattgtggcggcttctaatacatttttgaggagatgagagtattggaggagaaaattttgtggccgcccccctccttggtggccgacacagatattgccgacacgacgccaccacgccctcaacatgggcgttaataggcccgncttctacttctgcggacaatatgacttcttgtggtgatattataaatagcgcccctcctttcggcagaatataaaggagaaatatctgggtgctcgctccttgagaagagcgctcttgttgatatctctcgaatagatatgtcacagcgcacacgtcgcgagatctgtttatggagaacacctctcgttctgcgctcggaggatttttgtggaggccacctcttcgttattatgtcgagaaagctgtagtaaacctcggtgtgtcgcccctctctcgcgtgatatgtatcaagcgctgcgtttcacagcgcgggctcgagagatggtttctctcgcgagagatgtttttctctctatcagagaggggctcgcgcgcacacagagacacccacagctttgttggttgtggttgctctgtccagcgtgttgctcgctcacacagcgggttggagacaagtttccacacgcccgctgataggagacccaccgctgttgcgctcttttcttataggctcgagagagttctctttgggccacagagaacacccgctcggcgctcgttatactctggctcttgagaggttggagaagccggtttgcaatttaccgccctgtaaaatgtaattcaattctcttaaatttatatgtaaaggtttttgtttgtaccgccaattcttctgaattcttttgaaagagatgaccaaccaaattttggttttcttactgttatgtgagaaccttaggcccccagccacacgtccttgtgtaaggaaaaactaaaagtgctgccgttacccca

SEQ ID NO: 515147 - DNA, 241 bp, Homo sapiens
ctgtttggttttgacaacctaccctcaggtggccaaaccaatctcccacattgatctcccttcgactaagcactcatctcaccgagacagagcttttccatccccccaaaaaatgtgcatacccaacgaggtatgttccttctcttttgaggacatccatcttcttagggcagggaaggggtgttaggtggacctggttagttttggaggctcttgggtttgtgcagtttccatctaccct

SEQ ID NO: 515148 - DNA, 399 bp, Homo sapiens
gtggttcacgcctgtaatcccagcactttgggaggctgaggtgggagcatcacttaaggccagggcagcctggggacatgacaaaaccctatctctacaaaaacaaaaagcagggccgggcgcagtcgtcacgcctgtaatcccagcactttgggatgctgaggcgggcggatcacctgaggtcaggggttcgagaccagcttggccaacgtggtgaaactccatctctactgaaaatacaaaaaaaactagccaggcatggtggtgggcgcctgtaatcccagctgctcgggaggctggggcaggagaatcgcttgaacctgggaggtggaggttgcagtgtgccgagattgtgccattgcactctagcctgggcgacaagagtgagacttcctctca

SEQ ID NO: 515149 - DNA, 290 bp, Homo sapiens
  misc_feature (11)..(11): n is a, c, g, or t
ccccccccggnccaaacccttctgccgccaccctccttgtttgtttcatagctcctctgtaaaacgcggagcttgtttgtgccctcctacccccccccattaatttaataagtcctgccctcctattatttattgtgtttactatctattgtcttaaagttttgtatattttgtaaatttttttcctcaattagtagatgtctaaattcattgtacatctgattcttttatattccattgttctgcatcaaagtgtggtttttattttgaatataaaaatgtaatttgaa

SEQ ID NO: 515150 - DNA, 165 bp, Homo sapiens
  misc_feature (45)..(45): n is a, c, g, or t
agacctgtgcaccaccatccatgttggctgcaaggttggtgtgtntccggacacttacccttctagggtgtttccaccccagcttttcacccaaagggcttcccctgtttgtgaagaatttccatacacgaagaatcaatggctgttaacactagcagggaatat

SEQ ID NO: 515151 - DNA, 299 bp, Homo sapiens
caaggaaaacggcaagatgcaccgagctccgcacacctgcccgacccaaacaccatcagctacctcttcctgctggaacactagaacagggttgccgagaaggagcccatcagcaaaatgccactgcacaaccaggctaccgcgagaggacccacgccacagagaccctcagaagtggagagcaaagcacacctcacctcggctgcggacatctgctcccatgacgtcatggcgcaggaccaggtgctcctctactacctgcagcacccccccattaccttcgcagaactcaagcggaa

SEQ ID NO: 515152 - DNA, 229 bp, Homo sapiens
  misc_feature (88)..(88): n is a, c, g, or t
  misc_feature (101)..(101): n is a, c, g, or t
attggaagcatttctcagaattaaaaatagatctagttaagtgtggttattactggggaatgaagctctgggagacttacttgcctgngttattgctttanacatatactacttttatttattatcaaatttcttgatgtgtcgtttccacatgataaacctcaaatatttaaaatgtgcaatttgataagctttgacggatttcacacctttaaagccttcaccacag

SEQ ID NO: 515153 - DNA, 373 bp, Homo sapiens
gaaaatgcaggctgggtgtggtggcttattcctgtaatcccagtactatgggaggctgaagtgggaagatcgtctgagcccaggagtttaagaccagcctaggcgacatagggaggcctcatctctaaaaactataataaattagccgggtgtggtggcatgtgcctgcaatcccggctactcaggaggccgatgcaggagaatcgcttgaaaccgggaggcagaggttgcggtgagccaagatcgcgccaccgcactgcagtctaggccacgagagtgaaactctgtatcgggagaaaaaaaaaccaattaaaaacagtgtgggcacagtagcggtgcacacagtaccaggctatgtacaatagagacatga

SEQ ID NO: 515154 - DNA, 243 bp, Homo sapiens
gtgactatcagatctcatgagagtcactcactctcatgagatctgatagtgagtgactatcagatctcatgagagtcactcactatcagatctgatagttttataaaggggagtttccctacacaagctctctcattctctcttgttgttgccatgtaagacgtgactttcaccttctgccgtgattgtgaggcctcgccagccacctggaactgtgagtccattaaacctttttttcttgat

SEQ ID NO: 515155 - DNA, 684 bp, Homo sapiens
ggtctcgctccgtcgcccaggctggagtgcaatgttgcaatcatggctcactgcagctttgaactcccaggctcaagcgatcctcccatctcagcctcctgagtagctgggactacaggcacaggccaccaaacctggctaatgtttaaattttatgtagagatggcggggggggcgggggtctccctatgttgcccaggctggtctcgagctcctgacctcaagtgatcctcctgccccagcattccaaagtgctgggattacaggtgtgagccactgccttggcctggccgtaggtttgtaactgtttcatagaacgagccctggagaagacagtagaatgagcctatctagtttaacaaaataaagaagcacgttcgatttcgaaacaacaccaaaacagaccaacacacacacaacaacaccttctttggcgccgcgctcggacaccacgaaaaagcgactctataaacaacccccggatgggagccacgcgggcccaccaccaaggcgcaacacggcaaccactggcgcgccacacacgcaggactacccctaacgagcaccccagcgggtcaacgcgcacacaagtggcagaagagcatcttccacccacccaaacaaaaaatccgccccgagagggcgcaacagcgaggcgtgctccagacgaccaactaccacgag

SEQ ID NO: 515156 - DNA, 914 bp, Homo sapiens
tgcagtggctcacgtctgtaatcctagcacttgtgggaggctgaggcgggcgaactgcctgagctcaggagttcgagaccagtctgggcaacgtggtgaaacctggtctctactaaaatacaaaaaataagccgggtgtggtggtgtgcgcatgtagtcccagctactcgggaggctgaggcagaagaatcgcctgaaccggggaggtggaggttgcaatgagccgagatgtgtgccactgcactccagcctggacaacacagcaagactccagctctaaaaaataacataaatgatactacacaaaaaattattaacattaaaatttggctagtaaacatcctgtaaatcttttatcagatacatggttgtgaatattttttccatctgtgaaaatatttcactttctgtgatggcatcctataaaatataaaccttttaaatttgatgaaaccccaatttatctgaatctgacatactgtgaaaaaacatttttcaaccaaacattttatattcctcattaagtaaaaaagttttgtcgcaactccaggaattcggggcaaccataggcctgtcttaaaacaccaagtctagtcatttgtggctccagaaaaggtcacttaaaaaatgctaataagtatatggaacttctgaggggtcccacggccatttggtcaaggtcatgcctaaatgggtttccacattaggttcacccacacgttggcatacttttgtgaactcaggctgaatgattttaaaaacacattggtctccatttcgacaccaggcataagggcaggcggacaaatgccttgtgggttgtgcacacagttggcacgggagtttcacacccaaggggataacatctgggctacaggaaaaacccacgaggcgcgggggcacaaaactcgttc

SEQ ID NO: 515157 - DNA, 458 bp, Homo sapiens
  misc_feature (120)..(120): n is a, c, g, or t
cgaggaatcctgttaagcacggtggcagccggctctacggggtgtccttctgccaagagccaaggggaggtccccttgggggtcaaatggggggacaagcccatcccaggcaaccccccncgcgtggtggggccctgagtttgggggcggtgccaaccggcagcccccaagtttgccccgcttcccaaaaaggccggcctttttccttcaaccgggggcgaggccgccctggccgcccgcctgttttgacaaccgcccctgccttgtgccgtgttgggctcccctgcctccccagccagcggttgccctttgggctttcctttgggcaaagggagccctttggggggcccgcttgttttttttggttttggggggggggggggggggggggccgggcccccccccccccctggtttttttttcccgccaaggggaaaaaagttttgtttcccttttta

SEQ ID NO: 515158 - DNA, 189 bp, Homo sapiens
  misc_feature (40)..(40): n is a, c, g, or t
  misc_feature (47)..(47): n is a, c, g, or t
  misc_feature (171)..(171): n is a, c, g, or t
gtgccaatcgcctttcaaaatgttttctatttgctcaccnttccggnagtgctaacgtttagctaatgagtagagtgccttccttcaacatattgttaccttgtctagccttaggaagcaaaacagtgccacctgaaataatacaggctcttttcgagcatctgctgaatnccgtcacagcatttcgaa

SEQ ID NO: 515159 - DNA, 974 bp, Homo sapiens
caaaaaaataacgcacactaacagaacagtatctttagctgcaatagacttcacacattgttacgctatgtatcactttagacgaactgtcttgtccccctttagtgcacccgtcctttactggctccgtgtacttttcctcctctgtgatgtatgagttttcccgttccctgtagacgccctaggaatagcaatttcttgaccgaaccttttttccaaggccttttctttaaacaacccggtgggaaagtttattccgcgaaatcattcgctgtcccgctcggcaaagagcactggttcaacccccccaagggggcatatatcccggtgacccccagaggagtgggcgtgaacaaacaggaatcctgttttgaaaccgcttttccagtcgtgcccccctcgtcggaaaccccacatctgtgggccaatccttcggcgaagcccccaaaaagtggggggcccacaaaacaaatatccagcacgttatctcgtagcaaatgagaaagtttgagaccgccgccgcgctgggcttgtctctaatgaagagccccccttcttgtgtaaccccccgtcaaaccggaatggtgtttcaacacctagttgtgaatagcccccggggcctgcgtatgtaaccaattggtctattcggcaggggggccgatcatgcacggcaccagcgagcaacactttgtagtcacctggttgccccaggccctcaaacattctgcggggtggcgtagtaggacaccaccacacaaggattcagtagcaccagctggccccttctgtaccgctcctatcgccaaaattttctcaggagattcagccccttgtagtagataacaaatggagtgaagtagccgcccagtaggatgcagcagcaccccactgcagtagtatcatcctcttgctgtgttatacatggagcaccctcacattattcccccaaaaaaaaaacccctttcaaaaaaaca

SEQ ID NO: 515160 - DNA, 380 bp, Homo sapiens
  misc_feature (11)..(11): n is a, c, g, or t
ttacgcccaanactccagtcaagggttctatatgaacagccataacacactccagtgaagggtctctctgaacagccctaatacactccagtgaagggttctctctgaacagccctaacacactccagtgaagggtccctctgaacagccctaacacactccagtgaaacggtctctctaaacatgcctaacaaactcccagtgaagcgttctctctgaacagccctaacacactccagtgaagggttctctctgaattagcctaacacactccagtgaagggtctctctgaacagcgctaagacactccagtgaggggtactctctgaacaggcctaagacaactccagtgaggggtactctctgaacagcgcctaaca

SEQ ID NO: 515161 - DNA, 1119 bp, Homo sapiens
  misc_feature (403)..(403): n is a, c, g, or t
gctcctctgacacccagtgccttctagatgtgcagcagtagagagagctctgctagtgtcagtgggtggcggatgccaccttccttctcacaaatacttcttggccctgtgtcctgtgctgcccgggcaggctccccatggctcagggtgtctgacgatggctgcttagctgactggtcaggtgtgcaggcgcccaatgccgcgtagcttcgtgcctgggtcgattccggtccttgacctatgcttgttctgaggaacacgctgctgtgtgactgctggctggtagtgatgccatgtactgtccgaccttgtccctgttgaccgatcggccatggacgggcccttgctggggctgtactggggccttgcagtggcacgcgacgtgctgtcgcactctgtggantgtccagggggcaccttttcttctattcgggagatcctgtcgagtgacccttcgtgtggttcccgtggggcttccttccggcgggtacacccctgttgcggtcacctcgctttgcccctcgtatggattccggccgctggcacggcattgtgtcgatgggcaagggcgcgaaacggctccccggttctcatgtggttcttccttgaccgtgttgagtcgccgacaatcggcacgtacctgcagggccgctgggagtgcttgtgcacggccgcggctgtgctgctttgtggcccattccatccttcgatctatatgttgtcgacgcattgtcgaaattttgctcggtccgtacacgaagtcgaaggtggatagcaattagagcatcggtttttcgttggagaagccttagagaagttggtatttcccaaataagacccaggatagtagtaacgcctctgagaacgagatcttgggcacagaattttgctctggtaaccacctaagttgagccccgttaacccagtttttgtcgcgcaacctgggatcgtatacttccacacacgttagacacaggcccattggttagtttgaaaggcagaaaccttgggttttagcttcacctttacgcatacaacttgacacagcaactgaacttgcagcgacggtgtggtttttaactttccaggtggttccccggggacaccaaccaacaccct

SEQ ID NO: 515162 - DNA, 137 bp, Homo sapiens
aaaggaggtaagccgttaccaatactactgcataaacgcttggacctctccacgtgtatgccgtctctggcccatctcaggctgagcttacctgtgacagcagctctgtccccaccccatgggcctcatgaataaat

SEQ ID NO: 515163 - DNA, 184 bp, Homo sapiens
gtgttatccggtctgcatggaggtccagtatgagtctgatactgtggctggctagtccggactgggcggcgtcgtatgatgtactgtcatgggaaaggcctgttgcattttaacataccaaaggagctcagccatagcaatcaactaaaaacagaatgcaaacactctgggatttattagaatt

SEQ ID NO: 515164 - DNA, 694 bp, Homo sapiens
  misc_feature (2)..(2): n is a, c, g, or t
  misc_feature (136)..(136): n is a, c, g, or t
  misc_feature (166)..(166): n is a, c, g, or t
  misc_feature (189)..(189): n is a, c, g, or t
  misc_feature (194)..(194): n is a, c, g, or t
  misc_feature (211)..(211): n is a, c, g, or t
  misc_feature (315)..(315): n is a, c, g, or t
  misc_feature (317)..(318): n is a, c, g, or t
  misc_feature (326)..(326): n is a, c, g, or t
  misc_feature (350)..(350): n is a, c, g, or t
  misc_feature (358)..(358): n is a, c, g, or t
  misc_feature (417)..(417): n is a, c, g, or t
  misc_feature (425)..(425): n is a, c, g, or t
  misc_feature (460)..(460): n is a, c, g, or t
  misc_feature (480)..(480): n is a, c, g, or t
  misc_feature (523)..(523): n is a, c, g, or t
  misc_feature (579)..(579): n is a, c, g, or t
  misc_feature (598)..(598): n is a, c, g, or t
  misc_feature (610)..(610): n is a, c, g, or t
  misc_feature (627)..(627): n is a, c, g, or t
  misc_feature (660)..(660): n is a, c, g, or t
antatttatggtaaatacatatatataacttacttgcaatttaaattacaaaattcatatacaaagtaagcgaaagggcacacataagaaatccaccttgaccacagaaatgtagaaaacaccagccctaatgacnaagacaatgtttcaaagaacaacaaacaanaagaaaagttgagattctacaanaaatnatattaaacgcaagcantatgatgcacagacgtgagccctgaatattttctaaagcataaaacttagggaaaatcattttacgggggatctattcatattccaaacagcattttaaaaaanannaaacttancttagttttaaaaacaaaattcanacccaaanaatcaagaaccagaaaatgggtttcttaccttttgtttccggtgggatgtgggctgaanagcaaggngggttattcaatctggtgttatgaaaagtaattgnttcttaaagggacttaagtntttccttggttagaaaataattataggctccctaaaatattcnaggggggcataatagggggggggggggggaattccaggacagcttttgttgtatcnaaagggagtaactttcttntaataattgccnatacggatagagacctnaaggtccattttatgagacaataaataagggcngaccatacatcccatcacagctattagctgtctg

SEQ ID NO: 515165 - DNA, 1016 bp, Homo sapiens
ttctcccccctcgtgtttgttttggtttgttttaaacttttcgtacatgtacctctctcccagctttaacaagcatgacgagaccactctgccatcctttctcagctacccctgccccacctgtactctttattttttggctggagtatattaaggtaaatcatagaaaacataatgttaccccaaaattacttcagtatgaatcctttttcaaaaagcatagctatagtgtcattatcatatccaatgaaattaacagtgattcttgaatatcatctaatagctagttaggagatttggggctagtagccagatttttgacctctttaaagaagtgttctttccactctctgagtattaagtagctgtatctgtcacaaatgagtacagaattcaaatgcagttaactgtgtgaagagttagtgtttagtttttcctgattatctcaactatattttttattgtggccaaacaaaattactcatcttaaccatttttttgttctttttgtgttgttgatcttaaccattttcaagatgcaatagttcaacagtgttaggtcatattcacattgttgctgcacaattgcatctaattgatctgctagcaactttttcatcttgcaaatctatatacccattgcagcaacaaggcgtccattatcccccttcctccagcccctggtgaccacaattctactttctgtttctatgcaattctgactgctttagatacctcgtataagtgaaatcatgcagttattgtcttttgtggcgggcttatttcagttcagtcataatgaccttcaaggttgtggcacgtgactggatttcctcgtccttctctaaggctggaactacagttaatactcttgtattttcatgccaacatatcgttcatatccatgtcgagcatgtctcatgggctagttggacactgttataacttcttggagaaatgtctattccagctccttatggctatctttccaatcaggtccatcaactcctccgctg

SEQ ID NO: 515166 - DNA, 111 bp, Homo sapiens
taaatacaatgtttatataacttgcattgagaactttttgaggccaggcgtggtggcttatgcctgtaatcccaacactttgggaggcttgaggcaggcagatggcttgag

SEQ ID NO: 515167 - DNA, 400 bp, Homo sapiens
  misc_feature (94)..(94): n is a, c, g, or t
  misc_feature (192)..(192): n is a, c, g, or t
  misc_feature (396)..(396): n is a, c, g, or t
ccttttttttaaccgggggggagaaaagagtgtccccccccggaaaggcctcccccccctttgagcaccttttaagggccggcccccctttccncccaacaaggggagccttaggcttcagttttactttgctgcaaaataaggcgggcctgcaagcggactacaccctccgaggctgttgaggacaatttncattccattaaattaaaaaatactgactggctggcaggcaggtgccatgtctgggaacagggacgggggagcttcacctttttgtcttggcttttctttgggctgtgggggggcatccatttccagggtcggggaggaaataccaaatgcattgttgttctgctcaatacatctcacttgtttctaataaagaaagcagctganccca

SEQ ID NO: 515168 - DNA, 1582 bp, Homo sapiens
  misc_feature (454)..(454): n is a, c, g, or t
acggacgtggctgccttccgtgcgctctcgagtgctggtcttcctcgactggcaggcaagcacagagtctctgtatcagcagcagcattgctgtccatcctgtggtgtgtggcttgagagctggtgtattcggtctcctgtctgttccagtgtctgtgggaccgatgtcctcgatgagaccgcgtggacaggattcgtcgcgcatgcctggctggcgcgtggtcctgggcgcacctgacctctcggcgtatttagggcctacccatgctgcgcacatcggatcctgatactcgcacaggtgtcctgtcgtgtaggagcgcgctgagccaagtcaggtcgtcgtgagcgcaacacgtgggtcacgagcctagtaattatccgaaaggcctgtggtggcatctcgtgtgctagctgcgtgtcgctatgcagcgcatgcggcgcgtgcccccaaccngaaccacggagcggcggccgtccttcgagtgtagcacgcagggaccttgggtgccctatcccacatggtttatccatctgcgtagcgtagatcccgcacgcacaaggtgccccttcgttggctctagggctatgaaaccgaagccaatagtaccccattactcagattctgagcaagaggagcctacttcgtggggaggcatacgcgtatgaaaagaggtcccaccgaaacggagatgcagattccgctgttggtacgggggtgcaccgccactcctagtccctagagaacaatttcgaccactagggcacgcaccgtgggcgggtgctccgaggggcatctgagtggtgtgtgtggtgcccgctatctgtgggtacttgtccccctttaggttcctttgcttcccccaggtggacatggttggtgtcgcgcgttggcgcccacgccttttggcttggtcccgagtggggcgctaagggcccaaccggcacaggtgggacacagaggcccgtttgtttgggtcgggtttgtaggggccagaagggccgtcagggttcgctaggattggggggccctttggaaaggcccctggactatttgcttggggaccgattccggagctcgaatggtgaacctctgggacatttcccccaggtttttccccctcccacagagggacacactttttgccccccgggcgggggagcgccgccccattgggggcggcgagcacgagagtgaaatgtggccccatgtggaccttgtggtgtggccatctggggggtttggttccgcaaatcttgtgggattgcgggttaaaggggccctgggggatagtaggaacataaaatattcacctccaaaaaatttgctctaggtattatacacacggggcccaggattgctgagtggtgtgggagggcccctatctaacaaagggaagggggggtgctatttggtagaccgcggcggagcacgagtgtgattagcaaagagctagaattgtatgtacaccccccggctctgatgtagaagagacgcgtgcgtacacacacgagaccttgctgacaacggagttgtctaccagacgtggggtggacacacttaatcgaacaagtgaaaaaaaag

SEQ ID NO: 515169 - DNA, 522 bp, Homo sapiens
  misc_feature (14)..(14): n is a, c, g, or t
  misc_feature (226)..(226): n is a, c, g, or t
  misc_feature (470)..(470): n is a, c, g, or t
  misc_feature (473)..(473): n is a, c, g, or t
  misc_feature (498)..(499): n is a, c, g, or t
  misc_feature (521)..(521): n is a, c, g, or t
agatggcccccagnatagcccccggggtgtgggatgggttggaccccacaagggccatgtgcccctcctgtccttgcctgtttggtgacccccggttcctctgaacccctccctcatcctcatgccttcccttcccaagaactttcctggaaagagatgctggctttggagatgatatagggttttcctccttcagacccacctgttcctgccctagcaaaaaggncctaccttggccgggcacggttgcgcacgcttgtaacccccagccctttgggaggctgagacggtggatgcttaagccccaggagttcgaaactagcgtgggcaacttggcgaaaccccatctctgcaaaaaatacaaaaattagctgggtgtcatggtgtgcgcctgtggtcccagtacttaggaggttgaggctggaggatcacttgagcccgggagttgggaggttgtagtgagccaaganttnccactgcacttagcctggctgacanngacccctgtctcaacacaatana

SEQ ID NO: 515170 - DNA, 361 bp, Homo sapiens
  misc_feature (55)..(55): n is a, c, g, or t
  misc_feature (137)..(137): n is a, c, g, or t
  misc_feature (153)..(153): n is a, c, g, or t
  misc_feature (357)..(357): n is a, c, g, or t
gcccttctgcatggccctggcccaccttccccagcaaccacgcccagcgccctgnagcgccttcagcttttactctgcctgccaaaatgcaagcgcgccgcccttcaagcccgcactacacctacgcgcgcgcctgnttgcaggcacaatttncattccattaaattaaaaaatactgactggctggcaggcaggtgccatgtctgggaacagggacgggggagcttcacctttttgtcttggcttttctttgggctgtgggggggcatccatttccagggtcggggaggaaataccaaatgcattgttgttctgctcaatacatctcacttgtttctaataaagaaagcagctganccca

SEQ ID NO: 515171 - DNA, 297 bp, Homo sapiens
cggggcttcccccccgggttgttttttgccagcagcagcagccaatgagcatttagggcggagcctaggaaaggggcctcccctatagggggacagggtttgggggaaatccctgccaacggcacgctggggttttgttcctgaactttgggtccccgaaggcaggaaaggaaatgaattaagccagctgggtttggcggggggggcccctgtgggggcccctccggggccccttgggctccgtgggggggccgtttgggttttcccgaaagaaccgaaatataaagtgttgtttta

SEQ ID NO: 515172 - DNA, 824 bp, Homo sapiens
  misc_feature (204)..(204): n is a, c, g, or t
  misc_feature (280)..(280): n is a, c, g, or t
gcggggccatggtgagaggggtgggtgagactcctcgggactctggcggggttagggcgtttccccctaaacgttggagcggctcccagaaaaccagagctgctacaggaggaatctttggcactcctcatacgtctggattcttgggctctaagcctgagggccagggcctcaggcagagtccagagatacaggcacagaggncctgatccctcacatcttggaaccgtttacatactggcactagccgaaagagttaccggcccaagcttccagtggnaaggcccttgggattgggggagcccccccttgtgaagagtcccccttttttctttggcagggcgaattggttgtggcctttgtggccacccaaccaacacactttgcgaaggattcccagggtcctttgggacacaggcttggggggggggttgggtgggaacccctttggaaagaattgggggggggaaattttccctttccaaggaggtttggttcccatttccacggtgggttcccccctttggtccaagggccccaataggcctgggaaaaagtggtttcccccccctttgtaatttgtgggatgtggaactttcccacatcgtggggggggggccatgcaccacggaatagtggtggactctccccccccccacaaaggaaagtgtgcgccttttgtgggaaaggggtcgttcccccttcctaagccagcttccccccctttgtgggaaagaagatttttgccctcttgtggtgtgttcccccctttaattaggttgtggaaacaggttgggggggttcccccaaccccccttttgtgg

SEQ ID NO: 515173 - DNA, 333 bp, Homo sapiens
taaccaaggactgttatgttgcttttctgattatttctgctgtgtcaatcacgattcttccactatacttactccgatcctttatattattgtctgcttatccatcctttgaaaatgccatccacaatcccaattgtcgcttcttctgcatgagcataggagccaatctgagccatgatggtcatcaatgcaacttgtttttatgtaggagctctttccacccatgtttggtccggtaattatcattactctctctgagtcctctgataaatctgtattatttgggacatattgatcctgttctcccagcaacacatcaatcacaggggggga

SEQ ID NO: 515174 - DNA, 378 bp, Homo sapiens
ggtgtgtagcggctgcgaagacggtgtcgtcgcactatgcgaagtaaggccgtcctgagcgcaaaaaccgcccccagatagagagcacccacaacggtcttagcaccatttaatccacacaccgccgtgcgggcaaggcatccgagactatggattcttccagtgcatctacctctcattactccgttggtctaacccagtcccagacgtgctggtcggtgcatccggctagctcgcagaggagcgtcaaatcatgttggtgactgaaatatgcaccaatattattacgaagcacaggaggcatggtcacggtgaatttgtcgaggtggggctaatgtaaaggtctattccatggctctatgtgtctagtgagcggaa

SEQ ID NO: 515175 - DNA, 408 bp, Homo sapiens
cccctgtcctgcaagaggattaggagtttcttctcgggaaggcggacaataccctgtctgtcattccaaggccagaagtgactgggtaggcaagacatccctggagtgagaggaaccttactttctatggccctactggtcaggaggcctggcctcaagacaaggagatgcggaaagtcagcctagacgcatggtggaagcagaccaagcgctagaacaatggaaagaggtgccctggaagagatgctgagagcagtctacactcggacttgacaagacaccactggcagtctgcactgtacacctggactgcacatgacaccactgatagcagcctacactctacaattggacttgacgagacgccactgacagcaggttacactaggacttctcgacgccgtgctg

SEQ ID NO: 515176 - DNA, 1082 bp, Homo sapiens
gggcagctgtaatcgttgcgacagaaggagcatcagaaggagcatccggcggcacaggcgggcctgtaaggacagtgtgggtcgtcggccccgtgagggcaggcataaggccaatggtcgaatgtccccaagacgaagaagagcctgcctgggtgctggtggaacctggacctgcagagcgatggagatccagggtcgtgagaagtcccgtgccgatcttgtgctggtggctctcctaaggccaatgccagccacagttccagcccctccatcagctcctgcaccttctgcccagcccacaccccgcgtcagcctctgtccctggaaagaaggctcggtgaggaagccccagggccaccgggtgtcagcctgtggccgacatgctgaagctgcgctcacttagtgagtgggccccccaatggagctgaagatccggctcatcacagggtagaccagtggtgacaagggagacctttatcgcctctgcaggtggaacgagcggcgtgctgcgccatggcaagacctcaccatcagccacttgtggctgcttgacgtcgtgcgcgccacgcaggaatgccaaggtgaaagggaagttgtcggagagtcctacctttcccctgcccagtctgtgaagacgaagatcaacattgaggagaagctgtcccgggcaaagattcaatccctccttaacccaggcatctatctggagagcaaagcgggattgctttctcaccatgtccttgctgcaggtctgtacgagacctcgaaatcgcatcacagtgatccggggcctgcgggatccctgcggtcaactttgggcctcttctccacaagaccctgtggaagcagtgcgaacacaccgtggaagtcggaaccaggtgcaagcaaggcccttctgattaggaccggtggaatttgaacgggactccgcagaatctggtctttgagagctccggttccaaaccaccatttgccagttgcccaagaacaagggccatcctcaggagctctagaagacaaacgagagttggaatataggtacacggcgaaaacggagtaatgccataatagccaaagaagac

SEQ ID NO: 515177 - DNA, 113 bp, Homo sapiens
ggtacccaggcttgatacggtagtgctatcacagctcactggcagccctgaactcctggggctaaggatccctcctacctgagcctccttgagtagctaggactgggtctcca

SEQ ID NO: 515178 - DNA, 1001 bp, Homo sapiens
tggggggtaacgaaatctttatctggaaaaccaaaaaaccgggcaaaccagaggtcattccaaacgaggaagattggtggcacctcgtatagcacaaaacaaacacaaacccgagaaaacaaaaagaggggcgggggcgcccggctcaaaaaaaccgagaggggggagcgaaaactcgaggaagaggggcggaaaatttttcctctttctccacatttttctttataaagaaaaaccccacacccagaaggaaagaaacaacaccacacacgacaacacccaccccaacgcgttgtgtggtctccgcgaatgtataagacaaccctatacaatgtggggggccaaatacctgcagaacacacgtgcgtgagttctttctctttctctcgcaaaagacaaacaaaaaaacaaaacgtgttcacaaagtaagagaggaaaaagcgcgaggagttatgggaggttgtgcgcccccctcgcggagagagcccccccttctcgcggggagggccgggggtgcccacaacgagggggggccacccgcgaaaacacgccgcgcggtgtcttgtgtgctcacacaccgcagggggggggaggggacgcgccaccctaaagaaagataatatctcccccccgcggggggcgggcccacaagaagtttataacacgagggtatacaccccacgagcatttctctcgtggggtactccacacagggggggggccccccctatagaggagggggagggcggccggcaaattaaacataacgaacaagaggcgccgtgaggcacccgcctgcgttatacaaacaacgccgctcgcggcccgcgggggcgaacaaccccgcgtaccaacgctggggaccactcttcggggggaagagagacacccctataaatctgctcgggggggggggggcacccacactatgtggcgcccaccacaccacaccctcaacagaaagaaatttcaaaacggcctcacaaaggggcgacacattt

SEQ ID NO: 515179 - DNA, 214 bp, Homo sapiens
gcttgctctgagatgtctcctgcggtttgagtttctacataagactgtgtgcagcataagtttctggttgtaatcatggagtttgtatggttaattatgcgttgcaggaagaggaagtcgaaattatctttcagtttactgggcttggggattgagtaatttatgatacgggtgattcggggtgttatagagaggacgctacgttgagaagctt

SEQ ID NO: 515180 - DNA, 195 bp, Homo sapiens
tgagggcggggcaaagggagcttgacgggaaaagtgaggagaaaagaggaaaggaaggccaggttgggagaaaggatcagttaattctgaggaaaaaaaaaggaagggagagggactatatggcttagcagattgcaattgagggcgactgtggggcgctcgtgccgggaactctctagagttaaccggaaggct

SEQ ID NO: 515181 - DNA, 137 bp, Homo sapiens
ttactgcacagacacacacgctcacacttgcacacagcagctaagcacacagcacattctacgaacacagctcacagctacactattcacgcagcacacacgttgcacacgcttagcacccacctgcacacacacaa

SEQ ID NO: 515182 - DNA, 230 bp, Homo sapiens
ttgacagcatcctaacaggatgtactgttcctgcccagttccctcaactccacctacccatctcctcaactccactaccccatctccctcatgctagcaccccgcgactgtcactgcaccgaccgggcctctgaggaccctgctctctaggttcagaaagcgaaccctcacgtgcacacctgacctgggctgagaggatgcctcagagtgtcacctatcaccctggaacg

SEQ ID NO: 515183 - DNA, 358 bp, Homo sapiens
aagccggaacgacttattattacaactggccatatgctatatagttcgttgtggtctcgtctaatcagcaaccgaggaatcctctataatcacacctcgcgtcggtccagcttggctctgtccagtacattcaacatcgttcttgaacttgggaaacccctggcggctgtgttgcccaagctggagtgcagtggtgcagtcctgggtcaccgcagcctgcatctcctgggctcagtcagacctccttcctcaccctcctgagtagctgggactacaggtgcctgccaccaagcccagctaattttttaaattttagatggggtttcaccatgttagccaggctggcctcaaactcctg

SEQ ID NO: 515184 - DNA, 515 bp, Homo sapiens
gtcatgaagaaagttctgttcaataaagttttggaatgtttccaaaaacaaaaacccaaaaaaacaaaaaaaaaaacaccaataccctcacaattaaaagacaaaaaaatacacaaaaaacacccccggaattttaaccatttttcccttaaaaccaaaataattgtgcctaaaaaatgtaaaaaaatgttctcttttttaacaaaaaaaacctttttttgaagaaacttaaaaaaaacaaattacccccaggttctactttttattgtgcaaaaaaaaactccctttttatcccccattataataaaaaaaaacgggaaccccccatccccccccttttataaaacatcctttcccccaaataataaaaaaattttttaaaaacccccacaccccaagaggcccccaaaaccaatttccccacaaaaagaaggccttacaaaatcaaaacgcccgtttaaaaaccccccccccccgaaaaaacccccggtttccccccatataatccttttaaa

SEQ ID NO: 515185 - DNA, 401 bp, Homo sapiens
ctccaaagcaactaggacgaattgggagatattccttttctagtttccagcaagagattgttttgagtctgtgttaattcttttttaatgtttgatggaattatccagtgagttcatttggatctggtaatttcctttttttttttttgggaattcttggaattataaatccagtttcctggatagtggtagagcttttcaattgatctattttattattgggggagttgtggtatttggctttattggaggaataattctattttgcccaatttgtcaaggtttttgttgttgtagatgttgtccctagtattccctatttatctttttccatatctttagagcctgtttcatcactatttgttgggtaatttattgtcttttttttttgggcagtctgg

SEQ ID NO: 515186 - DNA, 965 bp, Homo sapiens
  misc_feature (308)..(308): n is a, c, g, or t
  misc_feature (316)..(316): n is a, c, g, or t
  misc_feature (529)..(529): n is a, c, g, or t
  misc_feature (535)..(535): n is a, c, g, or t
  misc_feature (566)..(566): n is a, c, g, or t
  misc_feature (592)..(592): n is a, c, g, or t
  misc_feature (616)..(616): n is a, c, g, or t
  misc_feature (655)..(655): n is a, c, g, or t
  misc_feature (663)..(663): n is a, c, g, or t
  misc_feature (670)..(670): n is a, c, g, or t
  misc_feature (676)..(677): n is a, c, g, or t
  misc_feature (680)..(680): n is a, c, g, or t
  misc_feature (694)..(694): n is a, c, g, or t
  misc_feature (698)..(698): n is a, c, g, or t
  misc_feature (700)..(700): n is a, c, g, or t
  misc_feature (707)..(707): n is a, c, g, or t
  misc_feature (709)..(709): n is a, c, g, or t
  misc_feature (713)..(713): n is a, c, g, or t
  misc_feature (728)..(728): n is a, c, g, or t
  misc_feature (734)..(734): n is a, c, g, or t
  misc_feature (744)..(744): n is a, c, g, or t
  misc_feature (746)..(746): n is a, c, g, or t
  misc_feature (749)..(750): n is a, c, g, or t
  misc_feature (752)..(752): n is a, c, g, or t
  misc_feature (754)..(754): n is a, c, g, or t
  misc_feature (756)..(756): n is a, c, g, or t
  misc_feature (758)..(758): n is a, c, g, or t
ggcaaagcaggggaactgatcccacacgtgtgcgcaaggcttcttccccaagacgtcgattctcgtggaacgacaaagaaggggaattcaccaaaggacccggggagcccgctaaaggagtcccggccccacaatgggctgcaccacaaagatctaactcgggtaccgcgtccgggagggccataaacgacgcaggccagcgcgccccagtagggcacctcaccttgttgggagttaatccgggaatcgtcatcgacccggagctctaacgaggccctcagtgaagtgggagaatcggcattgaaggngtcttcangttcctgcgctccgaggctgtggcccaactatggggccaaaagaaaaagaacagcaacatgacctacgagaagctgagccgggccatgaggtactactacaaacgggagatcctggaacgggtggatggccggcgactcgtctacaagtttggcaaaaactcaagcggctggaaggaggaagaggttctccagagtcggaactgagggttggnactatncccgggaccaaactcacggaccactcgaggnctgcaaaccttcctgggaggacaggnaggccagatggcccctccactggnggaatgctcccagctgtgctgtggagagaagctgatgtnttggtgtnttgtcanccatcnnccntgggactcggagantatngnctcgccncncccnccctcctcttggaantacaanccctggggtngnagnntnantntntacgctgcaagtgtatctcgtgttatctggtgcctctctcagacccagtctcagacactaaatgcagacatactccttcctccatgcagtacatcctggagtgatgccaaggaggcctgggagaggccctaggggagcaccgtgatggagaggacagagtaggggcttcctagcaccttctttctggactggcgttacctccagaac

SEQ ID NO: 515187 - DNA, 446 bp, Homo sapiens
  misc_feature (281)..(281): n is a, c, g, or t
  misc_feature (382)..(382): n is a, c, g, or t
  misc_feature (390)..(390): n is a, c, g, or t
  misc_feature (430)..(430): n is a, c, g, or t
cccattttacctgtcctaaaaccagacaagacttacaagttagttcaggatctgtgccttatcaaccaaattgttttgcctatcccccttgtggtgcccaacccgaacactcttttgtcctcaataccttcctccacaactcactattccgtgcttgatcgtaaagatgcttttttcactgttcccctgcacccctcgtccccgcctctctttgctttcacttagactgaccctgacacccatcaggctcagcaaattacctgggctgtcctgccgcaagnttcaacaagacagcccccattacctcagtcaagcccaaattttcatcctcaatctggttacctatctcgggcataattctcacaaaaacacacgtgctttncctggtgnttatgtctgattaaatctctcaaaactcaaatcccttacnaaacaacaacttcttt

SEQ ID NO: 515188 - DNA, 237 bp, Homo sapiens
gtgccagaacaaactgatgatcccagcttattgtagtattgcctccctgtgtcgagaccaattcaaccttcccagaggcagtcagacctcaccccaggacagagtgtcaggagcattgctgtgtgctccctcaaccctatgcacaaagcaaacggttcagttttccctgagcatcacgcatcccaggcctgagtgccgcagggtgattaggagtctctacagagaattgcagcggca

SEQ ID NO: 515189 - DNA, 292 bp, Homo sapiens
gatcgaccctgcatggtccccatattctgtctttgaaaaggattgtgtggcttatggttctgagatgccagggaaaagggaacagaagatgatatgaaccatgcttataaggataaaagaagcatattcactttgaatatcacttcatgcttcatcatctccaattgcctactccagtaacagtcttcagtattcttgtactggcttcaagaaaaggtgtttttaggttactggaatagaaaacttcataaaaataagtaaggatccattgtcaagaggtatagtagcttac

SEQ ID NO: 515190 - DNA, 280 bp, Homo sapiens
gggatgggagatgtctggagccggatgtaatgggcttctctcaggtcagagtaggctctccagaggtcccgagccccagcaaaagcctcgccaaggaacgaaaagacgcttcgggcggctgacactcaggaccagggagcagaaaaccaggcccgtgagaagctgcagggtgctctctagatcagaggagataagaccccttcagaagggtagggcggtatgccccaggataactattttttttccccaacaagattatcatttccttaaaaaaaaatag

SEQ ID NO: 515191 - DNA, 407 bp, Homo sapiens
gttgacattctttcatgtcccttccctttactcatgccgaaactatcaactgggacattttgggcttttggtttaaaagttaattgatattaaactttggttttatctaaaaagtaaatgtatttgcctttgccaaaagactgacccaagagcaaataagctttaaaatcgggggttatgggctttcccccatttttgagcatattatccaaaatggtttgtataatataaatgagaatgatccagtttaagtaacccttgttaacccattgtcatggacccctgtcataaacccattttttggtttgtttgggaaaaaggcatatgggatttaaccaaattcccttgtaaatgttggattggggatttttgggtaaattttttcaaataaaggctaccagaaccca

SEQ ID NO: 515192 - DNA, 163 bp, Homo sapiens
cccacatgcagcaggacctgcccgcacaatactgtgcctaaagacagagctgccctgtcactgccaccaccacagcccacacacactgtcaagggggcctaagcactgagcccaccctcactcaccagttgccaactgcccagagtacactagccacatgccc

SEQ ID NO: 515193 - DNA, 126 bp, Homo sapiens
aaaggacaccaaagtatcttcaataacatctcgattatcaccattctctggcaaagcttgggaaaaccagttttgttcttatccatttcttcagacatttccttaatgtctctggaacgaatatct

SEQ ID NO: 515194 - DNA, 587 bp, Homo sapiens
acccggcgggggcgtacacacatacagagcgaaaaccctggcttatccacggaggcaccccctctaggaccaaatttgtcaggcacccaaatcaacaggctcggcaggcgcagtgaagcgaaccgacacaattccccaaagagggtattaaactcagagccagctcaggagaaggctggtgctgacccctctcgcgacataagatgtggctggcgctctgaatacaccaccgacttacaaggaagccccagaggaggggggtgagcgcacccggggaatccctagggcgccctaactagtcaaacgggcaactaccccccggcaaactgtaatcagtcatagttcgacgccccccaggggacaaaatgtaaagtcaccctggtagcaccgggggccagcaaacagacagctgaaggcgtcttcaaagaatcggataaaaaaaagcttgcagcccgcagggtgcaccgccacagacaggtacccgggcgcgcggagggcacgagcgcatggagtatccttcgcgggcgcccaagtgcagattcgtgctccccgcgaacagacaaataaaaacgcccgacatgacgaga

SEQ ID NO: 515195 - DNA, 1084 bp, Homo sapiens
aggatggtctcgatctcctgacttcgtaatccgcccgcctgggcctccgcccgcctgggcctcccaaagtgctgggattacaggcatgagccaccacacccggccgaggccttttgtgtgtgtagtgtgttgtgtgagacaaatgtctctacgtctgtcaccaggctggagtgcaagtgtgtgctgattcttggcttaattgctaacgcccgtgccttcccgggattcacacgtgattctccttgcctcagcgtacgtcgggagactgaggcccagagaatggcgtgaacccggaaggcagagcattgcagatgagccaacgatcacgccactgcgctacagcctggggtgacagagcaagactctgatctccaaaatataaaaaacaagaaatggataaaacacttttacaccggactcgagaaatttcagggaaatattgaagtctcgaaaagaaagcaatgctgacgggcaactcaccagtggatacagacagagcaaaccaactccagcagaaggagaagaaacaaagcagaagaaaaagcggacaaaaaacaacaacacaccacaaaaacaacgacaaataacaacatgaaaaaacacaaaaacaaaagcagcacaaagccaaagacgtagggacaaacaatgagcgaacaacagaacagaggaaaacagacaggacacagcagcgcaagaatccaagagccaaacaacaagagaaaaacacaacgaagaaacagagtgagagaagccaacgagccacccgagaagaacaaacagaatacgtagtacaaacaaaacacaagacaaaaacagaggaggaacccagaagacaacaaccacgaagacagcgcacacaacaaaccaaacacagtaaaagaaaaaacgcacacagaaaaccacaccgatgcagggaaaaagggaggacaaaaaaagcgaggaagagcagataaagcaaagaaaagaaggcgaagataggcaaataagacaaagagaaaagcgaagtaagaagtgagagacaaaacacgagcaggagaagagaacaccacacagcagcgcaccgaaaccaaggaacgcaaacaaa

SEQ ID NO: 515196 - DNA, 114 bp, Homo sapiens
atccactagctaaaaaatcccaaacatataactgaactcctcacacccaatatggaccaatctatcaccctatcgaagaactcatgtatagtcataagataaccatgaaaacat

SEQ ID NO: 515197 - DNA, 683 bp, Homo sapiens
aagatgagtgcagtgtagctggcgactctggatttcaggagcgccgatagcctaccacagtgatctttcccagctctctgagccctctccacccactctctggaaggcttgctcactgtgccctgtcagtttttggactgaatgctgagtctgatagacctctgttccccccgtcagcccctttccttacaccagtctctctgggtccacgacccctaaataagagtatcctggagcctggcttacctcaagtgtctttcccagagcagagctagacttcctttacaccaagggtatttctctggaaggctcctttatgtgtatggcttctgaagaagtttgagatgttttacacaatattttggtggccaggagctctaaccctcacccccaacaaccctgtcccaagacttttggctggctctggggagggttcagaatgcatcggcttgagggtgcagggttggcatacacagctggagataacataatgtctgctaagacgcctggtgggtttcagtgtctgttgaatgaatggcactcagatatttgagttgggggtcccagttgccttgttaaatgcttttcctggtaaaccagtgttctacatctgtatctgcaggggaagtgtatacctcatttatcctgagaactggatcagaagtaaaggttgccgggtccag

SEQ ID NO: 515198 - DNA, 315 bp, Homo sapiens
atcgggcacgccgccgccggggaagagtacagggtgaattggcgtcgcacgaacgtattatgcactgtgtggcttgtggtggggtcttaagttgtggtctgagacacagtgctgtggttcccctggattgagtgcaactgccgtatgctggtggacccccaagaagtaccacgggcctctttaccggattctcagttactcttacaagaggactggggtccgtggttcggcatacaggatgggctccgaatttccttggctaactccatgcagggactctgcaaggtttggctttactgaggggactcctcctac

SEQ ID NO: 515199 - DNA, 417 bp, Homo sapiens
cttttgtagtgtgagatctactgtgaagctggtactagagcttatgatgacatgctgataatgtagagcagacctgattgtagcgccacctattaacgcctgacatactggcaccgccagatgcgttccatgtgcacagagaagacatgccgcagtgtctaaggcaagacattagtatactgagtcgtagacgctagtcgtgttagctcgctctattaccggatggtgcgaccctcaacaatctgaagtgtacgcccatgctgtcatcttctgctgtgcactgatacaacgtgaacctccgtgatctgacttctgtggaaaccaactcgagcatgatatcgcgtatcattgcgttaatcttaggaggagaccaatatgacacacgcactgcgggaagatggtccatgtagatgctgt

SEQ ID NO: 515200 - DNA, 111 bp, Homo sapiens
ctgttagctacccataaaaatgctgtttgctgcagttttgtgtcctgggcttggatgctttttataaaagttgtcattgttggaaatttttaaataaaactgttttaaata

SEQ ID NO: 515201 - DNA, 318 bp, Homo sapiens
  misc_feature (15)..(15): n is a, c, g, or t
  misc_feature (18)..(18): n is a, c, g, or t
  misc_feature (84)..(84): n is a, c, g, or t
tgctcttccctctgntcngaagcacttccctcagctcatctcatcctgagctctgtccaaatgtcaccctcccctagaaacagntttccaacccggataacaggattttagtttcttcctcttccttacagtgacctaatcgttgctgtgctgtgttttgtctctgccccatcagaaggcgagctcatgaatctttgtgtgctctgagcactgtgaataggatctggccccagaaccgggctccagtgctggagtgaggaatgcacacagggccaaaggcagtgagctctggggcctcccgagacgctgtggcggccg

SEQ ID NO: 515202 - DNA, 112 bp, Homo sapiens
agatatcgtgccactgcactccagcctggtgacagagcaagtctccatctcaggtgaaaaaaaaaataggcagaggccaggcacaggggctcatacctataatctcagcctg

SEQ ID NO: 515203 - DNA, 659 bp, Homo sapiens
taaatcccaaacagtataaatattgaaataggttgggtgcagtggctcacacctgtaattccagcactttgggaggccaaggtgagaggatcacctgagtgtcaggggtgttgagaccagcctggccaacatggtgaaaccccatctctactaaacaatacaaaaattagctgggccatggtggcgggcacctgtatatctcagctactcaggaggctgaaggcagtagaattgcttgaacctcggaggcggaggttgcaatgaagcccgagaattgccgccaattgacactcccagccctgggcgacgagcaacaactcacattctcagaagagtatatgtatattaatcatatattatgctgaccaaacggcgggtgggcacccacaatactataagggagagtggacaaggacaagtaagcacacaatggtggcgcccagattcgtctgcttcagatgcaccctcggtgctggcgaccacaaataagagagaagccacccacaatctctgccgaagaaatagtagtaaaaatatttgagcacatcatcattgatggctactgcaccgtatacacaccacctaaactaaaccagagaagtgcttggatgtggaccagtcatcacgtgacccccgaggctactccgaacaataataga

SEQ ID NO: 515204 - DNA, 160 bp, Homo sapiens
ggggggcccttgggggggggtttttaaaccccccccctttcttttcgcgctttttgggtttttttttccgggcccccccccccccgggggcccctccccccctttgggggggcccccccccccttggtttttagggggggtttttttttttttcctttga

SEQ ID NO: 515205 - DNA, 1241 bp, Homo sapiens
  misc_feature (911)..(911): n is a, c, g, or t
  misc_feature (922)..(922): n is a, c, g, or t
  misc_feature (924)..(924): n is a, c, g, or t
  misc_feature (933)..(933): n is a, c, g, or t
cccgcgcgcctatattgttgccccaggggtctttacccccctcgttgtccctgtgggcacaatgatgggagttttcaccgttgggagatgtagctgtgtggccaaagggggggccccacagccttttgtggcccccccccgggtatcctctgggccggggggctttccccctttagtggcaccacgcgttttatatagggggcccccacgcccggttcttaattgtgagcccccggatttatggtgggggaaaggaaattttaatttatagggttactgatggggccggacccagaaacccctttgccgcggaaggcccctccgggtggagataaaacccttcgggtttggtcccgccacacgaatttatggaatttctctttagggttgcaaaagccggtgtaaaagagattgtggggcgcccacccaccggaagccccctcgtctatgagagtgccccccccctctggtgagaagatgtgtatagagctcggctttataggtgccgcacgcaagagagggagacacacgccttctctcttggggagaccacacttattgggagaaaagaaaccccctctggttatagacagagagagagtttatcaagagaatgtgtgtagacaccccccacttatagttataggggccgtatataatggcacgcccccacccacactgtattaagagagaaggcgggttttcaagaggcgtcacaccacacccacgctattcgcttaaaaattttctcccctaccactattatacctgtagaactccctccaccacaccccacacattgtgagaccacacttctatgtcacccctcatctatagagaagagaacctatacatggttatagtatatataaaggtatacacactgggaaaccacatttcttcgctcctcngcactataagncnctcggcgtncacgagattataataccacctgagaactgagccacacattatacacgccccacatattctatcacactcacaccctcacccaacgtcacttatttatccctccatcctgttcacaccccacaccacggcactgctcactaaaggaaaaggttataaaaaagtataaaggaaactcggccaatccttaaccccccctgtttatcccacaaacactcaccctctagcactcaccccgtattagaaggccccgccctgccccgtgacacatgttttacggccccggtaccctaaccgtgccaaggtagcca

SEQ ID NO: 515206 - DNA, 668 bp, Homo sapiens
taaaaaagcaaaaaaaaaatttttggggaaaccctagaaaaaaatttagaagtgtacctggtttttaaaaaaaaaagggtgtggaaagggttggaagaggagggttgtcttttaattgggaggtttatagatgaataatattaaatttgtattaaaaaaattaataatgttatttttattataattttataattattatattatatttttaatagatatattcatcaaaattttaattaaataagaatttttatatttaaaatatatatagattaatatgttattattttttatattatatttataaatatattagattaaaattaattatgataaaatattattaaaataagattaatataaaattattatatatgtataaattttattaaaaaatatatctgatttacataaattctaatatattgataatatttataaatattatgtttatttttaataatataatttatttttatctattattataatataattataataatattatcaataattaaatatatataatataatttttataatattatatatatatacccacccccacaccctatacaacactcattcataccatactaactactttcttatacatatacttatctaattaacttatattaatttcttttaaatatctcatttct

SEQ ID NO: 515207 - DNA, 145 bp, Homo sapiens
ctcttatcaagtcagcacacaccttttccaaggattttacgtggcggctagtaagggtgattcgaattcggtgaatggccacctccggctccacgggtgtctttccggtatccttaaaagccatggctgtagcgcgcgggcttcc

SEQ ID NO: 515208 - DNA, 261 bp, Homo sapiens
ccacctcagcctcccaagtagctgaaactacaggtgcatgccaccacacccagctaattatgtgtatttttttgtagagatggggtcttgctatgttccccaggctggtttcaaactcctgggctcaactgagcctcccaaagtgctgggattacaggcgtgagccaccaggcctggctggaatttttatctttctggatggtatcatttgaagcacaaaagtttttaattttgatagaaataatggtggtggtcgttgtg

SEQ ID NO: 515209 - DNA, 341 bp, Homo sapiens
  misc_feature (161)..(161): n is a, c, g, or t
cctagaggatccttcagaggcacaaggaggcagaggcacaaggaggtccagatattaggacatggatatctttggggggaaccattattcagtctaccacagatgcatactcatctctctctcttttttgagatggagtcttgctttgtcacccaggctgnagtgcaatggcgcaatcttggctcactgcaacctccacctcctgggttcaagcaattctcctgccttagcctcccgagtagctgggattacaggcatgcaccactgcgccaagctaatttttgtatttttagtagagacggggtttcgccatgttggccaggctggtctcaaactcctga

SEQ ID NO: 515210 - DNA, 401 bp, Homo sapiens
ttcttcttgctgcatctccattgtgggccatagcaacgagcgttgtgacggcggtatctacattggctctatcatgaagggtggggtcgtggctgctgatggccgcatcgagccaggagatatgttgttacaggtaaacgagatcaactttgagaacatgagtaatgacgatgcagtccgggtactgcgggagattgtgcacaaaccggggcccatcaccctgactgtagccaagtgctgggacccaagtccacgtggttgcttcacattgcccaggagcgagcccatccggcccattgaccctgcggcctgggtctcccacactgcagccatgaccggcaccttccctgcatacggcatgagcccctccctgagcaccatcttgagcctgtgtctgggta

SEQ ID NO: 515211 - DNA, 284 bp, Homo sapiens
tattcccttccattcctgttgattcaatttcattcccttccattcgattcctttccattcgattccattcctttccattgcattccattcgttcccattccatgtgatttcattccattccagtccattatattcgagtccactccactccattctattacattcaattccttttgagtccgttccataacattccattaccgtctattctattcccttccattcctgttgattcaatttcattcccttccattcgattcctttccattcgattccagccgacg

SEQ ID NO: 515212 - DNA, 704 bp, Homo sapiens
acgcgccggtgaagtagacccgtcagcatgggccgtgtgatcctgtggacagaggaagggctgccgggtctgtgtacctgcgcgcacgtgaagcacctgtaaatgtgcgctgcgcgcctgcgacgcctgtggatttcgcatgagcgtgcacggctacatcaatggtgcatctgtcaagtgacatcatcccacagaccctgtggcctgctggctgctgccccatctgccaaaggatgtgtcttaccaggtgatccgatactcggatttaatgaatgcgtgacggatgacttgtatcatatgcctgcctgatgggacattcaacacttgtggccaagttatgtagtatttgctgtgcaaatgaatggcaccagctcaaccattgtgcacatgtgcctcccgtgtgggcaaccaatgacctgaagggatacacatacgtgtgactgccatggatggaagaagccctgagaggacctgtggacacggctggaccctgggcatcatgggaaacatatgccaaccggttaatctacccacaacacctgcagcaccaagaagacccgatgtgaatgctgacccatccggcatccaagaaaggataatctccctcagaccaacaggagctgtggacacggtgtgcgtgcctgcaggtggcccgacatctgacaaacccatcttgaaggctggccaggacgtaccaccaattc

SEQ ID NO: 515213 - DNA, 1114 bp, Homo sapiens
agggagtctggcctagtgaaagtctctgtttcctccttttcttacttttcactcaataaaaccctgctttacacacccttcaaaccatctgtgagcctgaatttttacggccatgggacagacaaggatcctgtctttatctaaactaaggaaaagtcctgcaacatttgtggtgcacaacgtggggctcgagaagtgatcatccaaagtccagctaccacaatatgtctggattgaatcttaaggattcttcctgttattcatgaaaacgcctattttggagtgaaaccagggccgccttatgagctaaacagagtgtgttacagcttcaatagactaaacaagctctaaatttatcttcctatggtcacgggatctcatatattctggctgtcattgtcataataagccactcttggtcatatggaaaagcattcagctgctccctgcctttgctcacagcgtgtggtactctcttagaagctattcctggaaactgcagagaagagaataatttgcaacccattcttctgaggcccaaattaactcaataccaacacaacataaggacactataagaaaacttgaagaagatgaagtttcttcttcattgaaagaaaataaaggtcacgtctgtgatcatcgttcgagaccaagtaccaaagaaaacagcaacatctggctgaaggaggcttcttctgagatggcaacaggcaactgcagaagagaggagggtagtttgtaattagactgatggcaagcaacatttgggcatgtgcaaaaatatctctgatcactgtgttttcaccttaaaaggaagtgtgactcaaagttaggaaccattatttatatacagcttttgtcattcagttcactgacaagagttaaaaggcactttattttatttacaatatctcagtagactttgatactaaataatataaagtgtgaaaaaactgtatatgtaaaagaatatagtaggcatactttggttagaattgtgaatttggggagaaactaaactctaataataggtaattaggaaaattataatagatttacttattcaagctcttgtaaccactaataaatggttatgaagcctctgtcaaaa

SEQ ID NO: 515214 - DNA, 269 bp, Homo sapiens
aggacttcagcgagtagcgtccatggcccctcggagtaaacaaaagaaaaaagaaaaaacatatccttgaaaaattccccttaaaggtaggtttataaaaggtcagaaatgcctggtacccaaaacaagtgcttaaaaaaaaaaaaaaaaaaaaaaaaatgggggcaaccacctctaacaatccaattttttttttttataacttcaaaaaggggaagagttctaatatcacggatagcctcgctgttaagaaggacctccttctcctg

SEQ ID NO: 515215 - DNA, 260 bp, Homo sapiens
  misc_feature (38)..(38): n is a, c, g, or t
catggttgaatggacgagctggagtttattctcagagncagtgagaagccactggacaagttgtttttttgtttttctgtttttgagacagagtctagctctgtcacccaggcagactgcagtggtgcaatcttggctcactgcaacctctgcctcccaggttcaagcgattctcctgcctcaggctccccagtagctgggaccacaggcacacgccagcacacccagtctagtttttctttttcttttttttttttttt

SEQ ID NO: 515216 - DNA, 170 bp, Homo sapiens
  misc_feature (20)..(20): n is a, c, g, or t
  misc_feature (48)..(48): n is a, c, g, or t
  misc_feature (67)..(67): n is a, c, g, or t
ggccaaaacattttaaacanaatgtgctctatacttcaatcttgacanatccataacatcattaaanacatttgttttgttttgttttgttttgagacaggagtttcactcgttgcccaggctggagtgcaacggcgcgatctcagctcactgcaaacctccgcctcccc

SEQ ID NO: 515217 - DNA, 403 bp, Homo sapiens
cagatcagtctggctgctacattcatagccgcactgtcttcgttgagtggtcttcacaaatctccgcagcttgctgctggcggcaggtgttactccgggtatgcgactagcagccccgatcgtctgtggccgactccactgtagtttctctcgcacttcctgggacaaagacacatccctaatagtcaaataatctaggtctaaacggcagaaggagagactacatcttgctgaactaccctttatatactagtagttaataggaacaacactgattcataagtggctactataatacagtctatcagccagctctctacattaagtctacttctatcaagggcactggaacaaagccttggataatagactccatgtcacactatcctcatcattcagaaac

SEQ ID NO: 515218 - DNA, 910 bp, Homo sapiens
cagagcacggagagcggggaggacagagataccgaagcacaagaagacgcgcaacccgaggctgtcccccgatgacgtcctgtggagcagcgtgttctccccacaagtccgtggccccatgagagaggcttcacaaccacgggagggcggcaactctaaggcgcctcacccacaccgagggtgagccacgatgggaaacgacggaactcggttgtaacacagggacacaaaggtggaaaaaccatctcgcggtgggaggaaacagtcttgtcacgacgccaagagtgcttttccggcagagagcacactcccccacatggcgccccgtttgaccgcgcccttttgttctggaggcccgtggctttccgctttgtaaggggcccctctattggggggccaacggctttgggtggcaccccgcgcgctctcccccccaggcggagattttgggacaattggccgccccccccctgcaaagttctgctaactatcttgtccgccgttattgggcccccggggcgttcacctccccctgggccgttggttaacgaaccgttgtcttccgccccgtgccgcggacgattcccccgccgatccgccagggagctcccaacggacggcaacaccttggtgcggccctccgccaagatttctgaagaactttgccgggcacgactagcggagcatgccggcccccacaccgggaacaccagccggcccccaaaaattaccaggagccacaccagacaccccgaggggggacattcctccatacacagcagcagtgagacaggtaaccaaccccggttgggatgcacccaggcgcgtgcccaacagccttgtcaccaaacccccggggcgcggctccccagtaatgagccgcggtgaatccccccaaccccatcataac

SEQ ID NO: 515219 - DNA, 643 bp, Homo sapiens
cgtgattgacatagttattatactagcatttaccatcacactcctaggggtactagtctatgggtcacacctcatatcctccctactatgcctagaaggagtaatactatcgctgttcattatagctactgtcataaccctgaacacccactccctcttagccaatattgtgcctattgccatactagcctttgacgcctgcgaagcagggattggcctagccctactagtctcaatctccaacacatatggcctagactacgaccataacctaaacctacttcactgctaaaactaatcgtctcatcacttatatcactaccactgacatgactttccaaaatgcacatattttgaatcaccacacccacccagagcctacttattggcagtaaccccctactactttttaaccaaatcaacgaccacccatgtagctgctccccagccttttcgtccgatcccctagcaaacgcccctcctaatactaactacctggctgctacgcgttacagtatggtacgccaacgccacttattcagtgaaccattatcacgtaactttcccttttatccttatttccctccaaattcctctaatcctacattcccggttccggccttcctttccatctctcttcgcg

SEQ ID NO: 515220 - DNA, 264 bp, Homo sapiens
gtagccacagctacttgggaggctgaggcatgagagtggcttgagccccaaaaacggaggttgcagtgagccgagatcgcaccactgcactccagcctaggagacagaatgagaccctgtctcaaaaaaggaaaaaaaaaaaaaaaaaaaaaactcccaataaggaaaccggaagggggcccccggaaatcccaggctcaagggccggaccggttccggagcccaattccgaaaccagggccaaagcggttcccggggtgaact

SEQ ID NO: 515221 - DNA, 287 bp, Homo sapiens
caaggcttaatttaacgggtcagaacattaaattattacaacattttttccaatatagcatactaaacagagtccatttcttttaaaacgctgcacaagagactaggaatcaagctttcaacagattatgaataactcataactcattctaccttcttatagatttgcaacgctctccccacccccatgcctgacgcacgtgccactttaattctgagcacagccgcccaagagcaccagcttctaaggctcctgtaggacatgacttcactcttaaatgctctgcc

SEQ ID NO: 515222 - DNA, 350 bp, Homo sapiens
gctgactagcacatgcatgtctgctttctgacacgtgactttgtcagatgtttggggacatactgtatccttagaataagtgagtatcatgaacagcatttaattcaactcttcacactgagggaggagtgatttgataaactaactatggtgtctgcgaatataagatttgttcgtgaaaattagcagagaacaataaaaacagaaataagttgtaaaaatttgcagatgcactatcttaatatatatttagatgccctatcttaatatattaatagactatacccaattcctagatactaaagactggctgtggatttttttgagtgagaagtacagaggtatttggc

SEQ ID NO: 515223 - DNA, 1139 bp, Homo sapiens
aggggtctataatcaggggttcgttacaaatgtcgctcctcacaaaaaccgcgtggtgataataacaagggttaatttagatagggggtctaacccctctataaccctgtgttataggggccatcacacaatggacctttggggggcgcgtcaaagcgtgggatttctcacagctatttttgggggaaacctcgcttgtgttttgggctttccggcccaaatattgtccgaaatttcttaattgagacttttctctattattataggtatcgcccatttctttttgttgaacacagactgcgccgttctcccaaacatgtcgtgttgcccaaaacaatggggtggttatctcaggttaccctaaaggcatcatgggggctgtgtccctcatgggggccccccccatagaatctttgtgtgggcttggggataaataaagaagggcccccttgggccctttttaactaaacctgtgggaacaaaacttaaaaaggggggtacccccccgatttttctcacagggggcacacccctgtgtctgtcttttaaaggtttttctcgggcttttctcgtgttgatacgcacatataggggggtcacatggagtctggggctatattctcttttgatccgctggagaagtgtgaaccacaggccttatatgagtcttggccctcctctgagagccacatttttccactcagctcacccgtgtcacagaagatatgtctccttactccaggagaggtctcacacttcacaacctttaaccacacgctgcgcggaaggaatggctggaattccgcagagttctcccacgtgaccacaatgtgtgctgaatttaacacatgaagaagtatataattggcttctaaccccgctgagaaagaagggtggatgcacgctgcttgtgttttcttggggtgaactgtcacattgggaaatacggagcaccacgtgagcccactcctccactcctaatttaataagtggaaagggccttcacaattgtaatcacggaacttttttttaaagctttggcaccttgacctctatgtgttacccgtccataatgagctgctgcagaagtgactaattgttttacttttttggaagttaaccttaccctactcactact

SEQ ID NO: 515224 - DNA, 140 bp, Homo sapiens
cgttctagaggatcccaacgcgggactttgttgagtctccacaattactgatcgttcctggcctggactatcaatccagcctcccacattattctgaataccacaattgatccccattactgtatctctctgatccacgt

SEQ ID NO: 515225 - DNA, 1058 bp, Homo sapiens
  misc_feature (150)..(150): n is a, c, g, or t
  misc_feature (201)..(201): n is a, c, g, or t
  misc_feature (463)..(463): n is a, c, g, or t
  misc_feature (781)..(781): n is a, c, g, or t
cacaatgttactggaaatgtacccaacaagacattacaccaggcacttaacttcaaaaactgggaaagttttcccactttccttggaataacatttggcgctatccttggaatatacattgtggtggaacttctgcgtagaggttacagnacacctaagttccggtggcgtccaccatctttcaaccgcacaacccagccnttggagagtattaacaggaaacatttattaacaacgggcttggtcacttatattcatatcttccctattagggtaggcggcttaacaggggcttgcgtccctattcttgcgcattagaggtctcactggacacttctgaggtcctctcctgtgaggtcaccagacaactatactaaacagacggcacgacagacacattaacctatactctaacgcgtcccacacacctaaccgctgggtcctctctgcgagctggtatcanatggtgacctctatgtgcccaaatctgtccacgctataaatctaaaacctggggtatcacctggtgtgtctggccctgagtccctatgggtcctaaacaaagcctctctctaacacagcgggcccggaaactctacatgtgcctgtgttgggcgcactaaattcagagtaatgtgcgggtaataaacacttgggatttttcccagccactaatatacagtcctgaggagaagagagtcctagacactccctatgtcctgtggggaaatagggtgatcctccagagtacactacctctttaacggtccaacggtggtgnacagccttcacttggagtattccttccaagaattttcccaacgcaccctcttcaggcggccagtgtctttccacacacagtctcccaccattacaatttgtaggaactgggtatcatccggaaacacagcccgctggcggtatccggggaggcgctctacagtggtccccagatgcatatataactcagctataacttccgcgacgtatatgtggccatagtgccaaggagattggcagtttacgcacatagaccaacatttgggccttcaggggcc

SEQ ID NO: 515226 - DNA, 447 bp, Homo sapiens
tgctctaccacagtgtatctaaataagctgtcaactacaatttatcctattgctgctgtaaaatttttatgaccagaaggaaaacctgaccatgggacccagctagcttgatggccttcagcagcaaacaagaaactgtccaagttaggaggtgaggactagtgcctgaagatgtcctctcagtccacaacatgtacaggtgcccatacacacatcagcactcgcacaaagatgctctggaggctatagtagtgtgtcttggtcattgcaaaccatcagaggcaaaccctgaggtattcccatttcctgtttcctgcttgcagtgtctacatttctctcccattctaatgaaggaatgattcttttataacatgagtgattttatgctgtttataaaagtaaatgttgacatgtgttagaattaaaatgacttagagaaataaaaaa

SEQ ID NO: 515227 - DNA, 173 bp, Homo sapiens
  misc_feature (18)..(18): n is a, c, g, or t
  misc_feature (54)..(54): n is a, c, g, or t
  misc_feature (113)..(113): n is a, c, g, or t
tataaatatatatgggcntaatcatttaaaatttgttgcagcaagaactttccnacctgtaggcaatagattgctatgtttttaacaaattgtggcaaattctaaacagcaantcttttgtacgtaataggacatttcatcctagaaaaataaagtaatgtttttgacattga

SEQ ID NO: 515228 - DNA, 768 bp, Homo sapiens
  misc_feature (5)..(5): n is a, c, g, or t
  misc_feature (84)..(84): n is a, c, g, or t
  misc_feature (96)..(96): n is a, c, g, or t
  misc_feature (210)..(210): n is a, c, g, or t
  misc_feature (444)..(444): n is a, c, g, or t
  misc_feature (490)..(492): n is a, c, g, or t
  misc_feature (496)..(497): n is a, c, g, or t
  misc_feature (500)..(500): n is a, c, g, or t
  misc_feature (503)..(503): n is a, c, g, or t
  misc_feature (510)..(510): n is a, c, g, or t
  misc_feature (512)..(513): n is a, c, g, or t
  misc_feature (519)..(519): n is a, c, g, or t
  misc_feature (526)..(526): n is a, c, g, or t
  misc_feature (549)..(549): n is a, c, g, or t
  misc_feature (551)..(551): n is a, c, g, or t
  misc_feature (627)..(627): n is a, c, g, or t
  misc_feature (631)..(631): n is a, c, g, or t
  misc_feature (649)..(649): n is a, c, g, or t
  misc_feature (654)..(654): n is a, c, g, or t
  misc_feature (679)..(679): n is a, c, g, or t
  misc_feature (690)..(690): n is a, c, g, or t
  misc_feature (740)..(740): n is a, c, g, or t
atacncacggtgtggtgtagagagggagatgagatagacagagagagactcattcacatatagatatagattacatatgagagnatagtggagtgnagagcacgatcgagatgatatctcgctggagtcagaatcaccccattggcagagcggaagaagggtattccatctgctgacagagccagagatgtgactcatgccctccccgangcaagggcagctcctgctttgtccagactcacctgccagagccaggggtccatcgatgaacacagctatttcacaatgggaccgcatgcctgcagagacagctggagctgaggcctgggcacctggagtgcagtcagcaacctaggcagactgggcgtcctgggctgggggatgcaggggtgctgctccatgccggacatggggtggccccagacaagtgttgtaacctttganggggacctgggaggacagagtgggtgggagtagctacgcccccccnnngccnngancantgatganannggggtntccaggnagtcctggcgccaggtgaatgtncntccttccctggcaggacaggcctttgagtaggatggatggccagtccttccagaatgtaccatggactagcatccngggnagggctggcgtgtctccnggggnatcagctccaacttaggtacctggntgaacgggtanagtaagaccccttcgcaggcaggggttcctcccatctcgtctcgcacttntccctcaccccgacctgcagggaatggc

SEQ ID NO: 515229 - DNA, 1740 bp, Homo sapiens
  misc_feature (455)..(455): n is a, c, g, or t
gctggttaaggacggcagagccagtatgagtgccgccgtgcgccataatcctactgatcagcatgatggaagtccacagacctgattgtgacccgtctgcgtcaacgcgcaggctccccgacaggtatctctgcttgtcacgctccaaccattcattgccatactatccttcgctcggcaccgaatgctggagaagttcgtctcgacgtggctgagtcttctaggactaacactattctcgctcgcacaagcctactctttctggtggacaactactgacagccagacgcagtatcggagcaaaaactcttatagaacctagatataggagcatagcctaccaagagagaatgactagggccatacagaagatagtaataccactgaccccacagatgagaagccttatatacaccacccccaggaagggacacccaagacaccaggatgacaanagtacagagattagagtgaaaccctaagaaagaatttggcatgagaagatacggagggaagaccaccaagacattagcattagacttggaggaaaaaatagcataagaacattttatgaaaacacccaaacaaacacaacagaccggaaaatacctaacatggcccttatttctgaaggactacataggcaaagagcagcattcagttataaatcaataaccaaatacacaggcaattggaaaagtcagataaacataccgggggaggattggaagcgacaatatggtgaagaatgagacattgaccacagtggagacaatgagaacacgaaaacaaagacatgcccaatatatatcacccctaatctatgagaaacgaccgtgaaggaaggagcgcaacatcatatgatgcacatagaataaactacataaccatggaagaagcataaatagggaaaagagaatcacaatccattaccaaaatcattataactaacaagaaagaaatttaacatatatgacattgacaatataaaaatgaaacaaatttacccaccattcacccaaaaccttacatatcacattatatagacagagcaatataattaacataatcataacaattacacccaaaatttaacatactaaacaactataaaaggacagataaaatgattaccccccattactatagatacccaattataacccaataacccaataaaaagatatataagggagactacagaataaaaacaaaaaccaagggaacaacacaacgacaaaacaaaacaaaacaaagagagaaagacacagacacaaaaaagagaagaacacaaaaaaagagaacaaaccaacaacaaatacagacgagacagacacaaagataaatatgtaggacaagagagggacacccataaaagagagaaaacagaatatataaaccgatagccgccagacgcgagcacgctagcaaaaagaccacagacgtacacagcgaacaccacacgtacagcacggaggcacattagcacgaagcacaccaacaataatgatggaggcgaagaacagtggaaacacgatccaagtcagagaaaacacacacgagacacaacaacaagacaggcgagtcacgggtacaaaacacacacatacgctgcgaacgaggatcacctagctgcactaagctcacgcacaacaagtgacactcaactaaagaaagacaagcaataacaatcaagccgacaaccacataaaaaacaaaaagaaccggaagagcacaacc

SEQ ID NO: 515230 - DNA, 280 bp, Homo sapiens
gtcgtcgtacgaaccttacttgtcagggtcaggtaatagtagtacacagtgatgtatagtaattggacttgttagaagtagtaggaaggacaggatggaacaaatttagagagcagcactgacatatgtacatgaccaggtgtaaaatagatggccagtgggaagtggctgtataacacaaggtgctcagctccatgctctatgatgacctagagaggtgggatgggaagtttgggaaggaggctcaagatggaggtgatatatgtgtacttatagctga

SEQ ID NO: 515231 - DNA, 607 bp, Homo sapiens
  misc_feature (429)..(429): n is a, c, g, or t
ccatgttggccaggatggtctcgaactcctgacctcaggtgatccgcccaccttggcctcccagagtgctgggattacaggcatgagccaccgctcctggcctaaaatctcttaatttctaaactaattgattgttactctggaatttcttgattcttcgttattttaaatgtgacgggcagtgacttttcttttgtaggtttggataaatacctcggacattattttggttggtctccgagactaccaggtaaaatttacatgtaaatttttcctattttactggcttgaatttgatgagccatttcttaagagccagttttgtttcaggcattgtgctaggtatcccagggatttatgtttaaatcaaaatctgggagccattattctaggggatacagctgaatgagttaagtgcccatcccacanaaggctcatagcctggtagtggagagagttaagcacacaagtaattacaatacacatcacaacataggtatgtgctataaatctaaaggagcacttgggaaagaaagaaagtggtggttgcctttcgtgatggaacccttgactctgtagactcattgtgggtctgtgagatccattg

SEQ ID NO: 515232 - DNA, 203 bp, Homo sapiens
ggcattcagagcgtgtgagatgctggcgtcgcgtgctccactagcgagatcgagctgcgagtctgacgcagtgatcatagagattctcagctcaggcgataggttgatacacatactgaggtacactgctgaggcatacgcctacatcttctgagggcagcgacaatctaggctacgcctgaatcggacgaacagtccgccgc

SEQ ID NO: 515233 - DNA, 679 bp, Homo sapiens
  misc_feature (37)..(37): n is a, c, g, or t
  misc_feature (81)..(81): n is a, c, g, or t
  misc_feature (83)..(83): n is a, c, g, or t
  misc_feature (90)..(90): n is a, c, g, or t
  misc_feature (116)..(116): n is a, c, g, or t
  misc_feature (120)..(120): n is a, c, g, or t
  misc_feature (122)..(122): n is a, c, g, or t
  misc_feature (173)..(174): n is a, c, g, or t
  misc_feature (193)..(193): n is a, c, g, or t
  misc_feature (203)..(203): n is a, c, g, or t
  misc_feature (205)..(205): n is a, c, g, or t
  misc_feature (208)..(209): n is a, c, g, or t
  misc_feature (215)..(215): n is a, c, g, or t
  misc_feature (231)..(231): n is a, c, g, or t
  misc_feature (243)..(243): n is a, c, g, or t
  misc_feature (249)..(249): n is a, c, g, or t
  misc_feature (276)..(276): n is a, c, g, or t
  misc_feature (283)..(283): n is a, c, g, or t
  misc_feature (378)..(378): n is a, c, g, or t
  misc_feature (384)..(384): n is a, c, g, or t
  misc_feature (386)..(386): n is a, c, g, or t
  misc_feature (412)..(412): n is a, c, g, or t
  misc_feature (415)..(415): n is a, c, g, or t
  misc_feature (417)..(417): n is a, c, g, or t
  misc_feature (432)..(432): n is a, c, g, or t
  misc_feature (438)..(438): n is a, c, g, or t
  misc_feature (451)..(451): n is a, c, g, or t
  misc_feature (493)..(493): n is a, c, g, or t
  misc_feature (517)..(517): n is a, c, g, or t
  misc_feature (533)..(533): n is a, c, g, or t
  misc_feature (547)..(547): n is a, c, g, or t
  misc_feature (571)..(571): n is a, c, g, or t
  misc_feature (575)..(575): n is a, c, g, or t
  misc_feature (578)..(578): n is a, c, g, or t
  misc_feature (596)..(596): n is a, c, g, or t
  misc_feature (619)..(619): n is a, c, g, or t
  misc_feature (660)..(660): n is a, c, g, or t
  misc_feature (671)..(671): n is a, c, g, or t
tattatttcttttcttttcttacacttttattttaantctttctccttcatctctctttccatttatcttcttactcttcnanctcctcntttattttctcctttcttaatttttntcanancttttctactattttcatctttttcattattcttcattcttccatcctaanntttctccttccaataatcntcttctttantntcnnatttcntttcctccctccaacnctttctccattntctctntcatttatctttacatcctttctattnctctcanatcttcttttacatttcttcttccttctctttcacctttttctttattaactcttataacttttttaaaacttcttttccttcttttttttattncttttnantatttttcattttttttaattttttnttncncatcttctcctccanaaattnctctatcttcatnttttttttttttttttctcttttatatatcattatttttatnttctattttttttctaatttcttnatcactttcttttatntttttttttttacnttttttatttttaaatttattttntttnttnttattactattaatatcntgttttattatttttatttatcnattctctccccttcctcactctcctttacaaacatctttanctttttctccnccattttt

SEQ ID NO: 515234 - DNA, 874 bp, Homo sapiens
aagacagtacaaagagaacaattttacagctgggccgccaggggtgacatcacatatcagttaggacatcacatgtcaggtaggaatcaccatgattcctgcctgagtctcagaccagcaagttgatcattaagggtttcaaaaggggagggggtgtaagaacagggagtaggtacaaagatcacatgcttcaaaaggcaaaaagcacaattactagtaagggtctaacacagatcacatgcttctgagggaacaggacaaagggcaaaagcagaactactgataagggtccaacaaagatcacaaggcaaagagcaaaagcagaactactgataagggtctgtgttcagtggtgcacatattgtcttgataaacaatcttaaacagcagaaaacagagtttgagagcagagaaccagtgtgaccacaaatttaccagggcagagtttcccaaccctagtaagcctgaggggtactgcaggagaccagggggtatctcagtccttatctcaaccacataagacagacattcccaaagcagccgattattgacgctccccccaggaaatgcattcctttcccagggtattaatattaatattccttgcctaggcaaaagaatgtaggcgagtaactctccctatttgcacatccgtttataggctctctgcgagaagaaaaatatgggtctttttggcccagcccggagggaggcagaaccttaatggttgatttccctggtgccgtaaaaaaggcgggattctggccttcccagggggagcggatctccaattggtcgaaccccccgggtttacaccctttggagcggcacaacaggatcacacggggccgcagggagcatcccgtttgaggac

SEQ ID NO: 515235 - DNA, 959 bp, Homo sapiens
atcttcaaggctcagcagtaaagcagttctcggtatacgtgtaagcataaacatttcatttctcaccacacatggctcatttgaattcactttaatccattaagcaacataaaagtacatgccctttaatccatacacaagcacaaactctacattatttcaagcctcatccgtgtaatatcgaccatcttgcacatgctcagctgctcaattccattcacagcaagatcaacaggcaatcatatagcattttctgtctctaacatatattccagagttaaaatgttctttaatgtacttcagaagtacttatgcagatcttaaatctgttattcaaaatatatgcttttaaagatgtattgtgcttcccatgcaggcttgacatattctattgtcaacagcaaacagcaatgggtaatgtgaacattctttaccagccgactgtacaacaatcaatttaacccatggcacaacaccttgtagagtccgtatactgttctgccatgggccaaacaggactctggcgtacctgcactggaaggctatcccgttctctcttgtcctgaacgtggctactaccagaacccacacatttaatgcttacgacacgttgctctgactccaaccatttcgagcacggatggccttagcacacaactctgaacttcctggcgcctataacccatcctggcaccttccgtcggttacaagcggcacacgcgatcattcactggcaattgctaatcaacgcggcttatcgccaaattacgagttgcccgagttgggcccatttggaacctacaagtggcacaccttaagagaacacatgggctagtctcacaccggatgcgcagacttgtgaacaacgtctaacagccacactagtacccaccaacactcaacggtctccactcttcttatcttggctctcctacgcgatcacatgcccaatagcgctg

SEQ ID NO: 515236 - DNA, 108 bp, Homo sapiens
ggacaggcccggactcagtgctagcactcactgacctcctgctctaagccacaggggtgggcggtggcaggaagaaagaatgtcatgctatctcttgctgctcctccg

SEQ ID NO: 515237 - DNA, 252 bp, Homo sapiens
aggatcggttagggacctggaggcagagaagcacggtgaccttatgcctctgtgccctgttccctgtctcacccttgtaccacgggggccttggggtccggcggggccacgggcgccaacagggccgacaggaccggcggaaccagcaggaccagtctcaccacgatcaccactcttgcaagcagggccaacgggcccaggggcaccacgaagcaccaggagcaccagggggtccagcgggcccgggcctca

SEQ ID NO: 515238 - DNA, 373 bp, Homo sapiens
caacttatcagtctgaccgacgccgcagcgtgtgatggcgagcgagattgtcacgtgcatcactacgcaaggccttcaagccggcgcaaggtcgccacgccaacctgcgttgaaggaccgtgcgacgctgcaggcgcagatcctcaaggttgaagcactgatcgccgaacaataagcctggctacggcgggaaccattggggttctgcgtctctctgattgcaggatgccaaagcctgactaggctctgacatgactcataccaatcagagcgaaacgccatgggtatcatcggaaccatctttatcggcttgatcgtcggcctgctggcgcgcttcctcaagcctggcgacgacagcatgggcaaatctacc

SEQ ID NO: 515239 - DNA, 136 bp, Homo sapiens
gaatttgtgtaaccctgttgtattgttgggaaagtatttttatttaaattttattttcttatccagggtattataaaaattaacttttgtaactgtcgcttgggaataactcaaataaatttcaagaagcctttca

SEQ ID NO: 515240 - DNA, 675 bp, Homo sapiens
  misc_feature (132)..(132): n is a, c, g, or t
  misc_feature (550)..(550): n is a, c, g, or t
  misc_feature (566)..(567): n is a, c, g, or t
  misc_feature (581)..(581): n is a, c, g, or t
  misc_feature (592)..(592): n is a, c, g, or t
  misc_feature (594)..(594): n is a, c, g, or t
ggcaggcttggtgcgccctctcgcgccgacgctctgcgggttcctcccttcttccgagcctctcctctggccgccgcgcgggagagaggccgagatggcagatgagattgccaaggctcaggtcgctcggcntgtgtggcgacacgatcttggggaagatcatccgcaaggaaataccagccaaaatcattttggaggatgaccgggtgccttgtttcccatgacatttcccctcaagcaccaaacacatttttctgtgtgataccccaagaaaatatatatcccagattttctgtggcagaagatgatgatgacagtcttctgggacactttaatgatgtgtgggcaagaaatgtgctgctgatctgggcctgaataagggtatcgaactggtggtcgacctgagggtccacatggtggacagtctgtctatcacgtcatctccatgttcttggaggtcggcaaatgcttgggcctcctgttaagcgcacgttgggggataatttctcttcttgaggcatgatacgtaggcaattcccagtattgttangtaacacacttatttnngcctgtgtatggcngagattccagnanataattttaaaacccggtatacttaataaacgacctttgtcgcctgccaaacaaacaacaactcacaacgtcaaccaaaca

SEQ ID NO: 515241 - DNA, 102 bp, Homo sapiens
tcccatcatattgactatggtatgtactgactgtgtatcaatattcataccattgtaaaggtgaacaatcataagtacagaccactgtaagtaagggactgt

SEQ ID NO: 515242 - DNA, 436 bp, Homo sapiens
aacacaagatctcctgggtgtccgagtgcgccctgatgctggcgcagggcacggtgggcgcctacctgaataaatatattccagctaagtggacgtggatggttttctgcataaactcttattgttccttgactgatgtcataacactggagatgcatgctccttagatgaatatctaggatcctggaattcacaagtgaatgcattttgtgtgccatttccctagaactgtaaatgactcaccccaaggagctgctgtctagatgagaaacaaaacctcacactattgctgctgctgcttcatcatggggaaatgacttctgggcttaggttattaagtctctttctaccactttactacaggaagacatgtccttggcacatcagacagaacactgaagttatcttgcaaattactttaatggaattaaaaaaa

SEQ ID NO: 515243 - DNA, 220 bp, Homo sapiens
gcccttccataaaaggctgaggaaagccaagtgagaagattccattaatttgggcagagttatttaacatctgaacctgtttttctgttcattgttcattacttaccttgtccaaaaaggtcataaagggtagggctttttatgttccacctttgccctatatttctccccaacaaatatttgcccctgaggacctcaataaaggtttggtcaagtgaaa

SEQ ID NO: 515244 - DNA, 236 bp, Homo sapiens
gaatctacagtccaggactctttcaattacccgtattgtccggtcaaaaagatgagaaattcctctgaatgaaggatctgctgtttctctcttcctctgtctactctcttggagaggcttccttcatcttcctgtcttatgtcttgattatccagttctgaggtcctggcacagctttatattccatcatttcctcatcttcctcatcctcttcagactgatgcgtggccagaagg

SEQ ID NO: 515245 - DNA, 405 bp, Homo sapiens
ttggactcacagaatggttatgatagcactcagcattacggaagtaatgttccaaatgcacaatggatgaaccaacaggcatatgcatatcctgctactgagctgcacctatgattggtatccaatgccaacaggatattcccaataagactttagaagatatgtaaatgtctgttttcataattgctctttatattggtgtatctgaaagatagtattaagaaacatggaattgcagaaatgactgcaggagcagaatatggtgcactttcgtattaagttggaattctctacattctgaacaattttaggtttttgactaaaaatgaggcaggtttcacaaagtaatgtacagtgattgaaatcataatgaagcaagatggctccataaaaatattgaagatg

SEQ ID NO: 515246 - DNA, 618 bp, Homo sapiens
acataacaaaaatatataaaaaattactcaaatgacaaagacccaaacgtaagcgctaaaactataaaatcttaggggaaaaatttcatgactttcgattggtaatatttgcagatgaggcacagattttaaaaaaagaagataaattggacttcatcaaaatgaaaacctctgtgcatcaaaagacactatcaacagagtataaagacaaccacagagagaaaatatatctgtaagtcaaatatctgacaaggaattaatatctagagtgtataaaggactcctaaaactcaacaacacagacaaaaacctaattttattttatttttagagactgggccactctgtctcacaaaaagaaaaaaaaaaaaaagatattggtccacggattattcatagccccattatattcacaaaagcaaaatggtggaaccaccccaatggcccatcaaaagataaatggataaacaaaatgtgttatatattgtataatgaaatattaactcagccttaaaaaggaataaaatcctgatacatactaccaagatggatgattcctgaagattttatgctaagtaaaataggccatacacaaaggatcaatttttatttgatccc

SEQ ID NO: 515247 - DNA, 945 bp, Homo sapiens
  misc_feature (376)..(376): n is a, c, g, or t
  misc_feature (382)..(382): n is a, c, g, or t
  misc_feature (385)..(385): n is a, c, g, or t
  misc_feature (916)..(916): n is a, c, g, or t
tcctggtaatcccagcgctttctccattgctgtgggctctgcgtatctgttgaaggtcattgactttcgaactaaagtccatggaataactagacgtatgaactccgatactgtcactagaaaatcacatgtaaaaacctatgaacggtgggtttgagagtgctggcgtgtcgtagttagatcgctcgaggtttacttctgtgtagggattagcaggttctcgtacgaacaagttgatgatgattacctcaagagcacgtgtcgtgcaggcattgacagttgaagactcaaaggataagagagggaaatagtgccaccctttcagacgacccgtcggcgatagaattcgatgaagccgaagtagccacatctcttntcggancangacaaggacaaacaaaaaaagagcacagcaaaagcgcacagacataaaaaattatcttgtattgtgtgtgggaaggccgaagttccacttctaacggtatcaggatggcaatatttaacggacagacacgaattctcaataataagttagggagagcaccgcagtgcgttctggttctccccagccccaagcacaggcatataagggagacgtttacacgacgttttagttcttcccagaccgagcgaaataagcgcagagttttccagctacttacagatgctccgatccgggcgggcactgctccgcgatagagacgattcgccgctctcagtttgtggtaccgacagccgagaattatgtacgactagccagtgtgcggcctagtaccgttgctgcatcaagttagcagcccaacagcccagttgggaagccttatatactaggagagagcggtcagcgtacagctgggctcactacacatttagacagcccggcgggcgagggttgggtcccccccccttaggcagngaaggccaccattactatttacccaaaat

SEQ ID NO: 515248 - DNA, 791 bp, Homo sapiens
aactaaaataaccccaccctactaaagcccattaaacgcctggcagccggaagcctattcgcaggatagtctcactaaataacaacagtatcccccggactacccagcataacaaagcaagctcacgtaggtaagaacatacacatgaactgcaaacaccgtcgacaagtcatggacaagcacacaggacagctagtacagtgagacaaaaatgaagacacgaaactctaccatcagagcatacacatcacccccaaaacaaaatcccggaacacaagccacaaaacgcagcccaaagcgaaccacaacaaaacaaacaaaacaaacaaacgaagcaaagcaaaacaacacaaccaagggacacaaacaacaaccgacagcacgacacaaccagaacagcaacagccgaaacaacacacggcaaaccacacaccacgactaccgaagagcccaaagaaaaagaacacaacaaacaacaaaaaaccagcgacacagacagacaacagaaacaagaaaacagacaaaaatccagaaaaaacaaaaacacaaaccagcaacacccaaacggaaaccaaggaaaatcaacggaagagacaagagagcagataaaaaaaatataatgaactagaagaaaaaagaaactaactattacaaaaaaaaaagaaaaacacattaaagatagaatacaaattaaaaacaaacaaaaaggaaaagtaagtgaaagaaacaaaaaacaaaaataaaaagaaaaataaagcaagaaaaatatgaaaatcggaaagaatatagag

SEQ ID NO: 515249 - DNA, 412 bp, Homo sapiens
gcgtggtgtgtcatgcagagtatctgtcaggtctgcttgatccagagcgtgaatttaggtcctgagtatcttagttaattgtctgtctctatgattagtctaatatggtcagtggggtgtgaaagtctcccactattatgatgtgtgagtctaagtctctttgtaggtctttaagaacttgctttatgaatctaggtgctcctgtattggttggatatgtacttaggatagttagctcttctcgtagaactgaaccttttaccattacgtgagtgtcgtgggtcttgtttagatcttggtagtttgcaagtctgtttggtcagaaactaggatggcgactcctgcttttttctgttttccatggcttggtaagttttccaccatccctttattttgagcctatgtgtgtctt

SEQ ID NO: 515250 - DNA, 433 bp, Homo sapiens
tttagtgatgaaagtgatggcccctaagatatagagagaactgctaaggtgtacagagaagatggttaggtctacggaggctccaggatgggagtagttaccctgctaagggagggtagactagttcaaactgttcctgctccggcctccactatagcagatgcgagcaggagtaggagcgcgggaggtaagagtcagcaagcttatgttgtttcatgcggggacaagccatatcgggggcaccgcattcattcaggggcaactcagtcagttgccaacagcctccgattcatgcatgggtcattcactatgcaagaagcattcttcacaaatgcatgggctgtgcacgcatacacgttgtcagatgtggtcgttcaccctgcacagcattgcttggtggggggcatcctctcacagtcgcactgccaggcat

SEQ ID NO: 515251 - DNA, 887 bp, Homo sapiens
  misc_feature (1)..(1): n is a, c, g, or t
ntggctccgctcgggagtaccccagagttctcttgcgcggggggttttcacacagcccctgcccctgtgggggtgatgccgctcccctctctggaatgtgtgcaagcgcgtgtccccccctctgctgcggtgcttagttggagctcctccaccgtccgcctctcttgttttggcctgccggccgaagtcttcgcacctctcgtctgcgtggccgcgaccttgattaccgtctcgcgaggttgtgcccgcaccgtctcctctctgccatcgtgcgtgtgtggtcgcacccccgctcgtctcttgttacgtgctaggccggcgcccgctctctctccgcgttgtgtatgttgtctgtccgccccctaagaaacatcgaagtttgcgctgccgccccctctcctcgaaatgtactgctttcctcacgatctgctcgtctctgtttggctaccacgaggagctccactacgagcaagctattcttttattactcccattgccctgccaacatcaattggcggagcggaaaaacaaacactctccttcatcttccgctgtcaagacctactcctgctattaataattcgctccccgccgattataaataccagtcaatgagtgggaggttcttgtcaaggtgcccgcccgcaccgagccctgcggccatctgcgcaggacacccgccacccccccaccccggaccgtagggagagcccccccccctgctgtggggagcccccccttccaactggcgggagacaacaaccagccggcggggacacacaccagcgttgtctgacgaccctctcgctcgcagaaacacatgatagtggagcagccacgccccccggtgaaaacaacagataaaggacaaccccacaaacaaaaca

SEQ ID NO: 515252 - DNA, 102 bp, Homo sapiens
tcctcccccccccccttttttccctgcccagccctgtgttggggccccccaattggaatgttggcccaatttttccaataaacccttgtggtttgcggccca

SEQ ID NO: 515253 - DNA, 200 bp, Homo sapiens
gctagctaggcggctggggagcgttttccgtggcggggaaccgaaggtttgaatttccccttccctgggctcatagggaaggaggaatgtaaaggaagctgttaaaggcagaggaggattattgattattaaatccaagttttgaaaaaaattggatgaggcccctcaagagccctacgcgttgggaggggggctttaaa

SEQ ID NO: 515254 - DNA, 113 bp, Homo sapiens
  misc_feature (36)..(36): n is a, c, g, or t
gaagacatggcgccctaacacttcgagacctgctgntaaattaaaagctatttttcattaaaccaccatttcctccacctattggagtcaaatatgaaagctgtcgatgaagc

SEQ ID NO: 515255 - DNA, 1707 bp, Homo sapiens
  misc_feature (596)..(596): n is a, c, g, or t
  misc_feature (647)..(647): n is a, c, g, or t
  misc_feature (1707)..(1707): n is a, c, g, or t
agcgggccggcgcctgcgccgcgagatccgccccggcctccccgagagcgagccccgggccgccgcgaccaccaggccgcgctagccgccggaccaagccgccaccggaggcgcctgtagctgagacgcagcacgtgacggcaggagtgcatgcagtgaggcgggtcgaggccaccatccgaccaccaccgacgcagcccgtccccgcagggcatcctgacaggaaggcgggccagcacagccgcgttctccaatgggacctccgcagcttgaaacgaagcccgtggggagagccagagtcgtgattgcagcgcgcctatgagcctgcgcgggcgctctagagtgtcgcacagtcagcctcgacaggtacagccaagcgtaaagcacacgcgactgagagcgacacgacagagcactgcactgtgctgggccaatgaggtgcattcagacggaggctgttccgctctttcactctaatgctccagcggccctgtcacttagtcgggaggttatgcaatgcccgtggagtggaccgccaaggtactgtcagactaacctcgagaagagaggtccccagtcggagagcaactcgagtncctgaggacttgaccttgtcacaaccctgttttacttgggagtactagggnttttcctagtgcgcctttgaggtgactaccgactactgtttattgatagcattcgccacctgacctggcaccgccatgaacttgtctcctgggactttgtgccgaggaactgtgcgcccccatttggaacacccatgtcacttgctctcccttggaacaaacgtaccttaattgccggctccgcggcgagactgcggagaaacaacggtagagacggtacatatacataggattggagacagatttggcgtatttcgccccacaatgtaagccccgaggagggtaggaaccacgggagttagccacctattggccccagagaccaaatcgggtgccccctaggcgttcacttccccaatagggcgttgcttcgccatttggcggtggtccccgagagacaagatgaaccgtcccttttagtgtacaagcccacacgtggggccccgtgtattactttccgttaaaacagccaggcaacacggcggatttgtctcccagtgctgtaggaacagctccacacatacactctacgcagtggagtcccatccgtagatgtgactattcccgttttagtaaaggacacgaagaaccaccagctactatcaaagggaccaagcgcgcactaacatgactaattaacgacacatttgggcggccaaccccacagtgcgacgtcgagacacgaaaattatttgcggtacccgccacgattcataacacacacttcgagccaacctaccataacatactagttccacaccacaaaccaaaaaccgaaaccctacagcaagacacacctagaccaccacatagagctaatcaatatacatatcattacgtcgaacaacacccacacagcaatcacaagtagacacaccatctcacgtacattaatactacacattcactttctctattagccacatattctaatcgcacaatcaacgagtcctcacaattaacaacaacgtaccgcaagaacatagcgctaacaaaaaacacaaccatacaaactaactcatcacactcactctacgtacgctacaacgatacactccan

SEQ ID NO: 515256 - DNA, 465 bp, Homo sapiens
tgtggctgtagtgtgttttcggtgtgtgtggatatcaggtgtgtgtgtgtgcatggtgcatgtgtgtgtaggtgtgcagcgtgtgtcaatgcggttgtgttgtgtgcgtggatgtgcagtgtgtgtgtatgccctgacttggcagcagacggggcagtggcatctcttgcagtggggcataggccacagttgcccccataggccttcagcctctccgtctcatctgtctccaagcatgattacaaacccacaggtgtccagcagcttctgctcccattgtctgagggacatggccagatctcgagggctcagcaggagaatgtctgaggtccaaggtgtgcagacggaccaggtggaggcacagcatttctccagccaatctcgggccactcagttcccggctggacacgcacagtgcccctcaggccagtgtcccagccaggcctgcccccccttctcctgagg

SEQ ID NO: 515257 - DNA, 133 bp, Homo sapiens
  misc_feature (80)..(80): n is a, c, g, or t
  misc_feature (107)..(107): n is a, c, g, or t
ggtgctgcagccatgtctctagtgtatccctgaaaaggttccagcatattttgcgagtactcaacaccatcatcgatcgngcggcggaatatagccttttttcatgngctggcattaacgggctgtctgggcc

SEQ ID NO: 515258 - DNA, 181 bp, Homo sapiens
atataagataactgtataaaccggcgtacatgtatcctactaattaatctacatattgatgttatatctatagttcaggtcttctgtgtatatcttcttaagagtataaatgcgtatgatgtatatatgtatatatattaatattcttccatctatattcacttaagtgggtagtcacaga

SEQ ID NO: 515259 - DNA, 142 bp, Homo sapiens
tgtaaggagacagcgctcatcgagtccattgagggcacaggcaagccccgcctgaagccccccttccccgcagacgtggggatcagtggggtagacgagcggtccatgacgatcaccgcagctgtgcccaggcctgtctgtg

SEQ ID NO: 515260 - DNA, 384 bp, Homo sapiens
  misc_feature (225)..(225): n is a, c, g, or t
  misc_feature (240)..(240): n is a, c, g, or t
  misc_feature (259)..(259): n is a, c, g, or t
ctgtctatttctccttcggccgcgccggccaactgttgcacacatgctggtgtcggtgccgcgctatttacccccaagtcgttcccgcagcctatggaccaggccgccttgggtatatctgctcaaggtaaccacacccctctttaaaaattccgccgaaaatgagaagacgctttacccgactctttgggccgttatctcacggcgaactttctgaccaagtanacaactacccagagngcctaggagaagtgctgtntagagagcagttcgacttcatcgctgagccaccttgggaacctacctgatgataggggggttccatctcccaacttgtccatctctccccgttctacttccagggagggcttcacttcaaaaatc

SEQ ID NO: 515261 - DNA, 473 bp, Homo sapiens
acatacaaccagagtacaaccgacatacagagctgaccctgccaccgcgtatgtatcatctctcatggaaccataaaaacgaatgattcagtcttgatctaagtacgacttttaagcacacaagaaataatttaatcatgaagtatcagcttgattatgaatatattctataatctgtatcagttggtaaattaactgtgttacccaaaaaggctgaccagctctaactagtatgaacaggatattgaattcattaatgaatatataactattttgagcatacaaacaatctctggttttacacccactacatttcagaatcctgtaaactgtgaggcatacaatatgtttaatgtggcagaaaatcatatgacatgattattttattctgttcagtccttttcccattaagcatgcaaacaccgtcataaccatctttggtttcacttctacgaggtcatcaggtaatgcat

SEQ ID NO: 515262 - DNA, 117 bp, Homo sapiens
aaccccccccactgcccccccccctcttttttttaagaatggcctggtcatgggtttttcagcccccttgttggccattttatttttttacttccctttttttttttaagaaaggga

SEQ ID NO: 515263 - DNA, 280 bp, Homo sapiens
tgttttaccttctaccaggaagatgtgcatctccttctgccgggccaggatggtgttcttcatttccatgctttacttatggaattgctgagctgtttcaccttttgctactagttatactcgttcttgttttaactctagaactccatttaagtaacatctagtaaactacttactatacttaagctgctttgtaaggcaataataggaataaacaatatgctaaaagtaaccaggccataggaaattagcttactacctatcttcagcaaacttaggt

SEQ ID NO: 515264 - DNA, 566 bp, Homo sapiens
  misc_feature (1)..(1): n is a, c, g, or t
naatgattgtaatgacctttgtgtttaagtgtgattgtgttgtcagtgctttttgaatttatgtgtaatgtgacaggtttgtgtgatatggcaaataatattttgtgcagattttatttggtacatcagagggtgtggtaaaatctacctttaaatttaaaggaattttgtgtacacaaatgccacaaaacataagataagggacttattcagatttaatttaaaacaggagtaaaaagctgacattgtgtcctaaatgctaagtaggaaacttgtgacttgcggtgtttatgtgttgtttattacaaaagcactttatgtttttaatctcttaacctagctcttacttggttttaacttgatggtgaacgaggttatcatcagaactgttacactaaaggatacaagtgaaagataatgttttcaaatgtattaacattgaatgggagttaccagacagcttagtctgtttttgtatgtaggactaaagcggtgccacacaccacctgtaaatactgtaaattatttattgaagaaaaaaaataaagtgtcatgttgaattgtta

SEQ ID NO: 515265 - DNA, 129 bp, Homo sapiens
ccacgggcttacatctcattactattctgcctagcaaactcaaactacgaacgcactcacagtgggttcgatcaataccgggctgacctagctcgatttcgtactcattgttgtacctgtctgctgtgt

SEQ ID NO: 515266 - DNA, 836 bp, Homo sapiens
ggctggtgatgatcccttcaatgggtcaggctgaactcatggaggcagccgtacgtcatgaatgcttgtgatcggccgtacgtctctctactcttaactgtcagtgactgtcacccgtatgtggtcaagaatgcgacatggaacaatgcgatcattggaaggctcccatgaagagtcccgcgaaaataatttgtgtaacgggttggtggacactcaagaagagacggtacaacacgtagtactattccaaccttttggaacccgagattgagcaggtgaaaatcggagtcggagtaaatttgaagggctaacgctaggggtaagactcatctttaacgtagatcagtgtgctaagaaccataggggagcgacttagttgttgaccgcaaagcggactagaaaggttctgggcaactaagtgggattgtggcagaagccatggatggcgccccccattggttaagtgtcacggcacgatgtgacccgctccacaaaagggtacactcgggtcagggacattcgaagcgtaaacttctattgacacaacgtcgttggtgggttacaattacctaagaaggtttgtttcccccattaggagggggagggtttcgagatacatttaagatatgccaacaccaaggttagaggatcgctatacaggggtggttagcacccgattggtagaggtatctagtgggggcactatgattgcgggataaggtaaaagttaggagaagcgaagccaattttttagagataacagcctttgagtgaggaacgaggacagagattggcagcagaaagagtcacagacaagacattgaacaggcacgggg

SEQ ID NO: 515267 - DNA, 228 bp, Homo sapiens
  misc_feature (68)..(68): n is a, c, g, or t
ctagaggatccccatgcgcgacgcttccatcaaagaacatcttcatgaagattatctcatccatcagngcatcaaccttggcctccagctccaccttgttcatgtaggcagcatctacatccttcttcagcatcacaaactcattctcagcagtggtacgctgttgatttcatcctcatacttgttcttgaagtcttccaccaggtcctgcatgttcctcagctctga

SEQ ID NO: 515268 - DNA, 126 bp, Homo sapiens
cgcaagttacgcctgaacaaccgcctgcgcggcctgatcgacaacgccctggccagccaccagttgctcagcgacaacagcgacacccacctgaacaccacccagcaggccctggaaatccaggcc

SEQ ID NO: 515269 - DNA, 461 bp, Homo sapiens
  misc_feature (37)..(37): n is a, c, g, or t
  misc_feature (80)..(80): n is a, c, g, or t
  misc_feature (93)..(93): n is a, c, g, or t
atagaccaccgataagattagtttctttttagaaaanagcgtgaccttcttataactcagagcagctttggtttctgganaataccatctcanattctgcagagtcatcagataaggcagttggttaaacaaacaaacaaattgggcgtgagcaataattatacaagggcggtgtagtaacagccaatgagatccttttatgaagtcattattcagtatggccaaacgccatgttgggtcagcaaatgttagtccaaatgttgctgttttgttcttaaattactgccgtgtaataaagtgggacacaatattgagtttttcagaagactaatttttaaaaaatgtgattactttctattaatgggatttaaaggcttttcttttatgaaatgattgtaagggtagtaactaatgcatcagtgaacaacaaaaagactagttctagatcgcgagcggccgct

SEQ ID NO: 515270 - DNA, 211 bp, Homo sapiens
caaaaatttatccactgcctgtaatatcaatcattgagagctgggtaaacgtccagaaaggctttagcaaatgcattatcaaagatgctataatgttgatttcattaccactgatttatattgacatgactttccccgagtaacttacgaaggagaaaaaaaccaacaacaaaatctacataagacatgtgcattgtcttgctaagaatta

SEQ ID NO: 515271 - DNA, 950 bp, Homo sapiens
gtgtctgaccgccttccctctgggtgaaaaggcgcgacccggtgtgggggtctaggtaattgagctgggcgggaccgccagcccaacatcgttaccttcggtaagagagaggcactggcactcagaaaatgtggtgaagcaggaaagtccaatagggtctggggaatcgcccagattgcgtacaggtgcttaggtcgatattggccttgcgtacgttggcacggaggaggctgttcacttaattacctttcgatgtgtctgcatcgcagactccttcagcaggccttccaagcccagtttggacaagtcagactataacatggtggatatatctagaatgagcataagggagaagcatgctgggaagctctatacccggaatctgtccagggattaataggggtcatcaggagaatgtacacccgcatgtgaagctggtacaacccagagtagaattaattcagtctgtcatggaccacattgctggagatgaggatcacacagagtggagccattcagccttgtcgctgcgtcggtactgaatagggcgactggatgtacagcattcgggaagcgactggtactgaaattagtagatagtctagcgccaaatgatccatgtattgttaatccgaaggtcggagatcgaagactgacaaagcaaagacccgtgctacatgggctacacaagtaactgaggaaactgaagaaccaagcttgatctgttaccattgggatgataacctgaggacccccactggaaatctcccatcttactgaaaaacctggaagtgaggagtgtgcacggatgctgaatgtttgggaatgagaggatgagtgagtgaggctatggtaacacaccacacttggaaatcctaccacagcagcagccgcagggccgccaacagcagcgctgttagtgagctaagtaataactcactgcgtagatc

SEQ ID NO: 515272 - DNA, 242 bp, Homo sapiens
aggcagcagtgcagtggtatggtcgcagtttactgccacctccagctcctgggctcaagtgatcctcccgcctcggtctcccaagcagttaggactataggcacataagaccacgcccagccaatttttaaattttttgtagagatgaggtctcactatgttgcccaggctagtctcgaactcctggcttcaagggatcctcctgtctcagcctcccattatgctaggattacaggtcgacg

SEQ ID NO: 515273 - DNA, 862 bp, Homo sapiens
  misc_feature (376)..(376): n is a, c, g, or t
atggactgtgtcccaccggcgccactacccaggctccctgatgtcagttgaaccctggctatggctgcagctgagatcacaaagaagctcttctgtccattaaacgaatcgggtggtccgtgactggggggctgtggaatacatggccatatctatctcactgactagattgatgggtgagccacccaacagatgggctaccaagttcgcgtctactatatgagccgggacgctgcacgagcaaatgaggtcgcataggaccatcacgacaaaggagcttcctacatattgaccttcaggcttcggtgacagcataccaatagagagggtgtccccatgcgtacagggctgagcacctgggcgagttcaacctggngctccaccatcgtgctcatcttcgagggccccaaggacttgaatttccagtctgagaagcagcgacagaaaaataccggctttggggaagccctgggctcgctctagaggtctctttcctgattatggctgctaagggatcttttccaaacagagtgacgggtcttttcaagagggaggcccatgaggccatccaggtaagggcctgctcagcgtgttgggagtctgaccagggtaggacttgaatgattcgggtaccacgctgttccagaggtgcagcaccagaagtggggagagccccatcatggccctcaaactattccgttccttatgcgctaaccaataacaaagtgccgggtggcaatgatctcacggtccacatttggatcctttttaaccactggtttagacggacacaagcctgattcttgacggaactttcagtggctctcggggcggatactgggggtctctccccccataaact

SEQ ID NO: 515274 - DNA, 338 bp, Homo sapiens
ctcaggaggccatcgcaggcactctgagttattgcctctcacacaaggagggtgccgcctatcataatgttctgtggagactaaatgaaatgacatagataaaagggctaagacacatagtgggggctttccataactgccagcttcactgccactcaacgactccacgctgtcacacgtcacctctacactgcagctggctcccatctcttctctttggctccgccctctccctgagctctggtaccctgtctcccactgtcaactgtacatctcccgccggcatctctaattggacacatgcaaactgaaattaccatctcgccaaaaaaccagtg

SEQ ID NO: 515275 - DNA, 318 bp, Homo sapiens
ctgttatacaggactgctataaaacaatgagttacgacatacctatggaatggctaaaatctaaaaaaactgacaataccaaatgttgtgagcatgcagagtaacaggaactctaattcattgctggtgagcatacaaatgatacagccacttcagaagacagtttggcagtttttcacaaagctaaaacctaacttaaccatatgatccagcaatcacacttccaggtatttatccaattgacttgaaagcacgtcctcatggccgggcacgatggctcacatctgtaatcccagcaatttgggaagacaaggcggg

SEQ ID NO: 515276 - DNA, 135 bp, Homo sapiens
ggttaaacaacgccacttatccacctaaccactatcactaaaaaaactcaacctctatatacaaaactccctacaaaactccataattataacattcacaaacacaaaactaaacataatttatacattttttaa

SEQ ID NO: 515277 - DNA, 882 bp, Homo sapiens
ccgtctcgtaagttccgtggaatatctggtcgcattctggcctgcacccggaccgtgatgccattcgctccccgtttaccccgactggccgaaacatttggctccagtccggaaacgattcacgtgcgattagagaaaatggaacagcggggatctgttaccgggcgcgtatttgatgtcagcccgaacagctcgttatggacgtagcctgcttagtcggcattatattaaagagcctcaagactacccttccgcgctggcaagctggaaagccttgatgaagtcactgaagcctattacacaaccgccactacagcatctttataaaagtgatgtccgttcgatcgacgctctccagcatgtacttatcacaagatccaaacaattgatgaaattcagtccaccgagacattgatcgtcctgcaaacccgatcatgcgtaccatcaagccctgatcggcttttttaatcccatacttttccacaggtagatcccaacgcgttcacagcgtacatacgccactcgttaataaaggtggcggtttatggcagatatcactcttatcagcggcagcaccctcggcggtgccgaatatgtagcagaacacctggctgaaaagctggaagagcgggttttaccaccgaaacgctgcacggtccgctgttagaagatttacctgcctcagggatctggctggttatcagctccacccacggtgccggagatattccggacacctttctcctttctatgaagcattgcaggaacagacgcccgatctgtctcagtccgctttggcgcaatcggtattgcagtcgtgaatatgacaccttttgtgggctatcgataactcagcattactcgggcggagaaggaagcccc

SEQ ID NO: 515278 - DNA, 81 bp, Homo sapiens
ggatttgctggtgcagtacaactaggcttaatagggagctcgaattcgagggcctacttcacaaagcgccttcccccaaaa

SEQ ID NO: 515279 - DNA, 650 bp, Homo sapiens
ggtagccgttgtgttgggaaagtgagggatttttggcctacgtttctcctgcttacttatactcctccctatataactttgccggtagcaacacagttatgggtctgcaagcaagaagaagcagctgaagcctgtggtgctggtatttgtcatagagatttttgattgatgagaagatccttattcagcaccaaaaagcaaagcattttaaatgccatatatgtcacaagacaattgtatacaggactgccaccagtaccatgtgagcaccatgtgaatgcctccaggcatacctccattaattgccagtgtgttcctcctctgatgccaggaatgccaccagtatatgccatggcatgccccctggatttgcatcatcagagaaaaatacacccagtcattatgcggtgaaacatcatgatgccaattgggtggacatgatgccaccttggaccaggaatatcacctctgatgcctggaatagccaacagtgtattgtcccactaccatgtaccaaagtcctggaattcctcctatgactacaagcacaggatgttcaagcgccaggtatctatatagccaactgcacaaaaagcactgactgcccaagcatccagttataagctcatatccctagtgatgaagatgtg

SEQ ID NO: 515280 - DNA, 523 bp, Homo sapiens
  misc_feature (2)..(2): n is a, c, g, or t
  misc_feature (151)..(151): n is a, c, g, or t
  misc_feature (155)..(155): n is a, c, g, or t
  misc_feature (198)..(198): n is a, c, g, or t
  misc_feature (214)..(214): n is a, c, g, or t
  misc_feature (228)..(228): n is a, c, g, or t
  misc_feature (259)..(259): n is a, c, g, or t
  misc_feature (280)..(280): n is a, c, g, or t
  misc_feature (322)..(322): n is a, c, g, or t
  misc_feature (382)..(382): n is a, c, g, or t
  misc_feature (438)..(438): n is a, c, g, or t
  misc_feature (450)..(450): n is a, c, g, or t
  misc_feature (455)..(455): n is a, c, g, or t
  misc_feature (469)..(469): n is a, c, g, or t
tntccttcggcagcaatatatcatcctcaaaaatatcttgtgttgttaatatgacatcctgctgactactggattttgtctcattcttcttgactttctgatctgtaaagaggtcatcctcatctcccaggagaggaaagggatttgtttncttngctggtttgggtttagcagactgaaagagatcatcatcactgntggcctcgcctagagnaggaaacatggggntctttgctttaccacccactggtgggttggnaggattctctgctatcttggncttgggtttggttctctccacggactgagatccagtgcccgnggaaaaaatgtccccagaatcaaaaaggtcagcctcccctctggaatgaccagagacttnggaaaaggggcttgtgtccactccaggaacagaacacccccccaaggagcagcggnagctgccagggnctccncaggctgtcttctncactgggtgatctgacttgcggccgatggccattggggaatgggcacaaccact

SEQ ID NO: 515281 - DNA, 206 bp, Homo sapiens
agaaagcccctcggtccctctacggaagtagcgacacgcctaccgctcgagggaagagtaactagtaatcatgccagagtctcgtacgtaatacggaattaatcagacgaatcgctccaccaactagcaacggacatgcagcagcacccactgaatccaaaaagagctatcagggctgtcaaattgtgtacccggctcgcgggacg

SEQ ID NO: 515282 - DNA, 1430 bp, Homo sapiens
  misc_feature (120)..(120): n is a, c, g, or t
  misc_feature (312)..(312): n is a, c, g, or t
  misc_feature (397)..(397): n is a, c, g, or t
  misc_feature (419)..(419): n is a, c, g, or t
  misc_feature (438)..(438): n is a, c, g, or t
  misc_feature (488)..(488): n is a, c, g, or t
  misc_feature (589)..(589): n is a, c, g, or t
ggtcctgatcaagcgctagtactgaatctgttgatgctgtgcatgtgcgctctactgcgtttgtgctagcagtagagatcacgagaatactaatcgattggatgtcgacggtatatcgcntgctctatttgacaggctgaaaagtgactcctgacgagtatttcacagatgcatcggagggctactgttagccgactcggtgatgtgtatctgcctattgtctctgtgcggttctccaccaccgtggctgtgcatactaacgagagagcaaggagagataagtcatcatggacatagtccgcgtgcctgggnccaggggaaagaatggcttgcatggacctaagggtgagtgttgcctagcctaggagaagacattctcgttcgctgtccgcaggcnacgggggtgtgaagcgactcgnttctacctaagcttagagnagagcgatactctatgctagatgtcatcagagtcgtgatcgcgaggcctntttgctatctatctggagccgattgtgttactgccgcgattctgacgtctagtgttttgctcatctctaagtctctgggcacacttgcatgtggcagtaanacacactagagagtgtgtgtccctttgaagctagttattttattacccgggtgacacatggacacacgtatttagagctaacagtcctaatgttcgagtcatgggagtagaaccgaaggaattgtcacctagtatcgggcgatacactcacaggcggaggaaaacgtccgtgggccttgatcgccttagtggcggccttttggtggcttataagtgcttggggtgggtaaggcctaatttcaagggaaccgaaatgtaacccaatggaccggaattaccgaatagaaggattccctggtcggtcaacttgtttgggtgcggcagatttgttcccctggggttccctaaaagtctgggtgtgcctcccggaatacggacaaagggttcagtaaaaagggcaaaaaggggcttaatatgagaactgtggtgctacttactatcttgtggtcgtaatttgtcccccccttggtgtactccttccttgttacactcataggaatttatttgggaagttatttaccagggggtctttccctccgcggaatagacatcaccaatatcaacgaggggggggcaacaaaaaatgtcgggtgggcgagaagaccccgcggcatcattaaaccgccggcgaaggcactacgccacagttgtctcgaacgcgacgatacggggccgatcggcgacccaaccgcggccgtataaacgcagaaaatcacgagcagggagcgcgcagcgacaatacgacccaccacactagcgagaagagagcatcaccaaacgagacacgaatcagcaacagaacaccatgccactaatagtgacgccccataccacagacaca

SEQ ID NO: 515283 - DNA, 742 bp, Homo sapiens
tctctctctctctctctctctctctctctctatctctctctgtctctgtatgactgagtctgtaaccgtgctcagctacaggcgccacattctgacacacacaaaggcagtaagagcgacagaaatcgcaatcgagagcgatacctcagctactggcagaggtaccacaaaggaaacgaccaatcagacagcaacacacatgacgtcataatgaatagctcaaaaaacagctcataatagatgcctgtataaagaactatatccccaacatagagcaggcactatcgaggaaataaagcccattcgagaccacagacagactcagagaaaactagcaggtggacccggaacccaatcagactatatgaaagcgcttacaattgatctgccccaatttacaaagaaggcctggcgaaacccctgagctcccaacttaaacgtccagctgcacataactgttttaccaagcaggcacataggcacaatgaccctacccaacagcctgacagacagactcagcaacagaacggccaatggcacaacatcagctataaatcctgctaaaaatatgtccaactcccccgttaacaaccctaagattcaaccaactgtgcctccctgagcgaaatccatcattgaactaaaagaatgttcccaccatatggccagactcggctgtcacatgattcgtaccaagaaacccctcattacagaaccgaagactcgcaatgtcacaggcgct

SEQ ID NO: 515284 - DNA, 143 bp, Homo sapiens
tgcaagaagggttccttcctggacgacttcacagcatccctctccctctaggcacagggcgtcaggtcacaaattagcagagactggcagcaggttcaggctcctttaagtgacctgggccccaagttccctctctgcagttc

SEQ ID NO: 515285 - DNA, 1059 bp, Homo sapiens
  misc_feature (500)..(500): n is a, c, g, or t
ggccgcgttcccccatgctctgggtacccggtgcttgatcgcgatcgccatgatgggccatcgtccagtgctcgtgctcatacagaacacaaagcgtgactttctggaagaaaagttcagaatctgggacacacagtcaactggctgcgcacaggatctattgcacgactactcatccgcaacagtgctttcgggaccctaatgcttctatgtactgacaggactgtgcattaggcagccctaacatggctacggcattgtgactgaacacatatgaatggacgaaaaagtcccataccgttcgcacgatgcatatccagagctcccatcaatccctaggcggcccataagctcccattgcattccggataattatccacgtcgctgcgcactcgctacgtgtaatcgtaaccgtatgggtatgcggacggaattgggagtagcgaccattcagatagattcattcttcgcagggagtataacttgttaagtcctaagtncatgctatggaaacgaccatgtacgcgtggaagccaagtcgaagtcgacggaatagccacatcgcatagacaaggttgggtttggatacacacgtaggcctttagacgctgggggcacagggccatatttttgcggcatttgccatacgagcgttatatcccaggacgacacacatccagaggaaccataagattatcaataggtaacatcgccccggaggtaaggggagggaagtctaaggataatgagcaaaaagttgaggtcacgttgattgcgcttttgaaaaccaatttccagttctaaaacaaaagcagtcgtagttttatactaaagccaaaataaggccccagatgcaaaagtttccgcgggttgggtacctatgcctttctagggacgtatagcgaaaaactttgtaggccccctagatgatgagcgtgggttcccacatggcattggggtcacccgggtatcttggaaagcggcatgacactttgggtccgcggaaataaggaaagatttcgaattattacaagaaattatattgctttggcgaaggag

SEQ ID NO: 515286 - DNA, 472 bp, Homo sapiens
tctagagtgtaaaaataggaccaagtgaggactggtcatgggtatcagtgcctcggagggttaaatcagctctcaacatcacagcacagggcccgtgagtcaccccagggctctggacctgtgtacccaagccgtatgcaggccggggagtgcacgtggggctcctctgtggcgccagtgtgaagctgctctccggggcggtcgcagcctccaaaccctggtgctacgagtccgtgcctcaggcccagggaccacaggccgtctgctcatggctgaaaatgaggccaagcagctcccaagtctcgaagactccactggtgtggaggcagaggggcccttccagggcagggcagccctcggggcagcagcaggggcaagggctctgttttacgcacacgggcacaggcacgcaggtgccggccctgtccgctggctcccaagaggccgatagcccggtagtgaggtcacacac

SEQ ID NO: 515287 - DNA, 876 bp, Homo sapiens
aaagcggcgtcgcgccgggaagttgggatcacgagcagtctaatccaggcctctggctgccgtatttatgaaatgatatttccgggccttccttccttccttccttccttccttccttcctttctttctttctttctttctttctttctttctttctttctgtctttctttctctctttctttctttctttccttccttccttccttccttctttccttcctccctccctccctccctccttccttccttttcctcttgcttcctttctcttcttatgtctctctttctctcttccctctctctccttccttccttccttcttatcagcagggttgtactctgtccaaacaagctggagtgcagatggcatgatcactgtatcattgcggcctccaactcctgagctcaagtgatcctcccgatctcagccttccgagtggctgggactaagggtgcatgcaactacacctggctagcttcaaaaaaaaaaaacgtgttcaccagatgtggttcaatgccatgtgagaaacagggccaggctcctcaccaactgcctggaactcaaagccagtccgtgccatcccgtgacctctgaaagtgctgctcattagcagacccacaggccactgttgcccggcactgagggtatttcttccattcacaccaattcagcagatattttctaccttcctttacaacgcacaagccaatcaaatgtagatcaagtagctcaacaaatcaagttacactcacaaacgtcatctaaggtactttagttaagcacctgtcatgcacgttacaggaatctggttcaatctgactcgtcgtgattctagacgatctagcctcgctatctattcccgttcagtcacagt

SEQ ID NO: 515288 - DNA, 403 bp, Homo sapiens
cgcggggttccctggtcgtatccacctcggcttcttcaaaactagcggtcccaccaccatgccaggaggccattgttagcacattttatatgagctaaaagatatacaccgatggctcagcaacggagccagtggttagcccaagtgcagtccactgacgaagcggccaagccaggttcaccgccagtgtgcttcccccgcacagcacatggccccacgacagtccatcccggaagtctactgccagttcccatgccactgcctctaaactgactacacgggatgctaggattggcttttggaaggtccacgacccccagaggatgcgccttctccatcccctctgtggctacaccaagggaggcagccacactagttgaaatttctaaaaaacactaaaaaa

SEQ ID NO: 515289 - DNA, 459 bp, Homo sapiens
  misc_feature (34)..(34): n is a, c, g, or t
  misc_feature (41)..(41): n is a, c, g, or t
  misc_feature (103)..(103): n is a, c, g, or t
  misc_feature (105)..(105): n is a, c, g, or t
  misc_feature (118)..(118): n is a, c, g, or t
  misc_feature (123)..(123): n is a, c, g, or t
  misc_feature (326)..(326): n is a, c, g, or t
  misc_feature (358)..(358): n is a, c, g, or t
  misc_feature (408)..(408): n is a, c, g, or t
  misc_feature (421)..(421): n is a, c, g, or t
  misc_feature (423)..(423): n is a, c, g, or t
gaattcggcagagcgaaagggcacttggaccctngatgcgncccacaaagttccccgaaatcccggtctccctcaagaggaacaccgaggttttccggcaccncntcctctgagcccnttctnccctcctgatctggacaggagggtcgactcccctgctttgtctggaaggggttcccgaccttccggtcgcacctcaggatgaggccggtctcacgaagacattccagacgtggcctcgtgggtggttccacattccgtagaccccgatttcccggtcccctcttgataagaacccgatgcccggacacctctccgaactccancctgtgaatgaagtcaacacgaaggggcagtnactcgcccgtgcatcgtccggaaaagacccccaggttccaaataccgctngacaagtggcctntntccccggggaacaaccttgaggggtgggcccggtac

SEQ ID NO: 515290 - DNA, 229 bp, Homo sapiens
acatagtaatactatgcatatcatggttgtttctattaggcgagtaaatattctcacttaagcaatatggtaataacaattgtttacttgtatagacatgaatacggcgtagagagcccatgacggaatgactaaatactccaaagtgtttagcattgagaggcttattctcatagataaaatatcattacattcagtataaaaagaccatacaacctcattttgtgat

SEQ ID NO: 515291 - DNA, 190 bp, Homo sapiens
aaaagtgagtatcgatgatctctctcgtcgtgcgacaacttgcccggcgtctctcttgctcacaagcccctctctctcttgctctcgtcgacgtatgctctctcgtctctctctcacaaacactctctctttctttcgtgacagagtctcactctgtcacccaaactggagtgcagtggcacaatctcgg

SEQ ID NO: 515292 - DNA, 101 bp, Homo sapiens
aaatgtggcctcaatgcgacctcccacctcagcctcccgagatagctgggactacatgtgcacgcgccaacgcgcccggccgcttgagtccacattttatg

SEQ ID NO: 515293 - DNA, 966 bp, Homo sapiens
gctcgaatcggaggtctgcagcgctgcttcaggagcatgaggtgctgcaggtgactgcaggtaagctggcaacgggcgaccggctgatacctgaggaaagccggggtccccgggagattgcacgctcccggagctccgtggggttggtctccacccggcgtacagagatcccggagtgtcctagtggtacccacggcagtcggcggcgcgtttgtgcggggccgctttttgggcaatgtcggctttgccaagtgcttcgagactctcgtgatgcaggatcaccaaggattgtgttcgcgagtcaaagattgttgcctaagtcgtctgctgcgtcaaggccgcactcgagaagggaggaatgatgtcgcattggaaagtatccagttcaaccggagccttctgcgcctagcgagccacagtcgataatggaattccacggtccattcattcgaaggaagcatagcgaaccttgcggtggtttcggtaggtagatctgagatgcttcctgatcaggtcgggagggtccttctacgcttgtgagccttgcaccataggcactgactggaagatgcctcttgacctcttgaagaccttgagaggcgcccgaataacctaatccttacgggcaaaagatggtgcttcggtttggccaggttacctttgcacccggatacaccagagagttattccatcggaggaaccttctaagcttggggacaattctttttccctgaaatggactgatcctgaagcgtgaacaactacaggcgaattcaggactcgtggacaaatcaaaaatgttagaacatattgactgtggacaggaggcgaaaaagaagaacccaggttgtaagggacctccatataatgacattaggactcccgaggatgcgtgcagccatcccacgggccccacaataaaggagtggttgtgttggaccatcgcggtgtatcatgttattacct

SEQ ID NO: 515294 - DNA, 437 bp, Homo sapiens
  misc_feature (413)..(413): n is a, c, g, or t
  misc_feature (418)..(418): n is a, c, g, or t
ctcattaggtgattattgaccaaatagttaagattggaaatatttttttttttcaagacaagagtttcactcttattgccgaggctggagtgcaatggcgtgatcctggctcactgcaacctctgcctcccaggttcaaacaattctcctgcctcagcctcttgagtagctgggattacaggcacccaccaccacgcccggctaattttttttttttttttagaagagacagcattttaccatgttggccaggctggtctagaactcctgacctcaagtgatccacccgcctcggcctcccaaagtgctgggattatagggcatgagccaccatgcctgggtcttgggaaattctctgttttttttcacagacaagatctcgctatgttgcccagggtgggtcttaaactccnggggntcaagcaatttttcctgcc

SEQ ID NO: 515295 - DNA, 216 bp, Homo sapiens
  misc_feature (16)..(16): n is a, c, g, or t
tcaccaatgccgtggntgggccgcgctgacaggtcatctttgtccgagaaacccccagggcctcgccgagatgtgggcccgctggtgtggggggcgtgggggggacactgctggtgctgctgcttctggctggggggtccttggccttcatccatgcatgagggtgaggaggaggaggaagagccctggaggagcaggaggaggagccagtgcaca

SEQ ID NO: 515296 - DNA, 136 bp, Homo sapiens
agaggacccggaaggatctgtggcattacgtacattcatactgtgtgcaaccatcaccacatccacctccagaactttttcattttccccagttgaaactctatacccattaaatactaacttctattccatcctt

SEQ ID NO: 515297 - DNA, 120 bp, Homo sapiens
agaatattaattgtactgcagagcagcttgaaaacatggctcattaagtatgcaggatagcagaccattcagggcagggtgctttcccattaggaactgcctaataagactaggaacaat

SEQ ID NO: 515298 - DNA, 880 bp, Homo sapiens
ttcttttccctggatgcgagcaacacgagacagaggagagaatgagagagaggaaggagcgactacgcactgtagaattagggtcgactctctgcacgagtctctccattccgtgttcacgctcttggattcaccattggattactcgcgtggttcaagagtaccagagtgaaacgctgtcttatcatgtcgggacccacacattggccaggacacaagagattctacgcggttctcttccgactccccccatgtcgacgctgtggtgagaaggccgatgtctctcctctttagccggtctcgtgtgcgcctgctagtgatacaccagaactgcgaaaccccatctccattagaaatctgcgggatccccggtcaaatctgctgaaaaaaaatcccgtcacatcggggttcataaatattttctaaaccccccccctgttacttcttatgcaaaaatatgcccgtagttgaatattatgctcatacactattttcctattgactactttgtcagcccctaatacccagctcctcacgaggagattcccccagttgttacaagcccgccacccaggtcgacggcaactactcaccatttccacaacctatatacaaccagtaattatccgtttttctttcaaccacaaccctcactcataaaattcggtgtggctccattctctatatcgaacatttggaatcaacataaccggtctatcagttattttattggataaacaatatagtgtacatagtacaggcatagcccacctttgcacccctatactatagaacgcttttcacaccccttgcagcgacatggatccattggacccggatttaacccccctggggcaccacccaaacccccgcatcatgc

SEQ ID NO: 515299 - DNA, 892 bp, Homo sapiens
ggcctcttcctcttctcctccttcgcactgaccctcttgcttgtggcgctctgggtcgcctggctgtggaatgaccctgttctcaggaagaagtacccgggtgtcatctacgtccctgagccctgggctttctacacccttcacgtcagcagtcgcgcactgacgctcccgtggcaccaggtctctggcgctctgctgcttgtgagggtgggccatggaggcggcttctgaatacaggagtagggggggtgtgggatgtgtaaccagatgaccgattagcatgagtggggtgtgcctcttgtgcgtgcctacgtgtgtgtgtgtgtgtgtgtgtcttgattatatgtgtgcgcagagtgccatcactttttcagactctactatttccgccaagtgtctgtggtgcattcgcattgcatctcacggatcggagtgctgttgcaagagtgtgtctagtcgccaggatccgggcccctgcctcctctgcacctgacaggctccctactccggggctagtctgtcccgtcccgtagatcgttcgtggtagcctgtgcaggatgaccgggttgtgtgggggcatagcgccaggcgggcacctggtgtgtcatcgtggccaccatcgtggggcatgtctcaggccccagcgctgaccttacattgacgtagggtacgtccgcctacctggggttgggggccaatgcttcgtcatttctggcgctgtcattgcgctagatggcctgggcgcaattggctgcacgtggcgttgctccccccttgggccctttgggcgaaagtgttttggccggcctccgctggattggccacccccgcgttgccttgtgtggcctcccctggggcccccccctatgggggccacagtccccccaagggg

SEQ ID NO: 515300 - DNA, 291 bp, Homo sapiens
cggcacgagggctatctccaggtaaacagtataagaatttaattgaattagaggacacgtagctggtatctgctgcttgatgtgtaggggaaaacccacacacatttagtcacagaagttttctgtgttgatgattgttgtgatgtgagatcagagtagaaaacatgttgagtctgttttttccacccataaaactctaaagcaatcaccaagaaaaaaggtgaagaaatatagctaactagacaataaaagagataaaatggaatactaaaacaatcaacataaagacga

SEQ ID NO: 515301 - DNA, 753 bp, Homo sapiens
ggctcgtctgcagagtcatgatctctttccgattggccctcatccagctagcagaatttcttccatcagatcagataacgtctctcgcgcttgtatgcttcatccgggaggcggtaacgcagggagccaataatagttcctcttgccggaactgctttcacattctccactatggcacgcgaaatatatgctctcctgaactatgcagatgaaaagttcctgggtgaaatccacagcagaagcttatgctgaagtaagcaaaggattgcacgcatatttctcattggaggctctatctctgaagaggatgctgggaagttatataaaatctgtgctgtgtttgggtctgaatggaatgttattagtcaaagtatagaaagatccttctggtttgacattgatgttcctggaataaattatcatttcaagaatctataaatcattgatgtccgggtgatagtattctccatatttgatagtccttaatgtagagtgggtctgggcatcatgatacgacatgctggttttgcaagagctgtgaaataaatctacgcacagagaggttgccagctgttcggtatatccaggagcttttaatctgaccactgaacagcccattgggagtacttcatcagaagccgggtgttgataatccagtgttgtgggcacagctctctgccgggatgacaagctccttgttgcctggggccagcacggggtgacctgggggagttctagccacgtgcaaatcag

SEQ ID NO: 515302 - DNA, 288 bp, Homo sapiens
ccctgaacattcgtgtcctctgtctggggttaaacccttcatctcatctcacccagatctttgctacagtctcctgatcagtcttcctacccctagagatgctgctaaagctgaaatacccacacatcacatcatttctttcaaatacattagaaagctcccgcctgcctacatcataaaggcaactgagaccaggactttcaccacatgccatctgccccagcccatcggtccaacctccttcccttgtcccctccctgcaggccacactctggacacgaatgttca

SEQ ID NO: 515303 - DNA, 909 bp, Homo sapiens
  misc_feature (192)..(192): n is a, c, g, or t
  misc_feature (211)..(211): n is a, c, g, or t
  misc_feature (217)..(217): n is a, c, g, or t
  misc_feature (246)..(246): n is a, c, g, or t
  misc_feature (316)..(316): n is a, c, g, or t
  misc_feature (342)..(342): n is a, c, g, or t
  misc_feature (344)..(344): n is a, c, g, or t
  misc_feature (355)..(355): n is a, c, g, or t
  misc_feature (364)..(364): n is a, c, g, or t
  misc_feature (379)..(379): n is a, c, g, or t
  misc_feature (384)..(384): n is a, c, g, or t
  misc_feature (389)..(389): n is a, c, g, or t
  misc_feature (416)..(416): n is a, c, g, or t
  misc_feature (430)..(430): n is a, c, g, or t
  misc_feature (447)..(447): n is a, c, g, or t
  misc_feature (463)..(463): n is a, c, g, or t
  misc_feature (473)..(473): n is a, c, g, or t
  misc_feature (476)..(476): n is a, c, g, or t
  misc_feature (478)..(478): n is a, c, g, or t
  misc_feature (487)..(487): n is a, c, g, or t
  misc_feature (499)..(499): n is a, c, g, or t
  misc_feature (609)..(609): n is a, c, g, or t
aaaaatatacaataatttgtcaatatataatcaaaataaaaaacaaaacatactctctcccccaaaaaaacatctcagtggggaacagatgtatcttttcatctgaaagacaatgctgggggaagagctccactgagatgcgggcagggaggctgggctcgagccagcccctgcgttagcaggagggggagnacagataggtaactctttnacattncctttatgatctggcacttctccccagcnccttccctctgccccccacccctactcctcaacagttctggtttgccctgacttctctacggctctggcntcttcccgaagagatataggagccangnaagcacgcagngggtgaacngcttaatttcactanatgtngatgnacttgtcttccgtcttgtaggtcttcnctatataaccttangccacccataaatgaancattgggaatacctgncatgctgganccngnaatcacagntttcccggctcncctttttgtctaagatctattgagaaagggaaatatgggaaggagaaccatttgatcagaatacaaccaatagtctttaagcattgttaaagtatgaaactgaaatacantcaaaacacttaatccttgaggcttgtgatctgagtaattagcaggtatgatgctgggactggaaaatagaaagtaataactaaagggttaatgtgcaacgttattttttggccttgttcatgattttatgttttcagtgtcctgtgtacatatagaattgttaaagttgtcatttccaatatttatattagaaaaattatttagatactttataattttaaccggcatttttaataatgacacttgcatttattgtattgtaataaatttcacttttaactttaaaagttaaaaaaaaa

SEQ ID NO: 515304 - DNA, 1751 bp, Homo sapiens
gctataacaacagtaccaaggtggctgtgaaaaccctgaagccaggaactatgtcttgtgcacagccttcctggaagaagccaacctccatgacagcaccctgccagccatgcacacatgctctgtgagtgctctcacgctgtgtgtcacccagtggcaggagccccatttacatcatccacctgagtacatggccaaggtgccagttttgcctagtgcatttccatgcacagcagctgcattgcacaggtgtgcacacagttgcttgctatcccacacagcctccatcttgcactctcttcctcgcatccagcatttgccagcatgggcaacataggcccatcaccatccgccagcgtgcacaggacactaccaattacaaccggtgaacctagacgacgccaggcttaacctgtatcctcggatcctcccgacggtcacctcacttgtcgcaacacacttcggcacgactctctctgaggcctattgctacgcacggtacacatctgaacgactacaactgcacgctacccaccatgtcacaagcggtgcacaagggtcgctctacagagctttcgcacgtcactctacacgcttgcagaccgggctcatcccatgacaggccacattccacactttatggaactcgctaatccacctactctcaacgtcctgcacttgtggtcgggtcccttcttagggacacttcccctcccttcatttacccacacaaaactcatgattcgaccccttagttgtcgcgacaccaatatagttcccactaacagcccaagggggcatgcaacaccttacaatgttggcgcggcaaccgactgtaacccggacacccgcacccgtagatctcccagtgggcgcttcccactgagtaatctggtcctcccgatggcttgctaggcaaccatgccgccagtcaactgacagcgtttcattactgtaaacacatctacgttggcaccaaccttgtttgccttgggagcacaagacaatcacccggcccagcaccggtaatcgataacctgccaacccggcattatgcacgcttaaccctcacacaagacagccgttcacttgctaatgtcaacctctctaacctccccagctccacctgtgacaacagtggtcgccaatctaccacccgacacatcctcgtcgcaccttacagacccaccgagggcacagacgaccagagtcaccactattgtgcacacgcgtgctatatgtgacctagaacctctaacatcaacgagacctaaggcaaccatcgattctcatcacctacacacgctgctaatgacactttatcgacacattcacacatttcagagtgagcatccaccctgatcgagctaccccgatgacaactctgccatactacctggtacccaacccacctctggccaagacgcactcatgctagagtggggagcaccctctcctcttagctacgtacagcgagtactaaccatcaagtgtaaactgaaaacgactactcactgccggtcaccttacactagctctgtcctctctagctctcagctacgctactcacgccccctcgctctccgaccttcactgtatatagaaccagcctcatatctactctaggcagtgtcatactaactataactcacgagtcgtaagtataccctgtgtctcctactacaccctagcggtcaaagctttatcaactaaacgtctgctgaaccagtaccacgactgcctaccgacca

SEQ ID NO: 515305 - DNA, 533 bp, Homo sapiens
  misc_feature (283)..(283): n is a, c, g, or t
  misc_feature (335)..(335): n is a, c, g, or t
ggaggatgcagcatcaccatgagagatgaagggagaaaaaagaaccgagagagcaggagaaatcagttatccacctggcacaatactaagcagtctgaacatttaggacctacccatttctgaagacaaacagactaaccaacgaggcaaagaattaaatcctcccaagtctgtcgctgcagctacgcggcaatccaaaagaacaacgcacgtttctgctaacacttcaagttgggaagcaccatgcaaagagactggttaaaattccctaccatgcagtgcngccatcatcagaagcccagcatatcttctgctctaagtagtgatgtgccagntcatgcacagaacagaggaagagaaaaatggaggaaatgagagaaggctggaagtcggcaggaatgtttctgggtcattaacaagtggaagacccccttcagtattcacaccaatcggtcttgatcttacaggacatctttttctcactgagcgtctgttgaaaagactgcagcaaaccaggccatctgaaatcccca

SEQ ID NO: 515306 - DNA, 207 bp, Homo sapiens
agagtcgaggcggaccctggaatatgcatcaatgacagctttatcttgatattcttgatggtgttgcaagctcctgtgtaagcagctgcttcagctcacctttagagagggtgtcaaaatgccccttccgaactgagtatggtggaagatattgacaattccctccagatgctcttcaagtttggtcatcttcccagcccggaccgg

SEQ ID NO: 515307 - DNA, 334 bp, Homo sapiens
  misc_feature (84)..(84): n is a, c, g, or t
  misc_feature (136)..(136): n is a, c, g, or t
gttgtcgctcttcactgaccatcctagaccactgacatggggggccggctgtctttgagggtgcacgctgctgcatgcagtgcngccatcatcagaagcccagcatatcttctgctctaagtagtgatgtgccagntcatgcacagaacagaggaagagaaaaatggaggaaatgagagaaggctggaagtcggcaggaatgtttctgggtcattaacaagtggaagacccccttcagtattcacaccaatcggtcttgatcttacaggacatctttttctcactgagcgtctgttgaaaagactgcagcaaaccaggccatctgaaatcccca

SEQ ID NO: 515308 - DNA, 155 bp, Homo sapiens
agtccaacattccggggatagctacaagtcctcagggatttcatttggcaggcatgtctctgagcttctataccggctcaaggtcagtgtcatcttggtggtttagctcatccaaaggtgtaaccctgggtttcaatggaacctaaacctcattc

SEQ ID NO: 515309 - DNA, 416 bp, Homo sapiens
cccgtatttcgagtgaatgtggctagaaagggttatgagatatattaatttctacacatatttacttgacctttaaactcttcatgtaaaattaaagaaagacatctttattcatgcatccattatcggcgaagcaatgttctaggcattgttaaccagaatctgtgggcggagattttaactaaagtgtgaagctctttgaagagagaactttgtcagcacgcatattgaggcagcttaaatacacaacaaggtcccagatagagcattataaaattatgaaatatttattttcttatttggttcctagtggatactacaattgagcaaaaacacaatgtgagcttcgatactacttattacacttaaatcgtatgtatattgcttcactcgaaacccgttttgcgtattggtcg

SEQ ID NO: 515310 - DNA, 365 bp, Homo sapiens
ctcataccagagtttctcatgtggtaaagtgtggatctgagaaacagagcacatgaaatgcgaagcacgtacttgggtttacatatccagagccactgatgaatctgttttctcatctgtggaagtttcactggtcttggttcatggagaaattaactaagtgtcagctgtcaggcacactggacttaagtgaaggtcattaatagctgtgggacacatatgtgtggatttggattgcgtggttattacttaacaaccggataaacctggacacatggactggaaatgtgagaactacaacttcttcttatttcatttgaacaattggcgggcctttcaccggatttacctgtggtggcttttgg

SEQ ID NO: 515311 - DNA, 230 bp, Homo sapiens
ccccccctttaaaaaaaaacggggggggccccccccttggggggttccccccctttccccgggggggcccaagggggtttggtccccccccggggaaaggggggtttttttttcggggggggggaaccccccccccccttttggtgggggggcccccccctttttttttttttttccccgggggggggggggggttttttttttttttaaagggggggttttttttttta

SEQ ID NO: 515312 - DNA, 317 bp, Homo sapiens
  misc_feature (7)..(7): n is a, c, g, or t
ttggcanagcaaagcccactatcatacttaatacagtaaaaaaaggtggttttgcagtatgtttagtgggcctcaaacattaatatcccaggttcttggggggcaggatttaaattcaatcaatccgtcctagtgtgtcaggtttggccctgtggacacaggtaatagggaccagcctgcctgggtgttaaaagatcagtccacccagagttagacattgtttttgtaaaaacaggcatttattagttagggttttggttttttttttttcctacaggataaaagctttatacagaacaaatggacctttaaaaaca

SEQ ID NO: 515313 - DNA, 1643 bp, Homo sapiens
  misc_feature (1)..(1): n is a, c, g, or t
  misc_feature (283)..(283): n is a, c, g, or t
  misc_feature (755)..(755): n is a, c, g, or t
  misc_feature (1172)..(1172): n is a, c, g, or t
  misc_feature (1210)..(1210): n is a, c, g, or t
  misc_feature (1242)..(1242): n is a, c, g, or t
  misc_feature (1304)..(1304): n is a, c, g, or t
  misc_feature (1306)..(1306): n is a, c, g, or t
  misc_feature (1309)..(1309): n is a, c, g, or t
ncgttgtgtgagtggattgggcggcgctgttaatatggtcgcgtcctctgttgtcgcggggttatccttcccgggtcgctgcccgctggcttttgtggccgtagcacgtgttgccaagacgcggggtggtccctgtcgactgttctccgagtttttggtgcccccccccgtctccctaccctttgggcccgaggttattcttcccccgggccctatactggggtgcggcgcatctgtctcttccttttttgccctgagcggccttatccctccgtggtgctcncacagcgtgtctccggggtttctcttccgcgtgctctttccccgctccacgaggaatggggagaacgccgtacgttctcgccctggaaatttgccataatatgttttcttgggtgttttcataccccccaccccgcgacacacttggagatgtgtgaaccttttatctctgggagggatgttgggaagaagagagaaattttggaagaaaaagttgggagacccaattccagaacacttggtggttcttttcaacccagcagacgagcttgggtgccttgttcctaatacttgcgtgtggggtgacctaagcaccctgggagagtttccaccccccccccccctgtgatacaaaggatatttggatgttaattgccccctggccccggctggtgtgggaaccacacactgggtggaacgcttttggtgtccacccaccgcccccccaacagagttattgtttataaagtggngggagtcccgagaggaccccatggtgagtagccccgccaccttcttctttgggaggggcttttgtagaaagagatcgtcccccgccacttttgggagaatttgggagatggaaaaatttccgccacaattttctcggctcttgggctttggcctcttctttttaaaataactttggaatattatgtcctctatataacacacccgctacaacaccctcgtttatatggccacccacaccaaaaatgttataggggtttatataaaaataaaaaatgggtgtatacacactcgggacacactcgagtttcttttctcgtgtatataaagatgtgtctacgactctctggagagtggcctcggtgtctccccacatcgctttttgagatagttagtttctcgagacccacgcgttttgnctcccccaccacagcgtatagcctctctataggagagngggctcgggccacacactctatagagaggttngcggggagacccaccagagagaatttctctctgtattccccaccactcacaccacttctctngngtnacagagtttggagagacttcttcgcaaattcttcttgccacactcccacaagctctgttaaagaataagttataagcctggcactaaagttaaacttccccactttaccactaactctctcgcttatgagatttgggggaaaatttatgaaactatatattgaccacggattattggaaaatttgttaataatgagatgaaaccactctttgtcactataagatttactaatttactttcttaataccactttgaataaaagtaaaggcctggttgtggtttatttgcgtttatttttgttcccccagtttaattaatcaattaaaccttgtga

SEQ ID NO: 515314 - DNA, 921 bp, Homo sapiens
  misc_feature (918)..(919): n is a, c, g, or t
gatctgaatcagatggacagctcacatggcagtcaagaaggtggagcaaacacaactctggtcctataaggacaccccaagattccagaatgctgatcatctgtgggcatcccatctcggccttgtgttagattcttgcagatgcattgcagacaaagtcgaagacggtgtgggcagaagaataagagctagctgatcaacagcggcaagtggaggctgtggacggccagaagacgccaagttggagctcaacggagaggccagcaaagtctcaggaaatggggcattgggtgaccacaaggagtcgctcaaaagagtccagaccagtttatgacagctgactgagaccaaggacacctgcagaatgtggaccatgagccatggtcggtgtaacaccctgacaccattaatctgcggcaggaacacaaccgttgaagcataacgcattacagggagcgtggaaaattaatagatgcaaatgtggtactgatggtacattgggagtcttttttagcataaaatttcctagctcttgtgtagatgtgttgggactgtacaaagtcggtcccaattggtgaagaaacgcgtgtttctgaaatgacgcgccaattataatcagcaagaattgatcgtccacgtccactaggaggcttccatccctcgggggtgctatggatggtcctagcagaaactacgatttgttcctgattggcaacttacctccccaggtaggcactcccaggtaaaagcctggcctggaggaattgattgacattggactcagccaatcggacgcacgcctgggggggcaatcactcaaacctcaaattcgtgggaccgggcttcaaccctgcgggacagccgcgagaattcacaagagctctgaaaaccgccctgcatccctcatcctactcctgnnct

SEQ ID NO: 515315 - DNA, 273 bp, Homo sapiens
agtcataatcagtgcctacagttttatctcctcctgaaaaaatgataaggtgaaatataagttggggaagaaaataaaacaacagcagccttagttgtctcccccgcaactcctgtcactccagggagaaggtttgatgggagaacccatacctcgagtccttacttggctgtcctccctgaaagactctggcatggccgaatttctacatcccagaatcaccactacgctgtaggggttgtccccttttcatgagtctgtattaactgcttg

SEQ ID NO: 515316 - DNA, 826 bp, Homo sapiens
cacgcgtccggatgaaaatggcagtggtggccgggcgtggtggctctcgcctgtaatctcagcacttgggaggccgaggcaggtggatcacctgaggtcaggagttcaagactagcctggccaacatcatgaaaccccgtctctactaaaaatacaaaaattagccaggcatggtggcacacacctgtagtcccagctactcgggagcccaacgcacgagaaccgcttgtacccaggaggtggaggttgcagtgagccgaagttgcaccattgcactccaccctgggcgacagagcaagattctatcaaaaaaaaaaaagggcagggggcaagtaagttatagaagagaaattgctggctagaaggaattaagcgtggtagtaaatggcgtgcttatcctctaagctggaagaggggagacgaaaatccattggtttaaattcacatctcagggagggagaacccggggctggtgtggggtgggtggccaatttcctagaagggaaggtgtgggggtatagaaaacgggaatgaataagcgtggttttcacatagggtctggtaagtatgatgagagggaaacgatgactggggagggcttaaaatgattttgggacaacaaattggtttgaggctcagttgacaacggcaacgatacaactttaacaaaacacattgtgtaaacatacggacgtggcaggtatttggcaccaggggggcggaaggcccattttatcctggagactggatcgtaaagattgggcttgtactcaattataaggctcaaagggggaggcctgtaattgacgtgactattaaggggtgg

SEQ ID NO: 515317 - DNA, 168 bp, Homo sapiens
gcagagccgttatccacaaagctaccttactctctctatacacacattatttcactcacacagccccacacagagcggatcacgatgcataatcttctcctagggagcccatcctatgcacacagcttttgcacagataacctccataacaagcacacccggctccgg

SEQ ID NO: 515318 - DNA, 333 bp, Homo sapiens
aagccaaatatacccacaaaatttaaagtatctatagtttgaaagatgaaaatagaaccgtgtgtgccccaaacctgtagtctcagcactttgggaagctgaggcaggaggattgcttgagctcaggagttcaagaccagcctgggcaacatagtgagaccctgtctctgaaaaaaaaaaatagccaggcttggtggtgcatgtcagtagtcccagctactcagaaggctgaggtggaggatcccttgagctctagaatttgaggctgcagtgagccatgattgcaccactgcactccaccctgggtgacagagcaagacccctgctttttaa

SEQ ID NO: 515319 - DNA, 274 bp, Homo sapiens
aacgggtgatgcggttgaacctgggaggctaagattgcagtgagccgagatcgtgccactgcactccagcctggacgacagagtgagacttcgtctcaaaaaaaaaaccaaaaaaaaaattattttgtagggacgggggtcttgctgtattgtccaggctggtctggaactcctgggctcaagcaatcctcctgcctcagcctcccatattgggattgcaggcgtgagccactatgcctggccacgttgttttctcaaccgcatcacccgttcg

SEQ ID NO: 515320 - DNA, 293 bp, Homo sapiens
cccctttttcccccccaatttttggggggtttttttcaaaaaaaggttggggttttcccccaatttttttttttggggggaaaaaccaaaaaatttttttaaaaggggttaaaaaaaaggggcccccttttttttttttttatttttaccccccccgggcccccaaaaaaacccttttttaaaattttaaaaaaaatttttggtttttttttttttttttttttttgggttttttttaacccccttttaaatttttcgggggttttttggaaaaaaaaaaaaaaaccttttta

SEQ ID NO: 515321 - DNA, 800 bp, Homo sapiens
gagagtagtataagcatttatatatagtctaatttagacttggataattgaatgctacttttatatattaactaaaaatataaattaaaattctcattagatctagtttagtagtgggtgtttgtgtgaggtagtccctgttgggggaaaggaacaaggaacaaccattcataatcccgccagtccctacagaaattagcctcacagctaacttgagaaaacctgagactttggggttagatagtacctttgtcacagcttgctgttctcccttgtctcacatcctttcagttgccctggcttagaaaaatacttgtgtctagcatccataggtgaacactaggtattcgtattgcccctctgtgaaccatggaggaaatggcacgaggcaaactgcaaggggtgataggtagcctacaactaagccctttgtacaccccatgctccatctagcacttcaaaaatcttgtaccactagacccccaaaaaactggcaaggaaccgaaggtggctggggagaattccctcggaacctgtgatggcttaatctgttatttcttttatcttgggctgctttctctaagttggcagtcctgtcccattgtgaagatccatcttgtcgtgagatatgacgccagaacgcacatgtaactacgcttctttgcaattggcctggcgagaagagagaaatcttctcctaagtagcgggggccgtttattagttaatcacacaactcagggcctaccccgtctatgggaaccgttatccgcttacgaaaagcagatccgacattaactac

SEQ ID NO: 515322 - DNA, 848 bp, Homo sapiens
catccggctatgggccctgcagctgatcttcagtgtccacgccagtgctcctagtggccatgcactgtgagctaccggaggacatgagaagaatgaggaacgttcatcaagggggagataataggagtgaatttaaggacatcgacggagatcaaaacccagaaggtccggatcgaatgctcccttgtggtggacctacacaagcagtcatcttcttcctgaggtcatcttcgaacccgtcttcatgtacgtcttctatgtcatgtacgacggtttctccatgcagcggtctggtgaagttgcaacgcctggtccttgatcctcaacacatgtggactagctttgatgctcccagggcgcacggaggaagactgtcttcacatgatgtgtcactgactttgcaaggtgtctggagatttgcaatccatgctgcaatgtcacttgaaattgtgtcagtttgcgtaattcagatacttggttcctggcgaagatcacaagaatagccacgtttaacagcacttgcgccagatcgttgaggattaaggaaataggacagcatgagatgggatgaggcgaacctcgttgctcgagctgtcatggctctagatcgaccagcatttcccaagcgacaagagattctgaccttagaattgcgagccatttgaacacccctgtaggcctcgaggtgaaactctcagatgcccacaatggagctctgctcccctaaagcctcaaaactagaggcctaacttctatgccctgtcttaagtactctttcactgtaagttagtgccactgatgaccccgaggctgttacgcgggttatccgctgtaaaggtactttcata

SEQ ID NO: 515323 - DNA, 198 bp, Homo sapiens
actagaggtcccgtacgggtgtacgtccatatcgcatctggaggttcttccataaggtccagacagtacttcttcacaataggtttttaaaatatgctttttttcccctcagtacttatgattggcttctttcttggtcagtaaatgtacatatacagttttaatcaatgcatggtattctgttattaatcgtggctg

SEQ ID NO: 515324 - DNA, 195 bp, Homo sapiens
accactcctatagatctagtctgggcaacagagtgagactctgtctcaaggaaaaaaaaaaaaaaaaaaaaaactttgcccccccccccccccccccccccccccggggccgggaaaattccataaatttttattggttaaactcttgggcccaggggtagcagggggcctccattcttgcggcccctttttccc

SEQ ID NO: 515325 - DNA, 187 bp, Homo sapiens
  misc_feature (87)..(88): n is a, c, g, or t
  misc_feature (149)..(149): n is a, c, g, or t
  misc_feature (165)..(165): n is a, c, g, or t
cagatatggtgattaatgaatatgtcttccattctttcttcctcagttcatttccttttgcagtctttgacttgaataaattctacnnctttctgggatattttgtaatgtgtgctgtatgtttttttaacagtgctcctgaatctccntttattatgttgttcnttgatcatttgtgacttgtagt

SEQ ID NO: 515326 - DNA, 352 bp, Homo sapiens
ctggcgccagcagtttgagacgagcctggtcaacatagcaagactccatctcttagtaaataaataaaatataaaaacaaaggcggagaggaagtcaaagaaattcagtttccttgctggctttgaagatggaaagggggtatgagctaaggagtgtaggtcacctcttgaagctgagaataatcccaggctgaagccactgaagaaacagggattttagttctgaatgagaagagaagcagatcctccccctctgacccagcccagacgacaccttgacttcagatttataagactctacacaaggggcacagccaagtccatctggacttctgacctgaagaactgtgag

SEQ ID NO: 515327 - DNA, 1194 bp, Homo sapiens
  misc_feature (230)..(230): n is a, c, g, or t
taagtaaaaacggggtttcaccatgctggccaggctggtctcaaattcctgacctcgtgatccgcccgccttcggcctctcccaaagtgtgctgtgggatttacaaaggtgtgagccaccgggcctgtggcctttcctttgcctctttctgtgtgcctccaaactccgtgggaaacgttctgtgaattcaacagggggacattctgtgtgtcaaacaccttccctatagncaaactatacccctgtggggaatgtggccaaacctgtgaccctgtggaagaacgaggtggaggtttatagtttaacgccacagaattggttcccattcggggggcctctcatatagagggcgcctgtggaaagcatattcaaagaacacacaccaacgctcttgtgttagaggaacaaaaagccaactctcggtctccgcgggcgcgccttttcacttactcggagacctctcgcggcgccgtggctgtgctgtgaacacagaagcggtatcccggtgtgagagtttcccaagccccccaaaatttaatctccagagagaaaaagtgggggtgtgagaccccctcttaagtgtgagagaaatatattttatatgggggcgctgtggcgctcccctcgaggtttatttctctcacaatctcgatgtgtccaacgtggggggagacagagagcgtaataaggggggcggggacctataagagagaggcacccccgcgaaaccacgaagggtctgccgcgtctctgtgcaagcccactttgtcgcgaaatagtctaatagcgcgcccccaccaggggagacacggccacaaaccactccagaggggcccaagtgttcttctagggcgtgagaaaccaaaaagagaaaaacccccgagagaaaaaccccgcgggggggcgcacccacctattgggtggcgcacccggggtcacccgcggagggctctctacaggggggcgccaaacgacaaactgcaaaggcgcataaaaaccgtccgtgtgagaccctgtggcgcgccggggttacctcagtacgacacaaaccaattttttcttctttaaccctttctctgagggtggcctcctttttcaaaggggggacaccacatcgggggggagtagaaaacaatattttgacacaacgctcctccaactcgttggagaagccccccagaaaaaatatattcc

SEQ ID NO: 515328 - DNA, 885 bp, Homo sapiens
tggaggcctggggcagcagatgaccgtcccccacaagagcggccatttgttatagtcgctgagcgccctggtagacagtgtcatctatcagcccacaggccgcacgacctcagggtccaccgggtgctgtgctggctctggttggatgaacgtctcctgatgtggacccaccgttgtggtatcatacagagtagtttcacgtgccccaggtcccccgtgtgccgtgctgcacatccctccgtccctccctctccccagcccctggattcgctgatcttcgtgctgtctgcacggttttggcctttcctggatgtcgagtcggaaccgtacagcgtgtagtccttgtgagacgggctgctttcactcagcagcatgcgtctatggtccttatcggtctttgcagggcctggtactattctgtgtctggatggacgccgggtgtgaatccactcacctatgagtgtcttgggtcaacttgtagtggtctctctgggcttctcttagcggataaatgaggactaaaccaatgccagcaactgtccctgaactcggttctgcctctgactttttcctttgattgaaggaaggggtccttggcgctggactccgtgcttgtgtccatcatgtctcctgctaccggtggttccggaagcccgcctgggcctgtgaccaggaggtccggtgttccaggcatgctgccgtctactggtcgagggacccatggaaacggcctggctgggaacggggttccacaaccattgggcgggtctactcattctatcacactgcttcgtcccaggggcacgcatctggcagagcctggagtcatggcggccagaacgcgccgactcggagtgtgcccactgctgcggcggatttacggca

SEQ ID NO: 515329 - DNA, 814 bp, Homo sapiens
  misc_feature (58)..(59): n is a, c, g, or t
  misc_feature (151)..(151): n is a, c, g, or t
  misc_feature (153)..(154): n is a, c, g, or t
  misc_feature (157)..(158): n is a, c, g, or t
  misc_feature (160)..(160): n is a, c, g, or t
  misc_feature (165)..(165): n is a, c, g, or t
tccggaatcctagatctgctcccaccctcatctctctaccctacccctcccatcgggnntgtgctggggcttggggaggggagggggcgccttgttctccctccaggtctgatcataaacaattaccaggaactagcattgtgggacattngnnccnncngctcnggagaggtgccgcccagacttacccatgccagtcccggagcccacagtgctgcccagcgtaccgtccctcaccgtactggggctcttctagggagcacaggagcatcccctgttcctgtttcactctcagcttctcccctcgaagggactctctgggcacctcctccaccgcgagtccagctccctcagtctggcacccactgctacactcagcctcagtgagccacttcagaaccagtccaggtgtcttcccgggccctgccagaccctgtctcacattccctctgctggtctgtgctggtctcagaaggacaccgtgcccgcattccactcagccagggatccagactgcagccccgcgccaaccttaccttcccttccctgtcctgggtcatgtagttgccaccctgtgtgacctttagaacgctgtaaaaatgagcttccaggggcctaggggtaggctgtcggggccagggccgacagaggctaggcgaggaagcccttctggctttatgctggtgcttctggaactttgcgtttccctcacgctctcactttccttctagaaggacgcttcctgactgggaacccagagaatgcatgtctgtaccacttggtggctgctgggtggggcccggaaacacagggc

SEQ ID NO: 515330 - DNA, 878 bp, Homo sapiens
ttgctgtgagtcgaggcggagtacatgtttttttagccattagacaaagaccatgagtatcttaaaagagatgtgacatgattggttaacagaaagataatctgtcagcagtgtacagatgaatagaaagaaagagaagacttgataatagaaggaccaatagaatggtttttcatgaattccaggaaagaaagaataaagatggagttaagacaaagctgtggggcatggaggagtgatctagggtacagttgtctaaggtccaattgagaaaattaaatgatctctgtgtgctgacttcagagaggatgctttcattgcctgttagggtgaagctgatttacatatgtggaaacgtaagtagagaccatttaaggagtaagtgagatagtatgagtgtgagactgttaggcaaagtttcatttaactatggatgagatgaataaacttagaggaacttaacaagttccatttaaaaccgtggaattcgaatggttgtgggacattcacaatggttttgtccagtaggcagggaaatcggtctggtggatcagaagagaactggtccatacagatcggagacgcaccagcggattaggatataattgaagcataggaacagctaaaattgccagggagaatggcaacgggctacaaagagattcccagaagcctttaactgtgggggtcctatcctgactcacccggctttttgagcgctcctggccagtaacaactggcggcgtataaacgcgagaagcacccgggtggcgccacgggaacacaaactcgcgggagcacaggtgggcgcgcgacaaccacgaccaccacaaatggggccacacaagggcgaacagggacagttacacaaacaggcg

SEQ ID NO: 515331 - DNA, 146 bp, Homo sapiens
gctaataaaactcaagttaagccttccataaaaaggctaaaaaacttttataaacaaaaaaaatgtttttaaaaacaccgcggctttttatgtttttttaaagaaaacaaggggggttttgtccttcaaaagaacttcttaaaaaa

SEQ ID NO: 515332 - DNA, 1013 bp, Homo sapiens
  misc_feature (5)..(5): n is a, c, g, or t
  misc_feature (92)..(92): n is a, c, g, or t
  misc_feature (98)..(98): n is a, c, g, or t
  misc_feature (120)..(120): n is a, c, g, or t
  misc_feature (129)..(129): n is a, c, g, or t
  misc_feature (149)..(149): n is a, c, g, or t
  misc_feature (165)..(165): n is a, c, g, or t
  misc_feature (174)..(174): n is a, c, g, or t
  misc_feature (195)..(195): n is a, c, g, or t
  misc_feature (252)..(252): n is a, c, g, or t
  misc_feature (268)..(268): n is a, c, g, or t
  misc_feature (277)..(277): n is a, c, g, or t
  misc_feature (291)..(291): n is a, c, g, or t
  misc_feature (296)..(296): n is a, c, g, or t
  misc_feature (312)..(312): n is a, c, g, or t
  misc_feature (961)..(961): n is a, c, g, or t
tgtcnaggcagggcggaggcttgctgtgctgttgcctctaggtgactttccaagatgcccccctacacaccttttcttggaacgagggctcntctgtngtgtccctcccaccccccatgnatgctgcantgggttctctccctcttctncctgcttgtcctgccncaagaactngagggtctcccccggcctccnactgcccctggctgcaggtcagtgccccaggggcgaggaaatgtggcccaggggacnccaggatcctgggatnccagggccnctgggcctggaccntcagnacaaggcatggaggcncacaggggccccagcagcccaccctttcctctccccactgcctcctctcccttcctacactcccagctcgagccgtccagctgcggtgggatctgagtatatctagggcgggtgggcggatagcagtgctgggcctgtgtcttgagcctggagggagtctgctcctgccgccctctgccctgccagagacagacccatgcgctgcctgcccaccgtgcccctttgtccccatgtcaggcggaggcggaaggcccaccgtgccagaggctgggcaccagccttaaccctcactctgctagcacctcctccctttccccaaggtagcacatctggctcactccccactccgtctctggagcccaccagggaaggccctcatcccctgccgctacttctctggggaatgtgggttccatccaggattgggggcctctctgctcacccactctgcacccaggatcctagtcccctgccctttggcacagctgcttcctgcaagaaagcaagtctttggtctccctgagaagccatgtccctcgtgctgtctcttgcctgtcccacctgtgccctgccctccagcttgtatttaagtccctgggctgcccccttggggtgccccccgctcccaaggttcccctctggtgtcatntcaggcattttgcaaggaaaagccacttgtaaaaagatggaaaggaccaaaa

SEQ ID NO: 515333 - DNA, 642 bp, Homo sapiens
  misc_feature (470)..(471): n is a, c, g, or t
  misc_feature (492)..(492): n is a, c, g, or t
  misc_feature (509)..(509): n is a, c, g, or t
  misc_feature (561)..(561): n is a, c, g, or t
tccttccttccctcctttcttcctttctttctcttttcttgcttttttatttatagaccgaatgtttgtggcaaccctgtgtcaagcaggtctatttggcaccatttttccaacagcatgtgctcacttcatgtctctgtgtcacattttggtaattcttgaagtatttcaaccttgttcattattacacctgtatggtgacctgtggtcagtgatctttgaagttactctcgtaactgttttgggacaccatgacccacacccttataaaatggtgaaccttattgataaatgttgcgtatgttgtgacttctccaccaactggctggcttcttgactctctctctctctcccggcctttcctattctgtgagacacagtgaggagaataatctctcgtgccgaattcggcacgagcttcgcagtccagcccggcccgggtcatggtggtgggccgagggcttgttcgnncgcgcagcctcggcgcgctgngagcccgctgcgcccgncgaggcctcggtccagccttgttggagttttttgcacacagatttgcggaangaccttgacccgtgacgatggcacccattgaagtagaagtgcttgcttgccctgaccggcaacttcattgtcctggtcatt

SEQ ID NO: 515334 - DNA, 555 bp, Homo sapiens
  misc_feature (433)..(433): n is a, c, g, or t
  misc_feature (458)..(458): n is a, c, g, or t
  misc_feature (485)..(485): n is a, c, g, or t
  misc_feature (502)..(502): n is a, c, g, or t
  misc_feature (523)..(523): n is a, c, g, or t
  misc_feature (549)..(549): n is a, c, g, or t
gacgccctggcagatggtggggtgaagatgggcgtgccgcggcgcctggcggtcagactgggagctcaggcgttgctgggagcagctaagatgctgctggactcagaggaccatccaggccagctcaaggacaacgtctgctcccctggggggccaccatccatgccctgcacttcctggagagtgggggcttccgctctctgctcatcaatgcggttgaggcctcctgtatccgaaccagagaactgcagtccatggctgaccaagaaaaggtgtctcctgctgcccttaagaagacccttctggacagagtgaagctggagtcacccacggtgtccacgctggccccacccagctcagggaaactccttacaagaaaccccgcccagggaagcaagaaggagtgaggaggatctgtagggtgtccctgtcncctgtagtacaaggaggggcagctnaggtctgggggtgaactgttcattgtnaactggtgccacgagtntttctgtccgtggaaaaagtntctgaaaagcggtgatccagaagtanatccct

SEQ ID NO: 515335 - DNA, 986 bp, Homo sapiens
  misc_feature (83)..(83): n is a, c, g, or t
  misc_feature (85)..(85): n is a, c, g, or t
  misc_feature (92)..(92): n is a, c, g, or t
  misc_feature (122)..(122): n is a, c, g, or t
gggggggggagaaaaaaaatgggccatcttaaaaagcgggtaaaaaacctgggttagggtgtgtgttccccttcaaaatgttntntttaacnactgggtcatgtgcctctggtgtaggaagntttttctaccattaagggtgacaccaattaaagtgttgggttttcttaaaacaaaaaaaaaaaaaaaaaaaaaaaatttgtttgggcggcgcattggacctaaaaaaagttttttaaaaacaattgtgtttgggggcggcgggggcccaaagtgtgttttgggtataacagtggggctaaaagggggtggtccaaaggaaaaactccgtgggatacacaaaatggtgttgggttttcaccaaagtataaaaaagccgcgggggaacaccgaagagtttgttggcaaaaacaccaagaaatgggggattcgggagagggacaaacaggggggatcctaacacaaccagggagggtccaaaggaaagcgtggtagatatcacaatttcaccccggctccgtgtgggggagagaacagcagagcaagacatagcccaacgacagaaaagcagatgcagataaagcaaagatacacggcaagatgagattaaaacgatgaacatacttgataggcgcgcaccatcatcaataagctagcacaacaaggcagcaaagttacagaggaggcagagaggcgggcacgacgcggaaacgagaacaatgagagagagagaagagagggagggagcgtaggagagaggagcaacgaggcgagggagagcagagacgagcggaacgagagggaagataggagggagcgagagagagaggagacaggagagagggaggcgaggaggagacaaggcgaccgagcaatgaagaaaccaaagcaagaggcggaacagaacagagagcagaggacacgggaaatgacaacgaaacaggagacggagacagacagagagaaagaggaagagagaagcgaaa

SEQ ID NO: 515336 - DNA, 104 bp, Homo sapiens
acgctctccacccaccccgagagtagattgtatgtgacccgcctacttatttattgcagcgtggagaccacatgcggtgtgtctgttgatcagagcagcgctca

SEQ ID NO: 515337 - DNA, 157 bp, Homo sapiens
aatgtacgttcccatgtgccaaacaaactaaatgaaatctactgcatgtttgcagcatatctgccttttgggaatgtactcaaggtataatcttatggctagtgttctgtgcctgtatttttttaaaatggtccaccagaaaaggactggcagtcta

SEQ ID NO: 515338 - DNA, 95 bp, Homo sapiens
ttgattcttgtaatttttcattcttgtcaaaatgcataccagaagtttgtatcagtattggcatgcttaaaagaatttagactgcatatttgtca

SEQ ID NO: 515339 - DNA, 144 bp, Homo sapiens
gcgggtgcgtctgggggtcgcctgtcccctcctcctcctcgctgctctccgactcggcgctggtgatgtcatcctcttcttcgccgtcctcgctttcctcttcctcttcctcttcctcctcctcctcacatccgtactggcccg

SEQ ID NO: 515340 - DNA, 177 bp, Homo sapiens
  misc_feature (20)..(20): n is a, c, g, or t
  misc_feature (23)..(23): n is a, c, g, or t
  misc_feature (26)..(27): n is a, c, g, or t
  misc_feature (38)..(38): n is a, c, g, or t
ttctcacagtgtgctggtanggncgnnccatgtagttnttatggggaccaaaagacaggatggatgaagtcaggaaaccccccatcggggaaatgaggcagtccaggatggctccagatgtgtgactcaggtgccgctgtgaacaggagggcagctcgccactgagttgggtaccga

SEQ ID NO: 515341 - DNA, 829 bp, Homo sapiens
gagcggccctccccgcaactccatgctctcacaaaatgccttcagatgtgaatggtaggtgggggtcctcgtgcatccgctacatgcaggcaacacagtatgaacggcgccgagatgctctgggacctaaggcactatgctctatggcagggcacctgggagcgcctaacattcaatctcagagtatcgacagaagcagcttgccactcgaactagtgtcccttcgagagctgagcctagtgggatccgaagtgggcagggttacaacgcagtattcttgtggccagtcactcgacagagacatgccaggtacatgaagtcagaatgacaaatgagctcagggaacaaccgaaatgggaagacctagtggctcccagaccgaaatagtgaggtatgcagccgaagcacaacgggtccaactgatgcattcagacagacctccttgcctcagcaactagcaagtatgccagagggcacggcggaacagagattgaccaaaggatcagtagacacaaccttatgcggagatgactggggtccacatgcttaatcctaacgggcaatcactgtgatggggtgcagcacgaccatgcgttcctccctattggaacctcctcgatcatgggttcgcatgcatcgaagctagtactctaggcctaggaagactattatcggggacgcaatacagtcgtggtggacaaggtcctccagaagggatgagcagcgatattaccctgatggaaacttctgagtatggccaacagaatgatggatacccagggagcaactcgcacaacaggatatccaacccagaagcagcagtacccag

SEQ ID NO: 515342 - DNA, 179 bp, Homo sapiens
  misc_feature (119)..(119): n is a, c, g, or t
gcaaggcaattggatcatcacaacaattgggcttaaacagcacttgggttgaaaatgaatatcccctagttatgtgtttttcaaggtatgggtcatttgggtatatcatgagtggtttngcaaactttggtgcctaagttttcaggaaaactttctaatattggctttggtgtttctaa

SEQ ID NO: 515343 - DNA, 251 bp, Homo sapiens
  misc_feature (178)..(178): n is a, c, g, or t
aaccacacacgcaatcacaggtttacaccttatggcctggggcgtttacagctcaagtccaaaggttgcccagactcgttaagcaagtcctcgatacattccacagcctggcgacgcccaccaactctcacggcaactggtttaatggggcacagcgggaccaccgggtgtatctcangaggtgtgttagaaggaccggagtcacagctatccgtactactattgcattctctagacacaggtgatgtcgg

SEQ ID NO: 515344 - DNA, 881 bp, Homo sapiens
cgagggagattcttcaagtcaatcatgatgtaaagagaaacaggtgtattcccttctttcatatgaggaagatcgaggggatcaagatatctcattctgaaaaggcgttccccgagtgcgaccaatctcgtacccgtgtggagtaagcgcgggttatggctgcgcactagttcgtcctatggggacttcattatgaactggaagaagcgggtgcgagaggcctcactgagaatatgtctcatttcatctggatcacataatgcgttgtggggcagtccactactgggcttaggagggtagcgaagcgattggaccgtgtttgggtagtgagggtctaccttcgaagtgttactttgcgcatgggtatactgagagaaatagatctagaggtccgtgtacgatacgagaagagactggcataggtactgtgggtcctgagctttagaataggacgttcttgctttcataagatataggcatatggtactttagatgtatttaaaaactttggagccttatttgaacttggggtttgtgaattactacaacctaaggtttgtgatcgcgcgttgcacgatttgcgtaatcgttgagcccatttctctgaaaatattggagtcttccctatttacttgggcaagtgctatgatctattgcatttgggttgagccgagatttacataaggggggacgtaacattgttcactttagatttaaggtccattatcacaacgggaactttcgacggtttcacctttgaaatcaatttgtttcacggttaatagtgggccttttttgcatggcttggttctgcacaattgtcccaggccttctgtgtaaatctctttgaaagatccaccctttttaagtcgtaaacggaa

SEQ ID NO: 515345 - DNA, 603 bp, Homo sapiens
ggacagagacgctggctaggccgtcatacacagtgttgccagcatgaagctgctcgcggcaactgagctactcctcaccatgtgcagccttgatggagctgacggtcgtagacaggcaaaggagccatgtgtggtgagcctgggtgctgaggcctaccagaccgcgactgactatggcaaggacctgatggagaagggcaagagcccagagcttgaggccagagccaagtatgactgtgttaacttgctgagctatgtcgaggcacttggaacacagcctgccacccagtgaagtggccagaccagcgtattacaacctcagatgtgctctagaacacacacatgacagtcgtagatgctctgtacataccgactctttgctgcatatacgctgaatgaatgcaaatttttttgactgagactcgagtgctcttggatcctggaatctaacaggacatcttattttaacggcacgataacacacgagtttactggggtttagggctgagccgtcaatttcgtgatggcgtcccgtaaagtcgggctacctggtttgcgtgaacttagtgaccaacccctctttcatatgccatgcgtggttcg

SEQ ID NO: 515346 - DNA, 201 bp, Homo sapiens
ggggaaccccaaaaatttccccccccccccccccaccaaaaaaattgtcccctttaaattttttgcccctttgttttttttggggctgggccccgtttcccctttaggggtttaaaagcctttttttggttaaaaagggatgcccccttttccaaaccgcttaatgtttttttttccccaaaaacccccgggttcttttta

SEQ ID NO: 515347 - DNA, 112 bp, Homo sapiens
tgataagaggctttattcattacttaattcctcccaaggtttacccctttccttcttccaagaagaaaaaaaattgcctgatttttcagaatagatttttctgatttgaaaa

SEQ ID NO: 515348 - DNA, 187 bp, Homo sapiens
gcggccgcgtcgaccagcacgtccgcgtcatgatccgaccagtcgacctggcagaggctttccacggaggcctcgaggaacgcgagaacgtcagacagcggagccgtctccgacccctgctccggcgcgtcccacactccctgttccatggctcaaagtatagaacacacgtacgacatcgagcggg

SEQ ID NO: 515349 - DNA, 160 bp, Homo sapiens
gtttgtggagtccccacttatcaagatgcgccacacagttgcagactcactgagtttactgcttggttctggggactgggacaatttccaaaggccatcaacaataataaaagtaagtatctgtgaactaggagaaagaactaaaaaaaagatacaggta

SEQ ID NO: 515350 - DNA, 561 bp, Homo sapiens
  misc_feature (4)..(4): n is a, c, g, or t
  misc_feature (66)..(66): n is a, c, g, or t
  misc_feature (78)..(79): n is a, c, g, or t
  misc_feature (87)..(87): n is a, c, g, or t
  misc_feature (89)..(89): n is a, c, g, or t
  misc_feature (142)..(142): n is a, c, g, or t
  misc_feature (197)..(197): n is a, c, g, or t
  misc_feature (199)..(199): n is a, c, g, or t
  misc_feature (216)..(216): n is a, c, g, or t
  misc_feature (547)..(547): n is a, c, g, or t
tgangggagtgaatgattttgaaccaggctctgcagattttaagaactgttacagctattttaatnttttgagttttnnttattttntntgttggcagttaacaaaagtgagaatttctgaaacaagctaaataggatttanaagcagaacactgttcatataatagaattgctgttttataacttttgctcagttntnactttttatcctaaaanagtttcttatctgataagttttaatgaaaacctctaggaactgtaacagacttttctcaacccagctctagatactaagtatcagaaacaaggcttgtgaagtggatgtgttcacagaaaaatgcagtgtttctactggaggtaagtgtcaagtttcctcttgatgttgtcaaaggaatctgctcccatataatcagcctggccctgttcccatcgttccttccgttcttccgaggatacaaacggctgtgccatagctggggatctccccaagggacagatgtgatatggctcctgagacatcttccacatttacatatgagcaggtgtntttgacaaggccaa

SEQ ID NO: 515351 - DNA, 296 bp, Homo sapiens
aagatacccgcgtgtaacgaaggacacagagtggtccaaatatccacttgtagatcctgcaaaaagagtgtttcaaacgtgaactttgaaaggaaagttcaactcggggatttgaatgcaaacatcacaaagaagattctgagactgcttctgtttagtcagctgaaattatcccgtttccaacgaatccctcacagaggtccaaatatgcacttgcagattctgcagacaagtgtgtttctataactgctacatcgcaaggaatgctcagctctgtgaggaattcactgacaacg

SEQ ID NO: 515352 - DNA, 255 bp, Homo sapiens
  misc_feature (159)..(159): n is a, c, g, or t
atgtgggtagcgttcacacagctgccacatgcactctggagacttccagaaggactgggagcccgaccatgcttgtgacccacagagccaggcctgagaaacaatggaccctgtgaggctatggctagagggcggggacctggttccctggggtctccncctccagaggggcgacgagcaaccctgcttgtgaggcctgggagaggcacaggctgtccagtggctctgacacgcggtcctccttggttgctcatg

SEQ ID NO: 515353 - DNA, 161 bp, Homo sapiens
ttttatggtttctgaagccgctggcggaggaaagggacgcgctcaatctgaagtttggaaagaatccccccaaaaaagccgccagcgaactggcggctttttttgtgccgccggaatcggaaagaccgatcggaatggatcccgttggcgggcaacccagg

SEQ ID NO: 515354 - DNA, 252 bp, Homo sapiens
  misc_feature (101)..(101): n is a, c, g, or t
  misc_feature (219)..(219): n is a, c, g, or t
  misc_feature (225)..(225): n is a, c, g, or t
ttttagtctctactcagtggtgtttcatcatgtttcccaggctggtctcaaactcctgagctcaggcaatctgcccaccttggcctcccaaagtgctgggnttataggcgtgacaccgcacccagcctcagcagtaatagatacatagatatagatatagatagatatgtagatgtatagatatatagataaatagatatatagatatagatatatagntatagntatatagatatagatatatagatatac

SEQ ID NO: 515355 - DNA, 356 bp, Homo sapiens
gagtaagatcgagcgaggagcccaagagcgagcgcgcaggaatgaagctcgagcggcctccggggcgaccccacttcggcgccgccgctgcgcgggaagatcgcgccgggctccccggaggaggagagcccgggccggcgcggagacaacagcggggataaacgtggcaagacaaaccgcgacggaggcgcctggagcggaaaacgcagaggaggaaggaagccatgaagtgaaggcggcggaggccaacaaaaaacaacaaacaacaacctttcccgggaaaggctcccggacgggagggggccccgcggggtcccccaaaggaaccccgggcgccaaaaaaaacccggggggga

SEQ ID NO: 515356 - DNA, 296 bp, Homo sapiens
ttatcgttgaacaaactacaccctattatataagcggactgcaccatcggcgatgtcctgcatccaacatcgacggtcgtaacaccctattgttgatatggactctcgaatatgattgcgctgtttatccctagggtaacttgtaccgtcggtctatttattggatccattgagaatattcatccgctttgactggtgagatgtcttcgcatgtactgctccgacgttgggttctgctcccaggtcgtcccgagcgaaattttttaatgcatgtttggtactttaggccctgtttg

SEQ ID NO: 515357 - DNA, 239 bp, Homo sapiens
gtgaggcttgacgatcacctagcaggttaggagttggagaccagcctggccaacaaaagaatcagccaggcgtaggtggcacgtgcctgtaatcctggctacttgggaggctgaggcaggagaattgcttaaactcaggaggtagaggttgcatgagttgagattgtgccacgtgcatctccaagcctggagcggtagagtgagactccatctcaaaaaccccaaaacctggcattatc

SEQ ID NO: 515358 - DNA, 226 bp, Homo sapiens
ggcttctgcttgagtcagtcctcacggtgacgcttttccccagcttttccgactactcatggatgtctttttaagaatgccctcctttctcattctgttgcccaggccggagtgtagtggcacaattttggctcactgcagtctcttgcctcccaggttcaagtgattctcctgcctcagcctcccaagtagctgggtttacaggtaatcaagtgaaaaaatgagc

SEQ ID NO: 515359 - DNA, 358 bp, Homo sapiens
aaattttttttgcccccggggtgtggggtgccccccccatttttttttgggggggttcttttaaaaaattccccccccctccaaattttagggggggagggttttctctaaaaaaaaaaaaattttttccggggggggggggcccaaaaatttttcccccctgggggggaaatttttatttttaaggggtttttccccggggggaaagggggcccggcaaaaaaagggggttttttttaccccccccccccaatttccccggggttttttttttggccgtttttttttccccccccccctttttttttccccttttggggggggacccccccccccctaaaatttttttttgggtcca

SEQ ID NO: 515360 - DNA, 768 bp, Homo sapiens
gcatgacaggtgtgagccaccgagcgcacctttgttattcttagtgctttctgagatatagtctcactctgtcacccaggctagagcacagtggttcaatctcacgctcactaccaaccagcgccgcccgggttcaggcaagttctcctgccctgtctcgcgagatagcatgggattacaggtgcctaccaccatagccggttaattcttagtatgtatggtagaaatccgggttatcaccatgttgggcaggcatgagttcttgagcccacgttgaccctcaggtgatctgcccgtcttggcgtcccaaggagtgctgggattacaggagtgggcttgaatcctctgctttaacctttacaggaaaagtaactctgaagtgaccagcgcgccttgggtattctgtctactgtagcctcgggcctcttctgtctgtgaagacccgacactctgacctcgccctcgggtcatgagagcgtacgtctgtgtgatgggaaggaggtgttgcccgatttctagagtaggcaaggtaaatacacaactacagatcttgaaagtagagacacattcgaatgaacatctcagcggtaagacaatttttctgccggctgacgagcagaaaaaaaggtttgccacacccttttggtggccacggctgccatcggtgtgatggacctctcgcaccaggggtgcaaaagagaaccgggaacaaaccgggggggttttcaccaaaaaaaaccccgggggaaagggcgtctttgaaaaccg

SEQ ID NO: 515361 - DNA, 400 bp, Homo sapiens
tctgggctcagtgatctccaaaatgagtgaaatgatcaaaggttacctctccccctttttccttctaaagaagtatgtatttgttttgtttgaggtggagtctcgctctgtcgtcaggctggagtgcagtggcacgatctcagctcactgcaacctccgcctcccaggttcaagtgattctcctgcttcagcctcccgagtagctgggattataggtgcatgccaccacgccaggctaatttttgtattttcagtagagacggggtttcatcatattggtcaggctggtctcgaactcctgacctcaaatgatccactcgcctcggccgtccgaagtgctgggattacaggtgtgagccaactgtacctggctatgaaactcttaaaagaaaacagagga

SEQ ID NO: 515362 - DNA, 536 bp, Homo sapiens
ctgggctcggaattgcctttctctattctctttctcgagacggagtttctcccgtgctgtgacccaggctggtgtacagttggcgcgatctcggctcactgcaagcctccagcgtcccgggttcaagcgagttcgtccgtgcctcagcctcccaagtagctgggactacaggcgcccgccaccacgcccagctaatttaatggtatttttagtagagacggggtttcaccacgttgcccaggcatggtctcgagctcttgatctcaggtgatccgcccgcctcggcctaccaaagtgctgggattacaggcgtgagccaccgcacccggcccggaattgccgcctttagaaccctcacccacccgctgctgagtcttcctgggccccgacaccggaccataagcacaccagaacagagaccatgataaggaacagaccacagcaataaccacacactatacaaaactgataacaacaccgagaacaccggaaagcaacaaatagaaaccagaacacagaaagccaaggagaaaaaa

SEQ ID NO: 515363 - DNA, 1361 bp, Homo sapiens
tctgggcctgcagtttcattggcaaaacccccgaggcaggacacaaagcacagttgtgctggaagtgtgttggggaaaaccgggacagctcagctccgtgccagcagccgcaaaaagccgaggcgtgccaggcccatttaatgtgttcccttcagtgtctctaaattttctcgatcaccacagcctcaaaaattatatatgtgtggtcatggcaaacccctcaagtcctcctcttggcgcggtgttcttggtattcctttctccaaaaccttcaagcgcgggggcccttgggcctcaagccccccgggtcccaggcggtaatggatccttcttctccacaagcaacgcgtggagtgagaggggaactcactccgcggcgccatgcgggcgccacgagggcccgggagaccccactacagaagcgccactcagcgtgagcaactcaagggtctccagaggggacaccgcgagaggtgcgtgggcccaagaggcccgtggagggggggtattatcacaaaccctcttcttccgtgtgaaaattccaacattcagaagggggacacagagatcatccatcactcacggaggggggcatcaacacttgtggcaattgggggcacaaagaaacctcctgggatcgcgcctttgaagggcacccctcacatcgcggggactgggccgaagagagccagaggatcaacgtgtgtccccagggagagctggagacgcgacacaagtgccccaaaagaaagagcccttgcgcccccccatatgacaacctcttcccgacaagacaaaactgagcagagggcaaggggcccgtggaaaaagggcctacagaaatcccaaaaggcgtgggcaagccaaacagcggctttccaaccgccgggaaaaaggcgtcctgagaggggcccgggcacataagagtcacacgggggcgtagcgcggccccccccagggatcgggcccacaagcggccgcaagctggggatcccacgcgggaattaatcccacaaggggggaccaccgcccacgactgtggccagtacgacacccgcacagcggggaaaccccggaagggggcccccagcgtgccgtcccgtgcgggggacacatcatggcgttcccagggacgccacacaccagaagccgacaagtggtccagcacgaaagcacacaacatggggagcactggtcgccacaaggcggcggcgtgccacccacacatgcaagaggcgagaccggcaggacaccaccaaaaccgacataaacaagggggccctgagcaacgcggagaggctcaaacacgccaatcgggaccgccagcgacaggagaggcgcagccccgcgccagctaggga

SEQ ID NO: 515364 - DNA, 156 bp, Homo sapiens
gacccatgtagggaacagatgtgtccctcagtacactaatcccactacgctcccctgaaattattctaagataaactgaagtggctatcaaatctagaggacatcaagcatagtatgaaagcaaaagagtgtcgatattgcaagctggtggattat

SEQ ID NO: 515365 - DNA, 705 bp, Homo sapiens
  misc_feature (97)..(97): n is a, c, g, or t
agctttcaccaaccaagaggcccaacagcttcttctaggtgtaggctcctcgatccgggtgtgccccagaagtaaacgttcaggaagcgccgccaantacacaagcatactgaagaagagacatgaaagaaagagtgtttgtcaccgtgcgacccgctgcagagacaagcgtttgaagaaccgcatccctaggggcaatgcgggcgtgccagttacgggtctggggcacacgtgggagtgaaaggcgtgccgcctcagagaaaaacctgtggatctatgcaagtagaggggggcttgctgcagcagttgaaatacatgcccgggtggagataccccgcgcagtttttgggaaggcgccaactgcgaaggggcgggatccacgcgggagagaacaaggagggcccatgatcaggccgtgagcccaaccaaggggagcaagagcctcgtacattaactcacccgttcaccggggaacttcagctgtgccggtggtgggtggacaacctgtatagtctcaagttaaatttgggagtgctaaaagcatgtagaactaactttgaaactctaggagggatgggggtggctatgtggaaccaagagattctgaaccacttgtacttccagactgggatgagagaaagaaaggaattctggtttggggacaaaaaaatagtgaattagaagggtcccaggggtagttggcta

SEQ ID NO: 515366 - DNA, 722 bp, Homo sapiens
atctatggaaagttgctagcaaagtgcctgaatgaaatcctcttccttaataacagtaattattatggctattgttattatggtatttctaactcattcatcaggcaccattcttattttcttattttccttttctttctccaggcagatgactgattttccaaatgcataatgttcagatctttaaataaacaacacatttttctccaagggtcaatctctctcagtatttgctgacctattccactctttatagcaatgaagagttgggcttaggagataaaactcaagtgggtctttagttgtttgacattgaaggcctactttgtaatcttctttttaaagacatgggaccatcatttccagaggtttcattcaattctttggcaaatgtttagtagcatcgtggttatgagcaatttacataatctctttgagcctcagtttttatatctgtaaaataagggtagtgatgtcttattctgtgcatataaccaggaataaatgagatacctttgtgaaaattattaaataagcagaatgtgagataccattgtgctttggtgcattcatactggcataacaaaatagcttagatggggtaatttaaaacaatagaaatttattgtcacaaattctggaggctggcaagtccaagatctaggtaccagcaattttactgattggtgagaagccctttcctcatagatggtgcgtctatg

SEQ ID NO: 515367 - DNA, 122 bp, Homo sapiens
ccgcgtacagttgcggatagcagttgagtacgcgggatgatgcgggtcttcttgttgtcgcgggcgcgttgcccgcagtccaggatctcggggtcaggtactccagcaccgtgccagataca

SEQ ID NO: 515368 - DNA, 262 bp, Homo sapiens
acaccagcctgggcaacagagggagaccccatctctgcaaaaaatttaaaaaattagctaggcatggtggtgtacacctgtagtcccagctacttggaaggccaaggtgggagggtcacttgaacctgtgaggtccaggttcaagtaacccatgtcatgccctgcattccaggcttgggcaccagatcaatgtcctgtctaaaaaaaaaaccaaacaaaaacaaaaaaccagctccctccaattattttaaaagaaataaat

SEQ ID NO: 515369 - DNA, 1038 bp, Homo sapiens
  misc_feature (33)..(33): n is a, c, g, or t
  misc_feature (87)..(87): n is a, c, g, or t
  misc_feature (190)..(190): n is a, c, g, or t
  misc_feature (224)..(224): n is a, c, g, or t
  misc_feature (281)..(281): n is a, c, g, or t
  misc_feature (293)..(293): n is a, c, g, or t
  misc_feature (301)..(301): n is a, c, g, or t
  misc_feature (350)..(350): n is a, c, g, or t
  misc_feature (355)..(355): n is a, c, g, or t
  misc_feature (406)..(406): n is a, c, g, or t
  misc_feature (485)..(485): n is a, c, g, or t
  misc_feature (531)..(531): n is a, c, g, or t
  misc_feature (545)..(545): n is a, c, g, or t
  misc_feature (591)..(591): n is a, c, g, or t
  misc_feature (623)..(623): n is a, c, g, or t
  misc_feature (643)..(643): n is a, c, g, or t
  misc_feature (655)..(655): n is a, c, g, or t
  misc_feature (664)..(664): n is a, c, g, or t
  misc_feature (676)..(676): n is a, c, g, or t
  misc_feature (729)..(729): n is a, c, g, or t
  misc_feature (736)..(736): n is a, c, g, or t
  misc_feature (754)..(754): n is a, c, g, or t
  misc_feature (769)..(769): n is a, c, g, or t
  misc_feature (790)..(790): n is a, c, g, or t
  misc_feature (796)..(796): n is a, c, g, or t
  misc_feature (799)..(799): n is a, c, g, or t
  misc_feature (801)..(801): n is a, c, g, or t
  misc_feature (876)..(876): n is a, c, g, or t
  misc_feature (905)..(905): n is a, c, g, or t
  misc_feature (929)..(929): n is a, c, g, or t
  misc_feature (932)..(932): n is a, c, g, or t
  misc_feature (950)..(950): n is a, c, g, or t
  misc_feature (1027)..(1027): n is a, c, g, or t
acctccctcccttcccttcctttccccttccanttttttccatactgttccccctcccgccccaccccaggctctcgcctagccctnccctctggggtcactgcgtgggttaggcccccaaaaaagcctaggaaaggagattggagagggctggctgagggtgggtggggcgtctcttcacatttttctnttctctaagcctggggtggaggagagaggcaggnaccaggagcagggagaggtagagagctacggccccaccggcccaccctccccaagtnactttcacagtnttccccanccctggctgccccctgcggtccccaccccagccctgcccctaggttgtnctgtnaggtcctcagcaatgtatgaacctggtaacccagttaagagttcaggcttntttgccatgggcccaccacccacggctgaggaggtggcccctcttagttccccccactattttcaaggctggggttctnagaggacatgggtgggtaggagaggaccagggagagggggcttctnaagccttgtgtaanagttctgggcctggccccacttagagggaccctgctggaatttgcnggggcgccaggttggcttagcccccgacagangctcaggaggagaagcagancccacagcactncatgcaganctctaggcagtncgcggactcgcagcaggaatccaggatgccgcagtacaggtcgcagggcaggncgcagtnggcacaatcgccagagcnacagcagcagcggcngaggcacgagttccccgagcngcaggngcnanaggtggcgcagttcaggacgatgttgcacagcgtcaggtactcgcagaacaggcaggacaggatgcagtggacanagcagttttcctgtgcctgggaggggganctgggaggtggtggatttgctgcngcncttactcttcttgctgcnctggctggagaaaaaagggtgtgtttgcaactcccggtgggcctgggggcaccaagggcacaattcccgcccgtttngggccgccaac

SEQ ID NO: 515370 - DNA, 872 bp, Homo sapiens
tgctgacgccaatgtgctaacatgccttggtcaagggatggaaatgtcaccccgtaagtatggcaatggcagtgaacccacgctgcttgaaggctcgtggactgcatcctaccaccaattcgtcaagttgacaagccctttgtggctgcttctccaggatgtctacaaaatggggggtatggatacctgtcctgttgcccgaggtgacgactgtgtcctacaaaccggggtatggtggtcaccttttgctccagtcaacgtttacaacgggacgtaaacaactctggtcggaaatgcaccatgaagctttagacgtgagggctcttcctggggggccaatgtgggctacaagtgtcaagggaatgtgtctgcaagggattgtccggcggtggccaactgtgggctgggtgaccagcaaaaattgacgccacccattggaaggcgacgtgggttcactggctcaaggttgattaatccttgaaacaaatccaagggcaaaaattaaggcgcggatatggccccttgtattgggattggccaacacgggtccacatttggcagtgccacgcttgggtgagcgtggaagggacaacgcattgaaccgcgcgtctggtaacgaaagctggaaggagtggcctaaatacttgaggcggggtgatggtgccattggtggaattgctcctgggaagccccagtgtgttgagagctccagactatcaccttgggtgccttgctgcggaattgagacaaccgtggggggtgtcaccaagcggtgcagcagggtgctgctgcgaggtacagttgtccaaactgaagctaggattaactaaattggacccttacggtgacaccaacgtgtgctggcagtaggg

SEQ ID NO: 515371 - DNA, 861 bp, Homo sapiens
  misc_feature (9)..(14): n is a, c, g, or t
tccactctnnnnnncctttcgttgcctgatcgccgccatcatgggtcgcatgcatgctcccgggaagggcctgtcccagtcggctttaccctatcgacgcagcgtccccacttggttgaagttgacatctgacgacgtgaaggagcagatttacaaactggccaagaagggccttactccttcacagatcggtgtaatcctgagagattcacatggtgttgcacaagtacgttttgtgacaggcaataaaattttaagaattcttaagtctaagggacttgctcctgatcttcctgaagatctctaccatttaattaagaaagcagttgctgttcgaaagcatcttgagaggaacagaaaggataaggatgctaaattccgtctgattctaatagagagccggattcaccgttgtggctcgatattataagaccaagcgagtcctccctcccaagttggaaatatgaatcatctacaggctctgccctggtcgcgataagatttgtctgtgtactcaagcaataaaatgattgtttacctaaaaggaacattgtcaaggaaacttgacggtaagccaattaggaacagaactgacctgcgatattaggactgtactattccctttttgaactggtctcatccgctcttccttgaggatgaatccaggtcatttccatacgcggcaatgttccagtttctaagacattgccagagctctatgaggttagtgaacaactattcagcctgaggtactgaggtcggatggtgacggagaccaccggatcaatactgagacgcacaggcttctgagccaggaatctcactgaaggccaaggtaacggaacacgaaatcaccaatga

SEQ ID NO: 515372 - DNA, 870 bp, Homo sapiens
  misc_feature (138)..(138): n is a, c, g, or t
  misc_feature (142)..(142): n is a, c, g, or t
  misc_feature (792)..(792): n is a, c, g, or t
cactacctgagaagaaaaggaataactagataacattgacaaacatctgctagtttgtgtatgctcagattcactcagcacgcttcgtaaaatatcacagtaacgtcacaactggtgaacgtccgtctattagaaacnagtnggtcaacaatcaaagcttcgttccatttcgctgtatcaagagcgtatctgtccaaggacagtccgaggctgtgtcgagcctcccgtcttcggtccaaataatcaaaagcattggatagatttgtttccatctgataacgatactggtgctgtgtatgcatggggatactcccgtacttgatgcgctgtctagctaggcaggacaagcttccatgcgcattatcacgcgttagcactgctgcatcttagccaggatagggttaatgtgtactgtacgctggtgaatgtattgccaggccatctcgcgaatgtgagatcgcacgaactctttgtattgccctgttgaaataacgagacagcacaagagaataaaacaagtcatatcgttattaaaaagataccggacccccagggaataatggtggttagggccaggttctggcgccttgcgcagtggcagttggtataacctgtgtattcaaaggatgttcacgaggggaagtaattattttgagtgtggaaagcaggaatctaggcagaagaagataagtgttctaatgggttagagggaaagatttacgtctatgaagtggggcgagcacataaatgtgaaatctgtactacagagcattgaaaatgctgtaactactnttgcagatcatcctaatctctcgttaatttaaactctgggtcgtggaaattggtccctttaagaattgggtgccattg

SEQ ID NO: 515373 - DNA, 354 bp, Homo sapiens
  misc_feature (9)..(14): n is a, c, g, or t
tccactctnnnnnncctttcgttgcctgatcgccgccatcatgggtcgcatgcatgctcccgggaagggcctgtcccagtcggctttaccctatcgacgcagcgtccccacttggttgaagttgacatctgacgacgtgaaggagcagatttacaaactggccaagaagggccttactccttcacagatcggtgtaatcctgagagattcacatggtgttgcacaagtacgttttgtgacaggcaataaaattttaagaattcttaagtctaggactgccctcacttccaaggcttacattaataagaacgaggtcgtcggaagacttgagggcaagaggaatggcgaatctcg

SEQ ID NO: 515374 - DNA, 368 bp, Homo sapiens
agttcaggagactctcagaggtagaatcagaaattctggtctgcttagcattatttgtcatctctttagtgggcatattgtttagatttactgattctaacctctgggtagctccatttggtacgtttgttttgttgttccggccaaaaaataatgtgcgtgttgcctggtgatagcatgaacttttattgcagttacaagttgtctacatgaagtgtggaggtgtgtgaactgtgtgaataagcagagtggctggttggacagagtgatgtccccatggcctaagcggacacagatctcggccccgtgggtcttcccatcactgccctcgctacgactgaaaagaagcttcccggcaggcgtgtgtt

SEQ ID NO: 515375 - DNA, 386 bp, Homo sapiens
ggcacgagtgggatgacagcgggaacaaagcggcgtggaaaagaaacagcgtgattcaagatgctgcggcgaccagaagcgttggggactgatgggtctctctgctccagttcaaatcctcctgaaacccttttcattgtcctgattcagtgggtttttaaaaatctcccctctgttttgccaacctaattttcaagtagcaatttatcttatgaccttgacaaagttgtgtgactttacatttaagataataattagaacagctccctttagagatcacagtttgctactgcctgtctcttaaagactgctcaagtctgtttctgattcatcatttagaattttgtttcaaatgtttctttttggggtctgttaccttctggggg

SEQ ID NO: 515376 - DNA, 891 bp, Homo sapiens
  misc_feature (230)..(230): n is a, c, g, or t
tgacaagccagagagattcgacagtcagccttgtgtcctgggatgggagagcttcgcctcagggaaacattactgggaggtggaggtggaaaacgtgatggtgtggactgtgggggtctgcagacacagtgtctgagaggaaaggggaggtcctgctgattcctcagaatggcttctggagccctggagatgtttggaaaccaatacgcgggccctgtcctacccactgnagaggattctccctcttgaaggagtccctttgtccgggcagggcggtcttccttggactatgaaggctggagatgtctccttctacaacatgagggagcagatcgcacatctacacatgtccgccgttcagcctttagctgtgcctgtgtaggcccttcttcaggttagggtctgatgacagacccatcttcatctgccctggactcacaggagccagtggggtcatggtgcctgaagagggtcctgaaatcttcacagaggtggggacccagccatagcctatagaatcaattaccttggactcactagcgcatgcagataagcgcctgggccatctcagtagacagccgaacaagcccgcctaatgaaagtcacgccctcctcccctcgtggtctacggtaagagaacgatcttccagttgccgtttttcacgacccactccagccctctggccacagttttgctccctcctcactaatctgtgcgctttagatagcttcctttgggcgtggtacccatgggatgaggacccacgcaatggggaactagtggttgcatagcctccccagttcaacagacacgtgagaaaagaccgtttgggcgccaacctacggttacaatccggataacccctttaggccattgtccttgggccaatg

SEQ ID NO: 515377 - DNA, 872 bp, Homo sapiens
tgggttagagcacgggatacttaatgggatggtccatgaacaaggttgcggttccctaggcccctcccctcttacaaggggtctacatggaaatcggtgaggagggaaaatccagtgtggtgggggactgattgtggcagggactccccagcagtgagggtctctctcttcctcttgtgctcttgctgggggctggtggcccagggtcttaactccttggaggccatgtggcccatgaggtccaccaccctgttgctagtagccaaattcgttgtcatataaccaggaaatgacgcttgacaaaggtggtctgttgagggcaatgccaagccccagcgtcgatggtggaggagtggtttgtcgcttgtagaagtcagagtgagaccacctgggtgctcagtgtaccccatggatgcccttgagggggccctccgactgctggattccaccaccttcttgatgtcactcatattgggcaggttttctaacacggaaggtcaggtccaccattgacactttggcattggggacacgaaaggccatgcagttgagtctacccgacagttacagggaatgcaccttgccccaataggcacttttgagcgcccagatcgaggtcgcagggattgactgatccttgaacaaagccccgcgtgcaatcaaggcccaaaagttttcccggaggggccccatccccaagtcatcctggggtggcacgtgaatgcgatgggccggtggactaatgaatcctccacaaaaccaatgttagtcatgcattagcctgtgccacgtgggtacaacatctgtgtgcaagagcctttacggagaacattgacgcctaaagcaaatatatcagggtccagcatgacaca

SEQ ID NO: 515378 - DNA, 1321 bp, Homo sapiens
gagctggtggtgctgctggagctgcagtgagctgcctgcctgcctggatccaatggggtgcagcactgcttccctgggagctgcccccacctcctctccggggcctgcctgcaggctcggtgagctggttttatacccgtcccgtgcctggcatgtgctaggtgctgctgcatgtggtgctgctgagccccccgcccgtgctgctgcatggctatgacaccagtgtggcaccgtgtgcttgtcccctgtcatacccatgcatacctgggaatggctcactggcgtgttgggacgtcgattggcttgcgtgtccgaccggtgtgtgccaactaataaccggccctgttacgagataccattgcaatgaacgcagcccgaatggaacaaggagaagctctgaagggctgccaacttcccaatcaagtcttccggtggcttgcccgttgcacaacgaaggacatactggtgggccccggttggttccaggggcccagagaaaagaacagacaagcttcccagaaggaacatgggttgacaaaggcccaaagcagcccaggcgtaacccgaggacacgagaaacagtcagctggccaacccgtcgcaacgagaaggtgggacggaaaaccccttagaccacggacaacgcttcacggccatcggatacaagaggtaggccagcacccacaacacacagttgagatgaccccaacaagaatttgaccgtgggcccacccgagagagcgacacccgccagagacgctgggggcagcccgaaaagaccaccaggcgcacgttggcgaagaccacgcgcgccatggaagccccaaagcgcccaaagggacgaaccctaccggagagaggaatgtacccccaccgaaggggacaagatccaggcgggcggatggcccgatcaccgcgtaccccacctatcagaaaggaggtcagaaacgcggaaaaatgacgtagagcccgcaacggtaaccgagcacacgccgatagggcgcacccgtggtacaagacacgccgataccactaggcaagtgcggggggaaccgggagcgccgccagagataaaggcaccggtggaagggtcacagagtacctggggtgtcgaccaaacatgatggctcatggtgttcaccacagacgcacgagagggagttggactcgccatatggacatgatcaaccagcgcggatatgccaaccatttcgggcgtgagtttgtaccacagttactaagccagttcacctgtgaggcgccgcaggccacctgcagaagtctatcgactttacacccaccgggcccgctttcggacacg

SEQ ID NO: 515379 - DNA, 807 bp, Homo sapiens
ggccatatgccaaaacctgtactaaatgcctaattggtatggaagagtgcatatttaatctcttttctatactgctcctttctgatgcttatcctttcatctgtgtgagtgtaagcccctctactaacaagatcctcccagctttctctctacatgtcgaaaggataacatttctcatgaacccactgcccctcatgcatttacctcacgtggttagcagatcacacgtaacataggatcagaatatgctgcgtctcccctgacacacacttcctctcctcgaatcgagcaagtctccattcagattcagcaaagatcctgtcctcctcttctgcgtcctcacccatacctagaggccacaaggacatggtcttccactgacctgactcaatgcttaactcaagccacagtcaggcacctcagtttcatggaagcctaaacaaagcgtggcactagacactaccacactagacacagcagtagtcatagtctcacaggttaggagctactggaccaaccatcctgtctctccgctctcagtcccctcaacctcagtcctagtccggagctaaccgtggaagcagcccaaacagtagcctggcatcgttcgcattcaccaccagggggtgaactcgcccatcaggctgcgacatcagacaaaaagctcgacacacccggagtcggtatgtctcgtccaccaccgacctggcgctcaacactccaggccgcctgtccgacaagcacatcaaaggggctggccaacatcaaaccaccacacgacgatacacgacaggcaccagcagcccg

SEQ ID NO: 515380 - DNA, 589 bp, Homo sapiens
  misc_feature (56)..(56): n is a, c, g, or t
  misc_feature (58)..(58): n is a, c, g, or t
  misc_feature (73)..(73): n is a, c, g, or t
  misc_feature (75)..(75): n is a, c, g, or t
  misc_feature (79)..(79): n is a, c, g, or t
  misc_feature (84)..(84): n is a, c, g, or t
  misc_feature (87)..(87): n is a, c, g, or t
  misc_feature (97)..(97): n is a, c, g, or t
  misc_feature (99)..(99): n is a, c, g, or t
  misc_feature (101)..(102): n is a, c, g, or t
  misc_feature (112)..(112): n is a, c, g, or t
  misc_feature (118)..(118): n is a, c, g, or t
  misc_feature (140)..(140): n is a, c, g, or t
  misc_feature (142)..(142): n is a, c, g, or t
  misc_feature (169)..(170): n is a, c, g, or t
  misc_feature (184)..(184): n is a, c, g, or t
  misc_feature (187)..(187): n is a, c, g, or t
  misc_feature (190)..(190): n is a, c, g, or t
  misc_feature (195)..(195): n is a, c, g, or t
  misc_feature (200)..(200): n is a, c, g, or t
  misc_feature (223)..(223): n is a, c, g, or t
  misc_feature (227)..(227): n is a, c, g, or t
  misc_feature (231)..(231): n is a, c, g, or t
  misc_feature (278)..(278): n is a, c, g, or t
  misc_feature (293)..(293): n is a, c, g, or t
  misc_feature (305)..(305): n is a, c, g, or t
  misc_feature (329)..(329): n is a, c, g, or t
  misc_feature (353)..(353): n is a, c, g, or t
  misc_feature (389)..(389): n is a, c, g, or t
  misc_feature (476)..(476): n is a, c, g, or t
  misc_feature (497)..(497): n is a, c, g, or t
  misc_feature (535)..(535): n is a, c, g, or t
ttcaaggaccaccttagggttacctctgtggctgtaaaaggttgtcaagtgtcctncnggttgtgcgagccangnaacnatggnaanacttcattgncntnntgcttacccngagtcnaagaccccgttacccgccaccntntcaaaatcgggaaacacattccggccnnaggtccacctgttnccnccnccgtngaagnagttggccttgaacaagttggtnacgntaangtgcttggcacgcggtttaagccccaagaacgtgttggttcgttggntgcaggggtcacagnagttgccccgcnaaaagtacttgatttgggcatccnggcaggagcccagccagggcaccnccacttttgttgtgaccagaatattgggggtggcanccaaggattgaaaaaagggggaccctttttcttgaatggtgggccaaaaggccctgccgttggctttcacaaaaaagaccatggacngtttggggggtaaacccaccnatgtcaatgtgtttttaatgggggaggtggagggcacntgttattgagccgcccgcttgtccccacccttgaataaattccatgttccccca

SEQ ID NO: 515381 - DNA, 1049 bp, Homo sapiens
  misc_feature (213)..(213): n is a, c, g, or t
  misc_feature (867)..(867): n is a, c, g, or t
  misc_feature (869)..(869): n is a, c, g, or t
  misc_feature (871)..(871): n is a, c, g, or t
  misc_feature (884)..(884): n is a, c, g, or t
  misc_feature (903)..(904): n is a, c, g, or t
  misc_feature (907)..(907): n is a, c, g, or t
  misc_feature (938)..(938): n is a, c, g, or t
  misc_feature (949)..(949): n is a, c, g, or t
  misc_feature (952)..(952): n is a, c, g, or t
  misc_feature (959)..(959): n is a, c, g, or t
  misc_feature (1004)..(1004): n is a, c, g, or t
  misc_feature (1027)..(1027): n is a, c, g, or t
  misc_feature (1048)..(1048): n is a, c, g, or t
agcgggagttgtaggcctccggcgtcagcccgcgggctgccgcccgcactctccaagagactgctggcgccggcgcccgcccgcgcggaccgacgcgggggcgcgcttcgcgctgactcagcggcggcggcggctgcggcggcggcggcggcgttagccggccctcgcgctctttcccttcctggggcgccgaccccgcccgcttgcttgctngcttgcttgcctgcctgcctgcctgcccggcgccacgcaagagaaggtgccaggggacgcagagcgactagaggcgcgcggtcccggccagcaccgtctctggcgttgtagctgcggccgtggcggaggactacggcgacaaggacgagggccgctctcccagctctctgcgtgccgcgccgctccgctccgctggctgaccatctggagtgcaggctgggaggcgggatggagtgatagggaagatgtttataaattcttctgtgggatcagagggcacgcctattacaaccagaaaactacaagtataacagcgaggatggatgaacaggctctattagggctaaatccaaatgctgattcagactttagacaaagggccctggcctattttgagcagttaaaaatttccccagatgcctggcaggtgtgtgcagaagctctagcccagaggacatacagtgatgatcatgtgaagtttttctgctttcaagtactggaacatcaagttaaatacaaatactcagaactaaccactgttcaacaacagctaattagggagacgctcatatcatggctgcaagctcagatgctgaatccccaaccagagaagacctttatacgaaataaagccgccaagtcttcgccttgctntngntacagagtatctnactaagtggcccaagtttnnttngacattctctcagtagtggacctaaatccanggggagtaganctntacctgngaatctcatggctattgattaaaatttggtggatcgtgatgtggngcattcatcagaggaggctcganggacactttataaaagaaccnt

SEQ ID NO: 515382 - DNA, 1146 bp, Homo sapiens
gtgcaaatatccacgaagaggaagtttgtcgactgatggcatctccaaagctgtcctgattgagttgcttactacgggaggctggtctgagagatggcctcactctggaagcttcgagggtgcggagttacacctaaaccatggactagtaagatcatctatcttacgtccgagccagaaacacaagaagtgtgctccggtgtagacgggccgggcgggatacgggaactgactggtgtagctgcacaaagatggtttggcttctccagtacgggcagatggtataagctgtgtattgctgacatgagggctggccgcttagaaggatctaggtgtcgccatgttgtccatggcatgacgctcatcctagcggttagcataactccgtaagaagggcttcgccttgtgtcggaagagtgcctagcatattgcgttgtggcgtgcagagttctatctctcggaaggaggttgtgcggcactagagagcctagcggagtggtggttggtgctacttgagtgatacacttcccgcaaggacagatggagcttaaaagtccccattgacaggggaagagtggagcctctgtggcctcgtatggaattcacaaacaatgccggagaacgagaccccttttgggtagtaaaccataaccattaaggcgctacgaaaccaacgttgcattggtagaccgacacgggcaagtagttcgagggcgtaccaagtacccagggggtagttgggcttagtgcgtcaattgctacatggcgttggaacacgaaatgcaatggcctgtgtcccccattgcgaggaaggcctcgaaatccgtagagttaaaagggaattctgtgagagccacgttaaaaggacaatggctctcaattggggcgcattggaagggcaccagagcaggtttggcacggcgaaatttggggagttgggggaataatcaccgcgagagacgtaactgtatggaattaaccgttgggtgtctccaaaaccttaagacttcgccgcaagtttcattccaaggagaagacccatgaaaacaggcgggcgttggggagaaaaaaggcccaaagaaaagggctccggacgccattggccccaattgggtgccacgccaagggcccaaagtattcatcccc

SEQ ID NO: 515383 - DNA, 331 bp, Homo sapiens
  misc_feature (194)..(194): n is a, c, g, or t
cgtgctcaactgtaatcccagcacttggggaggctgaggcaggagaatcgcttgaacccgggaggcggaggttgcagcgaactgagatcggtccactgcactccagcctgtgaacagagcgagactccgtctaaaaacaaagcaaaaaaagcttctggactcattaaatataggcttgccatttcccctccccngcgaaaccactgttctactttctgtatggatttggctaatcgaggtacttcatatgagtggattcatatagccttcgtcttttgttcctggcctatttcacgtaacgtcatgtcctcaaggttcatcggtgttgtag

SEQ ID NO: 515384 - DNA, 1121 bp, Homo sapiens
  misc_feature (939)..(939): n is a, c, g, or t
  misc_feature (941)..(941): n is a, c, g, or t
  misc_feature (943)..(943): n is a, c, g, or t
  misc_feature (956)..(956): n is a, c, g, or t
  misc_feature (975)..(976): n is a, c, g, or t
  misc_feature (979)..(979): n is a, c, g, or t
  misc_feature (1010)..(1010): n is a, c, g, or t
  misc_feature (1021)..(1021): n is a, c, g, or t
  misc_feature (1024)..(1024): n is a, c, g, or t
  misc_feature (1031)..(1031): n is a, c, g, or t
  misc_feature (1076)..(1076): n is a, c, g, or t
  misc_feature (1099)..(1099): n is a, c, g, or t
  misc_feature (1120)..(1120): n is a, c, g, or t
gtagagagatatatttataccatacatgacaaagaatttgtatccagagtattttaggaactataaaagctgaacaataagaaaataccatgattaaaaatgggcaaaagacataaacagatacttcaccaaagttcaacatcatttgccattagagaaatgcatattaaaaccacaatgagttagccatcatagaagtacaagtcaaaaccagaatgaggtaccaccttatactcactaggatagttataacttcaaaaagatagataataacaaagttggagaggatacaaagacactggaaccctcactcactgctggtgggaatgtaaaatagtgcagccactttggaaaacagtctgacagttactcaaaaggctaaatatagagttattacattatcctgcaattctactccgaggtatatacccaaaacaataaaaacatatgttgacataaaatcttgtatctgaatgtccacagaacactattcatgtaggggtttcctttcaactttgtttatagggaagatgtttataaattcttctgtgggatcagagggcacgcctattacaaccagaaaactacaagtataacagcgaggatggatgaacaggctctattagggctaaatccaaatgctgattcagactttagacaaagggccctggcctattttgagcagttaaaaatttccccagatgcctggcaggtgtgtgcagaagctctagcccagaggacatacagtgatgatcatgtgaagtttttctgctttcaagtactggaacatcaagttaaatacaaatactcagaactaaccactgttcaacaacagctaattagggagacgctcatatcatggctgcaagctcagatgctgaatccccaaccagagaagacctttatacgaaataaagccgccaagtcttcgccttgctntngntacagagtatctnactaagtggcccaagtttnnttngacattctctcagtagtggacctaaatccanggggagtaganctntacctgngaatctcatggctattgattaaaatttggtggatcgtgatgtggngcattcatcagaggaggctcganggacactttataaaagaaccnt

SEQ ID NO: 515385 - DNA, 162 bp, Homo sapiens
  misc_feature (152)..(152): n is a, c, g, or t
caaagctggtaccgtcagaaatgtactggatcaggagggtacaggcttagacactgaggttgaggaaggccacttacctgtccagactgttcttatctaccccccaacacccaaccacccacctatcatccacccacccataccccccacangagagagcgt

SEQ ID NO: 515386 - DNA, 280 bp, Homo sapiens
cacgttggctgacgtggtcggacgcggcggcagcgtcgcggcttgagccgggacgaggcgttgcgcttggcgctcgaggacgtggcggattgcacgggcctgtcgtgctgccagttctgggacggcaccggcgtcgtcaagcgttgggcggagacccagcacagccagggtggcttggtggtacagccgccggcgctctggcaaatcgaaaaggatgactggacggtcccttatggccgcatctacttggccgggggagcacacgcgctacccgcacggt

SEQ ID NO: 515387 - DNA, 1257 bp, Homo sapiens
  misc_feature (1257)..(1257): n is a, c, g, or t
cgtcgcatgagcgcccccaagaacgcccgcacgctggtgtcggccgagtggatgcacgcgctcgtggacaacgatggtcctctacgaccccgactgcgaccccgagggccgcatatgcgagaggcgctgccatgttgtcaatccaggagcgtcggctgtgctcggtagcgtgcaagctcgtgtagaggcgatagcgccgcacgagacaagggcgacctgagcctacgctgcgatgacgctggttgcagcagcgccactcagcatcctacatttgagcctgcggccacacgagcgccatccgaccctggcgacctttcaaaccaactacagaccccttgggacgcccgatggctagaagagcggagctcattaccgacagagccgcttaattcgtgctggcgaccccgagagattcgatggacggccggtggcacatacgtagcagttccaaccagtccagtaatcgagtcatgctgtgcagtaacagcgtgtctcaccacaggccgccggttgacgtggaatctcggcgcatagccgcctaactaactatcgcagagaggacatcaaggggcgagtctactaataccagggccgcgggcgcgacctggacttagcgcgtagcgctggagaacccctgcaggtggcacgcagcacgcgacatctattaacacataggcacgagatttccgcccgaaagttctaccatgaagcgccttgaccgacggcgtcatacggcggaacatacgtggtcggacgtagagtggccctacgtcgaccgagacttggaccgtcctaggagatccacaaacaggacacaagtccgcggaacggtcacaagaaagggctggaactccagggaacaggggcgcacctgacgcaccgggaacaccgagcttcgacagtaccccggggggtcacagggaaagcggaggaggacaccagaactacggaacggacccagagagaaaagagaagcaaccaccaccgaaacacacagagaggggaaaagaagacacaaaacaaaacgggagggacgcagcgcaaagagggacgaaccaggctaaaacagtaggcccagggccgaaagcccgaagtgataccgagcgaagagaagccccagcggcgacagcgacaaatgagggcacagagaggacaatccacaacaaaaaaaaacggacaccaacggccccgagcgaggaaagcagacgcacaaaagacacgcaagaggagcgcgaagcaccacgtcttcaccctaan

SEQ ID NO: 515388 - DNA, 1266 bp, Homo sapiens
ttggtgccgtcgtttgatgttgtttggtgtggtgcttcgttgttctctgttttgggtgctgcgtctttgtgttgttttacggttttcctttttgtttattttgtttcttcgggtggtgttgtttgtttgtgtgtgttttttgtgtccgcctacgctcgttgatggggtttttacttgttggtttagtggtggtttttttttgtctgggggggggctttgttttttttgtcggattgtgtgtggttttttttttttttttgtttttcctttcgcttttgtgtttgtgtgtttgttgttctgtctttttttctggtttttgttagctctccttgcgggtggtttttatatgctagctgttgtgttttgtgttctttttcgtggtgaggtgtctttctctttctggctctttttcttctgctgttgtttttggttgtggttttttttttgttctcgttctcgggagagtgttgtgtcgtctttctctctcccctctcctgcgctcgggggccccgtttctctcttctgtgttgtgggctccttctgtttgttctctcttgtgtgtttctgccttcgtgttccgcatagtgtttggtttttttggggggggtgtgtctttcttttgctggttttttgtttccccaccctcgcgtttttcttcttctcacaccgttgttcggcggaggatctctcggggcgtgctgttttggtttgtggtgttggctctctcttcttttttctttttccacccgcgcgcgtgctttgtgttttgttgttgttcccaccctcttggttttattaatatatgtttgttcttctgctttggtgggttgtttggttggttggtgtcgtccccctccccccggcggtgcttttcctctccccccctctgggtgtgtcctttttcctccccacccctctctcgtgtgacaccctctttgtctttatagcgctcccgctcgctctctcctcgtgcccccgccccctctctgtgtgagtgtgagtcgtttttcttctccctctttctctccctctcgcgcgcgggtttcttgtcccccctctctctctctcatcaccccccccccttttctctcgctcctccgtgcgcgcccgcgcgcggctcccctctggggggccccacacgaggggtttttttataaaataaaataaaaggaggaatgaggagggtgtaataataaataatatataaaaaaaaaataaaataaaatataaaaataaatataaataaaataattaattaaaatatac

SEQ ID NO: 515389 - DNA, 900 bp, Homo sapiens
  misc_feature (33)..(33): n is a, c, g, or t
  misc_feature (310)..(310): n is a, c, g, or t
  misc_feature (317)..(317): n is a, c, g, or t
  misc_feature (338)..(338): n is a, c, g, or t
  misc_feature (344)..(344): n is a, c, g, or t
  misc_feature (361)..(362): n is a, c, g, or t
  misc_feature (364)..(364): n is a, c, g, or t
  misc_feature (382)..(382): n is a, c, g, or t
  misc_feature (425)..(425): n is a, c, g, or t
  misc_feature (467)..(467): n is a, c, g, or t
  misc_feature (562)..(562): n is a, c, g, or t
  misc_feature (564)..(564): n is a, c, g, or t
  misc_feature (585)..(585): n is a, c, g, or t
  misc_feature (587)..(588): n is a, c, g, or t
  misc_feature (591)..(591): n is a, c, g, or t
  misc_feature (593)..(593): n is a, c, g, or t
  misc_feature (598)..(598): n is a, c, g, or t
  misc_feature (607)..(607): n is a, c, g, or t
  misc_feature (609)..(610): n is a, c, g, or t
  misc_feature (616)..(616): n is a, c, g, or t
  misc_feature (618)..(618): n is a, c, g, or t
  misc_feature (621)..(621): n is a, c, g, or t
  misc_feature (623)..(623): n is a, c, g, or t
  misc_feature (629)..(629): n is a, c, g, or t
  misc_feature (634)..(634): n is a, c, g, or t
  misc_feature (638)..(638): n is a, c, g, or t
  misc_feature (665)..(665): n is a, c, g, or t
  misc_feature (673)..(673): n is a, c, g, or t
  misc_feature (754)..(754): n is a, c, g, or t
  misc_feature (762)..(762): n is a, c, g, or t
ccttatagcggctaagtgtattaagttgaatgnaacgatggtaatattaatttgtttgaactgaggcccactactgattctttgacaaattgaattcttatatttaaataattttatgggaatgttccatcataatttctaaatcatttatatatcaaggtagccttaatttgtatatgtttcagtacaatgagattttattgcctctgggatgctgtttagtttgtattttgttgaacgtttttatcctaggaagagaaacccatgacttgtgtacctagatcatctgccacattaaaaagccgctctnccagcanaagagctataaatgaatgccnccttgncgggaaacaatctaggnncnagctgtatgagctatgtntattatggtgctaatgttcagtagccacacttgactaatgccnccattctctgtgatgctgtggctagcagcagagctcgccagnccatgcctggacaaactgccagggctgggcccgaccagctagctcctttggggttgagtccgtatctttttgatggggaagtataaagcaagtancntgatttctaaacccagcaatntnngantngaccnttatgagtnannactttngnagntnttaaangcctnggcngtcatgatttcaaaccaattaggagcnccaagctnccttcccaggtaactgttgggagcaatggcatcactgtatgcccttgtaatggctggaagggacatgatcttgtaagtagnaaagctgnaactaaaaattgtattgtttgcttattagccatgtatctcttaaaattttgttatgtttacaacgatgtaccttattggctcccagttattagcttcatgtttaaccatagtgccttagtaaaaaaattttgcccctt

SEQ ID NO: 515390 - DNA, 396 bp, Homo sapiens
tcgagtactggccttaagttatctgcctgccttggctctcaaagtgctgggattataggcgtgacgcacggccagccacagttgctcccttctttaattgaacttctgtggcacttgtatagacagtgtctatgggaactctcaaatgtgtcaccacaaaatctatatttgaaagatttccagactattgttctagagctaagttttaattatacacatctatctgtatcgttaaaataaaaagtttaaacaacttaaatttaaccagagtttaattgagcgaagaacaattttgtgaattggggttgctcccaaggcagagtaataagctcagagagactccagtgcagcccacatggtggccgcatttctggacagaaccgggaaagtgatgta

SEQ ID NO: 515391 - DNA, 776 bp, Homo sapiens
tcgacccacgcgtccgacaaggaggccttgcggaaggaggatgatccgctggggagaggagaaacgccaggctgacccaggcttctttggcaggaagatgtggagggcatctcccagcccatctggctggtgagtgacacagggagagtgtgtgacatcgcacgtgggtttcgtgggacggcgcgtagtggggccggtgacggccatgagctggtccggcggttgtaacggtagggagctaggaagcgcgacaggcaagcggaggcttgggggtgttcgacgccatggggtggactgaatgcgtgaggtcagaagtgtggccatggacatatttcggggactttgacgtgggtctatgcggtaaacctagtggagttgaacagcggcctggaggagcatgttggagaaccctgaatagaagtgaattggcggctcccgagaccgtttagtatcagtatggttccgtaaggaggtgaagccatggggcgcgtgctgagggtgggggtggggctgtaggtcgtgtcaacacctgggggtgtcccccgcagatcccgggcacggaagtgagggatacagacacgggggggtctaaagattgctggaagggggttcagggcgatattgggcaacgcaaggaaatgctcctggagacctcagttgtccaaccagtggggcaacgaccaggcatgcgctttgcaggaggagactcccaacggggccaagggaggcggtctggggtgagctcgaaacggcaaaacccttggatatcccccagg

SEQ ID NO: 515392 - DNA, 137 bp, Homo sapiens
acgtgattgctccacctgttcttggatcgatgtaggtccggaacgccaccgtctgccccaagcaaatataggatgacctctgaacgggcaccctccccttcctctagactgggccaggatccttcacagtctctgct

SEQ ID NO: 515393 - DNA, 655 bp, Homo sapiens
ctctctctctctctctctctctctctctctctctctctctctctctctctctatctcactctcaaagagccgaataagcaaccaggagaacacacggaaaaacacccgtaaccatgcaggtactataatcgagaaatacaacacacaaaagcgctcataaaaaagtacatgtgcgtaaacctatgagccctaaccactcattgaggtggcacagagacagactgtatatgccaatggctgtgtaacagtgactgaatgcagacacaatagcaaatacattggtgatctaatgcagacttaaaaacacagaagcacatatgctaagtacgactctcagaaccaaaagcacaaatgataggtgccagcaccatgatggaaacacatatagaggactccagataatcagcgtgaaactgaaggcaagtgatctcgatataaaatttaacagatgatggaaatgaagaggcgcagagacttacccaatgtcacagacatccagcgctagagctgcccgacacgatgtagaaaccaaacactacaagcatacaggtggaaatgcgaattaccatgggagtattggggcctaaactcaatgccaggatatgaaatttggacctatcggcggacagaccggatgcgactatgacatcacatc

SEQ ID NO: 515394 - DNA, 376 bp, Homo sapiens
  misc_feature (4)..(4): n is a, c, g, or t
  misc_feature (84)..(84): n is a, c, g, or t
  misc_feature (122)..(122): n is a, c, g, or t
  misc_feature (159)..(159): n is a, c, g, or t
  misc_feature (184)..(184): n is a, c, g, or t
  misc_feature (221)..(221): n is a, c, g, or t
  misc_feature (224)..(224): n is a, c, g, or t
  misc_feature (234)..(234): n is a, c, g, or t
  misc_feature (255)..(255): n is a, c, g, or t
  misc_feature (269)..(269): n is a, c, g, or t
  misc_feature (271)..(271): n is a, c, g, or t
  misc_feature (275)..(276): n is a, c, g, or t
  misc_feature (304)..(304): n is a, c, g, or t
  misc_feature (375)..(375): n is a, c, g, or t
tctncttctaggtgtttgcacccaactcatggtgctgggcaattgagaggagaagcattacaaagggaggctgaaggctcatcnctcagggaaccggagccccccagcctgtggggcttgtntcagccctgaacagagggcagaagttcaaggggactnaagatgcaggtagttcccaagtganctaggagtccccagagctggggggttttgcctttatnggncaaggtggtngacaggaggattcaaccccancatggaggggggantnggcnntctccccaatttggcccctctaggtcanttccacgttgttagcacggtcaaacactcgggagccacgggcactacccccaagctggaaacggctctcana

SEQ ID NO: 515395 - DNA, 987 bp, Homo sapiens
ggattcccgtcgtaacttacagggaaattttgcacaactgtccggagccccttgatgtccatgcaaatgaaggaggaggatgtccttaatgttgccttgtcagccaggaacccacttaggtggcaccgagatcttgactttccagatggaacagtatcgatctataaacaaggaacacatgtgatggcatctatatcataaactctcaagaggacctgggaagacaagcgtatctggctggcagcgtcgtgcagagttgttggcattgaaaacccatgacatgattgtcagtgttagttagtccttccaggaatactggccagagggcatgtgcgtgaagtttgctgtgtgcgcactggtagccagtccaattgatggcgcgcttcgaagtcctggaacctttcgacctaagcgcagatccaggcagccttcgcgggtaggccacggacttctatgtggttactgaccccaggaatgaacaccagacctctcaccggaggtcatcttatgttaacctacctaccatgtgcgactgatgtaaatacaggattctccttctgcgctatgtggacattgccatcccatgtcaacaaacaagggagctcactcagtgggtttgatgtggtggatgctggtcggggaagtgctgggcatgcggtgtaccattttccgtggaaaccatgggaagtcatgccggatctgtaagtcgtaggagatctgaagagattgagggaagagcaggtgtgttgaaaggcgtgacaaggggattcggtgactggcggtccggtctgaattactggtatagctaagttgggatgttgaaggtttcaggtcctctgggtatagaaactaatgaaatgaggcagtgcggaaaggttgtgtcctgttggtttgttggtaactggtggttaggtgtagctaaggaagggtgaaaaactttaaaaacggtttgggaggggaggagagtacatataaaggttggttagg

SEQ ID NO: 515396 - DNA, 196 bp, Homo sapiens
  misc_feature (128)..(129): n is a, c, g, or t
cccgcatcggcgtaggcgtctgggcgacgtcgggcaggttcagcaccgtgatgtagcgtgcgccgtggccaatcagtgaccggacgttttcagccagttccgtgccggcttgtgcatggcttgaacgnnctgggcgttggtgatggcggtgctgttgaccgcgttcaaattgggatgcgggttacgccgatgcggg

SEQ ID NO: 515397 - DNA, 641 bp, Homo sapiens
ctttaagccgcgtgcccgcctccagctctcgtgggtcggctccatggaggcgccctcacggagaggggcgggcgctctattccagagaccgagtggcagtgctggccactgtgtgcggggctctttccccgtttcgcctctagctacccctcagctccggtagtcgccatgctccggggtcgtcgccgtttgggtgcgggagctgctcgggcccgctctgtcgtctcccgtcgcctgcttccgggtccaggcccctcggtgccgctcgtgctcggctgtcatgaggctgcgtgttgcggcttctggagcgtacctggccgctggaggtgcccgagacggagccgacgctggggcatttgcgctcgcacctgaggcagtcgctgctgtgcacctgggggtacagttctaatacccgatttacaacttacattgaactacaaggatcccctcactggagatgaacgagaccttgcgcttcatatgggattgttcctggggacttgatagtgttctgattcttcaagatgacattccagcgcctaatataccttgatccacagattcagagcattcttcagtccagaataatgagcaaccctcttatggccagcagctccaatcagactagcatacaggatgaa

SEQ ID NO: 515398 - DNA, 110 bp, Homo sapiens
cgtttgggatgcaacgatgaggctgctgtaatttgtggtatttgctctatttgctttcactcaaacagaggaagagaaccaatgcttttgactttccaaatcacttgctg

SEQ ID NO: 515399 - DNA, 976 bp, Homo sapiens
  misc_feature (1)..(1): n is a, c, g, or t
ncatcgagaagtaatgctgctatagaaaattgattagaattgtctggatgctagattgtcttggggacagatgtagcaggggtcatgctcatgggacagccgtctggcaccccggtgtttttcccccagttgggggtctcccagagagcgccggacattttgtgggagcctcccccaactctttctcgatcattaagaatgttctgcttggcccgaaaaatccagggttcgtccctattcgcgggggcaaaactgggggcccagccgaacaacaaagtcggttcaaatagcacgccctgttttgcttgtgcatgccgacgcaagggtggacaaacgcgaattcgccttgcatggacacattcggtcaatcgtggtttgcgtgtagaccttgacccgtctgagggataactcccttggcgtcctcccccaatgcgtcgtgtcaccgagagccccggcctccggcgtttctttttcaggcgcgctccccccccacaaatatcggtgcgtgcacatgtgccccggacgctgcgcccgttcatttagttacatttgtattgtgaccatggtacaactgcgagtaaaaggccaacaggggtcggacctaatttgcaatagtacgtggggccgcccctgctcaccacgaaggtagtattctagcacgcgatggcgccgtggcatcgctcttgccacatatgttgacattcaacatcgcctcggtccagcgaatgaggaaagcatcgcttcatccttgggtgcaaggcaaaaactattgggtatggacaaaagatggggtggtgcacgcccctggcaatacttctaggcagaaaaccacacacatgcgcaccataatgtgatcctccagccatgataaggccctgtcaaaacaagggtgccccttattttttatgccccaaaggtttaaatacggggaaaccccaattttttcaaaacccaaaaaaaagtttaaagccaaatc

SEQ ID NO: 515400 - DNA, 1765 bp, Homo sapiens
  misc_feature (2)..(3): n is a, c, g, or t
  misc_feature (1000)..(1000): n is a, c, g, or t
  misc_feature (1368)..(1368): n is a, c, g, or t
cnnttgtgtggattgatgctgatcattagctagtatgattgtctttcctcttttttatgttctgtctattatcctcttcttctgttttgctttggtttcctctcctcgctcttttgttatttgattgctctgtgtcgttctctaaatatttcttttgctcttttcttatgataccagatgtggtttggtttgcgctcgcatatgatttgctttctgctttcgtggggctgccctttattggtttttctctgtctgtttgtgattttctgtttccatggtgcgctgtgttccttttatgtatccccgtggttgcgtcgttttttgttgacgtcgcttgtgtttttcgttctttgtcccccccccgtttattattttgtctcgtgtgtgtcttatgtcgccccccctttgtttattatttttgtggtcactttttgtggtgttgttttcaccgtttaccttggggggggaccccccagaagatctgtggggcttacccccttttctcccttgttgagatctgttcttctcgtggtgctttccccactagtaatttttttcgccccgccatcttttttttgggataactttgtatttaatcccctttttcctccgttgggtccagagttagttgcccttaaacggaggtgtttgtggtcccccccatccttgttaatcgtttgtgccttcccccaaccgtggggtgtgttcataataaatagttgttaccatgttgagtattgttctcttgccccttttatttgcccatacttttctacccttttcctccggaattttgtttttacgcgccccacaagggtatgtaaataataaataaagggtaatatatgttattatatataataatcgcgcaatgttgataaaattttttgcgaagagagccgtttacctgtccgcgcccccccgcagagtgtgctacccacaaataataggaagattgttttctttgtcaagagagcttccacagatggcacccacgttnttataaaagaggatttttggtgtgctccctatgctcagatggtacatttcgtgagatggtgtttttttagatgttatacgcccatataaacatgatatattttgtctacccccacaagaggtgatagagggtttcagaaataaagagcgaaaatttgtgacaatacatagtatacattgtaccaccacatgtatggtgtggcgctatctctttgggcgagaaatatattaagcggccgcttttttttggagagcggcgcggttatatgtgagatatattaaaaacatgtgtgtgtctcgcgttaataaatatcctgtatatcgccgctattttataaactccacgggctccgttgtttttctctcttngagaaaatggcctctataaatatacccacgtgagtgttctgtgaaaaaattctcgagtcacgaccacacgtgtgacactgcgtgtccatatgaactctcgataattgtgtcctctggtgtcttccacgtgagccaccacggcgcacactctcttggagcactgtcccacacgtgttgcgctcggagtaaaagttgcctccactcttgccaaccacgtgatacactaacttgtctttgccacgtgtgcactgtatagtgaaggcgttaacctcgtgaaaccacgtgattctgagtggcccaccctccataaataaaattgcacgcactttctattgtttaataaatttgtaagccccccatttgtattatttgtctccaataaatacttagtcatcca

SEQ ID NO: 515401 - DNA, 106 bp, Homo sapiens
taactatacacgagtatctatacacctgatacactataccacctacaccctatacactctgatacacctgcgccaaaagcataagcaacatctcgccagctcaaag

SEQ ID NO: 515402 - DNA, 924 bp, Homo sapiens
gctcgcgatccccgtaacagtaacctaaagtttacattgacttgttctccttgtatgatgatgagagccggttcgatgaagatgtgcatagaatccatccatcacagaatctttgatctgacgatttagctgactgttctctagatatgtaatccaaattgctgataggctatgtcgagtgagtgttctactacgaggcagtcattgccagactggaacacttgtattgaacagatccgtattgagcttgtcataataagtgtatcgatatatacttggcaaatgttacattgaaatattacttaattactttttaaaggaataatttgaaggttttcccaggatttttttaagaatctccttttatttaccaattgtttaaagataaagcattctggtaattttttaaacaccctaatattattttaaacctcagcaatatttgatttctgcttaaattttcttcataagccacagaattttatgctactcatgacaaaaagtgtgagtaaaaaactaggagactgagtttgtatgatttatataatctttttactttgtagttatgcttcccatctcagactcttaaaaaagacttaatttcactttcagggcttcctttagggatcttactctgaaaaaaagttctctgtgggtatacggaccgggttcgagggggaatagtcagtctgatcccgattcattgctggttgtgctgatggagcatgaatgagctattgactttttgagactgcattgaacctgtcctgggtttaaaagatgccggccattcaaacagattttccctaaggtcccttcggataatcccccaataagaggttccggggacactttggcacaccctgcgaaggggggacatgcaacctactcttgtaccacacactttgctttggtagacatcag

SEQ ID NO: 515403 - DNA, 797 bp, Homo sapiens
tcggggggaggctccaatggtctgcctggggggttagcgctctgtagtgtttgagggatggtctgtagggaaagtttgattctgtgcagaaagcggtctatcgcccgtggtggacaattgttccgtgacagaaggtgtcatgcggctttgagatggacgcaagggtgaacaaacagtgttgtttggaatcgtctctcgcgggcgcccccccccgcggagtgtttgttagaggccccccccccgccccttttgtgacagagttatgtagcaatgtcctcggccggcgcctctgtgaagtgtttctgctccccctcttgccccacgcgctgttccacacgataaagttatgcgcgtcgatgtctggaatattctcgcgacaagaggttgttcccccacaattattctcggaaaaagagggcgctatatatggcgcaaaaaggttgtattcagagaagcgagccttacatgggggccccatccctgtatagcagtgtgcccctcccttccatggctccaccccctcggaatgatattcacgcccctcattgtacagcgcccgccagtgagctaatgtcttgtgggggttttttgcgacccccgcaaggtgccaaaaattttgttcatgtgaacctgttacaccgtatcgtcgaaacacctgtgaagaatctttctttgctctccttttaggttagattacccgccctctatatatcgcctactctttagaccctcttgatatacaaattattcccaatcacccttgtcgtataaaatgaactaaacaaataacaaaacaa

SEQ ID NO: 515404 - DNA, 533 bp, Homo sapiens
  misc_feature (2)..(2): n is a, c, g, or t
  misc_feature (64)..(64): n is a, c, g, or t
  misc_feature (121)..(121): n is a, c, g, or t
  misc_feature (187)..(187): n is a, c, g, or t
  misc_feature (236)..(236): n is a, c, g, or t
  misc_feature (239)..(239): n is a, c, g, or t
  misc_feature (265)..(265): n is a, c, g, or t
  misc_feature (279)..(279): n is a, c, g, or t
  misc_feature (284)..(287): n is a, c, g, or t
  misc_feature (290)..(290): n is a, c, g, or t
  misc_feature (292)..(292): n is a, c, g, or t
  misc_feature (294)..(295): n is a, c, g, or t
  misc_feature (324)..(324): n is a, c, g, or t
  misc_feature (329)..(329): n is a, c, g, or t
  misc_feature (333)..(334): n is a, c, g, or t
  misc_feature (342)..(342): n is a, c, g, or t
  misc_feature (375)..(375): n is a, c, g, or t
  misc_feature (443)..(443): n is a, c, g, or t
  misc_feature (494)..(494): n is a, c, g, or t
tnaaggttgttgaatttgaatctcatgaaaaaaaggcatctcttcattatatgttgattttggnaaaaagtaaagaccagcatacaatagatatacatgataatgtagtttaaagtaagangtgctttgcttttggtaataaggtagagtgaaacttactatgtaaatctatgttggttatttaggncatgtttcttgtctttttagaagtcttcaggcttaatattttaaaagtngcnctttttatttgatacttctacttttngctggaataggggnatagnnnngantntnnctgcttaggctaatacactcatacaatanatggntaanntgaaatanaaaggtaagatatcttagggatagtggcatttncgattgtgagttgttttaaacgcgcgccaaaactactaagtatttgttttagcaaaaactcaaggcgnaaaccaatcttgggaaatgatcgccaacctgttttataagagttatttaanagtctaatctctttgctagagaatgccattttaagctta

SEQ ID NO: 515405 - DNA, 196 bp, Homo sapiens
gatcccttactcgtgttgcaccttacaaggcatgtcacagggcaacatcttttacttgtcttcagttttttgttagtttgtttttgctctgtttttttaatgactgtggaacattcttaatctctgccacacaaattgcattttactctgctcatctttgtatttgtgtgtgtgtgcacatgtgcaacacgaataa

SEQ ID NO: 515406 - DNA, 177 bp, Homo sapiens
tcagggcaccagtgaaatcctgagtgatgtgcagcggatcaagacgggagacgaagtgggagccagcgaagccacgctgctgaacatgctgaacatctccccgcttctcctgtgggcgggtcatccagcaggtgttcgacgatggcagcatctacaaccctgaagatagttggctgg

SEQ ID NO: 515407 - DNA, 154 bp, Homo sapiens
tccggatgcgagaactcgacacaaggggtcaaaaacaagtaagatcctaacaaaaagaaaggagaaaaggaagaaaaagagaaaaagaaccaaaaaggtcctagccaatcccctgttcaagctatgcgagaagctctggttaagcttacacaga

SEQ ID NO: 515408 - DNA, 241 bp, Homo sapiens
tcgtggaggccgtgttcggaccctgctgtcctggttactgttgcccgggtgtcttttttttgagtactgctctctgagttttgcatcactcaagttgccctcatctgctggagatcgatcaggaacgcacaagacgttctcctctgcccttaaggagcttcccgcagccgcctggcccaccctgggcacgttctccgaggcatgtgtctcccttttgccctccttacagggattacgaggg

SEQ ID NO: 515409 - DNA, 182 bp, Homo sapiens
catgatgtgattgttaatatatgatgcagtcacatcggcttcctgctctgtggggctcgtccttcctagtctacggttccgtgaggatgccttcggaggactgggttattttggcattggctctcattatggtccttttgggaatgatgtggtttttcccagaagaacaatcacatcatggg

SEQ ID NO: 515410 - DNA, 155 bp, Homo sapiens
ggcacatctgacccagagggtgacggcgcgtaggatgaagctcgtgagatttttgatgaaattgagtcatgaaactgtaaccattgaattgaagaacggaacacaggtccatggaacaatcacagtgtgtggactgtcacgcatgacatacacgg

SEQ ID NO: 515411 - DNA, 404 bp, Homo sapiens
actatctcgatatccctataaggtttagtatctagtcgtatcttctgtataatcacgtctgtaactcaccattacttagttcaattatccttgcttaaaagcgtttaaggtaaagtagacggtcttcatccagggacatccacttctgtatgcgatggccaaagctattggcctctctctgaacacgtaatgagttgctctaggtctgctgagagctcaaggctcaaaaggtccccagtactggaatcgcttctatgaccagataaatcagtaacaatgaatctgtccctttcaacatagtgtgctgatgatgtggcctcgttgccatatgaactccaccttgaatcaacagcattgacataagggacatactctgatacactgatgggacgaagatgcggcgt

SEQ ID NO: 515412 - DNA, 172 bp, Homo sapiens
ttagataggtttttggtggaatacgtgcaattttcgacacgatatcttcaatattttccacggtaatcaaggtgtcatcttgttcagctttcagacgacgttgtgcccctgcttcatcaatgacatcaatggctttatctggcaagaaacgatcattaatgaactttgcaga

SEQ ID NO: 515413 - DNA, 100 bp, Homo sapiens
tgagtaggggaagggagctacgtatgggtgtagaataggaatgtatgtgcctgcgttcaggcgttctgactggttgccttcaaaatcgggtgcatgcata

SEQ ID NO: 515414 - DNA, 148 bp, Homo sapiens
gaaaaattaaaaaaaaaaaaatttttttggtcgggtggccttttttaattgggggtgggaagggggtgaggggccccgctaaaaattcaaagggagccaaaatggggggtgggggggggggggttttaaaaaaagggcccttttttta

SEQ ID NO: 515415 - DNA, 191 bp, Homo sapiens
ttctttttggaacccccttttcccccatttgggtaatccaggaaaattgttatcccttccccttatattgaagttgagaaatgtgccaaaggcctttaaaggatgggcctttcttttctttttctttttctttttttctttttaaaaaggagtccccctctccagggtggagggcagggggccaatttcca

SEQ ID NO: 515416 - DNA, 154 bp, Homo sapiens
ccgtcgctacactctcttgacaggagacggagttacaatcggagcacagctattattatacacagacaactagagacaaacatcagactggaattctaatataggaatattgatgaatcatgagtaaggggacttattccacctattagaactg

SEQ ID NO: 515417 - DNA, 407 bp, Homo sapiens
ttaccgcgggaaaacagccgggggacattttgcctttagcatccttaaaaacgctctgccatgggaggaccaatttcaaacggttttcaataaccttgaacacgccccagagctatcttccaaatttgacctgtctgggcctaccaacaccagctacgcagggcctatagccctcgactcaccaaatcgggccattataacaggcgggtaaagcccatacttcttccgaaaggttgctagctctccatcattaaagggtttctgtaaaactcgagataaaattgcccccaatcacaacagtggttcctacataacaaccaggggttcttttgcaccaaaaaagaagcgtcagccctctcgggtcggaaacaaacttccgcggtaattccaaatctaacaaagcaccc

SEQ ID NO: 515418 - DNA, 121 bp, Homo sapiens
gtagagcagaggccattgtgagagcaggccagtgtgggggctgagcctcccactgcatgaagatggcataaacctctgggggtggtgctggtggcctgggctgtgtgcctctgctctccat

SEQ ID NO: 515419 - DNA, 138 bp, Homo sapiens
ctgacaaccgcgccgatctcctcttgggctcttccttggcggcttcggcggagctgacctgcggatacggagacgcacgaatagatgcgggccgcagtcccaggactcgtcgcccgcccggccccgagaacaatgccc

SEQ ID NO: 515420 - DNA, 131 bp, Homo sapiens
  misc_feature (15)..(15): n is a, c, g, or t
  misc_feature (38)..(38): n is a, c, g, or t
tgttcagcctggttngtgtacatagcaagtaaagcttngttaaattctatagctagtagttgtttctaggaaagcttaaactctactccttccgcattggttaatttcacttttcttctggagtcaaagac

SEQ ID NO: 515421 - DNA, 161 bp, Homo sapiens
  misc_feature (72)..(72): n is a, c, g, or t
  misc_feature (81)..(81): n is a, c, g, or t
  misc_feature (87)..(87): n is a, c, g, or t
  misc_feature (154)..(154): n is a, c, g, or t
caaaccggagcccatcctagcgtggctccggcctccctgagacgttatttaaaactcagccttctcctcctncccctcctnccttcngccttggacttacccagcgtgcccgaatcccaccacccaagtgtcagctctctgtggtgccttgttnctgcagt

SEQ ID NO: 515422 - DNA, 145 bp, Homo sapiens
tgtgtagtctgatctaccgatcttagaggtgggaggattgtttgagcccaactgtttaaagagaccagccctggccaacatagcaatgaccagtctactacaaaaaaaaatttaaattaaccaggcatggtggtgtgcaccctgt

SEQ ID NO: 515423 - DNA, 388 bp, Homo sapiens
  misc_feature (10)..(10): n is a, c, g, or t
  misc_feature (43)..(43): n is a, c, g, or t
  misc_feature (115)..(115): n is a, c, g, or t
  misc_feature (160)..(160): n is a, c, g, or t
  misc_feature (330)..(330): n is a, c, g, or t
  misc_feature (338)..(338): n is a, c, g, or t
cctgcttcantataacacagaagacgcctatactgtgcagcanttgactgacagcactcagattaaaatggacattttggcacaagtcctacagatttaactgaagtcgaaattnctggtcttagaagatgaaaatgccaatgttgatgaggtggaattnaagccagacaccttaataaagttatatcttggttataaaaataagaaattgagggttaatatcaatgtaccaatgaaaactgaacagaagcaggaacaagaaactacacacaaaaatatagaggaagaccgcaaactactgattcaggcggccatcgtgagatcatgaanatgagganggtcctgaaacaccagcagttcttggtgaagtcctcctcagctctcctcc

SEQ ID NO: 515424 - DNA, 259 bp, Homo sapiens
ctccatctctcggtcacgcattctcctctgcctcccaaagtgctagggattacaggcgtgagccaccacgccaggcccaatgtgtaggcgggtatccctcacccttctccccaagtccccatagttcattgtatcattcttatgcctttgcctttgtgtcctcatagattagctaccacttataagtggaaacatacgatacttgtgtttccagtcctgagttacttcacttagaagaatggtctccaattccatctac

SEQ ID NO: 515425 - DNA, 967 bp, Homo sapiens
  misc_feature (190)..(190): n is a, c, g, or t
gttaaaggagtggcgacgtccgggcttcggagcgggcagctgttcgttgtgccagcgtaatacatagaatgagaatgatatattgggtgatgtttgatactaggcacgacagattgtttatggaatgaagtgtccccctagttgctcacaaccagttagcatcacagggagaggcaagacacaatgactngagtgccaatagtctccagtgggtcgatcgttatgtgaggcggcaaagacaagggtcacggaccgcgtggtgatacgtcgtttacgacagaccgctcataataatgacacgaaaaagggacatcaatcttgggaggagagggaataccactttgatgagacggtactgtgagacgaaaatcctcaatgagagtatcatccactggacactacaaaagtgattcttggtgccggcagtctaagaatgacaggagagagacagggctagacatttgaaatcaggcttgatcgtcgacctacatagagctactaggtgagtatctaatcggccactggctgatgttattgcacagacagagatgtctcatgacttttttatgtgtatcatccttaacgtagatctcatacgaccgagaattcagatcatgaatgtcctgaccgaatataggttgggcggccccgatttaggactaagacgggttgtggctaaatgaatatgttcagccttgacttcctagtaactccccttcgtcatggtatccttggtgcccctttacagatttgcttcgacttcgttcggactgtgcagcttgcccgaaggtgggggggcaactaaaactacgcatgggtccattcacacggaggacgctgtgaaagtaaacgggaagggcggggacccaagaccggtggggagaccgccccaggagggaggacacgagaaaggcgaacacaaacggacagagaacggaggggggaaaaaccaacctggcgccttgca

SEQ ID NO: 515426 - DNA, 909 bp, Homo sapiens
taaagcaggcttgtactgcctcctggagtttcctggtgattgactgtcgtgctctccctgtggccctgagtctgatgccgctgacgggccgagtgtggctggacggttctgtgtgctgaactgtggacctgtcctttctcgctcctgccctgcggtggtgtcccctcgtctctcctctcccctgccctgcctggcggttgcgtgtgggaatggctgtggggtgctggacccctgtgccctgacctcgcctgtccctgccctgcctgccttcttgcttctgctgggtgcgtggcctggctggggtcctcgtgacttgctggcagacagccgctctgctgtctgcctccgaggtggttttgtcgactttgctggggctgtgcccccccttactctgctggagcagtgattgttgggtgtgtttgccctggtacgcctggcactggtgcccccaggtacagttgcgttagcgccctccttcagcgggggagcgggagttattggcgagctgaggccctggtcagtgcttccctggcccttttgtggggcccccttaatagactggagttcgctatcccatagaggatgagcgctcattcacagagggggtattaggtacccccttcaaagtgagttttgccccccaggaagttgccccctgaaaaacctaggagatggagatatgttggtacggttaccgccctagtctcccacgctgtgtggctgtgcccccgagctcttctcattcacgggtgtgtcaggcctatgtactgctgactgagagttggttaccctcggcatggtccagtgtttacggtggttcccctttgagagtgggcgacggccatccagggtacggagctattggttgagcgggtttccacgagaggtggcaggaggctttaggaaggg

SEQ ID NO: 515427 - DNA, 278 bp, Homo sapiens
gtctcccacctttgagccggacaaaaccagagtcacctaagactcttaggaaaggtcttttgcaggtcagcgctttggaggctgaggttggaggattgcttgagtccaggagttcaagaccagcctgggtaacatggggtggaacaagcctgtagtcccagatactcaggaggctgaggcagaagaatcttgaacccgggaggctgaggttgcagtgagccaagatcacaccactgcactccagcctgggtgacagtgcaagattccatctcaataac

SEQ ID NO: 515428 - DNA, 1580 bp, Homo sapiens
  misc_feature (804)..(804): n is a, c, g, or t
atagcagcaggatgctgcaggctgtccagcagccctgctctgtggtggaatgcttctgtgtgtgacattcaatggcttaccgtgggcgtcgtgccatacatgcttgtgctgtccctgtcttgtctgtgagactgactgtgatgtatggctggactgttgcttgctgtgcacatcatgacgtgcttgtgtgccgctgacttcactgacctatacccacaagacagatgcctgcaatgcttgctacaatgatgaattgtgtggtacgtatgtgatgcacttgtggtgatgtgacgtctcttgcgtggatgctagggcttatcccttggtctctacagccagacgtcttgcctggtcacaatgaatggaccacatattccatatgagcaccacgtcactcaacgccaaattgtacactccacgtcatgtagacggaaacttgcaaagttacacactctgccattggatgcacacataccccttacatcacgttcatcattgccatgtgtgacacttgcactggacgcttgccttgggcccattggaacgcctagcgagatgttgtgacctaacacatgacgacacgacctctccatcatacaaatacctggcccagtctctcgccaactaacaacctagctcagcaaataggccattgaacccacctacctgcaaacgcaaactggacacaccacataccccagcgttccttggctcggtacccacacttctgtgacatcgctaactacgtttgacaacccttgaccctgacttatatcccattcgactatgcgctcggcaccagcntgatcctcttgtgacgccccatcggcagagtgagccccccactatcagacacgacatcccctctccacagtcctcgccatactgaggcacgccaaaagcgacgcccagactgcgcccaccacacgcaccaagcacacatatggcccactgcaataccgaagcgccaccaagatctcaccacaacacattcgcactcacaggcaactcatacacccacaggactgacgcacagttgcagcccgacgccaccaacctgcgtgcaccactacgaccagacctacaaacccccgagcgcgaacacaccacacagtgaggcccccacccaaaaccccagacagcacatggccctctcacacacccccgggccaacacacgactcccacacgcacggcaccgccaccaccacacccccgcgcaacgccccacgcccacaccccgacaccccacaccaaccccacaccacaccccccaacggcccacccaccaacccctctccaccgtccacgccgagcggcagccgacggccgcacggacaagctaccataccgtgaaccccgctcgaccacgcccacaccaccgccgccaacacacgccgcctcccgctactcatcgacaacacccccgccgcacgcgtccatcaccgcccaccctccgaccacacacacacgacgcaccacgaccacacccagcctccaccccctccagacccacaccaccccccgcccgaacaacgcaacccgaagaccaccaccacaccaaacccccccacaacggcc

SEQ ID NO: 515429 - DNA, 410 bp, Homo sapiens
  misc_feature (129)..(129): n is a, c, g, or t
  misc_feature (139)..(139): n is a, c, g, or t
  misc_feature (177)..(177): n is a, c, g, or t
  misc_feature (251)..(251): n is a, c, g, or t
  misc_feature (257)..(257): n is a, c, g, or t
  misc_feature (275)..(275): n is a, c, g, or t
  misc_feature (289)..(289): n is a, c, g, or t
caaagccaaagtgctctggtctaatagtatctattatgtctgttcgaacctagcaaaaaggtccagtgatggagtcgccccccatcttgagatagcagtgtcctgatgaggtatatttcccgtccaagnctctgtgaantttagagtcagtttgttggggtcaaagacaccatctcnaccccacccaaataaaaatgcactcatctctgtagaacatctgctgtcaaaggccagcctgtcgttaggccatnggcttntgcttgacaaaccagtancaactgtgggatgncgatggtgggatgtgtcgcaagcaattcactagacaatcttcacatgaatgtcggtagccagggtctctcccgagggatggctttagtcttgatgaatgtgaaccatgtcggaattgtagg

SEQ ID NO: 515430 - DNA, 209 bp, Homo sapiens
tacagcacgctggagtgcatggtgcagtggctcactgcagctccgactctcggatcaagtgattctccagtcttagccttccaagtagctgggattacaggtgcatgccatcacgcctggctaattttgtagttttagtagagatggggttcatcatattggtcaggctggtctcagactcctgagcttaggtgatctgcccgccttgg

SEQ ID NO: 515431 - DNA, 411 bp, Homo sapiens
  misc_feature (130)..(130): n is a, c, g, or t
  misc_feature (140)..(140): n is a, c, g, or t
  misc_feature (178)..(178): n is a, c, g, or t
  misc_feature (252)..(252): n is a, c, g, or t
  misc_feature (258)..(258): n is a, c, g, or t
  misc_feature (276)..(276): n is a, c, g, or t
  misc_feature (290)..(290): n is a, c, g, or t
agatgagtattttattcgtgttctgtctccgaaacacctagcacagaaggtcacagtgatgcggagtcgccgcccctatctttgaagatagccagtgtccctggacgaggtgatgatctcccgtccaagnctctgtgaantttagagtcagtttgttggggtcaaagacaccatctcnaccccacccaaataaaaatgcactcatctctgtagaacatctgctgtcaaaggccagcctgtcgttaggccatnggcttntgcttgacaaaccagtancaactgtgggatgncgatggtgggatgtgtcgcaagcaattcactagacaatcttcacatgaatgtcggtagccagggtctctcccgagggatggctttagtcttgatgaatgtgaaccatgtcggaattgtagg

SEQ ID NO: 515432 - DNA, 133 bp, Homo sapiens
cagagatgtgtttaagtgctgtggtcagaagcggagggaggggggggtttggtggaaattattagtgtatgaagtctgtgtggaaagatgctgtgcagacgtgcagttgttattattatgtcctacaagcata

SEQ ID NO: 515433 - DNA, 278 bp, Homo sapiens
gtcgttaattacaatgtcgtcatcaccctaaaaaaaaatcctgtgcccattaagccgatatttccccttcccccagcccctgacaacaaccagtctggtttctggctctatgaatttgcttaactctggctatttcctatcaatgggatcgtaaaatctatgaccttttgtgcctggcttctttcacttcgggtgaggcttttggagttcctcctcgttgtagcatgtcagtacctcattccttttcatgtctgaagaatattccattgtatggagag

SEQ ID NO: 515434 - DNA, 341 bp, Homo sapiens
ttcaacccgagtagggtggaaggtgttgcttaaaaagaacaaacaggccaggcgcagtggctcacacctgtaatcccagcactttgggaggccgaggcgggtggatcacgaggtcaggagttcaagaccagcctggttaacatggtgaaaccccatctctactaaaaatacaaaaattagccgggcttggtggtggtcgtctctaatcccgctcctcggaaggctgaggcagataattgctcgaacctgggaggcggaggttgcagtgagccagtgcactccagcctgggcaacagagcgagactccgtctcatagaaacagaaaaaaggactgtcaaccc

SEQ ID NO: 515435 - DNA, 324 bp, Homo sapiens
  misc_feature (101)..(102): n is a, c, g, or t
  misc_feature (105)..(105): n is a, c, g, or t
  misc_feature (283)..(283): n is a, c, g, or t
  misc_feature (310)..(310): n is a, c, g, or t
ggaatataactgcgtttaaaagagggctgtaactgcaaggaacaacgattgagtgttcaagactgcctttattagctttacttacaagataatacattggnnctncttttattgtgcatagaaaggtgaaccaatgtattatcttgtaagtaaagataatacattggttcacctttctatgcacaataaaagaagaattgggtctcaattttagaagttaagcttttttcagtacctcttaatgaaatatttttaggcttttgcatacttaatttgagagggncatctcccttatccggatagctggggnggattcttatccct

SEQ ID NO: 515436 - DNA, 189 bp, Homo sapiens
gctactaatctgaaaaagctacttagaaattatcaaaaatttcataaaattccaaatagagatgtggtaaactatattaaccatttccagggataaggcggattgatcagcatactcatagggtgggaacctgtaggacagagtcccgggggaagagaaacaatgctgtttaatctgaaagctcaaggg

SEQ ID NO: 515437 - DNA, 408 bp, Homo sapiens
tgtgtgtgtgtgtgtgtgtgtgtgtgtgtatgtgtgtgtgtgtgtgtttcccttgtttttgttgttatgaaattacagactttctgtgttgtcttggatgtagttatcctcgttggtatggacttttcttctagtattttcggtagggctggtttgtttggctttagatttgtcctgaaatatcttgtttacttcatctatagtgattaaaacttttgctttctataaaagtctaggttggcacctgtggttttatagaggttataagatgtctgtccagacctttctagcttttgtagcccctttggtaattcaggtataattctttgtatgttacttgtccttttctcctttctccttttaatatttgttttttttttgtttgtttgtttgtttttgtgtcgacgc

SEQ ID NO: 515438 - DNA, 270 bp, Homo sapiens
cgcgttggggatcagatcgggcgattgcaccagttggcgccgatgctcatcatgcgtcgccaaaaaatgcgcgaaaaaggccatgctcgagcgcacggtgtcgaggccgccgaacaccaaggtctggatcagcgcgcctgcattgtcatcggtaatgggctggccgtcgatctccgccgccaggatggtgctgacgaggtcgctacgctccggcgtcgcgcggcatttggccatgtcggcccgcacataggcgatcattctctcgcgagc

SEQ ID NO: 515439 - DNA, 620 bp, Homo sapiens
gtccaatccaataatccattccttttggaattaatgttaggaggttaaatcaatctgaaaggaattcttaacatttggaatgagtagggtaatccttttttcctaattagaggatggtttaaataaagcctttaattatccggttcattttccccctggaattcaaaaggccactttttaaatttttaaccaaactctaatattaccataaccatggaatggactacggccttggttttttaattggccaatttttaaaccataatcaaaaccttaatccatgtaccctaacaggaggtttggatagtcggtggattcctccctttggtaaatttaacctgcaaattaaatttaaggattaatcctttgacttttccaattccttcttcgttttggccgttaattttccttgaaagttttaatggcccggttggcttggattttggatttttgtcgttagttgtttctttttttttttggagacagagcctaacttttgtgccaacacggaagtccaaggccccgatacaagttaattggcacctccaccttccagggttaagccgattcttttggccttagcctcatgatggttgcgtttttaggccttggtccctgcg

SEQ ID NO: 515440 - DNA, 227 bp, Homo sapiens
gaattctctaacctgccttctgcccttaggctccggtagattgcaaacgacctgctttctttctgatcccgggctgcgttcggacccctgtcgtatagaaaatcccaagtaaggtacctgccgtcggcagatctgagctttcttcttggacacctaatacccacagttctccagacccctgtcggatagtaaatcccaaggtagggacctcttgcttggaggtcttt

SEQ ID NO: 515441 - DNA, 794 bp, Homo sapiens
aaaacttatttatagaagacttcagaaataataacaacactaggaaaacatgattttgtgactggactcgttgtatgtgcctcagacgctataatccgaagcagctttgggaggaccgaggacgtgacggcatcgcccgagattgagagttcgatgaccagcctgaccaacgtggagaaaccctgtctctactaaacaaacaatgaaacatagagcacacataatacataaagactagccggtgcgtggtggcgcatgcctgtaatcccagctactcgggaggctgaggcaggacgaatcgcttgatacctgggacgtatggaggttgtggttgagccaatcgatcgctaccattgcgctccaggctgggcgaacaatgagcagaagactcctcatctctagaaacgtaagaaaggagacagattttactctgtcatccaggccgatgtatagttgaccgtaatcataatgcatgctttggattcatgggctcaattgatgctcctgcctcggtccccctaacgtgctgggaattataggcttgtgccatctcactgagctaattttatgctttatatgagtctgcattggtgaagcgtgtttcacaatataataatactgtggtaacatcctgatgaatatatttcatgtacattctagttacacagcagtaatagattcctagtggtatattgccaggtcaaaggggtgtgtgcatttctaactttaatagagcctgtgttacttgccctccaatacattcctagtctttaactctagggcatccttaaaat

SEQ ID NO: 515442 - DNA, 777 bp, Homo sapiens
ggatggcggcgccctgtgagggacaagcgtttgccgtaggggttgaaacgaatggggtgcagtagttcgctccccagtaagggaccccgccagaaaatccggcagcatgatagatgaggggatcgccccggaagagggaggcgtggtacgctgaaggacacgtgtgccacgatcccagtcagtttaatggatcactccccaagcggaacaagctgtcgattggaatctatgaatggcaaagaagcctgcttatagacgagagtggaacacatttacttcttggtaaatgggcgggtcaagtcctttgagctgtctccaacgtcgtctgtgcaaaatatggctggggtcacaacgtggcagtgtgatatgctcaagtgctctaggctgtcaagcttttctctgtgccagtttagcagccaggctgtttgagctatgtgacagactataagcaacgagtgtgctgagctgaacgaacagcctcgtgtactgccagtgacgaagttctgttgtctggccagagcagaccatccgccatgaccggtttgggatgtagctcccgtggcatgagcgctgcatattcttgtaaatgaattccgagatcgcaggtcagaggcttggtcactatggacctccggcttccttcccgtaaggcggaggacttgaacaactagtgtgcttgagcagaagacaagatcagtcttatcctacacgttgcttgaatcatgaacttgatcaccgaacctgatgagaggaagagtagaagtcacatgaggctca

SEQ ID NO: 515443 - DNA, 327 bp, Homo sapiens
tgactataaacactagactcactgaccgctggagctaccagactacatatctcacacggtcatcatcctacatccggagagagcagatgtctagaacaacctcataagtcgatgctcataactgtagctgccacaagctggagtccatagacaacttctaggtggaggcgagagccaggcatggcaacaaaattccaagttcagggtctccaatgcagcttcctcagcaagccagaggaagggcttttcaaagtagtagtaacttttggcagaaatgtcgtagtactgaagattcttctttcggtggacgacaatggatatcgcctt

SEQ ID NO: 515444 - DNA, 387 bp, Homo sapiens
ttttttttgaaaagtggagtcttgcctgtcgcccaggctggagtgcaatggcgcaatgttggctcactacaacctccatctcccgggttgaagcgactcccccgcctcagcctcccgagcagctgggaccacaagcgcccgccaccatacccggccaacccttgcattttcagtagagatggggcttccccatcccggccacgggtactcaaactcctaaccccatgatccacccgcctcggccctccaaagtgccgggatcacaggcgcgacgaccgcgcacggcctacttctaaatttttgaagaaacaaattgaaaaagattatacaaataaatggaaagatgtctcatgttcacgaactgaaagaatattgttaaaatgtcca

SEQ ID NO: 515445 - DNA, 336 bp, Homo sapiens
ctaacgaccaagagggttttcgactgctagagccgagcgaagaattggcctaaattcaagggaccttgttcctcaaagctcctcctcggcagtgatcctaacagttaggttgacaaatggttaaagggggaaaaggccaagttcctcccagataaaccccgtaaaggataccaaaaggaccaggtgagactccgagagccccggtcatcctcctaaaccagagcagcagcagcagagatgataaccatggttccagatggggaaaatgaggcacgttagtgttccgcgatttttaaggcaaaggtcctaatttgatattagagaatatgggatgga

SEQ ID NO: 515446 - DNA, 344 bp, Homo sapiens
gtcaccatgcccggcctttaaaattttttttttagagacagggtctcaccagcgctgaccaacatggtgaaaccccgtgtctactatacaaagaggcaggagaattgcttgaacccaggagacggaggctgcagtgagctgagatcgcgccattgcactctagcatgagcatcaagagcgatactcggccttaaatcatcacccttgggcccctccccacgctctttacaggtgtccaactatgcttccttccttcatatacttattctataagcgctcttgcatctctcctccctgttcctccctcgtagacacactcttacttcttcacccttggctcccct

SEQ ID NO: 515447 - DNA, 1347 bp, Homo sapiens
gccctcctaagagaaaggagaggcacaaagcggagggcagggaacagaacgacaaagagttaccgtatcaaccgtcagtagtgctgttcttcatattaacagcctttttagtataacaagtttttgtgtcccctctcctactagggcgcatgtttttcctcacacaatgggttctcctcttttatatgagttgtgtctccgccatttctctctgctcctctatatgtttgtggtgctcctcctcgtcgcctccagtgtctcaccatggaccactgctcttgggggcacacccacttgtgcatatagtgggggtgccacattttatgtcgtggaatagcttcccccccgccggggtgttgggaattgtatcggtggtgtttagaccgtcgtcccgccggggaattccctcggtagtccccgcggcccaattgtggggtccaggtgcctgttctataggccttattttccctttattgtcgcccacagtctcttgggggccccatttgggcacattgtgtgccccaggcccatagtacccctctgttgaaacccaagttttgggatcccccctccccgggttggccaattgggaaatgggctcccatcttgccagtacgcccaggtaatattcgttggcacctgttgggcgggcccccctagcgaaccacccagtgggtacacaagggggtccagaagtatacccccggccgctttggtgttcccggtctcattgctgtatgggaggaatctcccaaatattgggtccataattgcgcggaagacccttggccccttggggccctctccaccggtccatgatgggctcttcttccgtggcgtgcgccccccctgagggccccctggtgagaataccttctttttctccgaatgggagtctccgcgctataaagagaaatattctctccggtatatgggttcttcttccgatcgcccatggacacagcaccctcacgcacgcccgtgaccacgagtattttcacagtgagaagctgagccacaagtccaaagtggccccgggagagtgtttggtgctgtgcacggacccaaagggtccaatcccccaaatttgtcccctacctgagttgctggcactcccacacactcactgccacggacacttggtgctccacgaggcttgagaccccagttccgaggccctgagatgtaacttctggggaggcttatagtttgaagaaagagaaacctcctcacgcccacggtggaaaggtggcgtccctagacctccctttgtatgagaaacggcttttttgtaaaagggatcccgcccccctcctcggtttttttttccattaaagtttagaaaga

SEQ ID NO: 515448 - DNA, 439 bp, Homo sapiens
atacagggaatagagggaaaataaataccatacaatacatgtgaaagtgcctggaatgtggcatgaacatatggtaactatatatagattataccttactatgttgtatttgttcatatccacaaaaatttcttaggcaaaacaaacatagactttatgagccttaaatggactttgagcaacttagcttattgagagtcgccatgggaatccatggcaaatccacagcaaactggatatttcaggtctcatgtcttagcagcctgactacatccaccttctagttgcagcatctactccctctttaggtgacatttatcacttaaggacaatgatactacgctcatcttcactgaagcacttcctatgtgccagccatattctacatgcttcacatttggttcgttcgactctttcacccacctgctgaggtagcact

SEQ ID NO: 515449 - DNA, 244 bp, Homo sapiens
  misc_feature (4)..(5): n is a, c, g, or t
  misc_feature (65)..(65): n is a, c, g, or t
  misc_feature (67)..(67): n is a, c, g, or t
  misc_feature (128)..(128): n is a, c, g, or t
cccnncaggagccctgctcccttgtggcacaggccaggcgcagatatcgtagtgcatgtcagccnangggagtgcctgtccgtgtgccccatccctccctcggctttactcctgcccagtgactgtgnacactgtccgtgttgccttcttgaacagcgattccccccaaccccttcacaaaggtcttgtacaaccagctgcccattttgtgaaatttttatgtagaataaacatttgtatctgt

SEQ ID NO: 515450 - DNA, 285 bp, Homo sapiens
cccccccgtttttttaaaaaagggggggggccccccctttgggggggggcccaattttttttctaacccccccccccccccggggggggggggggggttttttttaattttttttggggcccgggggggtttttttttcccccccccccccggggcccccccccccctttttttttgagggggggggggttgggggttttcccccccccgggggggggttttttttttttttccccctttttttttttttggggggggaaaaaaaaaaaaaattcccctttttta

SEQ ID NO: 515451 - DNA, 485 bp, Homo sapiens
gcatatataaaaatgggtaagctggtcagttttatgttataaatattttacctcaataaaaacaaattgaacttaaaaattcactgaagaagccaatatggaaaaaggactaaatgttaaaaaaaaaaaaaagccaacttttttttaaaccaagagataagtacttagctgcaagcccagggcctcggtggaggacaaccattatgagtcctagtaaaagacacccagtttaaagaacactgtcaggcaagctaccatgtagtcctccttgactccatgctaagctcttaaagactccccagtaatcacgaggggtcacatttgggtccagcttggcccagtgctgtcatacataatagatgaatgaaaggtcccagaaacctgttctgtgggggaaggttaactttggtcccaggctacgggggtaaatttgcttgacaaattgcagagtctctctgtctctgtagaccaatgccaaagaatgg

SEQ ID NO: 515452 - DNA, 562 bp, Homo sapiens
gatctagaggtccccggcggtgggggaagagggcctcttctcggtggcagacgggccagcttctcatggtaatctctcagggcagatcgcagaaggactcaagttatctcaggactcttacgagtactaatcccattctgatcattggttcttagctcccaaaggcccacctcctaataccatcatatggggaggcaggataccagcatatgtatgggggggtatgcaaacattcagttcataaagtctaacctctgaatacccaaaatgcaggtcgtactaacatgtcaaagggaaaagacaacacaccaaaagagaaagatatcagataggagtattatatccagaacatagaaagaacatttataactcaaaaacacaagccagttaaaaaaggaacatttaagaggggatagacttttctccaaaaaaacactatagaaaaggccaataagcacgtgaagagatgcttaatatgatcatccaggagggaaatcatgaaatcaaagcgagggtggacaggcagtgcacaccctcgaggatggctatactcacacaacaa

SEQ ID NO: 515453 - DNA, 360 bp, Homo sapiens
aacgggaacccattttttgccatgttggccggggtggtttcaaactcctggccccaaatgatccccccccgtcggccccccaaagtattgggattataggtgtgaacccctgtgccgggccagggaacccttttttaaaaaaaggggttggggcccaaccaaacccctttaaattcatttttacaaataatccccaaaagcaactttaggaagcaggccttttcatgcccatagtacgaataaggaaactggggcccaaaaaggttaagtaaaaaacccaaggtcctctaactcctaggggggatattttccttaggtattttaaaagaatttttttttctcccccccgggggctcccca

SEQ ID NO: 515454 - DNA, 832 bp, Homo sapiens
acactgctataaagaaatgcctgaggactgggtaatctttataacagaaacaagaggtttaattggctcatggttccatgggctgtacaggaagtatgactggggaggtctcagggagcttttactcatggcgaaaggcaaagccagagcaggtatcttcacatggggctagtagcaagaggcaaaagagacgaggggaggtgctacacgacttatttattgctaagccaaatctcatgagaagctctatcacgagacagcagtagggggaccagtgctaaatcattcatgagaaactacctgcgatggatccagatcgaatccttgtcaccaggccccatctcccacatcggggattacaattaagcatgagatatggtatggtggatacagaatctaaactgtatcatttactctaataagaagaaagaatagaataaaagaaaagaaaatacactgggagaatggacacttacttgttgttatcaattcatgatctattaagaacgtaggggttttagaacgcaggtaagggcaacacacatgggtgggcagggagtagtgggccaactcgggcccaccactgggattatctccaaagaaattttcatggacctcagccacatttactcattgacaggtggtccttgagtgccttggttgtcccagtgtcagaactgagtacgctgcacggcggaggtagagcctctgggctttaatatcccaaacagaggcggcttataagccacagaaaccttacttttccagtttggaaggctgggaagctccaagatccacgcggcgccctataaggggcagggaaggctggctc

SEQ ID NO: 515455 - DNA, 366 bp, Homo sapiens
tcgatctagaggatcccgagcgggttactttccttatgtttatcagaaacttttctttccctgtcccttaatgtcctatccgcttaaattgattttactcccagtaatttctattcagtgcagaccttcatcctggagagggagagctgcttagttctaagcatttatagaacctagattgctatagcaccctctgatcttgtacttacacactgaagtctacaaggcccctgcttattttggctattttccccagtttgtgttcctttcccttgggagcatccattggcaattttgcattggctctcaagttcaacataaaacctgtggtctctccttggttccctcctgcatacttgccgatac

SEQ ID NO: 515456 - DNA, 104 bp, Homo sapiens
tcaaggaacgccagacgtcttttttaacaaggtcaagatgtatccaataaagtgaaagcttctcgttaattaaacagaactggagaatgaacatgaacacaaag

SEQ ID NO: 515457 - DNA, 177 bp, Homo sapiens
aaatagaaaaataaaacaacatttcaacaaattctgccaatgttgatattaagacctacctcacagtccccacccaacactacaagtgaaagggtaaaaacaaaaaattaacttttagtctgacagccttaaattaactgcgggaaggttcattttgagaaaaacaaaatttgaggt

SEQ ID NO: 515458 - DNA, 840 bp, Homo sapiens
  misc_feature (209)..(209): n is a, c, g, or t
agcggggggctggtccaagaatcagactttgagaaccgactgctttgggccaatctccatgagagaaagtactcaaccgtctgagttgcgaagtgtatttcgaccatttagccagtaacttcaaccttcaattgctcggtcttgagagggcatgactctggcatcctaatatagattagcccctcttccaggcagatcacgacccacanatacagcccgcaagacctcatgtgcaggactacagatgaggacatggagacgtgcagtggcagataggataacagtacgaagaagtctcagaggaccaggatatacccatcaggagctaagcagctgtggcctgccgtagaacggggccggctcaggtgtatggtgggttgagctgcatcttagacttgaaagtgctaacaagctgaagatggctaaacggaagttacgaaatggtatctgtaagtgtcgagaattgacatgatctggctgcatcacatatgtcaggttgttacggtacttgtgataacgatgaacgacgtacagaagacttcacaagaaggtctcgtcccgtagtgaagggtcccttccggcttcactttagagtcgtctgcgacgtgtattaggttcatctcattggggtgtggcaagggaccagagaagccctggtttaaatgatgcaggggtatcctgatggcaaagtgagaatgcttgatagtgtctgaaggaagaaacacgaatgctgatgcatgccagggcagaatcttggacttggaaaatcaatgagagcacaagattgcttttagatggaacctgattcaaatttttaatttgtaaagatccttaggaaga

SEQ ID NO: 515459 - DNA, 180 bp, Homo sapiens
ccaacaccttaaataatgattctgctgcactagttcatttacagtggcgttatgataatgatacctagcttgtcaaatataatacagcatgctgcatcacgttctggtttcatggtaccattgaaactaaaatgtttctttctaatgtgtcactcctgactgccactccttaaactagcg

SEQ ID NO: 515460 - DNA, 363 bp, Homo sapiens
cctgggaagggggccccttctgtttggggccctgttaactgtgatttattgcccttgggcagtaatggggtccgggggccccccccgggcccgatggggcccttaaacgctttgtcatggtttttccgggccctgggttttaaaaggactcctccctgctgggggcctcccggggccccttggaagtttttttttggctattgaaccgggcacggcccccccgaatttcgggcagccctttttcccctcccccccccggggacccttaaaaggtttcgaccaaccaagaggttttttttttaaaaaaatttgtttccccccgaaatgatggaacccaattttttttttaaagggcaagattga

SEQ ID NO: 515461 - DNA, 92 bp, Homo sapiens
acggccgtgtattactgtgcgggagaagtagtaccagctgccgagaccaacaactggttcgacccctggggccagggaaccctggtcaccgt

SEQ ID NO: 515462 - DNA, 150 bp, Homo sapiens
gaggactcattcctatatgggagaggggcaactccccttgagattagcttggacctgtatcaaacggtgtacgcacgaaatatcttcaacgaagcagccgaatatctatcaaaatggaaccaagtagtataaatatacctattcatatta

SEQ ID NO: 515463 - DNA, 990 bp, Homo sapiens
gttgctgcgcgccgggggtcgctcctggtgtgtcttccgctccagcttcgacccacttccccttgtccagtcggggtgggcagctggagaagagctggcggagccatggatggacgaagtggtccgctttgccaagaagatggaccagatggtgcagagagaagaacgcggtggagcattggatttgctaaaggagcttaagaatattcctatgacccctggaattactggcagtccacaagaatcggaatgtcagttaatgctattcgcgagcagagtacagatgaggaagttgacagtcttgggctaaagtctctcagtcaaatccgtgaaaagaattattagatgggccatcaacgtgagaaagaccttgaggaaaagaagaaagaacctgcagattacatctgcagaacgagccctgtaggcaagagaagaaagtacttccagaaggcaactgtaagcaaccagagagaggatgagaccaagatgctcgagatacttatgttccatcctttcctcgggcaccaagcgcttctgattctgtgcggttgaagtgtagggagatgcttgctgccagctcttcgaacaggggatgactactttgcattggagcttgatgaggaagacttaggatcctccacttgggagaagctgtattatccaagaacctagcgagtgcgacctgcgactaccgaaaatagagtacgaagtcggcatatccagatcttaaagatgcagacatcccatgagggaccatgtccctgtgcgagattcccccgggcttattgtgtgaactacggcgggaatgcgcgtgctgcggctgagggacgttcgtaaatgtggccagcacgcacaagctacatggcgcgacaggcggccccccttgtttcctgtgggcatcgatccaaagctgctcccgccccctcttgggtacagaccctgtggttcactgcacgcctcgtgtcgaacgtacccgcagggtctctctcc

SEQ ID NO: 515464 - DNA, 290 bp, Homo sapiens
gtttacccttctcgagcgccttcctcttgtgagtctggtgtttagctcccgagtgatgagttcagcattcgagggtctctctcggtgtctatctttgtccttagccatgtttctccttttgttggatctttcttggtcaagaaatttatcctttgaccctagaatttagggctgcttttcctattctgtcttgatttctttctgaagactgaacacctacctactcgtatatctactatctctatatttatcattattttcatatctttccttccttgcggtaaaagctt

SEQ ID NO: 515465 - DNA, 1279 bp, Homo sapiens
tctgacgtgcccccagcctcccccagctctgcagggaggccctggtgccaggagaccttctcccagtttctccctatgggtgccgtgacctgtagggcagaagacatctgagtgtgtagttaagcacaggcagggacaccaggaccgtggccgtgatagacatttcctctcgcctcccctctggatttctcagagactgttctgcgatgaccagcagcaaggtaccggcgccagctgtgtgacctgggtccctcgatcgcgctggtgtcttgcaagctctgtctctggggagtacccagtggagcagatgacaatcatagcccagtgccaatgcttcttcttgtaactctgtgtcgctgaatagcagattattgtctgaggtcctccctttgaacttcgccaggcacacggactttatgacaatccgacgacagtgtagactgcgccaggatgcctgtgctggccctataagcagggtccgaggctacaggatgaatcgacgattgagttgccatggcttagctaggactgataattgactgctgagatgcatagtgaataaggctaccaagtttgatagacgaggtgctagtttgagccctgtcggacttggtgacccggcgtaccagctgccaacgctgtgtgtcagctccaggacgtggggctgcagaggccccaggcatgtgcagttgcaagagccgtggccgatatggagattcggcttccaaacgtgtaggaacgccagttgggaaacagctggaccagggtgcttggccggcagaccgatatggccgatcaactttgctcccccgtggggagagccagttgctggttttcacctattgggcagaacgatgaagcagcccataaaatgtctggcgcgcccaaggttgcaagggcgcacactctcggaacggagaccaccaagtggtgtggcccccagaactgttatgtgccatagacactgcttgagtgaccacgccctactgagcggcgaaacacagccattgacagacacccaccgggacacaacaacgaagttcccgtcagggaaaccaacaacaagaaatggggaggccccgccgcgtgacacacaccgcgagccgcaaaccccgcgcggtaactttctgaaccacgtggagcacaggacaacgagagcggagtaactgaaagtccctctgccagcgagcgatagtaagcgcaaaaccacagaacagggagtgctcctacgaaacgaaggccaccccccgagcgtgcgcagtgattgagaccgctacaa

SEQ ID NO: 515466 - DNA, 473 bp, Homo sapiens
ggggtcaactgtgttggccgcaaagtccttatcaactgacctctggatccacccaactgggcgtcccactgcgcgtgccttacatgatgaagtcaccgcacccggccacggtctttgcactcagagtcacattgtacgtcaactgctgtgagctcttctgatgcgtatatcctatctgggagcggggtatgttgactatggcacccatttaccgactgaggaaatggaggccctgacgcatcacgaggcctgcacaacccctcaagtggactggctatgaacctatactaaccacgcgatgctggtccaaccctctgcatgtaaaggagatgaaaggtaggctatcggctaaagagtacacagtttatagccataagggaaatgtagtctggataggacaggcaatatagactcgctacatctctactgaaggtgtgaagaagccctaacctggttgaggcactgattacccg

SEQ ID NO: 515467 - DNA, 321 bp, Homo sapiens
  misc_feature (30)..(30): n is a, c, g, or t
  misc_feature (44)..(46): n is a, c, g, or t
  misc_feature (73)..(73): n is a, c, g, or t
  misc_feature (140)..(141): n is a, c, g, or t
  misc_feature (198)..(198): n is a, c, g, or t
  misc_feature (309)..(309): n is a, c, g, or t
ttaaaatcatacaggaagctgatcaaatanaaaatgttgtgtannnttctttgagttgtatttgtataaatcngttattaatatgcatcccaaaattgtatcatattgcgaaaatgttgatagatcttgttatatgttannggtaataattgttatcctgttaaattattgtataccacagaaataatgaaatttctntgtcaattgcatcagtaatcatggctcttctaagtcttttgtcattcacagatgattattgttttacttggattcttttcaaaagtggtttgtaattggctacagcctaanatctgcttgttc

SEQ ID NO: 515468 - DNA, 1017 bp, Homo sapiens
  misc_feature (9)..(9): n is a, c, g, or t
  misc_feature (18)..(18): n is a, c, g, or t
  misc_feature (22)..(22): n is a, c, g, or t
  misc_feature (25)..(25): n is a, c, g, or t
  misc_feature (27)..(28): n is a, c, g, or t
  misc_feature (84)..(84): n is a, c, g, or t
  misc_feature (87)..(87): n is a, c, g, or t
  misc_feature (90)..(90): n is a, c, g, or t
  misc_feature (113)..(113): n is a, c, g, or t
  misc_feature (120)..(120): n is a, c, g, or t
  misc_feature (135)..(136): n is a, c, g, or t
  misc_feature (140)..(140): n is a, c, g, or t
  misc_feature (156)..(156): n is a, c, g, or t
  misc_feature (166)..(166): n is a, c, g, or t
  misc_feature (169)..(169): n is a, c, g, or t
  misc_feature (175)..(175): n is a, c, g, or t
  misc_feature (212)..(213): n is a, c, g, or t
  misc_feature (268)..(268): n is a, c, g, or t
  misc_feature (289)..(289): n is a, c, g, or t
  misc_feature (302)..(302): n is a, c, g, or t
  misc_feature (321)..(321): n is a, c, g, or t
  misc_feature (324)..(324): n is a, c, g, or t
  misc_feature (330)..(331): n is a, c, g, or t
  misc_feature (337)..(338): n is a, c, g, or t
  misc_feature (340)..(340): n is a, c, g, or t
  misc_feature (343)..(343): n is a, c, g, or t
  misc_feature (346)..(347): n is a, c, g, or t
  misc_feature (350)..(350): n is a, c, g, or t
  misc_feature (355)..(355): n is a, c, g, or t
  misc_feature (358)..(358): n is a, c, g, or t
  misc_feature (365)..(365): n is a, c, g, or t
  misc_feature (371)..(371): n is a, c, g, or t
  misc_feature (374)..(374): n is a, c, g, or t
  misc_feature (378)..(378): n is a, c, g, or t
  misc_feature (382)..(382): n is a, c, g, or t
  misc_feature (390)..(391): n is a, c, g, or t
  misc_feature (422)..(423): n is a, c, g, or t
  misc_feature (463)..(464): n is a, c, g, or t
  misc_feature (469)..(470): n is a, c, g, or t
  misc_feature (476)..(476): n is a, c, g, or t
  misc_feature (484)..(484): n is a, c, g, or t
  misc_feature (486)..(486): n is a, c, g, or t
  misc_feature (490)..(490): n is a, c, g, or t
  misc_feature (495)..(496): n is a, c, g, or t
  misc_feature (498)..(498): n is a, c, g, or t
  misc_feature (500)..(500): n is a, c, g, or t
  misc_feature (504)..(504): n is a, c, g, or t
  misc_feature (508)..(508): n is a, c, g, or t
  misc_feature (510)..(510): n is a, c, g, or t
  misc_feature (522)..(522): n is a, c, g, or t
  misc_feature (525)..(525): n is a, c, g, or t
  misc_feature (528)..(529): n is a, c, g, or t
  misc_feature (532)..(532): n is a, c, g, or t
  misc_feature (540)..(541): n is a, c, g, or t
  misc_feature (544)..(544): n is a, c, g, or t
  misc_feature (546)..(546): n is a, c, g, or t
  misc_feature (549)..(549): n is a, c, g, or t
  misc_feature (561)..(561): n is a, c, g, or t
  misc_feature (565)..(565): n is a, c, g, or t
  misc_feature (567)..(567): n is a, c, g, or t
  misc_feature (570)..(570): n is a, c, g, or t
  misc_feature (573)..(573): n is a, c, g, or t
  misc_feature (576)..(576): n is a, c, g, or t
  misc_feature (579)..(579): n is a, c, g, or t
  misc_feature (585)..(586): n is a, c, g, or t
  misc_feature (593)..(593): n is a, c, g, or t
  misc_feature (603)..(603): n is a, c, g, or t
  misc_feature (615)..(615): n is a, c, g, or t
  misc_feature (627)..(627): n is a, c, g, or t
  misc_feature (629)..(629): n is a, c, g, or t
  misc_feature (638)..(638): n is a, c, g, or t
  misc_feature (640)..(641): n is a, c, g, or t
  misc_feature (644)..(644): n is a, c, g, or t
  misc_feature (657)..(657): n is a, c, g, or t
  misc_feature (666)..(666): n is a, c, g, or t
  misc_feature (690)..(690): n is a, c, g, or t
  misc_feature (693)..(694): n is a, c, g, or t
  misc_feature (696)..(696): n is a, c, g, or t
  misc_feature (708)..(708): n is a, c, g, or t
  misc_feature (712)..(712): n is a, c, g, or t
  misc_feature (746)..(746): n is a, c, g, or t
  misc_feature (748)..(748): n is a, c, g, or t
  misc_feature (751)..(751): n is a, c, g, or t
  misc_feature (758)..(758): n is a, c, g, or t
  misc_feature (760)..(760): n is a, c, g, or t
  misc_feature (763)..(763): n is a, c, g, or t
  misc_feature (774)..(775): n is a, c, g, or t
  misc_feature (780)..(780): n is a, c, g, or t
  misc_feature (790)..(790): n is a, c, g, or t
  misc_feature (795)..(795): n is a, c, g, or t
  misc_feature (806)..(806): n is a, c, g, or t
  misc_feature (809)..(809): n is a, c, g, or t
  misc_feature (831)..(831): n is a, c, g, or t
  misc_feature (845)..(845): n is a, c, g, or t
  misc_feature (851)..(851): n is a, c, g, or t
  misc_feature (855)..(855): n is a, c, g, or t
  misc_feature (864)..(864): n is a, c, g, or t
  misc_feature (873)..(874): n is a, c, g, or t
  misc_feature (893)..(894): n is a, c, g, or t
  misc_feature (897)..(897): n is a, c, g, or t
  misc_feature (911)..(911): n is a, c, g, or t
  misc_feature (913)..(913): n is a, c, g, or t
  misc_feature (925)..(925): n is a, c, g, or t
  misc_feature (927)..(927): n is a, c, g, or t
  misc_feature (929)..(929): n is a, c, g, or t
  misc_feature (935)..(935): n is a, c, g, or t
  misc_feature (954)..(954): n is a, c, g, or t
  misc_feature (984)..(984): n is a, c, g, or t
tccgggggnacgctactntgtngcngnngtgagaggggaattgccggtgccgccgccaccgctgtctgtgcggggaggtgtggnggnagnatggggatgttagagaagatgtnggagatngagaaggagatgggnngganacagaagaagaagggnagtgagtatnatntggggntggtgaaagtaaggtggggaagtatgggggggaggtnntggaagggtggaaatgggggtgatggaaaggagaggggtttgatgtgatgaagtngggtgatgggggggggggggngattggatttggnggggtggggaagtggagantgnggagtnngagganntncanggnnagngaggnagngggctangagtgnagnagtntgangtgtatgnntggggtgattgaatacaaaggtgccaacatnnagctcctggaccttcctggaatcattgaaggcgcaccaannaaaannccgttnccgccagntnatcnctgtnncncncacntctnangtcatcatcatnatnctnnatnccaccaanntananttncatagttctctnctgnanaantanctntantctgtnntcatccncctcaacaancacaagcctaanatctacttcaancncaataaagntnntgncatctcctttaantctacattnactcttacccatttctcttaaaanctnntncagctcatcctncacnaatacaatatcttcaatgcagaagtgcttttccnanaanactgctncncgnacgagttcatnnatgtnatcgtgggcnaacgngtgtacatgcnctnctgtatgtttataacaaaatcnagcagatctccatngcagangtgnacgcctggngcgaaaagnnaacagtgtggtcatcagcnnggnatgaagctgaactngnactatctgctgnananctttgngagtacttgccctgacctnatctacacaaaaagagagacagaggcagantcacagaggcatcatctccggaaagggctcagt

SEQ ID NO: 515469 - DNA, 117 bp, Homo sapiens
gggtgagatcgctggagaagagaggagaggagagaggcagagagcggtctcaggctggtgggaggggcgcccacctacccacgccctcccctcccctgctgcaggggctctggagag

SEQ ID NO: 515470 - DNA, 396 bp, Homo sapiens
agcgtcaggcatgagcggcagagtacgtggggcggccttaatgcctcctctaacttcggtttgattccaagtgcatgtaggcatagggcagcaacaggtggtgtggcagcagcctttgcttctgactatctaaagtgtctttaggggaaggttagagcctgggacaataaaccagtgactatgtgataccagagccacatggaaaatacgacgagcagctgtaaaacacacacgtgttgagcactttctacacctaggcccttgatgtgtgatataacaacgcatcaccacattcaatcctcacaaccaatacctaggaggtagattactgcagaagggaaatgtaaacacacagagatgaagtcactttcccccctgatgctataaatgtatgaa

SEQ ID NO: 515471 - DNA, 344 bp, Homo sapiens
tgcacaatcacactgaactacagtttggtgtttcttaaaaagttagacacaaatttaccatagaaaccagcaaacattctactcccaggaacctacctaaagagaaataaaaacatatccacacagaaaaacgtatgtgaatgtgcacagcagcatgattcctaatggccaaaaattagacacgatccaaatgtccattaattggtgagtagattaacaaaatgtattttcatgcaatggagttcagcaatttaaaggaataaagtattggtacatgccacaacatggatgaacttccaaaacatttgctaagtgaaagaagcagatacaagagtacattattg

SEQ ID NO: 515472 - DNA, 575 bp, Homo sapiens
ccgtgctggctaagctggtccgaactcctgaccttgtaatctgctggccttggctcccaaagtgctggaattacaaggcacctgcccccatacccggctaatttttgtattttcagtggagatggagttttgctatgttggccagcctggtctcaaactcctcacctcaagcgatctgcccaacctcccaaagtgctaggattacaggcatgagccactgcgcccagcaaggtgtcctctatttttgacaaacatttagctaagtgaatataacttctatttaatcaatattttagttttagaatacatttcataccaaagtccagaacatatttttggtcaatcaaggttccaaagatatgattaaaacaattctgctgcctatgtcatctccaaataaatcctaccagccagtatttctagaatagtacctttaaaaggttactataagaaactctagtccaaatatacatttatttcctgagcaaaaaggcaaataagctagatattcagctgtcagaagaaataaaagcttcaaaaagttacttgctatcggtcaacttgtctggagtagg

SEQ ID NO: 515473 - DNA, 187 bp, Homo sapiens
cctttccggaacattaaaaccattgttgagtgcctggcaaataagttcatcaatgttgccaagggttcctcgaattcttatcccattaaaaaaaaggacaagttggagggtgtggccaagtccaaccgttaattttcccaggtggtgcccaaaaaacctttttgccctttggggcagtcccccccca

SEQ ID NO: 515474 - DNA, 422 bp, Homo sapiens
  misc_feature (181)..(181): n is a, c, g, or t
  misc_feature (288)..(288): n is a, c, g, or t
gctaccacagtgaaaccccatctctactcaaaatacaaaaagttagccgggcacggtggcgggcgcctgtagtcccagctacttgggaggctgaggcaggagaatggcgtgaacccgggaggcggacgttgcagtgagccgagatcacgccgctgcactccagcctgggcagcagagcgangagtctgtctcgaaaataaataaataagtaaataaataaataaataaataaatgtaaataaataaatagattaaaatggaaaactaaaaaaaaggaaaataattaanaaaataaataaataaaccgtagccggccagtcacgatggctcacgcctgtcaccccagcactttgggaggccggggcgggcagatccactgggggtcgccagttcgagaccagcctgacccacatggagaaatg

SEQ ID NO: 515475 - DNA, 458 bp, Homo sapiens
  misc_feature (120)..(120): n is a, c, g, or t
gacgccacagtcgtgccctcggttcgttgggtcccgccctcctttgggggagtccaagccagcaaggccccgttggtgcgttctaaaaggcttttctaccggggacccgtgctggtggcntggaaggcaaatacatccccccttagggggggggggggcgccccccccccctccaaataaaggaacaaaaggggggggggccgcagttttttgggcctgaggcctgggcggggggggtcccccaaaaggtccaggtgccgggttcggcataaagggggccccggggggaagacaggggcccccccagaaggtttttgggttttcacccccccccccccccccggggggataaaggggggggggtcccagggggggggttttccccccccccccagggggtcaggcccttttcccggcccccaataacccccccataaattttttcttgggccatcaga

SEQ ID NO: 515476 - DNA, 424 bp, Homo sapiens
  misc_feature (108)..(108): n is a, c, g, or t
  misc_feature (111)..(112): n is a, c, g, or t
  misc_feature (125)..(125): n is a, c, g, or t
  misc_feature (138)..(138): n is a, c, g, or t
  misc_feature (140)..(140): n is a, c, g, or t
aattcctctttcagtgaggctccgtttccctaaagatccctgtcctcagtgggtctccccacacacgggcctctcactcacccactgccccaccccatttgtgccctnttnntgggccttaaagntcagacactagantntgacaaggagccctccatgccccggtagagaccatcttctctcaccactccttttgagagaaacagccctccctacaattctgttgaataagtctcctcctctgcatcctgtttcacaagtgaaagcagtttaacagaagaatgccagctcataaacgtagaaatgcgagaatgaggaaatccccattctgtaacccttaatgaaataattaaatcaggcagtgtgcactagtgggtgtcaaacccttaggtgaaagtgtgcaggcgaacgggtgctaattgga

SEQ ID NO: 515477 - DNA, 975 bp, Homo sapiens
gatccacctcgcttctgaccactcactgctctgacccagagcacctcccattctccatcctctctagattgtgattaaggtactggagacaaaaccctgtgaggactggccgatgcgacgcccgagaacgctccgcatgtggtcagtcgtcgatgatagcggatggcggcagtgtggaacccggcgaggctgacaccgttcccaaccatggaagatgaggtgcctgctccacgtccgaccatatctcgatcgcctctcccattgagtgatctcccaaggtgcgtgggacctgatgtccataggtattgcttcacgtgacccccagtaagcccttaagcaagagggcctggttccctgtaatgaaccaaatctccaggaagggggccttgatccctccgccttgctgagagtgaaccctcgtctctcctcacccgtccatttctatttctgggaattggggcttagtttcgaacctttggcaaggctgtgcttactaatgcccaagccccgtttacccctctccctataggttacacaggggagaccagggctcggagaagactgctgcacacttccgaatcattctgcttgccaaataggtcatcttcaccagttgactgacccaagtttaggaccattggttatcgtgttgtttaaaaaaaacacgatataaaaaaactcttgttgaatattcttgttatgctaggcagcaggccaggtgcttcttcccctctacggctctgcgctgggggctatggtagtacagtttgtgttcctgtgcttttttctgcttcccctggcaaatgacagggcttactctcccattgggctccttcccttttttcaaagaaccagcagggcccctgggccacaggtgccgattggggcgcgagttctcgacttgggcgcgtccgggtggtccggggcctccttcggggcaggaactctcgtccgagacaggccggtggggggacg

SEQ ID NO: 515478 - DNA, 447 bp, Homo sapiens
  misc_feature (25)..(25): n is a, c, g, or t
  misc_feature (205)..(205): n is a, c, g, or t
  misc_feature (208)..(208): n is a, c, g, or t
  misc_feature (240)..(240): n is a, c, g, or t
  misc_feature (442)..(442): n is a, c, g, or t
ttttttaaaaccgcgtgtgctcctntttggcatgtttgaaatggtgaatttttgcccgtaagaactattcagaaccattgcatacagatatattttttttctcccggtttgtatttgtttttggtactttcggtctactcccctccccactctactttttattttactacctccctcctcatacatttaatccttaaaaggtttntanctttgggccgccttggtcattatgcctccagnccagggtactgggcccaacgcgggatagacactcttatcaagtctttcattgaatcaaaacggtatcgactggcttctgtcaaaagtgtctaccttttgcaactctctgctgggcccttttttatttgctgcttctctgtggtatcagactttgtgaaaacagtgttgctagaagtgtgtattctgaataagctctgaatgngtgca

SEQ ID NO: 515479 - DNA, 400 bp, Homo sapiens
  misc_feature (84)..(84): n is a, c, g, or t
  misc_feature (87)..(88): n is a, c, g, or t
  misc_feature (101)..(101): n is a, c, g, or t
  misc_feature (114)..(114): n is a, c, g, or t
  misc_feature (116)..(116): n is a, c, g, or t
tggttttttaaagattttgttctcagtgggttttctatatatgggttttttatttacttactgccccaccccatttgtgccctnttnntgggccttaaagntcagacactagantntgacaaggagccctccatgccccggtagagaccatcttctctcaccactccttttgagagaaacagccctccctacaattctgttgaataagtctcctcctctgcatcctgtttcacaagtgaaagcagtttaacagaagaatgccagctcataaacgtagaaatgcgagaatgaggaaatccccattctgtaacccttaatgaaataattaaatcaggcagtgtgcactagtgggtgtcaaacccttaggtgaaagtgtgcaggcgaacgggtgctaattgga

SEQ ID NO: 515480 - DNA, 158 bp, Homo sapiens
tcccaagatgaggaactggttgggtgataattaaataaactttttttttactagtaaacctatggtagaaggctagcttatataactaaagggtaagtctattcagttcttttggtcactacatttacaatgttactatgtgctatcaacaaaatata

SEQ ID NO: 515481 - DNA, 84 bp, Homo sapiens
gggagatggatcatcgagggcaggagctcaagaccagacggctaacatggtgaaacccggtttctaaaaaaaatacaaaaaaaa

SEQ ID NO: 515482 - DNA, 1245 bp, Homo sapiens
tctttatgattattattttttccaatgccagtgctgttcagccctcagaaggaatcttcagttcccatggaaataaacaatggactatataaaatcccacctttctggaaactggcagtctggacctcaggtgaaggctcaggtagaaatgtttctattcccaaggcagcccatctggtgtcccatcaagagatgtcagggttctccaagtgaggggagctggggcctggggatccctggcctcccaagtcactatggagcatctaagtctccataaggggcagggggggggggggaggggcaggtctaaaactcacagaagtcaagtcttaagaccggggggtgacccaaatggccataagaggtcaggcctgcggggcttggaacaccaggcgcggtgtcggcgcaatccggtcgcaaatacgtggaggtctatccgggcaaggcagaggccgggcccctcagagcagggggccaccatggttcccccaggggtctaaccaccatgtggggcgccaataatggacgctcttacacaaaggggggcgtcccacacctggtggactagttgcccatatacaaaaggccacgggggtatcgagataaagccagggggccccctcgaagaataggacctcaccaaggagggagatgagagcgcctggtaatgtggatctcccacaagagcgtagaagggacaacgcgaagtacctctgagcacccaagtgttggaaccccaatgtggcccagagacaaaagagagtttccagaggacacccgcgtatggtttcaattaggcagaccacaggttagaaccccaacttttgagcctgcgtgtaggggtgtcgctggaaccggggtgtgactctcaaagagctgtggggccgccatggtccagttgataaagatgttggtgtttaccaccgccaatatagggccccccctttgcccctggtgaaaacctcttagagacgtgtcacacaaggaagtggttgtttcatcccacgtgagagaataggggccaccataaatacgtgcccccctgttggatgtgtgatacaaaccatgctacgttgtagcaaattggtgataataattacctggaaggtatcggtagctccgcaagtagttgtgtgcacacgctctagagagaagaaccccccacagaggtatactgcaaagagatcccaattctccggtgaaacgaaggggtgggagttagttcccacgaaggatgtccgcacc

SEQ ID NO: 515483 - DNA, 164 bp, Homo sapiens
gtttttcttcgatgcttctttggcaaagcagttgtcacacggcgcggctcggtccgcgtgctgcccctgcctagggaggtgccagccagggggggcagcccctttccccatcagcctcagcacagccacgctgttcactagacagtggagaagtttctctagtt

SEQ ID NO: 515484 - DNA, 210 bp, Homo sapiens
ccctcctgcttactgtgatggaggaaggaattgcaccccagaacacatagcaggagtgcccaaggaggaggaagaggggctgagaaccatcactggcccgtgctttgccaacttctcattgtattggcctctgaaagactgcaggtgtagcaagcaggggatatatatcaagcaactgcaagtattatctcgcgaaagtcaacgatgggt

SEQ ID NO: 515485 - DNA, 731 bp, Homo sapiens
gaatggcgtccgcggccggtgtcggagcatggatggacccccagagctgttttatgacgagacagaatcccgtcaaatacgttcgcaagtgaggggagcctgaatactgcggggcgtccgggggtcgggaagcggcaagtagccctgtatgctggcgttgcccggaaaggccgtagaatatggagggtgcgggaaggtgaagtgacccgggtgggtgccgattatcttgtctctggtaaatcaactttaagttgccgacctctctgtggcctcggtacctcagctgtagagctcacggatgattgatatccagaccaggatggctgggcgagcatatggagcttctattatcttgccagagaataagccctgtatacctgctggatatttggctgtggcactgggctgaagtggaagttatctgtcagcatgaagggcactatatgggtgggcctggataatcagccctgccaatgcaggatgagagctgtggaccgagaagatagacgggagactgctgctgggggatatgggccagggcatcccatatcaagccaggcacatattgatgggtagcatcaggcattctgcttgtgcaatgagtctgtaatgctaacaaggacgtctgaaaccatgccagcggctgtacaggttaagcgtctctaaacaggcctcggccgggataccagcggctgagtgacctgagagcaagaatgagtttaaaacggcaa

SEQ ID NO: 515486 - DNA, 341 bp, Homo sapiens
  misc_feature (64)..(64): n is a, c, g, or t
ccgagatcacgcaagtggtcgcgatcgcggtgaagatgaaggcgaccaaggccgatttcgacgnccacggttgcgctgcatccgaccgcggccgaggaactcgtgacgatgcgcaccccgacggcgcgccacgtgcggcaggcggcggagtagggcggcctcgttccttaacgccgggttggttcgtcgttgggtgccaagggcgccgccttgtgcatcgagacgaaagtccgtcccatcgtgacgttcttctgggcgcggacctgcgaattgtcgtaggtccagcactcgccggaatcgtcgagaaagacgacccacagcaggttgaactccgctccgta

SEQ ID NO: 515487 - DNA, 210 bp, Homo sapiens
gctgttcccaggatggtgatccgtgtatatattgcatcttcctctggctctacagcgattaagaaggaacaacaagatgatgcttgatttcctagaaggccaacaaaataggatttgaggagaaagatattacagccaatcaagagaatcggacagtagactgagagaaaatgtacctcacaatagtcgaccagccacaggttaccccct

SEQ ID NO: 515488 - DNA, 487 bp, Homo sapiens
agccggagttgcggagccttaggctggagcgaagagaaccggtcgcggcaatcctagcgcgcagcagcagcagcagcagcagcacctgcatctgagcaggatccgagccggaaccagcgacgcaatgtaagcatgcccgtttccgtcttcgtgatagatcgtcagcgcgtaacactatcagcaggagccgcagttccacacgatggaaaaccaggcacgcacgataggcccggatcgagtctcctaccttggtttgaaagcagttgtgcgcaatgacacagcagcaaccaccgagcaccagcaaattgacctagccgagactaggaccaaatagacatccagggctgtacatgcactgcagaggaacgctatagcactccacatggccgagaatacgcaatcctgcccaggcgtattgaaggcctcgcgcaagtcactgtcgagccccggggcaatcacactacgatttggtctaaccacatgcatg

SEQ ID NO: 515489 - DNA, 543 bp, Homo sapiens
gggcccatatttgatctgtcaaggaaactgttggctgggaactcctgaggtcaggagttcgagaccagcctggccaacatagggaaaccccatctctactaaaaatacaaaattagctggccatggtggctggcgcatgtaatcccagctacttgggaggctgaggcaggagaatcgcttgaacctgggaggcagaggttgcagtgagccgagatcgcaccatgcactccagcctgggtgacagtgcaagactccgtctcaaaaaaaaaaaaaaaaaaaaaaaatttggggggggccggaccctaagaaaaggtttcctaaacccattctcttgttggcgcgcgcggcccaagtgagtggatcgccaccctggcccaaagcttggcccaaaggagaagccgggcgccatgggaaacggcgcgggtttcccccaaataaaaaacccgcgggggaacccggggctcctggaacaatcccaaggggggcccgagcgaatgcgggtcccaccacggggccagggagcgaataatacgggcgggggag

SEQ ID NO: 515490 - DNA, 329 bp, Homo sapiens
  misc_feature (77)..(77): n is a, c, g, or t
  misc_feature (132)..(133): n is a, c, g, or t
  misc_feature (136)..(136): n is a, c, g, or t
  misc_feature (164)..(164): n is a, c, g, or t
  misc_feature (260)..(260): n is a, c, g, or t
ggggcggaaaagggtaactctgctgggcgcatggggcgggaaagggtaactgtgctgggcgcatggggcggaaaagngtaactgtgctgggcgcatgggacgggaaagggtaactgtgctgggcgcatgggnnggnaaagagtaactgtgctgggcgcatgggncgggaaagggtaactgtgctgggcgcatgggacgggaaagggtaactgtgctgggcgcatgggacgggaaagggtaactgtgctgggcgcatgggncggaaaagagtaactgtgctgggcgcatggggcggaaaagggtaactgtgctgggcgcatggggtggag

SEQ ID NO: 515491 - DNA, 177 bp, Homo sapiens
actagaggtatcccccggggccacacggatgtggatcacttgaggataggaatttgagaccagcctggcttaagaaatgcgagaacttgtttctacaaaagattaaaaagactaaaaagtggcaaatttgtcgaacccataacccactgtaaccagtaaactctgagaggttgaggc

SEQ ID NO: 515492 - DNA, 915 bp, Homo sapiens
  misc_feature (159)..(159): n is a, c, g, or t
  misc_feature (167)..(169): n is a, c, g, or t
  misc_feature (173)..(173): n is a, c, g, or t
  misc_feature (183)..(183): n is a, c, g, or t
  misc_feature (192)..(192): n is a, c, g, or t
  misc_feature (201)..(201): n is a, c, g, or t
  misc_feature (223)..(223): n is a, c, g, or t
  misc_feature (226)..(226): n is a, c, g, or t
  misc_feature (230)..(230): n is a, c, g, or t
  misc_feature (235)..(235): n is a, c, g, or t
  misc_feature (286)..(286): n is a, c, g, or t
  misc_feature (312)..(312): n is a, c, g, or t
  misc_feature (355)..(355): n is a, c, g, or t
  misc_feature (374)..(374): n is a, c, g, or t
  misc_feature (404)..(404): n is a, c, g, or t
  misc_feature (414)..(414): n is a, c, g, or t
  misc_feature (421)..(422): n is a, c, g, or t
  misc_feature (428)..(428): n is a, c, g, or t
  misc_feature (442)..(442): n is a, c, g, or t
  misc_feature (445)..(445): n is a, c, g, or t
  misc_feature (458)..(459): n is a, c, g, or t
  misc_feature (479)..(479): n is a, c, g, or t
  misc_feature (915)..(915): n is a, c, g, or t
cctgctttctcatgcctatctccagtcaaagatgggatgcttaatccaactctggagagggaccaagtcttttctgcccacatctcacacaattgaggtgtctgaacaagcttggggagggtctataaggggtaggctcaaaaaaaaaaaaacccattngcagaggnnntttngccatcacangggctcttncaagccgantttcacaaagagagccggactngtnagtnggctnctgtctctttagagccaagaaaatagtaattaagtggcctagatataggangggcagaataagcacttactcccccngcttccaagatgaagaggagaagcaggccaaccctcaataatngcaagcctgaagagaagtnatcttagagaaagcagagaacagaagggcntggatagacntcttganntctatncagcccgtagtctngtnatctggagagtcnngttaaggtaacccagatttngacaaccgcttcctgtgagcaaagttttctcattacccctccatggggaagcaggtgaggccaggcttgttccgtgggaaattctctgctctccatcttcgtgcatgggcatggtatgtgcaagtgtcttaattcttgcccatttatgctcaaggtggcctgaaccactaggagtggcggggggggtggatgggtttattcatgtagtgaccgggggggtttaataaaagacctccctattggggtcaaccttctaagggtgaaaaacatggtgtgtaaaaaaaagaggggggaagatccggggcacacgaccggtttgtaaaggcaagggggaaacagagagggtaaggggaaggacgggtggagactccggtggaccgatcctttttttttgtgtttttttctctctctcttgctctttttttttcggaaaagn

SEQ ID NO: 515493 - DNA, 233 bp, Homo sapiens
ggcaaaaagggttttaaccgggggggggggggggaaaggccttttttttttttcccccttggtttccaaaaaaggtccccgttttttgggggttgggttcccgggggggggcccccgggggtttttttgtttttttccctccccctgggctttggggtccgggggggaacccgggcccccgggttccccttttggggggggaaaaccaaaaaaagggccccttttttttggga

SEQ ID NO: 515494 - DNA, 298 bp, Homo sapiens
  misc_feature (46)..(46): n is a, c, g, or t
cattgtgacgcacctactatgtgctgggtgctcccacacttgtggngttcacggggcctcaaaccatttaatcaccatgtgtaaactgttgtgggcgctgttccaggctaaggagactgaggcttagcgagcggacggcagcccctccacaccacgtggctcgtggttattagccaggctgtgtcatgtgacggcccccgagcagagtctgggcctctgactctgagtccactgatccatttataaccccaggcttgacctgcgactgtcggcgaggctgtctggggcctttatcaaa

SEQ ID NO: 515495 - DNA, 954 bp, Homo sapiens
  misc_feature (1)..(1): n is a, c, g, or t
ncgtatgagaagatccaccaatcttgctgtgtgtctagtgagactcgtagaagcccaccagtgtgccccttgggcccccctttttctcagggcgagttgttgttgcgaccctatactagcgggcgcccctttcttccgcccccagtgtattgtgtgacgcttccccttcccgggttttgggcccgtatacaaccactctctggaaatatcgtcccacggttccagcccccaattgtcacgcggctaatttccctctcgggccacggcacggcgcgtgtcctcaagggaaacccgggcgctcttgtcgtgtgcccacataccactactgtcggaacaattgcaccattctcatgcgggaactccccccggccgtttttgtcacccccacccccgccatgtaagacctcccagccgtcctccccccgggcatgttttggtcgtgcgcggctaacccctctgattaaatttggggcaagggcaacaccccaatgttcaagccatttttggggcaccgcttcccaaacaacctggggtgactttcgcccccgcatcacagaagttaggccttctccccctctccgggaaattacactcaatagcatcgcggataatcaccactgggccctagtgcatacccctcccttaaaagaacctggggagaacgtcaacatgcttctaagcccacgctgacgtggggagatccttcaaggattgttctcaacccagcaaacgagggctttgaaaatgtggtcccccttgcgggtcccaccacctgttccccccaaagactatcccacgtctcaaaaggacaaccatgagaactagcccggtatgcttacaagaggagaatgatggagtcgtgagctgctctctataatacccatattatatgattgaacaagccccttgcccttttacttttcaaaaaaaaattttcccctccccccaaaaaca

SEQ ID NO: 515496 - DNA, 270 bp, Homo sapiens
gtcggggatgcaggtatggcgtctgtctgcctccaggtcatggcatgtgcaggcgtgtgagctgggggccggcaggagctcgtacagtgcggcgtgatcgaacagagggttgcgcacctccatttccccggtcggggccagtgcccgggcactcgtacaccgtgaagtctccgtcctcattctcctcatccgaggaggccgtgtccagctccttgagtggcactatatgccgctccaggcacagcatctgttgccgttaatgctggacga

SEQ ID NO: 515497 - DNA, 332 bp, Homo sapiens
  misc_feature (315)..(315): n is a, c, g, or t
cagggtatagtgcagtggcgcaatctcggcccaccacagtctcgacctcatgggctcaagtgatcctcccacctcagcctcccaagtagctgggactacaggcatcctccaccatgcccagccaattttttgcatttttcatagagaaggggcttcaccatgctgcccagactggtctcgaactcctgggctcaagccatggaattgccttggcctcccaaagtgttaggatcacagccgcgagcccctggacccggcctatagtttttgtttcgctttgtttttgttttttgagatggagtctcaccctgtcanccagatgggagtgcagc

SEQ ID NO: 515498 - DNA, 349 bp, Homo sapiens
gttccttagtcttatttaaatgttttatttactggagatggatctgctccgtgcctgggctggagtgcagtggcacgatctcggctcactgcaacgtctgcctcccgggtttaagcaattctcccgcctcagcctcccgagtagctgggactacaggcacgcaccaccacgcccggctaatttttgtattttcagtagagacagggtttcaccatgttggccaggctggtctcaaactcctaacctcagatgatccacccgcctcggcctcccaaagtgttgggattacaggcgtgagccaccacgcccggcctgatttttgtatttttagtagagacaaagggaaaca

SEQ ID NO: 515499 - DNA, 317 bp, Homo sapiens
gaagtagcccgggaaggttggaaacccgcccccaggattgcccccccgtaggacttcaaaggccaaagggtaaccttctattgaagtacttcataaaaaaaaagcaatcccttaattcggatcatcaaaggtttttgaaaccaaggggcggaccccaacttctaattaaagggtttccttgggtcttcccaggggtttttggtttcccttcaaaaaggaccccctggccttcccaaacccctgggagagcacagccctgggtcctctgggccccttttaaaaacaatttccccaaaaatcttctaaaagaatttggg

SEQ ID NO: 515500 - DNA, 1588 bp, Homo sapiens
ctgcgcgcgagccccgtgtcccacggctgggcatgcagcggctggctgtgctgtgctgtgctgaactgctggatgtgtgtgtgctggagtggatgcccgctggctggctgtgcagcatgctacatgctgaacatggctggagacttgtggcttgacacctcggctggctgatcaccaatgcctgctgaactctgaattgacgcctaacggaccctcccagcgaactttccctcgacgatcggatcgttgatgcaacgcctgcaaactggtaggtgggtctggcctggggccggctatcatcactttacgcaaattcagttgctcaatgaccaaatctttcctactttctcaacgtctgcaatcgacatctacctgttacgacacgaagggataccacgttgacctttgaaacttgcgcatgccgacagtgacattacgcgacagacgagcagccacacggctccgtaggatatcaccccgtttcccctggggcaacacgccgttcttatgccgctcaagccttccccttttctccgacgcgacgattcgatggcgacattaattatctgcattgaccaacttttctaacttctgcagggcaaagccgcaacacccacactggcgtcttcgtcgcacgcacggtctttattacaaaccacaggggtcatggcttggcgcaccaatcctcattcctttgtgctaacccggaacaatcgcgaaacgccggttcatgggatcctttaccacacaccgttttgtttcttcgtctacgcccaaccgcaccttgacacaactttaaacttacggcattttaaccacacagcgcctttattacacttcctcacaattcgttaccacagcttacaagcacctctttggcgccattggatcgactcttttcgtgcaaagcgcaagcggtgggcgccaacatacccggttcgacctacattttcagcgctccgaagttatgcaatacacgccacctcccccagctagcaacaggaaaaggtttcctattaccgcctttattagtagggcacatttcatcgtctgctccatgcgaaaagacgctttggggctaattaaccaacttcgccgcttttccaacggtaatttccgtaaagcccacctatcaagttttattcctaccgaggacgtctggggagttagctggatatatcggggcagcgttactcgacgaccaacatggtgtcacattcttccgcctattacgatcagcgaaggtctcccctccatcatccgaggccttatccattataattaaagctggcgctatcttatcgtgtgacttgtccaagatggtggcgtgtgtccagctatattgtcgccatatcgaaagacccgtgttcatatccgagcgtgtagaaatgttgagccgggtcaacatcaaatcagcggttcgatgcacgatggctttctatttgtcacggctgtcttgcactgtgtattgtccttgtccattttcactgcaatctatttcacccgatcactgtatgatgtctagccccattttcttcgcaccacgttgtcatgccgacgaactatgtcgcactctccgctcatcacg

SEQ ID NO: 515501 - DNA, 127 bp, Homo sapiens
  misc_feature (31)..(31): n is a, c, g, or t
gagtgtaattcttaattattattaaataatncattgaatattgacaattttacacagtactcatcaaaacatcctagacccgggaaaagagattcattcagtagctttttcgcagagtacacaaaga

SEQ ID NO: 515502 - DNA, 1698 bp, Homo sapiens
gttctgcagccatgttcctgtgttaactcgttcttgaagtggcgtgcgtgcgtgcgtgcgtgcgtgggtgagtgctgtgtgtgtgcctgtgtgtgtgtgtgtgcctgtgtgaaattgttgcttgtgagtgccttgatcatgctgtgtgtgcctgtgtgtgtgctgtgctgtgctgtgctgtgctgtgctgtgctgtgcgtgctgtgctgtgctgtgttgtgatgtgctgtgctgtgtgtgctgtgttgtgaactggctcattgctgccatccgtagtgctggatgtcagtcatgctagccatcatgctgatgtgctgtgcttgctgcatgtaacaagcgcctggatgccccactgccaccacaactgcaacacagttacttccagacagtttgatgtgccggactgatgatgttgatgtgatgtgtcctgtgcgatagtatcctggagtgagcttcttttgctcgcatgcgttgggcattgggagttgattgacaattgtgatgtggtcagggctgccagcaggaaagcttcagttgagatcagttatctacagatagattgtggtttgttgagcagctgagcagcgctcttgagtacatttgaacaggcagcttgagcttgtgcttgcttttgtgcagattctagagcagcgagtttgtctggcaatggcagttgggtggtgctctgttgtagtttgtggagttatgcctgcacaagcgctacattgtggctacagtggcctatggggcgtatattagatggtggacatttacacagaggggtaaccgttttggattggtggagagcaagacactaggttctagaagacacatgtgttttgtggctcatggaggcaccatttacgttagctagagaagcaatgggtataccagaagcaagcctttggaagctctggacgtccaatgagggagctcccacgtatcttatggccactgcgtagtggttgagaactttccccctagtgtggttagcccagtatttgaacagtgaccgagtgccgagtgtgctttctctccgatcgctttgaaaaagttgtagagcgaatccgatccttactacaccgcgattgtaattctattcccggtaacgtgctttaacctttccagcggattgcaaatacgcgcttgtgggccaacacctagtgtgtagaatttttgtgaacaccacaacctttctcgtatctcgatggcgcttagctctgtgtgactcaccgagtgggcactttgtgtagcagggcgcaatagtgtgattacccctgattgggccccattatccagtaaacacttccttcttttgtgcagcataaacagtgactttaggcgcacccattggtcgaactaacatactccgcacagaggtgtggaagcagaaggttccaaaggtgaggatgtttggcctttgcatgtgccttcggggtaattttatatttcccttacgtagccatctatggaggagaccactacaacaacgcccggtgccccgcagtccacacaagatgccgatagacatatgacaaggaaggatcatcagttaggtaggcacactcatcgatcatgcatcacgcaggtggtacgtacaagctacatatgcgcgtgtgccaagcgcccaattcataagagggaggacgtcctgtgttataatcccacaggacagctgataaggaggcatcagagtag

SEQ ID NO: 515503 - DNA, 494 bp, Homo sapiens
cacgaggctggagtccggcgccgggggcggccgggacgccgaattgcgcagctgggtggcctgtttggtgcgccccctcaccgaccacctcgaggagctgggaaatccgacctggtatgcgcggttcgcggcgcaggcgatgaccgatcccgcctactacaacatcatcgtcaagggcgcgctcagctcgccgtcgctggtgcaggtcgtcgagggcatcaaccgctgcctgcccgacctgccggccgaggtgcacttcgaacgcaacgtcatggctcgaaacctgttgatgcacacctgcgccgaccgtgaacgtgcgctcgccgcgggcacgtcgacctcccatcgttcctggcgggccgcggcatccggcctcatcgacgcgatcgtgggcctgtggctggcgcccgtgacgccgtacgagtgaaggactgggcagatgaaagtgaccgtcgaccaagacctttgcgcatcgtcggggaactgcgtgatga

SEQ ID NO: 515504 - DNA, 88 bp, Homo sapiens
gccacatagccctcgtagtaacagccattctcatccaaaccccatgattgtgaggggtaggagtcaggtagttagtattaggaggggg

SEQ ID NO: 515505 - DNA, 140 bp, Homo sapiens
ggttgccggatgacgacacaggttcctccctgaatcagttgaacaaagctccactgcacaacaaggttatccgccaacgcgccgctcccttgagggtggtgcggggtcagtcgtcggatagtggtaaaacagttcaggtc

SEQ ID NO: 515506 - DNA, 1218 bp, Homo sapiens
cggaggctcatgggatcgggttggtcgaggctagactcgagaaggttcggtgtcgctggaacaggcaacgacaagggcggcatggcgggcgtgaggcctggaacacacgctgcgggcgcgcagagggcaaggcgcgagccaaggcggggcgcgacggtcgtagctagggcttgacgctgcggacgagcagtgcggcgtgccgcggtcggattcgaacatgcgactcgcctgagcgaggctgcgccgcgtgtgtggggacgggtacagagggacgtgcgtagcgagactccttgggccacctacgcgtaacacctggggcgccatgtgctgaacgtggcgaggcacaggctacgcacgggagtggaatagcgcacacctgcagtcgctgggcacagccagagcaagcaaatccattgggccttagccttacgtacagaccattgcgaagccgcagcgaaatagaaagcggccacacgcgcatgtgagcctcgtggtgcattggggaggttcgattggaatgactgcgaaacggaccttggagggatactggcgttgcagagggggaccgccgaacggacatactccggggattgcgtgtgtacggggcagcggagtacgcgagcggacgggcatgggcacgggttttcgggaggcaaaggcgtccccagggggatggccaaggcattgggaccctctggaaacgcagtcgaggggtgcaccaatggatggcggcacggccttgtggaccttgttggcgaaccgaagggacaccaagggaaacacgttctaagcacgtgccacaggttggccctgtggacaatagggcacggaatctccgcgagacattcgtggcaatggcgtaaattggactggggcgaaaatttcgggggaggtcccaaggggccacacccattttgccaaggttggaatacggccccgggacaaccgaacggttgtgtgtatcgcgtgggtatgcccaaacaatgaatgtggttggcgacagaacggctttgagaaccaaaatgcaaacagccatggagcgtgggcgccacatgacacaggagcgggccggaaggcaaaggccacttggcgttccccggaggccaaggggtgcccacaagggccgaccagtgaggaaggcccacaacgtgggacacatttatcgcctgagagttggccccaaagagcttgggccgcagagggcccacatgtggagac

SEQ ID NO: 515507 - DNA, 327 bp, Homo sapiens
ttgtctctgagccttggctcgctcatccataagatgggagtgatgaggctgggcgtggtcgtcacgcctgtaatcccagcactttgggaggccgaggcgggcagatcatgaggtcaggagatcgagaccatcctggctaacatggtgaaactccatctctactaaaaatacaaaaaatcggccgggcatggtggcgggcgcctgtagtcctagctactcgggagactgacacaggagaattgcttgaacccaggaggcggaggttgcagtgaccaagatcgcgccactgcactccagcctgggagacagagcgagatccgtctcaaa

SEQ ID NO: 515508 - DNA, 183 bp, Homo sapiens
gtggcggcgggctggagcaggtgtggtggcatgcactgtagtcccagctactcaggaggctgaggcaggaagatcacttgagctcaggagtttgatgccagcctaggcaagatggcaagatcctgtcttaacaaaaacaaaaacaaaacgagattggggaggtgggtgcccagtcccctgttt

SEQ ID NO: 515509 - DNA, 229 bp, Homo sapiens
gtcggcccgagtttgtttcatgggtgaggggtggatttttggcgtctttggtcagcgtatacagaagtaggcctggtgtgtgatgctgatggagatacatgtgggacctctttttcttgaatttccttttttcccccatagtagtcctcctggatcacaggggactgtggtggggattttgagagagcccaagaaataacactttgtctcctaggttctaagcaaaaag

SEQ ID NO: 515510 - DNA, 762 bp, Homo sapiens
ggccgggcaggcgtggtgctgctggagtggctggtaccccgcagcaggtgggctggtgtgcggttggctggcggcggctgtggccgggggctgccggctgctgctcggtgccgtgcgcggcggccgtgcgggcacgccatggacttcaacatgaagaaggctggctgtcggacgctgggcatcttcttcacccgggcggtgcagttcacggaggagaaagttttggccaggctgagaacgactgagcttgatgcccactttgataaccttctgtgccctgggcagacaggaccaagaactggacagagaagatcttgaggcagacagaggtgctgctgcagcccaaccaccagtgcccagagtggatggagttcctgtatgagaagctggacaggaatggtcccctcaagggtcaccaacggggagctgctggctcagtacagtggcagacgcggtcagtgagctgtgggccgaccatcgccctatggggaagacactgatcgaaggtggcagaagcgtgaacaagcaactggtgagccagcggcgacgggattgatccaactggcctcaatcagcttcctcaggacctttaggcaacttcctggaggcgggactggaagaccatctcgaaggacgacggcggctcctccaacaaccgggcgtctggacttggatgcctgcaaagcgagggtgaagaaggcaaaggctgagaagcaaaagccagaagggtgcctggactttcaggagactagaactcgtaaa

SEQ ID NO: 515511 - DNA, 161 bp, Homo sapiens
cttttccccccgaaaatttgtttttttacagaatccaggttttcccctccctcatcacgggggttgcttcctttgaaagtttaaaccacgggagggttttttttccttcctttttccttccccagtttcctttgtcccaattaaaaccaggatggagagca

SEQ ID NO: 515512 - DNA, 754 bp, Homo sapiens
ttcatttggggtttcggttcccccccttccccttccccgtggtgtctgggtgtgtgacattgcaccgcgcccctcgtgggtgtcgctgttgccaacccactggcggacaatccccagactggcgctgcccctcccatttgaactgtcctggtcagtgcccccaccccagacatttcccaccatgaccagaacaaatggggggcatgcgagtgaattataattcaggctgcacatattcagtcgacagtaacagtgacacaggccctatcaagctgctatatatctatgaatcacttgtggcattgggtgaccctgcattcagcgattatcaatcctggtctgacaggggcatttatacttgagctatgagtcttcccattgctccctagtgtccatctagtgtgtcttgagttcatctattgtgtaccaatgttgacctgaccctgtgatcaaggattgccaccggcatccaagtaacagagctccctgatattaataggttgattgcttgtcatctagtccatatactaacaaggacggtagtacacagattatgaccatacatacaaagcatgcattaaagcaagtgccagcattgacgagcgcgttagccattcgctgaagtgaggaccgagaagatcacccacatatccatcccgcccaaaatggccctatgttcccggtctcatacactacgggtatcatacagtggggtatcactgtaaacctataatggtgatccattgtgcaagtt

SEQ ID NO: 515513 - DNA, 672 bp, Homo sapiens
aggtctgctatacagctcagaactctcgtccggatcctgctcaaccatggtggctttatgggagagtcccttggccacggaagggtgaatgccacgctaatcttgcttttgagaaaaatctacgctgggaatggaagtgatatgtaacacccttcacgagaaagggcttatatgaggagagccacccacgagaagaaggaaggagaggaagaagatggagaatacacgaagagaccaccctcaaggaggaggagagaagaaaagcactgggaaactcacggaggtgacactttcccttcaactcctgtttcctaacccacaagggggagagaactggaggcctaagctgcctgctaactgggctttacactggtgacagacatttccgctgggatagggaagatagcacggagagaaaagtaaaactccatagaagtgtcattccacctgggttttgatattggcttagctgccacgtctcccacatttgtgaacctatgccaatccatctataatggaggatacccacatttcttcctaatattttataatctcccactcctgaaaacccctctttcaactaatactttgctgttgaaaagttgtgaaatgttaagtgttctgggaatttttttttttaaggaaaactatttaagtacttcctagtaggga

SEQ ID NO: 515514 - DNA, 207 bp, Homo sapiens
atctaatacatagagataggctacgatcctattactgctacgtgtctggttatcattcgttctcgaagttcgtatagcttagtcatagctatgtcctggataaaaagttgtagatgagataatatggaggtggggatcaatagagggggaaatagaatagatcagtactagcggcgggtaggcctaaatatctctacggaccaatag

SEQ ID NO: 515515 - DNA, 631 bp, Homo sapiens
tgtcgggcctcgcgggcggctgacggagtccgggatcgtgtgcctcgagctgttcgggctggagacgaggccaggtctccagctggtgtgtgtgactgtgcccaccagctgccgaagtgccaagacgccaggtccggtggacgtacaagctggacatgacatggtcctggtgttgacggtgaggacatgaggaggcgcgtcggcttcctgaacaccttaggctgtggggctgcggcgagaagcgggtctgttctttacttccgtccacggagtcgggcacactaatggctgccctctgggctcccatgaacccagtaacatgaagatggtgaaagctagaaggaaccaagacgctcatcatgtgccatagcattcaagagacacgcatcggaatcagctagcgcgccggcagcaagtccaaacccggcaagcaggtgctgaacctccgatcgttcatggccaaccccacatgctgggcgtgactggtttgaccacctagtcctaccacgatcatcccgagagtctgagctcctccagcgggggtgacgtcgtccgcagcgactccctcttcttctttttcatccttctgtctctttgtttctgaggctttcctgtcgtttccttttcctgg

SEQ ID NO: 515516 - DNA, 408 bp, Homo sapiens
attagatcctcttcctcctcccactctccaccctcaagtaagttccagtgtcttttgttcctgtctatgtgtctatgtgttctcattatttagctcccacttacaaaagagaacatgcagtttgcttttctgttcctgcattagtttactagggaactagcaggtaatgatctccagcataaaaacggactaatacaagtacacaagaatacaaagaaaagaacagcagacactggggcccacttgagggtagaggatggaaggaggatgtggatcaaaagcctacttatcaggtattacgcttattacctgggtattgaaataatctgtatactgaacccctgcaacacgcaatttacccatataacaaacctgcagacgtactcctgaaactaaaaattagaaaac

SEQ ID NO: 515517 - DNA, 354 bp, Homo sapiens
tactgccggctgcctaccacgtctgccggttgcctctcctattaggacttttcgctctcgaagcgaacggcttctcacactcatgaaaattattacttttactgctgtttgagaaatgaatgagcctacagcatataggatgtttcatgtgtgtgtatgcatcgcgggtagtccgcacgtcacgtcggggcccattccgtgataggccgactgaaagtgttgtgggagatcgaggcaaccggcagggcgtacccgagctcgatcttcgtagatcgtgagtccgtagcgtgtttccctgctgtgacaaagccctcggcgatccctgagcgggccaggaccctgggcagaccccct

SEQ ID NO: 515518 - DNA, 1089 bp, Homo sapiens
  misc_feature (44)..(44): n is a, c, g, or t
tccaggctcccgggtcttaaagggggcgggggctgggggcagtncatccaaaggtggctctccgaaagcttggaggtcaacctttgggggtgggcctcgccttactccgaggggccttcaccgagggcctcgttgggcctcgaattcggatcgtggatctcgtgcccgcgttggcctcgttcgagcgtgtccccaccagctccggccgtgggccttcttccagagtttgtgcctttgggtgtgcccccgaggtgtccaacagtgttccagggttccagcggcctccttgccggccaacaagtgtgccaccgaaagagagttcgggcgttctcacgtggggagagtggaaaccggtgtggcctcaacaaaggatatatctggagagcgggtggatcgccggctcctctctgtggcatgtgcacccacgagaacacagggccccgcgggccgcaggagaccctgtgacagcggtggggcgcaccggtgtggggccggccagagagatgtgccagaaggggctctcgcggctcaaagagcgtgtgggcccacgtgtcccaaccgtgtgcgcggaaccgtttggggccacccggttgtggagaaaaaacacacgcgtggcgtgtgggcgaagacaggggcgacaacagggtgtgacaaaggggaccaatccgtggggtgtggggggggcccaagagagggggcaggggcaaacaccaccggggagagcaccgggagaggggcgcggagacaccattgcggggacacatataagggcgacaccgggggaggccgtttgaggaggagaaaaacaaaagggccggggacccaaaagattcccagcgggtggcgtgtcgagacacaccacgaaggctggacgagcaccaacgccaatgggggccaagccagagaatgggggcgggcgcaccgaacaacgcggggatgtaacgctctgtgggcgagagacacaaagggggggaaacctccccggggcggagacaaaagcaccactatgaggtccctcggagggaggccatcaccaaatgatccgggaaagtcgccgggcaaaacacgagagggggaaaactcgacacc

SEQ ID NO: 515519 - DNA, 209 bp, Homo sapiens
ggactttctgtctgccttgtacttctagaaagagacacaaagaaatgtcagcatgtgcttgttctctgttttcccaggctgttgcttctgagtctcaaggtcattacttaggagccagggcttttcagatattgtcagctttgattttagctcctcctccaaccttcccaatttgtgtgtcaagaaaatgtaacataagtctacccccc

SEQ ID NO: 515520 - DNA, 923 bp, Homo sapiens
  misc_feature (44)..(44): n is a, c, g, or t
  misc_feature (923)..(923): n is a, c, g, or t
tccaggctcccgggtcttaaagggggcgggggctgggggcagtncatccaaaggtggctccgaagctaaggtacaccctgtggcgggtgggctctgcagggcaaaggggatggtaagcggcccgtcaggctggggggatctgtgaaaggcggaaggaagagccccagggggggcagccacagctcaaacgctgagagagagagcttccctgtggcccagtccccagagcttacaacacaggcagggccgggggcccaggcagaagcctgcactgccctcgggtggcctcctgggcagcgcgcggccttcccaagaggggccggaaccccagaaacgcgtggggggcccaccgggcatccttgcccagccccatgggccggggcctcgagaacaccgggcaacgcaccgcacaactccagggccttacaccagggcctcgtgagagccccgatccgggatcgggatctctgcccgacggggcctcgctccagtggtccccacaaagttccgccggggccttctccaagttggcctgggttgcccccaggtccaacatgtccacgcgtcagggcctctccggcaaaaggggccagaaaaatccggggtccactggcgaagggaacccggcgccaccaccgtctgggaggggggcgccggccctctgatggcccaaggaaaaagccccgggcggacggcccagcacctggggcacatgtgggcccccaggatgcccaaagcgccgcaaggggggcccgccccggccgaacgtggggccgtgcaaaacctcgtggggaagacaccggacgaatacgttggggcacaacagaacgcgacaccacaggcaggcgttccccaatacacgacaccacccgcccacctcctcacaaacgagatccaatctcaccgggccacgagactacacn

SEQ ID NO: 515521 - DNA, 885 bp, Homo sapiens
ctgttaacccccgccgggccacaggcagcgtgtggtgggacccctcgtggggacagctccaagggggaagataagcaggatcgcaccatggagacgaaagaagcgctgcagcaagggtgtacttcgaagattacctcccattttgaccaggagcagcttcaggaacatcttcaaccttatgcatgagcattgataatggagtatcctaatgatccgagttggtatcctcatattgtatgccaggagcaatactattcaattttaaaaaaccccaagagggcccatttatttgtcgtccaggggattccgccttttggattgaggtaatgtaattccctttgacacaattaaaagcggtgtcagggaaattatccccggctaatacggtagcacactttggcacccttttttcaaaaaagcctgcaaacaaagaaggactctaaggaaaggagaataacccaaaggtccgggacctaatcggatgatggatcccagcactatagggacacggttcttgttgggaaagggtaagtgcccaacaggattacttgagacacatcattgactcttccttaacttcgaagagaactcctcttgcgtaaggaggggaaattaaggacgggccagaacagattaggaggaaattacataaggctaagaagagagaacccccaatttttggaaggcttccttgagcagaaaagccaggcagaggaaattgacggagatcgaactcggaggacgacagaacagggtgggggcggagacgacacttagaagggacagaacggccacaggcaggatggaagcacgcagcgggaattgggcaacgcacgaagacgaacatgaagcaagggggcatttattcgagcaaggtaaaggaga

SEQ ID NO: 515522 - DNA, 332 bp, Homo sapiens
tgaaacggatctccgtctgccgcccagctggagtgcagtggtgcaatctcagctcactgcaagctctgcctcccaggttcacggcattctcctgcctcagcctcccaactggctgggactacaggcgcccgcaccatgtccagctatttttttgtatttttagtagagacagggtttcactgccttagccaggatggtctcgatctcctgaccttgtgatccacctatctcggcctcccaaagtgctgggattacaggcgtgacgactgcgccctccctcttctttttttcttccttgctttctttcttttccctcctcccttccgtcgacg

SEQ ID NO: 515523 - DNA, 902 bp, Homo sapiens
gagagaactagtctcgagttttttgttgtttttttcccgcaggtaaaaattatactttaattggagtcaccaggaaaaaaattcaatgggggttcaagttcaaagtggttcagaaactcataacgggccaaaaagggtggactcccgagccacaagcccacggagggaaggggcaccaaacagcgagaccaaaagtgagacaagcaaccccattataaaaagaatgaacgggcgggctttacacacactctcaccaagagcaattacgacattaccaccagcggatggaaagtgtctgggacaagagcgcacaattttcacgtgtggtctcaatattcgtgatatactctctttacacaatataccaggtttgtgataagggcgtgagacaattagcgcattatatgtcacacgacgacatactaaaatacaacaagggccccatacaaagagtgccacgtggtgctacacgagggggcagaacgaggcggcaagcaccactaacaccgcacaactaaaaacgacacacaataaacacacatgagaacgcgtgaaccatgtgaaccaagcggacaacacaacccacacggcaaagtgcacacgacccgaaccaagaggagcagacaaaaaagcgcacaacacctgaaccccgctccgagaacccaaacgtggggacgacaaaatacgcaagagggagaaccaaccaccagcatcaacagcaacacaaggagcggacaccaacaaaacaacagcgagggatcaaccacagcatcaccacacacaggatgcacgacaagaaataagaggaaagtcaggccccacaccctacacaacacaggaggggagacaattcataccaacatcgcgcagcaccctagcaacacacagcacccccccggtgc

SEQ ID NO: 515524 - DNA, 321 bp, Homo sapiens
aggggggttttttcccccccaaggggcccttttcccttttttttcggggggggaaagaatttttttttccccctttttgaccccttttaaatttccttagggaacttggggggggggtgggattcccaattttttttcccccccacacccaaaaaaggaaatttttttttggtccccccccctgggggggcccaaaaaaaattttttttttaattttttttttttcccccctttttttggtttttgaaaacggggcccggtttttttttttttttccccctttaacttttggttttccccttacccttggcctttttttta

SEQ ID NO: 515525 - DNA, 469 bp, Homo sapiens
gccaacaagactagcctccacactcagagtccacaagaccagtgctgggagacatacgttggtcaggtggttctctttacccttacaaagctctgtcatatccatctcatcacttaaccccagcaactctctgagctgtcactgcccctatgttatagaaaaaagaaaagttcagtgaggtttatgattttccaagcctcaaaattaaaaaagaaaaataatcagtgcaaagattcagccaatattgaccgcatgctgggtcctgtcctaaatgcttggtcctcataagagtcctattattgtcacccttataggcacagatgaggaaactgaggcacagtggtcaagtacttgcccaaggacacagatagtaaagagcagaatgaagtcctgaacccaggaatctgctccaaaatctgtacccttaaccatgttgtacagagaacctcaaccccaaggtattatccca

SEQ ID NO: 515526 - DNA, 192 bp, Homo sapiens
gtgtctagaggtcccagcaagtctacagtcgggacactctggttctctctagagagaggctaccaaatcctgtatagactactacggagatttctcaggaaatatatcagcacactagtcctatctgtgagaaaatctaccatggcaagatatccacctgtcacatgtttatagctaggtagagagttcttt

SEQ ID NO: 515527 - DNA, 783 bp, Homo sapiens
aaaagcatggagatttctcaaagaactaaaaatagaactgccatttgatccagcagtcccactcttgagtatatacacaaaaagaaatcattatatcaaaaaaatatttacagccaggcgcagtggctcatgcctataatcccagcactttgggaggctgaggcaggcggatcacctgaggtgaggagttcaagaccaacaacatggcaaaaccccatctctactaaaaatacaaaaaattagctgggcgtgatggtgcacacctgtaatcccagctactcgggaggctgaagcaggagaatcgcttgaacctaggcggcagaggttgcagtggaccaagatcacaccagtgcactccagcctgggtgacaagagtgaaactctgtctcaaaaaatatatatttattcacactcatatgtttatcgctccattattcacggtagcaaagatatggaatcagcctaagtgtccatcaacagaggactggataaataaaatggactactacttggccatacaaaataatgaacatctgagaaatatccatgcttttttccataaaggctgtcttttgcagcgaacatagatggaactggaggccattatcctagcgaaataactcagaaacagaaagtcaaataccacatgtgctcacttataagtgaaagctaaacaatgggttcacatgggcatacagagtgtaataagaaacactggagactccgaaaggtgggaaggtgggaagggaggcaaaggtgtgaaaaattacctattgaccacaa

SEQ ID NO: 515528 - DNA, 119 bp, Homo sapiens
gagctaggcacaaataggactagtcttaaactgggtgcttccaatagtcctggtcagcctaattctgtgaagagaaagaaactacctgggttaggtctagctgggttaggtctacctgg

SEQ ID NO: 515529 - DNA, 158 bp, Homo sapiens
tgagtcggaccggctgtcttcgataaatcaatcaggctgtcaaacatgcgggttgctcgggaagtgccgatacagagccgcttcggatacgccaacggacgccgccagtttcgctgtggtaatgcgctgacttccatcgctggattcaagcattagcg

SEQ ID NO: 515530 - DNA, 109 bp, Homo sapiens
acaacgcgctgactcccaggctcaagcaagtactctcacttcagccttctgagtagctgagactacagtgcgcacaccaccacgccatggctatccagaacggcgggaa

SEQ ID NO: 515531 - DNA, 1045 bp, Homo sapiens
ccaggcagacagcctgatgaccagcagtgccttcgacaactcccaagtaaaggacaagagggacaccatcaacgggcgcttccagaagatcaagagcatggcggcctcccggcgagccaagctgaatgaatcccatcgcctgcaccagttcttccgggacatggcatgcacgcaggcagtcctggcatccaaggcagcacagcacagctgctggtgggctccagcaggcactacggccgggcacctcaactggcgtgccagcacacctgcaggcacagcaagcacacagcggctggcaacgcagaactggctgcgcatgcagccggctcattccgggttgtcctggacacttggacaagacagctggtccgcatgacaaacacccatcggggaaagcaggcagatccagacagcggctggcgccagtcctgtcggagacactggcaacagagctgcaagccagctgggcagaatgcccaggggtcagcgcgctggaagagtccttggcaatcatcagcagttagtaggcaaatgtggaagcaggcaagaagcctggcatcaatgcagaacatgcacctggtggcccagcgaaggcatcctggcagagactcttgccgacatcccaggggcttacctgcacgaaccatggacagctctctgagaccagacctccaccgccccacaaggcattcgccgtgcaactgatgtcctggccccacggggcacaagacactccatacacgacgaagcatgcacccatgcgggcagcacatcctctctccacagcatgacgcggccagaacgcggacaagcgacagacccggaaagaaacaagaaaggagacccaacgaaagacacagggcaaacacatcggaatgcacaccccggacacgtaaactacgcgaacacatcgaggcacaggcgacagatggcgaaccaacacgcaacacaaggaacacggcgaacagacggaacacccgaagcatacggcacagacaccagcacacgggtacagacgcacacaacacacaagcagacagcaaag

SEQ ID NO: 515532 - DNA, 236 bp, Homo sapiens
ttggcaggtctttttttttgttcagacccttccccgggcccagacagggcagcgctgtcccgtctaaaaaaacctgtcaggaaaaggagctttggggttgggttcgtttcccttccccgtagcgtttcttttcccctccgaggtgatgattttttaggtcaggagggtcggaaccagtttgggtcggaaaaagcagtgtttcgtttttcagggatagatggtaagataaaattgca

SEQ ID NO: 515533 - DNA, 105 bp, Homo sapiens
tggatagaagtatttgaatattcgattagtgaggcatattatattgggtataagccgactatagaatgtggatacattataacccgtactcaagagtgacccgtg

SEQ ID NO: 515534 - DNA, 407 bp, Homo sapiens
  misc_feature (406)..(406): n is a, c, g, or t
aatatgttttgttaccataaaaatgtaatttggaagttttttgttttcaattaaaagttgaggtcccctccccctactgtgatgtcaaaaccccaacaatgggtcaccccccacaggacacccacccctgctcgcaccctgtaatccccagtcctttgggatggcgcaggtaggtggatcacttgagcccccaggagttcaagacccagccctgggcaacgtggcgaaaccctatctccacaaaaaacagaaaaattagctaggtgtggtggtgtgtgctagtagtcccagctacttggggggctgagtcaggaagatcgcttgagccagggaggtcgaggctgcagtgagctatgacagctccactgctctctagccttggccacatttttaggccctaattaant

SEQ ID NO: 515535 - DNA, 785 bp, Homo sapiens
agcggagttcgatcggtagcgggagcggagagcggaccccagtagagccctgcagcagccccaccggcgaacgaccaggcgctagttagcacatcaacagccccggcgaggagccagtcagctgccgcagaccggcgcccagtgcaaccatcgaccgtcagaccatgagcatgcgaggtccgagactccagactggccggaaaccggtcgagatgcacaggagaagtatactgacgcgcgataaacaggcgcagaacgcgatagtcacgggctgacgccgtcgccaaggtcaccgtctgtcgcccttgctggcttcgtcttcgccagcagctgcgtctagcttgccattccgatggcatctcatagcgcgagcgaaagtcgctccagcgagaacgaagttcctccacgcagtgaaccggagtaccgtcttctgcaacctaccgcgatacccactggcccagcgcttcagtcctcctactgacggcacgcctggtaacgaggcacggtcgacactgtctccacatctgctgcttgcacttcaccttgcagtggaccgctggtgaaccgatttgaactcgtgcgccgacagttctgtcttgcctgcatggctgcggccagcatgactgtcctgcctccagtctccacgggacgccggccctgtcttgcccaactactgcaacgaacgccttcttacacgaacggcagaacattctgaacccgtgttggccaaactggccacgtcctggctgcgagaaccatttgacgccggctgaattggtggacca

SEQ ID NO: 515536 - DNA, 107 bp, Homo sapiens
attccaaacagccccgagtgattttgcgaaaccccttttcccttcagcttgcttagagtttccacatttagaaagcttaaggcgggctacagaaaaggaaaaacagg

SEQ ID NO: 515537 - DNA, 271 bp, Homo sapiens
gaagagatcaatatcacttgaggagctttgaaaaatagattcctttgggaggccgaggtgggccaatcacaaggtcaggagattgagaccatcctggctaatgcagtaaaaccccgtctctacttaaaatacaaaaaattagctggccttggtggcaggcgcctgtagtcccagctacttgggaggctgaggcaggagaatggcgtgaacgtgggaggcagagcttgcagtgagccgagattgcgccgctgtactccagcctgggcaacag

SEQ ID NO: 515538 - DNA, 1468 bp, Homo sapiens
  misc_feature (186)..(186): n is a, c, g, or t
gtgcggttcactgtagccttagctctcggcctgggccctttttcctcctcggtgcgccggtgtcctcggagcgcggtccctgtattggtctcctgctcctagaggttgagaacaaaaacatgcacctggagtttccccggagccctctgcgtggttgagcttcggtggaatttcggggctcttggntgccagccgcgcttggcctggtagcaaccagaaaaccagtcctgctcgcctccgtggacatttcattaccatccagaagtgtctcccattgaaggcatccgtggttgtttttaagccacaaaaaagccacacccaagatcactgacacccaccctgacaagtgtccatgatgctgggccctgagggaggtgaaggctttgtggtcaagctccgtggcctgccctggtcctgctctgttgaggacgtgcagaaacttcctctctgactgcacgattcatgatggggccgcaggtgtccatttcatctacactagagagggcaggcagagtggtgaggcttttgttgaacttggatcagaagatgatgtaaaaatggccctgaaaaaagacagggaaagcatgggacaccggtacattgaggtgttcaagtcccacagaaccgagaatggattgggtgttgaagcacagtggtcccaacagtgccgacagggccaacgatggcttcgtgcggcttcgaggactcccatttggatgcacaaaggaagaaatgtgcagttcttctcagggtggaaattgtggcacaacgggatcaacattgcctgtggaccctgaaaggcaaagattacaggggaagcgtcgtgcagttagcctcgcaaggaagtaagctgagaaggctctagggaaacacaaggagaggataggggcaccaggtaccatttgcgggttgtttaagacgcagcaggcaggacagtaggtcataactcagatcccctctctgaagttcatgtcctggagcaagcgggcgagggcccctaatgaccggggccggggactgccagtagggtaccatggggcattcggtgaagccagggccagggccgtgaaagggaatgaggcctgtgcctacatgcacgagggctacgggggctacgaaggcaagttacaggtgccctcaggatggctacgggttcaacaaccggactggtcgggaggagacctaaataggtctcctcggaatggtctggacacctggattacgacgacagtatagtcaccggtgggcacgaccaagggcattggtccactgaggtctgcggcaaaggaccgagaagacatttaaattttcttcccttacaccggtgaagccatagggaggccaatgcaaagtgcggtgacacactgtggtgcccgaaaaacgtggattcaaaggaatacaataataattgaaaaggcagggggacacagagagggttgccactggacggagcaggagacaagagtaa

SEQ ID NO: 515539 - DNA, 176 bp, Homo sapiens
acattcgagctcggcaccccatcccccttcgtgtgtccatccccctttgtgtgtacatccccctttgtgtgtccatccccctttgggtgtccatccccctttgtgtgtccatcccccttgacgcgaggatcccccttcgcgtgtgcatcccccttcgtgggtccatcccccttcgc

SEQ ID NO: 515540 - DNA, 396 bp, Homo sapiens
gcatcccccggtctgcaggaattcggcaccaggcgagacttcgtttcaaaaaataaataaataaattaataaataaataaataaataaataaaacaggttgcagtgaagaagccggttaaaacccaccaagaccaagatggcgacgagagtgacctctggtcgtcctcactgctacactcccaccagcttcatgacagtttacaaatgccatggcaacgtcagtaagttaccctatgtggtctaaaaaggggaggcatgaataatccaccccttgtttagcatatcatcaagaaataatcataaaaatgggtaaccagccaccctcggggctgctctgtctatggaatggtcattctttcattcctctactgtcttaataaacttgcgttcacttt

SEQ ID NO: 515541 - DNA, 922 bp, Homo sapiens
atatgctttagctaaaattaattataaaataaaaacagtgaccagtctagccagcatggcaaaacccccatctctactaaaatacaaaaattagctgggtatgatggtgcacagttgtaattccagctactcaggaggctgaggcatgagaatcgcttgaacctgggaggcagagattgcagtgagcccagttcgtgtcacttcactccagcctgggcaacagagtgagaacatgtctcatcaaaaacaataaaaacagtgaatgggtgtaggtgtgatggaattcacttatacttgactaaaatggtttcgggaggtgtttctccaggtaaaattgtcgcctctctggtcccattacccaccttcaaacattgatatgcaaacagttttaaagaaatcttacagttctaaaaggcttgtgacgaagacaagcaggcagtccctctttcacatttgacagaagaaacttcctcttgtcaattctagtagttgaagaatttatatttccgaaatggtatgattataccgtactttttgatacatcaattatttatggacttcctactagaacgcagtggagaacttttggcccattttatactgccaccaataaagacccaaggtagtattggaaatattttctacgtcctgttggtccagtcaggaaacgtccagtatttttcaattaattaatgaactaggaggttccggaggcgggggaagaagacccacattgggccccataagggtgacggaaattcctttaagaacgttccctgtgtcaacctgccgaccgccgcattcaaaaaaaaatttccctgtgcaagcacgggcaactcttttcaacggtgtacacagccgcgagcaccgaagcggccacataatgataaagacaacgggtcgtatataccgcgagtagaca

SEQ ID NO: 515542 - DNA, 1604 bp, Homo sapiens
gccagcgccatatgttcccctccggctcccgctactttagcctcccgcagcctctcccattggcggccgcggccgccgcggcagctagccccgctcctcccttcgctcgctcccagctccgcccggcagggggcgctgcctgggccccagcgcctacgtctaccgccccagccagccctcccgcattggctgggcggggcgtgctcatccacagggcagggctgctagtgcggcgcccggcatctcttaccgccgcccattttcaacatcccagctcccataacaacactgctccgcccagccgcattgctagccgcgcacccgggacactgctgcgccaaagacaacacccaccatgcgcgcaccaggctccagtacactcatggggcaggcatacatagcaaacgcagtcaccagaccacatcatcagcaggcacatctcgcccagcaggggcatccccacagcatcccaacgtcgcagccacagccacatccagccaggcatgcaccggggtcacacacatgtattcatagcgcaggcattgcaagcatggggcatcaccaagcaaaacaacacaaggcattcattggcacaaagcaagtcacaatatggatcaatccgacattcttagcggcgcacaggatcaagctcaggcacttagggcactcaaattctcaaaacacaccaagcaatcccgaagatccacttagtgggccagcatcccacagcagggccaatataggggcaattacagggtagccttatatcccacacacgcatcggctaggcctcaagtaggttagccaatcaccaggggtttatactagcggccaaacttggccaaccggccaaacacactacaaaacttggggcctttggggccccaaccattttggcaatccagcattccctccacacacagggtggccctacaagcctttattgccaccaccaggggtgcaccacaggcaaaccggtccccctaaacaacaggcggttacaagcgctcgcgcgcatgtcgccatatggcaagcccccccgggccatcacattatcagtggcaaaggcacaccccaaaacttgttgcagccggccaatccaatttacggggcagccccttttagcggggcatcccagccatcgtgcgcaccacacattattatgggcacactatttcccccccattggggtaatacaaccaaaacacaaccaaatttgcaacaggcaaagccacggcaaatatatcaggaggacgacaactcgcaccaatacttacatggaagggtaacgcacgccccagggaacacacacacacatgggggtacgacaaaacgccaccaatatcccacccaaccatggggtccagggcacaacagggtgcaccacacacacgttgacaccacaacccccaaagcaggaccaaataggaccaggcacacctacaccacccacacaaggcgggccacaagcgtcctacacccgtgtacgtgcaaccacgaggaaaccgaggcgcgtcacggcacccaagagcctagagcaacacccgtggaccaccggaagtcaacacacactacagcactggaaacgagcacaacacaacaga

SEQ ID NO: 515543 - DNA, 293 bp, Homo sapiens
gattataaaggtaactcagaagctacaaagcccagaaggtaacgccccacttgcagactcaagcctgtccttgtctcgaggcattggcaggtatacccgatctgccatgtattccagatgggacatgtacacaaggaagtactcagccgctaaatccaatgttgacaagaaaacgaaggcgcaggtactcgcaactgttacacacacagttggtggtgacaagaacggtggtacccggatgatacagcttcgcacaatgcctagatattatcctactgaagatgtgcctcgac

SEQ ID NO: 515544 - DNA, 461 bp, Homo sapiens
aaaaaaaaaaataatttacttccttgggggattgttcctgacccctctatatgaagaatacctccaacccagtattctctattccattaccctgtttaatattttaatggcacttactgttatccttgaagtaattttattcattcattttggggtctattttattcaggataggtagtgtccagtgttcagaagagtgcctgggcacatcaaaagtgctgagtaaaggtcaattggggtaaatgaatacagtttggtggactcttgaacatggagaacctaggcccagacaattctaaggtaaaatatgtcaccctctgaaccaacccgacagctttcagctgatggacctaagaccagggccttagggttagccgggatgagcttatcaaagccatgggcccctgaccatttgcatcaatatctcctaggaactggcgtgcagggcaaatactggttgc

SEQ ID NO: 515545 - DNA, 225 bp, Homo sapiens
cttatacaatcagctctgtaccccgtcggtatgtcttacggctagacgatccaagatctggcaaaagcccttgatgatcttcatcggctcactgcgatttaagtccgggacttgcgcaaaggcgtggtgcgggatactgcgagtccaatgctgatatcaacggtggcgatggtacctttctgaccgtccaaggccggcagcaacttgctcatttgcaccccgtgc

SEQ ID NO: 515546 - DNA, 935 bp, Homo sapiens
tagggttcaccccagaacgtgcctcgaacctcgggaagaaactcctgtggtcgcccctgtgccgaccgcggcaaatctaaggccgaaaatttgggaacgggtcctgagatgtacggcccgggaacccaacagtgtgtcccggcatgataggtgccccccccgtggaaaaggctccccccaacggggacccagcttcatcgtggtaccccccagaaaacgttcgccgctggctttacccgcaaggtggcccccccccccccctccgactggggccggataaatactgccacgtcgtgctaacaaagatcaacagtatacgcaggacccccacgtctgcctgaaacgacattttctctcgccacattttagaacagccctatcgttcacacgtcaccaaggctccccgcctcaagaaaaagtcagtgacgatgggatgaacaaccgaatgtcccgaataaatgaaataccgaataaattaataactggtctattcctaaaaaaaaacaagggggggcaacacgccccgctctgctttctcacaacgggagtggtattcataaacatgtattatgtcagacattacaccattttgtagattcttcttcgaggagggagtccagagccccagagttccagtggactcccgcgaaatgtgggtcaaacaaaaaggtggactaccaccagaggctagtagaaaaaactaatctcaattccttgtttggtgttcaacaacacacagtctactacgcacccgatgcccagatccttcacgcgtccctccttgtcaagaccccgagtattccttgtatctcagcacggaagtcttgtgagatacgtatcccttttcgcggtacaactacttctttggctagcacatcttttctcatgcgggggtcccccccgataaaaatgctcttaaaaacacgaaaaaaaca

SEQ ID NO: 515547 - DNA, 874 bp, Homo sapiens
  misc_feature (31)..(31): n is a, c, g, or t
  misc_feature (33)..(33): n is a, c, g, or t
  misc_feature (35)..(35): n is a, c, g, or t
  misc_feature (39)..(39): n is a, c, g, or t
  misc_feature (41)..(44): n is a, c, g, or t
  misc_feature (51)..(51): n is a, c, g, or t
  misc_feature (56)..(57): n is a, c, g, or t
  misc_feature (60)..(60): n is a, c, g, or t
  misc_feature (211)..(211): n is a, c, g, or t
  misc_feature (213)..(213): n is a, c, g, or t
  misc_feature (236)..(236): n is a, c, g, or t
  misc_feature (293)..(293): n is a, c, g, or t
  misc_feature (298)..(298): n is a, c, g, or t
  misc_feature (300)..(300): n is a, c, g, or t
  misc_feature (332)..(332): n is a, c, g, or t
  misc_feature (409)..(409): n is a, c, g, or t
  misc_feature (426)..(427): n is a, c, g, or t
  misc_feature (430)..(430): n is a, c, g, or t
  misc_feature (458)..(458): n is a, c, g, or t
  misc_feature (480)..(480): n is a, c, g, or t
  misc_feature (492)..(493): n is a, c, g, or t
  misc_feature (501)..(501): n is a, c, g, or t
  misc_feature (510)..(510): n is a, c, g, or t
  misc_feature (513)..(513): n is a, c, g, or t
gaagagctgccgggacgctccccatcttctngnancgcntnnnnctggccngcggnnctnaaaggtggagtcgttgctgttgctgttgtgagcctgtggcagcggttctgtgggaccggaaccttaaagatagccgcaatggctgaaaatggtgataatgaaaagatggctgccctggaggccaaaatctgtcatcaaattgagtattatntntggcgacttcaatttgccacggnacaagtttctaaaggaacagataaaactggatgaaggctgggtacctttggagatantgatnanaattcaacaggttgaaccgtctaacaacagantttaatgtaattgtggaagcattgagcaaatccaaggcagaactcatggaaatcagtgaagataaaactaaaatcanaaggtctccaagcaaannccntacctgaagtgactgatgaggtttcacnttgtgtcaaacacagatctgtntatattaaaggnnttcccaantgatgcaanctntgatgacataaaagaatgcttagcacgataaggtcaagtactaatatcagatgagaagacctgctaagcattaagggatcaatttttgtggtgtttgatagcatgaatctgtagaaatttgtagagaccctggcagaagtacaaagaaagacctgtaataatttcaggggcgataatttggcgaaaaaaaaagaaaaaaaaaaaaatttgcggcgccgggcggaggttctaccttctttggccccgccaagtaggacatggcacttcaagaaccggcgagaagggcgcgtcccaaaaccgggagcggggtggaacatcgttgtttttgtacgctccccccccccctcgaaacaacaccaaa

SEQ ID NO: 515548 - DNA, 507 bp, Homo sapiens
tgcctgccttggcctcccaaagtgctgggattacaggcatgagccaccacacctggctctcactagcagccttatgacccagacattctcgagaaatggatgaatcatcgtgcaaacaggttcctcaggactccaaactgagaaggatatagagccttgcatcaggacccgagtttagggggaaacgattggtcaggagtggaacggaacaggggcatagccaaggttatctcctaaagacagaaggtatctcatatgtctttgttataacacttgaaacagcacatgaatattatactttaaaagtatatcctaattcagcatttctggtaccatttatctaaggcctcattgcaatagaaaagaaaaaacaggaagaagcgagagatgatgagtgcaggtaaaaaccacacgcttgagctctaggttattctaggtgtctgtctgggctccaagctgggatgggttcataaggatcgtgaggtctgtgcctgtcttaaagtatcc

SEQ ID NO: 515549 - DNA, 306 bp, Homo sapiens
tccataatgtgtgccaggctggtcttgactcctggctcaggcatcctctcagctcagcctcccaaagtgttgggattacagacatgagccaccatgcccctccttcctttacttcttttttttttttttttttttggaaaaagttttgctctgtcgccaggttggagtgcaggggtgtgtatcttgactcactggcaacctctgcctctgggtttcaagcatattctcttgtctcagcctcccaatatagctggaactcacaggcacacaccacctatgcccagttaaccttggttattttcagta

SEQ ID NO: 515550 - DNA, 172 bp, Homo sapiens
tccctattgctgcacgtctggccaccgcattgcctaccaggacctgctgtgtgacctgctgtggtctgacccttccagggacgtgcaggactggggcgcgaacgaccgtgacgtctcttttacctttggagccgaggtggtggccacgtacctccacaagcacgacttggac

SEQ ID NO: 515551 - DNA, 184 bp, Homo sapiens
  misc_feature (120)..(120): n is a, c, g, or t
cgctgagacgtgactcaggtgatgggaagtgtagaaagacctgagaaaacgagcctgtttcaggcaggaacatcgttccacaacgaatttaacccttgtccttgggaagcttaacaaaanaaaaaaaccttaaaccctgctgtccttttttttttctaattgtttttttaaaaaaattttaaaa

SEQ ID NO: 515552 - DNA, 834 bp, Homo sapiens
  misc_feature (10)..(10): n is a, c, g, or t
  misc_feature (94)..(94): n is a, c, g, or t
  misc_feature (151)..(151): n is a, c, g, or t
  misc_feature (153)..(154): n is a, c, g, or t
  misc_feature (173)..(173): n is a, c, g, or t
  misc_feature (199)..(199): n is a, c, g, or t
  misc_feature (221)..(222): n is a, c, g, or t
  misc_feature (413)..(413): n is a, c, g, or t
  misc_feature (479)..(479): n is a, c, g, or t
  misc_feature (515)..(515): n is a, c, g, or t
  misc_feature (537)..(537): n is a, c, g, or t
  misc_feature (586)..(586): n is a, c, g, or t
  misc_feature (601)..(602): n is a, c, g, or t
  misc_feature (627)..(627): n is a, c, g, or t
  misc_feature (704)..(705): n is a, c, g, or t
  misc_feature (752)..(752): n is a, c, g, or t
  misc_feature (759)..(759): n is a, c, g, or t
  misc_feature (762)..(762): n is a, c, g, or t
  misc_feature (805)..(805): n is a, c, g, or t
cttcccgggntccctcctcctccctggccgggccccctggtcttatcacgggggctggggccaggccgcccttcggttcgggtgggcccatggnccccagtccaacgccgggggactaggcccatcccaaagcgggaccttcgcctcagancnnggcgtggcccctgccagcngccaggccatggggctctctgatgtnaccctcattgggggtgtgggtnntggggtgatggtggtggcaggtgtggtggtgctgattcttgccttggtcctagcttggctctctacctacgtgccgacagcggtagccaccagctcctgggcgctattgtgtcagccggcgacacatccgtcctccccctggggcctgtgggccacctggtggcaggccaaggcaaccccgagccaactgntctcccccctccctcagagggttatgatgagttggctggagtggcgggtgaaggtcggggagactncactggggaggctggagctgggggtggtgttgagcncagccttgagcatctccttganatccaaggcctgcccaaaagacaagcaggtgcaggcagcagcagtacanaggcccccctgaganntgaggatagcacctgcctccctccnagcactggcctcatcactgtgcggctcaaattcctcaatgataccgaggagctggctgtggctaggccagaggatanngtgggtgccctgaagagcaaatacttccctggacaagaaagccagangaaactnaantaccagggccgcctgcaacaagacccagcccgcacactgcgtnctctgaacattaccgacaactgtgtgatt

SEQ ID NO: 515553 - DNA, 622 bp, Homo sapiens
  misc_feature (295)..(295): n is a, c, g, or t
  misc_feature (405)..(405): n is a, c, g, or t
  misc_feature (407)..(407): n is a, c, g, or t
  misc_feature (475)..(475): n is a, c, g, or t
  misc_feature (539)..(539): n is a, c, g, or t
actgcaatctgtgcttcccaactccctgatctaaagtgatccgccatcctctgcctcccaactcctgatctcaagtgatccgccatcctctgcctcccaactcctgatctcaagtgatccgccatcctctgcctcccaaactgctaggattacaggcgtgagccaccgctcccggcccaatttatgttataataaaaaaggatatgcatacatatgttttactttcatatgtatgcatggaacatttctagagtggcgtatcaaccttatagtagtgattgcctgtggaggcagncatgggagggggttttcactgtaaaccttgggatcgcgtttgaatatttcaccttgcgcatatgttacctgcccttccatgtcttcctgaggactctcacggtctgagtncntggcagtgcaccttaccaaagaatggaccagcaagaaccacactaaagcttatgcatcctaagtacangggctacccacttgaaatttaaacaaatatattcttttatttatcaggccaaatacttagaggnacaaaatatattcttttttctttttttttgagacagttttgtagtttcgctccagtctgggtgacagagcgagactccatctc

SEQ ID NO: 515554 - DNA, 2894 bp, Homo sapiens
ggccacgggctcccacgggttgcgaggccgccgaggtggcgggcggcggtcaggcagccgccggggcagccatgcgcggggaggcggtggcaggggcgggcaccgtccggaccgagggcgcgctggcggcctctgccggctgaggggcgcagcgcagcaccccgccacgctcgccgattcccctgcgccgtcgcgggtcgggcagccggatgaccgacccgaaagcctaggctttgggaatgagactgatggacacaaaagcgccatttatctagagctcaccatgtgccagagtcacacattatctcactgaatcttatctaaccctttcacagatgaggaacctgaagctcaaaaaatttaagaaacccacccaaggacccaaggctagaagataacattcggtacttctaatttattccccaaccttggaccattatatcatgaacttggcctaaccctactcaagccctgcattgaaagactagccttaaggaagaccccagaatcctcataaatatcctgcatttccccctcctcctccgaagactaaagactgtgaagtagtgctcttgaccgcagtgcataatacacttggctttgctttattaacatgctttttaaaatgatgttttcagggagccagcatttcacaccagaagaggagcccttaatttccttgggggccagctggcaggtgcagagcggggagaaaaataaaaggaaaggggatggaaaagggaaagagcggagagtaaccgaaggaaaaacatacattccattatcaagcttaattttaggtgtggcctctacttgagggctcttgccattctctatggaaacaggctaacaagacatttctaaatatcacaaggaagtggaatgtggcagaaaagcaccacctaagtaggtttcagatgagtaggattgtgatcctgatgccaaaaaatctggcggcatgaattacgggataaaacaaatgggcatatcatctgccaaactggatgtaaggtttaaacaagacgagagtgaaaacccactgagttcctcccttggaaatctgggaaaatcaggcaaagtgccagaagtcctaaaagggcaagcagtgctgaattttcacaggacagaagatggagatgaaaattacaggagtaccaggtaggcggatgctgcagatacagcaaatgcagatttcaacagggcatttgacaattcacatcttagatgcgaaagtgaaatcaatgctggatgatagcactgaggcttattaaagactagcccagaggtggctgatgaagaggagggaccagcagatgaggctgctaggggcctgcccaaacctcctgccctggccagccaattcagggtgccatcagtgacttggataagaatacagcagcagtcatggaagttgtggatgacctgaagcaggaagggttgccttatctactgcatgacaaactgagcagagactaaatctaacaagttgaaatttagcaggaactattaaagtcctgtggaagagtttaacaaaaaagcataggaaggccaggtacggtggctcacacctgtaatcccggcactttgggaggccgaggctggcggatcacttgaggtcaggagttccagaccagcctgtccaacatggccaaaccccgtctctactaaaaatacaaaaaaaaaaaaaaaaaattagccaggaatggtggcatccgcctgtaatcccagctgcctgggaggctgaagcacgataattgcttgaacccaggagacagaggctgcagggagttgagatcacaccactgcactctagcctgggcgacagagtaagactgtcaaataaagtaaaatttaatttaaaaatgcataggaataggataggaaattatttgaaataaaaatgataatctaaacgtcattactgtattaactataatctaagagttggtcatgtagaatgccaagaaacatcttagggtagaacccataaaacctcactgatgctaacaaagaagctagccccccatgccagtcaggctggatttcttagggtgacatttctggacacattttgcaaagacagaggtatccagtggtcagtgactaaactcataaggggacaagacatcgttctgctgcaacatgaagtaactagggctcatcagtatgaaggataaagatacagagggagaagaagggaaagtgtagacatttctgaaaagctaaagcaaataaacatacaccaaaaagaagtgaacctgactatatgatgtgggagtattcaaagcaactgcataattagtctttagaagaagaaactttttttttttcctctaggatactacaataaacaatagaagaggaaacttttttaagagatagggtcttgctcttgtccaggccagagtacagtgaaacactcataactaactacaacctcgaactcctgggctcaagcgatcctcccacttcagcctctcaagtagttaggaccacaggggcatgccaccacatccagctaatttttaaatttttttgtaaagataggggtctcactatgttgcccaggctggtctcaaactccttgcctcaagtgatcctcccacattggcctcccaaagtgctaggattacaaatatgggccaccaccacagccaaggaaacattttaattaacaaaatgtcaaatattgatttagtgtatgggaaccttagttaaatagcttggggaactattctttctgaattctggggagggacttttgtaccatataaaaatactaaaatccaaatgtcccacatagtatttattgcaatataatgtcaaataacatttaaaggctaattcttttctctgtgtcctttaagcttaaggaaaaataaaagcatattcct

SEQ ID NO: 515555 - DNA, 876 bp, Homo sapiens
  misc_feature (65)..(65): n is a, c, g, or t
  misc_feature (197)..(197): n is a, c, g, or t
  misc_feature (265)..(265): n is a, c, g, or t
  misc_feature (326)..(326): n is a, c, g, or t
  misc_feature (377)..(377): n is a, c, g, or t
  misc_feature (397)..(398): n is a, c, g, or t
  misc_feature (421)..(421): n is a, c, g, or t
  misc_feature (444)..(444): n is a, c, g, or t
  misc_feature (464)..(464): n is a, c, g, or t
  misc_feature (568)..(568): n is a, c, g, or t
  misc_feature (571)..(571): n is a, c, g, or t
  misc_feature (576)..(577): n is a, c, g, or t
gggtcctcttccgggcaaaatggcgatgggactaatgtgcggacgccgggagcttctgcgcttgntacagtccgggcgtcgggtccacagcgtcgcagggccctcgcaatggcttgggaaaccgctgaccacacggtcctattcccagtagccccgtgctgctgtcgccaaactacctcttccttgcgggttccggncccccgaagcctcagtacctctgctatctctttgtgcagaagtccaggttcaggcccctcctgtggtntgctgcaatccctcacccaagagtacctgaggtggttctggagagactgcagatgtagtcnaaatgtgcagagcaagcttcgtgaactggggctggggtcatacaccccagnggactgatccagaatttacnngaatttatgcatgtgatctgggnctacctgtggtggggggcaatgntgcatgtacagtctttgccnctgctgatttttcctctcatcgtgacgggcagcgagaggcagcaggatccacaattcactggccagagaatccagaagttttcccaggtcgaatcagaagaggncangttanncaggagacattatggcgtatacaagcggttctcggaaggatgctactttaccagaaacacttggtattaactctataacctctatttccctgtgatcaggccaatcttatttcttcttattggttgagaaaatggcacttctgggcagtgcgaaggggctggggtcaggctcagggtcggaccattattttacgagctggaatggggttgagtgtgagaggtgagttgctcgtagaagcaaggcggacgcaaagtcagggttggccatgcgatttgaggacacgctgctccgccacgtg

SEQ ID NO: 515556 - DNA, 512 bp, Homo sapiens
ctgtgacaaatcatgcgacagctcactgttgtaacttcactgtaaggcattctgcacgatcactgcgaacgccattcaccacaaccggctatgattgcaaccatgaaactctgccaactacgcgcgcacacattcaagccagccattagctacagcccatttagcaagtactacatatttgggcccccaatgcgtccaaaccaacccgcgcgccctctcgacacagacacgatatggcacacacataacctcgggagcacaaccggattcatacacacctacaccacaacaccgctggtcgtctgcaacaacgcttcacacccccctgacgtgagcaaattgtggctactctagcacgccaccgcaactataccgaaccatcttccattcgcttcacaacctctcacgctcaacgcaccatttgcgtagacgcaacaaatctttcagtgctgcccaaaacgagctccacatctccgcacactggcatctacacaccaacggccccccgctac

SEQ ID NO: 515557 - DNA, 680 bp, Homo sapiens
  misc_feature (267)..(267): n is a, c, g, or t
tttcagagttttattgtattgcacttttggagcagggggatgggtatacaataatctgtcatgtgagttgtgagaatcattagaggctgcagattcacaataattcctttagcacccgattagaacagtgtgcataataaccaatgccttaattaggaatgagttccaaagatacacattcagaatagctttgaatgcagtcaacacaagtgatgcagaatatatttttatatgatgtttacgtatgcttcagaattaaagcatgtntgtttataactctgagggaaatatgggaaatgtctcatacatgccacatacggggagattactcgagcggacggaaaagttgagctttttattctgggagaggatgcagattctagttttcacgtgacacactaagaagcccatggagatacccactgggcagagatacattttcactttaagagaagcccactgtatatagagcgtatttatcattagagactcgcccagtgaaaccaagacgtgggcttccaggtcctataaacaagagctgccaaagaactaggacagtcggtcatttatgcatggatgccaggaatatgggtggtccgtaagacatgcaagttaaaactgttcattacacaagcaaatggtttttcttaattttacggcaaccgcgggaagctttattt

SEQ ID NO: 515558 - DNA, 1341 bp, Homo sapiens
  misc_feature (21)..(21): n is a, c, g, or t
  misc_feature (50)..(50): n is a, c, g, or t
  misc_feature (103)..(103): n is a, c, g, or t
  misc_feature (115)..(115): n is a, c, g, or t
  misc_feature (146)..(147): n is a, c, g, or t
  misc_feature (158)..(158): n is a, c, g, or t
  misc_feature (514)..(514): n is a, c, g, or t
  misc_feature (587)..(588): n is a, c, g, or t
ggaaaaatggtagcgatggcngctgggccgagtgggtgtctggtgccggncgttgggctacggtcgtggtcggcgactgtgctttcaagcggtgtctgctttnggggcagagttnatcatcggaggcatgcagagagttaggcttnntctagcagaanttgcttatgcaggctctatgtgatcttctcggacagttcaacctgcttcagctggatcctgattgcagaggatgctgtcaggaggaagcacaatttgaaaccaaaaagctgtatgcaggagctattcttgaagttgtggatgaaaatgggaaggttccctcaagtccaagctttgttaggagtgataaacccaaactgttcagaggactgcaaatcaagtatgtccgtggttcagaccctgtattaaagcttttggacgacaatgggaacattgctgaagaactgagcattctcaaatggaacacagacagtgtagaagaattcctgagtgaaaagttggaacgcatataaatctngcttaaattttgtcctatccttttgttaccttatcaaatgaaatattacagcacctagaaaataatttagttnngcttgcttccatgtgatcagtcttttactgtgaggcattaaatatctaattaaatcgtgaaatgggccagtatagtccatgatatctaaggagtgggcaagcttaacaaaacccatttctgcataacatgtccaatcctcctgcattctgtggatcacccactaacaacacagtgcttgggtaaccacaactttgcgggtatccacttactgcaacctgaactacgtttcgggaataacttggctccacggttttctaccgaacaccccaccacgacttcctaaaccttaccgacgacggttaaccaccgacccgactgacttacctactgccctccactgtgctggtgtggctcctttggacacacgggaactgacacgcagaacttacacgcaccgatacacactactacctgacgcctcaacagactggcctggctcctcaagagtctctcctcatttgcgtatacccagccttcttttcaatacaagatgttcctctattcgtctgaccaagtgactgcctgcctcaacaacttgtagcttcattctgtcaacccctattcaagatcttacagtagcatgaaacatccaccaagatcgcgtgcatgacgcctaacagaacacttctagggctggtggtccgatcatcctggaacttggctcccatcttacaaacccatcacgtgctggcgaccattactcaaagtcacactccgatggacccggcgcacagtccaacgtgttcacgtag

SEQ ID NO: 515559 - DNA, 546 bp, Homo sapiens
  misc_feature (546)..(546): n is a, c, g, or t
taaaataaatatcctaataaaagggtttaatttttttaaaaacaaaaaaaaaaaaaaaaaaaaaaaaaaaaaaaaaaaaaaaaaaaaagggggggggcccaaaaaccccgggggggccccaagcaactcgcacgcaccccacccacagttttttttaaaaagagggggggccccacaaataggggcgcgctactttaaaaaaacacggacgccaaaccggggcgcggcggtaattaaacaaaggacgcgcgcagagggaaaaaccggacacaagaggagaaccacctcggcgggaggagaggaaaccccccacaccagcggggggggggggggaaacacctgacgggggaaacacaaccacccccgcgagaaaattagtaaacgcgcccccagagagcgagaacactaacaatcttgtcaaggcgggcctaacacgggggggtaaaccacaccgcctaataatagtacgcggcgcgcagaaaaaatgtggggccacacggaaaattgattatacgaaaaatattcaccacgcgcgttataaaaagn

SEQ ID NO: 515560 - DNA, 354 bp, Homo sapiens
agtatggttgtggttaatgttgtggacatcatcagatatgagtagggattggggagtgaaaataattctgtcaagccactgataatatgagaaacatttaattgtgtggtagtgttattcctcaagatcatgattcttattttactcatacatggagacataatgacaagatctacataaacttaatttttgattgattgcaaatgcatttatatgtctgtaatccagcatttaaatcaagacttcttccttcctgtggactttggatcgtctgatgacacatatgcttggtgattagatttgcgatgtatcttttagcaggtctctgagattctttcagtgtgttctcctctg

SEQ ID NO: 515561 - DNA, 166 bp, Homo sapiens
tagccttacacaggtgttttatttgaacactgaaaacgaggggagccttctgttacaataggaaaagccacaggtgtgtgccctgggctctaaggcaggatgctaagagagagacccagggtccagcctgggagaaatagaacaaatgccagagctccaggagagg

SEQ ID NO: 515562 - DNA, 945 bp, Homo sapiens
  misc_feature (891)..(891): n is a, c, g, or t
gagaatgagaacatgcaacatcaggagagggtgtagtaaggaaatataccttaacaggctgattgggggcgtgagccagtacatacccgaagataaacagtctcattatttgtgtggctaatgataatgcagcagtcgtatccactgcacatgaagtgacgcaagaaatgagaacaagggtgctccccaggaagttgccaacttgattttccacatgagattaagaaagatctggtgtgggattgccatggcacacttgcgtgcccggaagtggttcttggccaagtgcttgtgtgaccgcaaagatttggaggccccgagggcaatacattggcctccttgtaagaactttacctgggacacaagtaaatttgtttgtgtgtggccccacgtggaaaaaagtattaccgtggagaggattaatattgaagcacggtggtggggtctatggggcgaaggggggattctttcactagataatagaagacagtggataacttggaaagaatttttaaaagcgaagtgagagagagattcgaaaaaaatgggggtatatttcgacaggggtgacttgtatgaggtattgaggacctacttctgtagtatttacactgggggtggacaataaagtgacgaagtgggtggtaaacgagagtgtcacataagagaataaaggggggtcagtgcaagaaaaagggggagcaacattgtgggggaaaaagtttgcgctgcccccagatatttaaatttaactttgggatggttgcgggaggagaaacaaagacaaatgacaaaggtatctttggaatattatgtacccacacgcagagatagcaaaaagtgtgagtgaggtggcatcgtcacaagtacactacaatgggttgtttcaanaggttccaatggaaaagtgtaattgggcggtatcacaatgtgtggggagaaacc

SEQ ID NO: 515563 - DNA, 719 bp, Homo sapiens
gcactaccctgaagagaaggtttacggaatagagcagaaccccggctgaccggaaggaggagaaaaagcggctgcccctgctcctgtaggaggagatggatgtatttgagcaggcgctggcttctgaggccccaggccaaggaccccttcggcgtcacctgtccccagagtacctttgtgttggatgaatttaagcgccagtactcccatgaggacacactctctgtggcacggccatattttctgggagcactttgataaggacggctggtccctgtggtactcagagtatcgcttccctgtgaggactcactcagaccttcatgagctgccatcgtcatcacgtgggatgttcccgcgactggaccagactgaggaagaatgccttcgcccagtgtcatcccttttgggacccacccatagcaggtcccatttctggagttctgggtcttccgaggcccggagcgttgcctttccgctgagtcccagattggcaggtggactacgagtcataacacatggcgggaactggatcctggcagcgaggagaccccagacgctggtttgagagtacttttcctgggagggggccttccagcatgtgggcacaagccttcaatcagggcacagattttcaagtgaacattttttgccatcacctagctgcctgcacctgcccttcagggagatgggggtcattaaaggcaactgaacattga

SEQ ID NO: 515564 - DNA, 235 bp, Homo sapiens
  misc_feature (91)..(91): n is a, c, g, or t
gaattaatttagggataaaccacaaaacataagattaagagagtagggtttgggatacgtgaaatttcagtcccggctgtgcattagctgnctgtgactttggggaagttactttctattcttcagtttcatcactgaaatgagaaccagtacctacctcagacagtagtagtcacaggcttataagtagcaaaaaatagagcataacacactcactatgttgctattatatgct

SEQ ID NO: 515565 - DNA, 144 bp, Homo sapiens
gaagaaagagtatgacacattattcagggtcatggctttctgaaggaagttatcttcttatttattttctgccactgaattctagattaccagaggtggtgctcctggggatgtctgctggtctgtccctccggaagaatgatg

SEQ ID NO: 515566 - DNA, 321 bp, Homo sapiens
aacctctgactcagagcatgtctttaaagagtccacatctggccaggcgcggtggcacatgcctgtaatcccagcactttgggaggccgaggcgggtggatcacgaggtcaggagtttgagaccagcctggcaacatagtgaaaccccatttttaataaaaatacaaaaaattagctgggggtggtggcaggcgcctgtaatcccagctacttgggaggttgagacaggagaatcacttgaacccaggaggcggaggttgcagtgagccaagatcatgcccctgcactccagcttgggtgacagtgggagactccatttca

SEQ ID NO: 515567 - DNA, 259 bp, Homo sapiens
caggccagtagccacgatgtcctgtccacagagacgtatcaggcattagcagcgttcagattggagcatcgtacaccgattctaagagttctagccacagtgtttactgtgtcacttcctcatgagtggactccgccattaaagtccctaaggcgacgccacggggacagaagtgtatttcctcctcaggcctacaccgccccaaggagcgagatgaccctgggttttacgtgacttttgccccactattcggcagggg

SEQ ID NO: 515568 - DNA, 795 bp, Homo sapiens
  misc_feature (36)..(36): n is a, c, g, or t
  misc_feature (68)..(68): n is a, c, g, or t
  misc_feature (93)..(93): n is a, c, g, or t
  misc_feature (117)..(118): n is a, c, g, or t
  misc_feature (151)..(151): n is a, c, g, or t
  misc_feature (160)..(160): n is a, c, g, or t
  misc_feature (163)..(163): n is a, c, g, or t
  misc_feature (243)..(243): n is a, c, g, or t
  misc_feature (259)..(259): n is a, c, g, or t
  misc_feature (300)..(300): n is a, c, g, or t
  misc_feature (318)..(318): n is a, c, g, or t
  misc_feature (364)..(364): n is a, c, g, or t
  misc_feature (698)..(698): n is a, c, g, or t
  misc_feature (780)..(780): n is a, c, g, or t
aatttgctacgaattttggtccttcaaatgttttanatgtgtggggcggtgctgcgtctgcgcttggntggcttcgtccccctcttccctggngggccctggggccgccccccccgnngggggggctcccccgccggggggtcccccgggngttcctccnggngtgcctcctgcgctctggtacagcttggtggtggtggggttgcgggctttctccggctctttctgttggtgttcgggttnttccttctcggcggtntggttcttgtcgggccagttggtggtttcgttgcgcttgtncggggtcttctgtttgtnctcgtcgttggtcttgccttggggtttctcgtcttcgacagttgcnttcgtgttgaaggcgttgggctcaagtgatttcttgggtggcaccttgtccctctgcttctcgtcttcggctttgtgcttctcggcttcctgggccgtgcgttcggtgtcttccttgctcaaacggcccttgtcattagtgatagtaatcttgttctcttttcccgtactcttgtccacagcagagacattgagtataccattggcatcaatgtcaaaagtgacttcaatctgaggaacacctcggggtgcaggaggtatgcctgtgagttcaaacttgcccaagcaggttgttatcctttgtcatggcacgctcgccttcataaacctgaatnagcacaccaggctggttgtcagaataggtagtgaaggtctgtgtctgcttggtaggaatggtggtattacgcttgatgaggncagtcatgactcccc

SEQ ID NO: 515569 - DNA, 1136 bp, Homo sapiens
  misc_feature (631)..(631): n is a, c, g, or t
ctgatcaccagcacagccgcgcctgtccaccgtgtgctagctatggtctgagcaaggagcacagagtatggctgctgccgttcgtccatcgcaccgtcgcgtgccccgggcttctacgccgaccaacttcctcgggaggaagctcaacgcaatgcagggttgatcccttcggacgtgaatctgacctatgagcattagagctccaatggtcccacacatggttactaccggtgcattgcgcagttctgtgcaaccacacattcgcactgaagcaatgagtgaagcaccgacgaaagttgcgaacgggtctgtgctgttacgcatatcctctcgagcagaccatggcaggatcatcactcaacgagggaaggggcagtctgttggacttccgctctcgttccacgcgcgtcccgacttggacgtatcaggtccctcgcatcgagggccagatccattcaacatcaataccgtagtagcgatcgagcctatggtgaactcaatgaaggtacggacgtgtcggaacataactcacagtgcggagggcattcggtacactctgcttccactgcattctcaagtgagacgaagcatatgctttgatccaattcttcgtccatatgacacgtatcanttgacaccttagccacaacaattcgaaggactcgccaatatcacatctatgagcgtattcatgccgggacgggcaacggtgtcaaagagataaatttctctatctcacgtgtgtgaagccgttgttcctttcgccctacagatggggggcgaatcaagggccaaatctagtgactggagtgccctggaagacgtctttggtcagaaggtgaggcagatcgccctggaggtagcccatggccttgtgctcgagtcaggggcatgcgagtaccccggtgaagggcctggcagtaccgtgattccgggcagggggttcagaattgtggctggcccttcttttcgattcacccggagtccttttgacagcccgagtgacggcgataaggggatggggcggggataccaaccagaaggttaaaaccgtttaaaaaacccagcattggtgaaacgggcaccggtccatgtaactgttgggcgcatgcccggcaccagaggggtttgccccc

SEQ ID NO: 515570 - DNA, 635 bp, Homo sapiens
agcgggcaaagcctgccgggagcttggtgcgctatggcgacacccagcctgcggggtcgtctggcgcggtaagggaacccgcggaatgcctgtgctgaagcgccgaataagagcctctcattctagctaaccgtcgctcgggggcagtcggcgccgggagaatgggcgaggctgacttgcatcacggagatgtcggtgatgataggcttgctggacagcagaatgaattccgcgtacgatgcgtgcagaacaagagatccatggagcttccgtcgtattgtgccgcgagggctcaggaagcccgaaagatgagatcaatacaggaaatcctgggagagtctgggagtgtacttccaaataaattgaataagttgtcacagaggtttcctaacaaaccttgagctcatctgaaaatggacaagtatttgcaatgactgaaatatagcttctgagaactatgcagaggcattttagagacattggcatttgccatgccctctttggcagggtagaagaggctagaaagcacctttctttcaaccttaggacatcatagtatggggttagaagttactgatttatcttgcaaatcaaatcctctgagacagaaaagccggaaagtcctctgtccggct

SEQ ID NO: 515571 - DNA, 164 bp, Homo sapiens
cggatcccttcgattggcgggcaccttatgcactgcgttactatctaaaacaagctttgagtgtaagagattgaagagtacaaagtctgaccaagatgttgatgttggataagagaattctcttgctccccagctcgtctacagttgcccgccacatcgaaggg

SEQ ID NO: 515572 - DNA, 139 bp, Homo sapiens
gcgggcagtatcgctgtatgctcagcggcggcggaagtatcgctgctttacaatagccagtttttctctcagcaaggaaacagcacggctattgtgtataatagtaggtattttttcctacctattgccatcttcctgt

SEQ ID NO: 515573 - DNA, 99 bp, Homo sapiens
ttcaggcggtttggatgagaataggctgttactacgagggctatgtggctgattgatagacgtatgcatgcagcgatcttaggtcttgttagttcgctc

SEQ ID NO: 515574 - DNA, 726 bp, Homo sapiens
tcgtgtacccactcatcatcgactccccccccgatccccgtctccgcagtgcagtgacacacttcggcgtcactcgcttggggcctgcctgatcctccagatcatgcatcggtgactattcctagccatgcgctactcagccagaagcgcctcaagccggccctcttcaatcgaagtgcgcgccgacgaatctcctctgacgaactgtaaacatttgagtggcgtgccctcatcctgctaccttcacgccaatggcgcctcaatagttctttatctgcctcttcgctacacactcgggcgaggcctatattcatcggagtcagtcttgctctactcgagaaagcctgaaacagtcggccttatcctccgtgcttacagactatcgcaagcagccttcataggctatgtcctcccgtgaggccgaatatcattctgacggggccacagtacttacaatacttactatccgcctatcccatgacattgggacagacctagtccaatgaatctgaggaggctactcagtagagcagtcccaccctcacgacgattctttcacctttctgattcactcttgcccttcacttattgcagccctagcagtactccatctcctattcttgcacgaaacgggagtcgtacaacccctaggaatcacctcccattccgatacatcaccttccacccttataagacatcaagacgcccctcgggtttacttctctc

SEQ ID NO: 515575 - DNA, 969 bp, Homo sapiens
  misc_feature (969)..(969): n is a, c, g, or t
tccctatgaaaatgctttaaggggggtgtcggtacagcagggatgtggccggggaaaaacagcaagtgcacacagggggacaggccacaggacaggttgggattgaataaaaagttcacacggtttcccggtttccccagtgactgaaggctctaggccacctcctcctcagcctcctcctcagaactcagccctccataccattcggatgggggcatcctgggtacgcggcggggaaccaccgagacaccagggtaaaatccatggtagctctagggccatcggtgagaactccatcttcgtcaatagcccctacgcccgtgtaaccaggtgcagagaaggagccttgccgccggacacatagggccgtgaactggctcgggaagatcgcgcttgaccacgctcctgggatgggccgtgcctgtgtgccaatgaaaggggcgcggacattttataggcccccgaagggggggatgtccacagacacgccgtttacacaatgggtggggggactccactctcaccaaaaataagctgcctgtataacaggtcatggaccataacgccatatggctcaatcccaccctctgttcagtggacacatgccggcccctgaaccagggcgggaaaccggtcaggaacgcgggccaatggcggggagctcgaaggcagccaaacatgtgtctggggacattcaaacatctgcggaggtgacactcgaggcaacggcacgcgccccggacctggtaggtagccccggtagtcaatgggagaaagccggctattaacaacgtcggggggggaacgggaccatgttcacaggcagttacggaggtcagattgagctggctgggaatgccacgcaggcgtagcccccctgggagacacacccggggcagcgcccacaggggggggaccgctagagctgcacagcgcggaagctcacacagaaaggcacgcgatccacgn

SEQ ID NO: 515576 - DNA, 2074 bp, Homo sapiens
  misc_feature (582)..(582): n is a, c, g, or t
  misc_feature (588)..(589): n is a, c, g, or t
  misc_feature (591)..(592): n is a, c, g, or t
  misc_feature (600)..(600): n is a, c, g, or t
  misc_feature (604)..(604): n is a, c, g, or t
ggccagaggctgttgaggcgcggaactggaggatggcgctggtggctgttggtgtgctggggctcggttgtggcggcggctgagcgggcctggggctggtggcgagggcactggactggctgtgcgtggctgctcccggaccgtcgcgaagcggcagaagccgaggcggaggtgcccgtggtccagtacgtgtggcgagcgcgctgtccggccgatcgggtcttcgtgtggggcttcatcttctcgcggtggctgctgggcagtgccttcctttgtggtgcccagctctcgaggactcccgggtgccccgttgccggcagctccagacgcagacctgtgagtgatccagacccgtgcctctatcgtctggagctggatcaaaagatttcatctgctgtcttgcagtgtatggattcacatttgctgtcctctaagactgcggatgttaagaaagtcttgggcgtgatgggactcaacaaggattctcagcttgtgatttacacaggagccgtgaaagataatacgaggggctactgagtatgtgttggagcccgttcagccgtctctcttgcctctggacangacctnngnngaccacgngtcngcaggtctcctgcggccgagctcactctcttgtgttgactgacagggaaggagtcttcagcatgggaaacaattcttatgggcaatgtggaagaaaggtggtcgaaaatgaaatttacagtgaaagtcacagagtccacaggatgcaggacttcgatggccaggtggtccaggtcgcctgtggtcaggatcatagtctgttcctgacggataaaggagaagtctattcttgtggatggggtgctgatgggcaaacaggtctgggtcactacaatatcaccagctcgcccaccaagctgggtggagacctggcgggagtgaacgttatccaagttgccacctacggtgattgctgcctggccgtgtccgccgacggaggactttttggttggggaaactcggagtacctgcagctggcctctgtcactgactccacacaggtgaatgtgccccgctgcttacacttctcaggagtggggaaggtgcgacaggctgcatgcggtggcacgggctgtgcagtgttaaacggagaaggacatgtttttgtctggggctatggaattcttgggaaaggtccaaacctagtggaaagtgccgtccctgaaatgattccacccactctctttggcttgacggagttcaacccagaaatccaggtttcccgcatccgatgtggactcagccactttgctgcactgaccaacaaaggagagctgtttgtatggggcaagaacatccgagggtgcctgggaatcggtcgcctggaggaccagtatttcccatggagggtgacgatgcctggggagcctgtggacgtggcatgtggcgtggaccacatggtgaccctggccaagtcattcatctaaacctccctcacctgcttgggcggccccgtcccgggaaccactggcactccttggcagaggccagcgcgtggccagccccccggggttcttggatggtggtggcggaggaccctgcgtgcagtgtgacgctctgtcctgaatcccttagcgggtacctaccaggaggatcagggcaaggtccctctccagctgcaggtgaggcctgcggaactcagcttggatggcagcctttggtgggccgctgtggcccgcacgtctctgttctctccaagtaacatgcgacggtgtctggtgtcacgtctcgcctgagaagcccgtcttaggaaagcttagcttgaacacagtgctcgggaggtttctgctcgctcactgcctggcttggaaaagttaagaagcccctcaggaagagaatcgaggctaagttcctctgcgccgagggccccgagcatatccgccaaggctcagctgcagtgccaggcggaggaggaagatccagaaattgtgaacaatgtttgatttagtagcgtgacttgcctttccctttaaaaacatcttttacaaatctgtcttggaataaagtctattttctgccttttggtttttaa

SEQ ID NO: 515577 - DNA, 346 bp, Homo sapiens
gacctatatcttttactagtgtatatattgtatttttataaatcattcgtgtgtatttttgttcatgcacacttattttcattgcagcactattatcaatatctaagacatggaatctacccttatgcccatcaatgatagactgggtaaagaaaatgtggtacgtatacaccacagactactatgcagccataaaaaggaatgagatcatgtcctttgcaggaacatggatgaagccagaagccattatcctcagcaaactaatgcaggaacagaaaaccaacaccacatgttctcacttataagtgggagccgaatattgagaacacatggacacagagagggg

SEQ ID NO: 515578 - DNA, 2293 bp, Homo sapiens
  misc_feature (582)..(582): n is a, c, g, or t
  misc_feature (588)..(589): n is a, c, g, or t
  misc_feature (591)..(592): n is a, c, g, or t
  misc_feature (600)..(600): n is a, c, g, or t
  misc_feature (604)..(604): n is a, c, g, or t
ggccagaggctgttgaggcgcggaactggaggatggcgctggtggctgttggtgtgctggggctcggttgtggcggcggctgagcgggcctggggctggtggcgagggcactggactggctgtgcgtggctgctcccggaccgtcgcgaagcggcagaagccgaggcggaggtgcccgtggtccagtacgtgtggcgagcgcgctgtccggccgatcgggtcttcgtgtggggcttcatcttctcgcggtggctgctgggcagtgccttcctttgtggtgcccagctctcgaggactcccgggtgccccgttgccggcagctccagacgcagacctgtgagtgatccagacccgtgcctctatcgtctggagctggatcaaaagatttcatctgctgtcttgcagtgtatggattcacatttgctgtcctctaagactgcggatgttaagaaagtcttgggcgtgatgggactcaacaaggattctcagcttgtgatttacacaggagccgtgaaagataatacgaggggctactgagtatgtgttggagcccgttcagccgtctctcttgcctctggacangacctnngnngaccacgngtcngcaggtctcctgcggccgagctcactctcttgtgttgactgacagggaaggagtcttcagcatgggaaacaattcttatgggcaatgtggaagaaaggtggtcgaaaatgaaatttacagtgaaagtcacagagtccacaggatgcaggacttcgatggccaggtggtccaggtcgcctgtggtcaggatcatagtctgttcctgacggataaaggagaagtctattcttgtggatggggtgctgatgggcaaacaggtctgggtcactacaatatcaccagctcgcccaccaagctgggtggagacctggcgggagtgaacgttatccaagttgccacctacggtgattgctgcctggccgtgtccgccgacggaggactttttggttggggaaactcggagtacctgcagctggcctctgtcactgactccacacaggtgaatgtgccccgctgcttacacttctcaggagtggggaaggtgcgacaggctgcatgcggtggcacgggctgtgcagtgttaaacggagaaggacatgtttttgtctggggctatggaattcttgggaaaggtccaaacctagtggaaagtgccgtccctgaaatgattccacccactctctttggcttgacggagttcaacccagaaatccaggtttcccgcatccgatgtggactcagccactttgctgcactgaccaacaaaggagagctgtttgtatggggcaagaacatccgagggtgcctgggaatcggtcgcctggaggaccagtatttcccatggagggtgacgatgcctggggagcctgtggacgtggcatgtggcgtggaccacatggtgaccctggccaagtcattcatctaaacctccctcacctgcttgggcggccccgtcccgggaaccactggcactccttggcagaggccagcgcgtggccagccccccggggttcttggatggtggtggcggaggaccctgcgtgcagtgtgacgctctgtcctgaatcccttagcgggtacctaccaggaggatcagggcaaggtccctctccagctgcaggtgaggcctgcggaactcagcttggatggcagcctttggtgggccgctgtggcccgcacgtctctgttctctccaagtaacatgcgacggtgtctggtgtcacgtctcgcctgagaagcccgtcttaggaaagcttagcttgaacacagtgctcgggaggtttctgctcggaggaagatccagaaattgtgaacaatgtttgatttagtagcgtgacttgcctttccctttaaaaacatcttttacaaatctgtcttggaataaagtctattttctgccttttggtttttaaaaaaaaaaaaaaaaaaaaaaaacaaaaacagaaaaacaaagaaaacaaaacaaaacacacacaacccaccaacacaaacgaaacaagaacaacaaggggggcccccaaaaaaagacaccaggagagaggagcacgaatgggaaagaaacaacagaaacggagacagagagggcaacaagagagaaagcaaaaagaaaggagaggagccgagcacacaaagagacaacacgccgcagagcagcggacgcggcagggccggcaccagacaagaagagaaaaaaaggagaagagaacaaaggcggggcccacgcccgacgcgcaacgaggcgacggggga

SEQ ID NO: 515579 - DNA, 2411 bp, Homo sapiens
  misc_feature (582)..(582): n is a, c, g, or t
  misc_feature (588)..(589): n is a, c, g, or t
  misc_feature (591)..(592): n is a, c, g, or t
  misc_feature (600)..(600): n is a, c, g, or t
  misc_feature (604)..(604): n is a, c, g, or t
ggccagaggctgttgaggcgcggaactggaggatggcgctggtggctgttggtgtgctggggctcggttgtggcggcggctgagcgggcctggggctggtggcgagggcactggactggctgtgcgtggctgctcccggaccgtcgcgaagcggcagaagccgaggcggaggtgcccgtggtccagtacgtgtggcgagcgcgctgtccggccgatcgggtcttcgtgtggggcttcatcttctcgcggtggctgctgggcagtgccttcctttgtggtgcccagctctcgaggactcccgggtgccccgttgccggcagctccagacgcagacctgtgagtgatccagacccgtgcctctatcgtctggagctggatcaaaagatttcatctgctgtcttgcagtgtatggattcacatttgctgtcctctaagactgcggatgttaagaaagtcttgggcgtgatgggactcaacaaggattctcagcttgtgatttacacaggagccgtgaaagataatacgaggggctactgagtatgtgttggagcccgttcagccgtctctcttgcctctggacangacctnngnngaccacgngtcngcaggtctcctgcggccgagctcactctcttgtgttgactgacagggaaggagtcttcagcatgggaaacaattcttatgggcaatgtggaagaaaggtggtcgaaaatgaaatttacagtgaaagtcacagagtccacaggatgcaggacttcgatggccaggtggtccaggtcgcctgtggtcaggatcatagtctgttcctgacggataaaggagaagtctattcttgtggatggggtgctgatgggcaaacaggtctgggtcactacaatatcaccagctcgcccaccaagctgggtggagacctggcgggagtgaacgttatccaagttgccacctacggtgattgctgcctggccgtgtccgccgacggaggactttttggttggggaaactcggagtacctgcagctggcctctgtcactgactccacacaggtgaatgtgccccgctgcttacacttctcaggagtggggaaggtgcgacaggctgcatgcggtggcacgggctgtgcagtgttaaacggagaaggacatgtttttgtctggggctatggaattcttgggaaaggtccaaacctagtggaaagtgccgtccctgaaatgattccacccactctctttggcttgacggagttcaacccagaaatccaggtttcccgcatccgatgtggactcagccactttgctgcactgaccaacaaaggagagctgtttgtatggggcaagaacatccgagggtgcctgggaatcggtcgcctggaggaccagtatttcccatggagggtgacgatgcctggggagcctgtggacgtggcatgtggcgtggaccacatggtgaccctggccaagtcattcatctaaacctccctcacctgcttgggcggccccgtcccgggaaccactggcactccttggcagaggccagcgcgtggccagccccccggggttcttggatggtggtggcggaggaccctgcgtgcagtgtgacgctctgtcctgaatcccttagcgggtacctaccaggaggatcagggcaaggtccctctccagctgcaggtgaggcctgcggaactcagcttggatggcagcctttggtgggccgctgtggcccgcacgtctctgttctctccaagtaacatgcgacggtgtctggtgtcacgtctcgcctgagaagcccgtcttaggaaagcttagcttgaacacagtgctcgggaggtttctgctcgctcactgcctggcttggaaaagttaagaagcccctcaggaagagaatcgaggctaagttcctctgcgccgagggccccgagcatatccgccaaggctcagctgcagtgccaggcggaggaggaagatccagaaattgtgaacaatgtttgatttagtagcgtgacttgcctttccctttaaaaacatcttttacaaatctgtcttggaataaagtctattttctgccttttggtttttaaaaaaaaaaaaaaaaaaaaaaaacaaaaacagaaaaacaaagaaaacaaaacaaaacacacacaacccaccaacacaaacgaaacaagaacaacaaggggggcccccaaaaaaagacaccaggagagaggagcacgaatgggaaagaaacaacagaaacggagacagagagggcaacaagagagaaagcaaaaagaaaggagaggagccgagcacacaaagagacaacacgccgcagagcagcggacgcggcagggccggcaccagacaagaagagaaaaaaaggagaagagaacaaaggcggggcccacgcccgacgcgcaacgaggcgacggggga

SEQ ID NO: 515580 - DNA, 1841 bp, Homo sapiens
  misc_feature (1261)..(1261): n is a, c, g, or t
  misc_feature (1670)..(1670): n is a, c, g, or t
  misc_feature (1841)..(1841): n is a, c, g, or t
tcacttggtaaaaaaaaaaaaaaaaatagctgttaacttggaattctatatccagcaaaaatatccataaaaaaatacaaataaagacagaagctgagagaattcctctccagaagacttactctgctagagtgcttaaaggaggttctaaggcagaaaaaacaatgcctcagatcttgaaatgtattagaaatggtagaaatataggtaaatatgagaataaatagaaatttatttttgaatttttacgtttccttgaaggaatattgatcacattttaagcaaaaacctccatatactattatgtctttaaaacatatataaaggaaaaaatatgacaaacataggatggaagggagaaatggaaatatatggtggtaaattcttacattatatgtaaggttatatgatattatttgaaaatagattgtgatgagtttaagatgcacattgaaatgacagaagaaacacaaaacaaaagaatacaaagtgttatagctgataaatctatataaaatagaatcctaaaaaattcaattataaaataggggaggaaaagaagagaaaaggaacaaaaaagagacgggagaaatagcaaggtggtagaagtaagctcaacagcatctataaccacattaagtgtaaatgacctaagagcttcaatatagtggtagagactatcatactggccaaaaaaaaaaaaaaaaaacaaaaaaaaactccaggagttattacctattacattggtgtgctatctaggagaactctctctttcacagttttaacaacccttagagtttaccgtgtacacaactgtggcgttcggcgacagacagcatcatctttttcgcggcacaacccccttttggctcttaaagaaaggcgcggggaccactttctttaatcacattattacagagaacacactctgttggccccccagttaagtattattatccgcgggcgaaatataaaagcgagacgggaacgcttgtctgggaaaccttcgctatcacagagcggcgctaccaatctttctctctccagagaaacaacccttgtggtggatacacctctctctcccaccacgctgtgtcttttttttacccccccccaaatataaaacgagaaaggctctttccaccaaacattgtgcctctggttgacaagcagcccaaatataagcggcgggacaaccacatatttcgggagacaatcgtgagcaacatgtggctgcggcacgccaaatctaccccctatnaatataattaagacgagctgggcggagagataaatgttcaccccccccattgtccgtcgggtggaacactcggggcgaagcagagaccatccccacttattacgaaaacgacaggtactgttggtcccgggcggcaagcattctttcttcgagcaacagccatcgttggcgggacacatctctaccacaaaacccgaaatttgcggatcatctccgagtgttcacaccatattttcttcgaagatatggcgtctgtaagcacaacgagacgcacgatagattgtttccacaacgttatagttcgctcacgacaatatcacgcacctgttcggaaccccttttgcgcggagcatacgatatgaacagccccaataatttgccggcggcgggtggaggaaacaaccacagngttctcctccacaacagctcgttttacaaaccatatgctcatagtcccactacacagaggtacggattactcatattggtgcagccccgcccgaacagaaatttaatcttatagaatcatgcgcggtacagcacgattaggaagtaacatttgcggatggcggccccagtn

SEQ ID NO: 515581 - DNA, 1929 bp, Homo sapiens
  misc_feature (582)..(582): n is a, c, g, or t
  misc_feature (588)..(589): n is a, c, g, or t
  misc_feature (591)..(592): n is a, c, g, or t
  misc_feature (600)..(600): n is a, c, g, or t
  misc_feature (604)..(604): n is a, c, g, or t
ggccagaggctgttgaggcgcggaactggaggatggcgctggtggctgttggtgtgctggggctcggttgtggcggcggctgagcgggcctggggctggtggcgagggcactggactggctgtgcgtggctgctcccggaccgtcgcgaagcggcagaagccgaggcggaggtgcccgtggtccagtacgtgtggcgagcgcgctgtccggccgatcgggtcttcgtgtggggcttcatcttctcgcggtggctgctgggcagtgccttcctttgtggtgcccagctctcgaggactcccgggtgccccgttgccggcagctccagacgcagacctgtgagtgatccagacccgtgcctctatcgtctggagctggatcaaaagatttcatctgctgtcttgcagtgtatggattcacatttgctgtcctctaagactgcggatgttaagaaagtcttgggcgtgatgggactcaacaaggattctcagcttgtgatttacacaggagccgtgaaagataatacgaggggctactgagtatgtgttggagcccgttcagccgtctctcttgcctctggacangacctnngnngaccacgngtcngcaggtctcctgcggccgagctcactctcttgtgttgactgacagggaaggagtcttcagcatgggaaacaattcttatgggcaatgtggaagaaaggtggtcgaaaatgaaatttacagtgaaagtcacagagtccacaggatgcaggacttcgatggccaggtggtccaggtcgcctgtggtcaggatcatagtctgttcctgacggataaaggagaagtctattcttgtggatggggtgctgatgggcaaacaggtctgggtcactacaatatcaccagctcgcccaccaagctgggtggagacctggcgggagtgaacgttatccaagttgccacctacggtgattgctgcctggccgtgtccgccgacggaggactttttggttggggaaactcggagtacctgcagctggcctctgtcactgactccacacaggtgaatgtgccccgctgcttacacttctcaggagtggggaaggtgcgacaggctgcatgcggtggcacgggctgtgcagtgttaaacggagaaggacatgtttttgtctggggctatggaattcttgggaaaggtccaaacctagtggaaagtgccgtccctgaaatgattccacccactctctttggcttgacggagttcaacccagaaatccaggtttcccgcatccgatgtggactcagccactttgctgcactgaccaacaaaggagagctgtttgtatggggcaagaacatccgagggtgcctgggaatcggtcgcctggaggaccagtatttcccatggagggtgacgatgcctggggagcctgtggacgtggcatgtggcgtggaccacatggtgaccctggccaagtcattcatctaaacctccctcacctgcttgggcggccccgtcccgggaaccactggcactccttggcagaggccagcgcgtggccagccccccggggttcttggatggtggtggcggaggaccctgcgtgcagtgtgacgctctgtcctgaatcccttagcgggtacctaccaggaggatcagggcaaggtccctctccagctgcaggcaccagccccagcctcccaccacgctcactgcctggcttggaaaagttaagaagcccctcaggaagagaatcgaggctaagttcctctgcgccgagggccccgagcatatccgccaaggctcagctgcagtgccaggcggaggaggaagatccagaaattgtgaacaatgtttgatttagtagcgtgacttgcctttccctttaaaaacatcttttacaaatctgtcttggaataaagtctattttctgccttttggtttttaa

SEQ ID NO: 515582 - DNA, 152 bp, Homo sapiens
ttactgctgagggtactctagacgatccccttaacggtagatttttttatattctttccactaatttacccaaaggctgaggagtggtgagaggaggtgcacaaagaggtgggggaggccgggcgcagtggctcatgcctgtaatcccagca

SEQ ID NO: 515583 - DNA, 1253 bp, Homo sapiens
  misc_feature (582)..(582): n is a, c, g, or t
  misc_feature (588)..(589): n is a, c, g, or t
  misc_feature (591)..(592): n is a, c, g, or t
  misc_feature (600)..(600): n is a, c, g, or t
  misc_feature (604)..(604): n is a, c, g, or t
ggccagaggctgttgaggcgcggaactggaggatggcgctggtggctgttggtgtgctggggctcggttgtggcggcggctgagcgggcctggggctggtggcgagggcactggactggctgtgcgtggctgctcccggaccgtcgcgaagcggcagaagccgaggcggaggtgcccgtggtccagtacgtgtggcgagcgcgctgtccggccgatcgggtcttcgtgtggggcttcatcttctcgcggtggctgctgggcagtgccttcctttgtggtgcccagctctcgaggactcccgggtgccccgttgccggcagctccagacgcagacctgtgagtgatccagacccgtgcctctatcgtctggagctggatcaaaagatttcatctgctgtcttgcagtgtatggattcacatttgctgtcctctaagactgcggatgttaagaaagtcttgggcgtgatgggactcaacaaggattctcagcttgtgatttacacaggagccgtgaaagataatacgaggggctactgagtatgtgttggagcccgttcagccgtctctcttgcctctggacangacctnngnngaccacgngtcngcaggtctcctgcggccgagctcactctcttgtgttgactgacagggaaggagtcttcagcatgggaaacaattcttatgggcaatgtggaagaaaggtggtcgaaaatgaaatttacagtgaaagtcacagagtccacaggatgcaggacttcgatggccaggtggtccaggtcgcctgtggtcaggatcatagtctgttcctgacggataaaggagaagtctattcttgtggatggggtgctgatgggcaaacaggtctgggtcactacaatatcaccagctccctgctcatggcccttcctggccgcctgccacaccgcaagctcgctggggggacactagaagcaccgtggcctgggattccatctggagctgtccgcaggcaccagccccagcctcccaccacgctcactgcctggcttggaaaagttaagaagcccctcaggaagagaatcgaggctaagttcctctgcgccgagggccccgagcatatccgccaaggctcagctgcagtgccaggcggaggaggaagatccagaaattgtgaacaatgtttgatttagtagcgtgacttgcctttccctttaaaaacatcttttacaaatctgtcttggaataaagtctattttctgccttttggtttttaa

SEQ ID NO: 515584 - DNA, 1532 bp, Homo sapiens
  misc_feature (582)..(582): n is a, c, g, or t
  misc_feature (588)..(589): n is a, c, g, or t
  misc_feature (591)..(592): n is a, c, g, or t
  misc_feature (600)..(600): n is a, c, g, or t
  misc_feature (604)..(604): n is a, c, g, or t
ggccagaggctgttgaggcgcggaactggaggatggcgctggtggctgttggtgtgctggggctcggttgtggcggcggctgagcgggcctggggctggtggcgagggcactggactggctgtgcgtggctgctcccggaccgtcgcgaagcggcagaagccgaggcggaggtgcccgtggtccagtacgtgtggcgagcgcgctgtccggccgatcgggtcttcgtgtggggcttcatcttctcgcggtggctgctgggcagtgccttcctttgtggtgcccagctctcgaggactcccgggtgccccgttgccggcagctccagacgcagacctgtgagtgatccagacccgtgcctctatcgtctggagctggatcaaaagatttcatctgctgtcttgcagtgtatggattcacatttgctgtcctctaagactgcggatgttaagaaagtcttgggcgtgatgggactcaacaaggattctcagcttgtgatttacacaggagccgtgaaagataatacgaggggctactgagtatgtgttggagcccgttcagccgtctctcttgcctctggacangacctnngnngaccacgngtcngcaggtctcctgcggccgagctcactctcttgtgttgactgacagggaaggagtcttcagcatgggaaacaattcttatgggcaatgtggaagaaaggtggtcgaaaatgaaatttacagtgaaagtcacagagtccacaggatgcaggacttcgatggccaggtggtccaggtcgcctgtggtcaggatcatagtctgttcctgacggataaaggagaagtctattcttgtggatggggtgctgatgggcaaacaggtctgggtcactacaatatcaccagctcgcccaccaagctgggtggagacctggcgggagtgaacgttatccaagttgccacctacggtgattgctgcctggccgtgtccgccgacggaggactttttggttggggaaactcggagtacctgcagctggcctctgtcactgactccacacaggtgaatgtgccccgctgcttacacttctcaggagtggggaaggtgcgacaggctgcatgcggtggcacgggctgtgcagtgttaaacggagaaggacatgtttttgtctggggctatggaattcttgggaaaggtccaaacctagtggaaagtgccgtccctgaaatgattccacccactctctttggcttgacggagttcaacccagaaatccaggtttcccgcatccgatgtggactcagccactttgctgcactgaccaacaaaggagagctgtttgtatggggcaagaacatccgagggtgcctgggaatcggtcgcctggaggaccagtatttcccatggagggtaaggctggccggggaggtcatgagactggatgctaagagtagagtcacctgacgtcactgcagacacctcgcgtgcagatgggccaggacgagggccatgggacctgctcccccttccgggtcctggctgcactcctgc

SEQ ID NO: 515585 - DNA, 197 bp, Homo sapiens
gtttcaccatgttgaccaggctagtctcgaactcctgacctcaggtaatctgcctgccttggttctcaaagtgctaggattacaggtgtgagccaccacgcccggacaaattttattttttttttttggaaatggatttccactcttgtggcccaatgcttgaagtgcagtgggcccatctgggtgttcaccagaaa

SEQ ID NO: 515586 - DNA, 523 bp, Homo sapiens
  misc_feature (315)..(315): n is a, c, g, or t
cgggggacctcccttgggagatcaatcccccgtcctcctgctctttgctccgtgagaaagatccacctacgacctcaggtcctgagatcgaccagcccaagaaacatctcaccaatttcaaatccgccactcccagaggccctggaactctggcccaaggctctctgactgactccttcccagatcttctcggcttagtggctgaagactgacactgcccgatcgcctcggttgaagccccctagaccatcacggatgccgagcttcgggtaactctcacagtggaaggttcccacggcgcccctaatcccgctngaagcagccctgagaaacatcgcccattctctctccatatcaccccccaaaaatttttgccaccccaacacttcaacactattttgttttatttttcttattaatataagacggcaggaatgtcaggcctctgagcccaagccaagccatcgcatcccctgtgacttgcacgtatatgcccagatggcctgaagtaactgaagaatca

SEQ ID NO: 515587 - DNA, 455 bp, Homo sapiens
gaacggccgccgagaggggccgccagggagggggagttgggacaggagtgatggcccaggctatggcccaactggcggaagggcccgcgcccagcggatgcacctgagcataggaacagacccgatgacctgagaaagaagaattcagtagtgaactactggaatcactgaaacaattaagactaatttaataccaagtatacccaaaaggccggagaaggcatgaattcccactgcagactgatagaggctactacgagaccacaactagacaaagacatggcaaataaggaaaatgaagagcaatataccttatgaatacaggggcaaaaatcatcaaggaaatattagtaaaacaaaccagaaacatgtaaaaaggattatacactatgtcaaggggatgtacctcagagaagcaaaatttaggtcaacatacaatacaattagtgctatgc

SEQ ID NO: 515588 - DNA, 236 bp, Homo sapiens
  misc_feature (28)..(29): n is a, c, g, or t
  misc_feature (46)..(46): n is a, c, g, or t
  misc_feature (63)..(63): n is a, c, g, or t
  misc_feature (67)..(67): n is a, c, g, or t
  misc_feature (225)..(225): n is a, c, g, or t
caaacaaaaatatatgtttttacttaanntgaatgtttttgctctncaacgatctaaaaatgnaaancaagatatcttatgtaggaaatattttggataatatttttacagtgagctttcccatgtttttatgtcttaagtttctttgtctgtcgtttatgtaggttgtcacaagaacttttactcacttgtaattgtggcctcagtctttttgaaagtctaccntctaaattttc

SEQ ID NO: 515589 - DNA, 140 bp, Homo sapiens
cttcatgcaggctatcagctgccttcattggagggctggtgctggtagggataatgaacttggtattgtcggcagaggtgattggccgggctctgctgcagtgagaatgctgactgtatgctcgggtcctccggtcccga

SEQ ID NO: 515590 - DNA, 212 bp, Homo sapiens
ctgcaggtcagacacagcaggccacgctcaggcccggtatgcgggccacccatgttctggaaaccacgtggtgtccctgtcgaatggggcgatcaagtccagagccggggcactttcatgagtttgaagggttactgagcagcagattgtcctccatttcgactccagtatgtggggctctggagaaggatgttctatcacctccctgggca

SEQ ID NO: 515591 - DNA, 850 bp, Homo sapiens
acaacaagcgaacgagccgatcagatagatgatgtgacgtagtcacgtcgccacaatgtgcccccgcggtggccccacgtaggacgcaacctgggtgtaccgccgaaggtccttccgcgcggatggaaccccacgcgggggggtcgcgccgccgaaagcatcgtgggaagctgccgcgatgaaactgccggggctttccccttcccgcggccgttgtatggcgggtgccccctgcgcgggtttttgcgttcttgccgcacgcctcctttcttttagatccaaacacaattcggggcgccccaagtgtattttcctccttctccgcccccctcagctttggtttcaacaaaccccgccccccccgtactggtttgaagaaatggtgtccccgcctgtgttttaaatttttggatgttcacaaagcagaaaattagtgcctttctcaaggcaaaatgctaaatactcccgttgctttttagaaagatgattcaattcacctccattgcgtctcccgggattaaaactacatctccccattgggttggtgcaaaagtaatggcacctcgggttatgtagaaaagatgaatattgaaataggctccgtttaagaaaaggaatgattctagggtgaatgttcatattagtaggacattatttagcactgatgctcttctttctatgcaggtgcttcatcattcctgcacgaagtgcagcctggttcccacctcaccaatagggggaaagaactaacacggttgcctccctgcagataacacacgggccggatacagtgcaataaaatttgagaaacttttgcaaaaaaaggagaaaattttcaaaaaaaataaca

SEQ ID NO: 515592 - DNA, 128 bp, Homo sapiens
accctttttccggggagaggggagcggggccgacacaggttcctgaccaagctggtgcttctgcgtgtgttcctgcatgacttggtcaggaacacacttgttgtcagccccacaaccccaacagaatt

SEQ ID NO: 515593 - DNA, 297 bp, Homo sapiens
ttctttttctttatttttaatccttttagttttaaatatattgcctaaagactcagttactacccagtttgtggttttttgggaaaaatgtaactggccagttagcttttcaattaaaaaaccccttaacccatgtgggatgtcttctttttataattagggttcccatgtggagaaaatttttccccctccttgcatgtaaaaaataatttaccttttacccttaaaatatggggtaaaacccaaaaagcatccctcatgaatgcaaaatcctttcaataaaaagtaagttttata

SEQ ID NO: 515594 - DNA, 373 bp, Homo sapiens
  misc_feature (282)..(282): n is a, c, g, or t
  misc_feature (356)..(356): n is a, c, g, or t
gcttcatttaattcttgcctcaacgggttgtcgttgctgagtcgcgggatttaactggtgccgcacaacgcgcgagagtccgtgtgcctactccgcagctgagtgggcactcgtagcttaaggcaaggatcaacgtgattaagtacgataccgcccgctattcgcgcctgtttgtcgctgccggtgcaatcccgacaatgtgacgcgggactagaccgccaacccttgagtgctgccgcgggttcatctggggcataccgaggtccgacaacgctacccgangaaaatccgattaatgcgtgcgagggcgagatccccatttcctgggggggcggccggttcgttttcctgggggntttaagcggatttgcca

SEQ ID NO: 515595 - DNA, 366 bp, Homo sapiens
  misc_feature (9)..(9): n is a, c, g, or t
  misc_feature (27)..(29): n is a, c, g, or t
  misc_feature (31)..(31): n is a, c, g, or t
  misc_feature (36)..(36): n is a, c, g, or t
  misc_feature (38)..(39): n is a, c, g, or t
  misc_feature (67)..(67): n is a, c, g, or t
  misc_feature (76)..(76): n is a, c, g, or t
  misc_feature (174)..(174): n is a, c, g, or t
aaactcacntcatattacagatggggnnncngaggncnngagatgaaactgtggtccagctggacanggtcagacngtgctgtcctgtgatccatggggtcctgcttgattcagaaatgggctcctgacactagaagggcttccagcacgccaagccatctggtgcaggtccangtcgggtgctgtgtaagagttgcacccagctggccaccggacagattctgaccagggagctccttgccctgcccaattcagccgctgctgccccacctggatcacaacattggctttctgatggcccccctggagtcttcagcctcacagcttccacagtccagcccatttcctgtgtgaccattcttatgc

SEQ ID NO: 515596 - DNA, 694 bp, Homo sapiens
  misc_feature (622)..(622): n is a, c, g, or t
  misc_feature (679)..(679): n is a, c, g, or t
  misc_feature (686)..(686): n is a, c, g, or t
gaatattgtgcatttaaaagagatgaggtttcaccatcttgcccaggctggtctcaaacccctgggttcaagcgatcttcctgcctcagcctctcaaagtacagagattacaggcatgaaccaccgtgcctggtcctatttttaattttttgaggaaactccatactgtttttccataatggttgtactaatttgtattcccaccagcagtgtgcgagggtttcctttcctttacatcatcaccaacacttgttcattgtttttatagtagccgttctaacgagtgctaggtgatatctcattttggtttgttttttatttatctatttttgatggagtatcactctgtcacccaggctagagtgcagtggcatgatctcagctcactgcaacctcagcctcccaaatagctgggattagaggtgtgcactatcacggccagaaaatttttgtgtatttagtagagatggggtttcgccatgttgcccaggtaggtctcgagctcctgacctcaagttcaggtgatctgcccacctcagccttccaaagtattgggattacagacatgagccaccatgcccaccctaattaacagtatttgtcaaattttaatgtgcatcanattcttaggtttcagctggcatctgtttccagctcttggtgctatttgcaaccttgnatcttangatgaagc

SEQ ID NO: 515597 - DNA, 947 bp, Homo sapiens
tacccaaagttacccaccttgtatttttaaaaaattggaaaaaaacggacccccccttcctggcggccctttcccctttttatggtcccccccccaaacaaggggggggggggcggcgccttcgattttggggccacccgtcgccccatccttgtagagcggtgtgggccctcccgagggtagttggggcccaaggcccagacccccgagcccttctttctccggggttcgtgggttgtgctgcagccccatgccaaagcccagggtgttgtttgtgccccagagctgtgggggtgtgctgtgggggagaccacctctaagaagccccagaaaaaccctactgtgccgcgggagcgcaacagggcacggggcggcaggggggcatgagttttcccagtgggctcaacagaagaaaacatagtgtgggtgggccctcgtgaaacagagggggagggacccctcgggggttggtgaatcccacttcatccgatggtacaattaatatctgtgggctttataggaaacacggggtccccgctttattcccccaagctgtggagatgtgccagggggtgcaaccagggcccaaggtgctagccctcaaaactgccggggcatcacaaacaactccctccggaggagagaacccccgttgtcgtataatagacgtggtgcgccgcaagaaagggggggcgtataattcgcaggggtatagaaaaaggggcgcttccccccaccttttgggctcaaagaccttgaccccctccctttgagcagcagtatatatggatagcatatcgattactacgcgcagaacaagcgcagagagtacgacggccaaattccccaggggggggggcccacacagaagggggcggcaaggatgtcactcaaggggcggacctatgtgatggcaacgggcaaggcaccctgtagcaccactgtgt

SEQ ID NO: 515598 - DNA, 129 bp, Homo sapiens
tggtgggattacaggcgtgagccaccattcctggccctgaaagaatattttaaatgatcattctgctgctggttgattatgcatactagcagcttgactcaattttaacattttgcagttgaagtccat

SEQ ID NO: 515599 - DNA, 371 bp, Homo sapiens
tgtatgactggtgtgaaggtgtctgagtagtgcggcggtagacgttggtttctgatttattatagtgtatgtgcggttaaattttaggaagaactagacacgttttatatactggtataataatgattgaaggagcagaaggtgtctttggcaggggtgatcaggctcagggaactcaacctgggctcttgaccggtcctggttttctgggaccccctgagcataagttacagctgtgcgtgtctgtctgtggtttactctggggaatcactgaagtcttggtcaggttcacgaaagggctagaccctgtcgtatagattaaccccctctaggaaggggcacagagagccattgcagatcatgcagatgtt

SEQ ID NO: 515600 - DNA, 551 bp, Homo sapiens
gtcttgggtctgtcaccggtacggtgagtgtgatacaggcgggggttttacaggtgctgggtcgtacctgggctctgagttacaaccttagcgtgcattccatctcgtacgagcgtggtacctgcatctgtgagactgctctagccaatctctaagtcccttccttctctaatatacagccgtctgtcaggtcgatgtctcagaacactctcccagctgtggaccactgtggaccacttagcagactcagggggtagttctttactctccctttactaccctggagggacagctctgcccttgaggtccttcagaaatttgtgctgattcggtccctgtgccagggcacagggtggtcaggcactgtggaacgaagggactcaggtgagggtcttctggactctaagacggtaaaggcactaaagtcactttaaagcttttggagaagcaggagggcattggcttaaccaagccgaaggctgctggctgggcttgctagcccagctaagatcttccttcagcccacctcaggatccgggcttgagggctgc

SEQ ID NO: 515601 - DNA, 948 bp, Homo sapiens
ggagaaggaatccgacgctggggggcttgtccgggcggcagcgatgctgctgcggatgggagggggccggctcgggcgcccatgagcgccaggaggtctcccgccactccgtctcgtcggtggagagcaggtggctgggaccctgaaatgggggggggaggacgccattggtctcgacgggggaggcaagggtttcggttcgccagggtgttggggggcttcgggtgaaggggcacagaagggggaatcgagaattgggctttttacaggggccccaactgagttttttccaggcacaggggggtcagaacaggctttgaggaaaaaagggggcgcggttctatcacaaatggtttgggatgggaatactgggggtggagaacttgtggtacaaggagggaattctttgggggaagcccaaagaactccaagtgctgaagacaggaagaggcacgacatgtcgaacgaggttctccacgaggacttcggggatgttacgtggaacctcaagttgggggcttagatggggtcacaagggccattgcgggaggtgacaccgcgaaagttgagggacctgacttggtgttggacggcaaggggaatgttgcattttaaaaggttcccaatcatggagagggtgttttatcaaagtgggacgagattacaattttgcgagtctccaaagggttttgtgtgacatggggtggggtgaacatttggggggtttcttacagaggtatcttagtggcaagggtagataagctggttgccaaggaatttaatggatagggtaaggaggcaggcataattgaactgtgtctgaggtacgttcttgttggaaccgtctcgttggacggggcggtgactgcgttccgaaaaagggcgactggaaatgcatggttaggcttaaaacagtgtcacacaaagagaggcgggtgaagagggcaa

SEQ ID NO: 515602 - DNA, 126 bp, Homo sapiens
cgatctgacatctgaatacgcggctgggggctccaagctgggtgctgtgggtaggtgggggcggagacttggcagggatgaccttgtttaggctgttggggggacaggagccgcgtagtcagatcg

SEQ ID NO: 515603 - DNA, 108 bp, Homo sapiens
tgatctttgcatcggcatccattccatttggcaactctgccatttatttctaaatcatcccgttatcattgtgtaatgacccttgttctctttttatccttttattat

SEQ ID NO: 515604 - DNA, 116 bp, Homo sapiens
tccgtactcttcgtatgactctcctctgctggaccctcctccaattcagactcctctgcgtggactctcctcgtgtatggacactcctctgcctggactctcctccatacgaacac

SEQ ID NO: 515605 - DNA, 327 bp, Homo sapiens
tgttgaacacgtagattgctttgggcaatatggccatttcagtgatattgattctcccaatccatgagcacggaatgtttttctatttgtttgtgtcatctgtgatttctttcagcagtgttttgtagttcttcctgtagagatcttttacctccttggttggatgtattcctgggtattttatttttttggtggcaattgaaaatgggattgtattcttgatttggctttcaggttgaaccttatagtgtatagacatgctactgatttttctatgttgatcttggtatcctgaaactactcaagtcatttggcagagtctttagg

SEQ ID NO: 515606 - DNA, 272 bp, Homo sapiens
taaaatggagtctcgctctgttgcccaggctggaatgctgtggtgcaatctcagctcactgcaacctccgcctccggggttcaacaaattttggtttctcagcctcctgagtagctgggtatacaggcgtgagcaacacgcctggacactatctagctattttcttacctagttccttcatttctcacctccacactcttgcttagcctgggccctctgtttttcctaggccccctgtttttcctaggccccaccctggattccattggggg

SEQ ID NO: 515607 - DNA, 726 bp, Homo sapiens
  misc_feature (59)..(59): n is a, c, g, or t
  misc_feature (63)..(65): n is a, c, g, or t
  misc_feature (596)..(596): n is a, c, g, or t
  misc_feature (603)..(603): n is a, c, g, or t
  misc_feature (629)..(629): n is a, c, g, or t
gagccggtaccttacattatagatttgatcatcgccagtagggttcgggctgactagtncagnnngaattagtaggctcaaggcagtgcccactattcctgctcaggcaccaaatagtaggtacagggtgccgatgtctttgtggtttgttgagtatagtcaacgatttacgaacataggtaaaatggctgagtaagcattagactgtaaatctaaagacagaggttaagccctctttttgccagttccgtggtgaatatcatgttgaattgcaaattcaaagaagcagcttcaattctgccgggacttctcccgccttttttttcctgcggcgggagaagtagattgaagccagttgattagggtgtttagctgttaactaaaagtttcgtgggtatgtaatcccaccaatctagtgaggatttagcttaattaaagtgtttgatttgcattcaattgatgtaggataagtcctgcagtccttaggttttcaggagttaagtactttgtacttacttagagctttgaaggctcttggtctgtgttaacctaaattcctagtttagggacgagagggctggtgttataggtaggantagtgtngataatacaattattgtgggaagtanttttatttgttttgtgtgttcgaattgtcattttatttttatgttattggtggatgggacatagtcagtgaggggcaatcaagcttgggtaccgagc

SEQ ID NO: 515608 - DNA, 1267 bp, Homo sapiens
  misc_feature (59)..(59): n is a, c, g, or t
  misc_feature (63)..(65): n is a, c, g, or t
  misc_feature (403)..(403): n is a, c, g, or t
gagccggtaccttacattatagatttgatcatcgccagtagggttcgggctgactagtncagnnngaattagtaggctcaaggcagtgcccactattcctgctcaggcaccaaatagtaggtacagggtgccgatgtctttgtggtttgttgagtatagtcaacgatttacgaacataggtaaaatggctgagtaagcattagactgtaaatctaaagacagaggttaagccctctttttgccagttccgtggtgaatatcatgttgaattgcaaattcaaagaagcagcttcaattctgccgggacttctcccgccttttttttcctgcggcgggagaagtagattgaagccagttgattagggtgtttagctgttaactaaaagtttcgtgggtatgtaantttcaggtagtaggttgtgttgtttagctctagggctagtatgaatcctatgatggttacgattagggctgttatttttatgtaaaggggtattgttgtgtttggtactgttattggtgggatgttgttggagatgataaagccagcgaaaatgcttccgattaaaaggcgtttaatagagttaattagtagggggttattttcattaattaggactaggggtgggaaacgtggttgtccctaggaatgcaaagaagataattcgagtgctgtaggcagcggttagggatgtggcaattaatgttattagtagggctcaggcgtttgtgtaggatatgtttgctgcttcaatgataaggtcttttgagtagaatcctgtgagataaggcattcctgttaatgccaggcttccaataattagtgctgttgttgtgaatggtattgctttatacagtccgcctatttttcggatgtcttgttcgtcattgaggctgtggataatggatccggagcatatgaatagtattgctttgaagaaagcgtgcatgcagatgtgaagaaatgctaggtggggttggttgatgccgattgtcactattatcaagcctagttggcttgaagttgagaaggctacgatttttttgatatcattttgtgtgattgcacatagtgctgtaaataaggtggtgatagctcctaggcatagtgttatagtttgaactagtttgttagtttctattaaggggtagaagcggatgagtagaaataccctgctactactattgtactggagtgtagtaatgctgatacgggagttgggcctctattgctgagggcaatcagggatgccgaaagtagtacgga

SEQ ID NO: 515609 - DNA, 398 bp, Homo sapiens
  misc_feature (331)..(331): n is a, c, g, or t
gactggatacggtgctgggtctggggactggagggcaggggtccttctgccctggggtcccagggtgctcgtgcctgctcagccaggcctctcctggtgagaccacatcgcccagaagactcagattggtcgaacttggggggctgtgtcacaaccagcccgcccgtcctggttgggctgcagagctcgaccgttggttgccctcctgccccggttcggagagccgagtctgtgggcactctctgccttgcatgcatctgtggctttctaacgacgtcgcgcttcagactgtaatcacaacgatccgtggagctccgtcatttattccaangaagggaacagtccaggctagtgctagcaaataggatgacaatgaaaaccaccagataacatggtgg

SEQ ID NO: 515610 - DNA, 534 bp, Homo sapiens
atgatcgacataaaacctgtctgcgacccagtatggtacatgatgaatatcatctcccattagtataggcgtggagaaatcgatgccaggaacgcagtgatgctagaaggggacactagtcagcgaagtgctggtgtacaatgttttaacaacccagctctctgcgggaagacgtcctggtttgtagtggatgccgataaccatcgtgtaaatactccacacctatggattgatacaagctaacaacataggatcatctgaattgcagagttgggaagaatggacaatataacagctcttgtgagctgaaacaagccagggtgcagaattaattggcattaatagattcagtatctggctacagtgctcttgccattgaccacttgacggacccaggctcaggaccactttaaaataccaaagttaaactctcagattctgctcagactctcactacagtgcctttgaagcgtgtatatcaaactttgagttggtaacccatagaacaggcctgaaacttaatatagggaacag

SEQ ID NO: 515611 - DNA, 1419 bp, Homo sapiens
  misc_feature (59)..(59): n is a, c, g, or t
  misc_feature (63)..(65): n is a, c, g, or t
  misc_feature (403)..(403): n is a, c, g, or t
gagccggtaccttacattatagatttgatcatcgccagtagggttcgggctgactagtncagnnngaattagtaggctcaaggcagtgcccactattcctgctcaggcaccaaatagtaggtacagggtgccgatgtctttgtggtttgttgagtatagtcaacgatttacgaacataggtaaaatggctgagtaagcattagactgtaaatctaaagacagaggttaagccctctttttgccagttccgtggtgaatatcatgttgaattgcaaattcaaagaagcagcttcaattctgccgggacttctcccgccttttttttcctgcggcgggagaagtagattgaagccagttgattagggtgtttagctgttaactaaaagtttcgtgggtatgtaantttcaggtagtaggttgtgttgtttagctctagggctagtatgaatcctatgatggttacgattagggctgttatttttatgtaaaggggtattgttgtgtttggtactgttattggtgggatgttgttggagatgataaagccagcgaaaatgcttccgattaaaaggcgtttaatagagttaattagtagggggttattttcattaattaggactaggggtgggaaacgtggttgtccctaggaatgcaaagaagataattcgagtgctgtaggcagcggttagggatgtggcaattaatgttattagtagggctcaggcgtttgtgtaggatatgtttgctgcttcaatgataaggtcttttgagtagaatcctgtgagataaggcattcctgttaatgccaggcttccaataattagtgctgttgttgtgaatggtattgctttatacagtccgcctatttttcggatgtcttgttcgtcattgaggctgtggataatggatccggagcatatgaatagtattgctttgaagaaagcgtgcatgcagatgtgaagaaatgctaggtggggttggttgatgccgattgtcactattatcaagcctagttggcttgaagttgagaaggctacgatttttttgatatcattttgtgtgattgcacatagtgctgtaaataaggtggtgatagctcctaggcatagtgttatagtttgaactagtttgttagtttctattaatattctctacccttcgacgtttcgttctgctcagcacttttgttcggtgtagtcatgtgtttattgtcatttttgattttgtgtaggacctgaataacgactggctacattgtaaacaatgtcacattgcagtgtgtatttgttcaaattatgtataatcggtaaacatatgtttttggtatttgctttctgtctcagagatgtacgtttggttgtagttattttcatagtcctgtcatttgtccggggatgagttcacgagagcggaccggcc

SEQ ID NO: 515612 - DNA, 112 bp, Homo sapiens
ggggtggtactaaaatccaaaatggcgtttgcaccatttttaagccaattttttccttttgatgttgggtaccagaattactataagggactgctgctttttggggcaaaca

SEQ ID NO: 515613 - DNA, 895 bp, Homo sapiens
  misc_feature (479)..(479): n is a, c, g, or t
gtgaaacacgccgtgttacaccataatacgaatagggaaccaattttatacgccacaagcccctttgttaaaccaccttttgaaaaacacgacataaaacaatgtgtgtcccgcaaaacacttcaaaccctcccggtttatcaaggtcccttcgcacacacagtagtgtcaacaaccccgcgttttgtgcccccaaccgtaatgtaccacacccacaaaggctgtttttattaggcgtcccacacacaatatgtgcgcgataatactactacttccaccgccttccgcaatatagaaaccgccttctttatcagtacaagaaagatcatcgtgaacaccccttctattagaatttgagccaactcccacccctgaaaagcccttagttaattgactactactcccccctcgttaataattttttcctattactaatgcccaatctctctacctgtttatgaagagaataggacctcttnttattctccgcgtgccgcccgtagataagaataatccacacttttcaaagaatgacgtgtgaacaataaccatgttgtataaatgagaatattaatttctccaccgacaagattttcaggtaacaccctctgccaccccaaggatagtgaactactactctctctcgtattgacaaaccactccagataagattaatagtctcattagggcttcttaggccaccactatacgtgacacacgcgcttaaaagataattacttgtccaaaagttcaaccagcttcttatcctcccaaaacttgtcatgctaattttgttttcccccttttacccaacatacactaagatactgcgcccttttttttaaaattggcccccaaaacccccctttaacaaaaaattaaccccccacaaaaa

SEQ ID NO: 515614 - DNA, 1227 bp, Homo sapiens
  misc_feature (59)..(59): n is a, c, g, or t
  misc_feature (63)..(65): n is a, c, g, or t
  misc_feature (403)..(403): n is a, c, g, or t
gagccggtaccttacattatagatttgatcatcgccagtagggttcgggctgactagtncagnnngaattagtaggctcaaggcagtgcccactattcctgctcaggcaccaaatagtaggtacagggtgccgatgtctttgtggtttgttgagtatagtcaacgatttacgaacataggtaaaatggctgagtaagcattagactgtaaatctaaagacagaggttaagccctctttttgccagttccgtggtgaatatcatgttgaattgcaaattcaaagaagcagcttcaattctgccgggacttctcccgccttttttttcctgcggcgggagaagtagattgaagccagttgattagggtgtttagctgttaactaaaagtttcgtgggtatgtaantttcaggtagtaggttgtgttgtttagctctagggctagtatgaatcctatgatggttacgattagggctgttatttttatgtaaaggggtattgttgtgtttggtactgttattggtgggatgttgttggagatgataaagccagcgaaaatgcttccgattaaaaggcgtttaatagagttaattagtagggggttattttcattaattaggactaggggtgggaaacgtggttgtccctaggaatgcaaagaagataattcgagtgctgtaggcagcggttagggatgtggcaattaatgttattagtagggctcaggcgtttgtgtaggatatgtttgctgcttcaatgataaggtcttttgagtagaatcctgtgagataaggcattcctgttaatgccaggcttccaataattagtgctgttgttgtgaatggtattgctttatacagtccgcctatttttcggatgtcttgttcgtcattgaggctgtggataatggatccggagcatatgaatagtattgctttgaagaaagcgtgcatgcagatgtgaagaaatgctaggtggggttggttgatgccgattgtcactattatcaagcctagttggcttgaagttgagaaggctacgatttttttgatatcattttgtgtgattgcacatagtgctgtaaataaggtggtgatagctcctaggcatagtgttatagtttgaactagtttgttagtttctattaatcgctcgaagcgcatcatgtagcaatgctcctgaaaccacaaaagttctctagtgtagtccgcccggcacaaaggggatcct

SEQ ID NO: 515615 - DNA, 355 bp, Homo sapiens
  misc_feature (209)..(209): n is a, c, g, or t
tgtgcatgttgttacaggttttaaatgtgataaaacacacaaaacgcaccaccttaaccatttccagtgcgtggtcggtggtgttacattcacgctgttgcaggcgtgcaggtcggtggtgttacacacattcacactgttgcaggcgtgcaggtcggtggtgttacatttgggctgttgaggcgtacaggtcagtggtgtacacacantgctgttgcaggagtacaggtcggtggtgttacacacattcatgctgttgcaggcgtgcaggttggtgctgttacacacatgctgttgcaggagtacaggtcggtggtgttacatgctgtagcaggcgtgcaggtcggtggtgtaa

SEQ ID NO: 515616 - DNA, 972 bp, Homo sapiens
  misc_feature (108)..(108): n is a, c, g, or t
tctagaggacccgaaacctaataacggggagagggggtggcggtgtatgatggagggataatatcctagtatgttggaaaatttgtatgtttgtgaggggtatttaantttcaggtagtaggttgtgttgtttagctctagggctagtatgaatcctatgatggttacgattagggctgttatttttatgtaaaggggtattgttgtgtttggtactgttattggtgggatgttgttggagatgataaagccagcgaaaatgcttccgattaaaaggcgtttaatagagttaattagtagggggttattttcattaattaggactaggggtgggaaacgtggttgtccctaggaatgcaaagaagataattcgagtgctgtaggcagcggttagggatgtggcaattaatgttattagtagggctcaggcgtttgtgtaggatatgtttgctgcttcaatgataaggtcttttgagtagaatcctgtgagataaggcattcctgttaatgccaggcttccaataattagtgctgttgttgtgaatggtattgctttatacagtccgcctatttttcggatgtcttgttcgtcattgaggctgtggataatggatccggagcatatgaatagtattgctttgaagaaagcgtgcatgcagatgtgaagaaatgctaggtggggttggttgatgccgattgtcactattatcaagcctagttggcttgaagttgagaaggctacgatttttttgatatcattttgtgtgattgcacatagtgctgtaaataaggtggtgatagctcctaggcatagtgttatagtttgaactagtttgttagtttctattaaggggtagaagcggatgagtagaaataccctgctactactattgtactggagtgtagtaatgctgatacgggagttgggcctctattgctgagggcaatcagggatgccgaaagtagtacgga

SEQ ID NO: 515617 - DNA, 620 bp, Homo sapiens
  misc_feature (59)..(59): n is a, c, g, or t
  misc_feature (63)..(65): n is a, c, g, or t
gagccggtaccttacattatagatttgatcatcgccagtagggttcgggctgactagtncagnnngaattagtaggctcaaggcagtgcccactattcctgctcaggcaccaaatagtaggtacagggtgccgatgtctttgtggtttgttgagtatagtcaacgatttacgaacataggtaaaatggctgagtaagcattagactgtaaatctaaagacagaggttaagccctctttttgccagttccgtggtgaatatcatgttgaattgcaaattcaaagaagcagcttcaattctgccgggacttctcccgccttttttttcctgcggcgggagaagtagattgaagccagttgattagggtgtttagctgttaactaaaagtttcgtgggtatgtaatcccaccaatctagtgaggatttagcttaattaaagtgtttgatttgcattcaattgatgtaggatgtatcgtacaacccttagacacacaggacagcaatgcccaggacttcctaagagagctgaaggctcctggtctgtgttaaactataggcataaagcagtgacgagagccacagagttataagcactatcagtgacaataatacagattattg

SEQ ID NO: 515618 - DNA, 656 bp, Homo sapiens
ggatgttatcggttcaccctcatgggttttgtccctggtcccattccacgcccaccgccaagggtggctacagtagccttcatcctcgatattgcccattgcgtctgcctcggctcactctcaacggtcggtactccagctgacctgagacgctttccccaccctctggactttcgtcatctttctgcctcccttcctactccttttggttttttggggagaggggaaggatcagggggccaggccagcagactcgggggccactaggagatggataatgtgcctgtttgtctaacacgacgatacaagcctacctccaaaatcccctttttgttcttcctggacctgggcattcaagcctcctgctcttaactgaattgggagcctgctggccacctgccccgtgtatcctaggctctcagtctcataggggaagcgcagcatagacatccctttcttcgccttgacacgcatcgctagtcagctggtaaggtcttcacatcctgattcctcaagttttctgcttagtggcactgacattaagtagtggggggactagtccactgccaggatcagcctggagatagccttcccccttggccgtgggcaggccctaactcactgtcgctttggagttacgccgggtctttatcttt

SEQ ID NO: 515619 - DNA, 235 bp, Homo sapiens
cagtaatgagcgcggattaatgtgacgaggccctgaacccacgctgtgggctacctaggatcctgctctctggtctttcttcatccagctgcgaagcaatttgaacgcaaacattgtttctctggacgtgatagatgccctgagttcacctctccccagccagtccttattttactgagggtcggtggtgagagcggtcaatgtatatgcagctttggagaagggtggacttgac

SEQ ID NO: 515620 - DNA, 626 bp, Homo sapiens
  misc_feature (496)..(496): n is a, c, g, or t
  misc_feature (503)..(503): n is a, c, g, or t
  misc_feature (529)..(529): n is a, c, g, or t
cttaagctacgatcctatcgacactaatcctacctatacaccagccctctcgtccctaactaggaatttaggttaacacagaccaagagccttcaaagctctcagtcagtacaaagtacttaactcctgaaaacctaaggactgcaggattcatcctacatcaattgaattgcaaattcaaagaagcagcttcaattctgccgggacttctcccgccttttttttcctgcggcgggagaagtagattgaagccagttgattagggtgtttagctgttaactaaaagtttcgtgggtatgtaatcccaccaatctagtgaggatttagcttaattaaagtgtttgatttgcattcaattgatgtaggataagtcctgcagtccttaggttttcaggagttaagtactttgtacttacttagagctttgaaggctcttggtctgtgttaacctaaattcctagtttagggacgagagggctggtgttataggtaggantagtgtngataatacaattattgtgggaagtanttttatttgttttgtgtgttcgaattgtcattttatttttatgttattggtggatgggacatagtcagtgaggggcaatcaagcttgggtaccgagc

SEQ ID NO: 515621 - DNA, 308 bp, Homo sapiens
ccctgagcaccttcctgtacttggatatcgaaatctgaatctctttaagttatacagacttgtacacggaacttgcagcgatatgataatattgaaagtggagctgtttggaaacaagtctaccaagatcttggaatccctgtcttaaattcagctgccggatacaatgattaatgtgcttattacaagtacttatatggttttgaggagtactgtatatcagccaacattgaatttcatcatgcattgcctgagaaagttgtatacaagcaatgtaagtgcaggttgctatatgaaggttgctaagg

SEQ ID NO: 515622 - DNA, 331 bp, Homo sapiens
  misc_feature (23)..(23): n is a, c, g, or t
aagatcatcattgtaatttgtgngccaggtccatgccgctcgagttcactgtagattgggagcaatggtgcatgcattcctacaatcccagcgctttgggaggctaagacaggcagatcgcttgagttcaggagtttgagattagcgtgggctacatggtggaaccctacataacacaaatgttagttgggcatggtggtttgttcctagagtcctagccactcgggagcctcaggtgagaggctcagttgagctcggaaggtttagtgtgcagttatccacaattgggcctctgtgctccagcctgggcgtccaatcaagtcctgtttcc

SEQ ID NO: 515623 - DNA, 345 bp, Homo sapiens
  misc_feature (215)..(215): n is a, c, g, or t
  misc_feature (222)..(222): n is a, c, g, or t
  misc_feature (248)..(248): n is a, c, g, or t
ggggccacaacaatcttcaggtcccaccaatctagtgaggatttagcttaattaaagtgtttgatttgcattcaattgatgtaggataagtcctgcagtccttaggttttcaggagttaagtactttgtacttacttagagctttgaaggctcttggtctgtgttaacctaaattcctagtttagggacgagagggctggtgttataggtaggantagtgtngataatacaattattgtgggaagtanttttatttgttttgtgtgttcgaattgtcattttatttttatgttattggtggatgggacatagtcagtgaggggcaatcaagcttgggtaccgagc

SEQ ID NO: 515624 - DNA, 357 bp, Homo sapiens
  misc_feature (33)..(33): n is a, c, g, or t
cggcaccggatcagacgccacgtgggggctggngctaccaagcggacctggcctctacgctactgacccccaagtggcacccgttgacacgctaggtgtaacgcggcaatttgcccttaaccccgccatgactcgaatggccaccttgttcaacacgggcaaggcggccatccagctcaatgtcggcccgctgatcgtcccgctcactcgagataactacgacagcaccgaccacaaaacctatccgcgcccgccgcaactgttttcgcacaatgaccagcaatccatctggcaatcttcgaatccagaaggcgccaagattggctggggtgggaacatcgccgacgtggcgtctgt

SEQ ID NO: 515625 - DNA, 304 bp, Homo sapiens
cgctgcgtccacccccgtcccggtcctcagcccctctgctgcagaccatcggtatcatctctggaaagattctgaagcttggcggagagggttgtgtgagtggacaccagtgaagtaacggtttttgtgcaacgatgatttgtgttttcctttgctcccctgtaatggcaggaactcggatagtgttgtcttcaggccaggaggactcccaggagagaacggagagccagtgtcctgtgtgtcacggtccatggatgaacgtttgtggaagtggaatgacttaaacaagacgtgcaaagcaaca

SEQ ID NO: 515626 - DNA, 173 bp, Homo sapiens
cggttggttccgaaaacccagaaagtgggaagtatcctcctgatgcctttgatctccagggcctgagggggatctcagcataaacgaagacctggcttccctctaacctctagctgagttcacaaatacccagattgacaaatcttgactcaccaaaagatctcctttattat

SEQ ID NO: 515627 - DNA, 607 bp, Homo sapiens
tcggtcccagatcggcctagtcgatgaggatagtaaatgtgataaaagctgttatagtgctgatgttgagtagtgctaatgtggcccctccaattagatgaattaataggtgccctgctgtaatgttggctgtcagtcgtacggctagggctactggttgaataaataggctaatagtttcaataattacgagcataggaattaatggggcggatgtcttgttcgtcattgaggctgtggataatggatccggagcatatgaatagtattgctttgaagaaagcgtgcatgcagatgtgaagaaatgctaggtggggttggttgatgccgattgtcactattatcaagcctagttggcttgaagttgagaaggctacgatttttttgatatcattttgtgtgattgcacatagtgctgtaaataaggtggtgatagctcctaggcatagtgttatagtttgaactagtttgttagtttctattaaggggtagaagcggatgagtagaaataccctgctactactattgtactggagtgtagtaatgctgatacgggagttgggcctctattgctgagggcaatcagggatgccgaaagtagtacgga

SEQ ID NO: 515628 - DNA, 190 bp, Homo sapiens
  misc_feature (2)..(2): n is a, c, g, or t
cngcaacgctttatattctcaacgctttatacttcctcaacgtttatacttcctcaacgctttatacttcctcaacgctttatacttcctcaacgttttatacttcctcaacgcttctcatttcatttcccggtatgaagtataaagcgttgagagagtataaagctttgtgcgaagtataaagcgttga

SEQ ID NO: 515629 - DNA, 365 bp, Homo sapiens
tctgaccagctgggaaaacaccccgtcactgtgtgcactgcgcatcacgacactgtgtccacctccccaaatcacccccactctctgcaacctccccaagtctcccacactctgtccacctcctcaaatccccccactgtttgcaacctcccaaaatctccctatgtgcaacctcgcaaaatctcacccactatgtgcaacctcctcaaatccccccactgtgtgcacagctccccaaatccctcccactgtgtgcacactcctctagtcccccactgtgtgcaccccccaaaaatccccccaatgttgtggcaaccttcctcaaatacccccttaaatgcgagcaagctcctacaaatctctcc

SEQ ID NO: 515630 - DNA, 122 bp, Homo sapiens
ttactaactacctaattcttgtttatcttctacctgagtgtttatcacaatttttacatgccttgttcacttgtgtgtcacatatttactgtctgtctctccgaaaatgtgagctctctgag

SEQ ID NO: 515631 - DNA, 553 bp, Homo sapiens
cggaaatagcgacgcaatctcagcatagtgtaattgaatgtctcgggtgaaatcatgtagtttaaaaattaaaagacattaatccttcaaaacaaatagaaatcaaggaacaaacacaaactctttcaggaagctaggaaatatctacaactaacgatgaaggaaaatggacggaggatagcacagggcttagcagagcagaggaatagtaaagtgtatttgaagaaagcgtgcatgcagatgtgaagaaatgctaggtggggttggttgatgccgattgtcactattatcaagcctagttggcttgaagttgagaaggctacgatttttttgatatcattttgtgtgattgcacatagtgctgtaaataaggtggtgatagctcctaggcatagtgttatagtttgaactagtttgttagtttctattaaggggtagaagcggatgagtagaaataccctgctactactattgtactggagtgtagtaatgctgatacgggagttgggcctctattgctgagggcaatcagggatgccgaaagtagtacgga

SEQ ID NO: 515632 - DNA, 641 bp, Homo sapiens
ggcgccaggatccaggtgtaaaggggaacccccaatcggggacttcccatcccccaactctgtgtccaccatctgtgttggggagagtggagaccagactgacgcgagccaccccaggtggttggaaccagctcaccgggccagacgcccccgtgtgtttccccagagtagatacactgtccagatcccttggcatcccgagaaatgaaaagattgctgtcgccccgcaacccgatttgaggggcgccaggccagagagaaaaattcttggagaaggggttctaaagagtgcgcggagtgatggagttttgagaaagaaaaccactttttcagataactggaaactttggtgtttgggagtcccggggacaccatcgatctgggtgatccagataatgacccccgacaattggtattttacggcctggacatttttatgtggtgctgggttggagcccggatttccggccatccgccagaccaaaagcgcagcgacaggctcactttgggcccaacacaggaatccacccaaaagagagagcccagccctggtttccacaaaaatattatgggatcatccttcctgtgccaattaatttccctttttatcccaaagagaccaattaaaaattttccaatta

SEQ ID NO: 515633 - DNA, 677 bp, Homo sapiens
atcactttaaatgtgtcatgccactctcttctggcctgcaagatttccactgagaagtctgctgccagatacattgaagctccttcatatgttatttgtttgttttctcttttgagatgcttttaggatcctttctttctccttgacctttgagagtttgattgttaaatgtcttcagttagtcttatttgggttaaatctgtttggtgttctacaaccttcttgtactgaatattgatatctttctctaggtttggaaagttctctgttatctctttgaataaattttctaccccagtctctttctctacctcctctttaaggccaataactcttagatttgccctgttgagggcaaattaattcctttttatttttttctcctctccctgtgtattttcaaatagcctgtcttcgagcttactaattctttcttctgcttgatccattctgctgttcagagactgatgcagtcttcaatttgttaattcaatttttcagctccaaaatttcccttgatttttaaaaattggttcaatcttttgttatattaacccgataggaatctgaattccctctgggttaactcgaatttcattgcacttactcaaaacagctatttttaatatttttgctgaaggtcacataaccttttcatttcaaaaccatcactgatg

SEQ ID NO: 515634 - DNA, 261 bp, Homo sapiens
  misc_feature (236)..(236): n is a, c, g, or t
ccaaagatacactgtgacaacccgagtggctttatttccttaggtggaaaggggctgcttgccgctgctagccaacagaaggggcatggcccatggacttaggggcgggagtcctcatccagtgtgccctaagctgaagcaggttaaaagtttagctctgccagcatgtacccacagaaagattttctagaaaaggtctctttcttttttgagcggtttcattatatatgaagggnttaagaagttttttgaccaagaaac

SEQ ID NO: 515635 - DNA, 1361 bp, Homo sapiens
  misc_feature (221)..(221): n is a, c, g, or t
  misc_feature (490)..(490): n is a, c, g, or t
ggacacaaaactcaatagcatcgtcagctaagctgtctcagatgatgcagatagatccatcagattcttgcagtcccttcgaagaaagactggatggtctggtagaagacaccaacaggatacattgataagcctgccctagcggttagattacacatacgtacgagtgacagtgcatctcaacacatatgctgctagagttaacaatgtggcacacgcantaggaagtccaagaattgctatgaggcacagttgcactgtagtctgtgagaagcggaacgtatgcctgcgttgctctatccagtccatctagttctcgataatgccgcatttcgacaagttgatgtgaattggccacatttgatggaacctaacgcgacaggaacgcacactcgttgacattggaaagacccatgcattgacagcaagggactgcaggatgttctggcagtggagagttggagagagcatacacagggcccacaggatntcgcagagcacttggaggaacagagacgggattgcccatgataacacaggagagaaaccccgagaagggcaaatttgcctcggacaatttgtgtggggtataaccatggtatgttctcaaggcacactagttctcgaacttgtggctgccagttcgcagtatagggtatccagggagagcaaccgaatgaaaccgccttagttccttgaaacgcgagcgttggcaaccaggattagtctaagcaggtgaaaggttgtcttcgacgattgcgatgggccacagccattatgaagttatgtgctcgttacgacaatttcacgttttgaacacccaaaacatgacatactcttgaccaaaattgcacaggtagcctgtacaaacagaccattaccaggattgcaggtcagaaacccaagattgattctcgattccctttttcttatctggatgggaccagcaaattcatgggggttcgtacagggttgccagaatacgaattgggcaccacaggcaacagcacatggtcccctatgaacagcagctacttaaggaacaggatgccaagagaccaccaaaggggaacgtggggaaccggatccgttcacttgggcggacattaatacgacggttacccaatgggactcttatcgctttaacgattttattagggcccatacacgaaaaagggttgctgtgaaaaattggacaatttttgcgaatacataatgagagagaagaactactctatgtgcgaacgagcttataaaatggtgtaccatatatcagagtgagagttaatatctcaaaaaaacaaggggaataattaaccaggaaaacgaatactttagaaacataaattgactaatcacag

SEQ ID NO: 515636 - DNA, 450 bp, Homo sapiens
ttatatacgaggaatttttagaaactgttttccttgtctgcggccattgtgctgctgctacacaactaccgcaagcagcccttcacgccctcctcccagtacaaagctaattgacttgtgagaaatgttaagcttggaagagtcagcatcgctgcacttattttttattctactctgacattagaataatccttgagtgggggaaaggttaaaaacccccctggataagtgttactaattaatgatgattgttttaaacaatgtttggataatttttccttgtcccttgacataaacttgataaataactgagaagtgagaaggagattagtgggttgattaaattccattcaggtacttaaagttagctccaaaaatttagctatttgtaaattgtcatgcatcgttaatgtataagagatgtagatttcatttatctttggtggagcg

SEQ ID NO: 515637 - DNA, 123 bp, Homo sapiens
caggtctcggtggccgctctgcttgcgcgctgttcctgctctgttaactgaatgttgtaccatctttgggtaggcagattccctgatgacatcagtgataaccaaagctgagcagagcgtggt

SEQ ID NO: 515638 - DNA, 173 bp, Homo sapiens
ctcccaagtatgagaaactggaccaccatcctgaatggtttaactgtgtacaacaagtgtctcaaggctacaagcctccggtgtgcaacaataccatctgctttcctggttctccagcttgccaactacagatcttgggacttgtcagcctccataatcacatgagccaattc

SEQ ID NO: 515639 - DNA, 275 bp, Homo sapiens
ctcatagatacttctcaaggtgcagtcatgtcctcacgggtcctctgaaaactcatcttcctccatcccctccccaacgtaccagatgaacaaacggcacgtttgagcatatcatcaggatcaatacttggtgtgtccagagcgatgcccatggcctagagcaatggtctgtggatgttgactcagcgatgcacacagactctctgatacctatgagtcaggatctcgcacacaggtcaccactagtgggatagcattggtggttgagtgccgat

SEQ ID NO: 515640 - DNA, 447 bp, Homo sapiens
cggcacagggcggcctagtgggcgtacgggcctcttttgaacctgagttacgtgtttgacgcgtcgtatgcggccagactaaggcaagtgcttttatatccacggcccattgtcttgacagcaaccctaccaagcaacgtgttatttcctctgttttacggctgaggacgcgcaggaaggtttacagctagaaagggctggagattgtggattcaaactcaggatcagaccaaagccactgccctttagaactttgcgggccgattgattcttgaatctagcttctgccacttcagttgtgtgaccttggggtatctttccgatcccaagtttgctcatctgaaaaatgggaataaagctacagtatctgtcccataggctgggtataaagtgctttactgttgagctgagtgatcatctccgattttcagacccctctcctccgct

SEQ ID NO: 515641 - DNA, 101 bp, Homo sapiens
tctagagatccccaagaaagaactctgggcaagcagacactctgggctatttatacctcagaagttttttggacaggtggtgtgtggtggccttggtacct

SEQ ID NO: 515642 - DNA, 1631 bp, Homo sapiens
  misc_feature (717)..(717): n is a, c, g, or t
aggccatgattgcgaccgtgggatcgctgtgattcgtagacatggccgatgggctatatggcggaccgagttacgatgtctcggtattgtcacgcgaagacttgctcacgtgtgagtcatgtgaggaatggatatcctctggaaccatctcaggagacttacatgactcaaggcggaacgtctagaaattagttgagcgagccaggcttgagagagagacattagacagcccggtgggattggtgcggcgaaaggacgttattctagtagattccatttgagttttccgcggattctcatctagagcatgcaaaagttcatctagcacgagaagaaatattctcatagttctcaggcgcttagatatctgtcgcacaaatcgagtaggacaaggaatgtttgcgaggaagtgggaaaggacaagtggatcagcttgtcaataatcagctggcaaggcagcgtagaaaatgcgtgacacctacaggtccaatgcatctgtatacatatgctcggcataccatttatcgatattacacgcgaacaaacggcagattgccaagagcaaggccggatagcatcctggaccagttatgctggctgcgaatgggcaatccatgtgagggtaggttagagtcgctctcacccgaagctcgcataatcccgtagggagagcacacgcaacgaagaatctcgcgcttggtacttcacactttacangcaatcggggggtagccttggcctcaccattggcaccgggtgttccaattgcagtgcactggagaagcattaccaccggcaaggaaaaacccaagttggttgcgattaccttatccatagggacgtacgacgaggataacatttcttccccctagggtatggttacttaatggggagacgaaagcgaatacaaccgaggggcttaagggcccattgcgtaacagaggcttggggaagatttctctctcccccagggagtttttttcccaccttggtggctataaagagacataatacacaagtgaaactttccaaacacttcagagggaatggcttagtttatttagtcaacccaatcaagttttagggcacagtggaaacattcattaggtacaaggaggtgtgggtagcagaaggttactggtagaagaatgaggacggcggtctcgagacagcgtgtgttcccaaatggaaattgaaccgacagtatagtggggaaggttcaaatctttggtgttggtaaaccggatggggacattgtttattgaaaggatgccgtgggaattggattagggagtaaagataagttggagtgagacgtgaaattcactacaagacgtgttttacactttggaggacaactgcagtgaataacaatgaggtagggtgtatgcgacgaaactagacacaacgttaccatcctgcgtgggggtggtgccacagctactttggggagataaccacactgtaagagtgagaatttacaggggtgaccacagtaatagaatacagaggttaaagagtatatagtgagaagacgacactgcaacatgctctgctgtgtgcaaaagttgtgtcgagactgtgtgtagaacaaatactcggagcagtagtaactgtgcaaagacaagact

SEQ ID NO: 515643 - DNA, 216 bp, Homo sapiens
cacgagggcgatccttgcttccctgagcgctggtccgggaggaaagaacatggcgactggctctggatttgcttcaggtggataaaggaggggacccacccctcatccgagagacgcaggatatgcgcttcaaggacccgggactactggaccagctggtgaatgcacacagcgagtggcgacgatgtaaatttcgagcacacaacttgaacaatc

SEQ ID NO: 515644 - DNA, 515 bp, Homo sapiens
cggctcagtggtcccaggcagctcgggtgtcggaacccccagacagttcacgcgacaaagaatcacgcgggtcaacctcagggacctcatattatgtttagaaaaggaacgtgagacaagccattcactgctgctctacaaagcattccttaagggacacaggaggacgcctggggactataaatatataagcagattacgccttttgggaacgagcaaatgggatattgtttaaaaaacagccacctctttacaatggaacagttttatattcctgtatctaaatcagctcttcagatgcgaaagaaaacacgtttctggaacagagagaacacaaaggcctgtggatactctcaaagggcaattagaacttaactcatgtggaatgaggggcccctcatgccaaacaaggcatatgtaaagaactggagggaattgctaggcaaataagttagcgggccctctggcaacctcataaggaggatgtggaaaaatgagcggcattcgggctcaga

SEQ ID NO: 515645 - DNA, 736 bp, Homo sapiens
aattttgcttcgcaactcttcctgtggaccaagatattgacgctcccacataattttctcttggcacaaaaattctccgtatgtttttcttgtcagcctctctcaagacatataacaaccagttgtgttctctacaatctctttctgatcataacgttgctataacccacctcggtctcacacccccgcaaggtaggctctccacatttctttctcccacacgttgtctataacccccccgctggagggtactaccccccactctcgaaacaatgcttctgtctctttcactcgtattctttgctcttgttcccctcctcacgagttcatacatgttgcgtggaacactcccgcgctcttttacaatttcatttctgtgcgcaatacggtattgcagattcccttacaattttcgaggaattccccttgattccccacaacaagttttggatactttccttatataccccctactccacatctggttcttaaagatttcaccacacgaggctatcataattctgtcagctttcccctcggccaaattttttatcatgaccgcccatagctttaatgaccccaagaggcttctccgtcacccctttgatgccccactactcgtcgcccgctgtttatacatgagagatcatcaacccctttctctttcgggagataactatatttcaataaccccccctgaagacctcccccttctgtccgcatcatagtcagaaca

SEQ ID NO: 515646 - DNA, 326 bp, Homo sapiens
ggtcgacattagaagtccctaagtcttttattagaagtccctaaggccgggcgcagtggctcatgcccgtaatcccagcactttgggaggctgaggtgggcggatcacgaggtcaggagtttgagaccaacctggccagcatagcaaaaccccatctctactaaaaagacaaaaaaaattagcagggcgcggtggtgggagcccgtaatcccagctacttgggaggccgaggcaaggagaatcgcttgaacctgggaggcggaggttgcagtgagccgagattgtgccattgcactccagtccgtacgacagtgcgagactctgtc

SEQ ID NO: 515647 - DNA, 914 bp, Homo sapiens
ggacagggtttcaccatatggtcaggctggtcttgaactcctgacctcgtgatctgcccgccttggcctcccaaagtactgggattacaggcgtgagccaccgtgcccaaccatgaaatatttttacttaaaaatgggaataagctcgcttttttttttttggaaatggagtctgctcctgtgtgcaggctgagtgcaggggcacgatctgggctcactggcaacctccaacctcccggggttcaagcaattctccttcttcagcctcccgagtagctgagattataggcgtgcaccaccacaccgggctaatttggtattttagtagagacggggtttcaccatatgggtcagggcgggtcttgaactcctgacctcgtgatccacccacctcagcaagtgctggggattacaggcgtgtgagccaccacgcccggccatgaaatattttacttaaaaatggggaataagcttttgggtatccggggggtcctccggtcttggcccccagggtcatcaggtaaaaatatcattcatcggaaacgggggctatggcccccttgtgtgcagccaggcggtggagtgggccggggggcacaaacttctgggccacacgtggaaacgtcgccacacactccgggagacaaagacaaagctccccacgtagttgtagaggccgcccccgaggagaacagcggggaaacatcacaggcggaatagtgcaaccacaccacacagcctgagcggctaaacagaagggggtgtctcaccacacaacaacgcacggcgggtcacccgcaaaatcggaccgcgagggtagtggttcagccaaccaccccgtgacacctcggtggtgacgtcaaccgcgggcctataacccccccagaggcggatagagattcacggggacttga

SEQ ID NO: 515648 - DNA, 357 bp, Homo sapiens
tgataagcggataggggcgggggttaggctggagacagccttccctgctaagggctcgtggtccaagccacaacagaggtgctctgtgtggtgtccaggaacatgcagtgccggctccggggaggagggacgagaagagaaaggggagtcacagaggaggctgcagatgagcacgagtttattggactctgggcctcgcgctgcttgcttgatgaagttgatgagcccattggtagaaggcggtcgtgagaggtcacttgagcactggccatcaagctcaggctctattttcttagccagctgctttcccagctccactccccactggtcaaaagcttgttgatgtcccagatgagg

SEQ ID NO: 515649 - DNA, 700 bp, Homo sapiens
  misc_feature (61)..(61): n is a, c, g, or t
  misc_feature (63)..(63): n is a, c, g, or t
  misc_feature (233)..(233): n is a, c, g, or t
  misc_feature (235)..(235): n is a, c, g, or t
  misc_feature (558)..(558): n is a, c, g, or t
  misc_feature (619)..(619): n is a, c, g, or t
ggccgggggccctttatttttaatggcggcagggagggggggtaacatctacccaattccnancaacagcgggttcatgctcctaacaccattatggggtctctgacggcgcacaagctgctattgttctcaacgtgcgtgtcaacagcttacaatatcatgcacctaatgttttaccttccgtgttttcatcatttttattggccgggggggtgtcctactcttccactacntntctacaatgaaagatgttatcaagtctataaccttagactgagcgctgactaagtatttttcttttccacagaattcttccttagctcataccatgccacttggcctctacctaccttaacacgtctcggtgtttctgtctttacgagacgatctcctgcgggacccagctctcttcttattgtttttatattgaaagatttcctacccttccacgcctgaaactctttttatcttgcacatatagttgcacccttacttttttatataatcctcctccccgcccatcttttgatattgtgcctgttttctatttttttcttnttttacctcgattttgtccccttcttctcttttgttttattccctttcgtttgttctctcnctctcttttcttgtcccctcttctcttttcccgctccttttccttcgttttttccctttcttcgcccatattaaaataata

SEQ ID NO: 515650 - DNA, 436 bp, Homo sapiens
ttggacctgaggctctcagtgtggatgcgcccttgcttcatgctgcagcccctgctgacaatgcactgattgtctgcagccccttggaggagtcagccagggaaacctcaggatgcctttgatgaatcaaactgtatcctccccttccaaccccactacttccttcccagccagtatctgatatcctgcctcagccaggacaaccctctcccccacatgtgattgctggtcactagtttgtctctggactcttggcctgtgcagaacatggggtcttggtgtgtgttagagctggccttgaagtcagaattggctaggtcttcgccagggtgattttgatctggttgggcagactttttttcttggtgttgcctccggactcctgagctagacaccggaactatcaataaatgtgtatgaaccatcaaaaaaaaaa

SEQ ID NO: 515651 - DNA, 126 bp, Homo sapiens
taaacaaatctatgttgaagtccttttataaaccagtatcaccttgtaatataaacacctatttgtacttgattttgtaaatttggatttctatatatatcatattttcttaattcattgtacaca

SEQ ID NO: 515652 - DNA, 310 bp, Homo sapiens
atcgcaggggaaaaaaaaatctaaaactcttagtcagtgaccattctccctctgcatttgtttttgtttgttttgttttgttttgtttttttgagacagagtcttgctctgtcgcccaggctggagtgcactagcacgatctcacctcactgcaacctccgcctcccgggttcaagcgattctcctacctcagcctcccgagtagctgggaccacaggcatgtgccactgtgcctagctaattaaaaaatatatattttttgtagggacagggtcttgctatgttgctcaggctggtcccaaactcctga

SEQ ID NO: 515653 - DNA, 141 bp, Homo sapiens
ctgagactgtctgagacaagcttccagaaactcagacgtaaacttccagctggtcacactcaggtgctgtgaggctgggcagagagaccccaggttcccaggatgcggagtctcggaggcggagacacatgaagatggggc

SEQ ID NO: 515654 - DNA, 168 bp, Homo sapiens
cactgtggagggtgtagaatagagtctgagaagcacgaaggaggtcgggagctcatgcaggaactgaactactatctggctccttggcgcactataggtttcttcaaactccatggtaggtgtcaatggccagcttgagacacgcgacgggcatcctctagagctcga

SEQ ID NO: 515655 - DNA, 742 bp, Homo sapiens
tacgacgtcataaaagcgacacatgcgacagacgacaaagactcatatcacccattgtcgctcattggacacgtagattcgggcaagtccaccactactggccatctgatctataaatgcgagtggcactcgacaaacagaaccattgaaaaatttgagaaggaggctgctgagcatgggaaagggctccttacaagatatgccatgggctcttggataaactgaaagctgcagcgtgaacgtggctatcaccaatgatatctccattgtggaaatttgagaccagcaagtacatatgtgactatcattagatgccccaggacacagcagacttatatccaaaaacatgattacagggacatctacaggcatgactgtgcatgtccatgaaagtagctgactggctgattggctgacattctgacgctggtatctccaagaactggagcacgacccgagagacatgccctatctggacttaccacactgggctgtgaaacacactaattgtcgcgtgttaaccaaaaagtggattccacttgcagccaacctaccagaccaggaacagagctatgaggaaaatagttaaacccgaagtcaagaactttacaattaagaaaattggctacaaccccgacacaacgtagcattatgagccaatcactgcctggaatgctgacacacactgctggacccacctgctcaacgccttgatccacgcatcgacacagaaccgacagtg

SEQ ID NO: 515656 - DNA, 430 bp, Homo sapiens
tactacgggtcctgtgagcacgctgtggtgacgaccacgacctttacgggtgctgacggtggatcaggccgacctgtggcgaggctctatgtgtggtaatctggtttgggacacactgtggagaactggatgcaggtaggagccgtggaagtggcacgaactgactggattctgactattatgttcaacagtggacgccagcacagtttgttgactggactgactgtggggtgtgatagaaagacgacggacgtcaaggaccaattctgaggaccttagtcggagcagctggaagcaggaggctgatgtgaatggagatggaatggagctggtttaggtggggatttcaaccatggataccatcatttgaaatgtatcatcagcatcctactggagatatgaactgggcagtaggacttacgcgtttgga

SEQ ID NO: 515657 - DNA, 949 bp, Homo sapiens
cagctgtacccttggttatgggatcccggtcaggcctcgtctgtcggatctggagctcagcctggcgcgcctcccgatcctgtccgacccaccgcactatcgcgccgtgccgctgcccgccccggctcctgccgctgctgctgctcgcgctcctggccgctcccgcctgtccgcgccagcagagccgagtccgtctccgcgccgcggtcctgaacccgagctgcgagtcgcggccaccgcccggcccggtggcccgggaacaccaccgcggtttgggtctggggctggctggtctgcatcggcgagctccaaccagcgatgcgggcgacggcctttggtgacccgcgattatccagtcctcgctccgcggagctacgcgcagcctcaaggcagccggtgatcggtggcggtaacggccgtttaaccggcaaacctccgtcatcgccgtgcctatgcgtagcatgacggcagatcatatcaggggttaaagaccatagtatcaccagaccatgagtgggcattccgttgtgggaaaggtatgagacaaggcatggcaaccattgggggatgtgcaacgggactcgagaccgttggacaggcccttcgtatggacgtacgggaagggctggtaggagagaccgcacgaagacccgacagcggtacactagtaattagaaaagcccccaagactaacaaatcggtaggccgatagtcaccaggacagttctttggctgttccaaggaagcgatgattcacaggtcgagggacagcgcggccgatcaggatataccgcaacaggataaaacccaggcaaagatgggaaggtatagcgcttttcgattaggcaaagacagcgctattagggagacagtacccgcgttgtacaaaagagtatggcccacacacgtaaagattaccataaaagtaccgcccccaattgtataaaga

SEQ ID NO: 515658 - DNA, 133 bp, Homo sapiens
ccttcgtgaccctgggagaaggtgcaccctagagagaatgtgtgcagcgggagcaggcttttttcctactttcactcatctccagccaccacccaagcgttgctacctgcaagaccttcacagaggctggtgg

SEQ ID NO: 515659 - DNA, 777 bp, Homo sapiens
agggaacggcaggaggctcctctagagaatggtggtggtggagactcagggagccggagcttggaactaggatgtggcgcccattaagcgtcaatacctcaccacccagggagacagtttcaccaattcctggaagccaaagggcaggagaagacttgccggggaaacctgaggtaggagaccctggctgtgcaatgagctggctgatgcctgatggcgtaagcggatcctgactgtgatggatggacagacggcgtgactgggcatgacggagtgaggcagcagagccacggggagcagctacatgactcagaagagggccctggggacaagaacaagggcctggtcccatgtgaagcccaacgagactactgacaagaacatgtgctgttgtcccatccctaatccagtgagtcggcttgcataagagtaatcttctggtgatcgcatgcctgctttctgcgacgacgtggggctgcatgaactgtgagacacaaagaccggcacgagcctgggcccccgacatagcgtgcagactcgagacctacggaccggtggccctacaggcgtgaccatgcacgcttcgatgtgggaccaccatgaggcccagagggaacagaaccctggatgcaggaggagaagagggaccagcgggaccagaccccgatacaaacgcaagggcctggaaaaaggcctgcagcagcaggatgagaaacagcgaggacagctcgagcgagctagcaggcctgcgccggtacagcaggccaaacccgtgcg

SEQ ID NO: 515660 - DNA, 604 bp, Homo sapiens
cagcaatctggggggtgtgggcagtcccatcaaaccggggggtaaggtttctcctcgggggtgcccgggcccacggtttcccatgtctctgacatcgttggtccggatggtttagtttaagcagtcgagttctcccaccgctctggccgtgacctcattaacttggccaagaaaagggccaacatcattcctgtgattgaggatgctcgacccccccccaaaaaccgcatgctcatcgcaatggtggatgtgatttttgctgatgtggcccacccaaaccaaacccggattgtggccctgaatgccccccccttcctgggtaatggaggaccctttgttatttcccttaaggcccactgcattgactccccagccccaaccgaggccgtgtttgccccccaagtgaaaaaaatgccaccggagaacattaaacccccggagccgtttaccccttagccatattaaaaagaccctcccgtggttgtggggggggacaggccccccccccaggtgaaaaacttaagttcagccctgtcaggattgcgaaaaatgtgggttgaaactgttgcccgggggtttttttattaaaaaactcctccgtcca

SEQ ID NO: 515661 - DNA, 984 bp, Homo sapiens
  misc_feature (57)..(57): n is a, c, g, or t
gtggactggatatctaggttcccagcatatgatccagtactcgactcggcgagtaantaccgacaagcggtggaaaggggactcctcttaccatcgcatagtcaagactgtctagaaacaattcgcgcacacgctagtttggaccccccacatctgttgtggtacttgaccacgcacgacgttgtccgggtaccatacacgttcgcacgtacgcggagcgctatcgatactagaagtggattacattccaatagaggctcataaaggagactatacgatgaatgagcagatcttatcagagaaggattgtagaaatgacctgtatgagtagatacgccttgatttcttgatgccttagtggagtatgaatcattgtcgtgggggtttagccgcgagactgcgtgtctagatggaagttcgtcgaggtacatctccctcaggaactaggacgtgaagagacaatgtagtagctggaagcggctcgctagaatatgggcctcctattgccccgtagcgaactagcgcagcgttcctttccgtgacttccacactcagaacagagtcgttggcttcggagattggccagttaagtcgttattcacatcatacgcgctcgggtctgacctctgaaaagacgatcacgtaagcgaaatcacggaagacaggtactaaccgcataaaaagttcaaccccatcgcatgtcattggtccgatcagaccacgtgagtgctgggacagtcctgaccactcgaggacaggcgtggcttcagttcagacgagaacaccgcgccctaatatcaacgaagtgatgcagaacttcggatgacggcaaaatctcttaccctctctagaaacaacaccctttaccgctttacccatattaccagtcctgacgcggaaacgtactcaaacgtgtctaacccgccaacaagcattcctcgtcggcctaacccggagaatggccgcggactgtgggcatcggga

SEQ ID NO: 515662 - DNA, 238 bp, Homo sapiens
caaataggactcttctatatctactatgggcacatgcaggtcttcagacataaagtctcccagcccacatcttatgttttgttgtttgtatgttagtttgtttgtttgagacagagtttcactcttgtcacccaggctggagtgcaatggcacgatcttggctcactgcaacctccatctcccgggttcaaggaattctcctgcttcagcctcccaagtagctgggattacaggtgcc

SEQ ID NO: 515663 - DNA, 396 bp, Homo sapiens
gaaaagagatttaaacacagaggtaaatggttaattattagtggccaagttactcaggggactaattttttcttggtacacattcaccaaaattttacacttgaagccaaatagtaaatacctttaggagtagagagtaatccctagcagaagttattttctttatgtcaaagaaaagtaatagaacgcaacccaggcttacgacccctgttaaggagatgattgtttaaagcatcacagttcatgcactttttaaacgcaggagattgacccttgcccttaagcttcttaggggtatctgagcacagccacaagctccatcaggcctgctcagtccaagtaggtctgtaaggtgcctcggcgccgcacatcacaggtacagctatgaaagcctct

SEQ ID NO: 515664 - DNA, 927 bp, Homo sapiens
caaaatgctagtaaagaaaggttcacatcgaaggaactgatgatgtccacatgggctactagaactagactctgggttttagacgtgaattgttactttctttacagcttcctggaacgttgagaagcaacaaaagacattccagatagctgtggctgagcatagagtattgatctcatttatatacatcttaattattgtactccagaataaattggctaattctacatagacaaaaagaaatggctggaccacactcaccacctttatttctatctcttgcgatctattcttaacaactgcaacgctacacatacacttactactactactgctctatctgtgtgtttcacttcacacgaccgtacgacgcttacacaaacacgttcgccactatctgcagaactcccctaatctgtgtccgcactacgcggcaacatacgcacagaccccacagttaccaagatgtcactagctagaacacgaacctacgttggcgacattgtttccaacgcactatgcgccaaactaccctctcacaaaccgattcgcgctgatccactccaacgacggctctggaacactccaattatccccagaagcgaacattacaccaggttgcaacaacattccccctccacgttccttataaacttttgctcccaaccccctccccgccaattacgcggaaactttccaaataggtagcccccagatatagcacgcgtaacttgtttccccaaaccccgactagggccccacggggcaatagaggcattactgaaactttgtaattccccccggaccacaccttcaacatcttgagcacacataacgtctaaattcagcgtgcatctttccaccctggattacgcactgttattctattcaggtatctgggccccccacggcatcaacttgctccac

SEQ ID NO: 515665 - DNA, 818 bp, Homo sapiens
tcgcccttttgttttattttggtacaaaatacttatgtattcatgaatccatgaccaaataactatgaaaacctaatataaaaagaggtgtggtatgggtctcccgccccccaaagctcccctcctctgtgtagaattcagctctgagagtgaccaggaaaccagggctggtgcctcctgggcggggacctccattcagtatccctcaccatcccctcgtgttatcaggtatgggccatccgtggggggtgtaccctgaatccggattcccccaggagttctagaagagaatagagtttccttggggacacggggacttcattgacactacattgtaccccccatcatcataactcgcgtgcccgtgggaacccatcaccatgcgtgagcggaacacagaggaacaccccaacagtatgcggcacgttggcaatcaacccaaacagtagcatccacagtgaaggaagcaatcatcgcggggcaccgcgcgggaatcgcaccagtacgtgagtctcccacaacaggacacatcggccgcaaagcggacccgagggagggcacccaatgataaacgatgggcgggagcgcagaccccagaagacacccaaggtgagtgcccacgaacaccaaaaggggcggtaacactcatcacccacggaagggacgaacaacccaacaatacctacccgccaatgaaggagggcggactctccaccataaaccaagacaccactggggggcttcagcagccgtcacggcataaccatacatgggcccaccggggacatccccccggggaatcccccaaccaaggggaa

SEQ ID NO: 515666 - DNA, 213 bp, Homo sapiens
  misc_feature (1)..(1): n is a, c, g, or t
ncctatggtaactttcggacatccttcccggactgacagccagcgaagaaggattccagcctatgccctcctcacagggagaccaacacatgaccaacatcttcctactgcaaatacttgcatttctcgactttacgtcccactctattcctctaaacagattctcaaacagaaattgtctctcgccattaagaccaagaattttggttttga

SEQ ID NO: 515667 - DNA, 128 bp, Homo sapiens
cggcacgaggcaactggaaaattacgtaaactggaaaagattcggcaggatgatacgagttcatccatcaattttcctgactcgagttagtggcattggtccatctgctgcaaggaagtttgcagatg

SEQ ID NO: 515668 - DNA, 108 bp, Homo sapiens
gcgaaggccgctggcgccgcctcggccagcccttcccgcgcggttccactgccttaggatgaagttgtagggaaccctcgaagttggagctgccagtggttgccaatc

SEQ ID NO: 515669 - DNA, 764 bp, Homo sapiens
gatacaaacacagacccggagaggacttcaacgagtctcagagtgagcgagaaagcactatgccttctggtgctgacgtagcatgctgtcgatgcttttgaaagtccactccttgcatggttatgcctggcaaaccagagggcaccttcgctgcagtcgcgtgtgtctcttgggatgtcattcagcaggctggccagtaggatgagacatccgccaaagtcctcagatttcttgcggtatggtaccgtggcttggctggaccgtaggaattcagtctgcacatgtgttagggtgcccctgacttgggccagagaccccagggaccaggccaggataggcaaagcagaggccaaggagaggccccccctggcccggaacgtcttcaggccagggggtcacagctatggtgggggggccaccaatgccaatgccaggacaaagggaggcaccgggcagacaggaggcctgacacagcccaagaaggatgaacccaaaaagctgccccccagacgggcggcctgaacccaagccaggacaccctccccaaacaagggaggctacagcccggactgtgaccccaaaaggacagcttcccggaggcaaggcacccccaaaagcaggatcgtggccccagctccttcctgctgacgaaggccagggagcccgggcccccagagagccaaagagccgtttcgccacccgcgatagacccaggagtaaatgctctacgtgtacaggacgctgacgatgctggaagaaaggga

SEQ ID NO: 515670 - DNA, 123 bp, Homo sapiens
atggatgatggagagatagatatatagatcagacgtagacgaacagatgatagatagatgttaggtagagtaaatagatatatcatcggtagatggccagatagatgttaagtagacaggtgg

SEQ ID NO: 515671 - DNA, 139 bp, Homo sapiens
atgattctagaggatccctgagtagtgactcagttcttcatcttgtaatgtcgatagttttgccaccctaggccaggcccatgccataccttgtcatgactgtcaaagtgcttgtggttaggtcaaactggttttggtt

SEQ ID NO: 515672 - DNA, 188 bp, Homo sapiens
gatctagaggatcccgggggttcttccggacattcatcactactcactcactcacccagagcaacctccagcctggcaagctctatgatacaagcggtggagtaaaataaatctaagccggccaggcaggatggctcacgccggtaatcctaacagttggggaggctgagacaggcagatcacctgag

SEQ ID NO: 515673 - DNA, 106 bp, Homo sapiens
aggtgccattagacagcagcggcatcaatttgtcaggctttgggagtgagcagctagacaccaaatgacgagagtgatgttacccatgtacactacagttacatct

SEQ ID NO: 515674 - DNA, 216 bp, Homo sapiens
ctgagacattttcggcatgtgatagccctgatctgctcccctcaaaagtcccttggaatatagcctagctaatctcagcatacgcttttcttacatcctggagtatgacattacgccaagcccacttgtctatattgtccttgtctacacatcacttaatcaaccatcaaacttaaaaataccgattatatgaccaatctccattattccacagca

SEQ ID NO: 515675 - DNA, 357 bp, Homo sapiens
agatcacgccactgcactccagcctgtgtgacagagcgagactccgtctcaaaaaaaagaaagaaaaaagggggggggggggagaatagatataaactacagatatctttaataaagataaggaaatcccttttaagtatctagagagcttcctgcagaagtctttagaataaatttggtcctatagttgttttacctttaaaagtctatgtcaagtattgtataaaggcataacactaagcttcattacaattgagtagggaaaataataattcctacctctgttatcttggaaaactgtgtataaacttctattctcaacacataataaccagacttacactaagggaagccata

SEQ ID NO: 515676 - DNA, 171 bp, Homo sapiens
ccggacgcgtgggccggaccgcgtgggcagaaccccgacccctgactccccggtggggaggtggcccaggatgctggagctgaatccgacgctgaccgtttttcaggcaattctatttccccatcggattggaccccttggccccaataaagttggaattttaccccccca

SEQ ID NO: 515677 - DNA, 358 bp, Homo sapiens
agacaggttctcactctgtcacccaggctggaggggggtggcacgatcatggctcatggcagcctccacctccagagctcaggtgatcctcccacctcagcctcccaagtagctgggaccacagatgcctgccatcacgcccgactaatttttgtactttccgtagaggtgggtttttgccatgttgcccaggctggtctcaagctcctgagctcagtctgcctgcctaggcctcccaaagcgctgggattacaggcgtgaaccactgtgccaggccaagggtgatcttcaaacagcctactagctctccagcttggactctctagatcgctattgcctcccgcttcctttctgtcca

SEQ ID NO: 515678 - DNA, 197 bp, Homo sapiens
acacagcaggcattccaatgtattgatcatgcagttgccggcttcatacaaacattgaagctctacaaaaccatgacaatgagtctgtgtataacggcttcgttacgcttaattgcgaagtatttctctgtagagcgcagaggacgatcaacacgttgtacccgaaactacctctgaaggctacactttccaagttc

SEQ ID NO: 515679 - DNA, 422 bp, Homo sapiens
  misc_feature (7)..(7): n is a, c, g, or t
tggccgnggggcaagaacaccatgatgcgcaaggccattcgtgggcatctggaaaacaacccagctctgcagaaactgctgcctgatattcggaagaatgtgggctttgtgttcaccaaggaggacctgactgagatcagggacatgttgctggccaataaggcgccagctgctgcccgtgctgttgccattgccccatgtgaagacactgtgccagcccagaacactgggctcggacccgagaagacctactttttacagactttaggtatcaccactaaaacctccaggggcaccattgaaatcctgagtgatgtgcaggtgatcaagactgtagaccaaaggtgtggtgttaaaaaggggtccccccccccccaaaaaggggttcttcggggggaaaaaaagtatccagcagggtgttg

SEQ ID NO: 515680 - DNA, 192 bp, Homo sapiens
ataccgccgctggccgaatggcacagtgagaggtcagctcctaaggtggtcaaacaggagaacgaagaagaagaagaagacaggtcgggctaagcggcggatgcagtacaaccggcgcttggtgaatcgattgtgcccagcttttggtcaagaatgaagggccccaattgccagttgcgcccagcgggggtg

SEQ ID NO: 515681 - DNA, 213 bp, Homo sapiens
ctctacgacggaccccaggtccgggtcccccactgggacttcgattagcggcagcccgggagctttttcacttataccaggggcagaataagtctccaggtgggtggtatgggtgtgctccaatttttttttttttttttttttttttttttttttttttttttttttttttttttttttttttttgtttgttttttttttttttgggggggg

SEQ ID NO: 515682 - DNA, 265 bp, Homo sapiens
taaaaaaatggccccttggggggggcaatgtcccccccccccccgctagatttgggcccaaagtttttccctgggtcgctgttgctagcagggggattttttttcccgcccccccttttttccccctgaacttgggtaaaaactcgggtttcctgagggggggggggccccccctttgcccccccatttttgtttttctccccccccctccccctcccccgttttgggtactaataaaaaataagccttttggttttctttttta

SEQ ID NO: 515683 - DNA, 729 bp, Homo sapiens
  misc_feature (506)..(506): n is a, c, g, or t
  misc_feature (729)..(729): n is a, c, g, or t
gggcacttgtgataatgcgccgggagcggcgaggtattgcgccagcccggagcagtgttgcagacaatggcgatgaccactcagaaggaggcctggtggagaaccacgtggacagcaccatgaacatgttgggcgggggaagcagtgctgttccggaatcccctcaatgtcgggtgtgggcggtagctgtgccgctgttccggtcagaaggtcactgagtcagacaccggcagatgggcaagggtggcaagcatcaccttggcctggaggagcccatgtaagctgcgtaacacccctctggcaggatcgtcccgtagccaactaggaagctgtgaccagagttcctggaagctggcatctcacgacctatgtcgcacttcgcggatgatgctggggcacctcgtggtagcgacctcatcactccactgctactatcctcgcaacgtgtgtacaagtcatggctctagtacgaactcgttcaaactagttgcatatgaatgtcgtcnttgaaccgtggcatgcagatggtggacgatgcgtcgagtgattgtgaagcgcctctaaacaacctgcgagacagccttgatgcgcaggtggcaaagccccgccaatgctattacgctgtgttgggggaaccccccagatgttgttcagatccttcgtttcgttagcaaacttgaaggacaaggagaagcgcacgaggcctcagacagcgtgggttgacaccan

SEQ ID NO: 515684 - DNA, 457 bp, Homo sapiens
ctttacacctaccctgctccatccattgccttgacttgccagttgctttccccacccccaaggcaaagaaacaagaagcaggagagtgcaagaggctcaggatctgatcttctcaacagcaggagaaaaccctagcctggcttcactcagaagatgtcatcttggattagaaaagagagagagagccccaacttggattgacagagtatggagcctgaaggagcccaggtccctgagacacggtggaacaaagccactatactacctcaggactctgtacgccctgctttatatagaggagaagtaaacttctatctttttaaagcccctatttgttgaattgtattgtcacagccatatccaatcttaaggaatatacaaagattatgccatggcttttgtagcccaattggctatctaggcaagtaaaataatttgaatgatgaaaaaaaaaaaa

SEQ ID NO: 515685 - DNA, 85 bp, Homo sapiens
catggccagacaaaaacttggccttttaagggaaaaaaaaagggggggccctccattttgtttttttaaagccccttttttttta

SEQ ID NO: 515686 - DNA, 900 bp, Homo sapiens
  misc_feature (248)..(248): n is a, c, g, or t
  misc_feature (265)..(265): n is a, c, g, or t
  misc_feature (267)..(267): n is a, c, g, or t
  misc_feature (296)..(297): n is a, c, g, or t
  misc_feature (304)..(304): n is a, c, g, or t
  misc_feature (306)..(306): n is a, c, g, or t
  misc_feature (322)..(323): n is a, c, g, or t
  misc_feature (338)..(338): n is a, c, g, or t
  misc_feature (340)..(340): n is a, c, g, or t
  misc_feature (342)..(342): n is a, c, g, or t
  misc_feature (361)..(361): n is a, c, g, or t
  misc_feature (377)..(377): n is a, c, g, or t
  misc_feature (379)..(379): n is a, c, g, or t
  misc_feature (384)..(384): n is a, c, g, or t
  misc_feature (386)..(386): n is a, c, g, or t
  misc_feature (416)..(416): n is a, c, g, or t
  misc_feature (418)..(418): n is a, c, g, or t
  misc_feature (420)..(420): n is a, c, g, or t
  misc_feature (443)..(443): n is a, c, g, or t
cggacggcgtgggtctgcccacgcgtcgggcgctgcggggcggctggcactaagcggtcctgaggctgtggctacggctgctccggagctggtggcgccgcgataggagagccgatggccaagtggggtgagggagacccacgctggatcgtggaggagcgggcggacgccaccaacgtcaacaactggcactggacggagagagatgcttcaaattggtccacgggataagctgaaaacactgttcntggcagtgcaggttcananatgaagaaggcaagtgtgaggtgacgganngtgagtnangcttgatggagaggcnntccattaacaatcgncnanagggaaacttatcttcttntatgaatggagcgtcnanactanantggacaggtacttctaagtcaggagtacantncnaaggacatgtggagatccccagnttgtctgatgaaaacagcgtggatgaagtggagattagtgtgagccttgccgagagatgagcctgacacaaatctcgtgggcttaatgaaggaagaaggggtgaaacttctaagagaagcagatgggaatttacatcagcacctcagaacagagttcacccagggcatgatcttacctacagatgaatgaggaggtccaagtagaccccaggtggggcatcagcactgaaaaactgaggagcgcaagggctaaggctggtccttcaaagacccaggcagacctgttggagtaaaatccccattgttagatcactcttaagggaaccttctgaggtttccgaagagccccataggggtatcccccaagaatgggaaggcgttacccaggtccttgatttagccaccagggggagtcccctggaatggcgctcgggattatggtggcctcgaacatggg

SEQ ID NO: 515687 - DNA, 844 bp, Homo sapiens
  misc_feature (142)..(142): n is a, c, g, or t
  misc_feature (184)..(184): n is a, c, g, or t
  misc_feature (284)..(284): n is a, c, g, or t
  misc_feature (327)..(327): n is a, c, g, or t
  misc_feature (331)..(331): n is a, c, g, or t
ggacttcccagattgtgcactctccatccagggtgcgctctcgtcgggagtcccagccatgtccgacgagagagaggtagccgaggcagcgaccggggaagacgcctcttcgccgcctccgaaaaccgaggcagcgagcganccccagcatcccgcggcctccgaaggggccggccgacgccgncgcctcgccgccactgctgcgctgcctagtgctcaccgtggctttggagtgctacgacaatggtgaagcttgcagagcctggcctggcatgctgcccccnggcccctgggccctgggcagctgacgctgcgtctgcgtggccntgcngggctcaacttcgcagacctcatggctatggcatggggctgtacgacctgtctccctgcctctgcctgttcactcctggtcatggagggcgcgggtgtcgtgatcgcactgggcgagggagtcacgcgaccgggaaggccaggcagaccggcgtgagtggtgttgaaccgggtccagggctgtgcgcacggaacaaggtgagtgtaccctcggtgccagaccttcctggattcctgcacggaccattgaccttttgaggaaggcgtggctgcctgtgtgccggtctcatgtagcatggacagggctaacatgggttgctacttttgaggtgtcaggtggaccttagcaagtcctggaccatgaggccgtatttgaatactagattggtgtagcggggggggatttggattatgtggttgccagtgtcagttgtgggggtagcattggcgaactgtggcagtgttcggaaagggcctcgtttgatgacagatggagggaccttaaggctacttc

SEQ ID NO: 515688 - DNA, 965 bp, Homo sapiens
  misc_feature (60)..(60): n is a, c, g, or t
  misc_feature (113)..(113): n is a, c, g, or t
  misc_feature (164)..(164): n is a, c, g, or t
  misc_feature (313)..(313): n is a, c, g, or t
  misc_feature (330)..(330): n is a, c, g, or t
  misc_feature (332)..(332): n is a, c, g, or t
  misc_feature (361)..(362): n is a, c, g, or t
  misc_feature (369)..(369): n is a, c, g, or t
  misc_feature (371)..(371): n is a, c, g, or t
  misc_feature (387)..(388): n is a, c, g, or t
  misc_feature (403)..(403): n is a, c, g, or t
  misc_feature (405)..(405): n is a, c, g, or t
  misc_feature (407)..(407): n is a, c, g, or t
  misc_feature (426)..(426): n is a, c, g, or t
  misc_feature (442)..(442): n is a, c, g, or t
  misc_feature (444)..(444): n is a, c, g, or t
  misc_feature (449)..(449): n is a, c, g, or t
  misc_feature (451)..(451): n is a, c, g, or t
  misc_feature (481)..(481): n is a, c, g, or t
  misc_feature (483)..(483): n is a, c, g, or t
  misc_feature (485)..(485): n is a, c, g, or t
  misc_feature (508)..(508): n is a, c, g, or t
ggcagatcatttgaggccaggagttcaagaccagcctgtccaacatggtgaaaccctgtntccactaaaaaatacaaaaattagccaggcgtggtggcgagcaccaccgtggncagccctgagtcccaagtactcaggaggctggggcaggagaatcacctgantccaggaggcagagattgcagtgagccgagatcacagacccacgctggatcgtggaggagcgggcggacgccaccaacgtcaacaactggcactggacggagagagatgcttcaaattggtccacgggataagctgaaaacactgttcntggcagtgcaggttcananatgaagaaggcaagtgtgaggtgacgganngtgagtnangcttgatggagaggcnntccattaacaatcgncnanagggaaacttatcttcttntatgaatggagcgtcnanactanantggacaggtacttctaagtcaggagtacantncnaaggacatgtggagatccccagnttgtctgatgaaaacagcgtggatgaagtggagattagtgtgagccttgccgagagatgagcctgacacaaatctcgtgggcttaatgaaggaagaaggggtgaaacttctaagagaagcagatgggaatttacatcagcacctcagaacagagttcacccagggcatgatcttacctacagatgaatgaggaggtccaagtagaccccaggtggggcatcagcactgaaaaactgaggagcgcaagggctaaggctggtccttcaaagacccaggcagacctgttggagtaaaatccccattgttagatcactcttaagggaaccttctgaggtttccgaagagccccataggggtatcccccaagaatgggaaggcgttacccaggtccttgatttagccaccagggggagtcccctggaatggcgctcgggattatggtggcctcgaacatggg

SEQ ID NO: 515689 - DNA, 804 bp, Homo sapiens
  misc_feature (142)..(142): n is a, c, g, or t
  misc_feature (184)..(184): n is a, c, g, or t
  misc_feature (284)..(284): n is a, c, g, or t
  misc_feature (327)..(327): n is a, c, g, or t
  misc_feature (331)..(331): n is a, c, g, or t
ggacttcccagattgtgcactctccatccagggtgcgctctcgtcgggagtcccagccatgtccgacgagagagaggtagccgaggcagcgaccggggaagacgcctcttcgccgcctccgaaaaccgaggcagcgagcganccccagcatcccgcggcctccgaaggggccggccgacgccgncgcctcgccgccactgctgcgctgcctagtgctcaccgtggctttggagtgctacgacaatggtgaagcttgcagagcctggcctggcatgctgcccccnggcccctgggccctgggcagctgacgctgcgtctgcgtggccntgcngggctcaacttcgcagacctcatggctatggcatggggctgtacgacctgtctccctgcctctgcctgttcactcctggtcatgtgatgtgtgctgctgtggttgtttgttgaatctgcatgttgtgtgctgacgggagtcagctgacctgcaatggcatgtgatgacctgggtgatggttgtttgaaccggtcatgtggacttgttggcatggaagaggtgacttgtgccctcggtccagaccttcctgattcctgagtgccatgaccttttgaggaagctgctgccttgctcgtcaattacattacagcctacatggtcctctttgacttctggcaacctacagcctgtgccacagcgtcttggtaacacattggctgcagggggtgtgggtatggctgccgtgcagctgtgccgtaccagtggagaatgtgaccgtgttcggaacgggctcggccagagcaagcccgagg

SEQ ID NO: 515690 - DNA, 577 bp, Homo sapiens
taccacagcgcactaccttattagtatcagctaatttattcttcaccccaacccctagcaaccaccattttactttctgtgtctatgaatgtgactacttgtagataccttatgtaagtggaatcatacagtaattggctctctgttattggcttattctttcagtataaggcccttaagattcatccatcttgcagcatatgacaggttctttctttttaaggctgaataatattcccttgtatgtacatactacattttctgtatccattcatatgtcagtggacatttcggttacttcgacctcttatctattgcgcaaaatgggccaataaacatgagtgtgcaaatatctcttcaagattctgccttcgattattttgtatatatatacccagaaaaagaagggggaggctgggcgcagtggctcacgcctgtaatcccagcactttgggaggccaacactgggcggatcacgaagtcaagagatccagaccactctggccaacatggtgaaaccccgtctctactaaaaatacaaaaattagctgggtgtggtggcacgtgcttatagtcc

SEQ ID NO: 515691 - DNA, 721 bp, Homo sapiens
tcgatgccgcagacctggtttaagccagatctggtataacaagtctaggacggccaccaagatggaccgcttgctcaaggacatgacgatcaagttcctcgaggacatctatatcatctccctgcccatgaagcaatcagcgatcattgctatcattctgcaagactctatcaaggacgcggtggtgaagattatcccagagcagaatctgacccgtaccgcacagctgacacggttccaggcatatcatgctatcaggttcaagcatgatcacggctactggattacaagtgctacatggatactgggcgtcgacatacgcaaggacatgatcatggtcaagctgtgcatcattatcgtggcaaagactactggggtaacaagatcggcaagtcccactactagcactttgatggagtctgaccactataccttctaaggtgagacgactcatcgatgtacccatttgtaacagcattgcttccgaaactgtgactacaatgctcctcatgaccgttggctaacgatgactggatcacctcaacccttgaggtacagttgcaccctgggccaattttggcatgacccacctttggtagcatttgtaaaagccacttttactctacccctaacgcctttaaggagatggcattaacaactgtcccttttataaatcaccgccctttgaggtgactagagtttcgggcagaggaccttcttc

SEQ ID NO: 515692 - DNA, 152 bp, Homo sapiens
  misc_feature (2)..(2): n is a, c, g, or t
  misc_feature (141)..(141): n is a, c, g, or t
tntttgggaccgagaggaaagatacaggtttatgatcttgccgacaaagcacgtgacaattgacgtctggcgagggggcatcttcacaagagacagtgaaagatgatgggggaggaatagaatcaggttaaatcaataggnatttggaacac

SEQ ID NO: 515693 - DNA, 1005 bp, Homo sapiens
gctggtgtgctgcacccatagtaactgacttctaaaacatacattcactgacaaaatgatggtgaacaattcgttctgtgtaagtaagacgtaggcatctccatattgtaacactggagaggagaaaaaccaaagccaacatagagcccttgatatcccctcggtagtcaggacctaggggtttacagtaaggagcagcaggcaacaacattaaccttctaacagcaagctatcaaaatgaacttgaaataatgcacttagttccatgtagtccttaacctccctgtgagaaacctgcacatgccttgcttcctaattcttcttctggagctcagggccaggattggtagtgctgcatatagagctgtgttgggaagaactgtaagactcaatgaaggaagagtgtagtgatcaattagtgatgtctgccaagagtatgggaagggatggggacagcacatgtgctatgtatttgccaaccctgaactggggcatattttcagtaagctgtctctgccatggaactgtagtgtacaaagctaaactagtattaatgaatactagttactagtacctagtattcacttgtaacttctccagcatgagataattagtgcctttgcttgaccttccagtgcaacaattttcacagactttaccagtaattctcatagatgacagacacactttgcgtagatatgactagtctggggattcagatcactaggctgttgcaaagtcacccaagatagtagccacgaaaaagccacagaactgcacacacacttacgcacacacaaatacgaaagcacaacacacggtgcaacaagaccacagtacgacacgcagacaccactcacaaagaatcatgagcactagcaacatacagaaacgagcagggaagagcagaggcagtcgagtagcgggaccaagagaagcacgacagagccagacacgcagtatacgaaccacaatgtcacgcggcagcgacaacaatcgacaaag

SEQ ID NO: 515694 - DNA, 137 bp, Homo sapiens
ttgtagcgggcacttctcaccctgagaattgggactcaacagtgggcagctgatgacacacttggtcagtgactttcccccaggagctgccgtgctgcatgtcatgtatgagtcacctttcacactgctgtactgtg

SEQ ID NO: 515695 - DNA, 471 bp, Homo sapiens
  misc_feature (137)..(137): n is a, c, g, or t
  misc_feature (146)..(146): n is a, c, g, or t
  misc_feature (148)..(148): n is a, c, g, or t
  misc_feature (150)..(151): n is a, c, g, or t
  misc_feature (158)..(158): n is a, c, g, or t
  misc_feature (163)..(163): n is a, c, g, or t
  misc_feature (170)..(170): n is a, c, g, or t
  misc_feature (173)..(174): n is a, c, g, or t
  misc_feature (176)..(176): n is a, c, g, or t
  misc_feature (188)..(190): n is a, c, g, or t
  misc_feature (195)..(195): n is a, c, g, or t
  misc_feature (197)..(200): n is a, c, g, or t
  misc_feature (206)..(206): n is a, c, g, or t
  misc_feature (211)..(212): n is a, c, g, or t
  misc_feature (215)..(216): n is a, c, g, or t
  misc_feature (225)..(225): n is a, c, g, or t
  misc_feature (230)..(231): n is a, c, g, or t
  misc_feature (236)..(236): n is a, c, g, or t
  misc_feature (242)..(242): n is a, c, g, or t
  misc_feature (251)..(251): n is a, c, g, or t
  misc_feature (257)..(257): n is a, c, g, or t
  misc_feature (283)..(283): n is a, c, g, or t
  misc_feature (286)..(287): n is a, c, g, or t
  misc_feature (300)..(300): n is a, c, g, or t
  misc_feature (308)..(308): n is a, c, g, or t
  misc_feature (311)..(312): n is a, c, g, or t
  misc_feature (316)..(318): n is a, c, g, or t
  misc_feature (320)..(322): n is a, c, g, or t
  misc_feature (324)..(324): n is a, c, g, or t
  misc_feature (329)..(329): n is a, c, g, or t
  misc_feature (334)..(334): n is a, c, g, or t
  misc_feature (338)..(339): n is a, c, g, or t
  misc_feature (342)..(342): n is a, c, g, or t
  misc_feature (355)..(356): n is a, c, g, or t
  misc_feature (358)..(358): n is a, c, g, or t
  misc_feature (364)..(364): n is a, c, g, or t
  misc_feature (373)..(373): n is a, c, g, or t
  misc_feature (375)..(375): n is a, c, g, or t
  misc_feature (390)..(390): n is a, c, g, or t
  misc_feature (399)..(399): n is a, c, g, or t
  misc_feature (406)..(406): n is a, c, g, or t
  misc_feature (408)..(408): n is a, c, g, or t
  misc_feature (443)..(443): n is a, c, g, or t
ggcggcggacgtgtccgttactcaccggcccccgctgagccctaagtctggggccgaagtcgaagccggcgatgccgcggagccgggcgccggaagaagagctgccgcctctagaatccagaagagaatccggaaangcctggaanananngagcgcnagttncgtaaangcnngnaagataatgatnnngggcntnnnnggggangtgannaannaggaagtanatganntgctnagtgantatgagctnaaatantgttttgtggaaaaataaaaaggganagnnttagtgaaaatgntgaatggngannaggnnnannnanaaatnaatgntttnnaanagagccagaatgnngnacactnaaatctacntnaacatcaggaaaaangatgaaatnatgtgtntncaaaaatgaaaaaaagaataaaaaagaagaagttngaggagctggtgcggaccttaggcaaga

SEQ ID NO: 515696 - DNA, 166 bp, Homo sapiens
ggacctgcctactgggcgtatgccttttccgtaacactcacaaaactaactagatactaacatctcagacgctcaggaagatagaaaccgtctgaactatcctgcccgccatcatcctaggtcctcgatcgtgctctccgcgatcgcctacggcatccgtttagca

SEQ ID NO: 515697 - DNA, 696 bp, Homo sapiens
  misc_feature (3)..(3): n is a, c, g, or t
  misc_feature (5)..(5): n is a, c, g, or t
  misc_feature (16)..(16): n is a, c, g, or t
  misc_feature (26)..(26): n is a, c, g, or t
  misc_feature (38)..(38): n is a, c, g, or t
  misc_feature (52)..(52): n is a, c, g, or t
  misc_feature (64)..(64): n is a, c, g, or t
  misc_feature (165)..(165): n is a, c, g, or t
  misc_feature (354)..(354): n is a, c, g, or t
  misc_feature (382)..(382): n is a, c, g, or t
  misc_feature (424)..(424): n is a, c, g, or t
  misc_feature (485)..(485): n is a, c, g, or t
  misc_feature (487)..(487): n is a, c, g, or t
  misc_feature (518)..(518): n is a, c, g, or t
  misc_feature (590)..(590): n is a, c, g, or t
  misc_feature (641)..(641): n is a, c, g, or t
  misc_feature (662)..(662): n is a, c, g, or t
  misc_feature (676)..(676): n is a, c, g, or t
ccntnaagtccaaggngaattgtggngctggagggcgncccctccccggagnttcctcactgcnacaagtgagggaggagggggtcgattctggtttaggggccggacccactgagaggccccagagccgcccgtgatgttcctcccccgtccccatctggcagntcctgtctcgcctgagggacccagccgccttctccgtgctctggggccgggcctcgctgcttagcagcggcctctagctccgtctcccggggacctgggcctgagggagggctggagtcgcacgcgctttgtccttagcgcctgtctgctctcctctaactaggacccaggggctttggtttccccagntcatccttggaccttccgctccaccagnctggtctgaggcgtgctctgtccttagagaaggcgcggtggncgggttcccttcccctaggggacattactaagggggtcaggcactgcatgctcgttccagnancatcttgggactgggtacaagtacctccagnccccaggggccctgacctggggaacctaggttggaaatcttcacggaacctccccaggaggttgggggccanttgaattaatcccggacctcaacaactctttttcctttggagcccaaaggnaggagttgggggttgggggcnacccaggaaagggnaagtttttggttgggggccc

SEQ ID NO: 515698 - DNA, 340 bp, Homo sapiens
ccgcagctcggggctggttggaatggaaagccttaggaatatggcagtgttccagtgtgtgaacaaatcttcttgtccaagtcctccagttattcctattgggagacacacaggaatacacctctggaagtctttccctttgggaaaacagtagattacacatgcgaccccctacccagtacggagggacgagcttcgacctctttggagagagcaccatccgctgcacaagttaccctcgtgggtctggggtttggagcagccctgcccctcgctgtggaattctgggtcactgtcgagccccagatcattttctgtctgcccagccccagctgcgcgc

SEQ ID NO: 515699 - DNA, 357 bp, Homo sapiens
cagtttctcaaataatattgtttaattcaacaatgtttcattataatgtttataaaaaaaaatttgatgcccagctggggccactgtctgtgtggagtttgcaagtcctccccatgtctgtgtctgcctgtgttttctctgagtactccagtttcctcccacacatcaaagctgtgcacattaggtttgttggtgtgtctcagtggtcctagtctgaatgagtgtggatgtgggcatgagtgtgtgctgtgatgggacagcatcctggccagggtcgggtcccacttggctcctgagctgctaggacaggctccagccacccaagatcctgcactagaataaataagtaaataatta

SEQ ID NO: 515700 - DNA, 286 bp, Homo sapiens
ggggggggaaccctttttcccccgggacccggtttgaaatggtttgggttttttaaggcccccctttgggggatttggcccccggggcccaaaattgggggggggggcccccttccccccaagggggttttcccccctcccccctttcaaaaccgggtttttttggtttgggagggggggggttttttttttggggggtttccttttttttttttaaggggaaattttttttttttcgggtttttagggggggaaaaaaaaaacccccccacccaaccccatttga

SEQ ID NO: 515701 - DNA, 739 bp, Homo sapiens
  misc_feature (374)..(374): n is a, c, g, or t
ttgaagtgcggggtctgtgctctgcgagcgactatggacagaaaagatgctcgtactgaaaagcggcacgtattagcacaacggctggatcactcaggtactggaccgctagttcctgtgccatgaagatcctgtaccatagacacttgcttttaaagctacgtgctgccaaaacaaagctgagccaggcacaatctgcctaaggaacaattcgacgcagaatacatgccaagcagtatataagttttccattaaaaaaattacaatttaaaaaaaaaaaaaaaaaaaaaaaaaaaaaaaaaaaaaaaaaaaaaaaaaaaaaaaaaaaaaaaaaaaaaaaaacaataatttaaaaaaaaattttaatattgtanatattttaattattttataattattaaatattctttttctaacctcgccgcccaaatttttttttttcggggccaatctcccgaaaggcctcaaattgggcgcccctatgccctgcgccccctatatggggtccttttcacaaacacggcccggtgggtaacacacacaactgggggaaaccctttgtttccccatttttggaaaagcccgctcccctcttttggagggggggaataaaaaatagtttccaaacgggtctttataaaaggggggcccccactgttgctttcataaaaggtgggcgccttttgtggaaaaaaatgggcgaatatttttaactgcactttttgtaacaaagggggcc

SEQ ID NO: 515702 - DNA, 986 bp, Homo sapiens
gcgcggagaaggggtgcgatgctggcgtgatggctggaggaggctgccatggacgacgaggaggagactgtacctggctctggaaaatccgacaagaccatcatgcagctgtgccacgaccgtggcatatctggtgaaccaggacagagcttgaccatcaccctggaggagtacaaagcccaaataggggacaagcctgagatgaggcggcggccgcggcgcacggaccgtcacacgatgactggtggccccacaaacgatgaccccaccgaacaggatgtagcgatgctctatcccaagaggagcaccaaggtggagcatcgaagaccatcaaggatgatacattgacagcagcatgcgaggaggagaacaatcaacacgggctctcactccgatggtgcagacagggccatcgaccacacctaccgacaacgccagccccatgagtcgcaacactggccaccacaaggtagcatccctaggaacgcaggacaccgtgaaggacaggacgcatgcctccagtcaaccagtacacagggaagaaagcagaaggcatagtaccagtgaagcaacgaaacaagtcaaagaaccagaggaaggaagagatgacaggaagacatggagggacgcccggacatcatcaagaggcgtgacggaagaaggaaaaccaaggcataggaccccaagggggactacacaagggccgagggtgagtgaacaccccattcgatgggcgggcggcaggcagcaaccagatctcggcgcgggcgacaaaacaggcaagctcagcgcggccacagagagttaggagcaagaacagggactccgcgagcgcccagcggaacccaacagcgttagaaacgaaaccggagggaggggagcagagagtgagaccatccaacacacctagaaccccgcgggctggggcaggcaaagagaaacggcacgaagaatgagcatagaagaccacagagcaccgcaaggac

SEQ ID NO: 515703 - DNA, 148 bp, Homo sapiens
cgagggtgggcagatagcttgcgcttctatcgtgagtgagatcgtagagatgagagttggatggaggtcgggcagatagatgtggcttcatcgtgagtgacatcgtgaatgtcatctaccggacgcggagtggatctataggtctaca

SEQ ID NO: 515704 - DNA, 221 bp, Homo sapiens
tacttccacaggactgcagttttcacggtgcatcagaattacctggagggctttttataacccagattcctgggtctctccctcagagtttctaactcaataggtctgggaatggggccaaagaatctgtatttctaataaatttctgggtgatactgatgttgctgatccagagaccacattgtgaggactgttgctatgaaggactgcatgggaataat

SEQ ID NO: 515705 - DNA, 364 bp, Homo sapiens
caagtcaatgtggcagctaatgaaccagtttgaacagaattccatatgaaagacggcacacctggatatagttgctgggccagcaggagatgatagtgagagtgtgtcacagagacatgctcaacatgatctctagttaggttcgcttcactatagaacgcactggtagtcgaaacttgtgacatcgagttgtagcgtgaatcatttaactgtaggaagctcttgccaatgtcaacaatgcgttggatgtacacggatcagtcgaggtagtggaactggttaagggcatataagtggatgtctctgtcaatctatctctctctctcgcaaactctctctcgctatctctcgctctgtatctgtc

SEQ ID NO: 515706 - DNA, 127 bp, Homo sapiens
  misc_feature (48)..(48): n is a, c, g, or t
ccaggtttttgttatcttgtcttttttatgttgtaattttaccttatnttgtatgattttggatttgtaaatgtgtatagagatccattcctgggcatcttggcaaaaccccatctctacaaaaaaa

SEQ ID NO: 515707 - DNA, 955 bp, Homo sapiens
  misc_feature (273)..(273): n is a, c, g, or t
gtagacaatgcggacgtcccgctacggcactggattgttcatcgtggcagtgactgaaaacgaaaattatctatgggtgtaaagtagatgacaagggcattcagcgactcttatatatacagcgtcgtcccattgcgcacagtgctgaacaaaggtccgagcatgcactacgtagtgggtccaaattggccatctggatcacattggagctgcgaagcagagcgtcgagcactccatggtattcaggtcctctgaggcctgccagccagtaangaacaaaaggcaatccatcatggaggagaggataccactgatgcgagtcattaggcagaatcccgagcaagtacatcccttgggaacataaaatgatctgtgtcggcaacttaagcaagagaggaagaaagggccagacttaatagcttatctccaaaataagctactaaatgacgtaataattggccactgccttatgtaattacaaaacagagaatgtctcatgactttttctatgtgtaccatcctttaatagatctcataccccagaaggtcagatcatgaatgactgacgcgagctaatttgttgggcagtctgatttagaactaagactggctgtggtgaacctgaatttgtgccgttttgaatttgaagtagtaactcccaattccgtaatggtatcactgttatcccttttagcgattgatcagacttcgttagtatgttcactttgacaacatgtggtgcatctaaaatactgcgcatggttgcttttcgcttcatttacgggcttggacttccccatcggggcactggtcctgtttaaccgaactgccgtgtgggccggcaagcctaggggggagaaaagagaacctttgtcggaaccactaaccccgtaaaggccctagacgggcgaacccccctctgtcacattccacttcgcagtctcatgcactcctc

SEQ ID NO: 515708 - DNA, 225 bp, Homo sapiens
agttttgccccttttgcaagtttggtgccagcttcctaccactcacaggcgcgctgcttcaaaacttttggggtttttgtaaaaaacttgaaatggcaaatcccaagataggtttcaataaccaggattattttttacgttaagttaaatgtatgtgatctgtaagttggatttttcatgatgaatttgaactaaggcaaaaataaaattcctttcctttaagga

SEQ ID NO: 515709 - DNA, 185 bp, Homo sapiens
atgcacgcgtatacgggtatgtgcgcgcggccccatcacgcctttctcggccctttagttcatagcagttcagctctgctctttagtctcttgatgtctcaatcttacatgtattccattgtgattggtatacatgtaagattgagacatcaagagactaaagtgttgagttgtactgtgaaaaa

SEQ ID NO: 515710 - DNA, 957 bp, Homo sapiens
ggaacctcctgccgggctcgtggcggctactgtccgctccgcggtggaaagcgctttccccacaggatatcaatgcaagcttgagtaggaaaagacacattcttcctccctaagccatggatatcaacggttatacgagaaatactacgttggggaaccagtgcttcaggagagcctagatgagctcatacagtctcaatcaagatcagcccccaatttgcccttcaagttctacttcagtttgataaggctataaatgcagcactggctcagagggtcaggaacagagtcaatttcaggggctctctaaatacgtacagattctgcgatcaatgtgtgggcctttgtgtactggaatgatgttgacttcagagaggtgacagaagcttattaacagtgggctccaagtgcaaatgtgtagcctgtgagtggtaaaaagtactggctccaatactacagaatgatactacaagaatgactagaaacaattatgacttttttacaccatcttctgtgattcatttgcttttgaagagaagcatagaagagacttttatttattctagaattgcagaaatgactacactgtgctataccagagaatccagtaggacacggaaactttgtaagttctgttagcctctttaaatcgacctttttattatacaggcatggaaaaaccataagttctttttaagggcccaaaggtggtgccttcctaaagaaaccctctttaattaacctcattttacaactcctgataaccaaaagatagctgtagcacgacagatacataaacacaaaagggggcgcgctataaaatcatggggggcacctccacccctgttgagagcgcccaatggtgataaaaagacgcggggacaaggtagacaacgagtgttgggcgtccttgtggggggaccccgcttgcgctaaatgtggggtccgcatgtcaac

SEQ ID NO: 515711 - DNA, 132 bp, Homo sapiens
gcaggctccatcgctaaacgatatttggaggtcagcacggctgctcacgtgtcgacggaacttgtacatgggaggcatgcacctgaagtggtagaatacacgtacgaccagtgctccagccttaactgatac

SEQ ID NO: 515712 - DNA, 117 bp, Homo sapiens
ttgttttagaagtttcaatagcacctagttttagaagattcaagtagcaactagtatatatatcaatatatttctcacaaaccattcagttacacattgtgtatgcttttagaattt

SEQ ID NO: 515713 - DNA, 821 bp, Homo sapiens
gatgctgcccgctgttgctgactggctcccccagcaagatccggggtgctgatccaggtgattctcgtggccgatgttctcaggaaaaagcacagagttgatgagacgcgtccagttcggctttccatgaattgcgtcatgtatcgaatgtgccttgtgctgaatcagagatatcgccataaagagcactcagctatcatgcacgcaagctgtatctgcgaaacaactagagcgggaggacactcgactggacggcgactgcctcgcgctgcccgtgctccagagaccggtgcgtcgcaggatggcctcgtgaggacgtgggtttgtcaatagggcgatcggactgacggcggcgagttcttgtcgcgcatgtatcattgcgatggaccgttcggtgcgagggccaggtggaccgaaccgggccggtgagatgagccttgtaacttgtgtggcgtggcaccttggcgatggggacctctcctatgtaggggagacgcccactttgggggggctccagtcgcctgaaatgcgtggggtgcccggcgttggctccggagaagcgggtggttgaggagcttggacctggcaggtggttgccctggtgaagtggcctttcctggtgaagccgggcgtataacgcaaaagagggctcgggcgagcaccgacgagaggaggtcggaaggtgattcgggggaccgcatgcacgatgtagcccagcgtccccgggttgtcgggggctcgagggtgaccttcaaggaaagggccttcacgggcccacggcctggccgagggcagaaactagccaacaagagaacactggc

SEQ ID NO: 515714 - DNA, 488 bp, Homo sapiens
aaaatttctcacgcatccagtgcatatattttctattccaaacagtaagtgtaattcatcaatttatgggtgggagaatggtttgataaagatggacagcgagtcactgagtcgcccgtgacgatgtggtctgtgcttctgtgtgtatgctgtgatgtattcattcatagcagccctcacatccagttcccatggggtgctgggttctcaggaaatgcatgtgaggatggaagacacgggactagaatgcacatgactttcaggggaaaattgttagttttacagtagatggagaaggaaatttgcttttcatttgacatcttacttttcttcttttcttttttaaactaaatcattataatcttattacaagggtaatatgtcttcaatttagataagttgaaaaaatatagaaagccccaaacttatacagaaatacaaatcttgattttattcttggtccctttatctgaaggttacgtaagtca

SEQ ID NO: 515715 - DNA, 926 bp, Homo sapiens
cagggaggtgcataaggaatattccggttttggtgtggcaactaagtcctagtgccccgtgcgatatagcacctgtgttgtgccttacctttcagtgtagtgattttggatttgtgatggattctggttgttccccaagaggattcgtgagagaatttttgatattgcagcaggttgtggaaagctttctgctacttcctagtttgtactgactactttcccttttttttggatggttagaatgtcaggaatatttcatatgacagcttctcgttgtcttttgactaggactgcagacgtttggtgatacaaatgtcaaatcaagaggtgtgattttccctggtaattgtggctgtctcacaatgtgatctgtcaaatccttgagcccatctgatataccatgaagagatttcggacattctattcttacactaaatggatcaactctaggatcttaggctatgttgaacttctgttgtgttttgaatctctccagagttgcatgtagatagcatgtatcttctgtgcccgttaagaccccatttagtaaataagactacaatagtaaaaatgtagaggtaaatagaaatgtattttttcactgaactattttgatacaaatttcatcatttaatgattcaccaatgttcttgcattgaatttgaatttaaagcatctaattcaaagagaggggagcatccaatgatttgatacatgtgggcttgtgagaactccatccatttatagagatagtcaaggtgtgggccacactaagtatatttttatcatggagaaaatttctactcctcaagccgctaatggtgaacagaattggagtattttgtttataatttcttgaacaggcaaatgtaagcttattatagaatgcattgtattttctttaattttccggacatcagcagcca

SEQ ID NO: 515716 - DNA, 117 bp, Homo sapiens
acctacgagcagctcgtggcgctggagaacaagttcaaggccacgcgctacctgtcggtgtgcgagcgcctcaacctggccgtgtcgctcagcctcaccgagacgcaggtgaagatc

SEQ ID NO: 515717 - DNA, 337 bp, Homo sapiens
acgaggacctgcgctcctggaccgccgcggacacagcggctcagatcacccagcgcaagtgggaggcggcccgtgaggcggagcagtgtagagcctacctgtagggcgagtgcgctgagtggctccgcagatacctggagaacggtaaggagacgctgcagcgcgcggaacacccaaagacacacgtgacccaccatcccgtctctgaccatgaggccaccctgaggtgctgtgccctgcgcttctaccctacggagatcacactgacctggcagcgggatggcgagaaccaaactcaggacaccgagcttgtggagaccaggccagcaggagatgg

SEQ ID NO: 515718 - DNA, 125 bp, Homo sapiens
ctcttagaggatccccccggaagattcggacctctgtatgtctcatggaggaatttaattctgaccagaactcatctctcctgtcagaggaacaatcaagaaacaatgcaactttggtctcgaca

SEQ ID NO: 515719 - DNA, 661 bp, Homo sapiens
ccacgcgtcgctgagcccttccactccaagtccagcagctcccggttcctggaagtatgatgacgcgggagaggtgaccagagcgctgtcctcaccttcctctctcaccgcgcggttttgttccctctacaagctggcctgactcaggcatgcctgctcacggaactgcagtgtgactggagtgtgtgtctgaggggagcgtttgcagagggcactggagccctgcacagcccttctcttctccgctctgggagagtggacccttccagaaggggcaggccggccttcgcccggtgctcctccttcctcgtgtttttatggatctgcaccagactgttaacttgtggggagatggcgaagttgacttatttaaaaactacaaacagcaagttgtgttctagaactttgaacactaaatggaagaaaatccattagcagaccgaagtctcttcagtgaaccctccgaaactctgggaccagtttcctctgggggctccatacagagacccaggcagaacttctgccctattttttttcttttttcttgtggatgtattaaatatgttctgggggtgtgaagtgactttattacatcccaatagaaataaagaagaagatcatctcgactactctccgagcactgactgacagacaggaaggg

SEQ ID NO: 515720 - DNA, 436 bp, Homo sapiens
cccccgtagtgggtccctgcagacaaaggagttattattagagccctacttctcatgtgatctactcgaaacagaataaagactagtgatgcgacacgcaataacaatttgtctcattgtacagatacctctatgccatatcctgcctgaggcctcttttatctcatttaattctcacaataaccctaagacgttgctctcatctacccctatttcccccagaaatggattggaatctcttcagagaggtgcggcgtgcctttggttcttccgttgcatgctcattccagaagcccacccagggcctatggagttgccagcaggatgctggctcaagcccttgtgccaagtccccctcctgagaatgtcctaaagggatccttccattcaggacatcataagggtcataacagattctgtctacaaagactgacac

SEQ ID NO: 515721 - DNA, 151 bp, Homo sapiens
  misc_feature (31)..(31): n is a, c, g, or t
  misc_feature (33)..(33): n is a, c, g, or t
ctagaggatcgctgatcgaggtttctcatgngntcaggctggtctcaaactcccgactcaggtgatctgccacctcggctcccaaagtgctggtgttaaggtgcgagccgagaacccagccagtgggttactttttctgtagaaacagttg

SEQ ID NO: 515722 - DNA, 1292 bp, Homo sapiens
tattaccaaacccaacattttattgaaaacaaaaggacccatttggcttaaaggcccgatttcaattcatcaacatttcaacctgacggattggggaacaccgcgggcggttggccagccctgaagtttgccctcccagggcacggaaccagcttctggcaagtgaacggggctgtcaaacctccagggccttggccgtgggactcctcgaggctcacggacactggtgtagacaacggtgccgtgtgggtgtgaaaaatacaatatcgcgcacgaacccccccagcgcattggtgcttgcaaaaccacccctcgcgtcgggccacaatgagaaggtccgcgttagaaccttgtcgcgcctatcccattacgcttgtcggatctatacagtggttgtgtgcccgcgctcacatcctcgtggtgctcagaccacggggtgcgaccatgtggagctccacataacctccgtgcgcgccagcacagtctctaccaggtgcgtctcgcggttacccacgaggctgcgcggcccacgaatcgtgccttctttcgctcccccgaggcgccccatttgcgtcttctcaatacctcctcacaatctgatctgttcacccactttctctcacacaagccccctacatcatctttgcactcacgcgcttacacacccaatattatgaggcctattactcagaaattgatttcactccaacacaacctcccgtcttacagccctctacataaattctaccaaagaccccccactaaagcattcttcctcattcacaccacaaagaattctcccaggacgttcaccttgtttattccataccagtcggtcgtacaaacactcattgtctacatccgacaaacactggcgtctcgtcaagttggatgcgttacttgctagaacacacaacatctttctcggaccaacgctgtgaatactcatgcatggtcgctggatcgactccacagatccatatactcgtgccaaacgcagaataaacccccccgcgatctaacaaactccgctaggggaccaaaaatcctagccaaacaatgatcagatcgggcggggggtcattccacacgtacagtcagaagttagtagtggagtgccattcgaatcgcaactctagggcaagaccgtccgggtactatcattgcacactgacgtcttggcgacaccctattaataatagataccacgcacgacggcgccactatttcttaataatatcgccggcaactgacaacacccaaccccctttacttatccaagccaacctctc

SEQ ID NO: 515723 - DNA, 1752 bp, Homo sapiens
  misc_feature (165)..(165): n is a, c, g, or t
  misc_feature (461)..(461): n is a, c, g, or t
tatactggcatcagaactgactttcatggcctttccacgtagatagaaatttatgagagacaatatttcaaatagactttttccacaaatagtactaatccaactaaataccgagaaaaatctaaactactgtattaccacacaaaccatatactaactaaacanattgcatcgtaatctcccttataaccatattcgtgcaataactatagataatactgagtagcactcaccctttatagtcgtcgtgaacgaaggcctccaagaaagacttacaacaacactctctcgtatatacctagcatatgtaagactttactctactatgaactctagtcgaggtaaaaagaaacttgagcctcgggtcttaagtggataaagacgaaaggttaacgctcgagtgtaccactacttactatataagtgatacaattattgaagcagaaacccatacaacgctnttaataccttgaaaggtcacatgtgaggtgagaatgacaagcgaaagcgctttaagtgctccaaaaggaagaacaccgaacattcttttaatgttaccaaacatatagcacctaacttttcgccccgaggggcctgaaactctcccttcgtaaaaagattcaccagcaccatagatatcccaaggattatctttaaaaacaacttcgataaaaaaggacacccactaacatacgaaaaggggattatacaacgacaatgcaacttgcgatgacagggaacgagatttggacgaacaccaaaaaacacgtgttggcaatctgccatgcatggaaggctccaaaatacgaggatgttggagtaagaagcccataattgacatataaaagagaacccacacattacacaaatagagaaaatatccttctggagctcagcaaaaaggacacatatggacccggtccacggaaagcccaatgcacaaattgggtacgctatcatattcgacaatggatagggggaaacgtaccccaaagaagggatttctgtagacccttaggaacccttccacatagcaacataaagttgcaaggtatagggcgctccaaagccgttatacccacctgtcatgagagcaaggaaaggaagatgaagaatcgaagaaaaaaataaagaggtagataggaggcggaaacaaccaaaagaaggaacaaaaaacagagagaaaacagaaacagaagtatacaccaacaccaccatagagactaccatgacaggacgaaagaaaaacaaagacgacccgaagaggtcgaaccagccaccacgacaaaaagacaacacaaaataataggaagcgccccacgagatagtataaacgaccaaaagaaaggaagcgagagaaaagaaagagagcaagaggataataaaacagaagagggagaacagggaataaagcgggagaaaataatgaagcaggagtacagagtagtaataggaaagaaaaagtatacgatgatgtgaataatgaatagtagaggaagaagaaacaagaggccaagagtaaagcactaggagagacaagcattagttcattgacatgcgttcgcgcggaggaagagatacaagtgtagtaatcaacggagcaagaagagaacgagggagtaagtacagaagtagagggaagggatgagtagaagagatagcgaagggtggggaaggagaaaagaaaagcagaaagaagaagaaagcagcaatggagcagagagaggaataggaaagagaaaaaaaaggaag

SEQ ID NO: 515724 - DNA, 408 bp, Homo sapiens
ccacagaggtgtagtcctagtgtcccaagagctgctactctttggtctagcagttcactatgcaaggggtcttagacaggtcctgtggtcatatttatcgctgagctaagcttctatcttgtccagccagctatagtcaggctcggtaggtgtgtcgcctttgccgatatatcttgtcgcaattgtgccacacaggctggtgagctctgcgaggcagttatatctagtcaattggttatgctggcgctatgtctgtgagtccgtgctatgtagtgcttgcttatccttcagggtcgctggcttgcagggtctatacctattgcgtcaggtttcggttccagtcgcctatacgttacttgggtacatggagagcctaaggtttgttcgtagtaagcgtgtgtgggtttg

SEQ ID NO: 515725 - DNA, 108 bp, Homo sapiens
gtattgagtcagctccccccaagatgagctgcagcccccagagagagctctgaactgtcaccaagtaaccaggccccacgtctccaggccccccacatccgcccagcc

SEQ ID NO: 515726 - DNA, 524 bp, Homo sapiens
gcgcaatgtgtgtttcccactctttaaatgtgtctgaactcgtgctctctttctcttgtgttatatagagactctagtgtccatgtatgtgtgtctcacctattgtgtgactcgcgtgtcttgtgtgatacacttatacacatgctctctcaaccactataagagatctcttcgcttccactgtcgcaccagacgctctcgtcgtgtatcacatgtctgtgtagagcgcaaatatgaaacgtctaagtgtgttataggtttctccacgagtccaagaggctgtttaaatagtgatactcttacagacttgtgtatgcgcccatataatagagtgtaattgtgaatctcaaattttctctgtggttcgcgatatgctctctctctttcttgcgcctctcgagtttctcttctaagagagatactcgacacgctgtcatatactattactacagatgtcatactcacgaggcccctgctcgcacacattgctctgcgtgaaattttcgtacagcgcggggtatcca

SEQ ID NO: 515727 - DNA, 357 bp, Homo sapiens
gggcaagtgggagggtggttctgattcagtaggtctggggtagggcacagggacctgaaaatttagaaataggcaattagctgggcgtagtggctcatgcatagtaatcccagcactttgggaggccgaggcgggcggatcacttgaggtcaggagtttgaaaccagactggccaacatggtgaaaccccgtctccactaaaaacacaaaaattagctgcgtgtggtggcgtgtgcctgtaatcctggctactcaggaggcttaggcaagagaattgtttgaacctggggggcggaggttgcagtaagctgagatcatgccattgcactctagcctgggcgacagagactctgtctc

SEQ ID NO: 515728 - DNA, 335 bp, Homo sapiens
  misc_feature (184)..(184): n is a, c, g, or t
  misc_feature (227)..(228): n is a, c, g, or t
  misc_feature (273)..(273): n is a, c, g, or t
ctgttttgtcagaaaataggattgcaacccctgcttttttctgctttccatttgcttggtaaattttcctccatccctttattctgagcctttgtatgtctttgcatgttagatgggtctcttgaatacaacagcatactgatgggtcgtgattctttatccagcttgccgttctgtgtttttnaattggggcatttagcccacttacatttaaggttaatattttnnatgtgtgaatttgatcctatcatcattatgctagctggtttattnttgcaagacttgttgagggtaactgcttcatagtgttactggtaaaaagaaaaaccagtgtg

SEQ ID NO: 515729 - DNA, 1452 bp, Homo sapiens
  misc_feature (1297)..(1297): n is a, c, g, or t
acaccccccctacagcgacacagccgcgacgtagtcacacacaacgatgctccaagatgtcttctacttgtgggactacaacaactagcggtcggtatttatgacacacaactgctgtggttgtctcgttgactacaatacctcgcttcttgtattaatgatggagatatcctctcggggctagtcatctatcatcgacgagcgatttttgctgggcaacgatagatacactgtggcaaaacaccaactgtttgtgcaccaccttgtggggcgtcattaaaccaggtttgagagaacgtcttttgtcagcagcggcgttggcaaaataaacagacgcggggtgtctgccacgcgtgcgtttaacggccccagtttcgggcttttttttggcgaagtgaggacactgtgtggagagagagggctccacgctgttgagtggataaaaacatggtggcacggagaggcccccagcgttgtaaatagggggagacacctcccccccgcggaaaagagaaaaggggtttctacccgggggaagagagaatgccaggaaggcccccaggggctgtgcctgcgtaaagggaagggagggaaaaagggccggggcttgcccccagggcttcccttgagggagggagaattggagaggaaaatgtgggagcaagggcgcctggggctttcctggagcccccccaaggccccaaagggagcacccctttcggcgtgccacccctgggccctccaggagttaaccctctctgttgtttggggaatgaaatattttataggcgctcacaagtgaacttccccatagaggggagcaccacctctcttctggtgggccacactgccactaatattttctcggggaagacacactctttgataaaaggagtcgcggtgggtgtcccctcgtgggtgaactccaggaggtatatcgctttgtcccctcgagagagaacttcacacttcacgagcctcttcacttgaggctcgcacattctgcatgcacacctgggaaaagtgttccacgcggaacttggagacaaaagcttgagaggagaagaaatagcgctcttgccacagtggtcaaacctctttttggagaaccacaccacatgagcacggcgccacatttctcggaagttcttgggttctttccgagggccacggaggcttgcctcttccgcctgagagttccagagttggcacaggtggactaacgaggtcaaaacaacactggcggaaaactggagtcctggcacgcgaggaggagcccacgaacgctggtttcganagtaacttttcctgggaagggggccttccacgcaatgtgggcaaagccttcaaattacgggcaagatcttcaagtgaacattttttgccatcacctagctgcctgcacctgccctttcagggagatgggggtcattacagggaactgaacattga

SEQ ID NO: 515730 - DNA, 155 bp, Homo sapiens
tttttttttgcatcttaactgtttaatctcagtttaatctgaccgggtgggaaacaaaaaatcctgtcgtaccaagtcacatgttgaaggtgctgcacaagtgcccaaaagtagctctcagaggcaatgctatcctcttttctcaaaaagctcct

SEQ ID NO: 515731 - DNA, 163 bp, Homo sapiens
acgctgcacctgcgttcaaattgctttgtactccatctgccgttgcagaactgccccaccctgctgcaagaatacgtgcgttgagctggggctttgcgaattgttgccggcggggtcatcatcgcaatccgtaagtcttcaagacagacaaccgcatgtgtct

SEQ ID NO: 515732 - DNA, 401 bp, Homo sapiens
agtgatatttctgtgaccttccaccaaaaccatttgcaattggttttggtggtaagagtcacagaatataatcagaggaacaacccacttctccaccctcggataattttggctccagtggggaaggaagcttttcaggaaggaaaaaattaggaagttcactatatggcacaggtcggaagagaaacgtggtgttaatgaagacactgtgtatagccttacctcagatgaccagatagttattttaggaggacggggaatatgaatatgcccgggtaagaggagctcagtcctcttctgtagataacatctaaaatcaagcagtcaaaaggcagttctaatatggtattttggagatgtgtgagatacagaggtaaagaccaagcaggttggcttgaaga

SEQ ID NO: 515733 - DNA, 430 bp, Homo sapiens
tggaaagaaaggaggcagacagattagctagcaagactgcctttcttttgtttatgtaggtcacataatttagtagctaagcttgatttttgaaaggagacatttctttaaagtgctcaataatttgtttaaagttctagggaaacgacagtgttatttatcctgttaactgaatggcaaaataaagcagtgtacttgctgtttatcctttcaaagacttagattactattagctttcttgatttattaaaagaaataagtattgagcacctactgcatcttacacctaggagaagaaaagtcttgtgaataaactcacatgctacaagaagtgtggtaggtgccctgttgaaagaacaggtctcacaggggagaacaatagaggagatactttgttgtgatcttggtaaataactgtgacctgaggggg

SEQ ID NO: 515734 - DNA, 138 bp, Homo sapiens
cgggggaatggcatgaatccgggaggcggagtttgcagtgagccgagatcgcaccagtgcactccagcctgggcgacggagcaagactccgtctcagaaaaaattaaaaaagacgtagattgtactgaaaataaccat

SEQ ID NO: 515735 - DNA, 173 bp, Homo sapiens
atccttattgcatatagactagctacttcataaactgccaccaagaaaagaaaaatcgctgatccctgatataaccattctagtgtctaaatgcaatcagtctacatgcaatcagtctaaatgcaatcagtctcacatgcacatcagtctacaatgcaatctgggtacctgag

SEQ ID NO: 515736 - DNA, 1005 bp, Homo sapiens
  misc_feature (69)..(69): n is a, c, g, or t
  misc_feature (202)..(202): n is a, c, g, or t
  misc_feature (474)..(474): n is a, c, g, or t
  misc_feature (479)..(479): n is a, c, g, or t
  misc_feature (483)..(483): n is a, c, g, or t
  misc_feature (511)..(511): n is a, c, g, or t
  misc_feature (540)..(540): n is a, c, g, or t
  misc_feature (574)..(574): n is a, c, g, or t
  misc_feature (588)..(588): n is a, c, g, or t
  misc_feature (597)..(597): n is a, c, g, or t
  misc_feature (604)..(604): n is a, c, g, or t
  misc_feature (619)..(619): n is a, c, g, or t
  misc_feature (679)..(680): n is a, c, g, or t
  misc_feature (892)..(892): n is a, c, g, or t
  misc_feature (896)..(896): n is a, c, g, or t
  misc_feature (898)..(899): n is a, c, g, or t
  misc_feature (902)..(902): n is a, c, g, or t
  misc_feature (993)..(993): n is a, c, g, or t
ggggtggggactgcatatatagatccgggagcagggagcgggctaagagtagaagggtgtcgcggctcnagagcgagagtcacgtcccggcgctaccaagcccgacccaggcccaccgtggtgcacgcaaaccacttcctggccatgcgctccctcctgcttctcagcgccttctgcctcctggaggcggccctggccgcgngggtgaagaaacctgcagccgcagcagctcctggcactgcggagaagttgagccccaaggcggccacgcttgccgagcgcaggccggcctggccttcagcttgtaccaggccatggccaaggaccaggcagtggagaacatcctggtgtcacccgtggtggtggcctcgtcgctggggctcgtgtcgctgggcggtaaggcgaccacggcgtcgcaggccaaggcagtgctgagcgccgagcagctgcgcgacgaggaggtgcacgccggcntgggngagntgctgcgctcactcagcaactccacggngcgcaacgtgacctggaagctgggcagcngactgtacggacccagctcagtgagcttcgctgnatgacttcgtgcgnagtagcaangcagcantacaactgcgagcantccaagatcaacttccgcgacaagcgcagccgctggcagtccatcaacgagtgggccgcnnagaccaccgacggcaagctgcccgaggtcaccaaggacgtggagcgcacggacggcgccctgttagtcaacgccatgttcttcaagccacactgggatgagaaattccaccacaagatggtggacaaccgtggcttcatggtgactcggtcctataccgtgggtgtcatgatgatgcaccggacaggcctctacaactactacgacgacganaatntnnatntttaaatcgtggagatgcccctggcccacaagctctccagcctcatcatcctcatgccccatcacgtggagcctctcgagcgccttgaaanctgctaaccaaa

SEQ ID NO: 515737 - DNA, 320 bp, Homo sapiens
  misc_feature (2)..(3): n is a, c, g, or t
  misc_feature (12)..(12): n is a, c, g, or t
  misc_feature (53)..(53): n is a, c, g, or t
  misc_feature (59)..(59): n is a, c, g, or t
  misc_feature (79)..(79): n is a, c, g, or t
  misc_feature (91)..(91): n is a, c, g, or t
  misc_feature (97)..(97): n is a, c, g, or t
  misc_feature (117)..(117): n is a, c, g, or t
  misc_feature (126)..(126): n is a, c, g, or t
  misc_feature (135)..(135): n is a, c, g, or t
  misc_feature (146)..(146): n is a, c, g, or t
  misc_feature (158)..(158): n is a, c, g, or t
  misc_feature (167)..(167): n is a, c, g, or t
  misc_feature (173)..(173): n is a, c, g, or t
  misc_feature (184)..(184): n is a, c, g, or t
  misc_feature (195)..(195): n is a, c, g, or t
  misc_feature (198)..(198): n is a, c, g, or t
  misc_feature (212)..(212): n is a, c, g, or t
  misc_feature (216)..(216): n is a, c, g, or t
  misc_feature (224)..(224): n is a, c, g, or t
  misc_feature (230)..(230): n is a, c, g, or t
  misc_feature (238)..(238): n is a, c, g, or t
  misc_feature (247)..(247): n is a, c, g, or t
  misc_feature (252)..(252): n is a, c, g, or t
  misc_feature (274)..(274): n is a, c, g, or t
  misc_feature (278)..(278): n is a, c, g, or t
  misc_feature (282)..(282): n is a, c, g, or t
  misc_feature (315)..(315): n is a, c, g, or t
cnntattaggcntgtatattttaaatgctaacattgatgaatgtaagtttccncattgntgctgtttctgcatttaaanataattgggaanaactgncattctctagtcgactgccngggccttanacccacatntccatttttgntcaggtatagcnttttatagnaagggntgcatctagcntcttttattanaantgtgtgtgctaaantccntattaatntgtaancagtttanattgttttntatantgaaggtgtattttcagtgctncccnctanctgattttaactttaggaataaaattagttttnaaagc

SEQ ID NO: 515738 - DNA, 111 bp, Homo sapiens
ggttgtggtttcgctgagatcgatcggtcgagcccgggagacctctcgttcctcccttcctgcgcgtcactaccttacgactgaccgacggactttggctacccttaccga

SEQ ID NO: 515739 - DNA, 133 bp, Homo sapiens
  misc_feature (38)..(38): n is a, c, g, or t
gacacaatcatgtattaacatcctatcacttataccantatcggcagaatcaagtcacaggtcctgtcagcactcgaggggaaggtatcacacaacaggcatgaacaccaggagtcaggatcatgacggccac

SEQ ID NO: 515740 - DNA, 102 bp, Homo sapiens
gtcagatttttgactcagggggaggatgcgcgcattcagtattggagagaagggggacgcttgcccaagacattagtgtaccctgtggattgtcaccattca

SEQ ID NO: 515741 - DNA, 1139 bp, Homo sapiens
tggggggtgacagattttttttataaactttgggaagtttccctcccccaatcttcttaagaaagcgaggggggcgagggtgggaggagacaggtgaggggagaagcgtgcccggggcaagacacccgaggcacggaggcgcgtgcactgggggggcgccggtgtccgggagccttcaggtaaggcgtgggcaaagtggctcctgcggaagccctccagggggcgtatagcaggaaccgggctgggcttctccaattgggtgacgtgagtgaaaaaaggtgaccagcgggggggtatcagctcgggggacaaggggcctcagcccacagtgtggacctcggggcgtgacaacaggccaccccccagggtggggggtgcccgacaagggaagtggaggcagactcctgtagaaccggggtggccagccacagggggaactgggaaaacaggggtacctggaggggttacagcccggagaactgggggctgagagctcagccgtttgggcatcactatctcaagccagtcctccaaatgggccctcggaggagctcaggagacatctagatagccacactcccgggactcgcctactccatacctacaccgggatgctcaagatccggaaggtactcgctctgacatgggggaaacactgaagatgggagacaaaagacgccacaggagccttgacagataaaaattcccggcaagtgcacaatgtgcacggctcatccacaaaagacgagaggctggaaattcggagaaaatggcggacacagacccttgggcctaaaagctatgacaccacggaaacagggcactaggaaagatgacagatagcccctcgaaatgaacgacgagaacatacaacgaagaactctggagccccggggatcccaaaaaaagagagtttggaccagggaacaccgaggaaggaacacagggaaccacacagagagacaaaaagaatacccagcgcacaaacaggaagaaacacacaaagggataaaaacaaaatataagaacaaaacagcaaagagggagtacaagaaaacagaaaaaaaacaagagaaaacaacccagacacgatcaacaaaaccaacacgtaaaaaagagaagaacacagaacatcccat

SEQ ID NO: 515742 - DNA, 158 bp, Homo sapiens
atcagctcggtaccactgatgcagagaactcaacaaaaaaagaaaattacagggataagctttttgatatgctgctgaattgtttgccagtgttttgttgaggatttttgcatcaatgttcatccaggatatccacctgtaattttctttttttgttg

SEQ ID NO: 515743 - DNA, 323 bp, Homo sapiens
  misc_feature (93)..(93): n is a, c, g, or t
ccccccccctttttcccctcccagaaaccaaagggaaggtttgggggttcccccttttgggggggaaccaattggggagaggggggttggagncccccccccccccccccctttcccccttaaggaggggggggtttttctttccccccccccttccgggggggggggggcaaggggtccctttaagaaccccccccttttgtttagacttggcctgggggtttgtttttccaagggggtttttgggccataaggggggggggggttgccccgggaaattgggttttttttttaggaaatttttttttttaattaattgccca

SEQ ID NO: 515744 - DNA, 472 bp, Homo sapiens
attgtggaacactggttcatcaactttcccgagtaggtccctaaagcttaaatctgccattctgaatgtacaaaacaacatatggctttgtacttacaagtcgcagttcccgcaaatactgggcatttcaaattattcccataatatcatggatgacagaatgtcttggggcagaaggaagttgatatttcagttcttttcttgctaacccttctattattgaaaggtcttcagtcacaagagcaagccactaatccttaaaattagccagagaaagcaggcacttaccaaaccatgaatcgtatgtttagagtatctcctgtcatcatccaaggatggaaaaattgaggaaatccgagggggcatcataggaataagagcttttaactagtgacattgtctcccacttaacgcagaagagcaggtttgtcccaggtctttgtaccacttttctcagcaggtcagcttctgt

SEQ ID NO: 515745 - DNA, 283 bp, Homo sapiens
ttgataaccaggctggagtgcagtcggtgcaatctaggctcactgcgacctctgcctcctggtgctgcagtgattctcctgcgttcaagtaattctcctgcctcgggcttctgagtacgttgggattacaggcatattgccaccacacttgtgctaattattttgtatttttatgtacgaaattggggtttcaccattgttgtgcgaggctgggtctcgagactcctagacctccacggatcctcctgtgctcgagtctcctaatggtggctgtggatttgca

SEQ ID NO: 515746 - DNA, 400 bp, Homo sapiens
  misc_feature (326)..(326): n is a, c, g, or t
gctcaccggctctatgaccctggaagaatggaaacttcgtaagagcagggacgtgagggtgaactgctcacccgggcaccgctggagaccggaacccagctccctccagggctccggaaaaggcggcctcagcagtgtgctggtgctgccctccagcggcgctgggtccccatggcacctggctttgtcctgctccccaggggccttttcagctcccgaccacctgtcaccagccgccagggcaagtctctatgtgactatagggtgaaggtggagggaccttgcctccgaggattcatcccaagcggattccgaggagtgagagnccagtacactggcacctggtgtttagatggccaatctcacagttaataaaagcaagtttggtatcaaaaaaaaa

SEQ ID NO: 515747 - DNA, 1478 bp, Homo sapiens
gccagaactccggacgtgtgcggcgcacgtgagtcgcaaccatgttcctggttcactcgttcttgaagtggcggtcggcggctggccggcggcgcgaggacggttggtcctggagtgcggggcctgctgaaatgtgcttggatggccgtgctcagcggggcctgtgggctggcaggcggtggcggcggtggctggcggcgcgctggtggccggcggcggtgtcggtgcgcgctgggcatgcggcagtccataggcggagtcattcatgtcgccagtcatacgatggctggatgtgcctgtaacacgctcggaagaccgtgcgcggccccccattgtacacatcatttatcttccatgctacttgaagggccaacgggacgagcgtcacggacgcgtccggagtaggtttccgcggacgaacctcgtattgcgccagactgtgcttggaacgcattgaggagtggaacgggtccaacgtcggccagcaattgagatcgtccacttgaaaggcagttcctgcgaaatttaacccgcggttcgcttgcacgagtcggtaacccaggcgccttgtactgcgttgcacagaaagcctggagtcgtgttcgtcgagaggcgactctcgagccaccgacttggtcggccgacgaccgattgtggtggcggcccagctgtactgggggactcataccggaacatagccaacaatggggcagaaggccttggaggggcttctcgcggaaggtgcacaatctccctagaagggttcagcttgttggttcgaggagaccagagcttagtctaggacagacggggttagcgcccgaggcggctcgaagtgatttatctgagaccatctcacgcttgttcgtaaaaacgcgtttggaccgccgttagtcaatgtggcaacccaatttatggcctaggctaaagcttggagaccttctcctaggggttgccccttttggaaagccggccacgcgacaagagggttgccccctatccctgtggacaatttgcaggcgaaattccttccttagttagagccaacttcgaagttcccacttcctccggaacctcgcccttaatgtgccatgccaacttgcagacacatggttggggtcgcacactcctatgttgcagtaagtgtcattcggaagcagagaccgtgtcgacgtcccaaaggacatgtcggcatttgcgggttcccaattccggcatttgtggtacccgcctcggactttggttttcccccgcctttggctcgtttttaccacacaatttcatctctttttggaccaagacgaagacaatgaggagcgttgggacccaatgagttggctaggggttcgaacaccacatcccgtatggaatagatcgtgtgtcttgacagagtgttgcaccacaaaatggttaagtccctccgttgcgaatacgcttgtggaaggcacacgcatataacccccagggcaccttataca

SEQ ID NO: 515748 - DNA, 620 bp, Homo sapiens
tgactgggagatactgggcacggatgggcagacagccttatgcaggtatcagaagttcacatatcaaatatatctgcccggcatgcgcctgtgaggcctgttgacatgtaaatatgaacgtgggctatgccttcatggtttgatattattgggctttcaccagattcataggcaggcatgcaatctgggattaaccaggcagccagcaaacatatcacagctttgatgcatgcagcagtgcagcaaggcataccttctaacagcaatatgtgggagggttctcagggaggagcttcctctcatatatgccttacaacagagaactggcagtgtcaatgactcagtctgctgacttcacttacgggctacctttccacaggttctatcgcggtggtcaagacgtaattcactcattcagttggcagggattggtaactttggtcccgtacgtttggtttcaacggggaacatagcccttgtaatcctcaatggacttaaacataagtacacacttcggcacgcacaggaacaaatagtcaccttcgcgacatgtagacagagagaaataagtgaatattaatttctcctcttctttttcattttttaaaaagaaaaaaaag

SEQ ID NO: 515749 - DNA, 317 bp, Homo sapiens
gacaatctgagtcagacaagcctcaaccttccccacactggtgatccttctctacacactgccagcttccaacacccacaacaaaccaccccacagccaaaaacaaaggacataatctcttgggagctctatgtccccacccatcagctgagaaacacaaatacttatccaggtgatcttagggcaagcttgtatacccctataatgctgcagcagatgctctactatgaaagctctaactcctggctagaagccaccaaactctagacatcatagcacctcataaaagaacaaacacagtactaagacaaaaagaa

SEQ ID NO: 515750 - DNA, 804 bp, Homo sapiens
ctaagtccctgcctctactctgaagcgtataataacctgtaaacattatacaaacccacaaaccttatagaaactcgtagtgtgttgtgactggaaattgattcattagaacccagtttctttaagaacttgtgagtggttatatgtttgtcctttcccaaagactgtcaacaatagttgccccaaaatgtcagcactgcacaccctccagggacttgtgaatacaatccttttttacttttgttttgttttttgttaagaaactggcgtctctctgtcacccaggctggagtcggcagtggcaacgatcatagctaactgcagttttgacctcctgggctcaagtgatcctcctgcctcagcctcctgagtagctaggactacaggtgtatgccaccatgcctggctaatacaaaaacaagttctttctacagagatgggatccctcccttttaaaatcacgaactgtgtcacatggtggtttgcttgtggcaaaacggagttcaaatttggctctcctatggctataattctgactagcaatctgttgaggtgaacatgggagatctagactctttcagacaatgcagcaaaatgacctagtaacctccaggggcaccacacctatttatggaaactttaaagttgcccactttgaactgcacgttagtttgattaacaccccatggtgcgggtcactcatagcacggcgatagcttctacggacactgaaaagtggacccaggcatttattgcgtctcccaaatggcttttcaacctgccctgaggttgtgaccatttcta

SEQ ID NO: 515751 - DNA, 107 bp, Homo sapiens
tgcaactgggcggtcatgaactgggcacctccggcctgtgaaaagttagggaagtgtctgacacctccagaatccattcccaagaagtgcctctggcgcggctagga

SEQ ID NO: 515752 - DNA, 155 bp, Homo sapiens
cacatatctacatagtcagattttatcccagctatgaaagcaaaagataattctactatcgtcagtcatcccattacagatcactacattatattcaatgtgtcatgtctccttaagatattctttgccatgatagttgctaagtctggcctttt

SEQ ID NO: 515753 - DNA, 141 bp, Homo sapiens
tggcaatccaaaaaattacccacttaaaaaaaggcaatttccctttttttttaaaaggggcccttcaggggccccccttttaaaaatttctttttcttaacccttaatttggatgtgcaaagatgattgctggtgtctcaa

SEQ ID NO: 515754 - DNA, 519 bp, Homo sapiens
cagttccatgttaaaaaaattaactaaatcgaataagaaaatagcaatgatcagtatcagctctttatggagaaagagcaggtgaaatattttctcagcactcttcctgcaaggcgaggtcgagagtcaccttgtgttgaaaatcttactagtataggactcaacgaaaatatattccccaaatgcccgtaagaattcctacttcaagcctcagacttcaaataattgccagaactacttgactgaggttagttatatgaccgtttctctttagggtttcatttctctagcgtaattcttgtttataatttggtgaaatactgagttgttctgttgacttttgcatgtgaagtaaagatcataattagctgtgttaacacagaaaggaaatgggaactttacattttttaattccctggagctctcattttcaagagatatccatttgctaactttattcaataaatgccgggtcgccaagcaatttctttctttatgtcctatattgtgattactcgt

SEQ ID NO: 515755 - DNA, 314 bp, Homo sapiens
gagtatcttcgcagacctggccttggcgaagtgcttaacgtagggaacgtggtcctcaatccacgctctagatctcttatcaaagtcatacgctttctcccgatttcaaaagatggcgaattgtatcatggccatgtaagagtagggtggccgctcagacacagagttctgccaggacgctgatggtctcgaaggctcctcaaccttaacctgtcgctgctccaggtgacaattctccttttcctccatctcttgctcgatgctgcgggagcccagtccatcagaactcatctttcgaagccactggatgttgg

SEQ ID NO: 515756 - DNA, 88 bp, Homo sapiens
agcgggtggactgtcgtgggccaggccgggggaggatggcgccctagaacccggccttgctggggtaggggcgggaggggacggggtg

SEQ ID NO: 515757 - DNA, 254 bp, Homo sapiens
  misc_feature (54)..(54): n is a, c, g, or t
  misc_feature (155)..(155): n is a, c, g, or t
ggggaccggccaccctctgtctcctcagtgcactcggagggagactgcaaccgncggacgccgttcaccaaccgcgtgtgggaggacaggcccttgttcgcaggttccacgcctagtgcttgcacgcgctgatcatgcgggtgcaggcgggtgtnatggttttcccacccccaccgggcctccccgcgggcagcgggccccttgttggcccccaccacgcctgggacgaggagcccaagccactgctctggtcg

SEQ ID NO: 515758 - DNA, 258 bp, Homo sapiens
tgtggaggcctggcagctcagtcatagtcagctcctcagctcacctgccagggcgtctgttccagacacttttgtttttgtttagaattaattgcgaaagagcagaattgggtggtgtcctccacactataagaaaatagcccttaaacagccacctttgtttcttgatttttcattttggctgtttagtttacctctggctgtctgcctggagccttcccagggccaggaatttgtacgtcctcccacgggatccgt

SEQ ID NO: 515759 - DNA, 540 bp, Homo sapiens
  misc_feature (12)..(12): n is a, c, g, or t
  misc_feature (37)..(37): n is a, c, g, or t
  misc_feature (64)..(64): n is a, c, g, or t
  misc_feature (71)..(71): n is a, c, g, or t
  misc_feature (99)..(99): n is a, c, g, or t
  misc_feature (111)..(111): n is a, c, g, or t
  misc_feature (116)..(116): n is a, c, g, or t
  misc_feature (121)..(121): n is a, c, g, or t
  misc_feature (135)..(135): n is a, c, g, or t
  misc_feature (155)..(155): n is a, c, g, or t
  misc_feature (158)..(158): n is a, c, g, or t
  misc_feature (168)..(168): n is a, c, g, or t
  misc_feature (207)..(207): n is a, c, g, or t
  misc_feature (210)..(210): n is a, c, g, or t
  misc_feature (231)..(231): n is a, c, g, or t
  misc_feature (239)..(239): n is a, c, g, or t
  misc_feature (251)..(251): n is a, c, g, or t
  misc_feature (278)..(278): n is a, c, g, or t
  misc_feature (282)..(282): n is a, c, g, or t
  misc_feature (294)..(294): n is a, c, g, or t
  misc_feature (299)..(299): n is a, c, g, or t
  misc_feature (301)..(301): n is a, c, g, or t
  misc_feature (357)..(357): n is a, c, g, or t
  misc_feature (360)..(360): n is a, c, g, or t
  misc_feature (372)..(372): n is a, c, g, or t
  misc_feature (392)..(392): n is a, c, g, or t
  misc_feature (407)..(407): n is a, c, g, or t
  misc_feature (419)..(419): n is a, c, g, or t
  misc_feature (427)..(427): n is a, c, g, or t
  misc_feature (430)..(430): n is a, c, g, or t
  misc_feature (432)..(432): n is a, c, g, or t
  misc_feature (445)..(445): n is a, c, g, or t
  misc_feature (453)..(453): n is a, c, g, or t
  misc_feature (466)..(466): n is a, c, g, or t
  misc_feature (470)..(470): n is a, c, g, or t
  misc_feature (512)..(512): n is a, c, g, or t
taggaggacaanacatttagttttatttcaatcaaancacacaacactttcttttccaactgcngcaaagngcatctacaaaatgccattacagatccncttttaaaaggnttccngtganattacagcaagccncttttttcaaacagaggaanaancccaaattcntccccaaaaaaaccccattccagtaaatgggaaaaacanatnaattacagtaagccagaaacntaaaaggncagccaagaagncttccaacagtttattagaaagaatgnaganatttaaaaaaanccccncnggcatgaacaaaaattgagggtttcagcccggggaaaagccgaatcaaaaaaaggnaanaaaaaatccaanagtgtattaaacatttttcncccatttgccaaacngacagtgcaaanacaaatcnggncnaaatgtacagacncccaagcnacaatgtacagcnttcntcgtcccccatgccaagagatgtaaaagcttaagggtcaaanaataccaattgtataggcttcaaaaacc

SEQ ID NO: 515760 - DNA, 253 bp, Homo sapiens
gttaagtactctgaggatctcctgtgggcccttaggagtgggactctgcctgaggctgacccagttttggggctgcaggttctgatgggagtgtctccaggaatgtcttcaggcccccagcggcagagcccagagaaggtctgagggcatgatgggcatcagtgggattttggttgtgccatggggtgggcagggccaccctgtgagcaaatggcggcaagggttgggggctattggcttgcaacaaagcccc

SEQ ID NO: 515761 - DNA, 259 bp, Homo sapiens
ggtaagcagacactttcttgtattaaaaagaaaaaagtgtaaaagttggccgggcgcgtggctcacgcctgtaatcccagcactctggagggccgaggtgggcggatcacgaggtcaggagatcaagaccatcctggctaacatggtgaaacccgtctctactaaaaatacaaaaaaaaattagccgggcgtggtggcgggcgcctgtagtcccagctactcgggaggctgaggcaggagaatggcgtaaacccaggag

SEQ ID NO: 515762 - DNA, 416 bp, Homo sapiens
  misc_feature (5)..(5): n is a, c, g, or t
  misc_feature (34)..(34): n is a, c, g, or t
  misc_feature (64)..(64): n is a, c, g, or t
  misc_feature (347)..(347): n is a, c, g, or t
  misc_feature (349)..(349): n is a, c, g, or t
tttantccattgtgccatttttaccccgcccgcntcggattaaagggaatccataccagtcccntaaccaggtaattaatatagaccctataaaccttaacaacccagtgatagaagtgatgaagagattaaattagtcataacttccaactggtttgggtgccaaaagaaaacacatgtttaatctgccctctttaaaaataaatttaggcccatgtacacacactggggcctgtcgtgaggtgtggagagaggggagggatagcattaggagatatacctaatgtaaatgatgagttaatgggtgcagcacaccaacatggcacacgtatacatatgtaacaaancnctgacgttgtgcacatgtaccctagaacttaaagtataataaaaaaattttaaaaacttaaaaaaaa

SEQ ID NO: 515763 - DNA, 875 bp, Homo sapiens
ggcagcaggtcccctatgccaccaagggcatccagtgggtaggatacgatgaccaggaaagcgtcaaaagcaaggctgcatgtatctgaaggacaggcagctggcgggcgccatggtatgggccctggacctggatgacttccagggctccttctgcggcctagggatctgcgcttccctctcaccaatgcccatcaaggatgcgcatcgcttggaacgtagcccttctgttctgcaactacatgcgagtgggggccaaggtagtgcctccgtcccgcctctggctccatgctggttcgggagtcctgatctacctgctcctgcttgatggtctgcaggctgtagtccctcattctccctcccttggggcctattgcgatgaggtccactataaaccactcagcatttagagctcagcccatgcgtcgaggccattgaggaggctacgcggataggaggctagtgggcgatcatgtgaggcatcgcaacatgtaggcattcgcggattagtacggcgacttgtaagatctaatgcgaaatgtttatcagatcccccaaagcctggccaagggcacatttctttcaactccctgtcccccagtgctccttatcaaatggacaccagttttggtatacgctcctatctactcaaggagcctaaaccagtccgtacatgactactagtgaccaatacgtaactgtatacccccctgcaaagccccagctgtgaacacccttcaacttaagaaacgtacatcgtgttcccctaatactaatttccccctttcctaaattcccccggctggtcaaataaaagttacaagaagctttagaaaggaaaaactccaaaaggggggggcggctaagggaacccg

SEQ ID NO: 515764 - DNA, 1137 bp, Homo sapiens
  misc_feature (149)..(149): n is a, c, g, or t
  misc_feature (248)..(248): n is a, c, g, or t
ggacattctcgagccatatcccatggcgtatctaatctagaatgtgaatcttgtcgggtttgcgacccgtatggtgatctcaagttcatccaggccgcagttcttgaatcgtccactgctgttgtacgctatctgcaggagagcacttntcagctgcaacttgagtgctcgccatgccatgttaccatcacggatctatctttgttgttgtccacttgacttcgtataatttcactcactgtgctggnaatgaattgttaatgccattgtattctcctgtgcacgtcagtaagaattgagacctcttgtcaagactatgcgacgtacattaggtttaggtgcaagcttgtgcttatcgtgttattcttgcgctcgcttatcgaacgccacacctgggtacgccatggctgaacgttgcgaatggaccgttgtcatttgaatcatcccatgacattgcccagtattgtccagtcagcacgacttgtcatcgatcaggaccgattgttagcataaggttagccttattcggagctctagtcctccgtattagtggaagtttcaggtctccttgtcatgtcgatcatcttcgtatctatcacaagtctagtacttgagtcgagggtagttctcgaatttgcttccaagtgttattctatatctatacctatatggtgtctaaggttttaaagaagagagtctcttctaaagcgttgatgaaccaagatgggggcggggttggctccctccattagttgctagtttaacaggcattgcgtttcccaaagggtggcacagggccaacaaagggtgactttaagggagggttgggaccaggaagtagggggttaaaaggacaagggatcattcgggtatcttccgtgtgctgtagattaaattagttatctatccagtttgggttgtatgtacacgggttgcgttccgttggagtttggaaaaggtaatacagagcgtatagaagaccaaattggtgggaacagacaccccataagggaagtggggggtgtgggggaaaaaataggacggtttcaggtgggcacatggtcctggggtcaaagtaaggggaaagttttaccatgttgttggaaaggttatatgtgggaatttgtgggggacaaa

SEQ ID NO: 515765 - DNA, 222 bp, Homo sapiens
gtcgtctctacacggatccccgtatacttgtggaaatagatagtgagaattttgcttgtccgtggctaaatgctctttctgaagtaactccatgattgtcctgtttctcgatctagcaaatgtattctgaatacctctcgacttgcagtacattagctcgtgttggaatcctaacatcaactggctttcataaatgtcttaaaacggtcttaccaactcata

SEQ ID NO: 515766 - DNA, 276 bp, Homo sapiens
tgttcttcgaacatactaatgatcatctaaggtcctacacttgtggcctgctagtcaaattgctggtggagggtcttgcctcgatgttgatggctgctgattgatcagaggagtggatgctgaaggctagggggctgtggcaatttcttaaaataagacaacaatgaagtttgctgcatcaattgactcttcctttcatgaaagatttctctgtagtgtgtgatgctgtttgatagcattttaccccatagtagaacttctttcaaaatttgagtc

SEQ ID NO: 515767 - DNA, 179 bp, Homo sapiens
gcctcatggtagtgtagagactgctctatgttaacaatcagtaacagaaaaatgtcaagaatttgtcccattagtatttgggtcagaacagtcacaactgcacaaaatatggtttattaattggagtcagtatctctggtttggagttttctattaaacagcatggcaaatgttttcaa

SEQ ID NO: 515768 - DNA, 280 bp, Homo sapiens
gctgtgaaccgctccaaatactcttaactgcaccttgtgaatagtagttagaggtcttcatacagttcagcctctagaatggtaacaaatcacgccaatgggattcgaaacaaagaagactatgtaaaactacacccatcacactttgagactactcactggtaggaagaatatagtattgcagcaaatcctgtatgacagagagatgtgggcttccttataagagtctagtgtaaggtgctgagaccttttacatgggcttatacagggagagagtctt

SEQ ID NO: 515769 - DNA, 189 bp, Homo sapiens
agaccgcgttctggcatcggtgcccatcttgcggatcgcttcggccgggggcatcccggcgtcggcgaacaactgggccaacttgtcgcgggtgaagggggtcttgagatattcgaccacctccacctcgacaccgggcgtttcctcaaggattgccagcgtcttgcgcgacgtgccgcatttgggatt

SEQ ID NO: 515770 - DNA, 795 bp, Homo sapiens
ttttaaaaacttacgttaccgggtcttaatatgctgccgtggttgtcccttgcttaactcttcttactttagaatatgtttctttgagatcccctccaaggactgtgaggaaaggctgtggtaccatgaccttgttggaatccaggcccgcgccctgtactacacggcctggttacagagttacttaccggtgaactgaatgggtacccaggcttcacccaagaggtacttttttgttgttgttgtttgttttaggaaatataattgtagccccatttttagaggcacttccccccaccctgtccccacacacaccccaaccacaaatgtggtggtgttgcccttccaaaaacgacgaaagcttttgtgtcacttaccactgaccacgaagaacctttttaaaaacaataactgtccacctacattctaatttgcactttaaggagaactgttcaatctaatgctagattgtcacttttccctccttctcccaccacgaagtttactggtagtccactgtcactggctcgtaactaatccctctaaccactaccactggaaatgcacggcacccccaatgtgaaaacggaggcaccttgctgggcaatcacctgacccccgctcaatgttttacaaccactagttgagtaatcagcatatctaggattatcttgccttgcctaaatcatatgtatatagtggatgttatatatatacctggccggtctgttttaatttaattgataaagatcccaatactttgtttggctggcatatattaaattattatatgga

SEQ ID NO: 515771 - DNA, 1212 bp, Homo sapiens
tctctccctgtaatagttgtgtgcaccaccgttagggggagtttatagtgccgggttggtagacagactcccggagggccagactaagtgtttccaaccgcctgccgctggcggtataccgcacagtgaagttcagttcggccgtgatattcctcccccccccgcgggcgggttcacaagaagaatgattgttgtagggccgtgatgccttctgtgtgcccacacaacacgttgtcccaccccgggggagcgcccgagttagtgggagaaagtggaagtcgctggccatgcaccacaatggcctttcttggtagcccccttcaaggggaaggtttgcaatggcctgtgttcctggtgttgtgcgcccccgttagtgcgtggggcccctcgtagccttgcgacactttggtgatattgacgccgcaaagcgtccacgtggcaccttatgggagcccgttcgggtagcgtaggcacgccgcagcgacacgtgatgcttaacgccttggttaggcctgcgacacttgtccccacctgaaatggtgcctcagtgccactataggagagactcgtaatgtgtggcgcactccactataggagaggctttcacattgcacctgggtgtgtgcgcgcctcatgtgtctccacaggcgtaacacacccttaggagccacaaaacctcatacgtctccacagattccgcacttgtgcacacgtattcacatagttgcacatcgcggcgctataaatttctataaactcttgtctgtgcccgacacacacacacactcttttctccgcgccctaattccgcgagaatggccccgcacacgcttatactccgcgaactataccccgcagaggcactagcacccaccactggagaacactgtcctgatgtcacttctcgtgaagggtccacttcacttgttcttctagaccacgcacggtgagatagttaataaatagttgtgcactggagagtttgaggagagcctcttcgctttcgagaagccagaaaagtgtcctctatagtagagagaaccctccacttaacctcggaggtggaactatatggatgccccccacccctaccaccaccactttcgagagaaacccgtatacacttaaattctaagaccaaaaaaggaaaggaaatcgaaacccccccaagctggtttcaaacccaccccctggcctccatgactttttcca

SEQ ID NO: 515772 - DNA, 132 bp, Homo sapiens
cctagagatccctatgtctcgatcgtatatattgaagccaagcaactgtaagatactagtatgcagctagggggcctgtagttttagggcagcaagtcaatttttctttttaagggattctctaaacctggc

SEQ ID NO: 515773 - DNA, 225 bp, Homo sapiens
tggtctttttttaaaacctaagttttataaataatgtctgatacctctgtgtatataaaaattaaactccaacagccacaaagaggtgtccgtaagtttacaaaaaagggatttttttccttttttttcctttttttttataaccaagccaagaaaggaccattttgaccattattgaatgtgaacagagggaaagaaaggtataattagaaactttgctagttt

SEQ ID NO: 515774 - DNA, 429 bp, Homo sapiens
tttttagcatagggagcagatatgcaacttgtacgggcgagagaacacccgacgcaatgttttcattaggtaccaaacacatatttttatggcaataaagaggccaacatttgatagttaggaaacacatttctagcctctaaaagaaatacagaaggtcgagcaactctagcccagcatttcctcatcaacagaaactgtaacacagtctcttagattaagcatgtattctacagtctgacacaatccccaccactccatattatcctatactcaagtaacacactttacattatccagccttgaattggcatctctgcattatagtcttcaaagatcagcagcaaatctgtctggcctagaaatgtatttcctctttcaccaatttgatcataatgctgacttgttgagatggcggcttttctctta

SEQ ID NO: 515775 - DNA, 195 bp, Homo sapiens
gacagaagcaccgggccataaagtccaccatttctaatatgttgatcgtagaagtagtattagattatagcaccatagtccgtgagctcatggactatggagtatatattcgtaatgaagaacttctatgaccaggatagtggggaggaagagttcactcagaggtgcgttgctgatcgggggatcctctacagt

SEQ ID NO: 515776 - DNA, 223 bp, Homo sapiens
atcgagctggtacccagcaggctgggcccagattaagatgtcaggtgatagttggagaacacttgggctaagcacccaggagactggctgtgcagcaagggcccagagcttctctgagaaattgggctgcctcctgaggaacacaaggaagaaccacaaggaattgctcagggcctccctggaggaagccccttcatttccttggacactgtagggccactac

SEQ ID NO: 515777 - DNA, 437 bp, Homo sapiens
atcccaacgaggaactggtgctaataagccaacacttttgtgactgttggattaggtcaagtatcggagggccttgatccgatgtacggactcagtcccgtgggtccagttctggatttcgtaattgtgccactaggtattcgcagtctaagcccggttccacgccagcgagccgggcttctgacccatcctatggtgtgagaataggttgagatcgtttcggccccaagacctctaatcattcgctttaccggataaaactgcgtggcgggggtgcgtcgggtctgcgagagcgccagctatcctgagggaaacttcggagggaaccagctactagatggttcgattagtctttcgcccctatacccaggtcggacgaccgatttgcacgtcaggaccgctacggacctccaccagagtttcctctggcttcgccc

SEQ ID NO: 515778 - DNA, 389 bp, Homo sapiens
aactagatcctcctactaatgtatacatacttgtaccatttgccacatgtactgacttattaattacactactctaaaaacacttaagttcacttagttgatcagggcatatacagaagggtttgtctcgactccatgtatcattttacaactttctgccctggttaaatttttctcccccaaagtaatcactgtgttggtgtgtctgatggaaatttcgaggtggacccacaaaaatattctatgtagtgtgccttcaaagagaaccatttatttctcttcacttatcgtcccacaaagtcacatttggtggtggtcagccaagtcgcatctggtctagttttactcttctcgataagggccaataacaaaaatgttggaaagtcgag

SEQ ID NO: 515779 - DNA, 692 bp, Homo sapiens
gttggtgcagtgggatggctgctgctcttcttcaggctgtcagtagattcagatctgctccatgcatcttcccatcccagtcatacagccaggaacagcaggtgtgagattcaaacttaggtcttcttcactgaaatttccattctattcagttcctcttttattatgttttgagaagatgtgtgctgagctatgagttgggggcttccttccaagacttgagaagtcttctggcctgtgtggcctgaggcaagtctccagtaacacagaattgaggcaagggaatggttagctaccaggagaccttggttcttagatgggaggacacagctgattaagtcactggcttaagatgagtcgtatatgtgaagcaggactgatggcagctaccctgccacccgctcagagattcagaggggccgtggagagagaatatacgtaaaaattctttgtaaactgtttaacatcattcaaatagatgacaatgttgttggttctctttagaaggaaatgggaacaaacctaactgccattttccctcaacagaggttctgcctgaaaaggcaatcctgtcccctaaaatgtttgttttgagggttctaggacacggcaaagaatatcacgcctataaccttttttgtagtagagagtacaacagagaatttcagactcacttttagaaaactcagggc

SEQ ID NO: 515780 - DNA, 872 bp, Homo sapiens
gagcggggtggtggctgagtgcggttccggaggttctagtgtcggagttgggtgcagagcaggtgccatggtgcccgcttgaggcacactgagggtgacgcggtggctgggccatggcctggcgctcgggcctgcgccgccgcatgcctcgtgcggggtcctacgtgcactcttcagtgcaagcagccgactcagtgagctggtggcttgggtgagctgctggaggagttctcccggactcagtacctgggccaaggatggcagccgggaccggctggctctacacggttgagcgcattgagacagagatagtcttggagctgttttggccgagactacttgtttcagcgtgattccaaaacacagacatggggatatctcgttgtgcactatccccggcaacatacggtgttcctggagtattgagagtactgacgaagggatgaaaagaacagtttgaagaagtacgcgtaacaggtgagcaagttgcgaagaactccattcacggagacaagatgggccaggtggcagaaggaagggttgtacttgaccagtaaatctgttacaggggcaaggcacattttgcagggtcggcacaggttggtgggatgggggaagacggtgaacttggacgcctcaagggtacagaactaatttaatgattcagggagggttgcaagaatggatggcctgtggccgaattgtgggaagggacggttaagaggatgaaaggacttgtgggctacttacgaaagatgggtggacaaagcaattataagaagaataaaggtaagaagggttaatggacattaaagattggttcgataacttgtcagacaataagtatgtgacctggatggggaaacaaagag

SEQ ID NO: 515781 - DNA, 2250 bp, Homo sapiens
  misc_feature (412)..(412): n is a, c, g, or t
  misc_feature (995)..(995): n is a, c, g, or t
aaacagtaatggcggaggctgcaatctccctggaacaacagccacaacatcaggagcaggagcgggcagcggagacgtgcgtgcatgcatgtctcccctcatcccctgatccccacatgtcatcctgcctcctgttcccctgtgtggtggccgtggctgtgatgtgtgtgtgctgtgctgtgcatgctgatctgtgtcacgccgtgctgggcgagccttgggcacgtacacacccacgtgctcgacccgttgacaagcgctactctctctacttgccacttgcgcgcggctactctggctagacgcgcaccacgcgcaagcacccagaaccttgctatcgtgacctaacccatcatgccccatgttgcaacgcccatttcgattctattgatagcctactgcataccactgnactaaccttaacgcgctcggcatcacgccttggctagcgcgacaaccgctcactactctgtccaaaggcccgtcagcgcagcgtctatacactgtgcataacattctcgttaacgtatggcgccatcggcaacccacctgtgtctctttggccctcaccggcaactttacctttgcataccccaacttaacgcgccgaatcacaaccgcccaacttcttgtcatattactcaacggcgctaacaccgtacaccgtccgataaccatatgactttaaacctacggctaacctgtcctataacgagccctttaaaccgcacgacagatcgcgtttccaactatctccctcccgtttttctgcgccctatttcggcgctttttatcccctgttaccgacaaactgcgtatacctcacctttttccatatttcccgggacacttaacgcgctttcatggcgggaaagcacgcctaaaccagtaatctaggcttctgcttgtgccaccatactcacctttctgtgcacgcacatttttaaaccccgcaacggggtggaccactgcgtaaatcgaagtggctccctctnatggtgcaaactggctcttttaccctgacaagtgctacatcaatcaacttttttgcccacacagaacgccccttatttcctgtgtgatccacaaagaaccaccctcttgtgactataacagccggtgaaactcgctcccaaggagcgcgcacttcttcccgtcgtctgccaatcggtgcgtgtgcaaccctcctttggtgggtcgtgcggccctttgtcgtaccaccatcgatattgtgcccgcctcttacacgctttctcgtggtggtcagccggtcttatccgtagcgcgcgggcttctcattccccccctttttttttgttggtgtgttcgtctaataatgcgtcccctcccgattttaaactcctttatgggtattttggctcgtgccgccccccgtggtctgtcaatccccagctttgggcgctgctgtgccctccacattttttatctcccactgcattttgggactccagcacgtgtttttgtgtattactaggtggtcagccagcaagtgcgccctccccactcttatttgttgcagccctaatgtcgtgcgggtgcctcgccgttattccgtaaggcagctgttgggacacaccctcccacatcaggtgtgcggggcacgtacaactgcagcaaaacaactactttttcccgtaagtgctaaataggtcgaccaacaactaagctacctggtagacaacgtggcccgaattagctagataatcctcctcgcgtgtggtccctcgccgctgtgtgttgtttgtgtgcgttagccacgcttcgtactcctgcagacaccatacacgggttgaaaatacataagggtcgcctacctaatgaggcgtctcgattattgtgcacttatgtgtggccccctcgcatttctcccctttaaaacctggttgttgtcgccgtttgtggcgccagcaactaactcctaggacgtagccgcgtcacaaactgcagtaacaagctgggctatgttgtcccccccgcctcgagtggcatacgtatataccactccgctcggtcagtcgatgtcaactgtgcagcttaacatactacctccgctgtttggtggcatgtagtgactctcggtgcactcattcacttctcgctgctttccccgcccaatcaaccgtgcgtcgtgcctagcctgccaacaatatttatttccccactatgtcgttgggctactctgctcgcacaccccaggctttttgtggcttttcggtttcgttgcgctgc

SEQ ID NO: 515782 - DNA, 284 bp, Homo sapiens
  misc_feature (72)..(72): n is a, c, g, or t
  misc_feature (146)..(146): n is a, c, g, or t
  misc_feature (215)..(215): n is a, c, g, or t
aggaggacagagtccctgggcatccaccttcctgcccaggggacgtggcgctgtcggtgtttggagctgctncccctgctttggcgccatggccctcagcgtctcccatgctgggctcactacatggccagcccttgctctcctgncggtaggcttggcgcctaggttgtgttgagagggggatccctggcctgcctcactgtgacctgctcctnccacgtgcagcacctgtcaccttttctagaaataaaatcaccctgactgtggggtgcatcggtctccgg

SEQ ID NO: 515783 - DNA, 141 bp, Homo sapiens
tcaccgagtgagaacttggatatgccattgagcttttctgcagtttccattctctcgtctcataaaatagcaaattttcagcacaacatttgctccacctcacctcaccacagctcattgtgcagcaaatccaatgcagca

SEQ ID NO: 515784 - DNA, 533 bp, Homo sapiens
acggcaggttgtactccacaggcaggttagtactccaccggacaggttgtactccaccggcaggttagtactccaccggcagattgtactccaccggcagtttgtactaccaccggcagattgtactccagcggcaggttgtactccagcggcaggttgtactccaccggaaggttgtactccaccgggaggttagtactccaccggcaggttgtactctcctgggccttgtactaagtgcggcaaagaaggccactggaacgggggcaatgtctccacccatgagttgccgaaaagcccttgcatagtctgccagaagatgggccctgaaaattctgattgtcctctcaacagatgggcagcacagcatgctcctcaagagccaccatcccttcaaaaagacaaaaagtgaagaatcacttgcactcccatagctcattggcctagccattgaagcctgatgaggccaggacccctgggcccgggttcccggcccccattgccatcattggttcggagcccagggaaactct

SEQ ID NO: 515785 - DNA, 1347 bp, Homo sapiens
ggacggaggcgggtacaagagtagaacaaggaggttgccagggctcgatgacccatcaataccctcgtctcacggacaacaggccgaaagggacttccgcctagacgtcgaccagatcatggtcgcctcgtagtacagcataggttctgacccaaggaggatcgctgcaagcccggtagacggatggagagcttgagtctcactcagagaagcaaccgcaataattcgcaccgggaactatacaggctagagttggtaccaggaagacatcgcccattccgatggtgtgctgagggctaggtaacgaagagacgctgtgccacgtggtactgattcgctgcctcagaacccggattgtgggtgtattgtgcttgactcaaatggcgcacgcgtcgtcctagctgggggttgtggaggcccccatagaaggttatcggaacccgggctgctcctgtcaggtcgttactatgcagaccctttttcgatccagtagtgcatttctagttagggaaagcgcatgtaattgcccgaaacggctcagacttactgcgactttgcggactataccacgaggtgacctcgtaagggaatttagtgacaagcccgcattagtcctattgccccttggagggagtcagccccgctagatacctcgcaccactagagcctagggatagaaacggtacctgggtgtagggagagggtgcgatgtatggggaatgaaaagggcgaattgaagtaaagacggtaaagtaggcatagtcgtgagaaggattaaaagccttttagggataaaagttaacaaagtggtccttagtgctcaatattaacaggaagatagccatttctcgggatgggggggcgactgaagaaattccattgaagaaaatcctaataaatcgttgggagccatagctggggcttacccatccaaggagaaagcttcatccatatgtggcgtagtcccccctgtgtaaccccttgggtgcttttctttgggaacgcacaggctgcgcacaatgaaccgattcaattcgaacacaatgatagatccttcagataggtacaagctgcaggagggagacctaggctaggtcgtatcctatggcgcacgaggactccgaggtccttccaacttggtgtggccttctaaggttatacagcttccaaggttaaccaccggcctctgagagtttgttcaataccccccacatggaagtgaaattttgccccgagagtaccaaacgctagagagtaaaggagcactgagtttgtacaaggccgatagaaccctcgaaggggccaattactttggacacgaaagtcctcacaaggtgttttggccgg

SEQ ID NO: 515786 - DNA, 238 bp, Homo sapiens
aacacccaaccgcaaggctcaggaccaggacttttactgggccccatctacaagacactgactcttctggaacactttcaaccacagggcactctaccaactatgtcattctttggaaatcccccaccaatcgcccccggcgacactgattaaagcgtggtgtggccctcatctgtgccctggactactagactcagacagaagggctggggccattaaagctgaattttctaagcaa

SEQ ID NO: 515787 - DNA, 791 bp, Homo sapiens
cataaaatggaaatgccttccaaatcctcattaagttagaaggcttttactgacatttagaaagcaagtttatggtcagagcaaataaaaacagtgcagatgtcttcataaggctgattccagaagatcagctgtttgtaaaggtaagtgattgcatctattacatatggattacccattctttcccaaattttttccccaaagagatgaatttttaccaaagattatagttatgtgtgtgtggttttcctttttttttttttccaaaggaaagcagtggtcttcatgcttaaaagtcagggctggtttatacttggcaagaaacaaaaagcatattttttggttggtggcttccccaaaagacattccttttagaaggcctgggaactatgtctatcatatcactctttaaaaaaaaacaagaagaatatatcttattgggaaagagactggatataatcaactcatggttactttactgatgctgagtctttaaatgtgtactggtcaattgtattagccatagggactttctgaattccggtaggcactaggtggggtcactacgccggggggtgcggttccatgggcagactgagcctctatggtctaactgttttccctctcgactcagatttaatggttacttatatttcggggggttctctggaccggttgtacttgcgttgggggctctaaggtccaggtccccttgggggggttccggggtgcgtaacgggtatgtaacacgtttcttctgaaaaaatgcggcctcgcgggttttttcttcg

SEQ ID NO: 515788 - DNA, 854 bp, Homo sapiens
  misc_feature (540)..(540): n is a, c, g, or t
tcaccaggcctggctaactttgtatttttgtagagatagggtttcgccacatggccaggcgtggtctcgaacacctgacctcagataatccacctgcctcagactcccaaagtgctgggattacaacatgagccactgcgcctggccttaagtgtttttttttggttggttggttggtgggtgttggaaacagcgtctcactctgtcacccaggctggagtgcagcagtggcgcgatctgggctcattgcaacctccgcctcccaggttcaagcgattcttctgcctcaacctcccgagtagctgggactacaggcatccaccaccagcccggctaatttttggtatttttttggcagagacggggtttctccatgttagccaggatggtctcgatctcctgatctgtgtgatccagcctcctcagcctcccaaagtggcgggaattataggcttgagccatgtgcctggcttaagtttaatttttaaaaattcccagtaacacgggggagtaattaagcctggatgtgttgcaatattngttcattttgccttagctttaagttgcaggactatgtgctctatcttataaagttctgatatttcactctatttcaataggttcgccaataggaatagaatctttggtaagttcataacatatcagccgaatgagccagaattacacatttctttggttaacttgaacaaataggggagcgcctccacttgggcccctcccgggccggaaggaggttcaccatacggggcgcacctctccagatggcccgggggggaggtcacacgatgcaggggtgaataacgggggaaaggcctcgcagcaccccgttggcg

SEQ ID NO: 515789 - DNA, 141 bp, Homo sapiens
tctttttgttgactttgttgaatttcaggtgcctgttggtgtgcatccttgtctctgcgttctttggtcgttgtctttgttgtgttgtctgcacgtggatctttggttgtctgggtagcattgattgaactgcatctgatt

SEQ ID NO: 515790 - DNA, 398 bp, Homo sapiens
gacactagcaggatccctctaatatagcaacaatctattttgacgaactctggaatataataattcattagtatacttgctttcattcatacattcatccatccttccatccatccatccttccatctatccatccatgcatacacccttccattctattgcttcttctgaccaacattataatgattagttgtgtgctgtgctgtgtgcaaatacaaagatggttattaaattttgactttgtcctcgaggacctccacaatctattaggatatactcttccgtcatgtcaataaatgttttgcacagagtaaatgatttcaaaggtgaatcttaaggaggagtaaacatcagtcatgtgaaaccattctgcagaggggatgtgggttactttgacg

SEQ ID NO: 515791 - DNA, 519 bp, Homo sapiens
tggtccctggtgatagcacaagagtgaacgtcgtctcacagtacaagtcggggcgtgatggctcacactggtaatcccagcacttgggcaggccagacggttggatcaggaggtcaggagttcaaaaccagccgggcctaagatggtgaaacccggtctctactaaaaatacaaatataagtggggcttggtggcatgcacctgtaatctcacctactcagaggtctggatgcaggagatatggctggaaacccaggagggagagtgttccttggagccgagattggaccatggcactctaagcctggggcgacagagcaagaactcaatctcgaaaagaaagagagagaaaggaaatcccccgagggaatgtcacctgggctggatttctataaaaaggtcacggaaggcaagcagaggctatgtggaggcatcccccaagctcatggaagctatttgggccgggggcgtcggaaataaataattccagagtcacccttttgatgaccttagcagtgc

SEQ ID NO: 515792 - DNA, 137 bp, Homo sapiens
tgaagaggtggagtctcccagctgtcagatgggtcgaaatccatgtatcaggagcctagaccctccagagccaggtgctacacgatgagcgaagtcattgagcacatcacccaaagcagtggccatcatcgcggacc

SEQ ID NO: 515793 - DNA, 2749 bp, Homo sapiens
acgcgcgccctgcggagcccgcccaactccggcgagccgggcctgcgcctactcctcctcctcctctcccggcggcggctgcggcggaggcgccgactcggccttgcgcccgccctcaggcccgcgcgggcggcgcagcgaggccccgggcggcgggtggtggctgccaggcggctcggccgcgggcgctgcccggccccggcgagcggagggcggagcgcggcgccggagccgagggcgcgccgcggagggggtgctgggccgcgctgtgcccggccgggcggcggctgcaagaggaggccggaggcgagcgcggggccggcggtgggcgcgcagggcggctcgcagctcgcagccggggccgggccaggcgttcaggcaggtgatcggtgtggcggcggcggcggcggcggccccagactccctccggagttcttcttggggctgatgtccgcaaatatgcagaattaccggccgggtcgctcctgaagccagcgcggggagcgagcgcggcggcggccagcaccgggaacgcaccgaggaagaagcccagcccccgccctccgccccttccgtccccaccccctacccggcggcccaggaggctccccggctgcggcgcgcactccctgtttctcctcctcctggctggcgctgcctgcctctccgcactcactgctcgccgggcgccgtccgccagctccgtgctccccgcgccaccctcctccgggccgcgctccctaagggatggtactgaatttcgccgccacaggagaccggctggagcgcccgccccgcggcctcgcctctcctccgagcagccagcgcctcgggacgcgatgaggaccttggcttgcctgctgctcctcggctgcggatacctcgcccatgttctggccgaggaagccgagatcccccgcgaggtgatcgagaggctggcccgcagtcagatccacagcatccgggacctccagcgactcctggagatagactccgtagggagtgaggattctttggacaccagcctgagagctcacggggtccatgccactaagcatgtgcccgagaagcggcccctgcccattcggaggaagagaagcatcgaggaagctgtccccgctgtctgcaagaccaggacggtcatttacgagattcctcggagtcaggtcgaccccacgtccgccaacttcctgatctggcccccgtgcgtggaggtgaaacgctgcaccggctgctgcaacacgagcagtgtcaagtgccagccctcccgcgtccaccaccgcagcgtcaaggtggccaaggtggaatacgtcaggaagaagccaaaattaaaagaagtccaggtgaggttagaggagcatttggagtgcgcctgcgcgaccacaagcctgaatccggattatcgggaagaggacacggatgtgaggtgaggatgagccgcagccctttcctgggacatggatgtacatggcgtgttacattcctgaacctactatgtacggtgctttattgccagtgtgcggtctttgttctcctccgtgaaaaactgtgtccgagaacactcgggagaacaaagagacagtgcacatttgtttaatgtgacatcaaagcaagtattgtagcactcggtgaagcagtaagaagcttccttgtcaaaaagagagagagagagagagagagagaaaacaaaaccacaaatgacaaaaacaaaacggactcacaaaaatatctaaactcgatgagatggagggtcgccccgtgggatggaagtgcagaggtctcagcagactggatttctgtccgggtggtcacaggtgcttttttgccgaggatgcagagcctgctttgggaacgactccagaggggtgctggtgggctctgcagggcccgcaggaagcaggaatgtcttggaaaccgccacgcgaactttagaaaccacacctcctcgctgtagtatttaagcccatacagaaaccttcctgagagccttaagtggtttttttttttgtttttgttttgttttttttttttttgttttttttttttttttttttttttacaccataaagtgattattaagcttccttttactctttggctagctttttttttttttttttttttttttttttttaattatctcttggatgacatttacaccgataacacacaggctgctgtaactgtcaggacagtgcgacggtatttttcctagcaagatgcaaactaatgagatgtattaaaataaacatggtatacctacctatgcatcatttcctaaatgtttctggctttgtgtttctcccttaccctgctttatttgttaatttaagccattttgaaagaactatgcgtcaaccaatcgtacgccgtccctgcggcacctgccccagagcccgtttgtggctgagtgacaacttgttccccgcagtgcacacctagaatgctgtgttcccacgcggcacgtgagatgcattgccgcttctgtctgtgttgttggtgtgccctggtgccgtggtggcggtcactccctctgctgccagtgtttggacagaacccaaattctttatttttggtaagatattgtgctttacctgtattaacagaaatgtgtgtgtgtggtttgtttttttgtaaaggtgaagtttgtatgtttacctaatattacctgttttgtatacctgagagcctgctatgttctttttttgttgatccaaaattaaaaaaaaaaataccaccaacaaaaaaa

SEQ ID NO: 515794 - DNA, 2807 bp, Homo sapiens
acgcgcgccctgcggagcccgcccaactccggcgagccgggcctgcgcctactcctcctcctcctctcccggcggcggctgcggcggaggcgccgactcggccttgcgcccgccctcaggcccgcgcgggcggcgcagcgaggccccgggcggcgggtggtggctgccaggcggctcggccgcgggcgctgcccggccccggcgagcggagggcggagcgcggcgccggagccgagggcgcgccgcggagggggtgctgggccgcgctgtgcccggccgggcggcggctgcaagaggaggccggaggcgagcgcggggccggcggtgggcgcgcagggcggctcgcagctcgcagccggggccgggccaggcgttcaggcaggtgatcggtgtggcggcggcggcggcggcggccccagactccctccggagttcttcttggggctgatgtccgcaaatatgcagaattaccggccgggtcgctcctgaagccagcgcggggagcgagcgcggcggcggccagcaccgggaacgcaccgaggaagaagcccagcccccgccctccgccccttccgtccccaccccctacccggcggcccaggaggctccccggctgcggcgcgcactccctgtttctcctcctcctggctggcgctgcctgcctctccgcactcactgctcgccgggcgccgtccgccagctccgtgctccccgcgccaccctcctccgggccgcgctccctaagggatggtactgaatttcgccgccacaggagaccggctggagcgcccgccccgcggcctcgcctctcctccgagcagccagcgcctcgggacgcgatgaggaccttggcttgcctgctgctcctcggctgcggatacctcgcccatgttctggccgaggaagccgagatcccccgcgaggtgatcgagaggctggcccgcagtcagatccacagcatccgggacctccagcgactcctggagatagactccgtagggagtgaggattctttggacaccagcctgagagctcacggggtccatgccactaagcatgtgcccgagaagcggcccctgcccattcggaggaagagaagcatcgaggaagctgtccccgctgtctgcaagaccaggacggtcatttacgagattcctcggagtcaggtcgaccccacgtccgccaacttcctgatctggcccccgtgcgtggaggtgaaacgctgcaccggctgctgcaacacgagcagtgtcaagtgccagccctcccgcgtccaccaccgcagcgtcaaggtggccaaggtggaatacgtcaggaagaagccaaaattaaaagaagtccaggtgaggttagaggagcatttggagtgcgcctgcgcgaccacaagcctgaatccggattatcgggaagaggacacgggaaggcctagggagtcaggtaaaaaacggaaaagaaaaaggttaaaacccacctaaagatgtgaggtgaggatgagccgcagccctttcctgggacatggatgtacatggcgtgttacattcctgaacctactatgtacggtgctttattgccagtgtgcggtctttgttctcctccgtgaaaaactgtgtccgagaacactcgggagaacaaagagacagtgcacatttgtttaatgtgacatcaaagcaagtattgtagcactcggtgaagcagtaagaagcttccttgtcaaaaagagagagagagagagagagagagaaaacaaaaccacaaatgacaaaaacaaaacggactcacaaaaatatctaaactcgatgagatggagggtcgccccgtgggatggaagtgcagaggtctcagcagactggatttctgtccgggtggtcacaggtgcttttttgccgaggatgcagagcctgctttgggaacgactccagaggggtgctggtgggctctgcagggcccgcaggaagcaggaatgtcttggaaaccgccacgcgaactttagaaaccacacctcctcgctgtagtatttaagcccatacagaaaccttcctgagagccttaagtggtttttttttttgtttttgttttgttttttttttttttgttttttttttttttttttttttttacaccataaagtgattattaagcttccttttactctttggctagctttttttttttttttttttttttttttttttaattatctcttggatgacatttacaccgataacacacaggctgctgtaactgtcaggacagtgcgacggtatttttcctagcaagatgcaaactaatgagatgtattaaaataaacatggtatacctacctatgcatcatttcctaaatgtttctggctttgtgtttctcccttaccctgctttatttgttaatttaagccattttgaaagaactatgcgtcaaccaatcgtacgccgtccctgcggcacctgccccagagcccgtttgtggctgagtgacaacttgttccccgcagtgcacacctagaatgctgtgttcccacgcggcacgtgagatgcattgccgcttctgtctgtgttgttggtgtgccctggtgccgtggtggcggtcactccctctgctgccagtgtttggacagaacccaaattctttatttttggtaagatattgtgctttacctgtattaacagaaatgtgtgtgtgtggtttgtttttttgtaaaggtgaagtttgtatgtttacctaatattacctgttttgtatacctgagagcctgctatgttctttttttgttgatccaaaattaaaaaaaaaaataccaccaacaaaaaaa

SEQ ID NO: 515795 - DNA, 312 bp, Homo sapiens
tacgggctatgccttcaccaccgacaaatccgctatccctcaggagaacgggatgacagcttcattcgtttttcgagttgccccatatgtcatccagaaagctgttcaggattgaaggcgtctggtttttcatagtcttgtgtgttcacagacctctagggctcaggatgagaaatacttccgtgtccttggggatggtgtaccctcagaagctggtgtgttgggtgacaatgtggggcacacccatggggagaaggtcagcaaatctctgaatttcacggatgactgcctctgtgtatggcattttggctc

SEQ ID NO: 515796 - DNA, 2784 bp, Homo sapiens
acgcgcgccctgcggagcccgcccaactccggcgagccgggcctgcgcctactcctcctcctcctctcccggcggcggctgcggcggaggcgccgactcggccttgcgcccgccctcaggcccgcgcgggcggcgcagcgaggccccgggcggcgggtggtggctgccaggcggctcggccgcgggcgctgcccggccccggcgagcggagggcggagcgcggcgccggagccgagggcgcgccgcggagggggtgctgggccgcgctgtgcccggccgggcggcggctgcaagaggaggccggaggcgagcgcggggccggcggtgggcgcgcagggcggctcgcagctcgcagccggggccgggccaggcgttcaggcaggtgatcggtgtggcggcggcggcggcggcggccccagactccctccggagttcttcttggggctgatgtccgcaaatatgcagaattaccggccgggtcgctcctgaagccagcgcggggagcgagcgcggcggcggccagcaccgggaacgcaccgaggaagaagcccagcccccgccctccgccccttccgtccccaccccctacccggcggcccaggaggctccccggctgcggcgcgcactccctgtttctcctcctcctggctggcgctgcctgcctctccgcactcactgctcgccgggcgccgtccgccagctccgtgctccccgcgccaccctcctccgggccgcgctccctaagggatggtactgaatttcgccgccacaggagaccggctggagcgcccgccccgcggcctcgcctctcctccgagcagccagcgcctcgggacgcgatgaggaccttggcttgcctgctgctcctcggctgcggatacctcgcccatgttctggccgaggaagccgagatcccccgcgaggtgatcgagaggctggcccgcagtcagatccacagcatccgggacctccagcgactcctggagatagactccgtagggagtgaggattctttggacaccagcctgagagctcacggggtccatgccactaagcatgtgcccgagaagcggcccctgcccattcggaggaagagaagcatcgaggaagctgtccccgctgtctgcaagaccaggacggtcatttacgagattcctcggagtcaggtcgaccccacgtccgccaacttcctgatctggcccccgtgcgtggaggtgaaacgctgcaccggctgctgcaacacgagcagtgtcaagtgccagccctcccgcgtccaccaccgcagcgtcaaggtggccaaggtggaatacgtcaggaagaagccaaaattaaaagaagtccaggtgaggttagaggagcatttggagtgcgcctgcgcgaccacaagcctgaatccggattatcgggaagaggacacgggaaggcctagggagtcaggtaaaaaacggaaaagaaaaaggttaaaacccacctaaagatgtgaggtgaggatgagccgcagccctttcctgggacatggatgtacatggcgtgttacattcctgaacctactatgtacggtgctttattgccagtgtgcggtctttgttctcctccgtgaaaaactgtgtccgagaacactcgggagaacaaagagacagtgcacatttgtttaatgtgacatcaaagcaagtattgtagcactcggtgaagcagtaagaagcttccttgtcaaaaagagagagagagagagagagagagaaaacaaaaccacaaatgacaaaaacaaaacggactcacaaaaatatctaaactcgatgagatggagggtcgccccgtgggatggaagtgcagaggtctcagcagactggatttctgtccgggtggtcacaggtgcttttttgccgaggatgcagagcctgctttgggaacgactccagaggggtgctggtgggctctgcagggcccgcaggaagcaggaatgtcttggaaaccgccacgcgaactttagaaaccacacctcctcgctgtagtatttaagcccatacagaaaccttcctgagagccttaagtggttttttttttttttgttttttttttttttttttttttttacaccataaagtgattattaagcttccttttactctttggctagctttttttttttttttttttttttttttttttaattatctcttggatgacatttacaccgataacacacaggctgctgtaactgtcaggacagtgcgacggtatttttcctagcaagatgcaaactaatgagatgtattaaaataaacatggtatacctacctatgcatcatttcctaaatgtttctggctttgtgtttctcccttaccctgctttatttgttaatttaagccattttgaaagaactatgcgtcaaccaatcgtacgccgtccctgcggcacctgccccagagcccgtttgtggctgagtgacaacttgttccccgcagtgcacacctagaatgctgtgttcccacgcggcacgtgagatgcattgccgcttctgtctgtgttgttggtgtgccctggtgccgtggtggcggtcactccctctgctgccagtgtttggacagaacccaaattctttatttttggtaagatattgtgctttacctgtattaacagaaatgtgtgtgtgtggtttgtttttttgtaaaggtgaagtttgtatgtttacctaatattacctgttttgtatacctgagagcctgctatgttctttttttgttgatccaaaattaaaaaaaaaaataccaccaacaaaaaaa

SEQ ID NO: 515797 - DNA, 2753 bp, Homo sapiens
acgcgcgccctgcggagcccgcccaactccggcgagccgggcctgcgcctactcctcctcctcctctcccggcggcggctgcggcggaggcgccgactcggccttgcgcccgccctcaggcccgcgcgggcggcgcagcgaggccccgggcggcgggtggtggctgccaggcggctcggccgcgggcgctgcccggccccggcgagcggagggcggagcgcggcgccggagccgagggcgcgccgcggagggggtgctgggccgcgctgtgcccggccgggcggcggctgcaagaggaggccggaggcgagcgcggggccggcggtgggcgcgcagggcggctcgcagctcgcagccggggccgggccaggcgttcaggcaggtgatcggtgtggcggcggcggcggcggcggccccagactccctccggagttcttcttggggctgatgtccgcaaatatgcagaattaccggccgggtcgctcctgaagccagcgcggggagcgagcgcggcggcggccagcaccgggaacgcaccgaggaagaagcccagcccccgccctccgccccttccgtccccaccccctacccggcggcccaggaggctccccggctgcggcgcgcactccctgtttctcctcctcctggctggcgctgcctgcctctccgcactcactgctcgccgggcgccgtccgccagctccgtgctccccgcgccaccctcctccgggccgcgctccctaagggatggtactgaatttcgccgccacaggagaccggctggagcgcccgccccgcggcctcgcctctcctccgagcagccagcgcctcgggacgcgatgaggaccttggcttgcctgctgctcctcggctgcggatacctcgcccatgttctggccgaggaagccgagatcccccgcgaggtgatcgagaggctggcccgcagtcagatccacagcatccgggacctccagcgactcctggagatagactccgtagggagtgaggattctttggacaccagcctgagagctcacggggtccatgccactaagcatgtgcccgagaagcggcccctgcccattcggaggaagagaagcatcgaggaagctgtccccgctgtctgcaagaccaggacggtcatttacgagattcctcggagtcaggtcgaccccacgtccgccaacttcctgatctggcccccgtgcgtggaggtgaaacgctgcaccggctgctgcaacacgagcagtgtcaagtgccagccctcccgcgtccaccaccgcagcgtcaaggtggccaaggtggaatacgtcaggaagaagccaaaattaaaagaagtccaggtgaggttagaggagcatttggagtgcgcctgcgcgaccacaagcctgaatccggattatcgggaagaggacacgggaaggcctagggagtcaggtaaaaaacggaaaagaaaaaggttaaaacccacctaaagatgtgaggtgaggatgagccgcagccctttcctgggacatggatgtacatggcgtgttacattcctgaacctactatgtacggtgctttattgccagtgtgcggtctttgttctcctccgtgaaaaactgtgtccgagaacactcgggagaacaaagagacagtgcacatttgtttaatgtgacatcaaagcaagtattgtagcactcggtgaagcagtaagaagcttccttgtcaaaaagagagagagagagagagagagagaaaacaaaaccacaaatgacaaaaacaaaacggactcacaaaaatatctaaactcgatgagatggagggtcgccccgtgggatggaagtgcagaggtctcagcagactggatttctgtccgggtggtcacaggtgcttttttgccgaggatgcagagcctgctttgggaacgactccagaggggtgctggtgggctctgcagggcccgcaggaagcaggaatgtcttggaaaccgccacgcgaactttagaaaccacacctcctcgctgtagtatttaagcccatacagaaaccttcctgagagccttaagtggtttttttttttgtttttgttttgttttttttttttttgttttttttttttttttttttttttacaccataaagtgattattaagcttccttttactctttggctagctttttttttttttttttttttttttttttttaattatctcttggatgacatttacaccgataacacacaggctgctgtaactgtcaggacagtgcgacggtatttttcctagcaagatgcaaactaatgagatgtattgtgtttctcccttaccctgctttatttgttaatttaagccattttgaaagaactatgcgtcaaccaatcgtacgccgtccctgcggcacctgccccagagcccgtttgtggctgagtgacaacttgttccccgcagtgcacacctagaatgctgtgttcccacgcggcacgtgagatgcattgccgcttctgtctgtgttgttggtgtgccctggtgccgtggtggcggtcactccctctgctgccagtgtttggacagaacccaaattctttatttttggtaagatattgtgctttacctgtattaacagaaatgtgtgtgtgtggtttgtttttttgtaaaggtgaagtttgtatgtttacctaatattacctgttttgtatacctgagagcctgctatgttctttttttgttgatccaaaattaaaaaaaaaaataccaccaacaaaaaaa

SEQ ID NO: 515798 - DNA, 581 bp, Homo sapiens
gtataatggccagcagatgaatccggcttccctcgtgctagtgccctccaggtgtggggtggcggcggcgtgcctccgttttctacgttcagttcagccctcacttggtggcatgacactgtttgaatgcaacttcgctttcagattgaacttgtcaaggaagtaaacgagggctgatttcagcaaatgctaaagtgtaaatttcaaatatgcaaatagggtactgcagttggttatgcaatattatatcaccaacccagtatcacaaaaactcatagaagatatcatgtaggccctgagctattaggggggttcccaaacatggtatgcagaaatgtgatggttacaggtcagtacaacctcagtccttagaacccttccacacttcagctctgaacccactattcctgtcatatatttatataaggactgaagtaattaaaagtatcgagagccttacgaagctaaatttatatactaacttagtacctttattctaaaattaccaaagatattacacaaaggtccattatgtactctgtaatatgctatatctgatgaagccaaatatcctctaattg

SEQ ID NO: 515799 - DNA, 431 bp, Homo sapiens
  misc_feature (144)..(144): n is a, c, g, or t
ataaaaaaaagggggggggggggggttctttttaccaacccccccccggaaagggggttttttcccgggtccctccccaaaaaaaaaaaaaaaaaaaaacttttggattttgggggggggccccttttaggggggggggaaatnaaaaaaaggggtccccccatttttataaagggggggggggggccggccgggttttttttaaaaaaaaacgggttttttaggggcggaccccctggggcccatttaaaccccccgcccccaaagccggggtgtgttttcccggtttttttaaaacttaaaggtttcccccccccctggttttttttttttgggggggcccctttggttaaaaccggggttttttttttttttggggaaaaaaggtttttgggttttcccaaaaatttttttccccgataacccgggga

SEQ ID NO: 515800 - DNA, 485 bp, Homo sapiens
tccggcggctgagtgccaacgaagtaaggagcgctcccttctgcatggggacttcacagcgttttccgttgggcctggctcttctcctatatccgcccctggggccagaattagcgttttctggtagtgcttaactttggggatgtgggcctctcggctggaatgcaggcctccgacctgccttccagggccagccttccaaccaagggtgacctcctgttcagcacccagccaggccgttaggaggggtcccctttttagttggaacgccttaaactggagcctcccgaaggggtgttggtccgctttccctacgcgggctgattttagcctgaaatgggacccctacccttttcctttccttcccagggcctttgggttttgatttttttttttttttaaaaccaaccaaccaactgtttccgattttgagttaaccccccaatagggtgttttttgccttcaaataaaagtcccccctgcca

SEQ ID NO: 515801 - DNA, 223 bp, Homo sapiens
caccagaaaagctgaagtccaatttaaggaaaaaaaaaaatacaagttatgaggggagaaatcttcagtgaaatagatagcatacataaaacaatcataactttaggaaataaagaacacagagaaaaacacactgaaaagcctcaacaatagaattgaacaagcagaagaaataacttcagagcttgaagacaagattttgacttagccaaatccaacaaag

SEQ ID NO: 515802 - DNA, 362 bp, Homo sapiens
  misc_feature (362)..(362): n is a, c, g, or t
ggcacgagagcaaacccactctacattactatcagacaaccttagacaaaccatatacccaaataaagtgtaggcgatagaaattgagacctgtggcactagatataggaccgcaagggaaagatgattataaccaagcataatatagcaaggactaacccctataccttctggataatggattaactagaaataactttgcaaggagaggcaaagctatagacaccccgaaaccagacgagctacctaagagacagcttaaagagcgacacccgtctatgtagcagctggttgtgcaagatagaatcttagttcaactttaaatttggccacagaaccctctaaatcccttggtttctggn

SEQ ID NO: 515803 - DNA, 234 bp, Homo sapiens
gctgtcgtcgataagcagaatctctattttgttcagaatccacccactcccccgtagctgtgtacctggccaggccctcaggtacatttccgatgaccggtgatttccccaggatgagcccaggacacaaagatagccaataagacgtggtagggggagacagaagcaagggttggaacgtcctcactcctaagaggaagccacagaagggactctcccacacttcccaggagg

SEQ ID NO: 515804 - DNA, 137 bp, Homo sapiens
aaggtcccgaatagtgatatagaggcaggagatcgcttgaacctgggaggtagaggctgcagtgagccgagattgcgcctactgcacttccagcctgtgctgacaaagtgatgactccatctcaataaaaagaaaca

SEQ ID NO: 515805 - DNA, 351 bp, Homo sapiens
ctgttgcgctctgaatcgtcggcctcagcgccaatccgcgctggagcgcgacgccggcctggattggaagagcggccggtcgaactcttcgcacaggagcggttcatcggcgcggggacctatgacgtcacccgggtcgaaccgaagaccatcgagaacaatcgcgtgaagtccgtcttctataccgacctgaccgccgccgtgcgcctgaaggatggctatcgcttcttcctgacggtcaacaatctgttcgatcgcgccccgccgctggcgccgaacggtacgctcttcacgttcatccccaccaatccgctgctctacgatgtgactggacgccagttcacggcggga

SEQ ID NO: 515806 - DNA, 130 bp, Homo sapiens
gctgagccaggcgttgtggggcagatgatcgaggcagctggaagagcgcccgttgctacgtgggtagtctatattctaactataggccttcctgtgttcctaggtaatcctgattcttgcttgttctcga

SEQ ID NO: 515807 - DNA, 178 bp, Homo sapiens
atgtcgccggcgagcacgacactgtaagtatatgctattgcttgggttctcacttgtttaagacggaaaccttgcttatctggccttccagctggcgcggtaaatctgtgagtacccctggttctcctcctgtgaatctctgatctgcttgtgtccccctaaccacttaccctgacct

SEQ ID NO: 515808 - DNA, 477 bp, Homo sapiens
acctaacaacccagcacacaatataaaaactggaaatacatgtaaagatcactaccatctgattaatgaggtcaaagaagtgcacagcattataaggaataagaatcgactaccagccgggcacggtctgtaataccagcacttggggaggctgaggcaggcggctcatgaagtcaggagttcgagagtcgcccggccaacatggtgacatcccaactccactaaaaatacaaaactgttctggtagtcctatcattcatgcacagagaggtgacaataacgcatcgtggtggcttctcccttgtgagtacacaaacacatatcaccaggcgtgggaagaaactttcttaacaagaaaaagatcaaaagaagcaaagggacctcaaaagaagcagaaattccaaccatggacaaaagtatgataaatatgctgggagagatgagaggagatttggcacctgtgaaacagtgctatta

SEQ ID NO: 515809 - DNA, 249 bp, Homo sapiens
acagggtctggataaaacctaaccatctttccatctgggctacagctttgacagctggagcatattggagagcaatgaccctggcctttggccctcaaatagtttttaccacaggccctacccaagtttgactttattcacctccaactgtgcccaaattcgacctcaaaagattaaaagcctatttgtcttttaaaggccagcctttatgaagctgacccagcccaaaccctggtgggtccctggttt

SEQ ID NO: 515810 - DNA, 120 bp, Homo sapiens
ttcattagagtgattatgaattagtgtctacaccattactcaattcttaaaacttagaaatgctgtcgcagtatcactataacttaacactacgagagacttaacaaacagttactgcac

SEQ ID NO: 515811 - DNA, 1025 bp, Homo sapiens
cacgcgtcggctggagatgcatctccgagatgaaatttgcaatgagatggtataacagatgcgacagcgggaacagtggtgcagctaggtaacattgtggatcacccaaaaggaactattggaggaaatgtatgatgaaaaactatactatcctcaaaggagtcactgacaacattcatgaccaagagagagattcaggagcgggatgaaaagattgaatgagctagaacgctctcttgcgggaagccaagacaaccagttcagatggtcccagtacagcaaatctagggtctgcaataggccctacggcggtcacaaaggttggcagcttctgcctccacgccaagcagcttcgaggaggttaaagctaaattacatgcaggtgcaaatgcatgagcataagacctcttagccactgaagagttgctataagtatcagtaaaatgttagaaccaccacccttctagatcatagtccacttcaccatgtgatgtggacaagaaggttcgaagagggccagtaagaatataaggctgttggcgtgacagatcgcttcagaaacttggtgagtctcatccaagtcagcaagagagagcttgttgccacagtcactggggcaggaaaacttgcggtaaagccttgagccactggtgatgacatcttatcaaacaggaccagactctggtctgaaactgcagaacaacgagggggctagggaaactgtaacttcggaagaagggcagcatgtatagctgagcagtatcatactgtgttcgcactccagcccagtttctgccacaaagcgctggtccacccgggaatcaggaacactccaacaacaccggggagaacctcctcgaattctcccaaacactgcaagctcaaggatggccttgccatcaacgcaagggtccctaccaattggttggaagccacgggggaaaaaactgccaggccacggaaacttgcctgaatacggaccacctccgaccccccggtttatgcgatcaaagccaggaaaaaac

SEQ ID NO: 515812 - DNA, 339 bp, Homo sapiens
gcaatgtacagcaacagagggtaccttttgggtttatagtatttacattctcttttagggtaggaggaggccaattttacctttaatttcacatgggttaggaattttaaaggcaaggttcattacccaaaggatagggtgtttggtaattgttgaaggaaggtaggtcttggcttcatgttttacatctccacctaaaattcccatactatctccttgggatttgggagagccacaaaataaagctgattgtcatgtgattaaatatctgatcaacaggtatgaatatacctcaaatcagcatatttttgccatggtaataaatgtcctataaactat

SEQ ID NO: 515813 - DNA, 222 bp, Homo sapiens
cggcgcacctgactgtaaacaatgaagattgacgcagcccgcagtgagacccgggcagagaagaaacgcatgggcatagaaataagagcagaaggccctgggcaccctgggcatacgacaatgaaaagggccaggtcgtgaccaaagacagcactcctgaagcatatagaagagctgatcgaggagcctggcctcacgtgctgcatctgcaaggaacccacg

SEQ ID NO: 515814 - DNA, 341 bp, Homo sapiens
ctccttgatggatcccccccatgcctttgtcacaggctacgaaagtctagtgacaaggaagcccactgagtggccaaatccaagtgttcattttattctttgaacggtatcaagaaaagagatgtacccgggcacagtgtctcatgcctgtaatcccagtgctttgggaggccgagacgggcggatcatgaagtcaggagattgagaccatcctggctaacacggtgaaaccccgtctctactaaaaatacaaaaacaaaaattagccgggcatggtggcgggcgcctgtagtcccagctactcgggaggctgaggcaggagaatggcgggaacccaggag

SEQ ID NO: 515815 - DNA, 118 bp, Homo sapiens
gaggaactctaccgagtataatagataggagcagtgacgaaagtaatttgatgtcctccacgagcaaacagagccacggagagcagcaacaaaaacaaaattcacaactggatttgga

SEQ ID NO: 515816 - DNA, 165 bp, Homo sapiens
tggaaatggagtttggctctgttgcccaggttggcttgcagtgctgcaatctgggctgactgcaatttccacctcccgtgtctcacacaagtctttggcctcagcctcgggatatagcggggattacagggcacgtgccaccatgcctagctaattttggtgttt

SEQ ID NO: 515817 - DNA, 185 bp, Homo sapiens
caatcatagcatacagcctatcagccaggggcagactgcagactagaccagatagtgtccaaatatagacaaaggttagagctagtaagccaatacagcctaatatccaatagccactatcactaaattctgtataatacaactcctagcttgccccactgtatgctagggtggcaggtctcata

SEQ ID NO: 515818 - DNA, 128 bp, Homo sapiens
gaagagatagcgttgatagggttgtaggtagtttgtcagctcaggctcggcagggcaagaagctgtcggaaatcatggagaaggggcagctggttccactggagacagtgttggacatgctccgggat

SEQ ID NO: 515819 - DNA, 1228 bp, Homo sapiens
catacactataagctcctgctaggcaaggactactaataagtgctgtgttaacactttcctgtagagagcttactttatctaactaaagataccagagcaggaattgcagtcccgtctctatggtagaaccatcagtaagtcaccctctggcttctttcgtctttagcgcagatacacgaaattgaccgagaacatcagaacattctatgaagcatcatctagaactatggtcatttacaaacttcaagacggtccagagaaaaaacagaagcttctgaactcacgtcgaacccgcatactatagctcactattttctcagtggccttacttctactattaatacccactgcagggatcatagacactctgcccaggaatttcgcaccagtatcacaggccaacacgctgcacgtctccaacctttgcagaactgtacacgagtataaccttggtgactctactagtctctacagcaccactctgcccagaatcctggagtgttacaacagcggacaacctaaattacacatatacgctctagactggcttcagtggaccaggtaccacacccagcacaaacccctcacatcctgtacgttagcacaacccttcattactaagccgcaaactacttactcacacacactttaaaattatttttaccgcagagtcaggcgacccaccacccttcaacacaggctctacttgaacacctctcctgtgacattaccatttccaagagtatacatatgctcacaacatctaccatgggtgctgaatggcgatcggaacgtaggtaagcctttgcgagaacgcttaatatcggcatgccaatggcgatgcacacatcagcgcacaacaacacagccgaaacagaagagactaccagaaaccatccccccagaaacaggatacagaccccataaagacgtgcctacaggagatacccaccctaccaacctgacgccaagcgcgcaccaaaaacgaaacagagaaaatacagaaaggcacaacaggggaacagcaactgacgcaccctcccgttggcacgtggagccttcagctccacagaagaaagacatagacagaggcgaaccacaatacataggcacacgacgaacgaggcaacggaaagaccagtcccaaaccaggtgcgtagcacgacagacggcagacggaacgaacaaggacagaagagggaaaacgacagcgagaaccgcaggcgc

SEQ ID NO: 515820 - DNA, 232 bp, Homo sapiens
  misc_feature (50)..(50): n is a, c, g, or t
  misc_feature (185)..(185): n is a, c, g, or t
  misc_feature (193)..(193): n is a, c, g, or t
cttggacaagatctgggataattctctggattacctggcagagacttttnttctcttcccttactgtctcccaaataaacagtctctcactctgttgtgagccacctgaagctgtgatatttccaacgactgtaggaggaaaaaattaaggggagagaggaaaacaaaaccaaccaacccctaanatcatttntttattgtacataacgacctcattctcctgtatatgcgg

SEQ ID NO: 515821 - DNA, 125 bp, Homo sapiens
cgttaaaacgggctgtggtcagcagtgtggacgtgcagtcagtggagcctgtggattagaggacccgggacgccctgcaacgcagcgtcagctgtccatcgagatcaccaccatagtcccagtga

SEQ ID NO: 515822 - DNA, 599 bp, Homo sapiens
accgtaagaaaaaaacagaactatgccaaataatatggaacgatttccatatgatctctaaaagtcttattgaaggatgatatcctttagtttcttttgagatggagtctcgctctgtcatccaggctggaatgcagtggtgcagtctatggctagctgcaacctctgcctcctgagttcaagcaattctcctgcctcagcctcctgagtagtggggattgcaggcacctgccatcattcatttttgtataattagtagagatggggtttcatcatgttggccaggctggtctcaaactcctgacctcaggtaatccacccgtctcggcctcccaaagtgttgggattataggcgtgagccactgtgcccagcctgaagtataattttcctttcataaaattcagctatagtaagtgagtatcaggacatttataacggctgtgcaactgtcaccacaattccgttttagaacactttcatcatctgtagggaggtttttgatcactacttaatagaataaaatagggctattttatccaatagggctgtttcacttcccagtttaatttgtgtcagattggtactgtgttttcgaggt

SEQ ID NO: 515823 - DNA, 387 bp, Homo sapiens
gcatgtaactgaataaaaggaagaattacatgcctcactttccctgctaaaagcacacattcacgtcgcatacctttgatatcacatgaattctgatcaaatcatttaattataaatgaaatagctcatggccaaaataaacaccttgtcataagacgtaattatatggtatggagtatcttataataaaactatgaggctacgcacatgtggctcacacctgttagcacaacaccttgagaggctgaggtcagaagattgagttcaggaattcaagactaacctgtgcaacatagtgagacctcatctctactaaaaattaagaaattagctgggcgtggtggcacaatttcagctcactgaaacctccagctcccaggttcaagc

SEQ ID NO: 515824 - DNA, 961 bp, Homo sapiens
  misc_feature (76)..(76): n is a, c, g, or t
ctatcatacgcagtagtgcccagttcacgtgccggtgataataatacatcaagtattctgcatctagttcttatgntagtatatgaacaattttcatatacattggtgcgtctctacatttattcactgactggtttgaagcaagttatttcattccaagtttatttgtcttcctgctagtagctgtgttgtaatttgatcctattgtcctattcagatcaacttcacattagaaattaaatggtcaagtcctcttattctgacttctatagaattacatgtatcttccaagcaagtaagatatcacttctgattttaagtctaggaaaacctaaattgtggctatggatccataagctgtcttgttgcttgtgaagtatcacatagttttcaaacacgtgatcttgtattgtaacaagttcccagctacgattgttaccattatgttatttatttccatatctctttaggtctttgataatcgtgaagtgttttctctcatcgtttttggtcttccaaagtgcatttggttacggtgaaattgaagaagaaactattgccatcaaagaattacattgtgttagcacaagaggatagactcttagctttatagagatggtcgtgtatctaatagtgaatatcccagcgtttaagaaacagaagtaaagtggaatacagaacagtgccattgaaggaccagttatttaccgtagtaacagaatcggtttactttgacaacaaaggcttgggtctggcgtctgtgtgtgtgtgatgtggtgagtgccactacaagaacaggagcgcagaagacagtgtgccgtcgaaaaacgccaagcaacacgttccacccaaacaacaggcgctgccgcagatggacagcaaacatgggaatacgcattaaggaattcatcatgtcccaccagcccggggaccacacagcggaaaaagactaacccgctcc

SEQ ID NO: 515825 - DNA, 229 bp, Homo sapiens
gccgcagcggataatccgggcatagtctccccgtgtccgatttgtagcgtactcgtatctacacagtcccttttattcagggaagaacaggttcggggaaggacatgtacatctttgcgggagcatatttctggctagcagaatcagataagtgcagtggtcttatttcttccttcatgtaatcttaggtctaacaaagcatagtcattttcttctaatcattaaattg

SEQ ID NO: 515826 - DNA, 195 bp, Homo sapiens
  misc_feature (162)..(162): n is a, c, g, or t
ctgcgtgtggtttacttttgtgaacacacagtcagctaaaataaacagaatttaggcaaaggagcaggaggcacttgttttgggaaccgagcgcacagtgtcagacaccgagtcgaagctgggttccttcgagctccttctggctgtgggtgtggccgaggnccttcaccaggtggccagggccgcagtacccag

SEQ ID NO: 515827 - DNA, 542 bp, Homo sapiens
  misc_feature (68)..(68): n is a, c, g, or t
  misc_feature (89)..(89): n is a, c, g, or t
  misc_feature (112)..(112): n is a, c, g, or t
  misc_feature (139)..(139): n is a, c, g, or t
  misc_feature (173)..(173): n is a, c, g, or t
  misc_feature (230)..(230): n is a, c, g, or t
  misc_feature (280)..(280): n is a, c, g, or t
  misc_feature (287)..(287): n is a, c, g, or t
  misc_feature (309)..(311): n is a, c, g, or t
  misc_feature (315)..(315): n is a, c, g, or t
  misc_feature (319)..(319): n is a, c, g, or t
  misc_feature (323)..(324): n is a, c, g, or t
  misc_feature (339)..(339): n is a, c, g, or t
aacgaacgtacacacatacacacacacacacacacacacacgagggaaactccatctcaaaaaagaanagcccgcaaacagcgaaatgntacttaattacatataaacgaanagagaatactagttgagaaagtgaaanagtcacaaaccctaacttcaactcacagaagatngtggcaaacacccattaacttttctacacaactaccatttcaactgatgagctgaanggaacaatatcaactagcgatttaaatctaaaactaggccaggtgcggtngctcacncctgtaatcccagcactttggnnngccnaggngggnngatcacgaggtcagnagatcgagaccatcctggctaacatgatgaaaccccacctctactaaaaatacaaaaattagctatacgtggtggagcgtgcgtgataatccccagctactacaggtggctgaggcaggagaatcgcttgaatatgggacggcggaggatacagtgaacccacatggcgccagtgcactccagcttgggtgatagagtgagac

SEQ ID NO: 515828 - DNA, 923 bp, Homo sapiens
  misc_feature (492)..(492): n is a, c, g, or t
agcgggccgggcccggggagtaggaaggagccggggctgtagccggagtggagcggctgccagccagaggtagcaggcgcgggcgcgggcgccatattgcggccctcagcagtgccgcagagcgagctcatgggctgagaccgtacgacttcctcttcaaattccatggtgagttggcagtgtcacggaactgtgctaaagtcgactgtctcacttcatcagttcacttgagtaactacagtttcacaagcacggactccaagcacacacagagtcgtgccgttgtgagggttggagtccccggggtggttcaacgatggggtggggaatgacctgtgaaggtctaccgatgtgtgggacacggggatgggccaggcagcggttatcggatcaggtgacgcgggaggtctataatccgatggggcggtctggagccctgctggtgtagcgatcattcaccaggccgggggactataacaatctcaccttggnctgacctggttttgacggaatgcccgcatcgctctgagccatgcctccaaacattcgttggtccttcctctgatggcagatcgatagagatctgggaccctgatgctgggaggtcactttccttggatggtcctcccgcttatgccgcagggatgagtgagctgattgttccttggagaccagcgctctcacaggcgatgaccgtggaggaggcgttcctccaagtgtgcccgtatatacgtcaatgaagaattgactcggggcgaactggacccggagagggatgggctctggcttgcagtacggggatggggtggctcccgtgcagttcggagagccatggagtgcccggcggtggccctagcgtgttgtggtgagtgtgtggggccgtaactgtctccaggaccgctgtggggcggccagtcgagaga

SEQ ID NO: 515829 - DNA, 691 bp, Homo sapiens
  misc_feature (195)..(195): n is a, c, g, or t
  misc_feature (226)..(226): n is a, c, g, or t
  misc_feature (281)..(281): n is a, c, g, or t
  misc_feature (294)..(294): n is a, c, g, or t
  misc_feature (321)..(321): n is a, c, g, or t
  misc_feature (351)..(351): n is a, c, g, or t
  misc_feature (481)..(481): n is a, c, g, or t
gctcaaacaccaacaaccagtaaagtcccccccctgcttgagtcacctatagccaccgggagttttatgttcaaactctcagtgagttccagcgttggtagggtgctgttgttgggggatcttgcacgccaaagatctctaccccaccctgcctttgttacagagtaagctgagtgccgtagcttgcggggaatnggcagtcccagcacagatgccagtgccagtnatgtcccggcaatttcgccttcgagggcattggaaatgaggatctgtaatctccnctgcttggatgtntgccctctaccccagaggaatttacanaaacttgccctgtgcctgtgtcccccatgntaggggcggaggggtcttttcctttttttttccaaccaacccctttttttttggccaggggcctggtatcctacctttccttgtcccctggggtgggtgcccagaggattgcccctttttttttcaaagntggccctcgatgccaaattagcatttagtattttgcccaaagtttaagggcccatggctgcctcccttggggaggaaccatatttccctttgggccgcttttggccttttggagccatgggccaaaggccaaggggatgggcaaaggtttgtgtttggtttggcccagttccccatcattaaactcagcctgactgctgcctaaaaaaaa

SEQ ID NO: 515830 - DNA, 191 bp, Homo sapiens
  misc_feature (67)..(67): n is a, c, g, or t
  misc_feature (83)..(83): n is a, c, g, or t
  misc_feature (108)..(108): n is a, c, g, or t
  misc_feature (144)..(144): n is a, c, g, or t
agaccatctgactctacaccctgtgtctcaaagcatcagacacacaccacagacaccgtccccagcnttcctgtctgcttcangagtcatgtaggtttggggaaacangctgggtcccggaaggtctgagggaggagacggcanggcttaattcctggaggccttgaaggtttaactggacccatctttgg

SEQ ID NO: 515831 - DNA, 965 bp, Homo sapiens
  misc_feature (737)..(737): n is a, c, g, or t
cgccagacgcccctgggtcagtggactctaagagtgtcgctccggcatccagtgtccttaaagatgaacgtgagaagggtggaaagcatctcggctcagctggaggaggcgagctccacaggcgacagcgtggaagatgagctggagatggctactgtcaggcatcggcctgaagccctggagctgctggaggcccagagcaaattcaccaagaaagagcttcagattctttacagaggatttaagaatgaatgccccagtggtgttgttaatgaagaaactttcaaggagatttactcacagttctttccacagggagactccaccacatatgcacattttctcttcaatgcattcgacacggaccacaatggagctgtgagctttgaggatttcatcaaaggtctttccattttgcttcgagggacagtacaagaaaaactcaactgggcatttaatttgtatgacataaacaaagatggctacatcactaaagaagaaatgctggacataatgaaagcaatctacgacatgatggggaaatgcacatacccggtcctcaaggaagatgctccccgacagcatgtggagacgttcttccagaagatggacaaaataaagatggtgtcgttaccatagatgagttcattgaaagttgccaaaagatgaaaacattattgcgctccatgcagtctttgaaatgtggtcttgactggcaggcctcctcgacgagaggncgatgggaacgactacacccaagttgggagcccccctggttgctaatgctcacttctggggcggtatgcgccggttgtttatttaggggccccccgccccataggttcgtcactggccggccggcgcagtggcttttttcaggggctggagtgcctccgttgcgtgaccgcaacccggtctcggttccccgcgtgacctcgcccacgcgcgggagatagacccccggt

SEQ ID NO: 515832 - DNA, 960 bp, Homo sapiens
ggtcagactgccttacgcggtgaatggggtaaaatgcggacatgccactcagtccggccgcgaacagtgctccagaatctcagagagtattccagacgggtggagatcgcgttccctggccgccgaggtcccatcgcttccctgtctgggacagacagatgaggcgctttagccgtctcgcacggccagccgctccctcataacccgagattcttgtgggctcttagtccactatctgccgtttggaggtggtgtagaccttgctaatccaggacggccagtaggcagagctcatttgtgattcctgtctgcaatcgtgcaggagaacgcctcgttatggaaaagccaggagcgccaggagtcagcaaaacacgactaaagattgggcagtcactggggagaacactcagcccgctgcagccaggtgaaatatacagccttgtggcctcacaacaaagcctgttgggggtttcttcacacggatgcatgtgacattggtgctgaagaaccaggacaggaggacctccttgggagagcagagccctgttgtcgacctcaatccgtgaggagatccacctatgatctcaggtcctcagaccaacagtcgaaggaacatcttgcaatttcacctcggatcggagtgtcaggctctgagttcaagctaagcccatcaaattccctgtgagctgcacgtgtacatccagatgactgaaggaactgaagatcacaaagaagtgaaagagcttactgatggccttcgccatgtgattgtcctggccaggtagtgatacaattttttccccgctgaatgtatttgaacttatcgaggtttaaatagggatctacacttgggttcttttgatcagcgctggccggtaataacggcggggcaaaaaaccgggttctggtggcacagcgggccggacgtttcacttggagggccaggtaaacggaatacag

SEQ ID NO: 515833 - DNA, 1153 bp, Homo sapiens
  misc_feature (534)..(534): n is a, c, g, or t
  misc_feature (648)..(648): n is a, c, g, or t
agcaaggctgatggagaagctgcagcaggtagacccggaagctctagctaagatcatagatgagcgagacgacagcaagcatacggaaactagttaaaagataaaaacaatcctaacggaagaataggaagggaagacagcgagaggacaattaagggtctgagtatagggaaacaaaaactgaatcaacgagggcagcagaatgaatgcagaggcacggaatagaagatttatagaagtagtctagggtagactagtttcagctagaaggcctactccgtacaatttaccattttttgttaatttatcgttatggcctcggaaaagagaattaatgaagtagattacgaactacgaaaccagtatatcaagattataaaacatgaacaaagaacaaataatgaaattcattcgggtagaatatgctaaataaaaatcaaaactaatatttatttgccgaattcataatatatgggaactagcataatgaaatatctgaagaaggatcggctaaaagaatcgatgttgctaccngagctgactgcagacgagatacctatcgagaagatacggagaaaatgccgcgacaggctctagatgaaatgattgccggaaatgaatgtaattgttaaaataacaatgacggtnaaatgaaatttctatctgatagcgatgctcgatcaataccacgttaaatagggaacataaaagaaaatagggataaattttgcttaaagatttgtactataaactcgtaattatatcaactatttcacaccgataatttgttagtctcggaaaaatcaagataggttgatttgggcaggagcaatagaccattcaaaccattatattgggattctaagataatagaatataatggggggattatctttatcgggaaatttattagatcattaagatatggaaataatccttacatttatgaaaaacacgatttaccacaaatttagattgataaaatagacaacattctaaaaaactacttgatacgttcaaataactaacttttaccgggggaaagggttccaaattataagaaaatggtttggaaattatgaagctcaattggaatattgagattattccaggataagagttgcgggtgggatgggaaggtaggggcacaggg

SEQ ID NO: 515834 - DNA, 283 bp, Homo sapiens
  misc_feature (163)..(163): n is a, c, g, or t
  misc_feature (265)..(265): n is a, c, g, or t
  misc_feature (274)..(274): n is a, c, g, or t
gctgccgggcatggcatgttatgttctttaatgggtcagcagttgttttgcaagatgaaaaagttctggagattggttgtacaacaatggcgacatacttaacactactgaatgtctacttaaaaatgattcagatagtcaacttctattactctgtatttcnccacaaaacatttcttaaacgtacgcaacgacaataaataaaacttgtaaaaaccctgactgttacgtggcctactgtagggaacatggactactcatatanctccccaancaggacagt

SEQ ID NO: 515835 - DNA, 1071 bp, Homo sapiens
cccacgcgtccggaaggggaagggagggacatgctcacatggttccttctagcatgtacctcatgtggttaaaaatggaaactgttctcctccccagccccactccctgttccctacccatataggccctacatatgggaaaaatcactattaatttctgaatcctttgcctgtggagtagtgaatggagaactggctgcacaggtgagactaggatgtgagatcaccaggatgcatggagaacagtgcgtatacatgtgatttgacctggtggagtcatccagctcttctctggctgattgtgccttccctcccttcctctcccaccatgcgatgaggcatccttttcaggccaggtgtactgcagagcctcagttaccaggatatcggcttgctgatgtgcctatctgtgctctatcctacccatctgacagggacttactcgtttgctactgaaggcctccgcatatcgccacagtaacacatccagactccttataccacctgggctattccctatggactatcctgcacagctaatttggggcaagaatctcactgaccacacatatgacctaagaaggcctgataccgtctggacttgcgcggaagtaaactcatggaagggatacctcactcgtaaatatacccacacccttagctggtccacgacgggaaacgtgaccggggccacacagagacaagaaaaggggagacacaaaacaacacatacttccccgaaagaagcgaaacgcacacgacaaaacgggcgatggcacatggcggcggaaagcaaacatgcggcacaaacccggacggaatactgcaaacatacgccgagagagaacgcgggacgacgcccccaggcacacagcggaagcacccacaagatgaccaaccaccactcagtcacagggaggaatcagaggaaccaccccccacgacagaagagagcctctacacaagagccgccgcaaccacccggtggagatggcaccacacagggtggtcgtccacagggacgacgaccatacagacaacaaacggtgcgggcgaaacgaaacgccaacg

SEQ ID NO: 515836 - DNA, 500 bp, Homo sapiens
atgaaatctactatgccctaatatgtatggactgggacccagtagaaagcctctgccccgaatgagactttcaacatagggtataagcttcattgaatgaggtgcagcctttcatttcagggactctcttattttgcaaggtcttaagaggcagaagtaccatggattgtaagtacacatctctgtgacctcagtttcctgaaaatatacacctactgggttctaagattctcccttaccagtgactgtatgcatctatttcacagccaccagaatctggacggtacactataaacattatgaaaaatacagatactgctgcagaattggcgtacgtggcacgcatgttcaagtactacgcatcctggcgggattgcttggacaaactggacaaattgtcagcctgcgaatccagtgctgagagtgcttctcctcgtagtaacacttcttcaatattggccaccatgatcctctgcacatcttgcaactctgcggtgatg

SEQ ID NO: 515837 - DNA, 415 bp, Homo sapiens
  misc_feature (10)..(10): n is a, c, g, or t
  misc_feature (45)..(45): n is a, c, g, or t
  misc_feature (51)..(51): n is a, c, g, or t
  misc_feature (75)..(75): n is a, c, g, or t
  misc_feature (87)..(87): n is a, c, g, or t
  misc_feature (91)..(91): n is a, c, g, or t
  misc_feature (125)..(125): n is a, c, g, or t
  misc_feature (143)..(143): n is a, c, g, or t
gggcgctgcncagcctcctgaggagccttccccgcagggcccggngcagcnccggcttcgggcctgaatccagcncggaacggccgncggnccaaccgcctggggccgtcccttgcgcccaaccncggggcgcctggcgcgtnacgctcgtgcagcaagcagcggctgggcccaagggtgcgcccgagcgggctgccgagctgggagtcaacttcggtcggagccgccaggccagcgcacgggggaccaacacgcacaggtacaaggcatccgtgcaagagtttcaagtataactccctgctccttaagcaccagcgcatccacaaggccaacaaaccttacgcatgccacgagtgcgaccagcgctagccacggctggccggcctccagccagcaccaccgcatccagacgggc

SEQ ID NO: 515838 - DNA, 414 bp, Homo sapiens
ggggggcgggttttcacaatcccctggcccggcttctttgggccctttgggcaccttttcaaaaatggcgggacggggggggttcgggggatttctcccccccgtccccccccggccgccctgggtttttttttttttttttttttgggcgggggaaggccctccgcggggggggcttttttgttttttttttaaaaaaccccccaaaaaaccctttgggtcccccgcgggcccaaccaggggctttttttaatttttttttacacgggggggggcggggggggggccgggagaaaccccccaaggttttttggggggccttttggggggccccccttgggggggccccggtttttttttgtttttcttttcttttccccggccccggaaaaagggggttttgaacaagtttta

SEQ ID NO: 515839 - DNA, 355 bp, Homo sapiens
  misc_feature (342)..(344): n is a, c, g, or t
  misc_feature (346)..(346): n is a, c, g, or t
  misc_feature (348)..(348): n is a, c, g, or t
gaggctggagaggcctcagaatcatggtggaaggcaaagaaggagcaaaaaggtatgtcttccatggcagcaggcaagagagcacgtgcagggaaactgccctttataaaaccatcagatttagtgagatgtattcactatcacgagaacagtatgggaaaaacctgcccccatgattcgattacctcctaccgggtccctcccacgacacatggggattatgggaactacaattcaagatgaaatttgggtggggacgcagccaaaccatatcgggtagcaacaacctagggtcagttttgcaggtggtaaagccatttaccaagatagttgtgacatggnnnangnccgacta

SEQ ID NO: 515840 - DNA, 177 bp, Homo sapiens
ccccgcgctagcggcattatgtgaacgtatacacacacacacatacatatctgaatcactttgctgtacacacctgaaactaacacaatattttaaatcaactatactccaacatgaaaaaaaaattaaatttaaaaaatagtcatttatctagccgttcacttaatgccgctagcg

SEQ ID NO: 515841 - DNA, 168 bp, Homo sapiens
tgaggacccccgaacatgtcgaggctaacattagtcgttgctcaagcgcttcttggtcatcagacagtctttgggcaattgtcctacagttgctgatgaaactagattgctacgtaggaagatgtgtggcgcctgtttgaagaatgcatcttaatcgagcatcagctc

SEQ ID NO: 515842 - DNA, 505 bp, Homo sapiens
  misc_feature (367)..(367): n is a, c, g, or t
ttagaacaaattagctggaggccaccttatcccacctccagccccctctgcaacacccttcatagctaattacctgcttttcattccaaattttctatgacaaggtgttcctacctcaacaggtgatcaccatggcaacgaggtagtctgttctatttttggagtatgaaagtagtgccttcttaaatctaataataaatgagagttccagaaaaccagtgcttcaaacaaatttgatttacttgaatttttttttattttaaatcacactttgggaggctgaggcagaaggatcacttgagcccaggagtttgacaccagcctgggcaacatggtgacactctgtctatacaagaaatataaaaanttagccaggcatgggtgggcacacgcctttggtcccagctgctcaaaaggattgcctgagcctgggaggttgaggctccagtgagctatgattgtgcccctgcccaccagcctgggtgacagagtgagcccttgttta

SEQ ID NO: 515843 - DNA, 220 bp, Homo sapiens
aacaattcttatgaggtataattatcacatgcattcattggcgatcgactaaaggagctctgatcgcttgttggctagtcttcgatcagcgacatagaccgcggagacagagccattctcatacaaaccccctgaagcttcaccggcgcagtcattctcataatcgcccacggatttacatcctcattactattctgctattgaaacttctaaaactagg

SEQ ID NO: 515844 - DNA, 352 bp, Homo sapiens
ttttttttttgagatggagtcttgctctgttgcccaggctggagtgcagtggtgtgatctcggctcactgcaacctccgcctcctgggttcaagcaattcttctgcctcagcctcccgagtagacctgggactacaggcgcgtgtcaccacgcccggctaatttttttctatttttaatagagacgggggttcactgtgttagccaggatggtctccatctcctgacctcatgatccgccccccgtggcttcccaaagtgctgggtaagggctttttttaaaagtgatatcaaggaaataactgtcatgaataaaagaaatgtcagacacaaatactcttgatgccctatga

SEQ ID NO: 515845 - DNA, 101 bp, Homo sapiens
cacacgtccagggtggcgcctgtgaggtggtgacgttgacttccaggcagagcccctccaggaaccagctgttggcctgggccacatactgcctggtggcc

SEQ ID NO: 515846 - DNA, 227 bp, Homo sapiens
ctacttgcctcggcggctgaacgtcttttcgtgtgcttgtttgccacgcgttatgctctttggtgaagtgtctattcatgtcttttgcctgcttttcacttgggctgtttgttttcttactatccggtttgagagttctttgtacatcctggacacaaaccttttgtcagatacacgatttgcaaatattttctcccagtctgtgacttgtctattgggaactgaca

SEQ ID NO: 515847 - DNA, 192 bp, Homo sapiens
ctctagagcctcccctttggaggctgaggtgcgtggtcacctcagtcgagagtttgagaccgcctggccacatggtgaaccccatctccagtaaatataataattgccaggcctggtggcgggagcctgtagtcccagctactacggctactagggaggctgcggcaggagactcgctcgaacctcttcggt

SEQ ID NO: 515848 - DNA, 232 bp, Homo sapiens
ataatatattagagatttcaccttaaattatttagtaactagttctagaacatgttttccaattgattattttgctaatggagacatatattgacctagtgtttatgcatatatgttctctacacagtgaaactttttttagaaagaataggaaagaaaatgcgggagctctggctctccaaggcagagtcatatatgtcacgtgtggggggggggtggggggggacctttt

SEQ ID NO: 515849 - DNA, 177 bp, Homo sapiens
cacggcctaagcccacatgacaaatggaacagatagaagacgacacaatcattgaaaacgggaaagacaaaggctcagtgaaagtgacttagatacacagtatcttggtattggggcctcatcaaggtgaggcttcaagctacaacatagcttattcaacaaggtgacagacgaact

SEQ ID NO: 515850 - DNA, 330 bp, Homo sapiens
cattgagccccttgatgcccagagagccctcacctaggaacccaatctgccaacaccttgcatcttggacttccccagcgctcctggaacccctgctccataatttctggcctgggctcagtggctcacacctgtcttcctagcactttgagaggccgaggcagtactgtattgctggaacctcaggagttcgagaccagcctggtgctatcacagttgaaaccccatctctactacaatagcacaaaaataagccaggtgtggtggtacgtgcctgtagtcccagctactcgggaggctgaggcaggagaatcgctcggacctgggagg

SEQ ID NO: 515851 - DNA, 1409 bp, Homo sapiens
gagagcggctgtgcagccctggtagcacctcaatcaggcatcggaccttgtaggtggatctcgacgcctcgttatagacctcgcgtccaagctcacgaggtcgagggccggaacttgcggaatggtaactgactatccggtcctccgcctcgcaacgctcgaatatacgaagtttctcggggcatgatgccaaacgcggccagggcccttcgacagtgtgtcgtcacgatgacactctctctcgtggccccggtcatatggctcgcctcagcaactgttgggagggcggtcgcactcggaatggggaactctaacgtgtggttggtattgggatgaggccaatggcgctctatgacacgtgaacttatgtattgtagtgcgagtcggagcgaagggctgccgaggagacagagtacgcagccgagaatgcgctaacgacacgctgcacagggtatgcgccgcacatgcgtggggccatgacaggcaattcgaatatgaaactatactctgggtgaatacggaatgcactgcccacgaaacacagttcctagggcctgaggcattgcatccctctccctaacccatatgtggagagccttgccagtttggcttagcgccatacaccacggaaaaggaggaagggcggacccacacttggtaggccattaggtcagtcgaaacaccgggaaggtggaacacgcttcgcaatggggacaagcacactctaccaatgggggcgacattcgccggtcgggaaagtagaccgtaatttgaatcctcgcaaagggagatcctgaatgggttacttgtaagaactcgtaggttcgagaagcaacgcgacaacacaaagaaagctcgagataggatatactgacgatgacatgcggatacatacactctaagggaggcgtttgggttgcctttaaggttacgccccttaggagaatactggctcaggatggccattcgagtaccctaaggataagcacacatgcgggttatgcgggctaatgtcaaggcgtcgaattttcggaggaacattatcaccgaggccgattaggcagcccgcggtgtgaggatcctcaacaccgtaaaagccacaacgaagtaggctagtgaccacgcacgcaagagtttcaattaaagttcgaaaccggagattggggattaattttgcacacaccagtaacagcgccccccacagttggtccccaaactaccgtgtggccattgggttttcatttttgagagagcacgcctgtagagatcgttttgggacaccacggtgtgggaaatccgctttgcgcagaagtgtggaatctattaggccccattcacaattgtgcagagagaatgtcccttttatcaaagaccacgagaatggctggccagggggaagtaatcacagg

SEQ ID NO: 515852 - DNA, 940 bp, Homo sapiens
tagcacgctgcgccgcgcagtagacccggggcccacaaggacaaggtggcgcgacaggggaactgccagggggggacgagagctgacgtaagtggcaagggggtgcgccgcaacgtgtcgtggggggacaacaaatggcggcccgcccgcgggaaaaactcgggggggcaggcaccacagtgctgatatccggtaacgggggataagagccctgaaaccaacacccgggggggtttcggctaggaaaaaacgcacgtctacgctggcgggggcgggccgccccaacagccggcgccaccacgagggtagcggcagcgttgccgcccaacgcaaaagaggtccaggcagtctgcaaaggggtttaccttgtgtgggaaaaacaaggaagtggggcttctggatccgttaggtcgtccccgaaagatggtgtaacacactcgggacgatgttggagaatatacaaggaagtgaattagacaaaccttgtttaaagaacccccctagagttgtgccggaaaaatcaaacaacgcactaccgcggcggggtgcggtgactccacccaggagagaccatagcccgctatggcaacagtgttatttagtctcggaagggggagaaaaccagacaaacgcttccagatacaccgtgaggggcagctggtttttttaagacaaatagataatacgggaggaataaataatagacttctgtgcctgtttagcaataggcgtagcaatttaaagagcttttcgcacacctccactcatcgtggttccataaatccgagtgagaccgacgccacgatgatccacggcccctcctttcatggcgtttatacacatttactgcacgaagatggttcaccatacccaacatttggagcggcccctgcgggcgcgtttctcccaaaatactcgaaccccaaaccgcaaacatgac

SEQ ID NO: 515853 - DNA, 1274 bp, Homo sapiens
acaatgcagatcttctgtgaagactctgactggctaagacctatcatcgctcgatggtggagcccagtgagactcgatcggagaatgtcaaggcaagagatccaatgataaggaaggctatccctccgtgagtcagcagaggttgatctttgctgggaaaagcagctgtgaagatgggcagcaccgctgtctgatcgtacgaacatccacgaaagagtccgaccctggacctggtgctcgcgtctagagcaggtggggattgcaaatcttcgtagaatgactcgtcactgcaaagtgaccaatcgagcactcgtacgttggagcccgaggtgagctagccagtcgaccacatgtcgagggcaaagatccgatggattagtgacggcggtcccgtgcctggagcgagacacatgaggggtcgactctttgctggtaagacagtttgggaagatgggtggcaccctgatgtgactagaatattctagaaaagtagtcgaaagcatgggaacatgagttgcttgcggttctaaagtatgtgatgagaatggaggatcatgcagtgaaagacagggtgaaccggcgtaaggaaccgcacagaccccatacagactggtggtaactcaaagcgtggagccagcaggtccagacgaacaggccaacgagcggacaagacaccccacaagacggacacgatgtgcaactaaccgtcctggacaaccaagcaaacagcgattggaacgaatggacggacaacaacaagagtgggggaaacaacggggaacggcaccaaccatgccactggactacgccaaagacaacgacagaaaccacgaaggtcaaaccaagaacaccagtgaacaacccggcaaccacgcgaagcgcacccgaagcaacacactcggcatacaaccagaacgcgacgcaaataaaccaaagagacctcccagagagcagcacaagtaacaatcccgagaagccacgccaaagcccaagagaaaagacaggagcaccggataagaagaagaatgaaaaatgagggcgacagcgaggagaagggcgcccagcggaaaataaagcaacaaagaccacgccagaaagccagacaaaaggggcagaaaaagagcagacgagaagcgaaagacaagagcaggagccagagaagaagagaacaaagaagagcgccgaaagccggacgagcacacggcgcagcctaacaccgtgcgggaacgacggaaaatgcacacacacaggaaaaaaccagctagaagacaaga

SEQ ID NO: 515854 - DNA, 292 bp, Homo sapiens
  misc_feature (211)..(211): n is a, c, g, or t
gcacctgtttcggatggatacatggataatgggtcaatgggtagatggacagaagaatgtatagacaggatggatggatggatggataaatgatggtgagggatgatcaaatggaagatggatggatgggccgatcatgggtggaggatacatgacgggatggatagatggatgacggatggatcctccttcagcttctcctccaactttnacttacttttcaccaattcatcttcttttggtgaaatacttgtccgcctgggcctccagggatttcactgtctgtcccttt

SEQ ID NO: 515855 - DNA, 132 bp, Homo sapiens
ccaccaaccaggtcaaatctggaattttgccagcacccagaagccctctcatgtttcttctcaataccagtctcctcacttctccacacaaagggtaaccccttgccccagaatttttattggcattcactt

SEQ ID NO: 515856 - DNA, 718 bp, Homo sapiens
gcggagggggccgcgagctcccggctgtgcagacgggcgcgcggcgggagggcgcggacacgtccccagcccggcccgggcggaaggcgacggagcgcggcggcgggcagcagacggagacggtgcccggcgcccacggggctgccctgatggggcctggcaatgactgacaggccagccccaaggacaaggaagagaaggcatcttgacggagggcaacgaaggtgacgcccggtggtaaatgactgccctgggagggtgcttccttgggccctggcagggttgctgacccttaccctgcaaaacacaaagagcaggactccagactcttcttgtgaatggtcccctgcctggagtccaccatgaggcttctcgtggccccactcttgctagcttgggtggctggtgccactgccgctgtgcccgtgtaccctggcatgttccctgccccctcagtgtgcctgccagatccggcctggtatacggccccgctcgtcctacaggaggctaccactgtggactggaatgactattcctgacggagtcccaccggaactccccgaggcacaacaggaccatgctctgagagcaacagcattgtccgtgtggaacaagtgagctgggctactggcaatctcacagagctggactgtccagaaagctttcggatgccaagactgggatttccatgcctggccactgtgactgacctaaggaa

SEQ ID NO: 515857 - DNA, 789 bp, Homo sapiens
gctcccggtacctgcttgctgctccctggggcttcgtggaaatgctgagagtctgagccggggaggagtgaaccctgagcagcggcggcggcggcctgcggcggcgggagccccccaagaggagtgaccgggatccatgtgtctttcctgggtgactaggatgtcgtcggaggagaacaagtgcgtggagcagccgcagccaccagcagaggaaggtatgcgaggaggggaccaggaacacagaaggaggggcagaacggcaggacaggagaagaccactggggccaggaccgtcgagcgaatggcggctaaacaggcttgacaaaggacgaagacccgaggcagaggacaacaatccaggacgcgcaaggagtgaacacagcgaggggaggaacaagagagacgagggcaggagaaggagtcaggaagcagaaaagacgcaagagagagggagtgggggcgactcgtggaccaacgggaaatgggggccagtggacaatttacgaacgccagagggaagaaaggagggaaacggaagagaagaaaccaacaacccaacaaaacgcagaacgcaggatacgcacaagttgatgagcagagcgtgagagcgagtcgacgcagcaagacgaggaggagaaggacgaagaaaagtcgacaagaagcgacaggagagacataggagagagagacgggagggaaggccagcaggcagaagaaagagcaaaagagaactaacaagaagtggccagaacagaagggagggaaagacagatgatagacaggaaagaa

SEQ ID NO: 515858 - DNA, 149 bp, Homo sapiens
  misc_feature (30)..(30): n is a, c, g, or t
  misc_feature (57)..(57): n is a, c, g, or t
  misc_feature (121)..(121): n is a, c, g, or t
  misc_feature (136)..(136): n is a, c, g, or t
aattcactatgcgtggccgccacagctatncttgtcctcctggatcctgaaccttgnaagctgcactaatgagttcaacgggagtgctctgggcccaggtgtcagctgtagcaatgccccngctgcaactgaaggngccagcaatgcta

SEQ ID NO: 515859 - DNA, 261 bp, Homo sapiens
tagaagttctcatagcaagggagtatgtgtacacaaggaatctccttccttatagagtgtgtatcgcctttgtcccaatggggaaccgtaaatctagttttaagtggcacagacacatggactaaaagtcatttggtatctgccaggtgtggtactttccttggttaatgggctattgaaagttctaagagtaggtgctgattgaaagttctagaactaggcattgctgcctggggtttcgtcgatctagggctattgaaa

SEQ ID NO: 515860 - DNA, 413 bp, Homo sapiens
taccttacaagctaaatttatggcgatttcagttttaaaaatcggattggtgatttgttccagttcctatgttccaaaaatagactcagatgaaattttaaatgtttccagtaagcatggtattagagtttcccatttgatctggctggtttggatcaagagaattttgagttgtttctgtctagatgcatttttatgttgtgttgttgttgttgtagtggggggggtgtggggggagtagtttttttctagatgcatttttaaagcttacggtaggggaggtggtatggcacgttgtgaggttgattggccagtatttgcaccaacaacaaaaggatccactgtaacatgaaattggggtctgatgacaatcccatgtcatgttacaggggcatcgataaacaccgggtacc

SEQ ID NO: 515861 - DNA, 132 bp, Homo sapiens
acacaaaacaaatgacgggcttcataacgactgccgtgctatatgattattgtaaataaattaacataattatattaacaagggcacgcatgaagaattgaatgaattcatcctcggtaacttaagctacgt

SEQ ID NO: 515862 - DNA, 362 bp, Homo sapiens
ggggctcaagcaatccttctgcctcagcctcccaagtagctgggaccacaggtgtgcacccccactcctggctaatttttttattttttgtaaagaaggggtcttgctatgtttcccaggttagtcttaaactcctggtgtcaagcgatcctcctgcctcagactcccaaagcactgcgattacaggtgtgagccaccaaggccagccccagcaccacttttaactagctgcataatccttgggaaactactaacctttccaaagaacatcttttaaattaagactaacacaccagggctttttctaaggattagatgagaaaatgtatgttaagcacttaaccacactgtgtctgacaata

SEQ ID NO: 515863 - DNA, 123 bp, Homo sapiens
cgggacatacgcctaacggacggaactgacgcactacggacgggactgacgcactaacggacgggactgacgcctaacggacgggactgacgcctaacggacggggactcctctacgacgtcg

SEQ ID NO: 515864 - DNA, 459 bp, Homo sapiens
gctgaatcagaaataatgtggatgcctgacaaccagtgactggccgtgtgggtagaagagtgacatctttgctttctcatggttcaatgtatacaaactttgtttcatacacaaaataaataaaatcattgctataaaattaccttcaagccatgtgtaaggtaaatggatacaccataaatggatttcctgtttagacttgggtcttatccccaacatatctcattatgtgtatgcaaatactcaaatacaaaaaattagccgggtgtaggtgttgggcgataagtgatgttatcgcccaacacggtagtggtggagatgatgggtgtcacggttgtactctttgtgctggtgggtgtaggagttggtgtcatcgtagtggtggtggtgatgagtaccgtggtaggagactgtgtgccggtgggtgtcgggatagaagtcaccgagaagtaggaggtg

SEQ ID NO: 515865 - DNA, 184 bp, Homo sapiens
  misc_feature (45)..(45): n is a, c, g, or t
  misc_feature (178)..(178): n is a, c, g, or t
ggcacgaaggtggcgttcaggcctgcagatcgcgtcgcgcaggtngaagcgctgttggccagcaccacgatgctgcggcttccggcgtttcgtccgccagcgaggccagctgcgcggcgtccgccagctcttgctctttcacgcccggcgccggcaggaactccgaagcctggcggtngcccag

SEQ ID NO: 515866 - DNA, 152 bp, Homo sapiens
gttgcgtaaggatgagtgctttgaggactgggaactgagatgtagatttgggcgtgatgagcatgaagaccaaaatccatgcaaataaatgtattggcacgacctgagccccaaatcttacatctcaattcccatcctaaaaagcactcata

SEQ ID NO: 515867 - DNA, 247 bp, Homo sapiens
  misc_feature (209)..(209): n is a, c, g, or t
gacctgggggaccaggcgaaaacccctttcaaaaaaaaaaaaaaaaaaaaaaaaaaaatggatacagcacaagtagttctaaaagcgaagtataaagcgttgagctcaacgctttatacttcattagctctagaggtccatgcatacttaatattatacttgaattcatacggaagtataaagcgttgaggaagtataaagcgttgagnaagtataagcgtgaggggatcctctaggtcaccgcgca

SEQ ID NO: 515868 - DNA, 1111 bp, Homo sapiens
accaattctattgtacgtctacccacaggcaactttgaatttacttctctagtgctaaataaacatttcagcgatttaatcccccaacttgggggatgcattatgaaaaggttttcctggagtcaaggggtttttctttctcgctagttttgtgaacaaaatttttatatcaataggcaaatcattataactttttaggggttgatggtttcttaagtatatctggaaattgtggtgtctaaggcatgatgttcagctgaacgacacacaggcgcatcccactttcacgaaacctagccattgcttctgcgctccacactttcatactgctatgctaactcctacgtctccacacaatgtgctcatcttgcacgaccaccaggtctgcctactatacatggaagtctcaaactctgaacttttcatccatctcaatatgaccatttctctctgcttgtcgacgctgcacacagacttcacgtcctctatcctgccacggtcggcgaacatcatcccgcgtctcatcctcttcctgctccactccgcaactctaactctacccacccattcactcaacacgcgtccacgatgctcgactacctaccccgctaccgcttgcgccttcatccattaacagcacatatttcccactacaccactggcttcccactcctggtccctttacctctcactttacctgcagcccaactggtccggcgactcctccgctgcccttcccctgcccctcgctctttccccaagccgcctctccccgcactccccgcggtccctcctccccccggttctccaccccttggctctaccccgcgccccctccggtcgccactctcgccttccccccccctctctctccctcctccctaaacctctacccctctttccccactttgcccaacctcgcaccctcacacaaccccccccggcccaacccccgcccccccaccacccgccaccccaccaccccacccgccccccacgccccgccccccacacccccagcgccccaccacgaccgccagccacccgatgcccccacacaccccccccaccccacccaccccccactcccacccgacacacacgatccccc

SEQ ID NO: 515869 - DNA, 293 bp, Homo sapiens
cattatcaatatatttagtatagttatttttaaactcttccaaacttactaaagaaatgtaagagtcatgttcatcatcataaagattatcgcatggatttttcttataacttgacttgatatttagcatatttttttgtgctaagttatcaaagaatttcaaagttctacatgatttaatttgttgacagtgagaacaataacgtgaattgctttctaatagcttatctttagcatcatctgtatatactgcgactacgccatttgttctgttattctttctatcatccaag

SEQ ID NO: 515870 - DNA, 211 bp, Homo sapiens
  misc_feature (173)..(173): n is a, c, g, or t
tatgcgcatgcggacgccctcgacgccggaaccctcctacgctttagagttccatgcatacttaatgtctcaacgctttatacttcattagctctagaggtccatgcatacttaatattatacttgaattcatacggaagtataaagcgttgaggaagtataaagcgttgagnaagtataagcgtgaggggatcctctaggtcaccgcgca

SEQ ID NO: 515871 - DNA, 370 bp, Homo sapiens
cggccatgctgcatcagtgctgacatgccgggcgcatatcagctgtggctgacgatctcggcgtcggccggcgcttcctgagggtggagatgaagaactgggaggctttcatgggcgtgctgcaaaacgaaggccgggtgaaaacccggccaagtcacgacaaaacggggagaactcttcgggttagcgagggcgctgccgcaatcgcgggccgatgcaataatcgaaccaactatagattcgaggttgattatgctcgaccgtgaaggcttccgccccaacgtcggcatcatcctgctcaaccagcgcaacgaggtgttctggggcaagcgcatcaggacgcattcttggcagttcccgcaagggggca

SEQ ID NO: 515872 - DNA, 967 bp, Homo sapiens
  misc_feature (1)..(1): n is a, c, g, or t
  misc_feature (174)..(174): n is a, c, g, or t
  misc_feature (330)..(330): n is a, c, g, or t
  misc_feature (379)..(379): n is a, c, g, or t
  misc_feature (486)..(486): n is a, c, g, or t
  misc_feature (499)..(499): n is a, c, g, or t
  misc_feature (502)..(502): n is a, c, g, or t
  misc_feature (508)..(508): n is a, c, g, or t
  misc_feature (526)..(526): n is a, c, g, or t
  misc_feature (535)..(535): n is a, c, g, or t
  misc_feature (547)..(547): n is a, c, g, or t
  misc_feature (565)..(566): n is a, c, g, or t
  misc_feature (575)..(575): n is a, c, g, or t
  misc_feature (587)..(587): n is a, c, g, or t
  misc_feature (693)..(693): n is a, c, g, or t
  misc_feature (731)..(731): n is a, c, g, or t
  misc_feature (735)..(735): n is a, c, g, or t
  misc_feature (785)..(785): n is a, c, g, or t
  misc_feature (818)..(818): n is a, c, g, or t
  misc_feature (821)..(822): n is a, c, g, or t
  misc_feature (879)..(880): n is a, c, g, or t
  misc_feature (902)..(902): n is a, c, g, or t
  misc_feature (967)..(967): n is a, c, g, or t
nggccgggcgccccccccccccctcccctcctccccctctcttctttcacttcctaccattaaccatactccctatccttttccgcccataaccacattcacccacttcttatatttcattttcacaaaaccatcattcattccactccgcgtttctccaacaccctataatcnaccgcttttttttcaacattaatcaacaaattcctccatctccaaaactcaccctatcccattcaatacacccaacatcataaaatacaaatctcattaccgtctactcaatcttcacattcattcactacaatacacaccgcgaaacgcgcaaanctttccccttctcaaaccgtctctatcattttttacaacaccttctcanaccctcaaacatctctcactctcctaacaccccttacaaacctattttataccatctatcctcactcacctaccgacttaccaccgaccctccgatccacatggggnaaacatacccctncangatctngttgttattaaagggtgncctttgggnagtctcaaactngtaaccacaaaagggggnncccactgcnattcatactatnatacacacatagctgaactgcctttctaccagtaacatttaaaataaacacacttaatactgccagtcacatgtagtagagtgttcactctgtaactgtgtgtggnaaaccaagatatcctaccattccaataaaaaaaaggcnaggnaatagctttaacacaccattgatgtatgctattacacttttccagtggangataacaaagcccatataaaatttaaagacagnggnnaaactcgattttcagccacttgtacctctctaagttttcatgccctgctatctgggnnacttccccacttccctgccagnagtgctctagctctgcattaaggatcttgttgtccctgactgacacccacatatggaacatttgn

SEQ ID NO: 515873 - DNA, 197 bp, Homo sapiens
  misc_feature (159)..(159): n is a, c, g, or t
acctagtaggatccccctcaacgctttatactatcctctaactgctttatatttctcaacgctttatacttcattagctctagaggtccatgcatacttaatattatacttgaattcatacggaagtataaagcgttgaggaagtataaagcgttgagnaagtataagcgtgaggggatcctctaggtcaccgcgca

SEQ ID NO: 515874 - DNA, 967 bp, Homo sapiens
ggtgctgcatgcagcgtgtcctgcgtgctgcgcagctgtttctggtaactgctttgcctccctggctcccgcaggaggatgctggtggtggagtgtgtgctgaactgtgcctgctccctgtgtgttggtgtgagcctgatgcctgtgtgcatgtgcctctcctgtgtgagctgcctttggtgttgtaggtggtggcctgcactggtagtgctgccctgccccgcgtggccccgccagaactctgctgcctgtggcctccctgctgctgcttgattgccctgaatgaggcgctggctcttggccgagatcggtgcctgtgactctggtcagctgccccgctgtccagactctcgtgcaccacagcctggccctgacatccttcaagcgccagcaagaggagagcttccagtgagcagagcgccttggcagctgaggcccgggagaccctgtcgtcaggatgctccttggagaagattacggagggccaggctgctaagaatgcagaaactagaacatggcttcagtggtgccagctcaatgccagtgagtgccggctcgatgccagtgctgccaaagaggatgagaccagtgatggccaggcttcggggagagcaggaggaagctggcccctcgtcttcccaagcaggagcctcaaatggggtagcccccttgcccagatctgctctccttgtccagcttggccactgccaggcctcgaccggtcaggccaggcacctggacttggcgtgtccagtctaaagactggcccacgcccggcctgcctgcccacgagctgcgctacagtatctacagagaacctgtgggagcgaggcttcttcctccagtgcggctggcaagtcggaggtgacttcctggtctatcctggtgacccctcggatacacgccattatatcgtccatgctgggcctaagaacatccaatcaagactgttgtgtgacgctgaaca

SEQ ID NO: 515875 - DNA, 245 bp, Homo sapiens
gccccctgggtaaggaaaagccttttgaaattttaccttgggccccccccttttagctttttcccccccaatgggggggttattaaccttccattggtgaaaccgtttttggctttccaaaaaccctttttttttagaacccccctaagttttgtgggtggaaaggtggtaaaaatggttttgggtatattaaataagctcctggtttttgggggggggttaataaaagtttaaatttttttcca

SEQ ID NO: 515876 - DNA, 460 bp, Homo sapiens
gaatacatgggtcttcctaaacttaatgcaagattaaaggatgaaactctgcagccattctttgaaggattattaccccgagataatccaagaaacactcggtttgccatcaacttctttacttctataggtcttggaggtttaacggatgaactgcgggagcatctcaaaaataccccaaaggtcattgtggcgcagaaaccagatgttgagcaaaataaatcctccccatcctcttcctcttcagcgtcctcctctcaagagtttgactcatccgccttttattttgacaagcagtgaaaccagttcagagtcttccagtgaaaagagcgcctcttcatccaccagtagtcatagctctgcctcagctaatgatgtaaaaaaaaagggccatgggaagcccaaaagtaaaaaggtagataaattgctcagaaaccagccaccaaatgatagggcccca

SEQ ID NO: 515877 - DNA, 777 bp, Homo sapiens
agcggctcgttgcccagacggaccccagacctctgccaggttcggtccgccatcctcgtcccgtcctccgccggtccctgtcccgatgcccgagggatcctccagtctcctttcagcgccgcgccctccgttcgctccggacaccatggacaagtttaggtggcacgcagcctaggggactctagcctcgtgccgctgagcctggcgcagatcgatttgaatataacctgaccgctttgcaggtgtattccgacgtggagaatacaatgtgtcgtcgtacagcaatctcatcgtgactggaggctcgctgaaccatctggcataggcattatcaattagactaccttgcccacagagtggcccatgcatggacgaaagctctggagcatcgagattctagatgacctagacgacggtaatgggttcagtgagcaagggccacgtggttgattgccccggtatccatcaccaaggtcacatactgtgcagccaaacaagcactaggggggtgtaacgatcctccacatccgagatgacctacccgagtatgcagcagcgatgatcgcttccacatgcttcagctccacctggaagaacgatgtgtacatacagtcactggacctagcccaatggccttttgaattggcacccatgttacccattaactagttgatctaagccggtgatgggcaccccgcgtatgctccacgacctgggagcaattacagacccggaagtcctttgaagaaagtctatccccagccgatgcttactgat

SEQ ID NO: 515878 - DNA, 366 bp, Homo sapiens
tcttggaactccactgtcactgtctgccagtggataatgactggcaacatatgggagtattgatttgagggtcacaaacagatcttaggtgatgggcctatttacgaataccgaatctggctgtaatgaggactgactgtataatgctttaatagtctcaagtatgttttttttctcattaagccggggcttaagatgcaggccagattgatgctgttggtttggtgcaaaagtaattgcagtgcttcccatttaaaagtaatggcacacactgcaattaacttttgctccaacttaatacttggctttattgacttttagcatcagtgcagtttggtttatgataaaattttccaaagcagtgtc

SEQ ID NO: 515879 - DNA, 911 bp, Homo sapiens
caggatgctccctcgctggaagggatccagctgcaaagtgaagtcaaggcgtgtaccagatgacagacggaaagtgacgagagcagtccaccatcagcctccctgctgaatctggggccacagcgtgatcccagctttaaaggagattgcaggagaaaatacggcatcgctagaagccggcaggagtgactcctcggcatggaggacccatctcctagcacacgtgcccaactgaagtggcaccaacagaagtttggcgttgaagctaaaggacattgaaggttggatacttgtaggacataatgttgtagtatgttggaaagaatggtatagtagtgttgacctatgagagttctgatttgatattacaaaggatctaagagtatgttcgttcgttgaagagacttttcgattagtcctcatatatttatctactaaaatagagtgtttaccatgaaacagtgtgttgcttcagactatgtacagaagacaatctggggcaggtactctaatataaaggaacaggtggtgtttctggaataattggcatgctatggttctgtaaaaaccagttaattctattgtggtacaaggtttttggcaaagcacatcaatgttagacctaggtgtaagtggaattgtataaagtcaagttcgagtatattgatgctacatgaggctttccctggaggaaaggttttttttgttgttttttttttaagaacgtgaaacttgtaaactgagatgtctgtagcttttgttgccacatgctgtagtgtagtgtgaagatttcaaaacctgagagcacttgttctattgtttagtatctatgagaaaggcactagatgactatagatctgcacttttgcccattattgctcatttataacacgcgggttgggcatgcggga

SEQ ID NO: 515880 - DNA, 1331 bp, Homo sapiens
  misc_feature (501)..(501): n is a, c, g, or t
  misc_feature (691)..(691): n is a, c, g, or t
agcggcgaatcgccctggactcacgggcgagaaccttgaagctctctgtgatcccaccggtcctgcgtgggacaggccatcgccttgatccgcaccctcagttcctgcacagcgccactccgcccgtaggggccctcgggggaagaccgaaggtctcctctggaccgccagcgtgcccactttcgggagcaccagctgcgacaaactgggcccacgtggagttcgcagccagactcgacccgaggggcacgagccccccatcactgccgcatcgccaagctctggtcatggcccgaggccttatcatcggattcgacgagccggtggtcatctacgctccagcattgccattgcgcttccatgtccccacagcatctgggccatcacatcatctgagcatctgccgaaggcaatcacattgccaagttcggattgggaagtgatttaatgcgagagcatggaagaagatagatgctctcgtatgcggttgtgccactcganatcctcgcagtgggactttcggttctttagggatctcccgatgtaggactcacatcttgtccctttggaagggccaggggtcgcttttctctcacaatgggactatacagtcaatgcgatctcccctcagtctggggtatgtccatcgccaccgtcgaagtccccgggaccgcctcgcggcgatcccccntttgtgaagctagacgattagctagagcttggttggctcagaatttggaaggttcgcaatcgcggatagggcagttagagccccgactgaacaaggtataggtgccccctccccttggcgaagaagtgcattgggagaaaccaccgggcgtcccttagccaatttttccagcgtcgaactctaatacggtatgtaatcgttccacacaacgattcaaggacaacacaaatttggtttgggcaccgcgggttagttttatggaaccaatttcccgccattggaatgaaccttccgatgattttaatcccggaaattttatgcaccactggttcttaccccaaaagagcgccgaggaaaagcggggtacgcggcacattccggcctaggggcgtacatggggtggaagtcccccttgaggttcacagttgaaagtcgggcttttcccaacttgtgcaaatacccccgcgcttccgaggtcgttgaattatccaacaactttttctatatcggtgacgttggctatatttcacttcgtggaacactcaggcaagcatctgttcacaaatggtagtaccatcccaggcgttggatatacctgtttagaccccacatattgttcgcatatttgcctcccacggga

SEQ ID NO: 515881 - DNA, 880 bp, Homo sapiens
aacggtggcgcgcgcggtgccctgtgacacagcgtctttggtgctgactctcaccagtgggccccagggtcttttacgatacaggtttgtcccagagggccatattgattagcgctaacgtgcataataccggttccctcggaggtcaacagtgggaccttccgagccctttggctcacaaggctgcctgcgcaagattctcagaggattgggcgtaaccgttctccagagcttttcgggtacttctcggacacacagactgcgtccccccctcttgggggacaagccttttttctgtctgttgcagcacacccgagccatttgcggctgccccgcccttcatggataaaccttgtgccgcccgcgcgcttgttaccacccggggcatcccgcaccctttggggaaaggccggtggggcctacttccatgtggcccgcggagtttagcacctcccttcggttcaacccccgcgataacgcccgttttgttgatcagggtaggtcgcacatcaccatctttcgggccctatatgcgcgaaccgtgcccagtttgcccctatctacttacgggttgggccccgggaatccccccttcacccgggagcgtggggtttcccccgatgttcagtgatggggacccttctttccactcgccgggcccctgacatgtatcgtcgtcctccgcttatccacctcgagagtgatgtcgcacttccggagttgctctcctttgcggcagcctcacaacgagcggtacaggtacgataggtcactcttaccctctgcaatagggcccttgctggccccaccaagtgcggtgccgaccccccgggcccttcgcgagcccgtgccaccaactcgaacatacattattggcgcc

SEQ ID NO: 515882 - DNA, 363 bp, Homo sapiens
gaggggggtcataataaacagcgatgacagctaggtcgggcgctgacttgagagtgactggatagatgtggcgggttttaggaggctcttatgagtgaagagtattatggcgtcagcaaagggttgtagtaacccgtaggaacctacaacgttggggcctttgcgtaataatatatagcctagaattttacgttcggtaagcattaaggaatgccatagcgattagaatgggtacaatgaggagtaggagagttggaccatggagtactgttgttaagaagcaggaattgaacctctgactgtacaagttttaaagttatatgcgattaccgggctctgccatcttaacaaaccctgcgtacg

SEQ ID NO: 515883 - DNA, 129 bp, Homo sapiens
ggcgtttgccgtgtcacttactggtgaaaaacaaagatgaatcctagggctcagagcactgcagcagatcatttcatattgcttccgtgagtgaccacgcaacactccgggctaccgagctctgaattc

SEQ ID NO: 515884 - DNA, 313 bp, Homo sapiens
ttcccaggcatcaagactgtgagtgcagaacctggagccgttgttctgaagcagtacatcaacaacctcagtgaggcagctggacagcatctgtggggtgaactggggcctgccatggactcagagctagaaaaacatgcaggacctggatggaagacttcaagaacaagtctgaggatgacatcaacaagcgtaccactgctgagcaatgagtttgtgatgctgaagaaggatgtagcatgctagcctacattgaaccaggtgcagctggaggccaaaggtagatgcccatgggaagggtaacgagctcgaa

SEQ ID NO: 515885 - DNA, 145 bp, Homo sapiens
acagaaaacaacaggaagagaattcacatcagctacagccagtggaatcagatatacacagcatgcaactatgcacatgactagggcagaagagaacctagtctattaccaataagcacaggctccctatacagggacaactaaa

SEQ ID NO: 515886 - DNA, 151 bp, Homo sapiens
aactgagcttaacaattacggtcgttgagggctatgccagccccaagcgtcaataggttgaggagtgggtgtcgctgcttgaagtcacgaggagaccacctggtgctcagtgtagcccaggatgcccttcagggggccctccgtacgcctg

SEQ ID NO: 515887 - DNA, 115 bp, Homo sapiens
actgtactctcacaaacagagtgctaccatccaccaacagagtgctacctcctgtattgccaggtgcaatgtggaggttgcccactgtttgtggagtctgtcagtgcagttagca

SEQ ID NO: 515888 - DNA, 172 bp, Homo sapiens
attattcaagcctgagtaaagagcagaacacagagattttccgtgtgttggtttttactctagttccccctctcatcccccttcctcagggtgtcccctaattgcaaggccccattcctgtccccagccccaggtctccttgtgcagtgtcccagcccccagcccagccctt

SEQ ID NO: 515889 - DNA, 980 bp, Homo sapiens
gtgggtctcagcagctctgggctggcgtagatgtgagtggcagcgtggcaaggcagcccagtttcgcgaaggctgtcggcgcgccgctagcccgcagtgcacccggcacgcgccttccccgacaggcaccctggcacgcgccttccccgatcgccacggatgcccaagaggaaggtcagctcctgccgaaggcgccgccaatggaagagcccaagaggagatcggcgcggattgtcagctaaacctcctgcaaaagtggaagcgaagccgaaaaaggcagcagcgaaggcataaatcttcagacaaacaaagtgcaaagcaacagaagggaacacacggggagcaaacgggaaacacagtgccgaagtggctaacgcaagaaacctagaagaagacttacctgcggacaaaaccgggggaaaacggaaagactgaggcagagtccaggcctctgattgaaggcagcgagcaggaaacgaagccgaagtcttgattaactaacccatattaccatagtactatatcgagtggtcccatgttatcccttttcttgtacaaaatcccagaagggaatatttatgtatatcacagcctaattgaggtcaagatgccaaggattacatacaggtaagccgtctagaacaaccatttttctaccgcaaagggcagcggcacttccgcaaccgtcaatcacccagtatgtattataaggctgttacacgtggcattatcgtcactctaaagagcaagctgctggaaacattccagttttgccttgggaataagtaagaaataaagtagatcggggaaacaagagcagagaaaagagattaaggtgggtggaggaattaatttagacaatttaagtggaggaacgggctttcgtatgagattggtattccgtgggattgtcacaggtttaaaaccaattttcgcaacaggaattgggtggggttaaaatatagaataattccgtaata

SEQ ID NO: 515890 - DNA, 171 bp, Homo sapiens
  misc_feature (103)..(103): n is a, c, g, or t
cagacctaaccccacgtggtgtaagcagaggaggaattggttcacttaactcccagcaaacatcctcctgccacttaggaggaaacacctccctatggtaccnatttatagtttctcagtaaccagacagaatcatgtgcctatgccttgtgcccatgcaagatagattgg

SEQ ID NO: 515891 - DNA, 169 bp, Homo sapiens
cggacgtcatctctctcttacaatactgtaagtagagctgctttcaagtctttctcatcaggacacacagagaaaatagtatatgcaaagcccacaagaatacagacatagccaggtgcagtggctcacacctgtcatcccagcaccttggtaggcccgaaggctgtga

SEQ ID NO: 515892 - DNA, 394 bp, Homo sapiens
gcacgagtgaggatactgtggtcgccatgtgccgccgccccgcccgttgttaccgctattgtgagagcaagccgtacccaaagtgtcgcttctgtcgaggtgtccctgatgcgcaagatatcgcatttttgacctgtggcggaaaaaggcgtggatgaatttccgctttgtggccacatggtgtcagatgaatatgaacagctgtgctctgaagccctggaggctgtccgaatttgtgcgcaataagtacatggtagtcattcgcattaacaagatgttggcctgtgctggggctgacaggcttcaaacaggcatgccagggcctttgggccccaaggcactgtggccagggttcacattggccaagttatcatgtgcattcgcaccgctgtag

SEQ ID NO: 515893 - DNA, 1552 bp, Homo sapiens
  misc_feature (1350)..(1350): n is a, c, g, or t
gccggcgcggagcggggacgcggtgcaggctgaggtctccgatgcggctcgccattggcttggccctgcagcaagcaagccccgctttaccgtgcaagccatggccggatgcatgactggcggtcccaggttcctgtgaacagtattggaacgcactttatgagcggcagcacgggaaattggcgtatactcgagagggtcaaagatgcttagaaaaacttttattccaagaagtctgtgcatgaaaggcgagagcgaacagggctcgtggccatgattggtcaagagaagttgacaaatttgtgggagaaaaaggattgacagggagtttacattgcgagaaaggtaattgcatagagaaatcttcgacgaatgcgcgacaaaattctggagacatggcacagacagctggggcggcaagaattccgcgtgcacaaaacccggagaaggagcacacctttccctttcgtggtagcttatcaggggcaggcaccgttggggcctcccaagggcgcccgcgggaggttacactggcccaggggcattatggggcggcgcaaagtgtaagcggaacagcaggcacgacgtgcaggtgcgcattacaattcggaaacgcccaagagttgacgtcttcgaaagggggaattcccctgtgtttcaagaacccggtggcgttgaaaaagccactggggccaggacagcccgggtgccgcggcataccgaagttgaagggccccagaaaaagtctttcccaaaggggaaaatataccagcctacaaaaaagcccaattatcataagcggggacttggtttttggaccttttgcaacaccggggggggcaattggcggccacaaactttgtgggtccccttccttctaggaaatgcatttgttcacgccggaactcgtacccctatggccccgtgtgctcccgcaagtggaacaaaaacgccttttcccggttggcgttatcacaattttcttcacacggggggccaatttgaacacgctataggaccccatcaaggaacgggagaggtatatataaaccgggccggaactccgttcccaccaattttttacaacggcaccacgaagggggcacttataggaaacgggcgggggcctaaccatttgtggagccaacagcaatttgaaggctgtgggaattgcccccttttttttgcacacgggggactccttttgttccggcacaggcaaacaagaccacacccacaacaacacaagggggggcagggcgccggtaccagtaaaaaaaagtataattccccgtgggaggggggggccacccccagaggtattaaatcggcaggtataacccccgagantttctgtggttgatcaaacaaacacggtgggctcccccccatatatatggtgagcggctcgacatttaaataagccttatagggcacgcgcggggaccgcgcgtgttctaaacacacagtgcttggtagacgtggtgaaaccactggtgtatagtgtgtgagaccttcgtggtcgaagagcaaccatactctcttggtgggg

SEQ ID NO: 515894 - DNA, 154 bp, Homo sapiens
ggatggctgttaacccgtcagcgcggagtttgcctcagtaacggcagaggaaaggaggggtctcgggacatctccagaccctaccaactgggagggtcccctcctccttccctactcctgggacggcagcaaggacatgggggctgctgttagc

SEQ ID NO: 515895 - DNA, 731 bp, Homo sapiens
gggcgccggtggcgggagtctggggaaaatggctgcgtcttcgaggtggtgagaaggagaaggagcggctgggaggcggtcagggagtggggtggtggtaacagcgacagcgagaggtcggtagtgtcttggacttgtgggaccatgggaggtcactgatcatagggcacttcatagaagatgctggcgattgtcgaggaaatcatagagtggttaacaggctggagaggaaaaccaggtccgggagctagtttaattcaccgagatggggactttctcagaaactagtgaagacttggtcatcgtaatcagggccaagaattcatcgatgaaatgcaagtgtttagaagaagagaagtagagaagcgagacagtgctattcagtcagctactaaaacagctccaggacgcagaacgaatactggcaacaagcgtgtttacccaaagcgaaggagaaactcaaggtcaatagaaagcatgcaacgaaggaggtgctatctccgtctgaagaaataattaagtatgcacattaggatcaggtgcactgtaagtgctgtgatgtgctccactgatcctgggttccaaggggaccccgcggagaacctagccagatgatttgagagatgagaacgtgggtaacctgggtcaagatgaacaatcccttccacctaatggcgtgaatgcgccattacccaggagatgctcttgcagcaggaaagattgcggaatgc

SEQ ID NO: 515896 - DNA, 481 bp, Homo sapiens
  misc_feature (60)..(60): n is a, c, g, or t
  misc_feature (276)..(276): n is a, c, g, or t
  misc_feature (298)..(298): n is a, c, g, or t
  misc_feature (355)..(355): n is a, c, g, or t
  misc_feature (357)..(358): n is a, c, g, or t
  misc_feature (360)..(361): n is a, c, g, or t
  misc_feature (444)..(444): n is a, c, g, or t
  misc_feature (448)..(448): n is a, c, g, or t
ggttaaattttggtatttttagtaggagacaggttttaccaatattggtcaggctggtcntgaaactcctgacctttgtgatctgcccaaccttggcctcccaaaaagtgctgggattacaaagtgtaagccactgcgcctgtcctccctcaaggaagatttcaagtaaagtggatgccaagactttagcagggacagagaccagagaccagcccagagacacctgtcccttcaccccacactgcccaaatggggagcccgggcagcaagcttgcncagcaccccgtgtgcctggagntgggacctttgcttctgggcctcggaacggttaacacccctggctctcctcccctcncnncnnctgggcctttgacccctcccagcctctctccttccctccaccgacacctttgcccagtgacgttggtctgtccttacgcaganctgncggaggctggggctcttccggggctgccatgtt

SEQ ID NO: 515897 - DNA, 177 bp, Homo sapiens
gctgtcaggcggcgcgttggcgaccctgggacggtgtgccgcagcagatcgaccaccggccagccaggccgcggccacgcatgttgtccagcgccgccgcgttcacgatgtgtcgctgtcccggcccgcagcacggagaggaacgcctcgcgcgacttggacgtgccggtccggaag

SEQ ID NO: 515898 - DNA, 289 bp, Homo sapiens
agcgggaggctgaggcaggataattgctggaacccgggaggcggaggttgaatagagcaaagattgtgccactgtgctctaacctgggtcacaagagcgaaactccgtcttaataataacagcaacaaaaataacccaggagtggctcaagagtccagagtgggatgaaaatataaacagaggaagacaacttatgtcactggggaggctgggggagctatacaaaattcacactggaggggcagggattgaaacaatatgggcccctgggtctggccaaactttggga

SEQ ID NO: 515899 - DNA, 751 bp, Homo sapiens
gctctacaaggcgcctctgtcgaagagcctgtctgctggtccccagtgccctctccctcctgctcgccctcctcctgcctcactgccagaagctcttgtgtatgaccttcacgcagtcaagaacgagcttccagagttggaggttgatatgtggaagaataatttgtctgtgattatgaaagatacgtttctagcagtgagctctggcgttgatttgataattgttaggatatttgaaagaagatatggagagcggagagaaagtttgcatcgctgttgtgcgtgggttccgtgggtgttgtcaagccttatttgactatctcctcatggaagctatgcagtatatctttgggatcactgacagactagtaattatgccttctggattcctggcacctgtgtatgctctgtcttgtaccaatttaacatgctgccataccaagagtccagagtggagacaaattctgggtccgttgtccatcacgaaacaagacattgatttatatatggggactgcaggtttgtcatcctctggttcctacatactggattgtagccataagtggacttatgtccggtctgtgctacgacagacaaaatgttccaggtgcatcaggtgctctgaatccccaggtggatggcaaaattcttttctctggacacttgaacccatcttctcttctgcagaagccaccagcgaagccagaattgggatgggagccacgctggacatccagagacgagcagagaa

SEQ ID NO: 515900 - DNA, 205 bp, Homo sapiens
  misc_feature (10)..(10): n is a, c, g, or t
  misc_feature (18)..(18): n is a, c, g, or t
  misc_feature (20)..(21): n is a, c, g, or t
  misc_feature (26)..(26): n is a, c, g, or t
  misc_feature (48)..(48): n is a, c, g, or t
  misc_feature (64)..(64): n is a, c, g, or t
  misc_feature (80)..(80): n is a, c, g, or t
  misc_feature (130)..(130): n is a, c, g, or t
  misc_feature (152)..(152): n is a, c, g, or t
  misc_feature (174)..(174): n is a, c, g, or t
taaataaaancaggtatncnnttganggtagggaagggttggaaaaanggaaaagcaataaaanctgcccaattcacatnagttatccgtctgcttttttttgaaagcttggggaaggggttaacggggntggaaacatcaacaccttggcntgcatgaatgttaagccagganggccagcgaccaccttgatagcttcttcact

SEQ ID NO: 515901 - DNA, 658 bp, Homo sapiens
  misc_feature (5)..(5): n is a, c, g, or t
  misc_feature (142)..(142): n is a, c, g, or t
  misc_feature (156)..(156): n is a, c, g, or t
  misc_feature (167)..(167): n is a, c, g, or t
  misc_feature (173)..(173): n is a, c, g, or t
  misc_feature (175)..(175): n is a, c, g, or t
  misc_feature (226)..(226): n is a, c, g, or t
  misc_feature (242)..(242): n is a, c, g, or t
  misc_feature (253)..(253): n is a, c, g, or t
  misc_feature (443)..(443): n is a, c, g, or t
  misc_feature (445)..(445): n is a, c, g, or t
  misc_feature (488)..(488): n is a, c, g, or t
  misc_feature (493)..(494): n is a, c, g, or t
agcgnagtgtcgctgcctcttcgcacagcccgggtttccgcttccctccgggcgcgagaagaggggagccaggccgagccccggccctaccgccgccgccgccatgtggcccccagaccccgacccgaccctggtaacccgnagcctgccggcggntcccgtcccgngccccngnggtccccgggctccgagccactgcttgccggcgcgggcttttccatctgcntctctcaaaggccgcnctcctgctggnccgagtcgggtctcttcattcatcacttttatctgctatgtggcgtcctcagcatctgccttcctcacagcgcctctgctggagttcctgctggccttgtacttcctctttgctgatgccatgcagactgaatgacaagtggcagggcttgtgctggcccatgatggacttcctgcgctgtgtcaccgcngncctcatctactttgctatctccatcacggacatcgcaagtacntcgcnntggggctatccaaagccgcatggaggcagtcggcatccttgataccatcgtgtatgccactgactgtctacccagatcttcaacgacgtgcgccacactccgtcacacacgggagactctgcccgctgagcacccaaagcccaccaagacacgaagcaaccagc

SEQ ID NO: 515902 - DNA, 612 bp, Homo sapiens
  misc_feature (5)..(5): n is a, c, g, or t
  misc_feature (397)..(397): n is a, c, g, or t
  misc_feature (399)..(399): n is a, c, g, or t
  misc_feature (442)..(442): n is a, c, g, or t
  misc_feature (447)..(448): n is a, c, g, or t
agcgnagtgtcgctgcctcttcgcacagcccgggtttccgcttccctccgggcgcgagaagaggggagccaggccgagccccggccctaccgccgccgccgccatgtggcccccagaccccgacccgacaggaccgagctgccggggtccgtccggcccgggcccgggctcggctgtgcggcgcgttctctgccccaagcgcctgtggcgagtcgggtctcttcattcatcacttttatctgctatgtggcgtcctcagcatctgccttcctcacagcgcctctgctggagttcctgctggccttgtacttcctctttgctgatgccatgcagactgaatgacaagtggcagggcttgtgctggcccatgatggacttcctgcgctgtgtcaccgcngncctcatctactttgctatctccatcacggacatcgcaagtacntcgcnntggggctatccaaagccgcatggaggcagtcggcatccttgataccatcgtgtatgccactgactgtctacccagatcttcaacgacgtgcgccacactccgtcacacacgggagactctgcccgctgagcacccaaagcccaccaagacacgaagcaaccagc

SEQ ID NO: 515903 - DNA, 140 bp, Homo sapiens
ttcattttgttcgtagccatacacgatccccatagcctgtgtcgcccagattcttgtgtcgccatcgacttcctcctgatgctcctttttgaggagagctaggtctttattctgttcttcaatttgactctcctccatct

SEQ ID NO: 515904 - DNA, 852 bp, Homo sapiens
tcgtttccgcgatgctgactctgctagctgcatgcaggtgccccgtgtgctgggctcctccgtcgccggactccgagctgccagagcccgactcacctttccggcagttcctgaagcctggcaccccggactgtgcacccggacctatcgggctgtatcagcgtgcagcgcaggttccgagcggcggcagggcctcctgcggtctctcggacacctgccgcttgtggctgtgagcttgctggcatctgcgtgcaccaccgacgagtagacaaatgcttttgttgagtttaccatgactgatgaaatcaatggaggaaagacaaacatacaggaagcataaaaccctccctaagatgtctggaggttgggagctggaactgaatgggacagaagcgaaattagtgcggaaagttgccggggcaaaaaatcacggtcactttcaacattaacaagcagcatcccaccaacatttgatggtgaggaggaaccctcgcaagggcagaaggttgaagaacaggagcctgaactgacatcaactcccaatttcgtggttgaagttataaagaatgatgatggcaagaaggcccttgtgttggactgtcagttatccagaggattgaggttggacaagaagacgaggttgagagtgacatctttctctatcagggaagttagctttcagcgccactgggggcgaagatctgaatggaaggatactaattatacactcaaacacagaattccttggactgtgccttatatgacccacctaaatggatttcctttgccgaccgagggggtggaccacccttttgcagatgacctggtggaactcagacaggcctggacgac

SEQ ID NO: 515905 - DNA, 182 bp, Homo sapiens
atgctaacccagctttggtagtgagacacgcataatcagatgaacaagttgacggctgttttgcaggtcagcatgttgggttaggacagttgtcagcactggcaggctatgacctagaatggcgagaagacagccaggtacgagcagtcagcccgagacaggacgagaccctccttgagatt

SEQ ID NO: 515906 - DNA, 406 bp, Homo sapiens
  misc_feature (39)..(39): n is a, c, g, or t
  misc_feature (41)..(42): n is a, c, g, or t
  misc_feature (47)..(48): n is a, c, g, or t
  misc_feature (54)..(58): n is a, c, g, or t
  misc_feature (61)..(61): n is a, c, g, or t
  misc_feature (75)..(75): n is a, c, g, or t
  misc_feature (143)..(143): n is a, c, g, or t
  misc_feature (145)..(145): n is a, c, g, or t
agcacccctgtctgtacatagtgctgctgtcctgcgacntnncagcnnggaggnnnnngancagtggtgggggcncctagaggtcagttcttcaagagggcgaggcagaggcagaggtgaatgtggtttctaccaaagaagtntngatgaagtagagggtgtttttggtcgaggaggtggcagagaactgcatagatcgcagagctgggaggaaaggggtgacagacgttttgaaaaaccaggacgaaaagatgtagggagaccaaatttagaggaaggtggaccaacatcagtagggagaaagcatgactttatacgctcagaacgtgcaaattggcgcatctttagagaggaacaaactggagccgatgacgctggcggttggcgactagctgaatcatctcaa

SEQ ID NO: 515907 - DNA, 146 bp, Homo sapiens
ctgtccccattcttccagtcctcggctgccacgcgcagtatgctggtcaccgcgaaggtggtggtgccctgcttgggctcctgccgtgatgcccaagtcaggtacttctcgcaggccagttcctgtgacccctgtagccagcgaac

SEQ ID NO: 515908 - DNA, 877 bp, Homo sapiens
gcgcgtggggttcaatatgaagaccaagccgcccttctagaaagtcaccaacaaacggggggcgcccacaaggcggttgaaagcccccctgggtgcccctagacggatcctatgaaccacgacacgcccagcaaagggggggggggcgtgccttcttcgacaatgggtcccgtcgcccccgaagctacttgcgccgaccatagaagatagttggttgtgccccccccgcccacaagagcgcccggccctgctcctagtcgcaacgagtagaagggaggctggtgggtcaagtcgtgtcagagggcacacaaatatcgcggggatggcgcttccttcctcgaatagtaggcctgatggtgcggaacgctctctcccagccgtcagacatccgcaaccagtggggtcccccccttatcggggtgagatgtgtcgtgtgtctcccctttagagacagcggctgcaaacatgtgtggccctcgaactctcgctctcgaaggaatggggtaattcccactctcccctttatttgaggtgcagtgtacgacgatatatgcgagacacaccctgttgggtttaccacacagtgggagcgttggtgaaaagctcctgcggtgagaggtaccatcttataggaggatgatttgaggcaccgccggcccctttgagtacacaatacatagttggttgcccgcgtacagcagcgcgagcgttacaaaaaaacacggggtagaagacccccccttctattgtgtctatgttatataaataaggttcttagaccgcccctccgggtaccttttccacagggttatacttcagcgccgtgtgcgcacccggggcaaaccgccttccaaagttactcctccaaacatagaca

SEQ ID NO: 515909 - DNA, 113 bp, Homo sapiens
gccatggctgggaccaattgactcatgaactctaagaaatgtccatactaatgaaagaggtaaattaacaggagagagggtgggcatggtggctcacacctgtaatcccagca

SEQ ID NO: 515910 - DNA, 100 bp, Homo sapiens
gctgtgttagtgttttttccctctcctgtcttgttgttgaaggagtaaactaagggtgtccatgccccattccctctctactcttggcagcaggttgagt

SEQ ID NO: 515911 - DNA, 158 bp, Homo sapiens
ttcctatactatgtcggttaaaagccttcatagaatataggcaccaaaaataaactaaccccacaccctcaccaaccaaaggaggcacaatccaacgaaactgatgaaaagtcgaggtaacgactctgcagaccgtactcatttctaaaccaaaagtc

SEQ ID NO: 515912 - DNA, 179 bp, Homo sapiens
  misc_feature (95)..(95): n is a, c, g, or t
ggatgatatgaaagagcagtatgacgacggtgatagacaatatgcacatttttgcttaacatttttccatttctaaaccatccttaaaggaacanatccatatatggggtcacaccatcctcaacggtagtccaatagagcaaccatgcatcggatcgtttcacataagaacggtagtt

SEQ ID NO: 515913 - DNA, 430 bp, Homo sapiens
  misc_feature (12)..(12): n is a, c, g, or t
  misc_feature (21)..(22): n is a, c, g, or t
  misc_feature (33)..(34): n is a, c, g, or t
  misc_feature (56)..(56): n is a, c, g, or t
  misc_feature (69)..(69): n is a, c, g, or t
  misc_feature (108)..(108): n is a, c, g, or t
ttaagtgaaatngttgtaggnnggtgggggggnnagatttcacaaccaagggcaantttgttcggaacncggcgccgcagctgccggggaggcacaccccccaaaccncgcagaacaaaccacaaccctttaaaagatcaaacgctcccctcacaacagaccaccgcacaccaacaaagaaaaagaaagagagaaggaaagaaagacctgaagagaaagaaataaccagattttagctcaaagagtatagcctgggattaattttttaagatttgtttgccaattttttttttctcagccggggaataaagagcttaatacagggatacaaaaaggaagccctcgagatgttttcaccaggatgaaatgggattagctttgtagttcctataatcttcttcacagaagaatgcaatttcagtttcactgg

SEQ ID NO: 515914 - DNA, 828 bp, Homo sapiens
tcgctctctcccttgggagggccctgtcggttattatttggcgcgccctttttgtgtatattttttgagagcccgttttgttgcaaaaggtgggaaatgtcttttgtggtgataaagaaggggggttttcctcccccgtgggttttcccccgggggcacaaccccgcttcgttggggaagttataaaattttgccccccctccccccctcttttattgtgaaatttttagcttttctcccccccgtttagttcccccaagtgttttctaccccatgctccccccaagagtgtgttcccgccgcgaaatacaatatggtcaaacgcgcttccccaatttctccctcaatagaagaagaataagtatctgttcccccccagagtccacaccacttgggctttttcccacaccccccccccattacacctcctctccggagaaaattcttcccctccctataaatctaatattaaagaactcctcccctttccgtgtgttcttttccaattatgtgcgccccgcaacaaccacctgtcgtacgatatttccacacaatcctcccctctgtcggggagaaatcatctttctaggcgactctcacgggataaagaagaggggcaatattcttcttcccctccctctctaacagggcgcgccccactccttggtacaataaaataatagaaaaataccccttttaacccacatttcccttaataaagaatatataggcggttaaaaagggggggataaaaagcccctttggcaatgcccccacacttatgacaccacacgcttatttatccggcacaacaataaacagaacaaa

SEQ ID NO: 515915 - DNA, 471 bp, Homo sapiens
tggagatgtggtcatcgaagcttttgcaacaaatagccgagctgacacaggatgtgctaaacaattgacaccgctgagcatcagagaagaaactgacacatgagaccaaatctggctagagagggcatatgtcactatgctggagtgcagttcctcggagagtctgtgagctggactgatcagaatggctggagcaccgatctgtatagtcaccaaggagaggggctgacagatgaacagtgtcagcacaggtaatgctgattcgatgagtgtagatacatgatcatgatgcattactggtacaagatgcactgagcaatcgcgagtacgctatgcataccctaagccaggccatcgtaattgatccctggtacgctctctgctgatttgacagtgcctctagctgaggtgcgcatccccagcattagccacgatcaggatcttgaggtagttacatgttgtataggtttg

SEQ ID NO: 515916 - DNA, 394 bp, Homo sapiens
ttggaacactcagacatgaggtataagaaccgtgtcggatgcagtatctccggcactgaaggatgccaagaagccctgacctgcagacgtaaatgtggtgtgatggtgtacataataacccagctgttcggtgtgatgatctcagaggacatgggcagggatgagctgcaggagatccgtaatggcatgaccaatgaggccctctgagagcaccagatggcccgcagtggtggctggcagacagatctgtgtcacctgcggcaagtgcaggaaaaagaactgcacctacacacaggtgcagacccgcagctctgatgagcccatgaccaccttcgttgtctgcaacgagtgtggaaaccgctggaagttctgctgacccctcgtgtagatgtgc

SEQ ID NO: 515917 - DNA, 2948 bp, Homo sapiens
aattcgggcacgagggtcctccctccgcagcagccgagccggacctgcctccccgggcgtgctccgccggccccgccgccggcccgcagcgacagacaggcgctccccgcagctccgcacgggacccaggccgccggaccccagcgccggaccaccgtccgtccgccccgaggagtttgccgcctgccggagcacctgcgcacagatggagctggaccaccggaccagcggcgggctccacgcctaccccgggccgcggggcgggcaggtggccaagcccaacgtgatcctgcagatcgggaagtgccgggccgagatgctggagcacgtgcggcggacgcaccggcacctgctggccgaggtgtccaagcaggtggagcgcgagctgaaggggctgcaccggtcggtcgggaagctggagagcaacctggacggctacgtgcccacgagcgactcgcagcgctggaagaagtccatcaaggcctgcctgtgccgctgccaggagaccatcgccaacctggagcgctgggtcaagcgcgagatgcacgtgtggcgcgaggtgttctaccgcctggagcgctgggccgaccgcctggagtccacgggcggcaagtacccggtgggcagcgagtcagcccgccacaccgtttccgtgggcgtggggggtcccgagagctactgccacgaggcagacggctacgactacaccgtcagcccctacgccatcaccccgcccccagccgctggcgagctgcccgggcaggagcccgccgaggcccagcagtaccagccgtgggtccccggcgaggacgggcagcccagccccggcgtggacacgcagatcttcgaggaccctcgagagttcctgagccacctagaggagtacttgcggcaggtgggcggctctgaggagtactggctgtcccagatccagaatcacatgaacgggccggccaagaagtggtgggagttcaagcagggctccgtgaagaactgggtggagttcaagaaggagttcctgcagtacagcgagggcacgctgtcccgagaggccatccagcgggagctggacctgccgcagaagcagggcgagccgctggaccagttcctgtggcgcaagcgggacctgtaccagacgctctacgtggacgcggacgaggaggagatcatccagtacgtggtgggcaccctgcagcccaagctcaagcgtttcctgcgccaccccctgcccaagaccctggagcagctcatccagaggggcatggaggtgcaggatgacctggagcaggcggccgagccggccggcccccacctcccggtggaggatgaggcggagaccctcacgcccgcccccaacagcgagtccgtggccagtgaccggacccagcccgagtagagggcatcccggagcccccagcctgcccactacatccagcctgtggctttgcccaccaggacttttgagctggggctgactcctgcaggggaagccctggtccagctgggtgccccctcgagctccgggcggactcgcacacactcgtgtcatccagatgtgagcaccgcacccagcggcaaagagccctcccccctgcagggctccacccatcaccctccctccgtctgtctttccggcctggaccccaccctccacactctcaggccatcacagaacaccccagcttcctcattctgctacaacacccaggccctctggacatccagaaaaccaagtgtccggatggcaggggccagcggccaccaagctcatgggacacccagagcagaagctagggcagagccaatgctgagggagcctcgacttccggcgccgccgccctctcccggcatccgcagagccagctgacgccctccctgcctcccagggcagctggccagcctcgggcagcgcggccccctcctcccaggggagagtagaagtcgcacacgcagcagagcagacctgatgtcccggtgcttcctggcccctcagctccagtgattcacgcccgcctggagaagaatcagagctcagctcatgactcacccatggcaggcggagggtcccagaggggctgagtcctcaaatccggctgaggcagcagctggcaccatcagagccaggagagtgacaacaggtctcaaggttcccacaaagtctttgctgctgtgctgggcaccacccacccctcaccttgcaggctgcctgcgtgggaggcgaagtcccaggacagcccagaggggggctacagagaggagtcggctgcagcagagggcaggagccccagcttagccctgagcgccagcgcgaggaccagggcctgccactaagcccgccccgctggccgccagctgcccgtccccagagccactgcagcaggagtcgggccctgcctccctcccagcagggaaaccccgcccgctgccaggccatcctctctgccagaggctttcatgagccccaaggctggggccacagctcctacccctgcccagcagccctgagctcagctgcaggaaggacatcccagaagccatggctcctggggcgcttccaggcattctgccctgccccgacaccagaaccctggtgctggtgggccactagcgtctgcagcctaagcaggtgctggctcagggttcatcgttctgccttgtccactgggggaccagccctgcagaccactctgacaagtcttcagcccacaccctgccagccccacagattttatttttgcacataagccataaccaatcctcaaggctggcacaggctttggggaagccctggagcctgtgaagaccctggaaacctcatgaggctgtggccaacccctgccccttgccccacacagaccaggccttaaatgtcggtccaggccctgtgcaccttaccccagagacagactctttttgtaagattttgttaataaaacactgaaacttca

SEQ ID NO: 515918 - DNA, 891 bp, Homo sapiens
ggagagtgtatatcatcttgtggatgtggtctaaatacttaggttagtggtgtattgtgctcccaggagctagctgtcccctatgtactctaacaatgcaggatagcatgtcgcagaggacgccgtatatacggaagacctgcgtcactctacggcttctacatgggacgcctaaggatgactagatgatgtcatgatgggcaggctgtgctccagacacagtttatgtgaggagttgtcgttcatgcacaagtagggctgcacatgccaacataggagcgtgtgggttcatcctgatgggagcctagctgtgctgatgcctgttggtggcatctgaagcaatcgaacgccaagtgataacttcaggtggtctccgtcgcgaccattgaacatgagcctctccgttatgctacgtgcttcatgtgtgacaagtcatggccagggcaaactgctatgagtactcagtgaggtaattcctcatttaggtttaattgtgacagctttcatgtattgatggtaacaagtgaatcagagtagtttacttttataccagtggttctccctaagtcccatacatcgttttgggggaggcgaccctaagacagagtaaacatcatggaccattgttttccgcatattttaatgctcttcaaggaagcatttaagagtaataccccgcaggaaattaattgacaactgagtagctgttaatctaaccacgaggactcgaatgatggcccgagctatgtgcagaaatggacagggcactttagagggccatctgtgtcgataattcacctccattcattagcatggggaagccagtacttaacatcatggaccttttgtgaacgaaagaggaggtacgaattcgctaagaataggcctgaa

SEQ ID NO: 515919 - DNA, 3196 bp, Homo sapiens
aattcgggcacgagggtcctccctccgcagcagccgagccggacctgcctccccgggcgtgctccgccggccccgccgccggcccgcagcgacagacaggcgctccccgcagctccgcacgggacccaggccgccggaccccagcgccggaccaccgtccgtccgccccgaggagtttgccgcctgccggagcacctgcgcacagatggagctggaccaccggaccagcggcgggctccacgcctaccccgggccgcggggcgggcaggtggccaagcccaacgtgatcctgcagatcgggaagtgccgggccgagatgctggagcacgtgcggcggacgcaccggcacctgctggccgaggtgtccaagcaggtggagcgcgagctgaaggggctgcaccggtcggtcgggaagctggagagcaacctggacggctacgtgcccacgagcgactcgcagcgctggaagaagtccatcaaggcctgcctgtgccgctgccaggagaccatcgccaacctggagcgctgggtcaagcgcgagatgcacgtgtggcgcgaggtgttctaccgcctggagcgctgggccgaccgcctggagtccacgggcggcaagtacccggtgggcagcgagtcagcccgccacaccgtttccgtgggcgtggggggtcccgagagctactgccacgaggcagacggctacgactacaccgtcagcccctacgccatcaccccgcccccagccgctggcgagctgcccgggcaggagcccgccgaggcccagcagtaccagccgtgggtccccggcgaggacgggcagcccagccccggcgtggacacgcagatcttcgaggaccctcgagagttcctgagccacctagaggagtacttgcggcaggtgggcggctctgaggagtactggctgtcccagatccagaatcacatgaacgggccggccaagaagtggtgggagttcaagcagggctccgtgaagaactgggtggagttcaagaaggagttcctgcagtacagcgagggcacgctgtcccgagaggccatccagcgggagctggacctgccgcagaagcagggcgagccgctggaccagttcctgtggcgcaagcgggacctgtaccagacgctctacgtggacgcggacgaggaggagatcatccagtacgtggtgggcaccctgcagcccaagctcaagcgtttcctgcgccaccccctgcccaagaccctggagcagctcatccagaggggcatggaggtgcaggatgacctggagcaggcggccgagccggccggcccccacctcccggtggaggatgaggcggagaccctcacgcccgcccccaacagcgagtccgtggccagtgaccggacccagcccgagtagagggcatcccggagcccccagcctgcccactacatccagcctgtggctttgcccaccaggacttttgagctggggctgactcctgcaggggaagccctggtccagctgggtgccccctcgagctccgggcggactcgcacacactcgtgtcatccagatgtgagcaccgcacccagcggcaaagagccctcccccctgcagggctccacccatcaccctccctccgtctgtctttccggcctggaccccaccctccacactctcaggccatcacagaacaccccagcttcctcattctgctacaacacccaggccctctggacatccagaaaaccaagtgtccggatggcaggggccagcggccaccaagctcatgggacacccagagcagaagctagggcagagccaatgctgagggagcctcgacttccggcgccgccgccctctcccggcatccgcagagccagctgacgccctccctgcctcccagggcagctggccagcctcgggcagcgcggccccctcctcccaggggagagtagaagtcgcacacgcagcagagcagacctgatgtcccggtgcttcctggcccctcagctccagtgattcacgcccgcctggagaagaatcagagctcagctcatgactcacccatggcaggcggagggtcccagaggggctgagtcctcaaatccggctgaggcagcagctggcaccatcagagccaggagagtgacaacgtaacggagcaccacccttccacccaaccccaccatcagctgtcccggccaaatgagctcctccccagaccccagacaccctgcggcccaggccactccccagtgttcgggctcgctgggaggctctgacggggtcggggggcctctgccttggaagaccagcgccatccactcggccccagcccctccccatggagccctggctactgtcctgcgtggtccttcactgcccactctcctgttctttcaggtctcaaggttcccacaaagtctttgctgctgtgctgggcaccacccacccctcaccttgcaggctgcctgcgtgggaggcgaagtcccaggacagcccagaggggggctacagagaggagtcggctgcagcagagggcaggagccccagcttagccctgagcgccagcgcgaggaccagggcctgccactaagcccgccccgctggccgccagctgcccgtccccagagccactgcagcaggagtcgggccctgcctccctcccagcagggaaaccccgcccgctgccaggccatcctctctgccagaggctttcatgagccccaaggctggggccacagctcctacccctgcccagcagccctgagctcagctgcaggaaggacatcccagaagccatggctcctggggcgcttccaggcattctgccctgccccgacaccagaaccctggtgctggtgggccactagcgtctgcagcctaagcaggtgctggctcagggttcatcgttctgccttgtccactgggggaccagccctgcagaccactctgacaagtcttcagcccacaccctgccagccccacagattttatttttgcacataagccataaccaatcctcaaggctggcacaggctttggggaagccctggagcctgtgaagaccctggaaacctcatgaggctgtggccaacccctgccccttgccccacacagaccaggccttaaatgtcggtccaggccctgtgcaccttaccccagagacagactctttttgtaagattttgttaataaaacactgaaacttca

SEQ ID NO: 515920 - DNA, 859 bp, Homo sapiens
  misc_feature (18)..(18): n is a, c, g, or t
  misc_feature (67)..(67): n is a, c, g, or t
  misc_feature (72)..(75): n is a, c, g, or t
  misc_feature (77)..(77): n is a, c, g, or t
  misc_feature (82)..(82): n is a, c, g, or t
  misc_feature (89)..(89): n is a, c, g, or t
  misc_feature (94)..(98): n is a, c, g, or t
  misc_feature (102)..(102): n is a, c, g, or t
  misc_feature (104)..(104): n is a, c, g, or t
  misc_feature (106)..(106): n is a, c, g, or t
  misc_feature (109)..(109): n is a, c, g, or t
  misc_feature (120)..(120): n is a, c, g, or t
  misc_feature (137)..(137): n is a, c, g, or t
  misc_feature (144)..(144): n is a, c, g, or t
  misc_feature (168)..(168): n is a, c, g, or t
  misc_feature (171)..(171): n is a, c, g, or t
  misc_feature (175)..(175): n is a, c, g, or t
  misc_feature (177)..(177): n is a, c, g, or t
  misc_feature (197)..(197): n is a, c, g, or t
  misc_feature (203)..(203): n is a, c, g, or t
  misc_feature (206)..(206): n is a, c, g, or t
  misc_feature (211)..(211): n is a, c, g, or t
  misc_feature (215)..(216): n is a, c, g, or t
  misc_feature (219)..(219): n is a, c, g, or t
  misc_feature (221)..(221): n is a, c, g, or t
  misc_feature (225)..(225): n is a, c, g, or t
  misc_feature (247)..(247): n is a, c, g, or t
  misc_feature (263)..(263): n is a, c, g, or t
  misc_feature (268)..(268): n is a, c, g, or t
  misc_feature (273)..(273): n is a, c, g, or t
  misc_feature (335)..(335): n is a, c, g, or t
  misc_feature (567)..(567): n is a, c, g, or t
  misc_feature (592)..(592): n is a, c, g, or t
  misc_feature (728)..(728): n is a, c, g, or t
  misc_feature (837)..(837): n is a, c, g, or t
tactttaaaatgtcttancatattgaatggagcatacgctacaatttatccatccttatttatatanaaaannnnantctcnctctganacccnnnnnggantncngtngcgccatttcngctcacagctgcctctncccaggntcaagggatcctcctacctcagcntcncggntngctgggaccacaggggtgcnccaccnggnccggntatnnttntntttntttttggtagagacggggtttnatcatgttggccaggntggtnccgancgcctgagctcaaccgatccgcccgcctcagcctcccaacgtgctgggattataggcatganccaccacgcccggcctatccatccttattcatattatgtaggaatcagagctctccataatgtccactattataaatgaacagcataattcccttggtcataacttccattccaaattcttgctcagctctcggccccgtgtgacacctgggggtaagaaccaactacgtatgcgctcagaaactcacctggggtctcctaggctgccgtagactgagtaccaggggcctangcagagggagcaaccgagagaaganaaggcaagaccaggcccagccccttcatcggccctcgccagatcactctctctcaaggggtcaggattcagactttcgtgtttctctccaaatctgaagtttacaaaagtagccgagctgctcatcagggatatgnagtctgctttctgcagcagagaacagaagtgaaagggagaagggatgagcaagaaagtctctggatttcaggagaagggagacagccccaagggcaggaggaacacttntgaagggtccattgaagagaca

SEQ ID NO: 515921 - DNA, 3219 bp, Homo sapiens
  misc_feature (2954)..(2954): n is a, c, g, or t
  misc_feature (3219)..(3219): n is a, c, g, or t
aattcgggcacgagggtcctccctccgcagcagccgagccggacctgcctccccgggcgtgctccgccggccccgccgccggcccgcagcgacagacaggcgctccccgcagctccgcacgggacccaggccgccggaccccagcgccggaccaccgtccgtccgccccgaggagtttgccgcctgccggagcacctgcgcacagatggagctggaccaccggaccagcggcgggctccacgcctaccccgggccgcggggcgggcaggtggccaagcccaacgtgatcctgcagatcgggaagtgccgggccgagatgctggagcacgtgcggcggacgcaccggcacctgctggccgaggtgtccaagcaggtggagcgcgagctgaaggggctgcaccggtcggtcgggaagctggagagcaacctggacggctacgtgcccacgagcgactcgcagcgctggaagaagtccatcaaggcctgcctgtgccgctgccaggagaccatcgccaacctggagcgctgggtcaagcgcgagatgcacgtgtggcgcgaggtgttctaccgcctggagcgctgggccgaccgcctggagtccacgggcggcaagtacccggtgggcagcgagtcagcccgccacaccgtttccgtgggcgtggggggtcccgagagctactgccacgaggcagacggctacgactacaccgtcagcccctacgccatcaccccgcccccagccgctggcgagctgcccgggcaggagcccgccgaggcccagcagtaccagccgtgggtccccggcgaggacgggcagcccagccccggcgtggacacgcagatcttcgaggaccctcgagagttcctgagccacctagaggagtacttgcggcaggtgggcggctctgaggagtactggctgtcccagatccagaatcacatgaacgggccggccaagaagtggtgggagttcaagcagggctccgtgaagaactgggtggagttcaagaaggagttcctgcagtacagcgagggcacgctgtcccgagaggccatccagcgggagctggacctgccgcagaagcagggcgagccgctggaccagttcctgtggcgcaagcgggacctgtaccagacgctctacgtggacgcggacgaggaggagatcatccagtacgtggtgggcaccctgcagcccaagctcaagcgtttcctgcgccaccccctgcccaagaccctggagcagctcatccagaggggcatggaggtgcaggatgacctggagcaggcggccgagccggccggcccccacctcccggtggaggatgaggcggagaccctcacgcccgcccccaacagcgagtccgtggccagtgaccggacccagcccgagtagagggcatcccggagcccccagcctgcccactacatccagcctgtggctttgcccaccaggacttttgagctggggctgactcctgcaggggaagccctggtccagctgggtgccccctcgagctccgggcggactcgcacacactcgtgtcatccagatgtgagcaccgcacccagcggcaaagagccctcccccctgcagggctccacccatcaccctccctccgtctgtctttccggcctggaccccaccctccacactctcaggccatcacagaacaccccagcttcctcattctgctacaacacccaggccctctggacatccagaaaaccaagtgtccggatggcaggggccagcggccaccaagctcatgggacacccagagcagaagctagggcagagccaatgctgagggagcctcgacttccggcgccgccgccctctcccggcatccgcagagccagctgacgccctccctgcctcccagggcagctggccagcctcgggcagcgcggccccctcctcccaggggagagtagaagtcgcacacgcagcagagcagacctgatgtcccggtgcttcctggcccctcagctccagtgattcacgcccgcctggagaagaatcagagctcagctcatgactcacccatggcaggcggagggtcccagaggggctgagtcctcaaatccggctgaggcagcagctggcaccatcagagccaggagagtgacaacaggtctcaaggttcccacaaagtctttgctgctgtgctgggcaccacccacccctcaccttgcaggctgcctgcgtgggaggcgaagtcccaggacagcccagaggggggctacagagaggagtcggctgcagcagagggcaggagccccagcttagccctgagcgccagcgcgaggaccagggcctgccactaagcccgccccgctggccgccagctgcccgtccccagagccactgcagcaggagtcgggccctgcctccctcccagcagggaaaccccgcccgctgccaggccatcctctctgccagaggctttcatgagccccaaggctggggccacagctcctacccctgcccagcagccctgagctcagctgcaggaaggacatcccagaagccatggctcctggggcgcttccaggcattctgccctgccccgacaccagaaccctggtgctggtgggccactagcgtctgcagcctaagcaggtgctggctcagggttcatcgttctgccttgtccactgggggaccagccctgcagaccactctgacaagtcttcagcccacaccctgccagccccacagattttatttttgcacataagccataaccaatcctcaaggctggcacaggctttggggaagccctggagcctgtgaagaccctggaaacctcatgaggctgtggccaacccctgccccttgccccacacagaccaggccttaaatgtcggtccaggccctgtgcaccttaccccagagacagactctttttgtaagattttgttaataaaacactgaaacttcaaaaaanaaaaaatcagggctaatgtgggggggaaagggtaaaggggcagggccaacgggggccggcccctctttggcaaagggggagacccggccccaagggggcgaaaccgagtcggccatgagcggtacaggacgcagaagaagaagaagaagaaagacgaaagaaagagaagaaacagcgcagaaagaagcaggagacgagcagagaggacagacaataagctgagaagataacaaacaagcgcgaagacagagcgctctgcgcgggn

SEQ ID NO: 515922 - DNA, 286 bp, Homo sapiens
tccgatctactacgcggctgatctgtgggtgggtgatgggagaagtcaggttttgagctgttagtattggatttggaaagtatagcaggagtggccgaaagaagggtggttacggagaatgaagaaatgcctgacctattaggaatctcaggaccatttctcattgcgatggctgaaggttgtctaagtttctaagtatattgaaatcgaaagtgccgttatcgggccattgctagccattgtccaattggtattgaggccatgcagtagccgcgtagtcagatcg

SEQ ID NO: 515923 - DNA, 1102 bp, Homo sapiens
actcaactgacctcacacagagacagatggacagacactcgaggacaagcgacagagaacccctcctcacacaggaggagaataaaaagatcagacaacaacagcagcagagcagacctgatgtcccggtgcttcctggcccctcagctccagtgattcacgcccgcctggagaagaatcagagctcagctcatgactcacccatggcaggcggagggtcccagaggggctgagtcctcaaatccggctgaggcagcagctggcaccatcagagccaggagagtgacaacaggtctcaaggttcccacaaagtctttgctgctgtgctgggcaccacccacccctcaccttgcaggctgcctgcgtgggaggcgaagtcccaggacagcccagaggggggctacagagaggagtcggctgcagcagagggcaggagccccagcttagccctgagcgccagcgcgaggaccagggcctgccactaagcccgccccgctggccgccagctgcccgtccccagagccactgcagcaggagtcgggccctgcctccctcccagcagggaaaccccgcccgctgccaggccatcctctctgccagaggctttcatgagccccaaggctggggccacagctcctacccctgcccagcagccctgagctcagctgcaggaaggacatcccagaagccatggctcctggggcgcttccaggcattctgccctgccccgacaccagaaccctggtgctggtgggccactagcgtctgcagcctaagcaggtgctggctcagggttcatcgttctgccttgtccactgggggaccagccctgcagaccactctgacaagtcttcagcccacaccctgccagccccacagattttatttttgcacataagccataaccaatcctcaaggctggcacaggctttggggaagccctggagcctgtgaagaccctggaaacctcatgaggctgtggccaacccctgccccttgccccacacagaccaggccttaaatgtcggtccaggccctgtgcaccttaccccagagacagactctttttgtaagattttgttaataaaacactgaaacttca

SEQ ID NO: 515924 - DNA, 337 bp, Homo sapiens
  misc_feature (120)..(120): n is a, c, g, or t
  misc_feature (288)..(288): n is a, c, g, or t
gcccaggctggagtgcagtggcataatctcagctcattgcaacctccgcctcccaggttcaagtgattctcctgcctcagcctcccgagtagctgggattacaggtgcgtgccaccacgnctggctaatttttttgaatttttagtagagatggggtttcaccgtgttagccagggtggtctctatctcctgaccacgtgatccgcccgccgtggcctcccacagtgctaggattacaggtgtgagtcaccgtgcctgggcaaattatactctttgtcctggatgaanccataatctatcttcattctatctatctattatactaaactctacatgg

SEQ ID NO: 515925 - DNA, 980 bp, Homo sapiens
gggagccacacaggtttccccgataccggcttcttttgactaccaagccctgttcctcccctcttctgcttagttagtggccacttcccttcttcacacgtaccactctggatggttcctctgtggggttgaagacttaatataagtgtagatgtgaccactgtcatcactatgtttcgattgagtgttgctggtccacatagtgtgggagtggccccaacaagtttgtgtacaccaggcttgtgcctaaacgaaacggcgctgcttattctctgtcttcaaccaaaggtactgatacaaaggggataacattttccctggtgaccacgtgtcaggcaaatacattaatacacagggccctcttcttacgcccctcggggggcgccccctaaagagaggcgtctccccgaaacggccggcgaagacatgtgctcccgcagaccgtcttctctaaaacagacaagatatagctggtccccccccccccagatccgtggtgggcgttacaaaaatccccccccccgctgcgatacataaaaaccaagtggaggagacccgcctgtaggggcgctccaagcagcgccccccgacaacttcgccccgctcgctgctgtcgtgatcgatcacaacccggagctcgcttcagctagcgcggcacgcaaccagaacgggtgggcgcgtatttgctcttctctagatgagtgccgcggctccacccactaacacaatcaaattatgtcgccgttccccagatataataggctgaaccaaaccattggtcgccgcagcaaggactgaatagagcgagttataaatgggacagccgccccgggccaccatttgtgcaacagagcaaaccaggacttctctccccattccctcgctggcttgttatatctatactgttcgggagatcgccctccttcgaaacaaaagaagtactttcgtgggaccaaaaaaaaaacgcctccccaaaaaac

SEQ ID NO: 515926 - DNA, 504 bp, Homo sapiens
ccagttactacgctgagagtcggaggcactcttgtgccagaggtatggtgcccataggatggagcaggcagtgcaagcaggagggtcttctaaggaggcaactggggacttcttaactgactgattgttttggatatttggggtctcaagcacctccaccaggtctttccaggatgctaagaaaaatgaaaggctcttacctccctccttgaacctatctcacccattctgagaaaggcctcaccgtgtaattgggatttcctggctggatacgtagttcggccaaaatccaaatgccgttagtaagcttcagggattggtacagcatgtcttgcccttccacattcctcttggcaatagtataaacattgttgttttgcaacttgctggaaacagtgtctagaaacacagattcaaagttcaacacctttagttaaaataccaaacaaatgtaccatgagccatgtgtgcccaagtagctgttgtaactgggggtaccgagct

SEQ ID NO: 515927 - DNA, 374 bp, Homo sapiens
acacggagagaaattcctcttgaaagcatcatgagaaaaacaacacatgatctatcacggaacaataattcatatgactactgatttctcataaaccaccactggaggccagaagacactgaaacaacctctttgaaatgctggggcgggggggagaactgtccactgaaaattctgtatccagctagagtatcttgcagagatcaaggataactaaagacattttcagaagaaggaaaactaaaagaacttattaccagcagacttgcactaagagaaatgctgaaggaagttctttacacggaagggaaaaagagtaatacatattatactaacactattcacaaacgtaaccctagcctccccactcgtac

SEQ ID NO: 515928 - DNA, 293 bp, Homo sapiens
ctgcccggcgcggccacgcgtgcaggtcgatgtccttggtttcgcgggtccagcgcaggccggtggtgatgctcaagggctcgctgacctgccaggtggtgctgccgaagattgcgaaactgtcggtggtctggtcaatcgaggtcttgccgtaatcggcgacgccgaacgcctggttgtagtcggccgggagcaaggcactgctggaagcgctgtccaggtgttcgtggaacaggtgggtaccgacgatccagctcaccgcctggttcttcgccgaggacaggcgcagttcc

SEQ ID NO: 515929 - DNA, 172 bp, Homo sapiens
cacaactctgaaatccaaatgctccaaagtctgaaactttttgagtgccaacatgacactcaaaggaaatgcttattaggagcatcgcagactcaggtgtttgaattcgagatgctcaaccgagtaagcaatagtgcaatatattacagaaatctgagaacacagtcccaag

SEQ ID NO: 515930 - DNA, 359 bp, Homo sapiens
  misc_feature (73)..(73): n is a, c, g, or t
ctcccactcgccccctccccagtgttcccttatcagttatgtcagctcttttcttttaagtgctcaggactanaaccatggactcttccatgactcttcattttcataaactacatccaattctcagaaaatcctagtaactttactggggggaaaaattgtaacctacatacttcctacccttcccctgctaatccctcagccaggcaatcactaattcttgtcttgtctatgagagcaatttctcttcttccattcttgcctcccctacctttggttaaatgtaagtcagaccatgcactcttctgcttagtgtctgccatgccataccatcaccctgaaaataaaaaccatttgag

SEQ ID NO: 515931 - DNA, 420 bp, Homo sapiens
caagcagttaatacatgacccaggtcaagaacctggtctccgggcgtggtggctcctgtctgtaatcccagtactttgggaggcaaggcaggtagatcacctgaggtcaggagttcgagaccagcctggccaacatggagaaaccccgtatctaccaaaaatacaaaaactaatcgggcgtggtggcacggggcatacagtcccagctacatgggaggccgaggcaggagaatcacctgaactgggaggcagaggtttgcagcgagccgagatcgcaccactgcactccagcctgggtgacagagcgagactctgtctcagaaaaaaaaaacagtggctagagtggccctatggctatttacctgatcttagaggaaaagcattcagctgtccaccgtaaaagtctgtattacctgcttg

SEQ ID NO: 515932 - DNA, 104 bp, Homo sapiens
agactggccgcagattgtatataatgatgtcacgtgatcgattccccatgtattttctgtcgcaggatccacatgatatttagtgtcatactccttagctcttg

SEQ ID NO: 515933 - DNA, 117 bp, Homo sapiens
gcagatcatcaccgagctgcactacagcctggtcaacagagcagggactccatctcaaaaaaagtgactgctatagatggaacaaagcaaatacacaagtagaggagcaccaccaat

SEQ ID NO: 515934 - DNA, 509 bp, Homo sapiens
acgagttaggacccagctggggctctccttggagttcttccatcccccaggggtacctcaggacccagggctgcaaacacaggctggggctgcaagggctcctgccccattctcagccttccttccctctccttgtctcatgttgaccggagggtaggggtctgtccctggtcttcctgggagggtttgtacacatatattgctactggggggatccatttatttttattgggggggggtatacaacaaggtgcgaacgggctgccggggactaattttgacttgcactgccattttgaggggagaagaaacaattaggggcaaacattaaaaaaagcaattttttgcagacccaaaggataattttaaaaaatggcaaatttctaaaagacacatcttttggaaaaaagaaaaagaagtgggcaggcgcaaggggtcaagcctggaaacccaagcactttggggagggccgaggcgggcggggtaacgaggggcaagaaaagggaaaa

SEQ ID NO: 515935 - DNA, 827 bp, Homo sapiens
  misc_feature (145)..(145): n is a, c, g, or t
  misc_feature (363)..(363): n is a, c, g, or t
gggagcgcagtgcagcgcagccgcgggagccgaggagcgcgcgagccggcatggcaagtcagtttccaaacagttcataatgaggtcctgaagggcccaaaatgagtccgggcagaagcacggtgtccccccgagtgaagctctngaagaactcaaacgggaggctcaacagagtatcctggaggccgtggccaagcaacggaggatcctcaagcaaccagccgggagtccagccggtggccccaggtgtgggggggagaaccttgggcattggcattccataatgatccagaccagggaaaagggagggtggttgcataagcatggcgtccaggcgaccacatcaaagcaacgtataaattntcccaggaaggcgttggttttcacccttcgggggacctggacccacctttcagcgggccatggtttatggcaaagacaccacccaaagaaagttattgcggcgtggagaggaaacgggcgtcccggcaatggttgacgggggtccctctttttggtgggtgggcccagattaatttcccccaggcggggggaaagtggggtgtgtcccaaagttagagcggggttttcttgtcaggaaaggaaaaaaaagcggttctgtggccgcggccggaagagaactgttaccggttgggtctacacgcggtttaagggggagacagggggggggcaggacctttaacagcaacggggtggacttttgaaggtggggcctaagaaaccaccaaaaaatctggggtgggggatgtttggtccccgtggtgggagtggagatggtgccgtagagtaggtgagatgcctttgtg

SEQ ID NO: 515936 - DNA, 607 bp, Homo sapiens
cgtttaggacccccccagcctctgacagccactaatttgtctttatacagtcacctattctggacattcatataaatgaaaacatacaatgtgttcttttgtgactgattttttcacttagcataatttttcagggttcgtctatattgcatcatgcatcagtacaacttctgttcttggtacttttttttggtatatttcatgatactgccaacacccagataattgtgttattgtcccactgttgttggaaaggatagaagtccgaaaagaatcatcatctatctaagtacttctgctactaagtaccataagaacctgccataaacattttattcccacatgtatttcttgcccttatcagtcctgacaatgggtaatcatgaaggctgaatgatgagtgatttgctttaatttaatggggtataggatgattgacttggaaaacagttctgtcctacttgaaggcatatgatggtttgctctggatttaaaaactgaaggatatgagacttcagttgtaagagtgaactttgtgtcgagaaattaggttaatgtttaataatgtatttaatgctgagtaaagttatataggaagacatttcaa

SEQ ID NO: 515937 - DNA, 878 bp, Homo sapiens
cgcagtggctcaagactgtaatctgggaggccaaggcaggcggatcatgaagtcaggagtttgagaccaacctggcaaaaatggtaaaacccatccctactaaatatacaaaaaattagcagggcgtggtggcgcgcacctgtagtcccagctactcgggaggctgaggcaggagaatcgcttgaaaccgggaggcggaggttgcagtgagctgagatcgcgccactgcactccagcctggacaacagagcaagactccatctcaaaaaaaaaaaaagggttaggaaatttcttggcctcttttataaatccccccattttttgccggttctaattggtccaccaccaacaccattcaaacgggaggggctcaacggggagaaaggaatgtggccctaaaacggggaacacgatcccggaattaaggtggtaattccagggcccatttctcagtgctaaatattattaataccgtgcattcccaagtagactgggaacaaattactcccgaaaatctttacaatttattcaattcattcaataccttatttcccccctcatagtctaaccagaacagctggtctggctttctacaatctcccggcagggtacatcaattgttcctttggaaccttggaggaggtgataattaggcagagcgaccctattcagttgtgggtcattaaccctcttggggggagcgacacggcagaattttgtgcctttcactccttaacacaggcccctggggaatcctggaactttaatcccaagaaatttcgggtacccagtcccattgactcatgtgggcaggttacacgctccacatttggacgtaaatccgttttaagacccggagtttcggcaacagggagaag

SEQ ID NO: 515938 - DNA, 844 bp, Homo sapiens
  misc_feature (233)..(233): n is a, c, g, or t
  misc_feature (396)..(396): n is a, c, g, or t
  misc_feature (408)..(408): n is a, c, g, or t
  misc_feature (414)..(414): n is a, c, g, or t
  misc_feature (426)..(426): n is a, c, g, or t
  misc_feature (435)..(435): n is a, c, g, or t
  misc_feature (462)..(462): n is a, c, g, or t
  misc_feature (468)..(468): n is a, c, g, or t
  misc_feature (488)..(488): n is a, c, g, or t
  misc_feature (501)..(501): n is a, c, g, or t
  misc_feature (517)..(517): n is a, c, g, or t
  misc_feature (523)..(523): n is a, c, g, or t
  misc_feature (529)..(529): n is a, c, g, or t
  misc_feature (537)..(538): n is a, c, g, or t
  misc_feature (541)..(541): n is a, c, g, or t
  misc_feature (546)..(546): n is a, c, g, or t
  misc_feature (556)..(556): n is a, c, g, or t
  misc_feature (561)..(561): n is a, c, g, or t
  misc_feature (570)..(570): n is a, c, g, or t
  misc_feature (574)..(574): n is a, c, g, or t
  misc_feature (577)..(577): n is a, c, g, or t
  misc_feature (580)..(580): n is a, c, g, or t
  misc_feature (583)..(583): n is a, c, g, or t
  misc_feature (591)..(591): n is a, c, g, or t
  misc_feature (597)..(597): n is a, c, g, or t
  misc_feature (609)..(609): n is a, c, g, or t
  misc_feature (616)..(616): n is a, c, g, or t
  misc_feature (632)..(632): n is a, c, g, or t
  misc_feature (641)..(641): n is a, c, g, or t
  misc_feature (658)..(658): n is a, c, g, or t
  misc_feature (770)..(770): n is a, c, g, or t
  misc_feature (834)..(834): n is a, c, g, or t
aagcagtggtatcaacgcagagttgccattatggccggggagaagtcgcttagctcttcggtggttgtcacacgtccggaggcctagccgtcgcgtacctaggatgccgcgtggaagccgaagccgcacctcccgcatggcccctccggccagccgggcccctcagatgagagctgcacccaggccagcaccagtcgctcagccaccagcagcggcacccccatctgcagttnggctcttctgctgctgctgccccggcagcgcaggtctgagtggcccagatggcaaccactgcagctggcgtggctgtgggctctgctgtggggcacacattgggtcacgccattactgggggcttcagtggaggaagtaatgctgaggcctgcgaaggcctgngatcactgaccnggggcntcagggggcccngcgggcgcngcggcggcggcgttgcctcgtgtgagngcaggncggtttctggggtgtgcgcngggcgcagggtgncatcgaggctctgtgngggttncaatgnggtgctgnnacngtgcncgacttgcanacggnttggcctantgangangtncancctggggngatggnaaatcagctctnataactnagttaattagtataanaatagaatngatagtgagggtataangtgtaccatcagtaaaacctctcctgtcattcctagcttccttgcttcagaattgaaatggaagtgggggtgtccctactctgtagaatctgggactgggcaaatgtttgtntggcctccttaaactagctgtaatgtaatgattttattctttgtgagtaaattagaataaagtnattttcttcc

SEQ ID NO: 515939 - DNA, 867 bp, Homo sapiens
  misc_feature (233)..(233): n is a, c, g, or t
  misc_feature (540)..(540): n is a, c, g, or t
  misc_feature (546)..(546): n is a, c, g, or t
  misc_feature (552)..(552): n is a, c, g, or t
  misc_feature (560)..(561): n is a, c, g, or t
  misc_feature (564)..(564): n is a, c, g, or t
  misc_feature (569)..(569): n is a, c, g, or t
  misc_feature (579)..(579): n is a, c, g, or t
  misc_feature (584)..(584): n is a, c, g, or t
  misc_feature (593)..(593): n is a, c, g, or t
  misc_feature (597)..(597): n is a, c, g, or t
  misc_feature (600)..(600): n is a, c, g, or t
  misc_feature (603)..(603): n is a, c, g, or t
  misc_feature (606)..(606): n is a, c, g, or t
  misc_feature (614)..(614): n is a, c, g, or t
  misc_feature (620)..(620): n is a, c, g, or t
  misc_feature (632)..(632): n is a, c, g, or t
  misc_feature (639)..(639): n is a, c, g, or t
  misc_feature (655)..(655): n is a, c, g, or t
  misc_feature (664)..(664): n is a, c, g, or t
  misc_feature (681)..(681): n is a, c, g, or t
  misc_feature (793)..(793): n is a, c, g, or t
  misc_feature (857)..(857): n is a, c, g, or t
aagcagtggtatcaacgcagagttgccattatggccggggagaagtcgcttagctcttcggtggttgtcacacgtccggaggcctagccgtcgcgtacctaggatgccgcgtggaagccgaagccgcacctcccgcatggcccctccggccagccgggcccctcagatgagagctgcacccaggccagcaccagtcgctcagccaccagcagcggcacccccatctgcagttnggctcttctgctgctgctgccccggcagcgcaggtctgagtggcccagatggcaaccactgcagctggcgtggctgtgggctctgctgtggggcacacattgggtcacgccattactgggggcttcagtggaggaagtaatgctgaggcctgcgaaggcctggacatccacttttaacccaagaagcctccaaggtaacccacaggcacgagacacgagagagagagaagagctcgtgctctcatatagatctacaacacagtctcctggagtgtgcccagaaccaggtgaccatcaagctctgtgngggttncaatgnggtgctgnnacngtgcncgacttgcanacggnttggcctantgangangtncancctggggngatggnaaatcagctctnataactnagttaattagtataanaatagaatngatagtgagggtataangtgtaccatcagtaaaacctctcctgtcattcctagcttccttgcttcagaattgaaatggaagtgggggtgtccctactctgtagaatctgggactgggcaaatgtttgtntggcctccttaaactagctgtaatgtaatgattttattctttgtgagtaaattagaataaagtnattttcttcc

SEQ ID NO: 515940 - DNA, 468 bp, Homo sapiens
aaggacctccaaagtcacacaaagtgcctgctcctggtcccctcagctctgcctctgcagccactggctgcccagtgccatcaggatgagcagtcccgggcaagcataatgacagaaagaaggagacttcggggaagccctgactgtgcagagctaaggacacagtggagattctcttggcactctgaggtctctgtggcaggcctggtcaggctctccatgaggttagaaaggccaggtagtgttccagcagggtggtggccaagccaaccccatgattgatgtgtacgattcactcctttgagtctttgaatggcaactcagccccctgaactgaagaaagccagccctagcctctagggtgacctagagccgccttcagatgtgacccgagtaactttcaactgatgaacaaatctgcaccctacttcagatttcagtgggcattcacagcaacccccaaaccag

SEQ ID NO: 515941 - DNA, 379 bp, Homo sapiens
gtcaaccgcagtgcagcttgcattctgctggccgtactctacaggtatcccctgcggacccctatcctgccaaattccccccatttctttctgcttcaccctccctcttttgctataagggatcggcttaggcgcctttgtggtgttcattctccatgtcccgtacagcctgttactgcagtttctccaagtcccacggtccgtgcagtctactcccttttttgaaccgagcggtacctggcgcgaagtctgagccttctcctgaagtgggttgatttgtcccagggtcatcaccgcttgagggtggcctaagccagatctcacgtcacagagctggctctcctccatttgcctccctcgctcttgcctcctgtaggcc

SEQ ID NO: 515942 - DNA, 745 bp, Homo sapiens
  misc_feature (19)..(19): n is a, c, g, or t
  misc_feature (31)..(31): n is a, c, g, or t
  misc_feature (34)..(34): n is a, c, g, or t
  misc_feature (45)..(45): n is a, c, g, or t
  misc_feature (57)..(57): n is a, c, g, or t
  misc_feature (70)..(70): n is a, c, g, or t
  misc_feature (73)..(73): n is a, c, g, or t
  misc_feature (77)..(77): n is a, c, g, or t
  misc_feature (92)..(92): n is a, c, g, or t
  misc_feature (100)..(100): n is a, c, g, or t
  misc_feature (110)..(110): n is a, c, g, or t
  misc_feature (155)..(155): n is a, c, g, or t
  misc_feature (165)..(165): n is a, c, g, or t
  misc_feature (169)..(169): n is a, c, g, or t
  misc_feature (173)..(173): n is a, c, g, or t
  misc_feature (187)..(187): n is a, c, g, or t
  misc_feature (191)..(191): n is a, c, g, or t
  misc_feature (213)..(213): n is a, c, g, or t
  misc_feature (237)..(237): n is a, c, g, or t
  misc_feature (252)..(252): n is a, c, g, or t
  misc_feature (254)..(254): n is a, c, g, or t
  misc_feature (258)..(258): n is a, c, g, or t
  misc_feature (261)..(261): n is a, c, g, or t
  misc_feature (325)..(325): n is a, c, g, or t
  misc_feature (332)..(332): n is a, c, g, or t
  misc_feature (337)..(337): n is a, c, g, or t
  misc_feature (359)..(359): n is a, c, g, or t
  misc_feature (375)..(375): n is a, c, g, or t
  misc_feature (408)..(408): n is a, c, g, or t
  misc_feature (450)..(450): n is a, c, g, or t
  misc_feature (452)..(452): n is a, c, g, or t
  misc_feature (578)..(578): n is a, c, g, or t
  misc_feature (624)..(624): n is a, c, g, or t
  misc_feature (626)..(626): n is a, c, g, or t
  misc_feature (633)..(633): n is a, c, g, or t
  misc_feature (636)..(636): n is a, c, g, or t
  misc_feature (641)..(641): n is a, c, g, or t
  misc_feature (649)..(649): n is a, c, g, or t
  misc_feature (662)..(662): n is a, c, g, or t
  misc_feature (680)..(680): n is a, c, g, or t
  misc_feature (740)..(740): n is a, c, g, or t
tgaggggggaggggggggngatctttattgnggnggggggggggnggggggttcccncgtgagccctggngcnaaanagagccggccgtccnccaggggngagcgggggnggcttctgcggttctggagtcccggcgatggcgccagtcccccancaaacccccnccanagcngcccccggatgcanaaanaaggagggggcttgggagtaanttgaggctgtgacggggtcgcccncggtgtgggcaagtnantccnctntggccaaaaggtcaaattcgtccctgaggctgagtcgaacacaaacccgtggccctcaaaaaantaaacanaaaancacaaaaatggcgcaaccaaanagcattggcttcaaanaggcaggacacggggcccctcgtgtgacctgtnactttccacaaagggcaaggacctggcactgactccggccantngagaaggctgttcgcccacccggccataactcaaacccaaaggctgaaacacaaacggggccgcaggcagcagcccccgggctctcgtgaaaacttcagaaggaaaaaaacctaaggaacagaatnctgaatggagaaaacccaacttttttaaaaaagaaggaagtgtatnangggaatntanggggngggttttntttaagaggtganaacttggaatcttgcaanccctgggagtggactccggcggcggcgcaaagtgggagcagggagcgtcctcgggccacntgcct

SEQ ID NO: 515943 - DNA, 160 bp, Homo sapiens
ggagaagtttgatatcacagaggagatcatgtctggggcccgcactgcctccatcccacccctcgccagacggaggcggctcgagcctcaagcgaatggggagacgccccaggttgctgccatcgtccggccagactaccgttcacattcatcaatcatt

SEQ ID NO: 515944 - DNA, 379 bp, Homo sapiens
  misc_feature (162)..(162): n is a, c, g, or t
  misc_feature (192)..(192): n is a, c, g, or t
aaccggctgctctcgaggatccctcgaaagaggaagggtggtccggagtattgggacggggagacacggaaatgtgaaggcccactcacagactcaccgagtggacctggggaccctgcgctggtactacaaacaagaagcgaggcccggttctcacaccgntccagatggatgtactggctgcgacgtagnggtcggactaggcgcttcctcctgcgggtaccaccagtacgccgtacgacggctagtgattacatctgccctgacaagaggacctgcgctctatggacccgcggtcggactattggcagcttcagaacctaccaaggcacaaagtagggaaggcggccccatgttggcggacgcagtttgagaagcc

SEQ ID NO: 515945 - DNA, 481 bp, Homo sapiens
  misc_feature (7)..(7): n is a, c, g, or t
  misc_feature (13)..(13): n is a, c, g, or t
  misc_feature (110)..(110): n is a, c, g, or t
tttcctnctcgtnccctgcctcaatccggaaactcctgtcagatgttgggcccttttgggatagattctgtgaagtcccttcctttctaccctttgcttggtaagataanactttccttgaatcccaaacacacacactctctctgctttttaaaaaattagttttggggctggatgtagtggcttacacctgtagtccccaggcactttgggaggccgaggcaggcagatcgcttgaggtcaggagttccagaccagcctggccaacgtggtgaaaccctgtctctactaaaaatacaaaaagtagctgaatgtggtggtgtgcacctgtagtcccggctgctcaggaggctgaggcaggagactggcttgaacccgggtggcagaggttgcagtgagccgaaatcacaccactgtactccagcctggtgacagagccagactctgttttaaaataaataaaaataaaaaattggttttg

SEQ ID NO: 515946 - DNA, 339 bp, Homo sapiens
gagttcttcctgtccaatcaatttttcgttccaacttattaataccgggcaagatccctctttctcatgatttcagcaagacacttgtgttcacaagcggggtactgacctcacctgtgggcggctccacgcacttggcgggtataataggcttcgttgccctgggtcacagcccgtgccaggcatgtgggccgccacaacttcagcattttacccggcacgcagcacttggcccggcccaacactacacgtttggaggctgcagccccaacacccgccccagggcccgggcgggccttctccagaacatggcgacataccgccgtctaacactgagga

SEQ ID NO: 515947 - DNA, 579 bp, Homo sapiens
  misc_feature (65)..(65): n is a, c, g, or t
  misc_feature (327)..(327): n is a, c, g, or t
  misc_feature (333)..(333): n is a, c, g, or t
caggggacatgtcaacgtgcaaaactcacgtttttgctaccagaagaattccctggtcacccagnccggcagttgcccaagatctgatacaaggtcggggtgtctatgcaaaggaagctcagttttcttttattatgagctgcttgtttgagtggtgtaaaactatgtgctcttcaatatagtgctaaagaagccagctaattttatcaaagcagcagccaaagaagtcaggccaaatcttcaggacttgtgaaatgaactgaaagagcttgaagcagatggaattttaatagttacactatatatgctcttagtaggtttttttcntgtagnggaaacataactgttagcatatttcttaggatgttttttcttgtctttttaaattcttatttcactcatcctttactctcccctcaagtattctacactttaatttcctgaaataaatttaaggaaaagggaaatagtaaagaagtaggaatgggtgcagcacaccagcatggcacatgaatacacatgtaactaacctgcacattgtgcacatgtaccctaaaacttaaagttttattattatta

SEQ ID NO: 515948 - DNA, 977 bp, Homo sapiens
agcctaaggcctggtccacgattccataatgtaccacaacagatagtcaagaagcggccactggaccttcatccagcgaggagcagcatggcaagactgcgggctgacgccaacacgaaaatacagatgcaaagccagtgagacaacgggaaggttctatccgaactgcatccagatctttcattgagcctcatgaacgacacactgacacatctcgcaaaaatacctatgacgacaccacggttaattcggaactactagtaacgagctgtacataacgaccacgacaactcgcaccagactctggatatgtggaggtacggcctttgtcatgtattttacacaaaccgataaaaagagtcgttacaaaatacacttccacatacacgtgcgacaagtaatacatcccacaagtgaactaaattaacattggcgtcaaacattggattggacagtctacatacagaggcacctggaaaaaaacggtaagcattgacaatcacaaacaggttagtcaatacgttccgtaccagctgcatgttaggagacaaaccaacaatacccgtgtgacaaagagaatcacgttccttgtggaggagcaagaagaacaaacaagacgctaagatacggagaccacaggacgttcaacatggtgaaacctataaatggaaaaccctaacgcatagtccgttacttaccaccggacccataacagtaataaacagctggtcgccaagcacgtctactatggttcacaacaaaagtacaaatatagacaagaacacaaatagaggaagagaagaacacgacccatgacaaatacgagaccgattaaaaagaaaaccccagccgagaatacacgcaaataaacataggaaggaaagagtccaaagaaaggacataagaagaagaggaaaaaagaaaacgcgcccgaagaaagacacaaagacggacacagtaaaaagggacagaaaaaa

SEQ ID NO: 515949 - DNA, 224 bp, Homo sapiens
  misc_feature (68)..(68): n is a, c, g, or t
tctctggtctcccagagacctgccaggggtagtgccccactcggagggaaggtggggaggtgacccanacctgtgtactatttacagaagcctttattggggagaggtcagagttcatggatcacagggaggtgcaaataaagagttctgaggatgctgctgcggcggggacttgtggaggaggctgcatccctgccaggttgtacggaagccgcttttgtgtt

SEQ ID NO: 515950 - DNA, 797 bp, Homo sapiens
gggggccggatccccggatggcctggtctctggacctggagtactaccactcgcacgatgccaaggttcaggtgctcccaaagagcgccctgcggagcgtctcacccgctcccccatcctagtggccaccagctcgacagacagggtctggggagtcttcaggagcctcgggggagcaaggaccatctgtgcagcacgggatgcaagccttcggtccccaaaggctgcatgcccctggcggccgcctccagttcgtcctcttccagcggtgtcttgggtgaccggtgctcatgtgagctatgatcggttgcgttcaggaacttaatgccactcgaggtcggaacgatcgacagatgagaatcgattgtcgtcagttccctaaggtctgatgccaacggtggcttcgaggagaggcatgaagggaggaccagtcgtgagaggatacacgaaaaggagtccatgactctcctgtccagcctcctgtctcctggcctcccggaaggcttcgtgcgtctcagaccgctctggaggctggatagactgatgagtctcactctctgacttccgcgttcaaaatcgatcttccagccctcgtgggccagtctcagccaccggtgtgtgagctccacgaaatgagggctcgaccatcagccacacaggagctcgactggcaagggcagctagacaccatgctgtgggctgctgctagtgccgatctcagccgcggggtgttcccaccaggcaaaggcctctgtggctctgcaataagctattgtgtgcacctggtgacggtctgg

SEQ ID NO: 515951 - DNA, 987 bp, Homo sapiens
  misc_feature (102)..(102): n is a, c, g, or t
  misc_feature (130)..(130): n is a, c, g, or t
  misc_feature (135)..(136): n is a, c, g, or t
  misc_feature (146)..(146): n is a, c, g, or t
  misc_feature (158)..(159): n is a, c, g, or t
  misc_feature (252)..(252): n is a, c, g, or t
  misc_feature (258)..(258): n is a, c, g, or t
  misc_feature (269)..(269): n is a, c, g, or t
  misc_feature (295)..(296): n is a, c, g, or t
  misc_feature (310)..(311): n is a, c, g, or t
  misc_feature (346)..(346): n is a, c, g, or t
  misc_feature (349)..(350): n is a, c, g, or t
  misc_feature (363)..(363): n is a, c, g, or t
  misc_feature (406)..(406): n is a, c, g, or t
  misc_feature (416)..(417): n is a, c, g, or t
  misc_feature (429)..(429): n is a, c, g, or t
  misc_feature (441)..(441): n is a, c, g, or t
  misc_feature (443)..(443): n is a, c, g, or t
  misc_feature (449)..(449): n is a, c, g, or t
  misc_feature (454)..(454): n is a, c, g, or t
  misc_feature (464)..(465): n is a, c, g, or t
  misc_feature (476)..(478): n is a, c, g, or t
  misc_feature (510)..(510): n is a, c, g, or t
  misc_feature (518)..(518): n is a, c, g, or t
  misc_feature (522)..(522): n is a, c, g, or t
  misc_feature (533)..(533): n is a, c, g, or t
  misc_feature (539)..(539): n is a, c, g, or t
  misc_feature (544)..(544): n is a, c, g, or t
  misc_feature (553)..(553): n is a, c, g, or t
gcgggctggaacggtgtctccttcacttcgccctccagctgctgcagctgcagcccgaccgcgagcgtgccaagcggcttcagcagctagcggagcggtggnggcggccccctcaggacaccaccagatnccccnncttcccgcgngctcgccatggnngaccacggacagacttgcgcgcgtccaatgtgtattcctccatcatatgctgaccttggcaaagctgccagagatattttcaacaaaggattnggtttngggtcggtaanactggatgtgaaaacaaagtcttgcnngtggcgtggaattnncaacgtccggttcatctaatacagacactggtcangtnnctgggcacttggngaccaaatacaagtggtgtgagtatggtctgactttcacaganacacgtgganncactgataacantctgggaacagnanatcgcnattgnagaccagatnngtcaacggctnnnacacctgacactcgatactaccttctcaccanacacaggnccanacacgtggtanaatcangtctncttacaagnggggaagtgggtattaccacactttgagtaagtgccctggttccgcacatccgcatcactgcctgtggaaccctggcgaagtcgccaatgagacacacagccagggccacatcagcgatgaatgcacgggcctggccttagctgtgcctaccagcaactgagccacaggacccgcaggccgacaacccacaaagcgatgcacacaaggcgaaattaaccgtctacggacagccgtcacgacctaacccggtgaaacatgcgtggcccgatccccaaccgctagccacccccccaagtgttcacccgggcctggataacagcaaccttagggagctgaatacacgtgtagatcagccaacaagcttaggcgaacagacaccctgggaccaactctcggaaccaccccttggactgtgcgctcactcactggctcc

SEQ ID NO: 515952 - DNA, 869 bp, Homo sapiens
ttcgtgagtgatggcgtcccgggttgcttgccggtgtctggccgccgtcgggtagagcccggggcagagcatgaggtgctcattcagcagctgttggcccggaaggattgtgtggtcccgttcctgatcccggcctaaggtccctgtcttgcagctggatagcgggcaacataccatctttctccgactagttgcgaatcctgcctggatatttatgttcctggtttagtctaggctgtggagcaatgaatgaccttcgacgtaacccaggtggcatggaaatgcgcaaagcgacgagagcttgcagcccagctatgtcatgctggcccatgttacttaattgcagtggtccaaggcaagaaggcgggacaggatgtgctttggttcagtgcgggaagagcccttgattcactactggacgcaggagcttgagtctgtcagaaaatgtccatttccttggctggggagacatgaatctctagccgacatagtttggtggggagcccgtaatacccaattactgcaaagagtcccgccataccttgcctgagcgagctgaggtgccctgtgacagcatggttccagacacttgagtacctcaggaacccaatgtcaggcgagctgcatgcaaactgtagcgtgaaaacagacaacggtgtcctggcgtctccggggcgttaccgtccaaaaagcaagtgcgcagcccaagccgcgcatgaagtgaagggctgtcaaacgaatgagcctgaagaggaggacgctggtaaccctatttgaaggaagagattgcatagggtgtaatggtttggaaaaaggccaaaaggttgcccccctggagcccaaaaatcagttgcgaggcgaaaaaattt

SEQ ID NO: 515953 - DNA, 112 bp, Homo sapiens
cccgaccgctacgggggaagagttcattgacaaaagtgtcctaccaagactggtttacaccaagcagagaggacatgtcacgtgaattttgaaagggaacccgcgcagccag

SEQ ID NO: 515954 - DNA, 227 bp, Homo sapiens
cggcacgaggcagactgtcattcatgttgacctgatgaaattaacaccctccttgacctccgtaagggtaatgtaagtagaaatttgactgaagctcctacttcctttcacagcctttcgttgtgtgggcttgtcactcttcagtacatttctagtggggaagagcagggcgacccctgtgctgggtttctccttgaatgtgaagcaaaataaatttatgttgtgga

SEQ ID NO: 515955 - DNA, 880 bp, Homo sapiens
  misc_feature (517)..(517): n is a, c, g, or t
atggcagaatgggtaaaaatccaccaaccaagtatctgctgtcttcaagagactcacctaacatgtaaggactcccataaacttaaagtggtggaaaaagatattccatgcaaatggaaaccaaaagtatgcagagtcgttattcttatatcacaaaacaaatctcaataaatttaagaaaataaaaattacatcaagtactttctcagaccacaatgaaataaaatttcaaattaactccaaaggtaccctcaaaactatacaaatacatggaaattaaataatgtgctcctgaatgatctttgggtcaacaatacagtcaagatggaaattaaaacattctttgaactgagcaataatagtgacctatcaaaacctctgagatacagcaaaagtggcgctaagaggaaagttcatagccttaaatgcctacatcaaaaagtctgaaagagcacaaacagacaatttaaggtcacacctcaaggaacttagagaaacaagaacaaacaaaaccaanacaagagaagaaaagaaataccaagatcagagcagaattaaatgaaactgaaatgaacaaaaaaataccaaaagatagatgaaaaaaaagctggttcttttaaaagataaacaaattgataggccactagtggaaatttaaccaagaaactaagagagaaaaaaccaaaattaagctccaatggggaaactggactttgggaaacaccaaaaccaggtatggtacctggttcttacaaattggcagattaaaccaatggacacgaatttgagaacccagaaacaaaggtcaaacactttcaatcagctgatcctcaaaaaacaaaaaacttaagtaggggcaaggccctttttccccaatggt

SEQ ID NO: 515956 - DNA, 261 bp, Homo sapiens
gacatacatgagggatgctttaatactggaagacaatgctgacttagcttataacacagtcccgagagacggtgtacaaaacggtatttagaaagatcatttttaaaaaaagcaacaggaccggtttcttctttagttacaatccatgaggctctctagggcctctccgtgtggccagcacagcaaccctgctaggagcacaaacggctggcctgagatctggcccagctgccttgcccactggtctgcaaggaacccacg

SEQ ID NO: 515957 - DNA, 360 bp, Homo sapiens
ggatgctttaaaacattcttgcttaccttcctagatcagtggtcagttcctagttttaagttacttacttgaagccctccgaagtggcaaagactttatctgctaaatctgccttggcacacatgtgctcactgatgccatggcacggcttccggacatgcacttagatctttgtgcctaggggcaggtcatggagctaaacaattaaagaactcttcattcatggataggcaccatcataggcatctctggtatttagggtcagtggtattaaattgacaattctaatttatttcagtcagtatatgtagcaagtcagtatgtaagtaagtagtttatagtactccatccagtaggtaa

SEQ ID NO: 515958 - DNA, 1028 bp, Homo sapiens
cgtgtagctgagcaggctggggcttggttctatgtccctgtggctatgtttccagtgtgcgctgggtgtttccaagagcaacaagaaacgaataaatctctgatgaagagataccatttgacattttagagatggctgcatgcaaactcttaaaacatttgaatggagattcactcttgttgcccaggctggagtgcaatggacaatattcggctctccacaatctctgccatcccagattacaagctattctcctgcacatctgtctcccaaggagctgggattacaggctggtgtgcaatggtgcgacttctgcatcactacaccttccaccttccgggattcaagccataactcctgccctcagactccggagtaagatgggactacaggcatgtgccaccatgcccggtaattttagtattaaataggtagaggcagggattcagcaacaattggtacaggctggatctcgaaactcctggcctcaaagatgatctgcccgaacatctgacctcccaaagtgctgggaaatacaggacatgagcaaccgcaaccggctggattagttgacaaatttacttcctgtagattgtcaatataattactatatgttatctataagatgcgcacatatactcacatgggtatggaagtatatacacaagagaggatcagggcgcattagcagattatccacataggggagcaataatcttggttacgtacgatgacacaactattgcaagagataacgtgaaacgaccatgacacaggcgatatcaaaatgtcacaaggacgcctgcgtcgtaacatggcaaagtgggtcccactggcacggggtagagagaacatggacgcagcagaggcggaagaaaaaaggagaaaagccaacatacacaaaacgagcgaaacaaaaacacggaggacaaagaaggtaagaggtggcacaacagacaaacacgcaaaagaccgaacaacacaacaaacgacaaagaagacacacgacacgaagagcaagacacaag

SEQ ID NO: 515959 - DNA, 127 bp, Homo sapiens
gtcgactctatagatcccccatccaagactgaggaagctgaaaacactgataacctccttggtaccatcaaccatataacaactgaagatccccaagattactctcacctcatttacgatgaggaga

SEQ ID NO: 515960 - DNA, 1013 bp, Homo sapiens
accctgcaacttgtacgcaggaaattgcctgccaccctgaatggagccctgactaactaagggacgtgctgccatcaccaaattgttatgcaggaaacttacccttgttagtaaacgaaaatagagtatacttcaggatctgggcaacagagaatcgtcgtcgccacgttgacgacatatcagttacggaaattacgccactgtagtgacgaatgagagtacgtccaatatagtgacgcatagtgcaaccaggctccacacgacactagtgttgcgaggcaaatgcaggtaagcgaaactgtagttcattccccgacttcacgttagtgcaggttagaactataaaagctataagttcagggatcgactgagttcgacccaatctaggcatatactaggtattgaacaccgtatgtaaactcctgtcgaggcatattgcctaagaattctgagagacgagtgccgattgtcatgaaatcctgaaatccggtgatcggcagatcagatactcggtatagaattccaaaggattgttattacacatgaattgcctcagacatttttcagaggttcacgattggcacttaaatgaagctaaaggcttaagtgaagagacccgggtgaaccgtctgaatgccaatcgggttcacagacagaaatgctacgctaagacgacaacgagccagttgcggcaggaacatcgacaaacgggagtacaattgcggtgctgagctctgcgtgcaaaatcaaacccattggagaggtgtcagacgcatggggacttagctctgactccccaaggaggactcatatttatgttgcccccgtggctttaccagtgaatttgttaaacggagaactgaacctagggtcaaacaaggggcacggtctcgcatacttgcatggaatgggtcccgatgaacataacccatcaccgtatggttcccgcagcaatagtaaagcacataaaaacacccccaaacacacataaaacccaacacgcgtaaccaaat

SEQ ID NO: 515961 - DNA, 223 bp, Homo sapiens
  misc_feature (77)..(77): n is a, c, g, or t
aactgtgtgctttaggagtcattgaacaaaaaacatagctctgagacactaggtttctggggtagacaactacaaanctacagctgctgcgtgctgggatcgacatttgtggctataccaacctggtaccgtcgtctcgtttagctgtgcgcgataacactctgaggccaagtctctgattaaccacattccccggtaacacgttcaagaccacatttctttt

SEQ ID NO: 515962 - DNA, 118 bp, Homo sapiens
tattgtgcaggactcatgtgtgccagcagcactgtatcaacagcccttccatcagcatgggaggagtctaatgggaggagacagaaaaggtaactaaggcatgaaagcctttctcata

SEQ ID NO: 515963 - DNA, 1578 bp, Homo sapiens
tggcttaaggggcttttttttaaatggttccctcccactgtttggacaatttctatgaaaaaaatcaggttaaagaatctgggaattgggcctgggacgggagattcagagggcagctgggcgggggcgctggcaatagcccctggaggtccctccccccacctaggggacctaaggctatggagaaacaggagagcaccaaacagggggcacccagtacctctggagaacctaagtgtaaggtgtgtgcataagagtgtacaggcgcaagagaagaggagagagatgctcaggcgcaaagaagagagagagggagcgccggggcgccaccaggtgcgcgccattgggggagacgcgcccctctctagagtatgtgtgggagtgtagagggtatctctgtgtgtgtattctcccgcgcctctctactccccctcttaacactgctgggaggtcataacacctgctttgaggagagacacacatgcgtggagaaaagtgttagcgggtgtacacagccgcgccaagaaaatagtagaattgtgccgaccacgatgactcacttacacagcagtagtgtctctgtgccagagacgtgagagacaactcttgcgcgtaatcagagatgtagatgtgtgtaacgaatgagaaacctgctgtgcgcgcacacccatctttgtgttaacaacagagaagggggtgtatatagagaaaaagcgcgcgccacaatctgtgggggtgggggtaaaccccgtcttttattcacacccaccacgaggctaaaagaggtgttggtatcaacccccgcagttgtggggtccccccctcaccaacatgttgttgttgtttcgtgttactataaacacacaaaacgctgtttaataaaagcgccccgaaaacttcttctcaacccacaagaagctctgttggtgcagaaacagaaacagcgctaatgttttattagacaatttaaccatgcttctgcggtgacaacccctgtgggctgtccttacacttttaatgtggcgggcgaaaagatgacaacattttggtgggacgcctggtggcgaatcttttcacccagcacaactgacgaccagaagaggttatactccctgtggcgcactccctggagggggacaaccagaaggcccctctaaataacgagattgacacgcgggggaagaaacacactgtggccacaactttgttatctggctgcgcaagatgcggggcgcaagaaaaatcttccaggagaacccccccgttgtgtgttcaccctgcaggcagcaaatctcggcgcctccagagttgatggcccctctttatcgagtcgaaagaccagttggcgtctcaatataattttttgctagaccccccctgttagtgaagaaggctatccacgagagggcccacaaataaatgtgttgggggccggaatatataattcatcacccagcatgatagtggggagtctctctactaagggttgtcttctactgtcgttcttctttttataatgcccgacacacagatcggccaatagttgaaatattcaccggagggaagaacacccgctgt

SEQ ID NO: 515964 - DNA, 826 bp, Homo sapiens
ttattctagccacctctagcctagcccgtttactcaaacctctggatcagggggagcatccagactcaaacgtacgccctgcatcgtgcgcactgcggagtcagtcagtgccaagcaatctcatatgaagtcaccctagtccgtcattctactatcaacattactaagtaacgtggctcctttgagatcctctccgacccttatctagcatatcacaacgaatcgagcctctgattacgtcctgcgcatcatggacgcctatgggcataactatgatttatctgccacatctagcagagaccaatccgaagcccccttcgaccttgccgaaggggagtcccgaatcgttagtcctgcaggcttcagaatcagtcggaaatacagccgcgaggccccattcagcccataggttcgttcagtagccgaactacatcagaacgagttagttagtaccataaagcgagccctcaccactagcaactcttccgtaggaagcaacatattgacgcactcgtcccgcttgaactcttacacagatcattattttgtcactcaagactcctacttctaacctccctgttcttatgaattcgaacagcatagccccgagttccgctacgaccaactcgtacacctcctatggaaacaagttcctaccactcacctagctgtccttctatgatatgtctccatacccattgaatctccagcattcccctcaggctgaaaaaaaaaataaacccgggcactaggcgggccgggaaaggggaggatcggcagggaagggttcctgccagtttggaacggaacgcggcccaaggcgaaa

SEQ ID NO: 515965 - DNA, 1239 bp, Homo sapiens
tggctggtaaataacttaaagggttggatggggggagtcacaagggaggtatgttggccccaagggttcttcagtgccatcctcaaagcgggttagtgcagggaggtagggcagagtgggttccagtttttcttccaggaagggttaagggagtgtcccagcgagccccaggaatgagtccctcggttaccagtggcaacccacaatttataaaaggggctttctgtgcccaccccttgtaagccttaccccgaggtgtccaggcagaaggaaacgaggaaggctcagaactgtggccaaactgtggcatatatataacaagaggcgccggatatctccagagaagcccaaactgtggcgcatgtgtggctcattttctctctcttctctgtggcgcacagattcctatatgtgcccatgcacaccttatttctctctctctctccaacatctgagggtgagatctgtgcgatcgcccaattgtgcgcaagagggtgttgcgcggcctatatgagcgtgggcatagattgggctccttcgggggtcccccgggggagagagatttcgcggttgagaaggtgtgtgagagacaggggtaggcgccacacccccgtgatacgcgaagaacgcgccgctatatcgcgggcagatgttgagagcacccctgaggggagaggggagaccaagtggcccatctctccagacggggagcaaacaaagaaggggtctccaagggagaggtccaatcgcccacccaagtggtggcgccactggtgggggtgagaggaggtgctccccagagcttcttgggggagatgctttgggggtgggggcccacatctctttggattggcgcccaatgctggctagaacacccaacggggggtgcatataacggcggcaagtaggtgttcgctaaaggtggcctgtgggggcccttgtgggttcaaacctccactcttttgcggccccacggccctacgaggggtctcgcgggggggggatgttgtatctcttccccagaaggcccccgtttggcggcggcccccctctcacccggcggcccgttgtgggatatcccgagccgcaagtgcgctcccgtggctaaaccccctgcttcttcggtctgtaaagctggtctcacttccccaagcgtgggggctcttcccacatattgatcgccctatgttcttactagggtggcgcctcaccccaggtggggacccccccttgtgtttt

SEQ ID NO: 515966 - DNA, 112 bp, Homo sapiens
agtcagctgttcagaaaggatgtctatatcctgttattttccttagttgcaggtagaatttgtttataaatgtcaagtggcaaaatagaagactttaaaataaagctattaa

SEQ ID NO: 515967 - DNA, 289 bp, Homo sapiens
tcaaacagatgagaatgtcagagatgatctccagttttaagtgaagcaattaggcaaatttttattctcttcatatatagaatattatctcaagtttaaatctccagagataaattggatggtgatacagccatacaacttaaagttatcaatgtgatgtatcacatctcatcttgctattaacctaacctttactttctttttcttgtatatttcactgctatcaaacaagcaggtgtcgagcaggaatggatgcaggaagtagtacctcacagtgctaacagtatgt

SEQ ID NO: 515968 - DNA, 530 bp, Homo sapiens
tctcctatagtctgtcattttcaataaatgcatccagtatatgtaaacagatattgttgcggatacctgtcacgttcaacctaatcttaatagaccactcctttacctctggccacattcatcagcacaaatgcctgcttttctcctgctgctcaagtctgccttctgaaatgaggttttgtcctctagagcttctctataatgttagcttatttcaaagagtagctgctaatgataaggaagtctaccctccacctcatatcaatactttgtatgagtaggctggttatcccacatgtcccaaaggtcataaaggaggaaaaagaaaaaaagaaaaaattattcaaaacaattccaaaccccatgatgacttgggggagagacttcacttgactttttctgtttcttctctcattgtcagctgcagttttttttcagcaggatcaggtccaatttgacttgagttaccccttcatcccatatctagcaccttatttgtcccctgattgttagcagcaatcagcactttg

SEQ ID NO: 515969 - DNA, 464 bp, Homo sapiens
tggcgaattcggcacgaggagaggaagagaaaaggaagaattcatttttaatttaggtttctttttttcttcttcatttcggagctctaaggtgtatgcagttgtgaccccatgtgtggggaagtgtagcaaggacggctggtggagggggaaggaggctgcgacgtgtccgcctgatgctttacgaaatgtctactgaggaccctggtacttaagaatacgggcggtgagagagccattgcctgttcgggagacacaactgagcgaaaccgggtgactttgcaaagcaaactcaaaacccagtttacgatgtggcacctgccccatgattcctgccctcggctctgccccagacccttattccaaatcctgagagtgaccatgacagccgctcctgaggcccattggtcttctttccaacaagaaacgaaggctgtgatgtcgctgtctggatcatgccctgc

SEQ ID NO: 515970 - DNA, 113 bp, Homo sapiens
agttcgacggagactctcacattccatgggatagtctctctgtgggatcacaggatgttgctccggatcatacactaggcgagctaggaggtgcttagatacccgcctgttgt

SEQ ID NO: 515971 - DNA, 110 bp, Homo sapiens
cgaatgacggcgggcaaacgctgataccggaggtagggcgatggtggcggcagcacctcgtgactgagcgcttggggcggatcacggtgtgacttcctctcgccattaaa

SEQ ID NO: 515972 - DNA, 287 bp, Homo sapiens
attatatgtctaaggacattatcgataaagtgaaaacacaaccacagaatgggagaaaatgttggcaaaccatgtatctgataaggggtctagaatccagaatatatacaggaatttaaacagatttacaagaaaaaagctaacaaccccatcaaaaagtgggcaaaggatatgaacagacacttcacaaaagaagacatttatgcagccaacagacacatgaaaaaatgctcaccatcactggccatcagagaaatgcaaatcaaaactacagtgagataccatct

SEQ ID NO: 515973 - DNA, 216 bp, Homo sapiens
taaactctgcgcggggtattcgatgttgaagcctgagactagttcggactccccttctgtacggtcgaagggggtccggttggtctctgcgagtgttttttataaatcatattatcgccaccggtcttgatggcaggagtaatcagaggtgttcttgagttgtgatatgggcggagaggttaaaggagccacttattatttatgttgactgtataa

SEQ ID NO: 515974 - DNA, 404 bp, Homo sapiens
  misc_feature (38)..(40): n is a, c, g, or t
  misc_feature (60)..(60): n is a, c, g, or t
  misc_feature (91)..(91): n is a, c, g, or t
  misc_feature (93)..(93): n is a, c, g, or t
  misc_feature (164)..(165): n is a, c, g, or t
  misc_feature (182)..(182): n is a, c, g, or t
  misc_feature (184)..(185): n is a, c, g, or t
  misc_feature (224)..(225): n is a, c, g, or t
  misc_feature (244)..(246): n is a, c, g, or t
  misc_feature (256)..(256): n is a, c, g, or t
  misc_feature (272)..(272): n is a, c, g, or t
  misc_feature (275)..(275): n is a, c, g, or t
  misc_feature (282)..(282): n is a, c, g, or t
  misc_feature (289)..(289): n is a, c, g, or t
  misc_feature (314)..(314): n is a, c, g, or t
  misc_feature (319)..(319): n is a, c, g, or t
  misc_feature (338)..(338): n is a, c, g, or t
  misc_feature (373)..(373): n is a, c, g, or t
gttttttcaaatgtatatacacgtataacataaaactnnntgtaatttcaaatgtctttntttcagttttttggatgaattattatatttngntttagttacatttaaaagcttgaaaattacctttctaacaatcatttgaatgtcattcattgtcacatganntcaggtatttacgtttntnnctaatgctaaaatatccaacattgtaattgccctatttnnccatttttataagtataannnaatgaatttnaacactggtatttaantantacaaantattatncaaattcataacagcacagtgaagnttctnttgaagactatgtactggnagcatttagaacttaccaatatatactgggataantcgtttcaataaagtttatcaaatattctgt

SEQ ID NO: 515975 - DNA, 383 bp, Homo sapiens
ccaaggcaggaggatcacttgaagcttggagtttgagaccagccagggcagcatagtgagaccctatctctacaaaaaatacaaaaaataagccaggcatggtggcttacacctgtaatcccagctgctcaggaggctgaggcaggagaatcacttaagcccaggagttcaagaccaccctgggcaacacagtgagaccccatctctacaaaaattattaagaatcagccaggagtggtggcatgagcctgtagtcccggcttcttgagagattgaggtgagaggatcaatggagcctggagttcgaggcttcagtgagccatgattgtaactctgcactgcaccttgggagacagagtgaagtgagaccctgtctcttaaaa

SEQ ID NO: 515976 - DNA, 308 bp, Homo sapiens
atgtcgactgtatatgaagcatgcccgaacgcaccgactggctcatgtactgaagtccatgacccttcattcgggctgaggccaaggcgacaccttgtgtccttccgggcctgggcctgcgtctgcttcttccagctaccccttcagatttgaagaagcacccgcagcatcctgccaggcccagctacgcatgtgcccacgggccatgccactgactgtgtacctgcagctcaggtgctgatgatgtggctctggacccaagctccgatatctaccctatgacaaccacagagtggggcgctgtgccc

SEQ ID NO: 515977 - DNA, 1596 bp, Homo sapiens
  misc_feature (1247)..(1247): n is a, c, g, or t
cccattgtggatttttttaatggggcgcccttttttggggggtgtgttgggtggaaaaagtgtttgcacacaaggggctcgtcctgtggcctattttgatcgccgctgtgtgttgctcccctcggagaatatttgttggtaggaaatgtgtactgctcccagtcgtgtttatcacaccaacttggtctttcactacgtgggggcgcccaccctcccctgtcgtaagaagagccgtctgttgtgttcctacacctgtggggtgtgtttgattggtcgcccccccttctggggggccattataaatctttgtggggggagaagaggaagtggttgccccatctccttttggatgaggaagaggctgctttgtttgctagcgtggtagaaacccacccccgccatgctggtggtgtggcaccgcctctgtggatccccccacaccgggggggggcatccaccacccccccccgtttattgtgatgccctcctccccccttcttatagtgtcttgggggtttgtcgtgtggccccccgcctcgtcctctcttttgtctgctggccccgctgcttttcttggtgggcccaccagcgttgtatggcgccaccgcttgtgccccctgtggagaccccttcttcttatccccacccccctgggcgtttggtgagttctcacggtctgttctccctcttctcagagtcccacagtggggagaaattcttcgggcgggatcttgtgtgacacacaccccctcttctcagagagttctctctgtgtctcatatgtgtccactctgtccccccagagagacgtctcgctttgcacagagggcgcacacacccctctctggcccctctgttgtgtgtgtgtcccacagtggcccacaggggtcttctctctcacaccccacaggtgtgcccgcgcacaccactctctgctggggttgtctctttctgtgtgtccacagtctctcccctctgtggcacccacacactgtgtgtctctgtgtcacactcgggagacttctctctctctctgtgggggagactttccccctctgtcctcgtgctctcacagagaggcccctctctgacacaggggtcttctgtgtgtgtcacaccgtctgcctgctgtgtctcacagtgtgtgtcacacacacactgttcccctccgcacacagtctgtgtataacacctgtggcgctgtattatagtgttctccgctgtagagaggacacactgtgtgtgtntgtgggcacacccctgtgcacacactctctgtctctcagaggtgttgccacacacagacctggtgtttgtttgttctctccagaccccacacgagtggttcttccccccacactggggtacgccacgaccaggcaccagcaccacgatgaatccaccagaaatcttgcccctgacgcacagaggctgcctgtcccctgggacatctcctagacccatgggtccagacctgtccccaacaccggttttccccagaaaatgtaaaagtaaatccctttttatactgaaaatgttactgtaaaatcccttttatgagccatctccccttaataaaccagaccttgattcccc

SEQ ID NO: 515978 - DNA, 145 bp, Homo sapiens
gcctggactgctcagcgattctcttggactgggaagcaaggttgtagtgagctgagatcttgccctggctccagcctgggctacagagccaaatttcatctcgaaataaagaaaaaaaaaaaagagaaagaaaatgctttcagat

SEQ ID NO: 515979 - DNA, 425 bp, Homo sapiens
tctcatggctcacatacccaaatgaaactgtcacttgattacacatccaatgcatctctacattaaacctaaaacatcaacaaatcaccttcacctctatcatctgatcattccttcttgcaactcgctgtactcataagctaaagagcctaacccaccactctccattatccatacagtactgaccacatcatatcaactcctcttctgcccattcctatacactggagttccttggaggcagcatcagcccctttttctcctttactgaccctccataaatattttaatacaagctaatgtctttattaccaaatacctgcaacttccatatatttatcacataacagatttctctactaagctacaaacctacatttgggttaccattatacaaggctcatccgcaatgagatgttggaagg

SEQ ID NO: 515980 - DNA, 219 bp, Homo sapiens
aggcgattgtgcgtttcatagtccatcatagactcctcacttgtgatatatcagctcagtagtctgactttaatctagttctttcaatacactgttcccattataaacttcgaagggcctcgtgcctctgctacagcccttgtaggagccatggatccttgtttggtctaactgaatactgtttggggagtgtgccccatctcatcatttcgaagatag

SEQ ID NO: 515981 - DNA, 137 bp, Homo sapiens
ctcaggtacttcagagagtgagacccagcgccttgtctcgcacgcagtaggcttacatccccgccatggcgggagctgatccagaagaagctacagtgtagaatgtggagagatatcaacatgctacagcaaggact

SEQ ID NO: 515982 - DNA, 255 bp, Homo sapiens
tccccgtaactgtggtgttacctgtgcttgtgtggacaacccaaaagcagtcatcagagacgggttggaggtaggatggaaaacaaatgaaaatcaaatatgcaaatttgttgtgtttagaataatgaaactgaaagagaaaccagattcctcacacacaacccccaccccccagtggattttgtttaacaagccgtcgtcaagaaacatgaaggagtcctccaataaagtgacaacggtaacaccaccagtcgc

SEQ ID NO: 515983 - DNA, 157 bp, Homo sapiens
cttaggaacaaaaaacttatttggccaaatgtttcttttttatgttttggggggtggttttgttttttgaccttttttgtattgtgaacaggccctgaagctgatgttattttaagattacagaatggaaaaaaaaataaactattttaatgtttga

SEQ ID NO: 515984 - DNA, 1182 bp, Homo sapiens
gctgcgtcgctccgggagctgcctgacggacggagcgcccccgccccacgcccggccgcccgaccgccgccgccatgcgccttctccaacagccacagagcgactgaagctgcgcttcccgggcgagtgacgagattccccgacctgagcgcccacaacaaccacatcgccaaggctgcgtgacccccgcagcctgtacccgcgacgctgcgcgcccagagcacgccgcagcggccttcacgcctgcgccccgacgctccatcccaccacccggcccgtggaccccccccgcggccacccccgccaccctccaccgaacccgccggccccccgcccgctcgcccggcgccgcccccacgccacgcacccctaccgcaacacctgctccccaacgccactcctccccctcacgccaccacccaccccccacccccgcggacacccgcgcccacgcgccgcgcactacaaaaagacccccccgccgccactagcacgccaccacagcacaccccacgccgcttaaaaccacccgcgggcacgcccacccccttgcgccaaccgggccccgcgaccgcaacgacacccctcgtgcactaccccccgacaacacaacagcatccgcccacgcccgccaccccgccccgccccgccttggccccccccacacccgccgccccccgcccaaagccgacaccacccgcccgacgcgactcctcccacggcgccccaccaccccccaccccccgggccacagcccccgcccacaccccccaccccgcgcagcaggcacacgcaccggcccccagcccggtaccccccactctcagcgagaccccacaaggcgcctccccacgccccggccagccacgggcgccgcacacgcccccccccgacttcgctctcccacacaagaccaccccatagaagaaaaaccagccgccacgaaaacaacccatcacgcgacgcacgcaggggccccccgcccgaactcccacccctaacacgctaccggccccgccttcccaccccgccacacgccccccccccccgcaacaccccgcgcgcaaagccggcccccgggcccccggcccgccagaccgccaacccgcccccgcaccacgcccatcccgaacttccccccgacaccccccgcccaagccaccaccccgcactgtccgcccc

SEQ ID NO: 515985 - DNA, 348 bp, Homo sapiens
  misc_feature (159)..(159): n is a, c, g, or t
gaaatggcgtccacggattacagtacctatagccaagctgcagcccaaggggcttaccagtgcttacaccgcccagcccactcagggatattcacagaccacccaggcatatgggcaacaaggctatggaacctatggacagcccactgatgtcagctnttaccaggttcagcccactccaccctatggcagacccctatgcacttttatggacgctcccactggtatatactccactgccccaggataaagcagcctgtcagggaatgcactggtcttatatacacactgctcagtacacaccaggctcatcagctagttgatttggatagctcttatcagccattg

SEQ ID NO: 515986 - DNA, 1481 bp, Homo sapiens
  misc_feature (710)..(710): n is a, c, g, or t
  misc_feature (1165)..(1165): n is a, c, g, or t
ggttcgggtgtcctgcttcaacagtgctgggacggaagccggcgctcgttcccgagcccggactggccgcccatagccagccctccgatcacctcttcagccggtcggctcggatggtcccaatgggtcccgcgcctgccgcttccgaggtcgccgtcgcatgtcagtcggccgtcgacggacggccttttcacttagctctgccgctcactagagcgatgcagcagttgcaccttcgtctggtgacgccactactgtacgcactcagagacggcaagcacggccagcgcgatcgatgacgcgcgagaaatcatatcgctgggtacgctccgtaacccgtactcctcccataacagcttctattacctcttggtacgcgaatggctgaatttaagtctgaacttctgtgaaaccctgacctggattgggacttgctttggagttacttggagactggaatcgtattgtgacccgataagggttcaagcgtaggatacctttgcaatcgcagacaggttgcattcaacatgcacggcggacagaaggggggcgaagaacaaagtggcctttggggcgtggacattacggccttgaacttgcaacacgggcgttgggcccaaaggaacacggcccgaaaaccgggagaggtcgtgtggggacactcggaatacatttcgtactaccgcgtattcccagtggcgactgtgaanttcgagccggaaagaccaattctccgatgtgacccgcttcggcatacgaagtggggcatccgttggagagacccgcacctgccgaagcggagcccttcgtacatttgtgagcgaaaagtcgatggcaccattcgtagagcgacattactaggctaactatttgttcggcggacacaggcccctttgcacccttcgctttaggacgcctatcccactaagttccgaggggaaacatctatggtcgcaaatccgctccgctagtcgaaagccgaattcttcgggttggccaccaaccgtctaggactggaaggaaacaccacttcgaaaggtcgcttctctcagttttttgagggcataggtcagaacggtttctacgaagttatcgccaagacatactaggccatttatagaaacggcccgtaggatacacactggatgtgcacaaggggggctcngcaagataaaagcgacgcattatccggaaacgtaagagcgaacaaagttgaaccgccgccaggtttcagacatgcgtgcagccaagagattagacaccggccaggaagcctgtttttggcccgtccgaagaccgtaagtgtaggggcaggaagggcatcggctccccctagggggaagttccatgggcggcctttcaggcgttgggtgcaaatacatatattaccatacgagtaatgtgggatcacaacaaagtacaagtcgaaactcgcccttgtgtgggacaacatgaaagcggatcgcgattggcacttcatg

SEQ ID NO: 515987 - DNA, 227 bp, Homo sapiens
ccatcatctcgctgactaaagtgaatggtgaaggaatctgatgttattccatttctaaagctaaaatggtaaaataccagcgaattctaatttgcaatgcgacattagttggttttgagttggagtttaaaatcaaagcagatacagtgttccttaatgaagaaatctgcagttaactatagagacccattttgcctttcatcagggaaaaagtagtttgtttctac

SEQ ID NO: 515988 - DNA, 1613 bp, Homo sapiens
ggccgttgtgtagcaaggaagcacattgaacgtatggtccaggcaagctagagcaatgctacaaagctgaacgatgtagaagcatgatgggacaaggtgtcatccaagaattcacttgtagtcctatgcctttactacactatgaaaatgcaaaccatgtggacatgattgagtaaacttcgaaggtcacagcattcaacgagtgatggacacagaccagaagcattctggcagcaagtgttatgacgattatcatactgtgtctggactagagaactctacgcactgctgtaggaacggaagaagttggacatcaatcaatcacgtaaagtagtgtggacgaacacgttttgcaatcgcccagtcagtcactcatagtcatggtgcctagaatgtgcctcgtgaggccatagaccacgtgaagggcacattgcgcgtggtgtgagatcttccctgggtttgggttggcatgactccctacaccatgctggtgtcgggtagcgtttcctgctagcggaccccgaacccattggcaacgaagagttcagatcttaaagcgcaaccaaaggtgatatgaatcgtaaagcatttatgtattacacgagcatttgtacaatagcaattggagacggaaaccttaaaagtatcgtatgacaatacttgctggattgggcatgattttagagtaaacgttgaacgcttggctattaagtaaggttactttgggcattttctcatataaccttttgagacttcattgggcaaccattattgccagccagcgggacagggacaaatcacaccatttggcaactttctattgacacacgaactcggtagtgggtccaggctcgggaccacaacttgcacactcggttcttccacatcatacacatactcagtattaacaacattcgggctcaaacaagacacacttgaacttaaacagcaaatatccagggtgggcacgggagcccgaattcatgtacgtaacagccttatcccctccctgcgaggtggggtaccaccacgatgtatatgcagccggttataaccacagcgtatattttcgtttgaggacacgaacaagggtgggatctaccagaagaaaagacgagaggagaactagacttattatagctgggattgaaggagagccgtgggtcgagcagatctcattcataccacagtcaggtagtacatcgtgggaaaatcggtgtgtttacgcatgtggaacactatgtgaggcaaaaggcagaacaccaccagaccgcgcgacggaggatcacaccaccacagcggcggcacagccacacactaacgagacaacagaaacggcgccccggcggaaaaatccaacgacgctaggcgtcttaggggctgaaacaccggcaaaacaaggcgcgcggagactacaacgatcgagaccaacacaagacactagcagacaggagacaaaggagacagcgacccgatcctgacagaagagggcccggatcgcgagcccgcaacacctagcaccgcgacgcgagacggccaatgccatgcagagaacgaagcacgacgaggacagaaaacaagacagacagagacgaaaccgcacgaccgaagca

SEQ ID NO: 515989 - DNA, 597 bp, Homo sapiens
  misc_feature (30)..(30): n is a, c, g, or t
  misc_feature (56)..(56): n is a, c, g, or t
  misc_feature (71)..(71): n is a, c, g, or t
  misc_feature (95)..(95): n is a, c, g, or t
gggtggtgggtagagagcatcctaaaaatngtctagtcagcaaaccttatctgatnactaaggaaactgangctcagggagggtcaatagcttgnaatagtaatctagaattcagaagctcatgaatttaaggcataattgggaatctgcctttaagctaccttttctgtctgtgcatcctactttgtaaacttgcggaaataacactttggcattaagtagaaattatgtgaaggtgtacaataggaacaatttaagtaccttcagaaagattatgatatgaaaagtacattagagctatgagaaatgatacagtaaaagtgaaaatattcatatatggtaaataaaacctcaatttagtaaatgccattgaaacattgagttatctggaattagtccatttttatgtcttaaatatcagtctataataatacaactttattaatgataatatgaatttttagaaaagggaaaaacaaaaatgtgttttcattttgtgctcatttattccaaaaatattttgagagaggctgctttataccagctacttcctaaatactaaaggtcaaataggagctaatcagataccaactggtc

SEQ ID NO: 515990 - DNA, 769 bp, Homo sapiens
gtcggaggctacaggcgctgctggcaatgtttgctaaccggacggtggtcgccaggtcgagaggcgtggagcctggagatggtaggcaggacccgggctccactgccgcctctcgagctcttgtgacgcggacctcagtgccaggatgctcggggcgagcggcggcgccgcgcagtgccggcagagggagtgcggacagccgagagggcggctcgtgggagtgccccgggcgactgtggacggcctggggcggctggtgccgctgtagcacgggtgctgggaggagtggctcttgggccggtcgttggtccttgtcgtttttggccccttggggtcattgtcgggggcggctaggcgttgcttgggctgtttgggttaccctgttgccggctgtgctggtggggctggggtcccgactggccttgcactttccggtcggcccctttcccttgggttagtttgccctttgccgggaactttccctttcctatggtccccccgcgcgtttgggtcccccctgtggaaacccttctttttcctgtgggcggtggaagaccccttttaaaccccgggcccccgtttcaaaccgggtttctttaagcgttttaccggtgggccagtttgaagaaaggaaaccccccggtacgatggggcccccccggaaaaggcgccgccgctttctcctttccaaccccctggggcacgcgtttggaagttcgtttgggggcccgtgcgaagggagccagagggtggcaaacccaaaggcgcc

SEQ ID NO: 515991 - DNA, 528 bp, Homo sapiens
  misc_feature (479)..(479): n is a, c, g, or t
cctctttggactaacagttaattttcaagggtatatagagggttttgtgggcaaatttagagttgacttaagattctatcttggacaaccagctatcccgaggctcggtaggtttgtcgcctctacctataattcttccctctattgtgttacataggcggggtgtgctctttaagctgtttataggtagcttgtctggtttggggggtctaagctttggctctccttgcaaagttatttatagttaattcattatgcaagaggtataggggttagtccttgatatattatgttgggttataatttttcatctttcccttgcggtaatatatatagcgccacaggttacaatctctatcgcctatactttatttgggtaaatggtagggataaggttgtggggtagtaaggtggagctcgtgtagtattccagcagctcgggttatacatagaaaagagtgtaatttggcgaggctttnaaggttatcactttgctgatcttgaatactgcttaaaactggaaagttt

SEQ ID NO: 515992 - DNA, 1502 bp, Homo sapiens
  misc_feature (778)..(778): n is a, c, g, or t
tttttaatgggcttgggtgagggaggtaggtggtagttggtgtttaatattttaagtggggtgatgaggaatagtgtaaggagttatggggggtaattatggtgggcgccatacggtaagttattaagttgggggctatttcgggataagcgcccgaaaacatttgtttgtggggaaaaaaatgttagatttaccgccgatgatatttcgatatgtcgaacatggattttgggcggtaggtttgggctcatagggtgtgtaccctgtgaaaattatggggaaactcaggtgaattgaacgccctcctatgtgagtggcaaatatacagcctccatatgtgaataggacattatggtgagaagtgtgagctataacacacgcgtgtagttagcgtgtgtgtccggtgtataagtatcgcggaagtgttctttaagggtgatatggagttttgtggcataaatatatacacatgtgcccccacgttttcaaggggcacaacccataagcggggtgaaaacagagatgacacaatgatctgtgtgacttcccaataaaggagggcgctccaatagaaaggcaccttggtgcgaacgcaagagatctacaattttctaccaaatattttgtgcgtctcccccggcgtgaggaaagtgttgtttgggcgagagaggttctacacgcttaaaaaatattaaccgttttttagaacgcctcccccaggtgtttggtgaggagaatctataggcgccgcatgctggaacatctaagatggtggatnaaagcgccgaggaaggtgtgttgcaacaccacattaagttgcgccccaccaagaggagatgtagtatcatcaacagcgagggttccataatatttagtccccctaagaaggtggggtcaacacattatttctctttagcgagggtggggggtcttctcacccacgagcgaaatatataaaaagccccccttttataatggataagaagcgcccgccaaagttgtgtgggagaatatcataccaaataaaagggcgctccaaaaggagaagccataattagacgcagttattgttgtgtttttttccccccgcaaaagttggtggtgtcccactattatgatgtgttgccccccgacgaggagattaaaaataaacgtgtgtgtgtacccaaacatacgtgcggggcgggagcgagcagattaaattttcccccccagaaagaaaccccctgttgtgaagacgagagtataacacaggaacgattatattgataccacctttcacaagaggggatggatgagacccccgaggaaggaaaatgtccacagaaaaataaaaaggatgtggattgacgccggaattatcaaaacacaggggggggagatatcaccatccccatcactaccgagcagggggggggagtgcctcaagacaaacacaaaagaaggtgcggtcgatgattaccgacaagagatgatctggacagagacgatgaggtgaagaa

SEQ ID NO: 515993 - DNA, 356 bp, Homo sapiens
cccccccccccacccccccgggtttttgggggcttttttgggggcccttttttggggggcttttccccccacccccccggggggggggggggggcccccaaaaaaaaaaaggttttttgggggggggggggggggggccccccccttttttgggcccccccccccgggcccccccccccccttttttttttggggttttttttttccccccttttaggcccccccggggggtttttaaaaatttttccggggggggggggtttctttaaaaaagttttttttttttttttttcccccaagggggtttttttttttttggggggggtgggggggaaaaaacccccccccggggggga

SEQ ID NO: 515994 - DNA, 150 bp, Homo sapiens
tggcctccaaccaaaaaacaaaggagataaatctagtatacttggtctctaaatggcgggtctattcctagttataccccagagtttttatgtaccaggaaaattatatttctaatttaagaaatcattggggtaaatatcgcctcatca

SEQ ID NO: 515995 - DNA, 809 bp, Homo sapiens
gctttctctctcgcgcgcggtgtggtggcagcaggcgcagcccagctcgaaatgcagaagagccgggagttcgtggacctgtacgtgccgcgaaatgctccgttagcaatcgctatcatcggtgccaggaccacgcatcatccagatgaacgttggccgaggttgacaaggtcacaggcaggtttaagtggccagtttaaaaactttatgctatctgcgggggccatttcgtaggatgggtgagtcagattgattcccatttctccgatttggcaaagggccgaatggacaatcggtctcaaaagaccttttttggacttgggaagaagacttcaccatggtttgtggggaattatttgtgtcattaactttacatttagtggaagaaccaaaaaaagagataacagtagagaaagagaggaaaaacaatttttgtggtggggcgggatctgtggggccctgagagaagatgttttgatagagaaccacttgtgtttgttgggagacggggcgcccccatgattggtggcaggacgaccaacgtgtgccccaggagctgggttcccaagagggaacacatccgggggcgcacgagaaccagtgggggtgcggtggttttccaccacccaatataaaaaagaacgccgcgggggggaaaacagcgggagtggttttggtgaaacaccaccaccccagaagggggcgcattcggagagacagccactcgacgggaccttaaacgaccaaaggggggccccgagggaaggcgcgagtaataagaatggccggcagcgggggggtggagagcc

SEQ ID NO: 515996 - DNA, 400 bp, Homo sapiens
tatggcgtgaatactataccatcagtggctatccacatgtagtctattccgatcactcgagttgatgcacatattagcttagtttcacctattagtactatagttgagcttgtgctgctctgaccagtcacgtgccaccttcagtttaaacgtcgtgtgttccctatactttcgggtgcacaccatggggtagaattgctaagtcatatgggtaattctagatttcctttctgtaataacactgcctctatctcattttgagataagtacataaagcacttagcactgtgcctggcacacagtagtaataagaacaatatttatcatcatcaatgacattttctaagtgccaggtattttatattttacttgtattaacacatttcatccacattaccat

SEQ ID NO: 515997 - DNA, 210 bp, Homo sapiens
ttaaacaaaaaccctggacctggcttcactggtgaattctactaaacgtttaaaaaattaataccagtcctttccaaattcttccaaaaactgaagaggaaggaatactttccaactcattgcaaggtctaccctgatacaaaaaccagatggggtcaccataagaaaataaaattacagtccagtatccctgacaaatatcgatgtgaa

SEQ ID NO: 515998 - DNA, 205 bp, Homo sapiens
  misc_feature (39)..(39): n is a, c, g, or t
  misc_feature (51)..(51): n is a, c, g, or t
  misc_feature (66)..(66): n is a, c, g, or t
ataatcaaaaggataatgttttcataattttttattggnaaatgtgctgantcttgaattttttantctccagatttatgaactttttttcttcagcaattggtaaagtatacttttgtaaacaaaaattgaaacatttgcttttgctctctatctgagtgccccagaattgggaaactattcatgagtattcataggtttatgg

SEQ ID NO: 515999 - DNA, 111 bp, Homo sapiens
ccaaagcacctcactatgtgctttctcagcttaccacggacaacaaaggcaactcaaaagcgggaaatggaacactgcaaaaccaaaaaggaactggcgtaacagaagagc

SEQ ID NO: 516000 - DNA, 205 bp, Homo sapiens
  misc_feature (98)..(98): n is a, c, g, or t
atcacttgccttctatgtctattctcaaggaaaaaaaaaaatcacacactcatcattacaaacctcaggtggcacggagctttctggtatgaggctanctggcttggagacggatgacaatacctaagaggatcaggcaggctctattagtttacttctcggtcttatatctcaatggttcccggcggggtacgacgctcgacat

SEQ ID NO: 516001 - DNA, 934 bp, Homo sapiens
gggcgtttttgcacttagtctcaagggctcatgctcctgtgtaaagtggaatttagaaggttcgtgtcttcttattactttgccatttctttctttgctacacccccctttttccctaattccgtgtgggaaccaaatgccatccttctgtttaaagggtccacatattgagtgtcccaggcaagtccagtctaactcttgtccgtatgccaattggctcttttctcccatcgtctatttctcgtgcttatcaaaggtgttttatagtatgcttaacttaccttactgttttcccacggaatttctatgtggtttgttccatgtgcagcacatgaactagtgtgtaaagacctccgtgggcccctatagggccataaagggatagccatgtcaaccttctgggacagagggctcctatgcttgttccttcccctatccatggcactacaccacgttcgtatcgctgccttctgtgcgaagatgattccttagttaatgcagtacatacagctctgccatggggctcaacctggacctacgtgatcccatgatccatgtctgactagaaccgtgagggcaaagatcggtgactgatgtctctccaccggtaatgtcactgtttcttattccttccatctagcagctggcctaatcactctgagttcacagagtgctggtgatcggatgagtggggagaggcacattaatcgtgtaaccccacaacggaggaaatgaacataagagattcttctaggggtagcatggtggatctgtgccttttgtaggctgattccctgttgcctataaacctgaacgatgtctcctcaagcctgtgggcagcatagccctagattcccagaccgttaagacactgtgagagttgtcatctagttggtccactgtgtttaagttgcaaggatttttctatgtgtgg

SEQ ID NO: 516002 - DNA, 292 bp, Homo sapiens
agatatataatatacgatcacatgtaatatgtgggacgtaacagcagcagtagatgtcaccttaatatgttctgctgggaccatctaccgccttatactacacttaggaaaaagtattacatatggtttatttagaaacttcaagtattattgccttaatgtctcttaaccctgttacacgctgcatgctagaacatggttaatatagctaatacctcttatgatctatcgagctttaaggcactactcctttttctgcttttatcactgtcactgcacttattcttgtata

SEQ ID NO: 516003 - DNA, 1299 bp, Homo sapiens
taaactggagctgtaattacagggctactaaagatgtgaagtatatagttaaggttttgtcagcacttttattgtaatacttagtgagattagtcattttagttgttccctttgtatgccaaaaatggaagacagctgtttgtgcactaaaaactgctttttaaaggatagttctctctggttatcaagcatattttgccatcagggaaacatattttaaagcttttgcactgtcaaaatgaagtgtgtaggaatgattgctttagctgttacttctaaataacgacaggaagatctaacatgtggtaatactgcacaaggatgatacaaagtatctggctagattcacaactattccaattactatctcttcctgcaagatgtatttctgatggcactcatcagaccctgaattcattccctgagcttgagagtgctacagaagtgtttagggccagttctgtggcagccctcatggaaacaaagaaaagcctaagggctggtaacctgcatcacgaccagcccatcacccaagaacacagccagcttcttttgcaaggttgtacctgttagtcaatcaaatctaaatctgagagttgtgactgacttagacctattcatcttccaaagtataaaccttaagaatttgtttccactagtgcattaaatatttgccatctaacagaccaaaaagcctgaagcttaactaaattttaaataaagctcatgtgtatcatttgttcttagttgcaacatgtcaagttaccaagagaggtaatatttatctctcttctgtggatgttttgaagatcaacatctttttttttccagaggcactcaattattttttttctcctattcaacctataacctaataggaaatctactgcgctgctttgcagaatgagtttttttaatggtcctgactcttaaggttttactgtagttactgagtaagacctaaaaacataaaacaattaaccaacactaatcaatgtactaaaagacgtctgtggcatggatggagaggtacagctcagacctgcttttaagagaagagtcactgcccatctgtcagggctgtggggaacagacaacctccagctgttagcctcttcagcttgcaagccaaggtcacactcttctcaaggtcacactcttgcccagacagtaactgagcaaggcagtagtacaggacctggccatttacacccaatgagtgctcctctaacaggctctctgctacaggactcttcactggactggcaggaactttatcagatctgcatgccatttgat

SEQ ID NO: 516004 - DNA, 365 bp, Homo sapiens
gtgttcttaatgtattgcccccaagccatgcgatagagactactgcgcacagtacacctgatacatgctatagactggcctacactatgacgccttctgtatgagatgtgccatgcaccggagctcattgaagtgataatagctcttatgtatctgacaatccttgcacaacactcatggtattggaacacactctcgtacatcatcttactcttagagtctcactcttacatgtgcgcgactcgcactgactcgtataagatcacgaatcattactagtgacagtgccacaaccaaggagaatagcttactcttgctcaccaagatgtcacctgtttcgatacggcagagcttggagtcatctt

SEQ ID NO: 516005 - DNA, 568 bp, Homo sapiens
gacgagaagaccctatggagctttaagtttattaatgcaaacagtacctaacaaagccacaggtcctaaactaccaaatctgcattaaaaatgtcggttggggctgacctcggagcatgaacccgagacctccgagcagtacatgctaaggacttcaccagtcaaagcgaacatagtatactcaagggatccaataacttgaccaacggaacaagttagcctagggataacagcgccaatcctattctagagtccatatcaacaatagggtttacgagccttcgatgtggatcaggacgatcccaatggtgcagccgcatattaaaggttcgtggttcaacggattaacgtcctacgtgatctggagttcagacgcggagtaatccaggtcggttagctatctacttcaaatccctccctgtagcgaaaggacgatgagaaataaggctacttcacaaagcgccttcccccgtaaaggatatcatctcaatgagtattataccacacccacccaaagaacaggtctagcaacaagacacaaaaaagacctgcactggcgaccacaact

SEQ ID NO: 516006 - DNA, 255 bp, Homo sapiens
tagcactctttctactgatgaagaactgaggtacttcataaaaccacttactcaagacaccttgggtaagtggttttatgaagtacctcagttcttcatcagtagaatgagctgctagggacgcgtggctggacgatctggcgggaatccgagggcaacgcccgctaggcactacccttgtcctcttgatctgcgtggatgtggatcctgtacaactgtcttccatgctccagattatgtgatctgcaattaaaa

SEQ ID NO: 516007 - DNA, 219 bp, Homo sapiens
catgcgtgtacctcactttacataagcaatgtattcctgaaaaactgcatttcaatcaagtcccaaattcaatgacttagaggagttcagtatttaatgaatccctatggagaatatatccatttacaatgtgaatagtcatctcctaatttgtttcttatgtctttatgtttttcagtaacctggattttttaaatcatattaaaattacaagatgtg

SEQ ID NO: 516008 - DNA, 927 bp, Homo sapiens
actgttcgtcgttgacgtccgctgtgtccgctaatcgtttcgccgtatagcgttttccccctagtcctgcgtgttattttgcggggcgccgctaatctgtgtagaccattacgagtttcgtgtcggtccgacaattccggggtctgccactctcccggggttttttttttccatgtggagcacgttgtctctgccacggtcctttcgcgcccgggaagattgtgtttcgccgcgcgcccacatgttgtgtctgccccaccccccgccccgttgggccaaagagcacccttaccactcgttgagccctcccgcgatattgccagtggggggccgtataccgagcccgggaaatctgtcgcacgatgtggtgccctcccgccgcttggccagtgtctcacagtcccccgctatgaccgcccaccgggtttcttatcgacccccgcggcgttgtccacacccggcgccctttttccaaggctcacttcgcacaccaccccggccccaggtgtcactcgtgagaaccctgggctgccccccacatttgggtggctcttgttttcttggggctcgggaattggaaaaccttcgtttgggggcctccactccactgggtatagcccgggaccacccttcttcttgtgagcggcaccgcgtctcttctttctctacagcctcattctgtggcgttttccctttcggggagccacttgggcgtcttttgtctgagatgtagccgcttcgtctaacacgttctttgcccacatgtgaaggaagcccgttttctcccctcctccataaggtgtcttctccggcgtctgggtggcccccctgtgttccctgtttcttaatacctcacccccgcaccccgggggaaagggtgggcccggggtttcaaaaaaaaacccaaaaaaaactgtttcccaaaaa

SEQ ID NO: 516009 - DNA, 300 bp, Homo sapiens
  misc_feature (32)..(32): n is a, c, g, or t
agttgtttgtttctggtcatctcagggatcanctgttctttgtgttcagtgccttgtgttcatgccttgtgttcagtatcttgaaaactgttgtttgtatattgtgtctgttttttagttgttttttgagggcctgtgagtatggtaaatccggtccctgtaacctcatctttgctggtaatgcaaattctgacttactaaagtttagcaaataaaacacagaaggagatttttttcatttgttaaatctgaaatgcttacctctacttaaagtgaatattaacatgaatattaatgttc

SEQ ID NO: 516010 - DNA, 175 bp, Homo sapiens
ggacaaaggacgatgatcgggcgggctccactcagggtctaaggcacccggagctgtccttggcgtgcaatcccagagacagataaccctgcatccatatttactgcagacaaatctctccttagttgatgagactgtgttgatctcccttgtaaactctgaagctgagctccca

SEQ ID NO: 516011 - DNA, 897 bp, Homo sapiens
gatcacgtaataatatgcacctgtcagccgctcattctacctactctctggctgtgccgtggatggactgtccaaactagcacatggtcatccaaacgttcggtgctctcagaacacgtggaccccataaagcggttgctcctctgtggcaccctgagactagccctacacatggctcttcctgctcatatactcgcatttaagctctaccatcagtagtgggtaagagttgaggataccttgagtgaacacatctgtggaagggacacctaacaatacctcagtacaacaattccatgaaggcgtcacccatgaagaatacttctcctgaccattgcgtccacttgcctagcttctgcgccttgcgcaaccaggcagtccctttaacacgcacaagcttcgcttaaggctagttagctggttgcccctcgggttccacaactgacccgaagcctctagaagaaatttctttgcacccaagtacatccatctctccaccggattggatgctggataacgagacgtgactacgtagatatagaatggatggagattctgactcgaacacctagtctcggataagcatcggggagatataagctaaagcatcgtctaacttgaagacggtgctatagacatgacagattaacgataacccatactctttggagtgcccctgatcgggcaacagttcttgaaccagcggcaccagagggccaaagaaaaagcgtcctgggggccaggacgtggcaaagggctcgtgaccaaaccaaattgcaggaaaaaatggggtgcaacctcactttggaggaaaccccctctcgacgagcgcttactcccatttcctttcctctttttatccgtgtccccaacattggtacttggctaaaactatta

SEQ ID NO: 516012 - DNA, 805 bp, Homo sapiens
cagacatatcatataaggcgcctctcggtgtggcgagaggtcacgataaggctgtatgggcagttatgaatatctcgctgtgcttgctgctaaagaactgggaatctctattacagtacatgaacctcgcaaggaaaatagagcgatttactctactccaatcagatgcatatttacaagaagcacagagtacagcatgaacactgagaacactgttcacagcatgtttcatgcagttagatagcatgctaatcttggaaggcgtcgagcacgatgtcgtcacttggcacataggtattcgacgtctgaaacttcagccttgaaggggtgtgtgcccatggcaacgtagagcaatagacagcgaattagatacagtatactcagaaacacagtcaaggtgagccaagtctgtggaaacactactcagaagcagaacgaatgaaacgcagagtctatcaatacgatctctagggtatggcctatgttttcgccatacatgtatgaaatcgatgggtcgggccaagatagagtcatgtttagagtcggagatgtgcttaccacgtctcgagaatcgatctatgaggtcatgaacactaactgcatccattgagttcattcgtagccctcgatcgagcatgagggcagggtaattggaacttttgaatggaagaaccacttgtggatctagttctatctatccactgtttcatgtatctgatttgcagccagggatgatgccaagcacttgtgactgattgatatccatggactaagcagtagggggaaccgaaaaggtaaaccccgg

SEQ ID NO: 516013 - DNA, 259 bp, Homo sapiens
tgccgcatccccttttattatctgatctaactctttttctctggtctctgtatctacttgttagctgttttaagaagggatggggagagggtcattttctttcattaattttttattcccttcttttaattttctcgaccttttctcaaaacatttcagccgattttccaactcaatgaccttctgtaatgtctgctccaacatttcttttccattcttctctggagtactcctcttgagggggggggtcttcaccaga

SEQ ID NO: 516014 - DNA, 342 bp, Homo sapiens
tctatatgtccatatggcctcatcatttagctctgactgatcagagagatataccatcatatactctttgatgtgtattatagcatagttcaactcagtagtatatttaacatctttgaaagatctgtgactgagttttgccacttattcattgaagatattaatcatctcgagacccacctacactgtgtctctacgcttatgcaggctctaagatcagatacctaaggagaataggctatgctgtcctgctataagaggggatcaatgtctcagttatttcaggttgccataacctagaagctggcatgcccagtatcggcactagcagattcgtggctg

SEQ ID NO: 516015 - DNA, 952 bp, Homo sapiens
tccggtaacccggggcgccgtggttgagaagtcgccacgtccaccctggcgcaaacctaagatggccacagcttgtgcgggacctcttagacaccccttcggggcaaaaaccacttccatcaagatgttgcatcaggggcctggacaacctccatcaaactctggaaggaaggaggggcggccattggaaggaggcctagaagctagaagccgcccaatgactgggttcgaaaatgacctgggcccacccccatcggccggcccaccgaacacccaatcccagccgcgtcccagagatggtcgtgggttcatttggacccgagatgacgcctcaagccacacggggccccaaactgcgcacaaggccaacgatctgaggtgccaatgagtggcccaacacagccgaaaaccaggcggtctttgggtggagacaacaaaggggaccccttggaaggcaactcagatttactgggccatcggggtgattcactcagaggacgtgcacgcaacggggcccgggctccatatcagcatcagcgacagaggaccatcagaacgagcaggagcacagacagctaggggcctggctccccagccccacagctgccacggtcgccccttccctgggccaacgaaccagaccacatcgggtagaggcccccactccctacaggagttacttttctcccacggaggagagttgacagaggacacccgcagattgatgacatcccttgaagctgatcggagatgctttgtaatgattccgtccacatgaaaacactcatgttacgaggaagagacataccaagttatttgtcaaatgcttgtgtttcgggtcaactatttacagtaccacttgggttcaggcattactttcggggggatttgtttacccaaggcattgaaataatcatcatcatgtgtcttatatgaacacacagaacaatca

SEQ ID NO: 516016 - DNA, 232 bp, Homo sapiens
  misc_feature (124)..(124): n is a, c, g, or t
  misc_feature (126)..(126): n is a, c, g, or t
  misc_feature (160)..(160): n is a, c, g, or t
ttttttttttttgtgacaacacaaggttctattaattttatcatattatacacaacaatcaaccagactacaacatgtctcttcatcatcgagaatattaaatagagttaagcactagcattancnacacttatatgtgcatctagcaatatatgtccanatatatacctcaacatagctaccgtatacctaatcgtaccactcaaactaattcaaggtactaagtccttaa

SEQ ID NO: 516017 - DNA, 893 bp, Homo sapiens
atgatgcggctcaagcccagtccctgtgaggaattgtcgatcaacttaggcttggggccttgcggaggcaaggtccagccgcgagtcctccaccgggcaaataggctccgaggggccccgtgggccctcctctcctccctctcagggcagcaggggccgctgggagacacggcggaggcgggcgcccacgggccgggtcccgtcacccgcagcagtcgggatgcgggggccccgccaccttccgccgcacaagggggccactgccgcaccagccacgcgtgcgcggtgagcccagatcgaccacgagttgaatacgcaaactggggttgggtgggacggcgccccgctgccagttgcacaggtggcaccgattgcgtgtgacgcttcctgcggagccctaggttgctgctcatctgctcgtcccggtactcgctgagcatccagcctctcgctttcccctgacgtagatgctagggcacaggggactgctatggttctttgtggtagaccgtgtgttgtgtcttctcctgatgctagctcctgcccctcagacggacccacagcgtcagttcgccgggacgattggcaggaatagtaaaggtcagctcagggctatcagtgcgaacagctcaatgcccagtcgatctagtcgattgcgtgagccactgacctgtgaggagagatagataacaggacaccgggagtgagatgtggggtctgtctagaggttctcccagtgaactattgtagctttggcgttccactcacctgttgatactcgttactgagtttcctagacctggggtgggtgttccacccaggaggaggggggtcccgacactgtgtcctgtggtggccaatttgcagctaaaatgctgggtcccttctcttcc

SEQ ID NO: 516018 - DNA, 1154 bp, Homo sapiens
gctcgtgaaggatcgcctcgggggaccggacgcggaggactacacgttctggacaacacaaggcacgacagtgactacgttcaccgtacacgacaggactgtgacttgacgctgaccagaccgaccacgctttgactacacgacactgtctctggaccacgtgacacgactgtatatggactaggtatgaccgtctctacatgctcactctggctcgtggaccacctggcaaaacacctacgacgccacgacgtgtggctagccgacagccttacagaacgtaaacacgacgcacgacgacacacggcaaacagtgacacactggccagcttgtggcatgcatacacgtcacatcgcgcgttcatggtcctcacacgcataccgggcacttagcaggcattctcgctcacacaatcaacgactattctccagacaacggcgccagtcctccattgtgggacttactgaacgcgctgaggacgtgcacacacgactccaggcacactacgatgataccacgtggacctctctggacttctcgtatactatctgactacactgcaccacacgcatcactgaagacatgcattggagaactcatattcatactgacgcgacactatgaccactgacgcgaccgtgttgacggcagcacgcatgcatctgctgcttgtgagctcgctgctggccccactactccttgactacctggacagctgcacgcgacagacaactccattcatcagcgcacagtacatccatgcagcctctggacagcacccacatacacaaaacgacaaagatgcgccgctggcaggtgggaccgaacgctggcagccccacccctgcaccctgcagcaccgcgacggggcgacatgccgcgggcagggaccccgagcaaggcacgcgacatcaaacgcacgccacgcatgacacactggagcccggccacacaggggccctaacatgaacaaggggcctcaccaccactcccccggggagccccccaatgggacgcggcccaccggcactggaagaacgcaggcaaccccaacaacacggagaaacaaacacagacaccggacagacacaaagcaccccgagcagaactactccacacccagcatgacgaccacactcgcacaccacaccaa

SEQ ID NO: 516019 - DNA, 781 bp, Homo sapiens
gaacctttctttccccagtgtcctaaaagtatgaggatctcctgtttcaaagctgaccaaggcattatgggagaaacttgggacatacgaaacctctagcagttgtgtaattaacctctggttgatgctactattatatatggttatctttttactatgacacgccttgaccggatttcgcgattcatcttccatactgctcgaattaggccaattagcattctgaattggggtgcggaccttcccacccttctgcctttcagcacaggtgtcctcttcggctctggggaagacggtgagatttgatacaacaatcatattgtagtttgccgggcaaaaggcacctttcaaaacaggagggctctcagctgtgggactccaggtatttaatgcttattgatcccttgttggggcttgccacatatatgtgagaaaccgacacggataaattaagaaaaatgtcccctattacaaaaaaggtccatcatggggcccactaaactggttgcattctcaacctacttaacgcggggcattagcactaattcacttcggcgtacctaacgggcagtgggacaacactgaccaaggtctttgagctaacacaccatttgttgtttccccacaacaccacggggtttggttttaacatccctttcaagagccccccaaaaaaacagaggggaggacattgtgggcacaacacaatcctgtgggcctccccaattggacaaaaatttccctcacgatttcccattggtttttgggagcgttaagccca

SEQ ID NO: 516020 - DNA, 924 bp, Homo sapiens
cacggtggctcacgcccgtcatcccagcacttcgagaggccgaggtgggcgcatcacaggaggtcgggagttgggagaccagcctgagcaacatggagagacacggctgtgccatactaaagaacacaaatatcagacaagccaggcgtgggggtgcctccctgtaatccccgctaatcgggaggcggaaggtgcggtgagccataggatcgcgccagttgcgccgtctagccggggataagcaacgagtgaaattctgtcctcgaaaacaggacagaagtcgagaagccagatgctaagaacgtggtggaccgcaaggaacgcgaacaagaaatcgttacgcagcagacgcactggcgcttgcggtcgaccggcgagggccgaaaaagacgagttacaggtaagagccagtcggcacgagtacgccaggcacgccgtaaggggaaccagtctgggcgcaaccagcgcagtaacacggactaggcgacgtatcctccggggctgccattgaccaaagatggcgccggggagtgcctaccgcggaaagcgaataggcaaagaaggcaaggcgagacggagaaagtagccaggactccgtgaccgggaaccccggcacttcggcaaggacctgagtaacgaaaggcatggggaaggtttcccaataatggccagagggcctccggaaattagccacaggaatggaagtgcccgcgaggggccacgtggacagaaagtaaatggaaaaagttaaacgacacccgaagcccgagagaggaaacagacacagcaccaacgaaaaacggccaaggaaaacacgccacggaaaaggccaaacggcaaaagggcaaaggaaaaaggcaaaggacaacaggaaacaagaacacaccaaccagaacaaaggaaaaagacacacagccggagaaa

SEQ ID NO: 516021 - DNA, 141 bp, Homo sapiens
ctcgaattcaagcttctaacgatgtacggggacatgttggccaggctgccattcaactcctgacctcaagtgatctgccctcctcaccctcccaaaatgctgggattacagggaatccagaaaattggtaatcccaaaaaa

SEQ ID NO: 516022 - DNA, 361 bp, Homo sapiens
  misc_feature (31)..(31): n is a, c, g, or t
  misc_feature (34)..(34): n is a, c, g, or t
  misc_feature (60)..(60): n is a, c, g, or t
  misc_feature (63)..(63): n is a, c, g, or t
  misc_feature (85)..(85): n is a, c, g, or t
  misc_feature (262)..(262): n is a, c, g, or t
aaatagcaagcccttgccacttttaaaaaantcncagagggcctgggcgcaatggctcangcntgtaacccagcactttggaagnccaaggcgggtggatcacctgaggtcaggagttcaagaccagcctgtccaacatggaacagttggcccaacatgggccaataaatatcccatgtatatttttagtctctactaaaaatacaaacaattagctaggcgtggtggcagacgcctgtgatcccagctactcggggggctnaggcaggagaattgcttgaacccaggaggcggaggttgcagtgagccaggattgtgccattgcactccagcatgggctacaagagcgaaactccgcctc

SEQ ID NO: 516023 - DNA, 125 bp, Homo sapiens
tgattagaggatctccagaggacaaggaggccactgatacaaaaccataccattgctcgttgacaatatagctgctaagcccgaggctttagtcatacaaagaaaataaagaaggaaactgtctc

SEQ ID NO: 516024 - DNA, 289 bp, Homo sapiens
  misc_feature (216)..(216): n is a, c, g, or t
tgcacgacatctagaatagcgatcatggaaggttgaaagacaggtcatgacaaagtcaaagaagtgagcagctgagaagggtgaaggacaagatcattggatgagtggatccaagctgagtggaccaggcacggtggctcacgcctgtaatcccagcactttgggaggcggaggcaggtggatcacttgaggtcaggagttcgagaccagcctggncaacatggtgaaaccctgtctctactaagaagtccgtcatgagaatcacccctttgcaactccaacagcctct

SEQ ID NO: 516025 - DNA, 388 bp, Homo sapiens
tgccctctggcctccatcatcactgacatcatgctgattgtccccatgaaggccagccttgaagcttggtcagtctccctaactgtatgattgatccccacttattgcactacatcactgagttcccgtatgccaagttatggccacttacatccacgtgagtaatggttacttggattgtcctctagtatgcatttgtaaaacctgagcagaaagtcatccgggtatttctagttgggaatctaaaattttactagtattgggccgggtgcagtggctcatgcctgtaatcccagcactttgggaggccgaggtgggcggatcatgaggtcaggagatcgagaccatcctggctaacatggtgaaacgtgtctcaactaaaaattaa

SEQ ID NO: 516026 - DNA, 107 bp, Homo sapiens
tagcgggtctcatacaggggtgtgggcatgcatgcttttattaaggctcttgttacacctggcagtgtactgtatcaacgtataatacagaaaatgaaatctctatt

SEQ ID NO: 516027 - DNA, 456 bp, Homo sapiens
tagaagcgcccagcagccgtccatcatacccctatcacggcccaggcctatgaggagctagtcccggcagtttgacccccagccgctaggccatagcagttacatacagccagtacagccctagaggacatacgtcacggcgcagatagagggcagctaccggggcgctagtggcgcatacagtaccccccagccgtgcccagatagaagcgggagctactacaacggcacggccgacatacaccctgcgcttacacctaggaactatccagagggacctggcgaagggaggcactgtggagtatagccaacgagaagcacatgctggccctggccccaacagcactagcacggggcagctggccagctagtcagggcactcggaccgtcagaggtcatcccaattcttccccaagtacatcgtgccccaggggccgaagcacccgtaacatggac

SEQ ID NO: 516028 - DNA, 493 bp, Homo sapiens
  misc_feature (404)..(404): n is a, c, g, or t
  misc_feature (410)..(410): n is a, c, g, or t
  misc_feature (421)..(422): n is a, c, g, or t
  misc_feature (437)..(437): n is a, c, g, or t
  misc_feature (439)..(439): n is a, c, g, or t
  misc_feature (442)..(442): n is a, c, g, or t
cggcagagcgcgctggtgctgatgcaggatggctgagcgcgcaggagcccgggaggtctgagccgggcgaggctcgctccctgcgcatcgcctcctccgcccgccgcgtggtcgcgggcaggtgggccggggggcgctgggcaggggcggggcagggccagggcaggccggtctgcagccggaggggccggagcggagaagctgcccaccttcccgggctcggagcggccggggctgctcagccggccgggctcgcgatgacctgctgagaagcgtcgtcggaggctgcaggaggcggcctagctgtgggcggtgcagctcgcggcctcctgcctcgtcgttcgaggcctcgtcagcaggtcatcgcgagctgggcgggctgagcagcccgggccgctcgggcncgggangtgggcagctnntcgctcgggccctcngntgnagacggctgcaggtcctgggcccgccctggttcagcgctaatggtaactgc

SEQ ID NO: 516029 - DNA, 2817 bp, Homo sapiens
cggcagagcgcgctggtgctgatgcaggatggctgagcgcgcaggagcccgggaggtctgagccgggcgaggctcgctccctgcgcatcgcctcctccgcccgccgcgtggtcgcgggcaggtgggccggggggcgctgggcaggggcggggcagggccagggcaggccggtctgcagccggaggggccggagcggagaagctgcccaccttcccgggctcggagcggccggggctgctcagccggccgggctcgcgatgacctgctgagaagcgtcgtcggaggctgcaggaggcggcctagctgtgggcggtgcagctcgcggcctcctgcctcgtcgttcccggccccggccccccacccatccccgtgccccctccctaccgccggccgagatggcggatccagccgaatgcagcatcaaagtgatgtgccggttccggcccctcaacgaagcggagatcctccgcggggacaaattcatccccaaatttaaaggcgatgagaccgtggtgatcgggcaagggaagccatatgtcttcgacagagtgctacctcccaacacgacccaagagcaggtttacaatgcatgtgcgaagcaaattgtcaaagatgtccttgaaggttataacgggacgatttttgcgtatgggcagacttcatcaggaaaaacccacaccatggaggggaagctgcatgacccccagctcatggggatcatcccacgaattgcccatgatatctttgaccatatctactccatggatgagaacctggagtttcacataaaggtttcctattttgagatctacttggacaaaataagggacttacttgatgtatccaagaccaacttggctgttcatgaagataaaaacagagtcccgtatgtaaaggggtgcactgagcggtttgtgtcgagccctgaggaagtcatggatgtaatagatgaaggcaaagcaaaccgacacgtggctgtgacaaacatgaatgaacacagctctagaagtcacagtatcttcctgataaatattaaacaagagaatgtagagactgaaaaaaaactcagtgggaaactttatttggttgatttggctgggagcgaaaaggtcagcaaaactggtgccgagggagctgttcttgacgaagctaaaaatatcaataagtctttgtctgctcttggaaatgtgatctctgctttggcagaagggacaaaaacacatgtgccataccgggacagcaagatgactcggattcttcaggactctttgggtgggaactgcagaaccaccatcgtcatttgctgttctccttctgtcttcaatgaggctgagaccaagtccacactgatgttcggacagagagctaagaccatcaagaatacagtctctgtgaacctagaactgacagcagaagaatggaagaagaaatatgaaaaagagaaagagaaaaacaagactttgaagaatgttatccagcatctggagatggagctaaacaggtggaggaatggagaagctgtgcctgaggatgaacagatcagtgccaaggaccagaagaacctggagccttgtgataacacccccatcatagacaatattgctcctgttgttgctggcatctctacagaggagaaagagaagtacgatgaggagatctccagtctctacagacaactggatgacaaggatgatgaaattaaccagcagagccagctggctgaaaagctgaagcaacagatgttggatcaggatgagcttttagcttccacaagaagagactatgagaagatacaggaggagctgacacgtctccagattgaaaatgaggcagccaaggatgaggtgaaagaagttctccaggccctggaggagctggctgtcaattatgaccagaaatcacaggaagtggaggataagacccgggccaatgagcagctgacagacgagctggcccagaaaacgactacattgacaaccacacagagagagctgagccagctacaagagcttagcaaccaccagaagaaaagggcaactgagatcctgaatttgctgttgaaagatctgggggagataggtggaattattggcaccaatgatgtgaaaactttggcagatgtgaatggagtcattgaggaggagtttaccatggcccgcctgtacatcagcaagatgaagtcagaggtcaagtccctggtgaaccgcagcaaacagctcgagagcgcccagatggactccaacaggaagatgaatgccagcgagcgggagctggcagcctgccagctgctcatctcccagcacgaagccaagatcaagtctctgacagactacatgcagaacatggaacagaagaggaggcagctagaagagtcccaggactcgctcagcgaagagctggcaaagctccgagcccaggaaaaaatgcacgaagtcagcttccaggataaggagaaggaacatctgacgcggttgcaggatgctgaagaaatgaagaaggcgctggagcagcagatggagagccaccgggaagctcaccagaagcagctgtccagactccgagacgaaattgaggagaagcagaaaatcattgatgagattcgggatttgaatcagaaactgcaactggaacaggagaagcttagttctgattatgacaagctgaaaatagaggaccaagagagagaaatgaagctggaaaagctcttattgctcaacgataaaagggaacaagccagagaagacctcaaagggctggaggagacagtgtctagagaattgcagacactgcacaaccttcggaaactctttgtccagg

SEQ ID NO: 516030 - DNA, 435 bp, Homo sapiens
  misc_feature (408)..(408): n is a, c, g, or t
caagcgtaatggcacgaccacggtcggatcaaagacacgcgaacagcgtcccttgatccaagtgaccttgatggccaaccccaccacttgtatcatcagcagcactggaatccacggcaaagaaaatatctggttgcatgagattaactgcgccatgcgcccacgcaagccaacttcttcctgtacattagccccataatcaacgtgttcggcgttgtgacgtcttgtaggtcttctaacgcccctaataacgtgactaacccaaaacggttgtcccaagcttttgacatcacccgttgctgattggccgtcaagacggtggtcacttctggcacaataaagtcgccaggtcgtaccccataagccatttcttcctgatcatccacaaacccagcattaaacaacatntcatcaacagttggtaactgtggtgct

SEQ ID NO: 516031 - DNA, 309 bp, Homo sapiens
cggacccgagctttctccttcagtgaaggctgggcgttgtggctcacgcctgtaatcccagcactttgggaggctaaggcaggcagatcacctgaggtcaggagtttgagatcagcctggtcaacatggtgaaaccctgtattttttagccatcatcttcacttttttttcttttttttttttggagacggggtctcattcattaccccaggttggagtacaggggtgggatttaagttaaccgaaccttttgcttccaaggttaaagcatttttggggcctcaccctccggagaagctagaataacgg

SEQ ID NO: 516032 - DNA, 1865 bp, Homo sapiens
tgccctctggcctccatcatcactgacatcatgctgattgtccccatgaaggccagccttgaagcttggtcagtctccctaactgtatgattgatccccacttattgcactacatcactgagttcccgtatgccaagttatggccacttacatccacgtcagcaaaactggtgccgagggagctgttcttgacgaagctaaaaatatcaataagtctttgtctgctcttggaaatgtgatctctgctttggcagaagggacaaaaacacatgtgccataccgggacagcaagatgactcggattcttcaggactctttgggtgggaactgcagaaccaccatcgtcatttgctgttctccttctgtcttcaatgaggctgagaccaagtccacactgatgttcggacagagagctaagaccatcaagaatacagtctctgtgaacctagaactgacagcagaagaatggaagaagaaatatgaaaaagagaaagagaaaaacaagactttgaagaatgttatccagcatctggagatggagctaaacaggtggaggaatggagaagctgtgcctgaggatgaacagatcagtgccaaggaccagaagaacctggagccttgtgataacacccccatcatagacaatattgctcctgttgttgctggcatctctacagaggagaaagagaagtacgatgaggagatctccagtctctacagacaactggatgacaaggatgatgaaattaaccagcagagccagctggctgaaaagctgaagcaacagatgttggatcaggatgagcttttagcttccacaagaagagactatgagaagatacaggaggagctgacacgtctccagattgaaaatgaggcagccaaggatgaggtgaaagaagttctccaggccctggaggagctggctgtcaattatgaccagaaatcacaggaagtggaggataagacccgggccaatgagcagctgacagacgagctggcccagaaaacgactacattgacaaccacacagagagagctgagccagctacaagagcttagcaaccaccagaagaaaagggcaactgagatcctgaatttgctgttgaaagatctgggggagataggtggaattattggcaccaatgatgtgaaaactttggcagatgtgaatggagtcattgaggaggagtttaccatggcccgcctgtacatcagcaagatgaagtcagaggtcaagtccctggtgaaccgcagcaaacagctcgagagcgcccagatggactccaacaggaagatgaatgccagcgagcgggagctggcagcctgccagctgctcatctcccagcacgaagccaagatcaagtctctgacagactacatgcagaacatggaacagaagaggaggcagctagaagagtcccaggactcgctcagcgaagagctggcaaagctccgagcccaggaaaaaatgcacgaagtcagcttccaggataaggagaaggaacatctgacgcggttgcaggatgctgaagaaatgaagaaggcgctggagcagcagatggagagccaccgggaagctcaccagaagcagctgtccagactccgagacgaaattgaggagaagcagaaaatcattgatgagattcgggatttgaatcagaaactgcaactggaacaggagaagcttagttctgattatgacaagctgaaaatagaggaccaagagagagaaatgaagctggaaaagctcttattgctcaacgataaaagggaacaagccagagaagacctcaaagggctggaggagacagtgtctagagaattgcagacactgcacaaccttcggaaactctttgtccagg

SEQ ID NO: 516033 - DNA, 531 bp, Homo sapiens
  misc_feature (20)..(21): n is a, c, g, or t
ttatcgacacacattggctnnactgacacaaaccgcggcgctccacaaggttgcactgccttgccatagttcaattgttcaccaccatggtgtaaagtggtgaaatatcagcggagtggtcgccatgaaatccagtcgcgccagtgctcaacaatccgataccgagaccgtaagggcctcgatcagtttcccagcaggtgactacgccgagctgcaacggctcgccgcgagcatgaaggtgtcggtggcgtgggttgttcggcaggccattgaagagtatctggccaagagggggtacggatcagacttggtcaagagaacagggtaactcgacgcacttcgaagagcggcctcaggtgcgctcattcagcggactctgccaccgcgcgtggcgtgcttcggattcgcagggggagagccatggatgtattcaagctcagggagagtctagtctctgactacagcagcttcgcgcgttcgttcacttccatccttgctgacgatatccgtggggggtcgagccaacattgt

SEQ ID NO: 516034 - DNA, 1855 bp, Homo sapiens
agcgggacttagcctgtggcagaggcagctgcacacatgtgggagggatatgaacttctgagaaaagagaaaatcccatgttgtacccgactctaataggccaggaacgagctttgccattggaatgtggcagtcctgcctctgcaggtcagcaaaactggtgccgagggagctgttcttgacgaagctaaaaatatcaataagtctttgtctgctcttggaaatgtgatctctgctttggcagaagggacaaaaacacatgtgccataccgggacagcaagatgactcggattcttcaggactctttgggtgggaactgcagaaccaccatcgtcatttgctgttctccttctgtcttcaatgaggctgagaccaagtccacactgatgttcggacagagagctaagaccatcaagaatacagtctctgtgaacctagaactgacagcagaagaatggaagaagaaatatgaaaaagagaaagagaaaaacaagactttgaagaatgttatccagcatctggagatggagctaaacaggtggaggaatggagaagctgtgcctgaggatgaacagatcagtgccaaggaccagaagaacctggagccttgtgataacacccccatcatagacaatattgctcctgttgttgctggcatctctacagaggagaaagagaagtacgatgaggagatctccagtctctacagacaactggatgacaaggatgatgaaattaaccagcagagccagctggctgaaaagctgaagcaacagatgttggatcaggatgagcttttagcttccacaagaagagactatgagaagatacaggaggagctgacacgtctccagattgaaaatgaggcagccaaggatgaggtgaaagaagttctccaggccctggaggagctggctgtcaattatgaccagaaatcacaggaagtggaggataagacccgggccaatgagcagctgacagacgagctggcccagaaaacgactacattgacaaccacacagagagagctgagccagctacaagagcttagcaaccaccagaagaaaagggcaactgagatcctgaatttgctgttgaaagatctgggggagataggtggaattattggcaccaatgatgtgaaaactttggcagatgtgaatggagtcattgaggaggagtttaccatggcccgcctgtacatcagcaagatgaagtcagaggtcaagtccctggtgaaccgcagcaaacagctcgagagcgcccagatggactccaacaggaagatgaatgccagcgagcgggagctggcagcctgccagctgctcatctcccagcacgaagccaagatcaagtctctgacagactacatgcagaacatggaacagaagaggaggcagctagaagagtcccaggactcgctcagcgaagagctggcaaagctccgagcccaggaaaaaatgcacgaagtcagcttccaggataaggagaaggaacatctgacgcggttgcaggatgctgaagaaatgaagaaggcgctggagcagcagatggagagccaccgggaagctcaccagaagcagctgtccagactccgagacgaaattgaggagaagcagaaaatcattgatgagattcgggatttgaatcagaaactgcaactggaacaggagaagcttagttctgattatgacaagctgaaaatagaggaccaagagagagaaatgaagctggaaaagctcttattgctcaacgataaaagggaacaagccagagaagacctcaaagggctggaggagacagtgtctagagaattgcagacactgcacaaccttcggaaactctttgtccagg

SEQ ID NO: 516035 - DNA, 446 bp, Homo sapiens
tggatgtactaggtggggccctagcctttctataagctctaagtaagataacacatgcaagcttcccggtccagtgagtcaccctctaaatcaccacgatcaaaggggccaatgcttcaggcacgcagaaatgcagctcaaaaggcttagcctagccacacccccaggggaaacagcagtgataaacctttcagcactaaacgaaagtttacctcaagctcatactaaccccgaggttgggtccaatttcggtggccagccaccggcgggtcacgacgaattaaacccgaagttcaatagcaagccgggcgtaaaagcagtgtttacagatcaccgccctccccgaataagagctaaaactccacctgcagtggtacaaaaactcccagtggacacaacaataaactaggacaggtggcttaaccattatctgaacacacaatagc

SEQ ID NO: 516036 - DNA, 541 bp, Homo sapiens
  misc_feature (4)..(4): n is a, c, g, or t
  misc_feature (73)..(75): n is a, c, g, or t
  misc_feature (83)..(83): n is a, c, g, or t
  misc_feature (113)..(113): n is a, c, g, or t
  misc_feature (211)..(211): n is a, c, g, or t
  misc_feature (279)..(279): n is a, c, g, or t
  misc_feature (300)..(300): n is a, c, g, or t
  misc_feature (325)..(325): n is a, c, g, or t
  misc_feature (347)..(347): n is a, c, g, or t
  misc_feature (375)..(375): n is a, c, g, or t
  misc_feature (397)..(398): n is a, c, g, or t
  misc_feature (419)..(419): n is a, c, g, or t
  misc_feature (428)..(428): n is a, c, g, or t
  misc_feature (436)..(436): n is a, c, g, or t
  misc_feature (438)..(438): n is a, c, g, or t
  misc_feature (462)..(462): n is a, c, g, or t
  misc_feature (464)..(464): n is a, c, g, or t
  misc_feature (541)..(541): n is a, c, g, or t
cgcntcttaaataccagcttataatacttgacattttctaatcatttcaaattgggtttcccataagtgtttnnnatgggagngcattcattcacttgggtgagttaccagtntttacttccaccaatccaaagtgggttttggtttttgaaattgtccatactgtagtcattcaaaaaaatacaatatgcttttgaaatgtctagctttnaagaaaaaagtcctgtgcttcctaccccagttgtgggtttttactccaaaacaactcatgtacccttnttttctttctgcctgtttttntgtttcctctcttgcttttttaagnctctttcctgtttctctctttnttccttctccctcacgtttcaggtttgntggaagggtaagttgtgtattnntggtgttgtgtagtggggggntcccggtgnccctctgngntcccattactggaaatacaacagncntggcccaaaaatctgatcttactagtttccttcagggtcaaatccaggatattttattgtacaaaaatttccaatgn

SEQ ID NO: 516037 - DNA, 1925 bp, Homo sapiens
tgccctctggcctccatcatcactgacatcatgctgattgtccccatgaaggccagccttgaagcttggtcagtctccctaactgtatgattgatccccacttattgcactacatcactgagttcccgtatgccaagttatggccacttacatccacgtcagcaaaactggtgccgagggagctgttcttgacgaagctaaaaatatcaataagtctttgtctgctcttggaaatgtgatctctgctttggcagaagggacaaaaacacatgtgccataccgggacagcaagatgactcggattcttcaggactctttgggtgggaactgcagaaccaccatcgtcatttgctgttctccttctgtcttcaatgaggctgagaccaagtccacactgatgttcggacagagggtatgaaatcaaggcttaggtgcaaagccatggataccatacctgagaccacacagccaagctaagaccatcaagaatacagtctctgtgaacctagaactgacagcagaagaatggaagaagaaatatgaaaaagagaaagagaaaaacaagactttgaagaatgttatccagcatctggagatggagctaaacaggtggaggaatggagaagctgtgcctgaggatgaacagatcagtgccaaggaccagaagaacctggagccttgtgataacacccccatcatagacaatattgctcctgttgttgctggcatctctacagaggagaaagagaagtacgatgaggagatctccagtctctacagacaactggatgacaaggatgatgaaattaaccagcagagccagctggctgaaaagctgaagcaacagatgttggatcaggatgagcttttagcttccacaagaagagactatgagaagatacaggaggagctgacacgtctccagattgaaaatgaggcagccaaggatgaggtgaaagaagttctccaggccctggaggagctggctgtcaattatgaccagaaatcacaggaagtggaggataagacccgggccaatgagcagctgacagacgagctggcccagaaaacgactacattgacaaccacacagagagagctgagccagctacaagagcttagcaaccaccagaagaaaagggcaactgagatcctgaatttgctgttgaaagatctgggggagataggtggaattattggcaccaatgatgtgaaaactttggcagatgtgaatggagtcattgaggaggagtttaccatggcccgcctgtacatcagcaagatgaagtcagaggtcaagtccctggtgaaccgcagcaaacagctcgagagcgcccagatggactccaacaggaagatgaatgccagcgagcgggagctggcagcctgccagctgctcatctcccagcacgaagccaagatcaagtctctgacagactacatgcagaacatggaacagaagaggaggcagctagaagagtcccaggactcgctcagcgaagagctggcaaagctccgagcccaggaaaaaatgcacgaagtcagcttccaggataaggagaaggaacatctgacgcggttgcaggatgctgaagaaatgaagaaggcgctggagcagcagatggagagccaccgggaagctcaccagaagcagctgtccagactccgagacgaaattgaggagaagcagaaaatcattgatgagattcgggatttgaatcagaaactgcaactggaacaggagaagcttagttctgattatgacaagctgaaaatagaggaccaagagagagaaatgaagctggaaaagctcttattgctcaacgataaaagggaacaagccagagaagacctcaaagggctggaggagacagtgtctagagaattgcagacactgcacaaccttcggaaactctttgtccagg

SEQ ID NO: 516038 - DNA, 909 bp, Homo sapiens
  misc_feature (300)..(300): n is a, c, g, or t
gactgcgcacgagtctaccgacgcggagattctcgagcttcactccaaggatgcagagaccatctgagcccgtcctaggcgcggtactggactggccctcgtgaggctgatggctctgaaagacgtacggcgtctagcagtaaggaaccatggtataaggaacgtgcattacaacagagtactatccaagactgatgaaactcgggaatgaagtccggtatcaaggtactgggaaaccagaattggccttcggacatggccgtcaatcgggcaaacaagggtggacgtcctgttcagtgntcgtgagccgtgtggacctgaccggatagggcgcaggaagagtacttgagctcccccgaaagtcttaggtggtgagccatcgagaattcttgctgtacgccacatagcgcaatgagcttgcgttactgtcgggatacgctctttttctgacttggactgcgcggttactagacgcagcggtgctgcacggtcagtctacgaagggaggaatgcgagaaaagcgtggggtacgcaaaatacaccacgagacttgttcgccgtggtgtaccccgatttgtcccaaccctaaggaggcttactcttggcgcaccgtagaaccttaatcgcgctagaagcgaccccacagcggcaaccgtcttgggcggagcactctcgtccaggggaacctcgaaggttccccgaaaatctagcgccgcatcgtatatagaaccccacacgattaagaaacccggtagcacgctagacggaggctaatctatagtgggttggccacaagcagctaggtctttaggcgacgttcgatagctttctgctcaaaacaagtgcccctactgtatagctatggccacagggagaagcgttcgcatacaagctggctagaataacccg

SEQ ID NO: 516039 - DNA, 1239 bp, Homo sapiens
cagtctagcagtgttgcgtcctggttgtttgctgacgtctcttggtggtgagatggacaattacgattgcgggtgatctccagttctctacggactcctggtgtgtcacgctgagtgaacttgggcacgccaggctgctggctgaaaagctgaagcaacagatgttggatcaggatgagcttttagcttccacaagaagagactatgagaagatacaggaggagctgacacgtctccagattgaaaatgaggcagccaaggatgaggtgaaagaagttctccaggccctggaggagctggctgtcaattatgaccagaaatcacaggaagtggaggataagacccgggccaatgagcagctgacagacgagctggcccagaaaacgactacattgacaaccacacagagagagctgagccagctacaagagcttagcaaccaccagaagaaaagggcaactgagatcctgaatttgctgttgaaagatctgggggagataggtggaattattggcaccaatgatgtgaaaactttggcagatgtgaatggagtcattgaggaggagtttaccatggcccgcctgtacatcagcaagatgaagtcagaggtcaagtccctggtgaaccgcagcaaacagctcgagagcgcccagatggactccaacaggaagatgaatgccagcgagcgggagctggcagcctgccagctgctcatctcccagcacgaagccaagatcaagtctctgacagactacatgcagaacatggaacagaagaggaggcagctagaagagtcccaggactcgctcagcgaagagctggcaaagctccgagcccaggaaaaaatgcacgaagtcagcttccaggataaggagaaggaacatctgacgcggttgcaggatgctgaagaaatgaagaaggcgctggagcagcagatggagagccaccgggaagctcaccagaagcagctgtccagactccgagacgaaattgaggagaagcagaaaatcattgatgagattcgggatttgaatcagaaactgcaactggaacaggagaagcttagttctgattatgacaagctgaaaatagaggaccaagagagagaaatgaagctggaaaagctcttattgctcaacgataaaagggaacaagccagagaagacctcaaagggctggaggagacagtgtctagagaattgcagacactgcacaaccttcggaaactctttgtccagg

SEQ ID NO: 516040 - DNA, 640 bp, Homo sapiens
  misc_feature (107)..(107): n is a, c, g, or t
aatgttccctcatgctctttcttggcaaaataaaacaaagcaaaataactctccatatctcactccctaaaattatcactattctgaaacttctatcactataaatnggttgcttattgttgggctttttttttttttggagaacagggtctggcctctgtcgtcgggcttagctagagttacaggggcgtggactcagtggcttcactgtgcagccttcaacctttccgaggcctcagggaaattctcccacctcagcctcttgaatagcggggactacagtaggtgcacgccatcacaccgggctaatttgggtattcttggtagagacgaggtttaaccagtgtggctataggcgggtctgaactccgtgagctcgggcaatctgccgtgcctgggcctcccaaaggtgctgaggttcacagatgttgagccacgggtgcccagcctattcttaagccttttataacatagatctcataaagctatatcacgggttgggttctgggttctctttcattctcaacattaagggtctttctcagactttataccgtgagggccgagtttattctctcctaatggctcgtatagcatttccatgggtgtaccctagtttatatgcttaaattttaccagt

SEQ ID NO: 516041 - DNA, 126 bp, Homo sapiens
gggacacctcaatttctgcctgtctgagccgtttaggtctaagtatatcaagggagttggcagtgcaccgaggtgggggatcactggttgaagaatacaggatggtgagatgcagaaactgcatta

SEQ ID NO: 516042 - DNA, 115 bp, Homo sapiens
agcggttgacggacatatctgtccgaggggtcgtgggagcccagcgcctgccttgagggaaatgaacactgaatacaggatttgggaactctattggcttgactgcagagaaggg

SEQ ID NO: 516043 - DNA, 273 bp, Homo sapiens
ctggcaacatggtgacaacctgtctctactaaaaatacaaaattagccagggtgtggtgggcgcctgtaatcctagctacttagtagagtgaggcaggagaatcacttgaacccgggaggtggaggttgcagtgagccgagatcacaccactgcacttcagcatgggtgatagagtaagactctgtctggaaaaaaaaaaaggaaagcaaaacgaaaggaggcagggagtaccccaggaagggtaaggtaggggtaggtatgcatgaaggacg

SEQ ID NO: 516044 - DNA, 895 bp, Homo sapiens
  misc_feature (52)..(52): n is a, c, g, or t
  misc_feature (72)..(72): n is a, c, g, or t
  misc_feature (125)..(125): n is a, c, g, or t
  misc_feature (153)..(153): n is a, c, g, or t
  misc_feature (186)..(188): n is a, c, g, or t
  misc_feature (224)..(224): n is a, c, g, or t
  misc_feature (248)..(248): n is a, c, g, or t
  misc_feature (284)..(284): n is a, c, g, or t
  misc_feature (365)..(365): n is a, c, g, or t
  misc_feature (371)..(371): n is a, c, g, or t
  misc_feature (378)..(382): n is a, c, g, or t
  misc_feature (384)..(384): n is a, c, g, or t
  misc_feature (388)..(388): n is a, c, g, or t
  misc_feature (475)..(475): n is a, c, g, or t
  misc_feature (498)..(498): n is a, c, g, or t
  misc_feature (503)..(503): n is a, c, g, or t
  misc_feature (508)..(508): n is a, c, g, or t
  misc_feature (544)..(544): n is a, c, g, or t
  misc_feature (551)..(552): n is a, c, g, or t
  misc_feature (584)..(584): n is a, c, g, or t
  misc_feature (632)..(632): n is a, c, g, or t
  misc_feature (641)..(641): n is a, c, g, or t
  misc_feature (665)..(665): n is a, c, g, or t
  misc_feature (679)..(679): n is a, c, g, or t
  misc_feature (688)..(688): n is a, c, g, or t
  misc_feature (699)..(699): n is a, c, g, or t
aaaaaataaaagggaggtgggcagcaaacacacaaagtcctagtttcctggntccctgggagaaaagagtgnggcgaatgaatccacccactctccacagggaataaatctgtctcttaaatgcnaagaatgtttccatggcctctggatgcnaatacacagagctctggggtcagagcaagggannnggagagagaccacgggtgaaaacagcagctacacanattcacctaattccatctgagggnagaacaaagtggccaagtcttgggggtagcagctgntcccagagtcaagagaataccgtacacccctggggagatttgctcctaaaaagaagtggaagttaaaaacaaaaaaaaaanaaaaanaaagggnnnnntntttnttgggccacactcttcaagaaaatgccataaacctgttatttaatattttaatttcatagcattggacacacactcaacatattganatattgcttccttagagaaaaanatggnaaaanagggaacaaaaaatattgcatctttctgctggggantctcggnncccgggcatggggtgtggtgcaccagtgtccnagcctgcgggaggcgctgaggtcggccgggtccttttttgtggaaggntgtgcccantgcctggggctgtatggcaaaaantgtgttgggtgtcnttggccttnccagctcatgncctcagtcgccggtcacctggggggcctgcccgtcggagggctggttggctgactggatgaacatgggctgggcgaggtcctggcccgcagcatggtgacttgctggatctggtagagctgctgtccatctgtgaactggctgaactgctgctgtccttgctggacctctgtctgtgtaatctgttgagcattggt

SEQ ID NO: 516045 - DNA, 152 bp, Homo sapiens
  misc_feature (48)..(48): n is a, c, g, or t
  misc_feature (110)..(110): n is a, c, g, or t
  misc_feature (140)..(140): n is a, c, g, or t
  misc_feature (149)..(149): n is a, c, g, or t
ctgggaatcagcaccgctggaggagtaggcagcccacttggtgatgancctccatttattcaatgatgcacccaactggagttgcagcacagacctaaaaactcagagcnggggataggattgtcaccatctgtgggcanatccactcnagg

SEQ ID NO: 516046 - DNA, 286 bp, Homo sapiens
catacgctctagacggggttcacgcgggttagaaaggaactctgtcttatccacggtcagtaggaatgtaaattagtacagtcattatggaaaagagtatgcaggtttcttcaaaaataaatctaccatatgatccggcaatcacttgactagatatttatccaaagaaaatgaaatcagcacgtcaaagaggcatctgcactcccatgtttattgcagcagtattcacaatagccaagatatgaaaccaatctaagtgcccatcaacaaatgaatggataaagaa

SEQ ID NO: 516047 - DNA, 85 bp, Homo sapiens
  misc_feature (36)..(36): n is a, c, g, or t
tcaagcttctctttttgcttatgaatattctgtatntataacccattgttttctgtagtttaattaaaacattttcttggtgcta

SEQ ID NO: 516048 - DNA, 426 bp, Homo sapiens
gcatacttttgacctcatgcaatccacctgccttggcctaccaaagtgctgggattacaggctagagccactgtgcctggcctctggtcactttgtaactgcgaccctacgcacatgtcttaacctcgctgaggctgactgcttatatgtagaagggggaggataacacctgcttagagaagctatttcacgtgataggaaacatatacatgcatcgttcaaagtctcgcctatattatgcgcttacgaaatgtacatgtctatacatgtgtatctactgcatgttactgctccttgcatctgataacatctggagatgccatactttgctgtagactttatattgtggacatatgtataccatctgtccatagtttcagcggctgaagtgtgctcatagtacagccactatgtgttgcgtgtgtg

SEQ ID NO: 516049 - DNA, 206 bp, Homo sapiens
  misc_feature (22)..(22): n is a, c, g, or t
ttttatatatgtataagaatgntccacaagaagtgtttgtaatagtaacaacaggaaatggccaggtgtggtggcgcacacttgtaatcccagttacttgggaggctgaggcaggagaatcacttgaacctgggaggcggcggttgctgtgagccaagatcgcaccattgcactccagcctgggtgagaagaatgagaatccatct

SEQ ID NO: 516050 - DNA, 338 bp, Homo sapiens
ggtcgacatagaaactagagcatagcttccataggattatgggcaaatagtccaggcacggtggctcacgcctgtaatcacagcactttgggaggccgaggtgggcagatcacgaggtcaggagatcgagaccatcctggccaacatggtgaaaccccgtctctactaaaaatacaagaaaatcagctgggcatggtggcgggctcctgtagtcccagctactcgggaggctgaggcaggagaattgcttgaacctgggaggtggaggttgcagtgagcagagatcatgccactgcactgcagcctggtgaccgagcaagactccgtctaaaaaaaag

SEQ ID NO: 516051 - DNA, 415 bp, Homo sapiens
agtgtgctacccatggaccggtatattgcgggggaatgagattacaccctgtaacttagatcatatataaaaatcaactcaacggggatcaagagataaactgatgagctagagtctataagagtcctagaagaaaacagtagtgggaaaatcttcatgaggctgcatctggcaaggtgggaagtatgacatcaagggcaaggacaacaaaagaaaaagataaactagagttcatcaaatttaaaaacttgtgtacatccagcaacagtatcaagaaagtaaaaaggctgactgtggttgcccacgcctgtaatcccagctactctggaggctggcaggacaatcactggaacccaggaggtggaggttgcagcgagcccagatagtgccattgcattccagcctgggcaacagg

SEQ ID NO: 516052 - DNA, 1112 bp, Homo sapiens
  misc_feature (201)..(201): n is a, c, g, or t
  misc_feature (225)..(225): n is a, c, g, or t
  misc_feature (228)..(228): n is a, c, g, or t
  misc_feature (358)..(358): n is a, c, g, or t
agggaacagctttcctttgccgccgaggaagtattattggaatggccggcaacatccccttttttgcttcacccttagccccctttgcttcccagccctgaaggttttacccggctatgctggccccctttgcccaggacactcttccctctcgggatgtgtgattaactcccagaaagggaaagagggagccagggcaanataggaagctctgcctgagctttncantaggcacgccagccagaccaataaaaagcgtctgtcccactctgctaagcctggttttcttgagcagagggatggaacagagggtgagagaggcagtggccgtctccacctcagctcctgctccctctgnatcagagcccttcctttcttgggggatgggccttgccctcttctcttttcccttcctgtacctttgactaacgctcagcttccgggcctgcatggcagaaaacaggaaaaaggaggaaagagacacgagagtgcacacggtgagatactcacagagaagcagaagtaggcagaaccgcgtggagtggcaggctgcctaaagacttccgttacgcctgccttctcccagtacagttccaaagaggaagtcaacagtaagcagcagcctccaagactgtctcctttcggccagatatcataagatggacgccataatcctgaggcctcctagaggctgagggggcaacggtgtgatccagctggctcatcccagacccaggtgggccagttattcaaattgttcaagaagtttggtgtgcaagccaggtagtcaaagcagagagcagttataagttatgtaaatggtggaaattatgttaaaaagcaaggacgaataaagtattcaagaagtgcatcccataagttactaaggaaagacagacaaaaacagacaggaaggaactcaatatacaggggatacgcgcaacaacacacggctacagcgccaaagtgcacaacgggacacagaacaggaagacgaaggccccagcgcgacccagcacacaaatcgggaaacaacacggcccgagaacaccacaatcaaaagagcacgcatgaaaacgaggaaacacgcaaggagtaacccgcgacaaagg

SEQ ID NO: 516053 - DNA, 100 bp, Homo sapiens
gcgagcaccgcatcacacatgctgctgtcccaggaccagtccagtcctctagtgccttatctgagtgctgcagccgccagtctccaccccaaggagacag

SEQ ID NO: 516054 - DNA, 222 bp, Homo sapiens
cacgaggcctcgtgccgatgtgctgggcgttggtggcagcccgcgcttcgagttcgcggatataggcctgggcggccggcgggaatcgggagaagtcgtgttcgttcatgctgaacacaatagtgcagccgccgcgcaattgggtatacgtcacaccaaacggtactcaagctgtgtgctgatacttgcgcgaagggtgccgctgcacaggatccacgtcta

SEQ ID NO: 516055 - DNA, 183 bp, Homo sapiens
ttcaaagtgtgaaactaaaaccttatgggtgtaccttaaatcttggcatggtgcctctatgtcccatttaaaataaaataccttttccttaactttagattggaaataaggttttattttgatggatgaatttttgcctgatgactttactctcaataaaggctgaaaattgtgttttactga

SEQ ID NO: 516056 - DNA, 165 bp, Homo sapiens
tgtgtgggctgctaacaatgcaatgaaaaccaccgctgcagctgatctgggctttttggttgttaagtagagtctgggcagagtcgggaaactttcttttttctttttgagacagagtctcgctgtgtcactccagcctgggcgacagagcgagactccagctca

SEQ ID NO: 516057 - DNA, 221 bp, Homo sapiens
ggacgaatcagaaagggcactatgatttgagagaaagaacggacagctacaatccagcctgtacttactccatttacctaacactgaattactcgttaggactgcattagccttagctagtgttaccatttcttgctattatcacactaggagtgcactgttattggtgcactactcgttgacccccgtctcaccctacttcctccagttcctctgtgggt

SEQ ID NO: 516058 - DNA, 401 bp, Homo sapiens
tttaaaaaaaaaaaaaaaatttttaaatttttatttttaggtcccttaaagggggcgggttttccttttgccctttaacccccaaaaatgggaggggaaggtttattttggcccccttaaagcaagcaaaaaaggtttttccatttccctttttttttttcttttttcacaaaagggaaaaaggtttttccctggtttaacgggtttttttttaagcccttccggtcggtttttaatttttggggaggtttgtaaaaggccccgtttttcccggttgaaaggaaggtttttttttttttaaaaaccaaggggttttttaaattttaagggaggaggttttttttgggaattcctttgtttttatttgtttaaaggttgggaaattgggaaaccccccccca

SEQ ID NO: 516059 - DNA, 932 bp, Homo sapiens
ggtctcctggaactgctgctgactacctggctgcatagatgatgcctggcagcttgcactgtgactgctccagttcccactgcaagagttcatcctggccatgggcttcttcctggtcctggtgaatggagcagatcacacttggcttacaaaggagcagtcagggcctgtcacctctggatgtgaaacaacggtgctctgcttggtgaacatgtgaatggttgtgtgcctgcagcattgtgcatgatgggccaagggtgtcccacaaggctgagtggatgccccagcaaacccctcagccttgctgttgccttgtgtacttggtgttctccctggccctccactccgtgttccgatggtggctggcggtagtggcctgcagctgagacctgggctccgggggccatggagctgtgcctggctttgcttggctccacaagggcatcctggctgtcagctgtccctgcggcttgtttgcagagccaccttagggcacaggtggtggctggctgtgtggatcctcttctcatgcatgacacctctagtgcatccgggctgggtgcagtctggcagagtcggcaggacctctgcagcacgctggcccaagtcttgtgctaagagcgcgcattggcatgttggcacctttctctataatcaccttttcttgagaaatccttgctcccaggagctgggcagttcttgagcaaaggatcctccacggtcatatctgctccctagcacggtttgctcttgtcacattggcctggttctattccaaatctagggggcgtccaacagatgggcactgcgagatagctgaacggtcccctgttccacttccctctcccaattcgcggcgcaaacgacgcgagcccgcgccatatctctcagacacaactctcgcagccaacatcaactcgcgcctccgtcag

SEQ ID NO: 516060 - DNA, 1597 bp, Homo sapiens
  misc_feature (1597)..(1597): n is a, c, g, or t
acgtcgaccttaggaggcaggtaggttcttaggacagacgaggcatggtcgggataccgctggctgctggacgagttgatgagtagcgtggcggaggatggctacagcatgaagtggttacactgtggaactcttcactaggatcgagcgtaggtgaatgcacacatgggagaatattcattcaggaagacaatagtgtacgagaggagacgtggattgcatggtagaactagagcgcaaatgagccgtgccgtgtactatagttcatagtcgctgagagttgcatctcgtgactgacaagggacgaaaaatccgacggaacgagtggggcctagatgctgagtctatcctagaaagaaaattgccctctttgatggaagcattgtgttgagcgatctaccaagacgtgagccattagatagagcgaattcattgtgagtcgtccacatggattagcatagacgatactagcactcagccaagtacatatggacgtgcacgttccttggacacggttacgtgcacataggcggtagaacgtcgatgcgcctatgtgcgcagttccatttagccacgcgtacgtaccgcgctggtggggcgcttgcatattcacccgttacacgtctgtcgttgtccctttctacgcataggtagattggggtgcctaggttagtcgggcaagggagcccatttagtgcgcggtacttcataaaggagtcttgttttacattaccctacaattcatgtgccgggtggcctcgccacaaaacacggtccttgttaacacttgacggacgattggtttcgctaaccatacaacataggatacagcggtgggactttcaaccttacaatcaaggcaaacggcaaagaccatcgaaagacaaaggccacggacagggtataaattatgcgattggtcatccattacgaacagcagtaccggctctaggaggggggagccctttattgcggcacagttacaccaaggacactttccatagcgacacattcacattctcctggttaaacctcaacaaggggcactgtcgcaaggaaggaacatgaaaagcaagaaagtcacccctccttagttgcgaacggcaaacaatcgacacacttaagtgtgagacggcagacaactccggggtgggactacacacacacagtggactttttcaggccgaaggacaacgacagatggccagtacaaactactcgcaagcaggaacagagattggcctacgggagagcagacaatgggacaccacggtgacaccgccgggccaaagaagggtaccacggcgccgaaatagctcgcagggagcacggataccaccatcagcctggggcatcgtgatggggacctacgtggcggcgcaagtcaacatgccgtgaagccaccccggaagagtgagaccgcgctgaatctcgcgagcagaggcagcggtgacacccccgaggcgtcggccaccggacagtggacacaaacaaagagaagaggagtgaaccaacacgtcaggtcagaggtcccacacgagggaagacgggacatcgggagaagcacaggagtagagcgacagacccgaatgcaggn

SEQ ID NO: 516061 - DNA, 514 bp, Homo sapiens
  misc_feature (13)..(13): n is a, c, g, or t
tgctgcttctccntcctcggagctcagttttctcatctgcaatatgaaggagttggactcgatcaatctttgacagtccatacctgctctaaaatcctatgtcttttcttgaagttactctatttaacagaatgcattgctttctcagtttgactatttgaattatgtttgcagtacacttattgctattgcatgttgtctaaaatagttttcctatatgatgtatattaaaactaatccctcttgagctgattgataatgtgtgtatatagccatacattaaaagctagtaatagtagggctctcataacatacttttccagttgtctaaccttggaatgttattaattcttctatcttacaggagatacttctcgtcatcgtactcacattccgtgattacagagtatgcaagagtcatcttctcaactgttgtcctcatgatttcctttctggaactgtatgtatttactatatgttttgttagattactggtatgctgcagttttggact

SEQ ID NO: 516062 - DNA, 150 bp, Homo sapiens
gcaacttagagttcttagagctttctggttttttagcttagtgctggctatagcttgtaatcatgtcggttgtatatttcatttacggcagtttttttgtttgtcagccattttggaatgtgtcgcctgcagtagagacaggttgaaggg

SEQ ID NO: 516063 - DNA, 406 bp, Homo sapiens
  misc_feature (140)..(140): n is a, c, g, or t
  misc_feature (142)..(142): n is a, c, g, or t
  misc_feature (151)..(151): n is a, c, g, or t
cacagagccgccttgcactgttttccctccaccacagccatcctgtccctcattggctgtgtgctttccactatacacagtcaccgtcccaatgagaaacaagaaggagcaccctgccccaaaaaccccaaatgtttggngnatttccccnacctgcaagtggacagcgacattcagtcctgcactgctcacctgggtttactgatgactcctggctgccccaccatcctctctgatctgtgagaaacagctaagctgctgtgacttccctttaggacaatgttgtgtaaatctttgaaggacacaccgaagacctttatactgtgatcttttacccctttcactcttggctttcttatgttgctttcatgaatggaatggaaaaaagatgactcagttaaaaaaa

SEQ ID NO: 516064 - DNA, 178 bp, Homo sapiens
  misc_feature (144)..(144): n is a, c, g, or t
agctcctgttactccctcttaaattatgtgggaaatcttaacggaagggcaatgggcccaggaatacctgcagcgtagtgacctcagatcctgatactcaccatgaaactctaagatactgattggaagcgacttgtggctgcnggctgtgtgtgtgactctgccggggaccctggca

SEQ ID NO: 516065 - DNA, 332 bp, Homo sapiens
gacagaagggaggcggggaggtatggagcaccagtagagaccacctttgtctcaaagcagaaactgattcagttaaaagtggatttggggtcaaaatgcgcgtgttgatgttctacaaaagttagaagttgcacacattgctcaaaagaatctaagtattaaaaaagaggtaccaggccacacccgtgctctttttgattcatctgcacctttcctcagaggcagctgggcactagcgcagcacagcctgccggtgaaatagcagctccatgctgttgaaggtcttatactccataccagcaattccttcttctccccttcggtcgtcttct

SEQ ID NO: 516066 - DNA, 425 bp, Homo sapiens
gccattatggccggacctttaggaaaggtaatgggaaaggttaaggaagggcttgggggccaaaggaaggagaggaggtaaattttccggatgggggggaaaatttaatttcccagttaatttcaatattccttaacggggtaattcctggaacctttaaggtttaaaacctctttattaaaattcatggccaactcctagaatccaatccttttaaaaggttacctaatttccaagggggttgaaaatatggttaaccattccaggattatgaatggactgtgaagattttaaaattaaccttagggcctaaattagccactgcctggttaacttggctgaaattttttaaaccgcctggtttttaatatagcaacctatttaaatactgcctggattaggttaaataaggaattttaatgtcc

SEQ ID NO: 516067 - DNA, 912 bp, Homo sapiens
gcactggctcagggccatgtggccatcgatgctggtgaactcgggggtgctgcaactgatgacctgtgctccagcccctgtcaagtactgctgcttcatccccccagtggctcacctaactgcttctgccgacactgcctgtactaccagaggatctcagattacatcgatgctgcaagtggcaatacagaccgggccactggatgcatcttctacaactaaacccagactcttatggcctgcaccctagggaatgatgcagacatccagacatactaggtacactttgacgtgaggctcgagtagactcaagactatgtgcatcaggaatgatggacagtccctgctatctgttttctacttggtactacgcctgtatcgagcagagaatgacctggtgaccgctctttagtggccctcaggacgccccattcgccccaatacccagtcacggttcctcgcacaggacgccctggcccatggttggggctgctggggttggtgtgtggaccttggagactcatgcccatcttggcaggatgtccctcgtgaactcggatgcaactggctctgggctgctttgtctgccagtgccgagtgtctggcctgtcgctctccccagagctcctgctggctgctgggatcatatcctaagaccgctagctccttgactccgagggtggcagaccacacaggaagtccatgtactacgtacaggtgcccgtagtttgccttgggagcccgagatccatggcgagtggtctccccacagaatccggctaggaactgattcctggacgaggagaagtagcttgacggatgccagcttgtccagggaacagtatgtgacagttgtcttggagacaggcattaactgacacccacaatccccatgggctggaagggaccctc

SEQ ID NO: 516068 - DNA, 180 bp, Homo sapiens
aagtgggacgtaagggactccatctcctcgttgtgtcatccacacgtttcctgtggaagtgcgggaggaggcgggggctgagggcgaggtgagcgagagcgatctcctggatggcgaggcgtagcttgggtcggatgcagaggagttgctgactgccagatctcgacgctgcgatctccg

SEQ ID NO: 516069 - DNA, 286 bp, Homo sapiens
  misc_feature (161)..(161): n is a, c, g, or t
taagaccctgatcacggtccgacatgatgatattgactctagatgagtatttttgctttctgtcatgtgttatcttttgtctactatctaattagtgctttcatggattaaaactattggagtctattttttaatttcttatcttacagtattttgctatntcctgaatatactgccttatatctcagtgtattagaaaattagcttactgttacattagtggctttttaggagaaagtagagacatgtacttactcactctactgcgtttaagggaagttttttg

SEQ ID NO: 516070 - DNA, 112 bp, Homo sapiens
tgaagaattgggtagaagctggcaagaaaagctaaagatctaactgacaagcttgctgttaccatatattatgaaattactataaaattacggctacgcgggaagggaatgg

SEQ ID NO: 516071 - DNA, 1509 bp, Homo sapiens
tgctggcatcttagtgcttgtcttgtgtgtgatcgcgattgcctgggatgttattcgttcgtgttaacctcctggtggagctccggtccgatcgtccttcgggattttggctcaagggtcgcggtgacgtggttacatgtttaacgccgggtaccgtctatagtcccacttgtggccctacattgtagggcgtagcacgcctgagggcgtaccgtagtttgtgtgtctgttgtgggtgtcgcgagggggtagcaacgccggatccgcggagaatgtcccccgggaggatcagctccggtcgaagccgccaacgggcgaccgcggccgtaaggcacttccgactaagtcaaggaccgggggaatctggcaaagggccagaccgcgggccccaggtccaagcgggccgcgtggaagcgctacagctctgagcggggcgaatgtcgagtgaggctaagggaaaggaccccgggggccggtttttgtaagtgccaagtgtgttgtcagcgatgcccatgggtctttttgaggttgcgttgcacgaaaggctttcgtcttgatatcccgtttcgtagggggttggaatttatctcggccgtcttagccgcgttctcatgctccccttgccctcctcataacggttgctctttgggcggagttctaagccagggggctgctgaagttctccactgcagctaaccgtttggagccgcgcttatggcgaagttgcgttgcgtgagcctgtgttaaaaccgttttggtcaggggatgagttatgaggccaggagttgtaatttcctcagcagtcctgtaacagtcgtggcgagagtgacctgaaaagtctccagaggacacaggcgggagactaggtaagcgctttttcagactaagctttacagacgaactgagggtcgtgtgcgcaccgaaggaacagtacgtctctagtgtttcgtcgagtgctagtatcgaagagtgtttgcaggagagggtgtagtgttgtcgtgtgtagtcagtgtggcgtaaagctagagtgactttgaccactggagatcggggtcacacgtgcccagtgactcttggggtacaatttgtaaacgctagagcttttagtcagaggctcttggtgaagcaggttctctggtcagtaagtagctcaagtgttgctactctgctggacaagtcactgctcagtgtccagcatgtatggtattatagtaattcaatggagaaatatgactaaaacagctgcccgtcttcgctcggctgcatttgaagagaacgagagtgaggacaaatgagtgaaaatggttcgcctgaacaataagtggggagacagccatcgttaacttgcgcaagaaaactgaagggatgtggacgcgagctggaaaacctcctattagccagatagctgactggcactggtggtttttgctctcgacagtatccacaactagctgacggctgggtgtattcagtttgaaaatattttgtgccatcatcttcactgcaagt

SEQ ID NO: 516072 - DNA, 287 bp, Homo sapiens
gctcagttgatcctctaactgatatctttctgaagggcagaaatatggaaaaggttcttgggacccagtaattctatttctaagaatttatccttaaggctggggcgcaggggcttatgccggtaatcccaccactcggggaggccaaggtaggatggctggagggcaggactccaagaccagccggagcaatacagcaagacctctctctacaaaaaaattttaaaaaattagccaggcatgagggtgtgcgccggtagtcccagctactcaggaggctgaggggg

SEQ ID NO: 516073 - DNA, 345 bp, Homo sapiens
gggggggggggggggaccccccctagggggggcccctattggggtccccgggcccccccttagggggggccgggccccctttttaaggttttttggttgggggggcccaagggtttaaaggttggggggacccccccccacccggggggttttttttaccccccccctttgggtgggggtgcccaaagggggttttttacccaagggggtttttttttttagggttcttgggtttaaaattttttttggggaaaaggggggggaattttgttccccccgggggggggcccccccttttcccttgcccccaatggggcctttttttttttttttttttccggggga

SEQ ID NO: 516074 - DNA, 137 bp, Homo sapiens
ccgtgctgctgctgagaaggcgcaagaagttggccattatgcatcgcggtcgcgttgccatttattcaccagtaaacattgctgctgacgcacaatgcatgaggccgagcagcagcaacagcatgcagcaccaccag

SEQ ID NO: 516075 - DNA, 352 bp, Homo sapiens
aaggatccccacttcccctgtacaggaatacaaaatgaaataccacgtgatctcacctataagtgggagctaaacactgggtactcatggacataaagatggaaagaataaacaccgggactactagaggggagaaggaggaaggcaaggtaagacaaactatagggtactactgctcatgtattactctgttctcaccctgctatatagacctaccctgaggctgggtacatttataaagacacaagacggtttaaactgacctcacagttccccaggctgtacaggaaacatggctgggacggcttcaggaaaccttataatcctggcagaaggtgtcaggggacgaccg

SEQ ID NO: 516076 - DNA, 1178 bp, Homo sapiens
gtcttcagcaaggccgagctagtggggtctcagtgttcctgattgtagggggctggtgagggttactcaggagtggggaagcactgaggaagtggcattagtgtgctgcttacttgccagctcctccagggtgtcctgcactggaggactagatgtgggtatcaagagacgcaatgtgatccgagcggaccagggggctcggggcgggccgctgcacgagtccggctttgccatatcacttgttccctcagaaggcggtcgtgtgctgacaagagtggtccctttccacaggtgccagacgatcctgcgcacgacctctatgagaagctggtgctgcaaggcggaaaatccacattggcctgtagtaagacgggcggttgtgagtgttccttgttcactagaggctgttggcacacgttccaaaacactcactaggtcagatgggacgagggacctgctgagtctgggccgtccatgtagcactcgagtggttgtctgggacccagggcgtgagtagctatccatgaatctaccctcgtggtggcagtcagtcctgggtgttctactatttgtctcaacccggatgcaccggcggcttggtcctaaaggtccagtcggtagtatgggactagtcacatattcttgcacgctattgccgtgactaaagccaaatcttagccttggatggggccggtagttagcgtgatcatactaacccgccgggggaagcctcccgttttccaaggaccacggccaaggcgcttaaccaagtaaggacacgggggggcatgaagcggtggggcaccatacgcgttggagtaacggccgccattggtttggtagtgcccattgcaccatgacgggtgcgagagttggtaccaaatgcctggggccccttttaggtgtcggagaggccgtggttactgcccggggcgtagttcgtaaggggaaggagttgccatgcacggttggtggccaggggcacagccgcaccaggcgttccccccggggaagaaaatttttgacccctgggcagtgaaaatacgacgcgtggcctggtaacgaccacgcccaaggcacttggcgcgctttgcattccaggggtgtaccattcactcgaacgggcaggtgcttcagagaggacacaccgttctatggacgggcctctcgtgggatgc

SEQ ID NO: 516077 - DNA, 395 bp, Homo sapiens
  misc_feature (233)..(233): n is a, c, g, or t
tcaatgatgggcgcatagcatctgttatagatatcaccgacaccaccgattgaatctggttggttaaccaagatacgtgatgcaccgatagcatcagcatattccttaataaatggatcatcttgtgatccgatttgaatagccgcgttgtgtccggcaccttgatagtctaagagtgcttgtactgtgtcgatagcttcttcacgtgtgtcgaccttataaagtgacaacantggtgaaagcttttctgatgacaaggcttcaccgatgttcttgcggtctaattcaaacaacaagacatccttaccttcaggaatcttaacaccagcttgttcagcaatccaacgacctgacataccagcaactggaccaggaacaccaaaggcttctgcatt

SEQ ID NO: 516078 - DNA, 423 bp, Homo sapiens
cctgagggtggaccttcgggttagtcagagttcttagatacaatatcaaaagcacaatccacaaaagaaaagaatggataaagtggacttaatcaaaaggtaaaacttctgctctgcaaaagacaataagaagataagtggggccaggcgtggtggctcacacctgtaatcccagaacttggggaggccgacgtgggcagatcacaaggtcaggagttccagaccaaccgggccaagatggtgaaaccctgtctctactaaaaacacaaagaaattagcagggcatagtggtgggtgcctataatcccagctactcgggaggctgaggcagagaagtacttgaacccgggaggcggaggtggcagtgagctgagaccgtgccactgcactccatcctgggtgatagagtgagactccgtctcc

SEQ ID NO: 516079 - DNA, 212 bp, Homo sapiens
cgaacagaacacgcaaggtgagaggcagggcatgagaggtcaagattgctgtgaacagatctgtgcctactttattactgaagtaaaagaaaacatagttcattgatgtcgaaggatatatacagagttagaaaataggactgtttagaaaaacaggaatacaatggttgcttttatcatagtgtacacatttagcttgcggtatatgactc

SEQ ID NO: 516080 - DNA, 520 bp, Homo sapiens
aattggaaaaaccttgccgggatagctcatctactgtcttctccaggactcgtctatgaaacagttacaacctacggccaggccaggcagtggctcacacctgtaatcccagcactttggaatgctggggcaggaggatcacttgaggtcaggagcccgagaccagcctgggcgacaaaagcaagactccgtctccaaaaaaaaaaaaaaacttgctttagtgatttccattgtgtaacaattgatgaaccattaatgattcataattataagctgggtgtggttacctgtagtctcagtatactccaggtggggctcatttgaccccaggaattgggattctagccctggccaacatagtgagaccccattcgcaaaagaaagagagagatctacttgtcaattttaactataactgtaacctcattgttttatagtataaaataaggtttcccctgtttgtgttcgtccagtcctgaatttggacaaattttccaccattacggttctcatatagaat

SEQ ID NO: 516081 - DNA, 183 bp, Homo sapiens
gctgactcatagcaggatccttctaaatggctgtaacaattcactttgtcgtttgttaataaaaccaggagaaagcgatgcaggtctctgggaatctcatcccttccataaggaaaatgctctgccaattcaagtttcattcagtcagggagaccagaagggtttaaaaggcttcgggtgaca

SEQ ID NO: 516082 - DNA, 134 bp, Homo sapiens
ggactatctacagcatactgatcacacttcgcactagttctcggactatgctatgtccatatcaagggatgatagcatgaaggactcggggatatctaacagccatacctgatcactacttcgcactagtttct

SEQ ID NO: 516083 - DNA, 2640 bp, Homo sapiens
catccaccgcatgtgggctggggatcatattatataatcgtcgcgagcacgatcagagccacgtacaacacatctactgagagacacaagtgacatcatcagcagaatagctacgataaaaactacgtagcttaatacataaagacacatcatgatgtgatgcaatcaatagcctctacaagagtcatgcagtgacgagaagacaactaagtcatcgatgaaaggacaaccttcctaactacatacaagaatatagatgaacaagcagaaacgtatagtgtcaagcattagagtagagcaagatagtacgaagatggaaacggagagagaggctgcgaccgaggtgagaggagaggagagaagagcgatggtaagaaagactaatagaatataaagaatagaggagtaaagagaagatgagagggatagcagacggacagcagaatagagatgcaggagtgaggagacgctgagatgaggacatgaagagaagaagaatagtaggtgagaaaagagacgaacgaggacttttttgggaggaaggaagagggagagagggaagtaaagaagaggggagaagtgcaagtaagggactgaaagagttaagtagtagcggaataagtaaggagggtgagcagcaggggagatagaaacagaggagagtaaagcgcgaatatgaagggagcctgcgtattaggtactaagtgagtgaaagtgttagagagaaagactaggtaaataggggatcgaggtaatgatcaagtgtggtggaatacgagagtgtgacagataggattggtatggtggtaatagcggagtgagaattagtagattcattgtgagtgtgagtagtccgagaggtagaagccgatagggtagctataatatgtgtttggtggagagtgaaagagtgaatcggaggaagatgaggtcgaaggagggatagtagggtggttgtgagtaggagtgagtgataagaattagagccagaggaatagagagtagtaaaaaataatggagagggagaatagcggatcaggagagagcatcttagagtaggtaattaggatataaagcggtaactaagaagtactatgtagcagggtcgatatgtaggttaacgagcatgatagtaagggaaagagactagagagatgctaagagacaggagaagccaagagagtggaggagctagacaatgtcagatcgataggataggactagctatataagctacagtagagcaggatgagactggaagatcgacgaatgatcatgcctactactaggttagcggagagttagagttggttgagtgcgtagttgggtaggatagctatgaggaaggtggacgtggtggtatcggtaggggattggaagcattggcgaagctgtaggatcaaggaggatggagtagtagaagatgagtaatgtttgatagataatggtcgcatatgatcattgagtattcgggatatgaagttgttgtagcatgagagtgaactagatgatgcgtgcgaggtatgcggtagtacgaatgagtgtatgcgaagatagagtacaagagtagagagaatagtgataggataggtaatgatcatgttaatggatagttgtagcttgatgtacgaattctgcgagttgaaggatgtgggtaggagataagtagaatataatggtagtatagtaagtaggtaccatgtagaatgagtgaacttctgtgctaatggtgtgtcgacgacaatgaatgtaatgtataagatctgttgtaggtaggagagaacgagtatggtgaagagagaggatgatgaagggtaataagagacgagaggtggttatagtagatctgttggaagttgagagatgaagtaacttacaaatgaaaaagaagaatgtaggggagggatggggtagaggaaaggctgttgaagtgatggtggatgaagagacgaggagatgtacaggagaaatagtgaaagatgatatacggtagtgagggtgtgggaattaatagagaggatggaatataaagaaaagtgggggattgtcgatacggaggagaggggggcacgtgatgagtagaagatgatgtggaggatgcaagagagaatggtaacgattgtggatgagggagagtggggatagaatggaagagggagggacatgagtggggatgaaagaggtctgcgtgagtagtatggattgaggaggagaggaagataggtagagaatatgtaagaagagagagagaggatagcaagtaaggagtatgtgataggggtgagaggagtaagtaggagggtgtagaggggggagagaggatatggtaaaagagcggtgagagagagtaaggtgtacaatgtatcagatagtatagatatatgagtgagagtggtagtggaggtggcgcggggttaagagttagagaaaggtgagtaggaaggatgtaggtaataagaaaggatataggattggtgttagagttgatgatgagatatgtaagggggggggagggatggggaggggagagggtggaagatgagtatatgaggacggatagataggtagagtggggtctgaagatgctagtagtagttaagagatgaaagtggaagtgtgcggtagttttgtagattaggg

SEQ ID NO: 516084 - DNA, 133 bp, Homo sapiens
atctggctcctgggctattccggtggtggctttttgttacctttaacacattacatacatgagtatataggatgtgaggggaggggtgagaacaactcagctgtagcatgtgtaggctatatactttaccatt

SEQ ID NO: 516085 - DNA, 438 bp, Homo sapiens
  misc_feature (418)..(418): n is a, c, g, or t
tgttactggcagtatctaagaggtgagtattggggggtcgtttctgggaaggaggctcagtttctacagaaaaggataattaaatctccggccgggaaaatttcagttggctgcccacatggtgtggatggagtaagagacagaggttacaggggagtctcaaccttcaacatgcagattttaatggaattaacctattttcagttcagattatgcagtgttagttgagacaaaaaggcacccaaatatttaaggcaaaaaattaaggggcctctaaaaaggtttgggcagtagggatagataggagataaatatgttgggaagggacttaagagggacactgggtagggcttggtgtttgactagacttggagctggaggaagggggggttagtcagggtgacttccaggattcggnatggtgcgataagggtcagg

SEQ ID NO: 516086 - DNA, 174 bp, Homo sapiens
aacatacggtacagctgtgaagacgaaaaaagaaatctttggcctgggcatggtctatggggtttcatgagttgaagtactatggataaaggactcccagtgtcgcaaggccccatatataatccttgtatttcccttctcactcttgataccctcccagcacagtcttgcata

SEQ ID NO: 516087 - DNA, 96 bp, Homo sapiens
  misc_feature (37)..(37): n is a, c, g, or t
  misc_feature (46)..(46): n is a, c, g, or t
acgagaaagcccaaagctcagcgtgttgtagttattngttacattnatatacaaggttgccagtactcataatttttatttctgcaattatgttat

SEQ ID NO: 516088 - DNA, 1481 bp, Homo sapiens
tgcggatcattggcagatggggtgatggattgcataagcctgtagtatattgtgatctagtatcatgtagaatgctatttgtagttgtattcgagaataactggcttgtataaaggatggatcgaagtgatgtagtaatgattatctaagatacattatggggagtacactggcgtgatccaccggaaaatagatagggaaaaattgatgtgtcgtcacatttgtgtactgtttgtaagcatagaggccctatagtggatatatgcatggtgacgtactcatagggaacgttgagagattgttagtacggcaacgcataaagtatgaatcttccacctaagggatgttaatgtccatcggttggtggttcacttcgtcggttgcatacagggacagagagtatgggataaatttagggcggatgttggagggtccacaacagaaatacagtataggaggatattggcacaagcaatgttcggaatagacagtcggggttggccagaaaaagagttgtgtttcgggctaaattgaggtactcgacgatgtaaactagtagggaattgaggacagagagtagatggcatgaatcaacagtagggaaagagcttgtcgagggtaaaaaggacagaggcaattagaggaaatagaacagagggggtgtcccgcagagcacattaattcagtgggacgtgaaggtttaaaacatggtggatcacaaccattgtggggaaaggtttacgaaataagaggcgtacacaataattgggggagaggtacaattagagggtgtaaacaatattaccttggtgggggcaacattgtgtttgtgtacaatagggagacatatttgtgacataatgtcgggacaagagggaggaaacaccttatttgggatgtgtattggtggagaaccacacattaagttatagttagagagaccgcgtgggtgcaccgagttaacaccggggtaaagttaccctatcacgattatgggagtgcgcgaaggttacggccaacacccgatcacacctccgggcggtggtcaaaacacacgcgctacacgcccaccgaagctaatataggggaactagcgcgaggacgccagaccgcacagaggactagtacgcgttgtgtcggaccacacttgtcggtcggggacacacatctaaggttcgcgagtgtgccgagaggaaacaaacatttagtctgctccacaaccgacaggaacgcaaccatatttttcgtcgggagctcccatataggtctggccggatcacgggcaagaaagacggaggagattccagtagagagtccacgggaagaaagtcgcgccgcgatgaacagacgaggggcgaagagcaagcacacactaggttagcggcagcggtagagtgaccagtataccagccgcaggttgacacaggtgacaacaacacaaagtttcagggcagtgttggcgcgtgtggcctcagtagcag

SEQ ID NO: 516089 - DNA, 453 bp, Homo sapiens
tgggtttgtgtttttgtttattttgagatggagtctcgctctgtctcccaggctggagtgcagtggcgcgatctcgactcactgcaacctctgtctcctgggttcaagcaattctcctgcttcagcctcccgaggagctgggactacaggtatgtgccaccacacctggctaatttttttgtatttttagtagagacagggtttcaccatgttggtcaggctggtcttgaactcctgacctcaaatgatctgcctccacctcggcctcccaaaatgctgggattataggtgtgaaccaccgcgcctgatgccttttgggtttatatggaggcttcatgatgtaggcatgattgattacatcactggccattggtgatcctctcaaccttcagcctcacttccctccctggaggagatcagggagatggggctgaaagtcaaacccttacacac

SEQ ID NO: 516090 - DNA, 640 bp, Homo sapiens
acatatagggtaagacaggggcatgactcgatgaaggaagaaaacagacgtggttttcttggcgtctgggcagcacagaagcaaaaatcacttagcaggtagtccgagactaaagagggcagagccactccctttgatgcagagggggcactgaggaacttgccctttcattccaggtttgctggtcgctaggcagggtgtcctagagtgagactggcgctcacgtcgtgcatatctccttcagagttggttcaggagctcacttccctctacagacacactgtcactgctaggccctagtgttttcctttgttagggctccaagtaatgagaaaggctgccccatgtagggtgccacctcaaatcctttttctcatttcacctcacagtaaccctggtgagccctctacatagtgcctgtccagcccatgcctctgggtaggcagccacataaaaatcaaacacctgttttgttggctaatctggggaggaagaaagggagtgattctttgtgtcatactccacaaagcgccatctctggcctaggcagcactgcagaaggcaggaccatgtacctgagactgatgagctgagtcgggtgcgagcctcactcaaggagagggtagagagggtaggtacc

SEQ ID NO: 516091 - DNA, 783 bp, Homo sapiens
gaaattcaaggccttttgatagatcaaggtgccgtgactggttcatcagactgctccaagtcagacctcttcgcacatgtccacccaatggatttccaccttcagacaccctttacgttctgtgtctttaagcatgagaacaagtggacccatgcatcttagggggtattttctccgcacaactttctgatagtgtgagctcatgtgccatctctccttcctttctcatgtgtttggctttggggctaggcatctatattggaaagcgactgagcacaccctttgccagcacctactgagggaaaggaaaagcccctggaaatgcgtcgtgacctgtggaagtggtgtattgtcacagtagcttatttgaacttgagaccatttgtaagcatgacccaaccgtaccaccctgtgtttttacactatccaattccagtaagctctcaatattcgatactttctatgtcaaactctcgttgaggcattcttactaaccttataccctttttggctctgaagacattctttagaatttcctaacagagtttactgcttgtgttagaaatttgcaagggcttcttttccgcgaatgccaccagcagattataattttgtcagcaatgcctatctatctctaattagtgccaccagatctagacctgtatcattcatggcataaattttactcttgcaacataactaccatctctctctttagagcgagatcaggttagcaaatgatgtaaaagaagctttattgtctagtatttgtttcccccagac

SEQ ID NO: 516092 - DNA, 172 bp, Homo sapiens
  misc_feature (16)..(16): n is a, c, g, or t
  misc_feature (71)..(71): n is a, c, g, or t
  misc_feature (81)..(81): n is a, c, g, or t
  misc_feature (86)..(86): n is a, c, g, or t
agtttgcaaaccgagnggagttgtgaagggcgcgggtggggggcgctgccggcctcgtgggtacgttcgtnccgcgtctgncccanagctggggccgcaggagcggaggcacgaggggcactatggcagacaaagttaggaggcagaggccgaggaggcgagtctggtgggc

SEQ ID NO: 516093 - DNA, 351 bp, Homo sapiens
tctgttaatacagtgtgtctgtgtgttcccaaatccagctgctcccaccagcgtcagattccattatctagtgtgtgtgtgttgtacacaggtaagccggcaatctactggctcccggagattatacatgtgtcacggatgtcgaaaagcaattctcctgcctcaggctcctgagtagctgggactacaggttcctaccaacacacccggccaatttgggtatttttagtagagatggggttcaccgtatcggcgagaatgatctctatctcttgacctcgtgatctgcccgcctcgggctcccaaagtgctgggattacaggcgtgtgccaattgcaacacggtctctca

SEQ ID NO: 516094 - DNA, 760 bp, Homo sapiens
atatgcaaggacacgagacggggataaatcggcacgcagggtagccctgtgctgctagctgcgcgtacaggctgctcccgtgaggcacgtgcgaggcgcgcggggcacggatgggcggtgtgctggcgggctcctgcgagaagcaagcggaacttcctgagcgtgcttaggtgtcacagctgggtgaccctccgaatggaaggtttttgcctgctggctgctgtcttggtgtatctgctgtgccttggtgtgcctgctggataccctgtgtggctctgcctgctgcctactggtgtgttctgctgctggccctggcgtcgtgggctgtcctcagtcgctgtgctgaagtgccggccctgaagcacccttaattgtatgtgcctgctgctgcttcccgtgctgcatcctgctgttctaccgctgtacgcggtggtaggactctgtgcaggtggagccttgcccaggcgagactgtttgaggagtgaatcatatataagattctaaaaatatattattccctatctctgtggacttgtgtatacaaactgtaggcttattttttctagcttggattcatttctctaaaaatcaacacctgtaaacccatactcagatacaacaaaaattggggtagcttaaaaaccatgagttgtgcgaaatgacgtccgtggaaacctattcaacaacaaaattggttaatcccaaagctgatatctttactgtgctgaatacttttgacagggtatgtctgatggcgtga

SEQ ID NO: 516095 - DNA, 312 bp, Homo sapiens
ggatcgacttctcctcatctaagtgcatttaggccacgcatggtggctcacgcctgtaatcccagtactttgggaggctgaggcaggaggatcacttgaggtcagggattcgagcgcacgctgggcagcatggcggaaccctgtctccactaacaatacaaaaattagctgggcgtggtggcacatgcctatggcgggtgcgggggaggcaggaggatggtttgaacctaggaagcaaaggttatagtcagccaaggtcgcaccactgcactccaggctgggcaacagcgtgagactctgtctcagaaaaaa

SEQ ID NO: 516096 - DNA, 892 bp, Homo sapiens
agaaaaaatcctacagcaatgacaaacggtatctagttactggactgtgtgcctagatggagaggcgtaaactgattgtggcgatatgcttgatgacgctggatcgccggtggtccacgcctccactctcccagcagtcactctggagctccacgagacgtatcaaacaaaactatgttctaaatactcttccataggggcatctattcaaaacgcttgcatgagccaattctcaggttttacatatatgtgcattagtcaaactattgcgaagagccagtctgacaaacagagaggagaagcatttgtgaacagtgatctgaacatgaacgactttggaaatattgatgcttttcttggtgtggacatgacctgacatacatacgtcgaagagtataggcatgtcgtcatagtagaatcttgaagatcttgaagctaaagattgcatccttattatgaggtgtggaagtcagtgacttgggtgacgtgtcttccgtagacagagtgtaagtaacgatgcaaggaagtaagagcatgagtgggccttgaacctaggccagcatgcaacataaccaacagactcaccaagaacagagctcagagtatgggagacaaggatagggtagaagattgtgaacacataatacaaaggggggaataacagcaagaaacaacacgttgcacaacgattgggaagtgcgctaaagttctgtacacagaggagctcaacaacagaacttcctccatgggcacaaaaaaagataataaccgtgcggaacctccaaacagcactcagaactaacgtcaacaacaggcaccacaacaggggagatggcaataaaaccccctccgaaataatagcccgaataaggaaagcaacaaataggaaaag

SEQ ID NO: 516097 - DNA, 204 bp, Homo sapiens
  misc_feature (48)..(49): n is a, c, g, or t
ctcctcctcctgtcgtgggctcattgtgaccactggcctctctacagnncttcgtgtggcctgttcaaggcagaaccacgacccttgactccctggtgttgatgtggccaatgatgctggagctgaatcagacgctgacagttcttcatgcatttctatttcacaatctaatttaacacattttccaaataaattttaaatttt

SEQ ID NO: 516098 - DNA, 280 bp, Homo sapiens
cgtgagtctcatgagatcagatgatttataagtgtatggaaatacctccttcactcttctcatttactgccaactgtgaagaaggtgccagtttcccctatcgaacatgactgtcagtttcctgaggcctcccaaccacatggatctgtgagtcaattaaacctctttcctttataaattacccagtcatgggtagttctttatagcagtgtgaaaacggactaatacagtgcatatttatttacaatcgttatatcctcttgctggattgaccccttta

SEQ ID NO: 516099 - DNA, 763 bp, Homo sapiens
tataaatatgttgttactgccaagaacttaaatgactggtttttgtttgcttgcagtgctttcttaattttatggctcttctgggaaactcctccccttttccacacgaaccttgtggggctgtgaattctttcttcatccccgcattcccaatatacccaggccacaagagtggacgtgaaccacagggtgtcctgtcagaggagcccatctcccatctccccagctccctatctggaggatagttggatagttacgtgttcctagcaggaccaactacagtcttcccaaggattgagttatggactttgggagtgagacatcttcttgctacacggaactgtcctcgacccgtgggtacagtattttctcgtatgccaccaagagacaagacaatgagattctcatattttggtctaaggatataggatacagttttacagtgggtgggtctgaaatattattcgaggttcctgaagtcacagtagctccagtacacatttgtacaagctgggagtccgcctcagggatcgtgaacctgggaccaccagtagccatcttgtttgccacatggagagagactgtgaggacagaagccaaactggcaagtggaggagccaaaggattgacaaacaacagagccttgaccacgtggagtctctgaatcagccttgtcttggaaccagatctacacctggactgccaggtctataaagccaataaagccctgttaccttgacacacaaaacacaaaatccttatt

SEQ ID NO: 516100 - DNA, 357 bp, Homo sapiens
  misc_feature (57)..(57): n is a, c, g, or t
  misc_feature (71)..(71): n is a, c, g, or t
  misc_feature (257)..(257): n is a, c, g, or t
ctgcacatgcccggcatgagcggcctggacctgctcaagcagctgcgggtgatgcangccagcggcatgcnttatgttccggtgatggtgctcagcgccgatgtcacccccgaatcgatcctgcgttgtgaacaggccggcgcgcgcgccttcctcgccaagccggtggtggccacgcgcctgctggaggtgctggccgatgtggcggccaacatccgcccggaggcaggcatccagtcggtgcctgcgctgccggncggcgatggcgtgctcgacaccgcggtgctggatgaactcgcttcgctgggcatgggtgatggcttcgaacgcaagttcatcgaccagtgcctggtggat

SEQ ID NO: 516101 - DNA, 137 bp, Homo sapiens
cagagggcaccaggaaggcacgttgcacactacttactgcttcatgtgaggggttcatggtggcttctccctaccttcggaccacacctctggtggggaggtgctgcgtgaggatcccaggtgtgggtggagagcgg

SEQ ID NO: 516102 - DNA, 147 bp, Homo sapiens
ctgtgagagtctcctcaagtccctctaactgtgtgcgagctcctcaactctcccctagtgtgtgcaagcttccctaaatcccctatattgtattcaacctctccaaatccccatcactgtgtgcaacctcccgaaatcccatcaact

SEQ ID NO: 516103 - DNA, 117 bp, Homo sapiens
acagcggttcgatacaaggtcaaatcaggaacaagttctaaatccagtgctgatatcagatacaagttcaaggacaatttcttttcgaaggctaattccagtttcgtgagggtagga

SEQ ID NO: 516104 - DNA, 169 bp, Homo sapiens
cacgagggcaccagaaagcaggtggactgtcacattacagagccctctcccggaccaggggctgggcaccaccaaattatggtacgacctgcgttgtggcatcatggctccactgtctggctccgtctccacatttaccgtctccccgtctctctctcctcttctcacg

SEQ ID NO: 516105 - DNA, 217 bp, Homo sapiens
ctgggactttgccatccaggccaaaaagcatgctccagtgggcatgccctttcatcaaagccctagtcaggaatcccagcccctcctttcctgtgcagcccaaactgaaggataaggtgtggggcagtgactgggtggggctgcctgtgtgattcctgataaaaaaaagccttcatgaaatgtattgttccccaataaagctcattttttgtgggga

SEQ ID NO: 516106 - DNA, 344 bp, Homo sapiens
  misc_feature (262)..(262): n is a, c, g, or t
  misc_feature (294)..(294): n is a, c, g, or t
aaatccgaaaatcacaatcccaaaagatctaaatcctggaaatataattctgggaaaatttttttttaattttttaaaagatacttacattttaaaaggatttatttgagaaacataaaaacacaacagaacacatcagccacttcacacaataaaataggcaataatacatatttttggaagcataaacaggtatactgacagttacaccggtgtgagttattaggcagacaaactatatttcatggaaggaaatagggtncaaaatgggggaaatgtattacatggcatgtncacttatggcttgggtaattgtgtggcacctcgcttttatacttggcagt

SEQ ID NO: 516107 - DNA, 141 bp, Homo sapiens
ggcccgcacttactcaagaacctataaaatctgctaacatgattcgaatatttataaattattgggtaaccagttttcagaactatttctgagtacagcttgcttataaagaaaaacattcattgacctgttaacgactgt

SEQ ID NO: 516108 - DNA, 361 bp, Homo sapiens
gaagaaagttagtaatgtgtgtctacgagaaattatacgctacctatctcccacacagcctagttcccaaactacctgtgctttgtctctctctccactggatcatttcttttcacacacctttaataacaaaatttctttacttaacctatctatcctttttcctccttttcaaggggtttattctacacgacctctattttgttacctatttctttgttgaaaattggatgtcatgtaatttatgacggggttgaaaggaacaagtgtgcatctgatgcttcaaaaatcctctactggacagatgttaatagacgtttatctcatgagtaaacacttccacagacaaggtagagccgag

SEQ ID NO: 516109 - DNA, 301 bp, Homo sapiens
agcactctactactcagtgtactggttaaatccaccttcgagcgttaggtggcataaaggacaatccgcagtagggctggggtacgaaatgtagcccatttgttgccacctcatgtgctacagcttgagctaaacgtctttacgtgggtacttgcggcttaccattgtagccttcatcagggtttgcttgcagatggcggaatatagggcgtgagccaagaggtggtgacggttgactcgggggtttatctgcttacatgaacaggctcctctagagcggctatgaagcaccgcaagcccc

SEQ ID NO: 516110 - DNA, 144 bp, Homo sapiens
cttctttctgaatcccagctacttgggtggctcgaggagagaggattgttgagtctaggaatctgacactgtggtgatactatgatcacggccactgcactccagctagtgggtgacacgagggtaccgacgctcgagattcgt

SEQ ID NO: 516111 - DNA, 496 bp, Homo sapiens
  misc_feature (386)..(386): n is a, c, g, or t
  misc_feature (395)..(396): n is a, c, g, or t
gaagaaggacatttttacttttggatacatattgcactttctccacagtcagctggaacctgaagaaaacctgaagagaacacatcttggctctgttctgcaacgaatcctggagtaacaaaactgtcactagttgccttagatggcccacacagtacggcacagccagctggcagagaaacactcacatcagcagaaatgcttgttgtactgtttggctttaaaaaaaaaaagcaaaaactgattcctcttaagttgacctgtgtgtgcagaccacagtggagcagccctggtgactttttctttcaaccgttaccctctaggacacaaattcccccacgaggcacactctgattgggcctctgtcactggagagtaaacatttngatctttgnnaaatggctttttcttaggtgttcaataaacaacaaaacgtctaacaaagaaggaagcattttcctcgctcagacaaataaagtctcaaactttaaagctt

SEQ ID NO: 516112 - DNA, 1034 bp, Homo sapiens
gcgctcagtttccctctatcgcggcccagggtagtctctcctctttcggtggatcaagtggtgcaaagatcttcgactaagtggcgcaaagtggaaagggtgagctcaatgtgctgacaagcctgtctgctactctcaccccaatggtctcgtcgcagcacaatagggtctcttagctgcggcgacttgcttgataagaggagttgcgtccggagaggttgcggagccactgtgtggactgtgggggccacttgcgatcttggtcacgcattgcggtggctcttaagcgaattgctggagcggatgatcgagcttataggcggaggtgtcattactattgggtaaggagagcgcccgcggttccctcgttatatgggagcctccattggggagcacgcgtaacaacgggtgatgtgagcgcgcggtgtttgcgcctctcgctatgccggagggctcctcgactctctagcggctgtcaccccttctgtatagacgccgtctcggcgctgttgaatagtaggagttcactgtgttcatactgctaactcgctgtgaacactcacacggtatctctgttaccctggtgtccacatcacgggagccgttctgagacgcgctttctcttgttggcctttgttttttgtgtcatcctgtgggtttttctaatggacttgtcaggaatctttgtaagtcgtcataacgtttcgcaaggctgccagccacgtgtccgtaaatctgtgaagaactcttaattgacagtattcaagatgaaggtgctggtttgtagacttaacacccagtgaaagcccagccatcatggacaaatgcctgtgaatagttctctctaacgaaaatcgatgctggtcatcgcagcgtcagcatctccagttttttgatgcagtggcatccctcatagcgtagatctcagtttcgctggcttttcctccctcagccccttctcacccctttgctgtcctgtgtagtgatttcggtgagaaatccgttgctgcaccctaacccccagcaccatttat

SEQ ID NO: 516113 - DNA, 1064 bp, Homo sapiens
  misc_feature (1064)..(1064): n is a, c, g, or t
atttaaactcccagagcctgtataagttggttctgtagtcttgatgctgcgcgcaaccagggtggtgtgcgtgagatgctgcatgctgtggttcctggggctgaatgtggaactgcgctgctcacctgatgctgctgctctgctggcctggtgtgtgtagttgtgcatggatgtgatgaaatggggtcagtgctgcactgctgctggtttgagtccgtcgagtacgttcgtggtctctgctgtggaccgtcattgatatatgtgcgtcttactgctgtgtgccgtactgtatgtgtgctggcacctatgtgctgtgtgtgatgtgctggcttttgtgtgctgccagaatggacctaatgtggctgttgacactgactgcaatgcatgctttggcagctgtcttgcacctctgtgtgaccaatggtgtgtgggacagtgtggaggcacggtggtcacagagcacaggaggggggaagtataaggtgcccgcccttgaaataccgccgcgtcggtaaagcccactgacattggacaacagtgaaactaactggggggatgtgaaacattgactcggaagcatgggcgggactggaaggaaaggggaaggcactggatatgtcctttgggataagacctggtgcaccactggaacctggcccaggagccggcgtccaagaagacttccgacagtctgggtggctcggggaagcgggtgggcgtgggcacacccagaaccgtgctggacccaacacctggagaaagccaaacatgaaggggaccttgcccattccttgggtggtgaacggcttccctggaagggggactggtggagaaacaggggaaggacaggtaaggggtccccaggaaggagtaccagggaagtggcagggctggcccatatacctaggcatgaggtgagtaacccccccaaaggacatggcatgagcggtagcaccaagagtgacagggagaaaaaatgaccccacggggggggacccggcagggcagcaaaccataaccgttcacaaggtgtggtccccccgaaggactaggccgagccagan

SEQ ID NO: 516114 - DNA, 104 bp, Homo sapiens
agtacagatcatgccgataaagtaaggcttgtcctacatgcagctgccaggtgatagtgtggccaacatgcggataccaagcctacgaagtccgtgacttgata

SEQ ID NO: 516115 - DNA, 145 bp, Homo sapiens
taggctggggaatgcttttttatctcatattagtgcctgtgatggcatctttcatctaacacgtgcttttgaagatgatgatatcacgcacgtttgaacggaacgtgtagactcccagttgcgcatatacggggtaccgtagctc

SEQ ID NO: 516116 - DNA, 301 bp, Homo sapiens
cccctttggatagggggtttggcccccccccccccccccggggggcctttccctttccccggggtttttggttggggggggggggccccccccccccccgggttttttgggttgggggggggggtttgggggggccccctttttttttttttcccggggccccgcgtggggttttggccccccccccccccttggggggaagaaataaaaataaaaaaaaaaggagtaggaaaaaataataaaaaatagaaaggagtgtaaaaaaaaagagatagatgtgtgtttgtttagaaatgtgagt

SEQ ID NO: 516117 - DNA, 202 bp, Homo sapiens
  misc_feature (70)..(70): n is a, c, g, or t
  misc_feature (72)..(72): n is a, c, g, or t
ggattctcagagtggcgcactgtacatctctaaggttcagacagaggacaacagcacctacatcatgaanangcttgtaaaaagaactcggcaatgtagacacgaaattgaaagattcaaggctgtcaagagttctttaccccgctatccccagggcctctcaatcaaaaattgagaaggagtagatagagtatatatgaga

SEQ ID NO: 516118 - DNA, 589 bp, Homo sapiens
ttactcctggaggagtgatattcaattttctttttttttttctggtgcaatcttgatgcagagccgaaacagtcctatgaaagagagacagtgtatctttaattaaatgggcactgaaatttcacttcccttagctgcattctagtagctgggccaagtaatctcgtaattctgttagttcaaattattctttcccatccagatattcctaagagtgtcttcaggttatggcgaaaagcttctggtacatatctgactttatctccagaacgttgctctaagtcagacagttgtccctccaggtcttggtcccgaatatctactccctgtagtttctgagtcaaagaatccctctgtcctggtagtcctcgggcattatcaatttctggtttaaacctttctattccctcttccttcagttccagtgtctctcccagtcctggtatggtctgattaaatcctgtcttataagtatgtccggtattggctgggctactaacactttcaagttcagtcacccgtttgtgcagacgtacggctccctctggataggcagcaagtggctgttcccatggttccacattgggcg

SEQ ID NO: 516119 - DNA, 111 bp, Homo sapiens
cttcgaccagtactctgtgggtggaagttaactcacaatgttctgggaagcaacaggcaaatgacctaatcaggcaggaagtctaagtgaccttgagtgtagaatactgtc

SEQ ID NO: 516120 - DNA, 159 bp, Homo sapiens
atacattggagattacattattgtataatacagaactctcaatacagcggcttgtctcgctttcctcatactccgtttggtgctccgtcgacttgtctccccgagagcggtccctcagaggtcgcatacaaggaaattttaccactaacttcgagagag

SEQ ID NO: 516121 - DNA, 96 bp, Homo sapiens
ggatttgctggtgcagtacaactaggcttaatagggacatgcctggataaataaaattggtaggaatgttttcttgccattatattcaaaaaaaaa

SEQ ID NO: 516122 - DNA, 110 bp, Homo sapiens
tcttctttattggatcagtctatacgacagatactattctattgtcctcgtagaagagaagtttgaccatattactttccaacactgagaaccaagaaaagaagaaaata

SEQ ID NO: 516123 - DNA, 148 bp, Homo sapiens
  misc_feature (1)..(1): n is a, c, g, or t
  misc_feature (33)..(33): n is a, c, g, or t
nggagcagcagaacaagatgctggagaccaagnggagcctttttcagcagcagaagacggctcgaagcaacatggagagcatgttcgagagctacatcaacaaccttaggcggcagctgaagactctgtgccaggagaagctgaagct

SEQ ID NO: 516124 - DNA, 443 bp, Homo sapiens
attccaatgctttggaaatagtgcagacacaaaactggggtaggctcctaggctgacaggtgtaatacagccccagacccaaaccaatctcgaaaattttacacagatgttgtaaaagcaaggccattgcctttggacaacataaattgggataagtttcaattataaaagccaaaaattgttgactgtattaaaaaccaaaaggggaaaaataaaggttattcaactaccttcagcaaattaatccaaaacaccccgggggctcaaaaaagaatttctttttttggaactttcctgttttataaaacgaaacatgtttttttaggaagattcttaaaggatcaaccatgtccctgaaattatttacccaataaaacaatacgggggcaactcttaagagtcctcaattttctttttacaaaacttggtgtaaaccttcctcg

SEQ ID NO: 516125 - DNA, 1962 bp, Homo sapiens
gggttaacatggctgacatgtgtgaaggatactcgtgcgtcctgaggttcggcaggacagctcagagtacgctagcgtgtacacctaagagaattcagcagcgggtaccaggcgtggcctctctatagtctgtgtgtgtattgtctatctcgctcttctgtctttggtgattcttgttcgaccatgcgggcatactacagcatagatctttggccccaggggccatggatactgacggatgcgacgtggatcgtgcacctttacacctggagaggaccactgtactcctcagaagtgctcaaagcgcagtttcgtgcacctgtgtttccagatctattccacaacacttgtatattgggagagtacccgacccatgggccactagcgactaaaagtccagtgtgatgatgtcctgtgagtatgaaatgcgcttagaagaatatacccgggcggttgtcaacatctccactaggttggagccattagttggtttggcgataactcctaaagggtccgtttggaatgcctccgcataagtgcgcaatccttaagcgcacacacacgtgtatgtgtctctgacgtacctaagggatggattgtgccctagggggcaagtaacgagacgggcggattgaaacctccataattacgcgaccacctcgaagaaggtacgtaccaagagcgttaaaaatgccgggaatacgtaatgttacgctcgtgatgtgtctcggtctggcacaatgtccaatgccggggggcaatatttggcggacttgtgtaccatttagaaggtgcaccaacctaattgttgggggcgacaggggggaactatctgaaaccagattagcggaaaacaaactgtggtcagttgtatagtaaacagcgcctttagtgtacggcagagaacattgaattattgagatatatccccgtcttgagatcgttgtagccatacaagtcactcttcaccaaataatattcttcgcgcaaaggccgccacacttataggaaacctatcgatgaataggcagaccgcatttttagggtgaccgcctaaatacgaccacatttatggggcttttactgcgctcaccttgaactttgcctccctacattagaagaggactacatgcaacattctcactatagagtgccacaaggtcatatccccaatgtcgtatggcccgtataaacgtggaatacaaacaacccaatgaggaactcgtgtaaacaattatctcccgcgctttccagtttagtgggaccacaatttgaatcagaccgtaccctcacattggccagctgcgcctagggcagtttagggtccgcttccgcaaataagtcctcacaccgaagggactcacgatataggttttcactatccacaaataatatcggcgcgtcattgaaaaccggccttttaatatcagggcctcccgtcccaaggagacgcaattacggcagcaacttaaagataagggcagccatcaggtggggggaccgctaaagagtttcgcatactattttggcgcataattttccctttgccatatagaggaaagatatcgcaaataggtgtcttgcacgacggacaatcatataacaacggttgtccggcaaaataccggacaatgtacattctttcgtccaaaaggacccttatgtgagaaggcgtcatcttaacattccccacgatgaatgtgagactattcgtaggcgagtacaacgtcgtgtaggacaaggcactggcgaagacgcacctgtggggcctaataacaccgcggcgggctattatgaacctacatcgagggcagaacagcctatgagtcgaccacgaatgacgacgcaccacaatagcgcgctgtgataaccagcgttgaacaggcagccacagatgaacgaggaaagcactagacacgtagtaacgaagcggctagatgatgcggccccaaacaagatagg

SEQ ID NO: 516126 - DNA, 1163 bp, Homo sapiens
  misc_feature (1140)..(1140): n is a, c, g, or t
  misc_feature (1152)..(1152): n is a, c, g, or t
tcctgcggatcagtcccacctctatacgctcggctgtcacggggggaaacaacctacccggcggtgcccactgtgtggagacacactcgactcgcaatcaacggggacccaatgcccactgtcacagtgtcgtccctacttaacctcgctaaggcgactggggtttcccacacacgcccccctttccagacgtgtgtcactcggtgagaattcacacaactctcgtgcgtccctgcgcaagagtaaacccgttcctgcacggggggctttctcacggaaaagtcaaactgccctacaggtcctggacacaaaggcggtccaaggcttactggccacttctgcaacgcttgctaggtctagtccatctaccacagcattagatgacttaatgaggcataacgcacaatattactctatgaagattgcttccacccactctgactgcaacatgacatggtgtcctggagcgaaactgtggagaacaggtcaatctttgccgtcagctacttcatcaatggaagattgaacactggagatccagagaggctggatgacctgctcaagttcaccagcatggtagtggcaaagtagaggtccagacgtcctggcccctgatgcccagctcagtgccacagaagctcaataggaggcatcttccagtggatgagggccaccaggaagcacaggtccaaggctggtcccacacttatcagcagcaacaacatgtctagttcatcctgcatgggaaaaacgattggcatgggagtctgaaatggggctactgtttcagtcctaatgtgctctgtgacacttgggacaacactctccctctctggacctcagtttccgctgcgtgtatacaaggactcagagatgctatgcccgtgacgcgcaagcaacatgccatgaagatcatatagcaaggcctggggtggagccgctgtccatatccgtggattgactttcgaatatactgcagagagtccacttctatccttataagcaatgaacatcctggatataaaggtggaaatggcctcatttaatgaatgattaaatcatatatgtggatatagttatgatatgatgggctatggctgggagtggaagaagaggaagcgtgttgcaaatagagagatntaatcagggggngcattgactaa

SEQ ID NO: 516127 - DNA, 901 bp, Homo sapiens
  misc_feature (622)..(622): n is a, c, g, or t
ctccagcctgggtgacacagccagacctttctcaaaaaaaaaaaaaaaaattacttttggggtaggggacatactatttccatggggtatttaagaaatctagttgggaatataaggtaattctatgggcaaagggtcactttagtggtggaaactcaaccccaaccttttttttttttttttaggaacggtggtttggggccgcgggtccccgcgggggcggggttggtggcagtaccgtgtggaccggtgggcccaggcgggtagtttggggacccccgcggggcccattcaattctccaccttcggccttcctgaagagccggggaccaagacgggggcaccaaataccacacgagggcctagcctagaagttatggggaatattataatttcttgtggggaaaaagaagagggggttgtggggaccagtgggtgggcggacggggggcggggtcccaacaaaccgcggggggggcccacagaggaatccccccacctccaagccctcttaaagagggcgcgggggggtcaccagagatatatttggagcccacgatgcggcgccaaattgggcgcgccccaaacggccggcgagtaaattctactaacccgtggggangaggaggagagggaggagggggacaacgagcgcgggggggaagacacactcgggcgggcgaatctctcaacggagacaacaagcaggggggcggctcacaacccacacggagttgataacaccccgagggcggggggaccaaaaaaaaacacccccgagaaacccacgagggaggaaaacagccgacccggccatcacacccaatcttcccccacgacgatgcgcggggagcaacacagggcgggtgagagaccccaaaaatgcccccggcaggaagca

SEQ ID NO: 516128 - DNA, 647 bp, Homo sapiens
tttgggaataaaggtccagtgtggaagagatcctgcagaaccaccacccaaaaggtggtttgccgaaggctgtaatgaaagaaagatttcgggggctgtttaaggaaaatatagacattctcacataagcccaggttcatccccatttcttccttcacctttcagggcagtttcttttcacattaggctgtgggttcaaacttttgggagcacggactgtcagttctttgggaagtggtcagcgcatcccgcagggcttctcctcctctgtcttttggagaaccagggctcttctcaggggctttagggactgccaggctgtttcagccaggaaggccaaaatcaagagtgagatgtagaaagttgtaaaatagaaaaagtggagttggtgaatcggttgttctttcctcacatttggaagattgtcataagggttttggcaaggtcccccttttttttcccccccccctttgtttttttattaatcaaaagaaacttcaaagttaatgggagggggggatttcacagggtgagaactcgttcccctccaagcatttcatgaaaaagcggctttttattaatcaaacaaactctccccatgatgggaagagtttcccaaatctttcaaaataaaaagtaatgcctta

SEQ ID NO: 516129 - DNA, 221 bp, Homo sapiens
gtctccgtttccctggaattccttttttctgattgttttcacctctctcttccacattcgtggctttcctcaaggtctggttatccttgatgtttgtgcacataggactgggcacttatattagccaaggttctccggaaaacagaaacagagccatatacatatggttatatatatggtatatacacacacacacatatatttccatacatatgtgaatg

SEQ ID NO: 516130 - DNA, 257 bp, Homo sapiens
cttcctgaccttccccaggttccagtggccccgggcataccttggcctctggttgtgtcactcctgtctcttcctccactggaccatggctgtcttccctctgtgtgtcttagtcacttctgtacttataaggacatcagtcatgtcgcattcaggacctaacctactccagtatgaccccatctgaactgcaaccgccctatttgcaaacatcacattctgaactaccacagatttgaacttcagcatagcttgac

SEQ ID NO: 516131 - DNA, 1171 bp, Homo sapiens
  misc_feature (579)..(579): n is a, c, g, or t
  misc_feature (582)..(582): n is a, c, g, or t
  misc_feature (584)..(584): n is a, c, g, or t
  misc_feature (598)..(598): n is a, c, g, or t
  misc_feature (602)..(602): n is a, c, g, or t
  misc_feature (604)..(604): n is a, c, g, or t
  misc_feature (609)..(609): n is a, c, g, or t
  misc_feature (626)..(626): n is a, c, g, or t
  misc_feature (630)..(631): n is a, c, g, or t
  misc_feature (633)..(633): n is a, c, g, or t
  misc_feature (637)..(638): n is a, c, g, or t
  misc_feature (642)..(643): n is a, c, g, or t
  misc_feature (649)..(649): n is a, c, g, or t
  misc_feature (652)..(652): n is a, c, g, or t
  misc_feature (789)..(789): n is a, c, g, or t
  misc_feature (792)..(792): n is a, c, g, or t
  misc_feature (799)..(799): n is a, c, g, or t
  misc_feature (806)..(806): n is a, c, g, or t
  misc_feature (809)..(809): n is a, c, g, or t
  misc_feature (816)..(817): n is a, c, g, or t
  misc_feature (830)..(830): n is a, c, g, or t
  misc_feature (833)..(833): n is a, c, g, or t
  misc_feature (859)..(859): n is a, c, g, or t
  misc_feature (886)..(886): n is a, c, g, or t
  misc_feature (889)..(889): n is a, c, g, or t
  misc_feature (904)..(904): n is a, c, g, or t
  misc_feature (910)..(911): n is a, c, g, or t
  misc_feature (952)..(952): n is a, c, g, or t
  misc_feature (989)..(989): n is a, c, g, or t
  misc_feature (999)..(999): n is a, c, g, or t
  misc_feature (1103)..(1103): n is a, c, g, or t
  misc_feature (1113)..(1113): n is a, c, g, or t
tttgcgtctcgtgtgtgttcctggtgtgctttggttctcgtctgctgtgcggctgtgtgcctttccgatgtcgttttatttgctgcgcccctcgttttgtgtgaaatccctttgacacaggtttggccctcgtccctttgtcccttttttctgtcgtgtgtgttttcccgctgtccaatagctggtgttttgcgtttcgtgtgggttctttaagtccctcggtttctcagggggtttctggtccttttggtatgttagggtttttgtgtgccccttccccaagtttcgttgtttcatgaaacggaaatctctcggtttaatgccaagagacctgtgtcccggtggacacagcaatttctggtctttgaaattgttacgcgaagtattccctgatttaagggactttttggaacgatttctccattggaggataaattgccccttaatatggagcccaaaatggtgctttttcctatgagtaaatgtccccatacccaagggttccacatcacgggcacggcatattacccatatatggttgatcttagttctcaaacgccacgtgtgacgcctcatttntgngnaccctgtccccttngttnanaaaanacaccactggggaaaanaaannancccnnatanngcttanctngtgcaccctagaggcttttttaataaccacaacgtgctttttgtttgtttgttttggattctttaaaaaatataggttaattctccactttaagtgccgcctcctcttagccacgaattctcacttactgcttcacnttnttgtaanaacacanttnaatttannataattttccacnatnttggcacctgcttaaatagaatatangcactctttcaatatggtaggaacccnacncaggagaactttccnttaaannccctttttacacctttatggtaagtagcccgggggggaaangcatttatagatcacttttctaggccaaattgtgaanctaatgaccncacctgtttctacctatatgccgtctctttattttactagaaatgggaatcatggccttcttgaagagaaaaaagtcacccattctgcatttagctgtattcantatattgcanttctgtattttttgtttgtattgtaaaaaattcacataataaacgatgttgtgatgta

SEQ ID NO: 516132 - DNA, 1466 bp, Homo sapiens
  misc_feature (1252)..(1252): n is a, c, g, or t
actgacagaccatacgcgatgatgctgctgcttacggtgccttttagcaacgctatgcaacacaatcctgatacaaaccaagataccatagacgagtcaactctggcttctgacgaactttaccacagtgaacaagatgtacctacgattccatcatgcccgtccacgtacaacgccaacccacggaacacctggacctgaggtctctctgtgcctaccggtacttacacatctcaaccatttgactcgtcacgtgtacttcgtgatacctttacctggcacacccagacacgacccttttcaaccacactcacttggatcccacacacgcactacccagtgccaccaggtctctgtacgcacccacgcctactgggctgcttccacttcagccctatcctgtatacacagcaccttgtggaagccccgtttacaaacttcctgatcgatggactttccacgtgtacccatcctgtgacgacccaccttgtgaactcgactccaccgcacattacgcaccacctctgggtaagtcgttcacgccctggttggcacccactttggagcaaagcgtcggccttgttcgatagagtagctggcccaactggtacaccactcaacctggttagtcacggtatccttccacaacacacatctaacgcccacatacaactcaccatggggcgcacaatggggcgccttggcattggcgccattacaaccgggcccccaggacagacaaattcccatccaaacgccaaccttattcgtggggagaacacgcgataccctgcacggtcccacgcgcgtgtggccacccattcccaccaccctcgacttgcagcgtccaatggcagcacggctttcatgggacaggaaattctcatggcatactacgggtggccccacaccacccctcttggcgctcgcaagcaacacccccccagggtccgtgtcccctacaccatcacaacaacaacagctttcaccaacacatacaaacttttcataccgtcatggggggtgctgattagaccactcgcagcatggcgggacagcctcaatggggacaaactacccccgaagcagcctaacaacagatggccaggacaagcaccatcgtgccgtgcgcagcgggcagacggaacaatccacctatcgcaacaccacccgggcgcaaccggccacagaccacgtatgcgcccagtagaccagcccacggcacgaccatacgacaaccgcaagtaggganacacgcatccacagcgatctggacggcgcccaaccacgaaccgctgaacgcaccaccccgcggccagctcaacaccacacccaacaacaggcatcaacggtcgcaagccaacaccacaacatcgacagcgacataagcacccacctacgtaaagctgcgagtccatgccacagccgggcaacagcgacacacatgctcgaggtagccatcgacc

SEQ ID NO: 516133 - DNA, 333 bp, Homo sapiens
gaattaaaggactgtccgctagtggtcaatcaagaacacattttaaatatagatatacattttataaattgtaaatatatatttgagacggagtctcattctatcacccaggcttgagtgcgagtggtgcgatcttggctcactgcaggctccaccttccaggttcatgccattctcctgcctcagcctcccaagtagctgggactaccggtgcctgtaaccacgcccagctaattttcttgtgtatttttagtagagatggggtttcacggtgttagcctagatggtctcgatcttctgacctcatgatccgcccaccttggcctcccaaag

SEQ ID NO: 516134 - DNA, 699 bp, Homo sapiens
tctgtaaatccatgcctaagagggcgggaaataggtattttccaagccaagattgattaggaagtgtcatgagaggcccctggtttccaataagacctttcggaattcgctaacacaggagtgcattcaaacgaagagccaatatagtgatgagctccaaagagggccgggacgggcgggttggcttgtaggtaactgaaagtgtcgaaaggaaaattctatggcctggttgcgtggggacttgaactccataaaaggggtttgagaccggaagaaatttcccctcatgtttaggaaattcacatgagggggggtttcccggctctgagggcagtgccacgtgttttctgtgtagagggagacgatactcccgttcacaccccaaaggtaaagaacccccggaaaaaatagcgggagacgggcgcctttccgatttcaaaagaggctcccagaggggtggggggatgggaaaacaaaaaaagcgaaaggggaaaaacagaaagtttggccttccggaacttttttaaaggaccggtggatgcaacccgcccaggggtgcctttttgaaaggcaacctgggattcttggttctttcctggggaactgccgggtttaaaccgggccccccacagaaaacatatgggttaaggggttctggttcaagggcaaaggaggtgtaaaattttttgtggggaggcg

SEQ ID NO: 516135 - DNA, 153 bp, Homo sapiens
tctaagaccccgtcgacggtacacagacacatagaaaaaatgtgaatgtgtgtgtaatacaatggaatattattcagcttttttttttttgggagagggagtctctctctgtccgccaggttggagttcaggggtgtgatctcgggacaagtt

SEQ ID NO: 516136 - DNA, 262 bp, Homo sapiens
tcagtgttcatattccacatgccccaggaggtgggcagtgcgcagaggcaaggtgcagttaagtccatctggggaatgtgttatatacactaccacaccagctacgcacagggggttcagcttcctcaactacaacacaggtgccattcacttcatctgctgggtttctcattatccacctatcatgtcttcatcagggacctcacagcagcaaacagcagcatttaggcccagcacactgggcagtgcagtgggcagggca

SEQ ID NO: 516137 - DNA, 946 bp, Homo sapiens
  misc_feature (312)..(312): n is a, c, g, or t
  misc_feature (946)..(946): n is a, c, g, or t
ggtgcgatcagatcgatctaaaatggcgactgtcgaaccggataccatccctactcctaagtcccccgactacaggaagaggagagaacggatatctaatcaaggaggttgctagacccagaatcactatattaatacatcccctacaggaacagatgggcactctggttgtttaatagaatgataaaacgcaaaaccttggacatacgcaaatcctgccgtgctgtgtctccaatgttttagactatctgcttgatagcactcttctcggtggtctgatacaagccgatactccagggtgtctacgtacantttaactgccctggactgtgaacttactcagcttttgtaagggactgcgtagttcgaagccctactgctgagcgaacgactgaggcaaacatacctagaaccgtgggcagcgcagcgatggcctaagttaccattttgacaccagaactatgcatgcacgacgaaggtagacctctgattcggcttttggcctatgatgaccacttctcgtgcctctatttgggagaactcgtttcgactgactacagctgagtgatgtatgtgcgcgctgctgtgtgtaatgctctagcagctacaagcgtgactaagtatagcacattatggactactgagattgtgaacaacagagaagctgttacaccagtatagggagggtatacacaggaaaggttaggacttcctccaaagatagtgatcgcgttatcatgtcccagcgcatgacacagtctactaagagcggatccaccactaaaaataggttgccgttaagaagacaccttctgagtatctcataggagactgcgtcaagcaatcgagattgggagctgaaccaaagcctcttcaaaaaaggcagagtggcctgctttaacattggattcccatcttaatgtaccccagatcttagagaagtctn

SEQ ID NO: 516138 - DNA, 172 bp, Homo sapiens
tctactagtgcctggtagacaagtgtctacattgaagatacacaacacctcgttgttaagacattgtcctgtagacttgatattacacgatgtgctattaggtgcaataagagtgaagcgctgtctgcccagagaaataagtaatttatataagtaaataaatttcataaat

SEQ ID NO: 516139 - DNA, 201 bp, Homo sapiens
  misc_feature (179)..(179): n is a, c, g, or t
ccgcagctggcggcttggtggcaatgttttacttctcggctgagtgaggggtggcgtcggtgtttatttataacacgttctagggctgggcagatggctcatgtttgtagtctcagtactttgggaggccaaagataggaggattgcttgagcccgtgagtttgagaccagcgtgggtnacatagcgagaccctgtctcta

SEQ ID NO: 516140 - DNA, 299 bp, Homo sapiens
aaaacacaatttaaaaatgtggcaaaagtccaagcgtggtggctcatgcctgtaatttcagcactttgggaggccaaggtgggaaggtcacttgagcccaggagttcaagaccagcctggaaaacacagggaaatcctgtctctatcaaaaaaatttaaaaactagttgggtgtggtggtgcacacctatagtcccagctactctggaggctgaggtgggaggatcccttgagcccaggaggtcaaggctacagtgagccatgaccatgccacttacactccagcaagaccctgtttca

SEQ ID NO: 516141 - DNA, 359 bp, Homo sapiens
tctctggaaaatatcaatttggaaatgctgcctttcaaatcaatgccatgatcatccatattgttgagtttgttgttggtgttccagaagtgtccccattttacaactttatgcacacacctggcaaatcattaacatgagcattcaacagtactgggatgggtggggtgttgataggcggctcaccaacagaactgtccatgagacattgtctgaagacgcaccacctattaaggccagatcgtggttggaggagcacagatatgagaattttgatctagcctccgttttgaatggtaaaaagaaaatgccgctatggaggatggaagtgctgccatacagattggaaatcctttctt

SEQ ID NO: 516142 - DNA, 965 bp, Homo sapiens
tggggaaaaacccgggggggccgggggggggggtggaccccccttggggggggggggtcccccccttttggggaaaattttttttaggggggcccccaaggtgggggggagggggggggggccccccgtagactttttacaaaaaaaaaaaaaaacaacactgaggcgggcctcctcatgtcggggcgggtggcgacagaacgacagagagggtaaagcaaaaggcggaccagcgagcgagcacacggggtgccctgagccgccagactattgctgtgtgccgcagaagggggggaacaacactaccgcgcggccccccctaataggaggagactggcactacatatcctcgaaaaagccacgcgcgggtatccgcgcgcggttttatatagaggatcgctggcgggacaaaccgaccggactgaaataccgccgcccaacacggagagaggacggagcctcactaggcaggcacgccgaacgaggaagccctcgcagcaaatctagtccctggcgacgaagcaaacaacacgatgaatgacgccgaacacaacgacaacaagcaacccacagacgcccaggcaggacagcaatcgaggccaacgcacggagccacaagagaccaagacacagtcaggttctgccagcggacgaccagactgggcgagcacgttgaagcgagcggggtgacgacgacacaaagcaaggacagggtctaataaaggaggacacacgtagcagagcagcccccacgaggagaaaaagcagtgagcgcacggcagagtaagcccaggggagtgaaactaccgctacacagaggagcgtggcagaaggagaaagaaaacgtagctttcacacgagggatgcacacaacgaatcagtaagaagacggagcgctgacggaataaggaaggagccgcaaccagccacgtggaaacgacaccaggagaggaaaccagggataa

SEQ ID NO: 516143 - DNA, 165 bp, Homo sapiens
gcggcgttggcggcttgtgcagcaatggccaagaatcaaggctcgagaatcttcgcgggaaggagcaggaggagctgctgaaacagctggacgcactcaaggtagcagctgtcccacttgcccttccgccaaagttacaagcggtcagctcaagctcttaagtcc

SEQ ID NO: 516144 - DNA, 132 bp, Homo sapiens
gggatccagaaaccagcctctccgcgcgtccctctgcgcgctggcgaggcctgagacgtctcccgggggtgaccagcgtgcaaggtctggagaccctggtcgcgctcccagcccagggaaagcccaggcgac

SEQ ID NO: 516145 - DNA, 378 bp, Homo sapiens
cgtggattgtgggtagaccgtggcttactcgttatttaataaactggcagggatttcctgtgtcatgccacgctgggctgcacttctaaccttggcttctaacagcaaacgcacattggcttggagatgccactgctggaatcagtggatgccgacccaaagcaaggaacaggtcacagtgatccagaacatggcgagagacccagggatcaaagttaccagggggaaaacaggcatttttttggacttaacttttggggaaacgacatacatgcagagaaaatgcaggggtggggcttgagtcccaccaggcgggaggaaaaggcaggtcaagggtagggcgtggcgagaaggcgcaccttgtagtcttccctggtg

SEQ ID NO: 516146 - DNA, 473 bp, Homo sapiens
  misc_feature (120)..(120): n is a, c, g, or t
cccgctgcgtattctatgagaagcgtatggcacagaagttgctgctgacgctctgggtgaagaatggaaagggttatgtggtcccgaatcaggtggtgcgaaccgaccaatacaagggtnttccccaatgaatagcaggggtggtcttgaccccatgggccgtgtccgcctgctactgagtaaggtggcatcctgttacagaccaaggagaactggagaaagaaagagaaaatcagttcgtggttgcattgtggatgcaaatctgagcgttctcaacttggttattgtaaaaaaaggagagaaggatattcctggactgactgatactacagtgcctcgccgcctgggcccccaaaagagctagcagaatccgcaaacttttcaatctctctaaagaagatgatgtccgccagtatgttgtaagaaagcccttaaataaagaaggtaagaaacctaggaccaaagcacccgag

SEQ ID NO: 516147 - DNA, 123 bp, Homo sapiens
attttctacacgattgtctgaacctgcggttcctctcgtactgagcaggattaccagtggcaacaacacatcatcagtagggtaaaactaacctgtctcactgacggtgtctataacccatgc

SEQ ID NO: 516148 - DNA, 335 bp, Homo sapiens
gagaggacctcatatgaatatgggacgcttccctatcatggcatgaggtcggcacctgtgccacctgcagcgggtaggaatcagttcccgacaccatgagctacattctccagagactcaagcatgcgaagtcggtgatccacagtcggcagtttccattcagattacttaacgcccatagatgccattgatgccctcgaggctcaactcagaaatcaagcattgccctttccttcgaatatccaccctgcatgcaggcggcatcctcacctagaaatgcaccaagaaccgtcccaggcaggaggttactttgccacctcaaccgtcagcagctt

SEQ ID NO: 516149 - DNA, 458 bp, Homo sapiens
  misc_feature (345)..(345): n is a, c, g, or t
  misc_feature (366)..(367): n is a, c, g, or t
  misc_feature (377)..(377): n is a, c, g, or t
  misc_feature (383)..(383): n is a, c, g, or t
cgagttctagttccctgaggtctttaaaaacaaaaacagaatgttgtacgtgaagattctaggaggggagggaccagcaaatctgagagaaccgtcctggggcctcccttcgaggagccctctgatgtgaggagggacttgagttgagtgacgctgtggtgtgaggtgttctgagctcactgaccggaaggtccaggtgaatctcgtcataagtgatctcaggctctcacaggatccggagggaaatgtgttagagggtctggaaaattcagtgcttttgagttacttgtttttattaaaatttcctccacaaaaaaaatcccccaattgtgggtgtttttgggnaaaagggttccaccggtttcnnacaagatgtnaatttnaaaaaccagttgattttttacaaagtaagtgtgttgggaattccttaattttgtgcaaaaatttttttggtaaaa

SEQ ID NO: 516150 - DNA, 219 bp, Homo sapiens
agcagagaaactgccctgcctaaagttaatcgccgatgaactagaagtccccggttaattaaatgtaagtagattgtagaacctgttttatatccaacaatgtttataatggggatatagaattgttccctgtaaaaaaaatggcccaaatgtgttttttttttaataagtaacttggctataaaataaaaccgtccgtggggcggctgccctcgttta

SEQ ID NO: 516151 - DNA, 315 bp, Homo sapiens
attcactatacctagggtctcaccggcgtgaaatacgcggcttctctcaataggaggctataaaattaatttctgggttaatttacgaaagctgaggggtcgctgaacgagagtcatgttgaagccaataataaaacagaaaagaccagtatgggggcagtgaaaggggtcactgagcggcaaaatcattgagaacaaaaaggaaatatagtgttgtctcacaggtgatcaataatcaccttctaggaaaatccaaaggaaggtcttaatcaattttctacttctctgaagcttcagcaatttgtgccacctttc

SEQ ID NO: 516152 - DNA, 298 bp, Homo sapiens
acctgttcactgcgcgtcctaccagccagcttatctgttgggctctcggccgcgtacaccgggtctctcccacgagaaggggggggactcccacgcagtcctgggtcaccccgcagctgctctggagacttggctctgggcgtctcgtggcccaagtgctccaagttggaagcttctgtgggcctcgtgtaggggatgccgtgctgggtgagcaaacctttcagccttttgatctcctttgagagttctttatgagccttcctgcagttttccagggtctcaaaccccaagctgtcag

SEQ ID NO: 516153 - DNA, 659 bp, Homo sapiens
  misc_feature (227)..(227): n is a, c, g, or t
  misc_feature (531)..(531): n is a, c, g, or t
  misc_feature (541)..(541): n is a, c, g, or t
  misc_feature (596)..(596): n is a, c, g, or t
  misc_feature (601)..(601): n is a, c, g, or t
agcggaggggcgcgccgcagcgtcctcaacgccgcaacgtcgccgggccaactgcaggaaggtctgtgctctggagccagggtaaatggttataaaattatacaccatggccctcctaagagacactctaggaaaaccatgtcatcctgatcttaaaacagcgctgcaaggaagagagctacacgtacctctcaccagttgattgtccacgtccaataggctttacntaccagtgtagtctcgtatatctcgggttcactcgttgcgtcgcttaccacttctatttacctcgccacgaaacgggaatacgtgatccacgctttcttgatcttgcgtgtatggtgtagacgcgaacccgatgttagcaaattgtgcaaaatggcgcagcattggctacaaataatatcacggaattgtatagcatgaccagggatagaggctaggtgcctcgtcctacctgttgcccagcgataaagcatcgtcgtagagaggactcgtgacaattgggacgcccagaggaggggtcagacnaaacagagantcgcccctcaaaaaggagtctgtgcgcgagacatccacaaacgttcgcagcgttntgtancaagatctagtgaggctcgactgcgcaagcgaaaggggaacctcggcgacatataatc

SEQ ID NO: 516154 - DNA, 186 bp, Homo sapiens
gggttttttttcccatcctactcccttttgtttccctggcctctgccatcctgaaccatgccttggttttaacctggctgggcaagttttgtgaaacttatcctgctgtttcggggtggcacccatatgtgctccccatgtgtaaggtgacatttccaaatgcctttgtgtgataatggtgttgga

SEQ ID NO: 516155 - DNA, 402 bp, Homo sapiens
agtcgtgtccgtccccccaacgggaatcatgcagaatatctcaagcatagaggcaagcattttaactaaaaaaaaaaaaaaaaaaaaaatcctaattggtttttaaagaaaaaaaaaatcttaaaatccctttggctggataaattagaaataatatcttctggtcctacttgggtgaacacaaatgtgccaagaatccagtcacttacgggcaaaccaaaggtggggaacaatccatttacacgttctactcaaacacagtgcaacacggccgtgtccatatataattttctttatagttaccaacacttttcgggcaaagacaaagtttgggaagggcaaaagcaacagaagtttaagatctcaaagctccagaagggaattaatctgagtctacgtcat

SEQ ID NO: 516156 - DNA, 305 bp, Homo sapiens
ccctcaccatctacccatgcatactggatcttggcagagctctcaccatctacccatgcatactgggtcttggcagagccctcaccatctacccatgcatactgggtcttagtagagccctcaccgtctacccatgcatactggatctcggcagagcccccaccgtctacccatgcatactgggtcttagcagagccctcaccgtctacccatgcatactggatcttggcagagccctcaccgtctacccatgcatactggatcttggcagagccctcaccatctacccatgcatactgggtctt

SEQ ID NO: 516157 - DNA, 178 bp, Homo sapiens
ccgctccagtacggaatatcatcattacctcctccacatctaccatcgtcatcacatcctccatctcctccaggacttgggtcacttcacttctcttcatttctttctgtattcttttcttttcttttttttttttttttggcatttgcagagttggggtctcccgagactcaaatgc

SEQ ID NO: 516158 - DNA, 120 bp, Homo sapiens
tggtaaccagggcccccttttcagtttttgtgtctgttattggagtctggccagggttgacttgagctgagaccccaaatgctcccggagatgctggacccataaagcaagttccagcca

SEQ ID NO: 516159 - DNA, 229 bp, Homo sapiens
tgtatgttcatctcctttgggtctctcaagtgaaatgaacattcttttaacatgaaatctcccatgagacagttgacttcacagttcctgataggcactgtggttccacttgagcatcacatgtggccattctttgcactggtagagagtacactcagtgccatgttctgatccaagaggacccggtgaagctaaccatattcattccgtccaggcaagtcttgtcgat

SEQ ID NO: 516160 - DNA, 1176 bp, Homo sapiens
tttttttttcaacctgaagaggtttaaataggggaatctgggttacagggatcctcataaagaagaaccgccgtggctgtggggtgctcaaaccacatgtgggccgacccaaaagagcgccaaaaccaagaagcgtgctcaggaggcactaaagtgtttgacggtctgggccggcttcacatctctcaatttcagcatgaacaagccagaggggtaaggtgcgagtgacgccgcagcaccctcaagtggccttgagtttccaggtgggtgtgtgccgtgaataccagagggtcttctaagaccaggcaggtgtgaggcgaatttctcagtggtctgtggtgagtggtgcgattccggggtccaattattattcccttgggttactccagggggcctcacaagtgggctatattttcacaagacctcttgtggtacccatgcgatagggcacaaaaggcgggacaagggcgcaacgtggggaggaaaccaatcgtggtggagaccaccagcgcaaagaagtgtgtacttcaccgagggtgggacaaagggaggtaccgacgtggggaccaacgaaacgcaaagggagtttcccattgggcgatcagggatccttaactggcgtttaacaattccttgggatacatcttaggacatatactgggtgggtgaaaacgtggtgcttccagcccaggggaaccagggggtatagggaccaaaccggatgcatactggtcacaaagcaattcaggaatctatcctcgtcttccaaaggatgtccgaaaggggtttaccgatacagtgggctccgggaaagggctctctcacacaaactgtgctagctccgaaaaaggacgttaatgtgcccacaatttctctgagaagagacgtctaaaacaaatcggcgattacggatgtgtgcacaccgcgtagagagcattgtcaacaatccgcagcgtctcccgtgggaacgtatcgtagaccatgtgtggaggagaacactctccaaaaacatcgccccacgagacgagaggctaggggtgtccccagtcctccaccaaaatcggtggtgccaccccagtggggagggcgaacccgtgcgggacaaaacatgaatagcgcaggcctacgacaaaataggcgcgcacactaggaaagagcggtgaattaaacgaacgt

SEQ ID NO: 516161 - DNA, 217 bp, Homo sapiens
  misc_feature (76)..(76): n is a, c, g, or t
  misc_feature (79)..(79): n is a, c, g, or t
cccaagatatacagaccagccctgccacatactccaaggtggattgaatatcaaactatgatgatgatgaaaatantcnctttaaaattcgtgacattggccgggcacgggtgcacgcctataatcccagcactttgggaggctgaggcaggtggatcacctgaggtcaggagttcaagaccatcttgaccaacatggtgaaaccctgtctctacta

SEQ ID NO: 516162 - DNA, 430 bp, Homo sapiens
ccatatctttagtctatactgcgactcctctcctttttcctctcttgtagttgatcctcggcttaatgcgtatgactgtccctactaaagattccagggttgagtcatcaatgttacgcgtatgtcgactcctactgcgacggggacgaggggttcgtctatcccaagagcgactgagaggtgcgggtctctgcctgagcattagtggtgcaagctcgtcggtgtggaaaatagaagaattagccaggcatggtggcacgcgactggaatcccatctattcgggaggctgaggcaagagaatcgcttgaccccaggaggcagatggttgccgtgagctgaaatcacaccattgcatgccagcctagaggacaaagcaagactctatctcaaaaaaggacactgactcggcaagaccgaaaagcccgtctc

SEQ ID NO: 516163 - DNA, 475 bp, Homo sapiens
  misc_feature (465)..(465): n is a, c, g, or t
  misc_feature (468)..(469): n is a, c, g, or t
gagggctggggctgggagatccggcggagccccggcagagcagtcgcccgtgagcccccgcaactcagacgcgctcggcctcgcgctccggggctgggaccaccgagggcgagctgcagccttcgccacccggtccgccgccggactccgcctcccacaaacagcccggcaaggcccttttccgccgctccctcatccagcgaagcctccttcccagcttccccggcggcggcgccgtgacgtcacttccgttctccagcgcgcacgtgggaggaagtgctggtgccctctgccgctgctcccgtctctttggttacgctcgtcagccgctggctcagccgcaagtacccgtccatcatagtcaactgcgtggaagagaaggtgaggaggcgccagccgtgtgccgctatgggagtcccggcgttcttccgctggctcagccgcaagtacccgtccatcatagtnaanngcgtgg

SEQ ID NO: 516164 - DNA, 272 bp, Homo sapiens
  misc_feature (40)..(40): n is a, c, g, or t
  misc_feature (239)..(239): n is a, c, g, or t
  misc_feature (241)..(241): n is a, c, g, or t
ttcattcaaatgctttcaatattaaagaactagggcaaanaaatatggaaaatgggatctgtgaagcagcattatttctgaatagcacagacatcaatggctcccctttccctgtgatggcgtttcaggcagggccaaagtgactgagccgtactccacagctctctaatcagatttttctgcaagcatattaaaagggaaaggaaggccaggtcagtggccacaattgtgccactgcncnccagcctgggtggcagagcaagctctgtctc

SEQ ID NO: 516165 - DNA, 354 bp, Homo sapiens
ggctggagtgcagtggtgagatctcagctcactgcaacctccgccacccagattcaagtgattctcctgcctcagcctcccgagtagctgggattacaggcaggcaccaccacgcctggctaatttttgtatttttagtaaagacagggtttcagcatgttggtcaggctggtctcgaactcctgacctcaggtgatccaaccggctcacctccctgaggtgaggctaggattacaggcatgagccaacacacctggccaagtggcagtatttgaaaaaagaaaagcagagaaaaatgctcaacctgtaagtataatgcaaatatagtgtccaaactccaaacaaaaaaaaaaa

SEQ ID NO: 516166 - DNA, 915 bp, Homo sapiens
gagcatggggaaacgtgcacaaaatctttccataataacaaagaggccttactgcctttacataccacatggacagaatgcgtgtcaaagtgaattatctaacattgtaaaaatgtatgtttcccctcacggtctgcagctcccaatgtggtcatttcagaaatgttatatagcatctcaagggttatgccagaccctttcctccaaacccaaactttcatgtcctacttcattccagcaggaggcacttaggggagactcggatgcggcgacatgccagaacaatcgcaggtctccttagacttattccttatggttaatatatgatcattatcatgaataaccgtgaggcaggaaagatgcttctcctttataaagatcccctccagatcctcaagacacagagcctctgtgaagagccttccccgaagaatgtcgctttatagacggacttcattgaaaatctttggttcgtccttgaatcagagtgtcataataatttgttgcttcttttttaaagatattcccacctcagcactcagagacacaaaaatagctgtagtctcaattaagagcagaatctcagagaatagctgttgtgcaatccaaatccagcctttgaggaatagagctgccccattaacgatcagcaagaggagattacctctgtttgttaccccctggggatcaggcataaaggaaaagagcaccagcgttgtcagtatgacctggaagtaccgaggccgatgttggcttggtgtaatcaatgaggccaggtgccctagtctctcaaaggggggaggactcaggtggaaatgacacgacgttttggagaggcggtgtgaacgggcgtagaacactcgttgatcctatcccgtaaacacagatagtcttcctctcaatactataatatcg

SEQ ID NO: 516167 - DNA, 145 bp, Homo sapiens
gcacagctcatggccggtgtgtagcgcttggcatggtgtcttcaggttctccttgagctccgtgttcagctgctggtagtaggcgtagggaggataccagcgatgatctccagcagaaagatgatgagcagcaggaggaattccg

SEQ ID NO: 516168 - DNA, 387 bp, Homo sapiens
  misc_feature (84)..(84): n is a, c, g, or t
  misc_feature (222)..(222): n is a, c, g, or t
  misc_feature (248)..(248): n is a, c, g, or t
  misc_feature (255)..(255): n is a, c, g, or t
  misc_feature (257)..(257): n is a, c, g, or t
  misc_feature (260)..(260): n is a, c, g, or t
  misc_feature (310)..(311): n is a, c, g, or t
  misc_feature (313)..(313): n is a, c, g, or t
gaaacgacctgaactgtctgtgtgctctctggtgtcccatgtcgccctctggccagtgagagcctcaaggaccctggcctttgnttcccagccccacagtgcagggagttgagcagggtccggggtggtggagaccagggccaggctgggctctcccttgggccagcagttcccgcaggtgttgagggtcgggggatgctgcccacttggccgccgccgccncgcgtcatggtctccctgtcgagtgnccggcgncntcngccgggcctcaagtcctctgccacggggtcggcctctgttgagtgagtcnngnttgtcaggctgcgtgggggactggcccagctgactggtctctctctcctgcactaaaaggatcaacaaggaaaa

SEQ ID NO: 516169 - DNA, 392 bp, Homo sapiens
tctagacgatcctatggatcagagccaggaagctgggtcaagtttcacgtctcttgagtgaggggctctgcactcctccatcctgtactatgtagtgtcatctttcatgacctacatggagacattcaaatccggggatgacacagagcttggagggagagacgtgtcaggagacagaaacagtgtccctggagatatcagcaggcaagtgtgctgagctcacactgagagccagaggggattctgaaaactagactgatgattaaaactgcttaaaaactcagcagcctccccatgctcccgggattaatgatgcaggctcacattgactacacacgtttataccaggcgccatgttctttgccgaaactcccgctcagagcctggataga

SEQ ID NO: 516170 - DNA, 459 bp, Homo sapiens
  misc_feature (8)..(8): n is a, c, g, or t
  misc_feature (62)..(62): n is a, c, g, or t
  misc_feature (79)..(79): n is a, c, g, or t
  misc_feature (82)..(82): n is a, c, g, or t
  misc_feature (84)..(84): n is a, c, g, or t
  misc_feature (87)..(87): n is a, c, g, or t
  misc_feature (94)..(94): n is a, c, g, or t
  misc_feature (99)..(99): n is a, c, g, or t
  misc_feature (120)..(120): n is a, c, g, or t
  misc_feature (164)..(164): n is a, c, g, or t
  misc_feature (187)..(187): n is a, c, g, or t
  misc_feature (228)..(228): n is a, c, g, or t
  misc_feature (417)..(417): n is a, c, g, or t
ctcttgtnctcatggttatagctttggtatcttttttggtgctgttatcccttggttttttntttactgtgtctctggnttncngtnagtggtnttctnggaagaagttgattggccggngctggaagcccacggagttcccaggtgtggctgtgttgggaatntcctctgagtgggggatgttcangaagcccaccgtcacccaggccaccaaaaaatcattttcantgttctcgttgttgtgaagaaactgctcaaagaccacgggcgggtgccaggggtcgttctggtggtagatgctgctgctgcacagctccgactcccggtacttggtcactgccagggggtaccttgcccaggtgatggcctgctcctcctgccagcctgggggcagcccctggtcggccatggagtggntctgcaggcggtactgcgcttgtggccccacgggttctcctc

SEQ ID NO: 516171 - DNA, 127 bp, Homo sapiens
atatgcattctggtgtgagtagttgagagccttgtctgcagaagaaagtgagggaatggatagaatatcttggaaaaagaatgctttccccgcttcattgggtctctcagcatgtaaaggttgatga

SEQ ID NO: 516172 - DNA, 215 bp, Homo sapiens
gggccggtatatagcctataactccggcctggccaggtatggtgcgatctcatagaggtaccacagcgggatggagctgggccgtgatcgtaggttgacacggcagagagccatcctctataagcggctgaaagtgcctcctgcgattaaccagttcacccagaatggctcaccgaatgacccgcagcatgtcccaccgaatgcctccccgaatg

SEQ ID NO: 516173 - DNA, 558 bp, Homo sapiens
aaagtgtacggataaaacctcaaatacaggatcatattttaggattcacacgacgtgctatgtgtaaaatgcatcgtgctaggtatgtaataactagaaagtaatagtggatgttgtaatgggggtgatacttattttcgcatcaggtaagtttgagttgataaccttaaaatttccttccaaataacagtccattagaaagccactagttaatctataaaaactttcaagtatatacatagtccaggcttgaaataatgatataaagcgcccagaagcttcccacacgaccctttcttatctacatcagccagccgctttatcatcagcaaccacaacattactaccgactacactagaagatccatatgataggccacatctatagctatagtcacaattccaactgagtaaaaactacatattcttttattaacataaaacactaaaacatttaaataagagcacttatagcattttaatgcccattcattcattcaacaaacatttactgactacctttggtataacccggcactgtataaagtgttgatcatc

SEQ ID NO: 516174 - DNA, 391 bp, Homo sapiens
caaactcaaattacgaacgccctcccagtggcatcataatcctttttcaaggggttcaaactttactccccctaaaaggtttttgaggaattttagcaagcctcgttaacctccccttacccccccctattaacctattgggagaactttttgtgttagtaaccccgttttcctgatcaaaaatccctttcctacttacagggctcaacatattagtcccagccctaaactccctttacaaatttccccccccccaatgggggtccttccccccccccattaacaacataaaaccctctttcccccgagaaaaccccctcatgtttatacccctagcccccattttcttcctatccctcaaccccgaaatcattaccgggttttctttttt

SEQ ID NO: 516175 - DNA, 894 bp, Homo sapiens
ttaggtgtccgaaaatgatgcgtatagtcgaattgaagtagtccgtttatacatctgtttataccatagtgatgcaccttgtagactacctcaatgggatctatagttctgtagtattcataggtctacttattagaccagaatggagtcttgtgaatattgcgtcaatttagtatactgagttaagtaattgccacgagatatgttgggctagtatgcatattgatattaggtatatgagatagaatatttactcgtataacaatagtatagctcaaggttgaagtcttcttgtgtcggaaaatagcattgtatatctaggaattagcaatcaaaacaagtgatcgagcaagagatgatggtcattgtgtcaatatgcttaggtggcacccgtgtgaaaataccgataggtttggccgagaagtgttctctatatactgtatcatatacatcgtggtggatctctcatatccagtgtaggggtagaaatctgtaggaatcgcagtagtaccatctaggatggaaactgaaggtcacgagcaatgtatagtatacctttcctaggattgagacaaatactatttatctcatatactcgtttgctccttatctagtactggcttgatcagcggcaaaatattgtagctgagaatttctctaaacaattccttgtcatgagacgattcaccaagatcaaaagccaggctcaggttaatacgaatgtgtggagaacggatatgatggatacgttgacgttccagaagcgctgtaggtcctgatagtgctaaggttttatggttgagccatcttaaaatgtgccgcttgattaaagtctagagcatcatttggaatttgctatctcgcttgtcccaaaaattttacgccccccccggg

SEQ ID NO: 516176 - DNA, 154 bp, Homo sapiens
  misc_feature (50)..(50): n is a, c, g, or t
tgccactccccctcgcacacgtcatcagagaaaggtgttctgaataacantataccgcatgcagacttcatgttcacacaggcacacacacacacgtctgacctctcacccccaccccattcacctttgaatcccacttggcacctaagcacag

SEQ ID NO: 516177 - DNA, 357 bp, Homo sapiens
tgagcgatctagaggatcccatctcaggcaggacgacaagggagtcactatctcaagaaaaaaaaacacaaaaaaaagaaaaaaaagaaaaaactgatagttgctaaaatttctcctttttaaccctgatccagctctacacacccatggcccttagttggtgccccaggaggccgaacctggttcttttcccttctggttcccaggtggtttgggccattggaaggaagtttaacgagtgaaagaagagagatagtcagagattgtattcctcgtagtttctctccaagcccattagttccccattcaagttccccagaattccaccagctcgctccttggccttgagattgggat

SEQ ID NO: 516178 - DNA, 515 bp, Homo sapiens
  misc_feature (133)..(133): n is a, c, g, or t
catcacctcgctctggctcccatgggctgattacatcattatgaactactcagtcaacattccaaataaccacctcggaaagattggttcctgagctgtgtccatccagagggctactcatcagagcacaggnccaagagctggtcatcacctactggccaggtggacccaaggtccttaccaagtgggtggtgataaatcttctcagttcctggtcccaaggcatgaagaagatgtacaagcgtggctcaagtaccccgagtggaaacagaagcactgctcacttcaagccggtggttgggccggagcagagaccgttgcgagcctggcgctgtcggagctgtcggtgcagcatgcggacctcactggagaacatccgacgagagcgcggtgggcgaaaacagagaggaacggatgggggggcgggccgggaggcagcgacagacgaacaactcggctcacctgagcgccgaccgttcagggagaggagaaaggaccgggggaaccctggggcg

SEQ ID NO: 516179 - DNA, 264 bp, Homo sapiens
tcttactgtagggggcagtaacatttcagcttaaacttagttactgcattcatttatatcatttaacaaatatcatcatgtgtggcttaagggcagggatacattctgagaaatgcatttgttagataatttcattgttatgtgaacacctggttggtataacctgccacacacctaggctacaagcctgtacagcatgttactgtactgaatactataggcaatgttaacacaaagtatttatgtatctaaacatagagaagg

SEQ ID NO: 516180 - DNA, 178 bp, Homo sapiens
  misc_feature (54)..(54): n is a, c, g, or t
  misc_feature (132)..(133): n is a, c, g, or t
ggagacactctcacacattcagatacacaccttctcatagctcatacaacattnccttgaagacacatcttaggacaaaaaggagcttatcaatttttaacaagtaaatttctatgaactacattctatganncaaatggaatgagacgtatacacgataaaagcaaaaaaaaaaact

SEQ ID NO: 516181 - DNA, 178 bp, Homo sapiens
atcctattgagaaacactagttctttctctattgaatggtcttgacaccctgtttgaaacatcagttgaccatagatgcatgtgtttattatctgtactgtcatgagtatgcgtcgtgtggtgatggttgtactgagcacaataatgctactaaaatacgcattcaactgtttactgt

SEQ ID NO: 516182 - DNA, 286 bp, Homo sapiens
gcgacgctggagtggcaagaggaagggtatggtaatccacacactgcaagagaaaaggagcagtcgcggaatagttgattatgtattagtctcacgctcagtaaatcggcactttatgtaagctgtggtgaacatggagcagctacctgtggggatatttaaccttttatctgtagctgtctgattaggaacaaaaggaaaggcagcttcttgcatgactcagctttcagctgaatttgttttcttttggcagagtgaactgaggtactccagcgtgctgatacaa

SEQ ID NO: 516183 - DNA, 490 bp, Homo sapiens
ctggagttctggaagggacttgtctgattagagcagggggagggccaagcatgtcctggggtcagaggagatgcttggccagagcttctgaggaattcggctgtgctgtgggggtggggaagactgcataggagaagtgggtagggccgccatgtagagcctcatcaagattggggccagggctcagtgggccacccctgggccgctccctgggggtgggatttggaggcggtccctgccatgcaccctgtggtgggtcggaggtgagtgattttgttttcttctaggtggaggcccccctgcctcccaccctcactccccaccccactctccagctgcagaggatggtttaggagcaaaaatggtcacaactttaaagggtgtcccatgttaatgctggctttttttttctttaaaaaatttgttcttttgaaatttatatttgtttctccacagattttgagatgtttactttaaaaaaaaaatctaa

SEQ ID NO: 516184 - DNA, 363 bp, Homo sapiens
gcgggggctcacaactgtgatatcagccttccaagtagcagggattacaaagccagctagctttaagatacggtgttgggcatcacgttttggcatggagcaggcactcttttctttgcccccaggtgggactaagccaccacaagccttccctggtgtgtgcagtgggtgatgaatgcttgcctgctcagcacccacttcctggtgggctgggtcacattactatgactcccccttgagcttcagtccgcgcctggttggagattattgactcaacccggggatccagaggtgggatgtagctctggcctggccagaggaccgaggatgctgcatgccatggctacagctactggttcggct

SEQ ID NO: 516185 - DNA, 884 bp, Homo sapiens
catcgagaccgcggtggatgcctcggtccctgcagtgcctgtctgctgaggaggccaccgaagctcggggacgcgaggagccggcgtggccctggagaattacgccccgattcctggacgctggtgcacgcgcatctcactcatgctgcacggctgcagcgcgcgtctagggcgttcctgccgagctggaggaaggccaccgccaggtacctgcgcagcgggccctgtactagcggacttcgcgcgctaccggagcactagtgcacggggtgacccaggcctttcgccggcgcctcgcgggaggtgctggcggttgacagcaagagactgggcgagcctcgctaggcagccgcttctcgcctggccagagtgcacagactgcaggagctggagcatacgcggttgggcacggtggcctctgactgcatttgatggagactccatagctggctggggcagtgaggacggctgtacgtgagttcaacaactgaaaatgacaggtaacttacaaaccattggaagcgatcaacggaagggttcatccaggacgcttaggtatgactgcgtgaatctgccgatgtgatggctggattccccagggcattgcgccagagtcgagcatgggcaaacggggcggatggcgccgagcccaagcccttaactggcagctggctgtggttgcgccccactgcgctgctgaccttcctgcagttcctagagcagccttcccatcaaaataaaggaagcttcctccatcttgttaacaaacgttgacgagtaaacgaataatgaggggaggggcggaaccaaggaataaccactaagtggggccaagattttaaggttaaacaccagatatatcagttaataatgggtggttccca

SEQ ID NO: 516186 - DNA, 188 bp, Homo sapiens
ctctgtgagtgctgtcttctggtgcttgaccatgcctggccattcaacgcctccgtgaccatttcaacgcctaccgggccattcaacgcctccgggccattcaacgcctccgggccattcaacgcctccgggccatacaacgcctccgggccattcaacgcctccgggccaattcaacgcctccgggc

SEQ ID NO: 516187 - DNA, 292 bp, Homo sapiens
attgtttttttaattttagtttacataatatatattataggaagttatggatattggatataggggaccctattcttcattatcttaatatatttgctatgttataatttatctatatattctttattaacatttaggagttttgtttatgaattttgtttttgatattgacggtaccatttcatttgatggttatcatgttgatctacttattgaagaacgtatttttaaattacatcaacttggccatcaagtgatatttgcatccgcacgtccaattagagatttgcta

SEQ ID NO: 516188 - DNA, 193 bp, Homo sapiens
  misc_feature (41)..(41): n is a, c, g, or t
tgtgcacggatcactgctgtgaccgagcaatacaggagcgngtgcgttgctccagatactgagagctctgaaaagggaacggaggtgagaagaggtgtggggagcgcgagtaaagttgcattggtcatgccaggccagtcatgaacttgagcacaggtgcatgtggagctggaagggaagcaacagtgggagg

SEQ ID NO: 516189 - DNA, 182 bp, Homo sapiens
aagaaataagcaaacaagaactagagttactatacaagaaactcttcttagtttttaaaccttaagcataaggattcagttgaccctttcttgggtcatcaatcttgaaagaacttacataatgcgccatttacactttcacctgggagcaccatggccgtaagtcttgacagccaatctat

SEQ ID NO: 516190 - DNA, 221 bp, Homo sapiens
  misc_feature (180)..(180): n is a, c, g, or t
gcactccagtgtgggtgacgagcgaaaatccgtctcagccaagaaaaaagaaaaaaagaaaaagaaaacttaactggcctttggggcacatgcctgtggtcccggcttcttgggaggctggggcatgagaaaaaaaatgggcctgggaggtggaggttgcggtgggttgaggttgtgccnctgcactccagcttgggcaataaaacaagactgtctcaagg

SEQ ID NO: 516191 - DNA, 398 bp, Homo sapiens
  misc_feature (10)..(12): n is a, c, g, or t
  misc_feature (27)..(27): n is a, c, g, or t
  misc_feature (49)..(49): n is a, c, g, or t
  misc_feature (55)..(55): n is a, c, g, or t
  misc_feature (61)..(61): n is a, c, g, or t
  misc_feature (76)..(76): n is a, c, g, or t
  misc_feature (80)..(80): n is a, c, g, or t
  misc_feature (124)..(125): n is a, c, g, or t
  misc_feature (191)..(193): n is a, c, g, or t
  misc_feature (199)..(199): n is a, c, g, or t
  misc_feature (215)..(216): n is a, c, g, or t
  misc_feature (367)..(367): n is a, c, g, or t
  misc_feature (370)..(370): n is a, c, g, or t
cgaagtcttnnnggagcccatgttcangtggacgcgggttgggagccgnctcctnggacgntcagcgtacgagttncgancgggaaggagtggtcgtcggagcgggttcccgccgagctcaatnngctccatgtatcgctgcaccgcccagaacccactgggctccaccgacacgcacacccggctcatcnnntttganaacccaaatatcccanngaggaacggaggactctaatggttccattggcccactggtgcccggctcaccttggtgctcgccctgacagtgattctggagctgacgtgaaggcacccgccccggccactccatcaggcactgacatctccacggccggttttcatttcnttncgtaactatttccagtcttgttcttaag

SEQ ID NO: 516192 - DNA, 985 bp, Homo sapiens
gcctccatcatctaccccaccacctatgtccagttcctgtaccacggccgtgcgcgggacacgccatcgccgacaccttcttctcctgcatcgcgtgtgtggcttacgccaccgaagtggactggacccgggcccggccggcgagatcactggctatatggccaccgtacccgggctgctgaaggtgctggagaccttcgttgcctgtcatcatcttcgcgttcatcacgcgactcccaatctgtaccatgcaccagccggccctggagtggtgcgtgggcggtgtacgccactctgcttcatcctagcggcagtcgccaggtcctgctgaacctgggggagtgcggccacacggtgtctacccatccccttccccagcttcctgtcggggctggccttgctgtctgtcctcctctatgccaacgccctatgttctctggaccctctatcagttcgatgacgaatgtatggaggcacgcactctggtagctcgagagatgtaagctgcagccgcaggcatgcctactacgtgtgtgcctggggaccggcgactggctgtggccatcctgacggcatcaacctacgtggcgtaatgtggctgacctggtgcactctgccaccgtggttttgtcaaggtctaagactctcccaagaggtcccgtgccctctccaagctcttgttcttcttgcggcgaggtttcttagtggagtacttctatcctccgctttctctgtgtcctcttcctgtttccgttccctccagcgttttctttccgtcccagtcgtgagcgctaaccagtctggaggcgtatttctacatcctttcactggcgggactcccggtggggttggcgcatctggttccccggcagggccctcttcttttttttaagaggttccctggcgcgggagcgcgggtctcggacccctggtagatttccgccttatttgagtatgccaggtccccatgacgcgaagacgaagc

SEQ ID NO: 516193 - DNA, 184 bp, Homo sapiens
ggagcaggtatttcgaagaaagcggaccatggcaagagtcattgatgtagccatagccagctaaaacactagaatgccggtccaaggctaccatgtgtggcacactcagactgagtaaagaatcacacctggcacagtcctatagcagtgcaatggccctacatcgcagagccttgagagacat

SEQ ID NO: 516194 - DNA, 973 bp, Homo sapiens
ctgaagaggctatgctaggtgtctctagcttaatggaggggacggcattcatctctgtctccctctgaagtgctttcgatcatccatctgatagtctcgtcataactagattctctctaagagtggggatcggcgtactcgttcaggtcctctggtgggagtggccaaagggacatgtgcccaggcggtctactgggggacatctggtttttcatgaatcagagagatctggatacctatcaatttccctgaagcactggatgcattgataggcttatactgcccatgtgctgctgcatagtgctccttacccactacttagctaaccatgatgggtttgtaagtactctggcagttgttcttaagaagaacaatgcacccccgttgagttatacttcaagggcattacaagaaacgtgcatgatgagtacatgtggatgtagagtatagaacttgaaggaatgtagatgttgaaggatttagtaggtatctctgtgctatttaatggtttatatggcagggaattgtaggctataagacaatgtgaattaatggcagttatgtcacatcaatcagagaaacatgttacaaatgaggcaacgtgagaaggataacttacccaggaggaataatttggatagtaaggcgttatatagcggagagtacataggtggagttcaagcctaggatagggaatgtaaccacttgcttggaaatttactcttcctgaggtagtgggctggcgagaggaaatcaagtgtaagtgtggataaaaaaacccttgccccggtatattgcgagggctgtggtgttatcttagaataaggtgcctagatattgtatgcagtggaatggtgggtagttaattgtaacattgtagaacagggtaaggaggaaattgaaaacattggtccaaatcaatagttacgaagatgggggggggtaaaatcagtgcagacaaagggtggaaaat

SEQ ID NO: 516195 - DNA, 151 bp, Homo sapiens
gtcggacctccaaatctatcattatttttggaggacaggtggcaaccttaattatactttggtggcattcttcccaatgcaagaaaaatttaatactttactgcttcccagctaaattaaaaacctatcacacactaacacatgtagtctt

SEQ ID NO: 516196 - DNA, 216 bp, Homo sapiens
ataaactgcatcaactaatgggcaaaataatcagctagcactcattatgacagtgatcaaattaccacataataatcttaatccttacatgcttgatgaggtaaatgccccgaattagaatacacagtacaggcaaatttgtgattagagagccaacgatgccagtcgcgtattcagcgacgacccactctcacactacaaacgacacactgtacg

SEQ ID NO: 516197 - DNA, 131 bp, Homo sapiens
  misc_feature (83)..(83): n is a, c, g, or t
  misc_feature (115)..(115): n is a, c, g, or t
taccctccttatgcaaccttgttgtcccccgctccctgggaatgtcaccatattgatgcctgaacttagtgctggacacccanatctggcattgctgcactacatgcccagaacntcctgtggctcaatgc

SEQ ID NO: 516198 - DNA, 549 bp, Homo sapiens
tgggcttgacccaggatttaaaaactggaacggtgaaggtgacagcagtcggttggagcgagcatctcccccaaagtttcacaagtgtggccgaggactttgtgatgtgcacattgggttgtttttgtataatagtcattccaaattatgagatgcatttgttacaggaagtccctttgccatccataaaagccaccccatttctctctaaggagaagtggcccagtcctctcccaagtccacacaggggaggtgatagcattgcttccggtgtaaattatgtaatgcaaaattttttaaatcttcgccttaatactttttaatgtggtctaatttggaatgatgagccttcgtgcccccctttccccctttttggtcccccaatttgagatgtttgaaggctttgggctccccctgggagctgggtggaggcagccagggtcttacctgtacactgatttgagaccagttgaataaaagtgcacacctttaaaaaaaaaaagtaaaatatatactaaaatcacacatcaagaaaccaatcaaaaaatg

SEQ ID NO: 516199 - DNA, 173 bp, Homo sapiens
ggagacgataaagattccagcagattttggcagtgaatattctcatctcccagaacaggccttctatatggttgaacccattgaagaagctgtggcaaaagctgataagctggctgaagagcattcatcgtgaggggtctttgtcctctgtactgtctctctccttcagactt

SEQ ID NO: 516200 - DNA, 106 bp, Homo sapiens
cggggttctctgacggatactcccaggaccgggggtcggagcgagatcggggggacacggaggtcttccgggctcctttacttctttctggttcttttatcctccg

SEQ ID NO: 516201 - DNA, 661 bp, Homo sapiens
  misc_feature (326)..(327): n is a, c, g, or t
  misc_feature (338)..(338): n is a, c, g, or t
  misc_feature (354)..(354): n is a, c, g, or t
  misc_feature (357)..(357): n is a, c, g, or t
tggggatattttccaggaaatctaagataggtagttctaggaaatttctctgccctcagcttcttttttttttgccaacacagacccacccagagatgaaaacatgaatgttttacaaggatgcttggtcattagtttgtgactcacactggcaaattctaaacttcagcttgctacctgggatacctgcatgcatgcagttcctccaaacctttggccaagagctcttcacttaatattttaaagagatttttgtttttaaaaagaatgcatttcatttttattttttgaaatggatctcgctctgtcgccaggctggagtgcannggtgcaatctnagcttactgaaacctntgncttctgggttcaagcgactttcctgcctaagccttccaagtagcttggactacagacatgcaccaccctgcccagctaattattggatttctagttgagacggggtttattcatgttgggaaggttggtcttgaactctagaccccgtcatccagtctcatcctatcctagggctggaattacatgcctgacccactcaagtctaccttggaatgcttacccttataacgggtgacctctccctaggctcctattaatacccgctcaatcgctcacctttgactgttcctgcaattttactgcc

SEQ ID NO: 516202 - DNA, 730 bp, Homo sapiens
taatggggcttgggtgagggaggtagtgtggtagttgtgtgtttaatattttaagtggggtgatgaggaatagtgtaaggagtatgggggtaattatggtgggccatacggtagtattaaagttgggggcattgaaaatgatgtgtgtgaggctgtattataccatagccgcctagcttcaaagagtcactggcggcaagtcactattggacccagcgatgggggcttcgacatgggcttatagggagtcataagtgggagcttcctgtaaagaggttatcttgtacttataaaagcttattggttgtaacgctagtctattattaaatgttggtgggctccaggagtttggataagtttcttggggcatgtgagggtggagtagtagaaatggtttagtggacgcctagggtggtggtgtggagttgtcaaattagtggcgatcgaagtagggagaagggacgcctaactaaggggtggtgacgaatcaggacagtccttgtcgttgcgctccacaattctatcgttgcttttttgggaacagtcattgctcaggggtcagtcaatcatacttggtgggggaccgatctcgtttaagcattgtgaagtcaggtacagggtaattgtacgtagtccaaaggcccatattttcgttgggcggacttggccctcagtggggcttagggccacgggtggctcgcaaggcggcaagacttagttttgccttggc

SEQ ID NO: 516203 - DNA, 769 bp, Homo sapiens
  misc_feature (7)..(7): n is a, c, g, or t
  misc_feature (66)..(66): n is a, c, g, or t
  misc_feature (71)..(71): n is a, c, g, or t
  misc_feature (101)..(101): n is a, c, g, or t
  misc_feature (227)..(227): n is a, c, g, or t
  misc_feature (251)..(251): n is a, c, g, or t
  misc_feature (267)..(267): n is a, c, g, or t
  misc_feature (285)..(285): n is a, c, g, or t
  misc_feature (306)..(307): n is a, c, g, or t
  misc_feature (316)..(317): n is a, c, g, or t
  misc_feature (321)..(321): n is a, c, g, or t
  misc_feature (323)..(323): n is a, c, g, or t
  misc_feature (329)..(329): n is a, c, g, or t
  misc_feature (331)..(331): n is a, c, g, or t
  misc_feature (352)..(352): n is a, c, g, or t
  misc_feature (391)..(391): n is a, c, g, or t
  misc_feature (394)..(394): n is a, c, g, or t
  misc_feature (398)..(398): n is a, c, g, or t
  misc_feature (408)..(408): n is a, c, g, or t
  misc_feature (432)..(432): n is a, c, g, or t
  misc_feature (465)..(465): n is a, c, g, or t
  misc_feature (467)..(467): n is a, c, g, or t
  misc_feature (533)..(533): n is a, c, g, or t
  misc_feature (689)..(689): n is a, c, g, or t
  misc_feature (718)..(718): n is a, c, g, or t
ccaggantccctgctgccagaacaccgtggactggggtacaggagttgttgcatagtccatgaagntagantcgggaagcagggactcacagttgccaggntgtccatctctgagccaatttccctccacaacccaggggtttcagtctcatatcaactatcatgtttgaaacagaaaacaggcaaaatgtttggctaaaataaaatgaaaacactgcagggaaganaactgactgtgctggtggacaggngccctgctcacctgtnggaagggcagggccagcnagggcagcagagctccctggnngtagctatnntgtntntgcatntngtcctccagctggtcccaggngagatgcggggacaggggacagttcaggtagacaggtanagntgantagggctctncctgatgtgttctggcatcaggangttgcctgatccccaacatgtatgatatgttcnangtagcaatgggacatctgcccaaaggatcaaagtccaacttggccagatcccaagcttcgcctgcntcatgtccctggctctgcaacgggtacccccaactccggggacgagccatggcctcaagcagcagctggctacgctgccgaaaccaggacacatctgcatcacacagaaagctgcgccaccctggtgtgacaggccctacttggtcaccctagggntaagctggagaagaactccagatgtgccntggagaggccccacctctcaggggccactcacagggtgccccccaccaccc

SEQ ID NO: 516204 - DNA, 894 bp, Homo sapiens
tagacccattttcttatgatgtcctgcttgggtggaccacgaaaacgtgtttgcaacgaacgtgcttcttggaaccgcgtgttgtacgcctgtctgcgtctttgtggtgacccaggcgcgcgccgtgccaataccctctccccgagggttattccctgccgcgcgggttactactcaccgcccctattgggggctgctcccgagaccaccccacgtgccaaacagggccgggtcccacagacaacgccaagggaaacgtcccccacaatttgggggcgcccacaacacgtcccctaaagggtctaatccggtaattctcttttccccacggggaacatccatctcccctgtccctaacttccatttccctaccccgccgccccccctagtagctaacacccacccctcccccctagaatggaggtcatatacacaggtctccccctttatcaaccctcctcaacagggaccacattttgggctccacataacccatcacgcaccacttttaaccaccttgccaaatgttggacaagatccccgtatgacaagtagagtttctttctgtaaaaaatctacacagcgcacactctttcttttaaagacgccaaggtctgggcgccctcactccccggcttgcacgccccctagcccccgtcagtaagccccacgcccgcccatgacacgccctcgggtgcccaatccagtttctccccccgctccgccggatgcctgagtcctccttgtgcctcgcccgttccaattagcttgtggaggcaagggggctcctcctgtggcttcccctctggtgtccgcacctcagcggcccccgagctagtccccccccgcctgggccccccagcgcgggcaacccgcgccgacccccacataaca

SEQ ID NO: 516205 - DNA, 855 bp, Homo sapiens
gaaattatcccgattggaaagagcgatctgtgtggatttgtttgttctcgtctcgatactccgttagcgtttgcattatggtttatctaatgtctgatgagcagtattgctcgtaaattcaggagaagcatattattgagtattgtgataaaagactagtggtcgcatgggtacttatcttgcaaacatggggtgactgggaatactgtcattgatgatcttcttgtggacatgatatcccgcatgaagtcaagtagattactatgtcatgattgatgagttcagatgctgatgcggtgattgtgctacatgttgatgtcccctgaaatttactcgacagattgatggtcaacgaccaatatgtattgtgagcacaagtaactttgttgagtgaatgataataacatgaatgagttccggaggtgttcggattagaggcgagtggtcacattggcctgattagtttatgatcgctttgctccaatctctcgtacacattgtgtttgaccacatctttgggaagacagttgtctgttgataggagaagtagatcgacatatttgattcacgcgtgtaaatgcctagactttattggtattgggtagaactcgagtcaaagttacgtacctgattggaaactgaggctggtggtacgaaaagttgaattgattctagcaaaaggtggaaagatgcctttgaaactacggagaactggtggttattcacttgcattgggttcgccatactttgcttcgaatttttcccctttttgctactaggtttcggtaaccttgattcctggtaagaagggattcctcccctaactggttcaacaactcttttgcttgctatcta

SEQ ID NO: 516206 - DNA, 514 bp, Homo sapiens
aacatctatgctgtgaagacagccgtgtcagttgcccaggggggccacagccgcaccagctctccaacgcccccttcctctgcaggctctggcggctctttcaatctctcaggatccggagacatgtttctggggatgcccgggctcaatggcgattcctaccctgcttcccaggtggaatcactccgacactcgatggggccggggagctacggggataacattgggggaggtcagatatacagtcctcgagaaattcgggccaatggtggctggcaggaggctgtgaccccgtcctcggtgacatccccgacagagggaccaggaagtgttcactctgacacctccaactgaccttgcccctcaaggtcgcggggctaggggcttccaccaggcaactcttaaggactctgggcatctagaggacaaaccccacagaagcacaaaacagagggcgattggggttgtgccctccccgaccagacgcttggtgctggggtgctgacaacatggc

SEQ ID NO: 516207 - DNA, 99 bp, Homo sapiens
tgtggggattacaggcatgagccactgtgcctaaaaatgtctggctacacagatcatctttgggcactctggtgcacttgttagaaacgatgctgtctc

SEQ ID NO: 516208 - DNA, 124 bp, Homo sapiens
cataatttagggacacaggaccctctcaagtagcaggactacaggcgtatgctaccacgcgcggctaatttttctatttttttgtggagacaggatttgcgatgttgcccaaggtgttcttcaa

SEQ ID NO: 516209 - DNA, 931 bp, Homo sapiens
  misc_feature (1)..(1): n is a, c, g, or t
nacaggagaaacaccactcgcagctccccttgtcgctatgtgtgggcgtgtcgggtgttccatctcgcgtcgaccattttgagcgtgcgcctctctacctcgggcgcggcctcgtccacctgggtgtcaacgtcccctgtgccaactctgttcgtcgtcgccaggcgtttttgccccacaggcgctttttggcctgtaaggcggagtgttcaagaccccgcggcgtgagacttgtcgaaaattggcagttctggccctttcaatacaatcgaagtccgggcaacgtctcataataggccctccacagccctccttttcttaaaaccaccctgtccctgcaaacggtttctttcttgtcactcccccgctgaaccaaccaatggggcttcccccccccgtttggggctccctcgagcgcttagttcatggacatgccccaggcccccccccgtgggggaaccctggggcgcgcccctttttccccgggtctattttttgctctccgggctcgttcatgctcttggtttgttagcaccccaggagccgccgctcccgagtcgggttcgcgccgcgggacgggttgttgcccccggacgtttctctctttgtctgctgcgcctgtgctccgcccccctcgtgtgtgtgaacaacccccccccctgatatgctcacctcctcttaaaggccctccctacgtctgcaaccgcctttttagatacaccaccatctatcgggtttttacacccccgcctgttcaaaagacccctgagatgacccctttttctttgataccgcatggccctaccccgttccccccacgcttcacccatcacgttgttcactccccctgtagaggtaaaattccctgaaccacctttttttaaaacaaatctttttaaaaaaccctttcttaaaacgcccacaagacaaa

SEQ ID NO: 516210 - DNA, 305 bp, Homo sapiens
  misc_feature (145)..(145): n is a, c, g, or t
ggtatgtgttccaccctggttcctagagtttctctgcaggattaaatttgagctgaccacagcggtaatttgcttgacaacatatcctttagtgcctttcagtccttatctgtcttgcattccactctgttaatggggtttactngggtcaacctcaaaatttaactgtaatgacaatccttgtcctatgggaatgttcctaggggcacccaaattaaggataggaggtagtggcaacacattggaacatagtcattggctaaaggtcttacattattaaccgtgggacacaacatgagtgtcct

SEQ ID NO: 516211 - DNA, 133 bp, Homo sapiens
tcagcaaacttcgggagcctaagaggagtccccagtgtgggcaggtggagcagaggtaagagaaactgtggtaaattgtccacctataaagacagtatcacactgggatatcaatcccctattcaaattccca

SEQ ID NO: 516212 - DNA, 216 bp, Homo sapiens
accctgcaggatgttgcgacaccttttcactgtatatggtcagtatcattatctcattgaaagttagtaggctgaatacttatacaatgcagatgagatagaaatgagaactctctaaatgtgtgaaggcctacttagccataagcttattattattatttaagagacagggttttgctgtgtctgcccagcgttggtcttgaactcctggaagct

SEQ ID NO: 516213 - DNA, 1659 bp, Homo sapiens
ggggccccccgtgggtcgactcggggtggtggcactgttagtttgctgtgctgactcctgtgttggggtgcgctgtggttgtctggtgtagttggctcgcgcgtgttgtgctcggtgtggttggcctacgagtgccgccggcggggggagcgcggctgccgctggcgggaggatgtttgtgctggtggatgcttctcgccacgggtagggggggcctgctgggtgaggtgtgtgtcggcgcggggcgagccggtggtcgtggagtgatgtgttgctacagacctgcggttgtgctggcggcgcaagacggcgtgctgttgggggcgcctcgcaccgccgtgtttgctgtggaggagaagaaggtgggcgaatgaataagtagtcggggtgccgacggtttggggccgccccatagtgtcaaggtgcccacaccattgggggggtgtgcgaagcgaacgcgtctgtaggggccgtgacggccgtccggtgtgtgtagatttggtgccgtctgtagccgcgccccccagtgacgtatggtgtatgcaccgcgaaggttgtgggggtggtaggtgtattacaccagtgggggcaaccaagggggggatttttttgtggcggggggggacaatggtgtgacgaaacgtgcttcttggttgtggggagaaagacaaagtggaggcgtggttggcgcgggcgtgggcgtgcagtagttggggtgaggttatgatcccggcgccgtatgtgggcctccggaggtggggcgtcgggccgcgcggtccctcgggaagtagtggggttgtgtggtagaagggggagcgcgccgtgtgtgtggggtggtctgggtgcggtgcggtgcggtggggcgtgtagaggagcccccggtggcgccgtctttcgcgtgggcggtggtgtcccacgtggtcttgtcgtgggggaagagacccgttgttgcgtctcgctccgcagagaaagcctcgcacagagatgagtcgccactttatgtgggcaacatcgcagagatggtgtggccacactcgtggagcgccacaaagtgtcagccgggcacaggttcacacatcatccgcggtgtagaaatggagatgtccccacacgtgtcgttgagcgccacactgagaccgctttctgtgtgtccccatgggcgtcacctgggagatgggccacaagcgtgggcctggtgtgaagggtggtgtgtctgtcgcacacttctcgcgcttctgaagtctcacacgggtatatgtgtgtgtgagcgcacacctgctttgagcgttaagcgcctccacgccacatgggcgcgcctgcggagatgccacgcaaggaggctctcgtggccacgaacaccctctccgcggaaggcccgcgcccactgagaatcacgaaggcccgcggttcttctccctcttctggccgctgaggcggggaactcacccacggccttcacgaaaccttcacgtacacgccctccgcgcacgcaccacgcacctgggtcgtgaggggccacacctgtggccctgtctccttagcagagaaaaagcacttctggaagttgaatgtctgttcccagaagccacatgtgtatcctgccgattgttctccctggttcccaccaaattgcccactaataacctgtatggaaaccga

SEQ ID NO: 516214 - DNA, 682 bp, Homo sapiens
catgtctctagtgatccctgagaagttccacgcatatttcgcggagtactcaagcaccaagctatcgatgggcggcggaaaatagcctttgccatcactgccattaatgggtgtgggccgaagcatatgctcatgtggtgttgaggaaagcagacattgacctcaccaagagggcggtgagaactcagctgatggatgaggtggagacgtgtgagtcaccgagtcagtgcagaatccatcgccagtgacaagagtcccagaactgggttcttgaacagacagaaggatgtaaaggatggaaagatacagccaggtcctagcccaatggctctggacaactacagctccgtgaagcacctggatgcgactgaagaatgattcgggcccatagagggtcgtgcgtcacttctggggccttcgtgtccgaggccaggcacaccaagaccactggccgccgtggccgcaccgtgggtgtgtccaagcaagaaataagctctgtaggccttgtctgtgaatcaaatagtcatataccttagtacagacaaaaaacccaaaacccgaaggccacaaatgtggggcggcgcgaacggggtacgacaggggatcgggcctgaactgtgctagaaccgagcgagcttggccagggggagagaactaccggtccccagagcgcgggccaatg

SEQ ID NO: 516215 - DNA, 453 bp, Homo sapiens
aaaatgcgagtcaagcataggacattgcctcatgtaactgataagtctagaggtatgtaagttttaggcacagtttgatcagagctgtggtcctgatctcagtgctgcccatattttgtgtgtgttagctttgtctccaggatacttcttcatggtcacaagatggctgcctgccacaaatagggatatggtcactttccacaatcatttttcaaagggcctgaattttgttcccgttgaactatccctgactcaatccctgtggcccaggaattccgtctactgactgatgtaggcctggattatatgatgcaatcattgtggtgaaaaaaaggaccctctggagttgggagtgaggtcatttcacataaaccacatgacttccacataatacttgtgcttatttgccatctctatatatatcttctttggtaaaatgcctgttcaagtctt

SEQ ID NO: 516216 - DNA, 242 bp, Homo sapiens
aaattggagaagagaaaattttgcccaccagcgagactaaacagtgcacaatattggatacctaccctggcgccagtgaagctgatagcaggagaaactctatcttctactgggccttttgctctggaacctgatgcaacaggaactagtaaggctatcagaatttaccacagcatctactctcagcttagataataaatgtgatgttgacttatctttaactactcaagatactgaacatg

SEQ ID NO: 516217 - DNA, 852 bp, Homo sapiens
tgccctcatttacatgaatattatactagcatttaccatctcactgctaggaatagtagtatatcgctcacagctcatatcctccctactatgcctagaaggaataatactatcgctgttcattatagctactctcataaccctcaagacccactgccctcttagccagtatgtgcctatggccatactagtcttgccgcctgcgaagacacggtggggctagccctacgtagtctcaatctccaacacatatggcctagactagtacataacctaaacctactccagatgctacaactaatcgtcccaacaaatttatattactaccagtgacatgattttcccaaaaaacacacattaattgtgacattcaacgacagacaccccacaggcctaattataggcactcatccctctacgtatttgttcaaccaagatcaacaaacaacctgatttaagggtcgttccccaaacttttttgcctgcgaccccccgtacaaaacccccctcataaattactaaacttacctggagttcctacccccttcaccaattcatggaaaggccaaaggcccacatttattccagtggaaccagtatcacggagaaaaaacttctagccgtctctaataataaatctccccctaacaaatcttccgtgatttcataaccatccacaggcacagaactactcataagagaatatctgccttcggaaacaaagttattcccaacttgggtatatataacgccggatggaggcaacaaggccagaacggcggacgcggccatcttactattcacaactaagaggcactattccaatcatgcctatttacagccagaacctag

SEQ ID NO: 516218 - DNA, 414 bp, Homo sapiens
gcccctttcccggcccttccccccttttgccgggggggggggcccccaattcaaattttcccttttaccccccccggggtcgccccctttatgccccgcggtcctccccgggattcatttggaatttcctttttggggccccctttgtttttttttttaaacccccaaggccccccccctgggggggtgtttccgggggttttttttttttttgggggttgaggggtgccccccccccaccccttttagagaacccttttatgcccctgggggggggttgcccccaaggttccttttttccagggttgcccttgggaatatttggcccccctttcccccgcttttggttttcctctaaattgaggtttttttttttatgctttttttccccgtttaaaaaaaagggttttttta

SEQ ID NO: 516219 - DNA, 83 bp, Homo sapiens
cccaggagctgctacaggcagagccagcactgatagccccccgcaccggccccgccaccccaggccacatccccacccatctg

SEQ ID NO: 516220 - DNA, 156 bp, Homo sapiens
tcatcagatgctctgacacaactgttagaccctggcaagtcatcatgcactttggattgtggaggctatgacacagtcatgcatactgcaccagagactgtggatggccctcggaaactgtgggtgatggccggggggtttcagacataatccttg

SEQ ID NO: 516221 - DNA, 1702 bp, Homo sapiens
  misc_feature (1)..(1): n is a, c, g, or t
natgtagtttcgaacggtaaggtgggtagtatgaagcttctggctgggcgtgtgggagagtggagaatatggtttatgagaatgagcgtgatgtgtgtctgtctgcttaggtaggtgtggttttgatatataagatggaggggggatgtagtgaagaaaggatgggaggagggaagtaggacgtggtgtggtgtttgtgtgcgctggtggggtgctgtgtttgttgttggttgacctcacgtgctgggtgggtctacccccatcctcgtcatatcgtgtgtggtgttcgtagaaataagacaatatattatggggtgtgctcgtgctccttcgtcctggcatgtgtgctgtcggtgtctctggtagggagttgtgttggttggctggctattgtggtcggccatctgttcgtttgtgttgtgcgtgcgctccctgtcttttttgtgtagtagtgcggtgggaggtggtggcttgtctagcgccattctaaggatgagtaacagacgactctagtgtgttgtttggtggggtggtcaccgcccaccagccgtctgtgtgtggtttgcttatcgagaggagtgtgtggctgtctgtgtttggtgttcgactagctgcatgcgagcagtgtggttgtcggtcggtcgttgtgtgatcgaacagctgccttcatagctggtatgcaaccatctagcggcggttcgtttagtagtaggggggggggggaggaggagaggaggggggcgggtttttgttgttgaagagtgagtgggtggtggtggtgtgagtaataataactgccgctgggtgtggttctttcgaccagagggggggcgcgtctgctgccctccggcgggggtgagaggaatgaatgtcattcttgggtgagttagttagtgtctcggtgtgtgctgtctgtctgccttcggcgttcttacgtgtagttggtgggacgccgccaggctgcatgctcacggtcggctccgcatatctatgttgggcggcgccatcgccgccggcagcatgatcgacgagacgccgcctcgtctgcgtcgtcatcttcttgcttcttctcctgcttgtgttggtctatgaggaggaggtggtggtaggaagaggtgttcgtcctgcgcggtgttctcgtgtgtgaggatacaccacggctctctcacgagcacagcagctgcggggggggtgtgtcttctcgtgtgtggggagaaacactcgtgtgggcgcgtctggtgtgttgtctgtgtgtgtgtgtagacaccacacgctctggtgtatatatatgtatgtcgtgtgagacacgaccgccagcagtttgtataccctcgcccgcgcgcgccccgcggggaggcctcttttatcagattttcccctcggtatttttataaacatctgtgttctcttgtctcccgcggacatttttttacacccgcgcgtagaggaaagagagagagagagagagagagagagagagggggagagaacacccaacacctcttctttttttccacggccctctgcgatgctccctcttggggtggggcccacgaggtgtgttatagtcgccccgccccgcgccctggctcccgatagccctcccggtgccctcttttttttggggtgtaggttatatctcgcttgtgttttggggtgtaaacacctacccgcacccattaaggaagagaattgtgggaga

SEQ ID NO: 516222 - DNA, 101 bp, Homo sapiens
acaccatgagtattgagaagacacatacccacaccatcgcagcaggcatggtgctcagtctggttttctcttactggcagggcattttggaagtgtcaaag

SEQ ID NO: 516223 - DNA, 221 bp, Homo sapiens
aacgaggtgttatggcaacatggaagtacccatgacttcgaaaagcagttttcaactttaagtgtgtgaaagctttatggtggcgagttcaagtgtgaatggaagagatgggggcaatgatagaagcatagttttgggatcttcctgaatggctacataaaaatagcaactagatagcacaatcaaaaatcaaaagctgggagagctgaggaccatcgtgg

SEQ ID NO: 516224 - DNA, 147 bp, Homo sapiens
gtattttattcagattcagctacttaacgtatcagaaacgggcactacaaagaatcgcccatgcggttgcaacctagcagtcgctttatgattggtgttggtgctacctggaccactactcaattttaaccaaagcattctatagat

SEQ ID NO: 516225 - DNA, 434 bp, Homo sapiens
gggagaaggaggccgggcacagtggctcacatctgtaatcccagcactttggaggccaaagaggaaggatcatttgagtccaggagtttgagaccagcccgggcaacatagcaagaccccatctttttttaaaaaatgaagaaataaattagccaggcgtggtggcaggtgcctgtagtccaaactacttgggaggctgaggccggaggatcacttgaggctgcagtgagctatgattatgccaccacactccagcctgggtgacagagtgagaccctgtctcaaaaaagtgggtgggagccaggggtagtgtcacgcctgccatcccagcaccttgggcggcctaggtgggtggatcacatgaggtcaggagttcgagactagcagaccaaaatggctaaatactagatctctacagaaaatacacacaatca

SEQ ID NO: 516226 - DNA, 234 bp, Homo sapiens
cctcgtgatgagtcgccgtttgattcatcattatttctcgtttatcaaccgtgagtgccttactaagaattataatgtgattggtctgttctgtaacattatcttctccaaggtcaactcatcgactctcatcacctttggcatgatcttcatcttccctttctcctgtgttaaattgttctccactaagctcatctagatccgctacagttcctccttttggcccttatcgag

SEQ ID NO: 516227 - DNA, 464 bp, Homo sapiens
  misc_feature (87)..(87): n is a, c, g, or t
ctttttaatcacctgggtgcaggcggcctgagtcgaaaaagagagtcagcaaaggaaaataggggtgggccgttttatagaatttgngtaggtaagccaaaattacagtcaaaggggttgttctctggcaggctggggtgggggtcacaaggtgctcagtgggggtgattctgagccaggagaaggaatttcacaaggttaatcgctcagttaaggtggggcaggaacaaatcacaatggtggaatgtcatcagttaaggcaggaacaggccattttcacttcttttgtgaatcttcagttacttcaggccatctggatgaatacgtgcagacttgggctcagaggcccttgatcccaggaggtcaaggctgcagtgagccgtgcttgtaccactgcactccagcctaggcaacagagcaagacccgcggacagctggagaggccgagtagtctcgctttgatt

SEQ ID NO: 516228 - DNA, 360 bp, Homo sapiens
cccaagttacggaaggcgtgttgtggtcacatctcaatgcagcttgagtcctgggctcaggtgatcttcccttagcctccagagtagctaggactaccggcactggccactactcccggccaatttttagctggggttcaccatgatgcccaggctggccgcaaactccttggctcaagcgatcctcttacctcagccttctgagtagctgggactacacatgtgtaccaccatgcccagctatttttttgtttgttttgtataggtggggttcactatgtttctcaggctggtcttgaactcctggactcaagcaacccaccttccttggcctcctaaagtactgggataccagcatga

SEQ ID NO: 516229 - DNA, 372 bp, Homo sapiens
agtcaattttaagcacctttacaaatgagccttgggttacaggattgttttttgtatttatgctgattttgtgtgtattcagtgtgcaaacctaacctttcttatattctttaaaaaggagctgtgatgtgagtcaattcaatttactaagcatcagagcgtcctgttatctagcatgacagtcacaaaggggaatgaagcaagggctctgccttaaaaggagatctttaatcagaaatgatagtaatacactgtgagattgaaataacaagagtaggcacagggttttttgcacacaaagagaagagtggaaaaatcttgtgagcggaaataataaaaacttattcctttaggagtttaatggatctgaaa

SEQ ID NO: 516230 - DNA, 881 bp, Homo sapiens
  misc_feature (874)..(874): n is a, c, g, or t
gagaagccgggagaactggttgcgcctgcgtggatcggaagccggttgggtgtgagaggttatctcgctctagggagattcttcaagcaatcactatgtcaaggagacacaggtgtttcccttccttcatatgaggaagatcagggggtcaaaatgcatgcgaaagagctacatagagtgcaccattcgtacccgtttgaatagcgggtttggcagcaatgggttggcttatggatgatataaatgaagagcagggtgaagtactaaaatgtccattcatctgatccatcatgcgtgggcagcccaagggttgtggtaggagcaagtgactgtggtatgggctattgccatgtatcggaaatgctgggcaaaactaagccttagaagaagagatgctgtctttggtctgtgtgtggaggagctttgttttagtgagatgtcttatgattaaagtatacctattatgtgtgggaagataaactaatgtgtatgggttagatggtaaccatggcatttctgaatatgtgggttccctttttgtgcaaggcttgattggttgggtgacctgattactagtgaactagtttgacttaactagcgtcatacaacgacgtccaggttaactaaacatgtatgtaaatggactgatggtgtgttgaaatgtcacttttaaatttgaagatgactagtgctaagagatagggggcaatctggagtatcccgttggtggaatgcgaatttgggttgaaaagcaattggccagtaaaacttggtggcgtttggaggggggtaaacgttcaaggggaaatttgggcaggagattttttgtaccacagaaagggtgtttaaaaggaacatttggaagaagatgtanagtgtga

SEQ ID NO: 516231 - DNA, 819 bp, Homo sapiens
  misc_feature (232)..(232): n is a, c, g, or t
  misc_feature (486)..(486): n is a, c, g, or t
  misc_feature (724)..(724): n is a, c, g, or t
  misc_feature (747)..(747): n is a, c, g, or t
cctgtaactgacagaatgggctccctgatggcccaattactagaaaataatgaacttggtctactgcatctctagggcctcgtggcaatacagagcactcataagagcgaggtttgctcatatcatccaaggacgaatgtactgccaaattaaatgcttctgaatgtttctacggcgcatccattcgacactcgacatggcccatcagtaactcgacacatgatcgataaanacatctatcctgacactaatagactcaaagaccgtcttgtcaatcagtagccctgcactaaatccaccctactagagactacaaaaagggtctgcctgtgatccaaagcactttaacacaggcgcagatagcatggccgggccgatacataatagcaactctagactggttcgaacatatggtatctgcacacactgaagctcaaattgcgattgcttgctatgtaaaatcaattaacacatacactggcaatntatagacaaggtggggcgtggtaacacccgtaaactgggacatcatacaatgtttaaagaaattccgaattctgactccatggtaaaatataacgagcaagttactgcacacatatttaaatgaaggccggccaaaaagagcggggggaacccataattttattatccaataaacctctcgggcagatttgaactcttcggccggttggaaacccaaacttgtaaagatcggcaaaantcccttttataaaaaaacaattnacctattttgggttgggtatggggcgaatttataaacataacacacaggattggaagctcatccaccgtgcc

SEQ ID NO: 516232 - DNA, 116 bp, Homo sapiens
agatggacagcccagcgaattcggatatgtgattgtgtggttcgttgcgaactttcggttcgtatcatcttcaccaccgcaatttggctgacgcacaaattgcttgggtgttatat

SEQ ID NO: 516233 - DNA, 924 bp, Homo sapiens
  misc_feature (10)..(10): n is a, c, g, or t
  misc_feature (229)..(229): n is a, c, g, or t
  misc_feature (370)..(370): n is a, c, g, or t
  misc_feature (381)..(381): n is a, c, g, or t
  misc_feature (440)..(440): n is a, c, g, or t
  misc_feature (530)..(530): n is a, c, g, or t
  misc_feature (540)..(540): n is a, c, g, or t
  misc_feature (542)..(542): n is a, c, g, or t
  misc_feature (550)..(551): n is a, c, g, or t
  misc_feature (554)..(556): n is a, c, g, or t
  misc_feature (576)..(576): n is a, c, g, or t
  misc_feature (579)..(579): n is a, c, g, or t
  misc_feature (595)..(595): n is a, c, g, or t
  misc_feature (597)..(597): n is a, c, g, or t
  misc_feature (625)..(625): n is a, c, g, or t
  misc_feature (662)..(663): n is a, c, g, or t
  misc_feature (685)..(685): n is a, c, g, or t
  misc_feature (698)..(698): n is a, c, g, or t
  misc_feature (736)..(736): n is a, c, g, or t
  misc_feature (750)..(750): n is a, c, g, or t
  misc_feature (756)..(756): n is a, c, g, or t
  misc_feature (784)..(784): n is a, c, g, or t
  misc_feature (787)..(787): n is a, c, g, or t
  misc_feature (793)..(793): n is a, c, g, or t
  misc_feature (807)..(807): n is a, c, g, or t
  misc_feature (834)..(834): n is a, c, g, or t
  misc_feature (893)..(893): n is a, c, g, or t
ccgcagtggncggcgagcgcggggctcggcccgagctcaggagatggggaaactgaggcacggagctggacagtgactcagacaccaggagctgcctggagtggagctgagagctcaggtctgggctcagccagtccagagtgcaaatcttactgtccctttctagctgttgttgatcttgacaggcactggacggggcctgcaggggtctccacagagaccatcatgnttgtctgttttgtggggagcatgtgtgtgtgtgggcgagaaaaatcatggctttgagggtcctgtaccacagcgtaagcaggggcccatctccaccaagggaggtgggcggacttcatccgggagagggccaccaatcganggaggaccgtncgtcgaaggcgaatggcgaaaactctcccaagctgggccagcaaacgggaacccccatnggggacctttcgccccgcgtctgggagggtcttccgcggtctcctcggacaagctggcgctgtgccacctgggaactgcacacggaattnacaggatctncntcaagggnnttnnnccgctgacggcgagggaacnagngcaagaacccacaatnanttgcaaaggaggaaagtggtgagcaccnttggaatgctgtgcagggtactctcggggcgtcacannctcctgccccaagtcccgcganaaataactggaancgttgcatgggaccaggagcgggtggcggagggagagnaccagccagaaggngatggncaaaggcggagactaaaaccaagaaggnggnagagancgtgcggcgctcangtggaaaaatacaactcagcccgagcngactttgagcagaagatgctggactcagccctgcgcttccaagccatggaggagacacnactgagggacatgaagggaactgctgggctc

SEQ ID NO: 516234 - DNA, 566 bp, Homo sapiens
  misc_feature (481)..(481): n is a, c, g, or t
gtggtaagtggcttcgtggtcttatagctgtcactcttttgtactttgtcttaactcttttattccttttgagcgattgtgcgaacatagcatagcacgcactatgccttctgtgttgtagctgcctggccagggcgactggcgcgataacggtacttgtagcagtgagccgtcgaggtcttatagagtagcatgtgggcgctttgatgaaggacaaaatggcgatggcgggccgtgtatgtcccccttcctatgatgaggaccttttcacagacctgtactgagtctccgtgaggataattaactctgaggcagatgggccctgcaaagccttcttgcttagcacgtctgttcagtaaaatcagcgttattgctaaatgccctgtagttgactctaatgtcttattgggctcctgttctgcatggactttatcgctgcacgctgggaaaccgataggagacgtcctctgtagtctgcaantgttccagtcccagctaagtagccttagctgggtgcacacggacatggggacaatgatcctcgattctttttatgccagaagcca

SEQ ID NO: 516235 - DNA, 323 bp, Homo sapiens
ccttatatatctctgggattaattatgtataagcaataattaataacaacaaccacgtctccatccaaccattttatgcgggatgaattacctgacaagaaaaaggttatgacggggctgatgtgaacatatgaattgcttttacaaatgtaaaatgccgactgacaatttgttcatttaacatggtgggatatttttgtgtgcagatataatgtggtcttcccactacgactcgggaaagcatgcagtttattagcctacagatgaaatacattcacaaggtggtgaatgtgcaaggtgatgacgagtttggggcgttaaga

SEQ ID NO: 516236 - DNA, 560 bp, Homo sapiens
  misc_feature (16)..(16): n is a, c, g, or t
  misc_feature (81)..(81): n is a, c, g, or t
  misc_feature (103)..(104): n is a, c, g, or t
  misc_feature (108)..(108): n is a, c, g, or t
  misc_feature (121)..(121): n is a, c, g, or t
  misc_feature (144)..(144): n is a, c, g, or t
  misc_feature (178)..(178): n is a, c, g, or t
  misc_feature (192)..(192): n is a, c, g, or t
  misc_feature (205)..(205): n is a, c, g, or t
  misc_feature (214)..(214): n is a, c, g, or t
  misc_feature (274)..(274): n is a, c, g, or t
  misc_feature (285)..(285): n is a, c, g, or t
  misc_feature (364)..(364): n is a, c, g, or t
  misc_feature (400)..(400): n is a, c, g, or t
  misc_feature (462)..(462): n is a, c, g, or t
  misc_feature (559)..(559): n is a, c, g, or t
aacttcatggtataangttgggagagaggaggaggaacatggagccagggctccaggcctctccagagaagtcctcacccncgaagcaccccctcgggggacnnccgncccaggccacgcncccccccacgcccagcctccgtntgagggagaggggagattaacagtggtgcgaggncaagaggggttggngggggcaggggcngggcggggncacaggaagtggtgggccacgggcttttgggaggggatgccccgtgtttttgggggagcngcctcaaagangaggaaatctttctggagaggcccgtccagccccaagagggctgccacagtcccacagcggtagcggtggtggggtgcngaccacacagtgagccccgtctcactgaagtcccantggtaaccctccatcaccagtgggggggcacggcagaccaggtcaatgtaattggctgcgtngaactgggccaccacgtaactcccaaaaaggtagcgcgggtcctcgggggcccaggcgcaaccctgtcgtgtctcctgggttagaacagaggaggtna

SEQ ID NO: 516237 - DNA, 159 bp, Homo sapiens
  misc_feature (50)..(50): n is a, c, g, or t
  misc_feature (55)..(55): n is a, c, g, or t
  misc_feature (61)..(61): n is a, c, g, or t
  misc_feature (135)..(135): n is a, c, g, or t
gtgctggtgtagaggatccccgagacggtggggatagaaggcagaagtangggtnagaatngaagtgagattcttccattctaccctctctctctcttcctctctctggcctcacctccccagccagcccaggcngcgccagcatcttcttcctctcca

SEQ ID NO: 516238 - DNA, 165 bp, Homo sapiens
attactatgtggagagcatcgcagacttgacagaggggttggaggactgagcccactgcacctgcgccacagcccacccctccccactccctgatccgtagtggaggcgatgggtcacgagccatgttaagtcacaacctagctccttggtcagttctcgaccgg

SEQ ID NO: 516239 - DNA, 339 bp, Homo sapiens
gtgacttattgatatgctctttctcgattccgctgtcgtgtgtgtcatgccgttcttagttcgtggatgcgatattgtcttggttcattccgataacgaacgcaaactctggcatgctaactatttacgcgactcccgagcggtcgtcgtgcttcaacttcttagagggacatgtggctttcagccacccgagtattgagccattacaggtctgtgatgcccttagatgttcgtggttgaacgcgcgcttactgctggctcagcgtgtgcctaccctacgccggcaggcgcgggtaacccgttgaaccccattcgtgatggggatcggggattgcaatt

SEQ ID NO: 516240 - DNA, 379 bp, Homo sapiens
catgtgcaggtttgttataaaggtatattttgcgattctgaggtttggggcacgattgaacccatcacccaggtagggagcatattacccaataggtatgttttcaaccttttctcccctccctcccgcttcttatagtccccactgtcttttgttcccatctttctgtccatgtggactcagtatttagctcccacttatgaaaacatgcggtattcggttttctgtttctgggttaactcacttaggatactggcctccagctgcatccatgttgctgcagaggacatgatttcattcttttttatggctgcataatacttcatgggtgctgtgccgttcctggtcagtgccacctttggcaccactgggctagggg

SEQ ID NO: 516241 - DNA, 112 bp, Homo sapiens
tacaccttttttttacttactttatcgggcctggggcgcgttccctggagatgcatccttgttgaagcatgggtgtttctcattcctcagatctcaccccaggaggggtagg

SEQ ID NO: 516242 - DNA, 521 bp, Homo sapiens
  misc_feature (129)..(129): n is a, c, g, or t
ttaaagtcttaacacagaaatcctacctcctagttttaagatataaatacttgaatgatataatcaatcaagagggattaattaactgtgcagttgattgattatatcatgcaagtatttatatctgtncataggaggtaggatttctgtgttcaaagatcttctgtatttgtgacccctataattaacacgtaaaatgtcctatttatggaggtatcccgttgtgttttcccttcttaagatttggttagtcaaagcaatttttctataaatgataactctatcttggagataattagaaatgaaaaatggcataagggtatttatgtgtactgttgccataatttagaactcagacttaagtattatgtagttttacgatggcctttttaacccattcagtggagaatgtcagcttttctcgcaagttgtatgttaagtctattctaatatgtactcgaacatcaagttataaacatgtagataagaacatggacaagtaaagtttgagctcttattga

SEQ ID NO: 516243 - DNA, 792 bp, Homo sapiens
cgccgccgccgctgcctgggctgggccgaggatgcggcgcagctgcctcggcggccaggcttgctcccctccggcacgccgtgttaacttcccccgctatgtccccgttctgcccgccgggccgccccgtctccccggctgccgctcctgtggtcagggtcactccatgtgagctgccatggcagcgtgcctgaccgtggtgcccttcacgacggcttctgccctgctgctgcccagtgtctcccacgccatgcgcaccagcggcccacgggccctgcggcccatgtcgctcaggagcggagtcattgcgtgcaccgctcttgacctacgttgtgcctgctccatgcatgcgtgtgccctgcctggtgaccctgtggcctgatgtcctgtggccgaccgacagccgatccaccttgccctgccactgcttcacgcagtgcagcaagctaagctggcagcatgaactgacacacacacctggtgaggcatgctgcagtgcagcttggatagcagaagacagccagagagctagcgcgactagtatagcagccaaaattgcagccccatggagctatggggagatgcccactgccgagaagctgtaccaacaccaaccgaatagcagggactcggagacctgacgacttgattaacccagaccccgaagggcttggagaaagccccttacacacaacttgcatgcacgggcaaggacgtgtgccatggacgctgtctggagatcgaaggccaatccagtgaacagcctgcagaccctttgacaaggaccaggag

SEQ ID NO: 516244 - DNA, 197 bp, Homo sapiens
ccgggctctacggatttctgcgcttggcggcgcgctgttgcaagaccctgggctgtccatggaactggcacacttgcacagcacgctggcacagggcatacccgcgtcgcccttgttcgtcgagtcgcaatggctgacattgctcggccgcttgttcagcgaaacccgcatggtcaagcagcagttcgtcaaaggca

SEQ ID NO: 516245 - DNA, 325 bp, Homo sapiens
gtatgcattcttggagtcggggctgaactagctactttgctcagggagcaccatttttattggcaaggaactgatagacaaccacggatctacagatgtgggtatgtggcagacatttcctcaaaaatgaagtaaccctgtcacttcaagaaaaacaactcaggactggcggcaacagaaaacatgtacgctttcaagctgaacaagcgattacaataatccctatcccaactactggcctgtaaggctgggactcgcttcgggtactccaacccagaaaacactgcaacatacctgaacacagaagcatatatgagaacctagc

SEQ ID NO: 516246 - DNA, 259 bp, Homo sapiens
ttccaaggtacttcgcatgctatttgagctgtcagcccagcacaggacaacgtcttgttgatgcggatgacgtggaaggaagtggaagcaacaccgggatatggaagcatctttggcacagctttttaccattgtacttattgggaccaattcgggcaggctccagggcttcagaggacagctggtcaaattcatctgacacacatgtggccataaagcggaaactcattcacttttaccttccttccggcccaggtca

SEQ ID NO: 516247 - DNA, 109 bp, Homo sapiens
atctgttcatactgcaggtcatgctgctctcttctgccattagtattatgacatggatctctgtaacatcgctttgggaacaatgcatgtattacttatactttctctt

SEQ ID NO: 516248 - DNA, 381 bp, Homo sapiens
  misc_feature (144)..(144): n is a, c, g, or t
  misc_feature (149)..(149): n is a, c, g, or t
  misc_feature (160)..(161): n is a, c, g, or t
  misc_feature (168)..(168): n is a, c, g, or t
  misc_feature (170)..(170): n is a, c, g, or t
  misc_feature (316)..(316): n is a, c, g, or t
actctggttgtgcagcggtcagcagtacataaacgtactgtatgagaggcactgatgcacgcactgtctgagggcatagctcatgtctctgacatcctggtgtccaagatagcaaaagcagttgaatataatgtaacttatttnttaantgtggacaggnngacttgnanaatcactaagttatcacaaatgtggatgtgctagaattggatatgtccaggaacatgggaagggctcactattggaatcccatgagtctcccatttgtctctacccaaacgtattccaaagctgactgcatatgtaccatcttatntcttttggggattatacacctcagccgcctgagatgggggtcagctctttagacaaagggaaaca

SEQ ID NO: 516249 - DNA, 234 bp, Homo sapiens
  misc_feature (212)..(212): n is a, c, g, or t
  misc_feature (221)..(221): n is a, c, g, or t
taatttggtataagaaacgacatatccctaaatagtgcttatttaacttcattataaatacatctacttaacaaaaaaatatattttgtgatcttgaggtcacttcgtttaggtcattatctcaacccaacctccccaaactctggtttgagccaatatgtgttttattgttctcagagcaccagcaaactgtccaccaattgttgttatangaatgtatntagttttccaaaa

SEQ ID NO: 516250 - DNA, 344 bp, Homo sapiens
gcacgagggcaagtgtctgaaaataatctctttgcaaagttcaaagggcactttagaaaggccggctagttttttaaagaactcatttgaaatttaattatgtattggcaggaatcaaagatgcaaatgtaatgagattaatgagtgtccctttagataagaaaatttctgctgttgttgagttcactgctttgaaatacctgctagtggaaaggctttaggtttaaagtatgcatgttggttgtgtcgaatgcaattcaagaatgtgaaattgattggttccctctgtagcctcagatttagtgtcagttcttaagtcataagaattaaagaaccatgaactc

SEQ ID NO: 516251 - DNA, 323 bp, Homo sapiens
  misc_feature (12)..(12): n is a, c, g, or t
  misc_feature (19)..(19): n is a, c, g, or t
  misc_feature (31)..(31): n is a, c, g, or t
  misc_feature (95)..(95): n is a, c, g, or t
  misc_feature (132)..(132): n is a, c, g, or t
  misc_feature (225)..(225): n is a, c, g, or t
  misc_feature (263)..(263): n is a, c, g, or t
  misc_feature (293)..(293): n is a, c, g, or t
agaaaaagctcnggaagcnaaaaacgtggcnctaagtgactgtcatctaagtgttcatgaaaaggactcctgtttagagtatgagagctgaaacnaataagaaggcagagtgttgctctctctgacctcagntgaggatcatgcatgtcaggcaacacaaatttttcgccactgtgcccagcagacagactattttgggtcctgctctgctctctccccagctgnctgatctgggggagatgacttcagcttaggggctcagnttcctcatctgcataatcaaaagaataggntttacttttggatggatgttggggactttt

SEQ ID NO: 516252 - DNA, 105 bp, Homo sapiens
  misc_feature (2)..(2): n is a, c, g, or t
tncaaccccacgatcaccagccatggaaacgtcacagttcatccaatcaagcaatagcactgccaataatctcttgtaaaacgatgggtgatcgtggggttgtaa

SEQ ID NO: 516253 - DNA, 165 bp, Homo sapiens
cttatcagtgtcgacaattagttattatttaaaaaaaaaaaaaaaaaaaatgttaacactgaggtaaatcaattttcacatgattaccagtgtaacagaaaaatgcagttcgccctgatggtgctcatccaaatgttttaatagaaatacacaatctttcacttt

SEQ ID NO: 516254 - DNA, 357 bp, Homo sapiens
ttaaggcaaactacagcgcccggcctcttacaactacagaatcagattctacaagagaatggggccaggcaatctgcatactaatgcgctcctggggcaatgcatcagatgcgaagaagttgaggaaccaggtgcctggtccaggtcagcagagctacctacgataaatgctgaggtatcgtaatgtggagatgggaagctgaatgcaacccccacagcaggccaaaaccttgacctccatcgacaaagttgtatacatctagggccccaatactccattccagagccatgtgaactcaaagacaccttcaggctgtgaggtacagaactctctcaaaaggcgagcactccatgtgt

SEQ ID NO: 516255 - DNA, 282 bp, Homo sapiens
aaaaccccaagactgaccaaagagagatcagaaataaaacagacgacacgcagcgcttaacgtcaatcatttccaaaagcgcacttgccaagaactctaacccgctaagcggacagggcgggggcaaatacacacgatctcccgctggtcagggttttttaaaaaaaggcccagcaacttatttttcacctccctttttccattctagattttggcgaggtttcttgccccaaagccccagggggggctgcttccccctaagcaaatgcttctcaggcacgc

SEQ ID NO: 516256 - DNA, 765 bp, Homo sapiens
cggacgcgtgggctcggttcacatgatttgtcctagttttgtgtatatatgtgttaattagacatggcatgctaagaaggttgtttgtcataatgttgcatctgtctaatttgtcttctgaccaatatgtcgggaggcattttaagaaacaagcaggctggcacttttattctcttacaaatgatggaattttttgcacttgtacattcattttctctgattgagtttaatatcagtatgttaaactttattgccacatttaaaggactgtatttcatacttttttgcattttacctttcatctaccaatccatgtgcatggattgcacactaagatgtatttcttacgaaatagtctgtgtcatttttgaattatagaaattccaaagaacagcacatcagaatgctcctctctttcagtaatggtttagttcagagatcttcccgctcagcctccataaatctaatgtcatttttttttgaataagtcctaggagctgggcttcattcctccagcgggagtccagtcagggtcctgaagttggctggttcaggacacgaacggaaagagaaaagccttctgtgccaggctaaagctgtacatttcccacagtgtggatgcagtcaagaatccctgcacattctggtcataaggattagagtccaccagatgaggctctaaaagatcgatcccttggaattagaaagcagtggaaaaccgggcgcagtgactcacaccttgtgatcggcacttcggaatgccga

SEQ ID NO: 516257 - DNA, 304 bp, Homo sapiens
aactgtgttggatgccttcgagagtggtgcgacgccttcttgtgatgctttttgggaagcttttaatccccagcccttatccaaagtttgcagccgagtagggacttcttccctggcctttaccaaggaaaagattgctattggcgtactcaccttccacgtactccggggtcttttgggagttttctcccctaaccatttcaacttttttttggattcttgcttttgcatgccttccccgtcctttttcccttgccagttccctggtgacaggtaccagctttcctgaatggattcccggccc

SEQ ID NO: 516258 - DNA, 135 bp, Homo sapiens
acgcagtaagacgaggaggatgaaggccattcaactcctccccacgacactctgaagcagcgacggcacaacgggaagatgaaatgtttataggaggccttagctgggcactacaaagaaagtctgaaggctact

SEQ ID NO: 516259 - DNA, 351 bp, Homo sapiens
caatttctagaggaactttttctctgttaattcctggaactgtattttgaatccttaaaggtgagccctcatagggagatccaaagtcctgtggttaacgccttcatttatagatgaggcacctgaggcctggggatgtgaaccacctgctcacagtcctcatttactggatttgacttcagccaggtgacctggaatccttggggctcgaagccattggatttccatcgctatgtgaatgctcatacaacaacgtcacggaatgaacaccaccacctctcagtggtgcctccacttctaactatttatgtcaaagcccaatccatgtacagcacattcgctataagaata

SEQ ID NO: 516260 - DNA, 372 bp, Homo sapiens
gctgggggaagatgggaaccacagtggatatgagaggaaaccagcctgttaaaggaatgcaggagcctcccttgactgaaaacacagccacagcgtctggaaccccccctggcggcccattgtctacaccgtcggggatcctttttcctaaaacaaaatggggtatgtgttctgacactgaaatacgttttagaacccacagccaggcccgtgcagtccctcggtggcgtccagtcttttggaggtacagatgctcacacagtcatggctcaggtgttgcattgatttgataactcagccaaatatttatagttttaaatatatatataggtgttattaaaaatgggaaaatattaattttcttgtttaaaa

SEQ ID NO: 516261 - DNA, 1511 bp, Homo sapiens
  misc_feature (1345)..(1345): n is a, c, g, or t
gcgtatgtgttgttggtgctgctctggtttgtgtcacgcccagtgtcgtgggaatgcacaccagtttggggggagtagtggctgtcgttctagctacagtcgtgcgtgaggtcgggcacacaccctctttcgtttatcatgctcgcttggtggggagtttgcgtgcgtgcgacttgtcctcctgctcatcgcctcgcctcgtccactgtttcgtgatatgtctccttgtctccgctgtatgcagctccacgctgttagaccttgggggggatcccgtgttttgtccagccactatccccggttctgggcgccacttttggtatcgatatatatatgcaatacagggtttttaggagaacactcacacaggatgtccctatggtggatgtatggtttgttcttcccaaggaagtgtgttgtggtaactccgttggactgttatagttccgcccggtgttgttataagggaatcccgtcgtgtgaagaaaagtttgagttccccgtggtgggagctccacacgtagaagttgagccggtataagataaattaggggtttgaagttcctgttgtgtgcttgcgctcccccgtgatgttttgctctgggcgcctcctcttgcccccccctttaatgttgggagttatgtttgaggagagtaatagattctttagggggaaagatataatatttggggagcacctcgtctgttaatatttctctctggggggagctgcttataataaatatgttgttcttttaagagagactgttaaacctcgcgtctgtgaaagagggaggagataatgatccactgtgccctcgtttaggaacacccccaagcgccccccggggggcgcttgtgcagtgaacactctggcccctttataggaacggttttgtggagatatgcccgcagtatatacgcccggtggtgttttgcgccggtatctctctccgcgccatcttgttatagtcgcgcggggataccaccaaaaatggcctatttttgtttctggtccatacacctgtgttgttccaccccaggcattggagccccgctccccctctccagaccgcgcgtatcttgtcctccaggggacacctgcccctaggcgccccacacgccgagggcgctctccccaggggttggagaatattctgcccggacctcataagacccccacccctttaggtctcctcgcccctcatatatatagagagatttccctctctttcgcgggaagactctttgatataagagaatattctccacggaccgcatatagggatagttctctttctgtgggctctttctctccggcaccacgtctttacctgtgggggcntaaggggaaaccccaggaagagtatccgactccaaagaagtaaacccaccaccccggagtaactccacgttactcaagggatggaaggtttgaaggcctccattatattattccttttactgttgtacaatgatttgtgaaatgtttataataccaagccttttta

SEQ ID NO: 516262 - DNA, 651 bp, Homo sapiens
gttttcattttggtgacccggcccccgtccccttacaagggtcctctcccccctctctttggccctcccccgccttcccacttgggtggtcaccttcccccgcctaacgcgccctcattattttggcgcgttcttcgccacaaccgcctgacgcaaaatccgccatggtgtggcgccgaattgtcccccacctcctggtaacacaatcccgtttgtatcactcgcgcctcgaggaagtgttccatcaccctggcggctccccccaataggtttttatatgtgaacaccccccggcacgcccaattatattctcacgccccgcccttatttcaccacaatttatctggggtctttttattttacccccctccagcctccgagtatcttcgagtctcccctcacccatttccgacggcattttcggctcaacattttttgtaaccacccaggcgttccaccggaacttcaacgtcacttaattggctcacactttcctcacctaatctgcttcaatccccccacttattagtttcacccttacaatccccacaatcacctttggctttgaaagcccccccctgataactggccttttttaaaattggtttaatatttttttaatttccccttttttgatgagggtttttaaaa

SEQ ID NO: 516263 - DNA, 373 bp, Homo sapiens
ctgtgtggagtgagtgcccctctacctgtccaccagccatcgccccacatctggctgggaccaggagcctccctcatacaggggccagggctgggtgtgaagctgttttcaggactgctaaaggcaaggtgcagtatcccagcacttgtcatcatgtgtttccacctgcacctgtctgggagctgccttgctgcagagtgctgacatgacagggatccgcatctgtcctgggctgggtcaggccaggggaggagaggcagccctctgtcccacccctgggctcgctaacacgagatacccaagcccctcaggctgtgcccgcctggtctgggagccttgcctgtcctcgcctgggtgtccaagttggagggtc

SEQ ID NO: 516264 - DNA, 700 bp, Homo sapiens
tagatgggtaaaaggggtttatttgcgggggagccggaatttaataaaaagggccaaatcccatggaataatttgacttttaaaactcctcctttttttaaatttttttttcctttggtgcaacaggggcaaaaccaggagcaggggctgaaaagcctggggcagcaaaaacgggtacaggcccaccagggggtacactggcaagcttgccaaaaccctgggcaatgacgttttaaagggtttttccattcaggtcactgataaccttggtgagccggtcgtcgtccgccttgatacccacgctggccaagaactttttgaaggccttggccctgggggaggagttgccccctagggcagccagcaggttggaggggacgtaacgcattgggggggggtttgcaggggaaaagtctcacgcgtgcgacctcggagaaattttttctatatttttattttattatataatatttattatatttattttatttctactatttatatttactatacctatattttaataaatttaatatttattctcaccccacctccttattcattatacatttatactaaactttttctatctaattaatcttcttttaatctaatcttaaatacttattaaaatataatttagacatactttccttaattatatataatcttatatatttatatctaatttcccctcacg

SEQ ID NO: 516265 - DNA, 964 bp, Homo sapiens
  misc_feature (7)..(7): n is a, c, g, or t
  misc_feature (393)..(393): n is a, c, g, or t
  misc_feature (433)..(433): n is a, c, g, or t
aagggcnacaacggctggtaacccagatcgctactaccccgcagttcccgaacatgatcctctccgcctctcgagataagaccatcatcatgtggaaactgaccagggatgagaccaactatggaattccacagcgtgctctgcggggtaactcccactttgttagtgatgtggttatctcctcagatggccagtttgccctctcagctctgggatgaaccctgcgcctctggggtctcccaacgggcaccaccccgaggcgatttgtggcccataccaaggattgtgctgagtgtggccttctcctctgacaaccggcagattgtctctggatctcgagattataccctcaagctatggaataccctgggtgtgtgcacaatacactgtccnggatgagagccactcagagtgggtgtcttgtgtccgcttntcgccccacagcagcaaccctatcatcgtctcctgtggctgggaccagctggtcaaggtatggaacctggctaactgccagctgaagacccacccccttggccccaccggctatctgaacccggtgactgtctctcccgatggatccctctgtgcttctggaggcaaggatggccaggccatgttatgggatctcaacgaaggcaaacacctttacacgctagatggtggggacatcatcaacgccctgtgcttcagccctaaccgctactggctgtgtgctgccacaggccccagcatcaagatctgggatttagagggaaagatccttgtagatgaactgaagcaagaagttatcagtaccagcagcaaggcagaaccacccccagtgcacctccctggcctggtctgctgatggccagactctgtttgctggctacacggacaacctggtgcgagtgtggcaggtgacccttggcacacgctagaagtttatggcagagctttaccaattaaaaaaaaactggctttt

SEQ ID NO: 516266 - DNA, 1020 bp, Homo sapiens
  misc_feature (7)..(7): n is a, c, g, or t
  misc_feature (393)..(393): n is a, c, g, or t
  misc_feature (433)..(433): n is a, c, g, or t
aagggcnacaacggctggtaacccagatcgctactaccccgcagttcccgaacatgatcctctccgcctctcgagataagaccatcatcatgtggaaactgaccagggatgagaccaactatggaattccacagcgtgctctgcggggtaactcccactttgttagtgatgtggttatctcctcagatggccagtttgccctctcagctctgggatgaaccctgcgcctctggggtctcccaacgggcaccaccccgaggcgatttgtggcccataccaaggattgtgctgagtgtggccttctcctctgacaaccggcagattgtctctggatctcgagattataccctcaagctatggaataccctgggtgtgtgcacaatacactgtccnggatgagagccactcagagtgggtgtcttgtgtccgcttntcgccccacagcagcaaccctatcatcgtctcctgtggctgggaccagctggtcaaggtatggaacctggctaactgccagctgaagacccacccccttggccccaccggctatctgaacccggtgactgtctctcccgatggatccctctgtgcttctggaggcaaggatggccaggccatgttatgggatctcaacgaaggcaaacacctttacacgctagatggtggggacatcatcaacgccctgtgcttcagccctaaccgctactggctgtgtgctgccacaggccccagcatcaagatctgggatttagagggaaagatccttgtagatgaactgaagcaagaagttatcagtaccagcagcaaggcagaaccacccccagtgcacctccctggcctggtctgctgatggccagactctgtttgctggctacacggacaacctggtgcgagtgtggcaggtgacccttggcacacgctagaagtttatggcagagctttaccaattaaaaaaaaactggcttttctgaaaaaaagaaaaaataaactcgagcattcagctcggtcgagaagggatagccc

SEQ ID NO: 516267 - DNA, 1006 bp, Homo sapiens
  misc_feature (1006)..(1006): n is a, c, g, or t
ctactctaccatcttggcaggcacactcatcacagcgctaggctcgcactgatttttgacctgagtaggcctagaaataaacatactgagcttgtgattccagttctaagtcaaagaaataaaccgctcgttccacgagaagctgcgcatcagagtatttcctacactgcaagcaacctgcatccataatccttctaatagctatcctcttcaacaatatactctccggacaagtgaaccagtaaccaatattaccaatcaatactcatcatgaattaatcataatggctattgcaattaaaactaggaatagccccctttcatcttctgagtcccaggaggttacccaacggctacccctctgacatccggtcctgcggtcttctcacatgacaaaaactagcccccatctcaatcatataccaaatctctccctcactaaacgtaatgccttctcactcatctctctcaatcttgatctcatcataggcaggcgagttgaggtggaggttaaacgaaagccagttacgcagaatcttatgatatactgcctcgagattaccgcacataggatgaataataggagttctaccgtagaagcctaacataaaacattcttaatttaactatattatgttatcctaactactaacgcattcctactactcaaattaaggtccagcaccaagaccctactactatctcgctgctgtaaacagcttacatgactgacaccttatgcttccaccctcgtctcctaggaggctgccccgtaaacggtgttgccgaatggcatatcgagaatacaaaagttgctcatctcccaccatatgcactgactcctacttattactagctattatcaccaaaatcccttacaggaataagagtgggaaaaccctcccaagatctaagccgcttccttatttaagagaaaaaagggtccagggccaccagactatatcgccgggacttatcatatagataatatcccaccaagagagan

SEQ ID NO: 516268 - DNA, 410 bp, Homo sapiens
gtggggggggaggagaggagagctgagggaggggggggggggctagttaggcacacgccatgttatgggatctcaacgaaggcaaacacctttacacgctagatggtggggacatcatcaacgccctgtgcttcagccctaaccgctactggctgtgtgctgccacaggccccagcatcaagatctgggatttagagggaaagatccttgtagatgaactgaagcaagaagttatcagtaccagcagcaaggcagaaccacccccagtgcacctccctggcctggtctgctgatggccagactctgtttgctggctacacggacaacctggtgcgagtgtggcaggtgacccttggcacacgctagaagtttatggcagagctttaccaattaaaaaaaaactggctttt

SEQ ID NO: 516269 - DNA, 236 bp, Homo sapiens
actacatacttccgagggaacgtgagctgtttctagaccgccgtgagacaggctagatttacggctactgatgatgtgaggcagccatggccctcctgctcattacgagaggaaccgcaggttcagacattaggagtatgagctaggctgaggagccaaaggggcgaagctaccatctgcgggaatatgactgaacgcctctaagtcagaatcccgcccaggcggaagtatgtatt

SEQ ID NO: 516270 - DNA, 188 bp, Homo sapiens
ttatttaaatgggttggttatgtaatcacagaggccagtatgtacagacaaagaaggaggagatcatcaagactttatccaagggaggaagagaccaagaaataaaacccccaatttggtctggtaatatgggcctcggtgattacatagatcagccattaaaattaaaacaaggccttatcggcggg

SEQ ID NO: 516271 - DNA, 200 bp, Homo sapiens
  misc_feature (66)..(66): n is a, c, g, or t
  misc_feature (184)..(184): n is a, c, g, or t
  misc_feature (196)..(196): n is a, c, g, or t
ctgggctaacacagtgagatcccgttcaaaaaatcttataaaaattagctgggcatgggggcgcanacctgtagtcccaactacttgggaggctgaggtgagagggtcacttgagcccagaggttgaggctgcagtgagctatgatcatgccactgcatcacagcctgagtaaaaaagcaagancctgtctcaaanaaaa

SEQ ID NO: 516272 - DNA, 270 bp, Homo sapiens
  misc_feature (42)..(42): n is a, c, g, or t
tttgctggggtgatctaacgatccggtaggcactgaagctangacgctcatgtgcacagtggccaggtctgtgcaaacacgcgtggtggcacggggataccccaggacgcgacatggatcccatctcacgggctcacgtgcgtaactgttgcagctgggataggcagaggcagaatacaggccaacctctggggcaaacctggccactaatcacctctggaaataaagttttatagccaggcgtggtggctctcgcctgtaatcccagca

SEQ ID NO: 516273 - DNA, 152 bp, Homo sapiens
  misc_feature (7)..(7): n is a, c, g, or t
  misc_feature (14)..(14): n is a, c, g, or t
  misc_feature (34)..(34): n is a, c, g, or t
atcgagntaagtgngacaccccagcaccagaagnctaccgatacttcagatattagtatttgcttggttgagcacagtctcaactaaaagtcaggtacacctgtcctcagaccatgggctttttgaaccttaatgcaggatttcactatcag

SEQ ID NO: 516274 - DNA, 113 bp, Homo sapiens
tgtgtgaccaggttacctgtggtcatgcagcatgcacctggcctgacccgcacctgtcacctgtctggcatgcgtgggtgatccgtctagaagtcgaccctgcatggcgatgc

SEQ ID NO: 516275 - DNA, 400 bp, Homo sapiens
ctagtcatctagaggatccctgcggatggggtctgtataagtataagtacaggtctatttctggagtaatgtcatttttttgctgacctgggtattctaggactgggtatctggttggttttatttgatatctgacctggatgtctttgtttccacttgaaagtggcatacagagagtcggtaaaaatagctatttaaggcaatcttttggtagcccaagtggttgctgctattggccattatgatgggaacgaggaacacaagtggtagaacaggtagggaggcagacacgagcagagcaggagagatccccatcccccaatgaggagtggcaggtgaccctcaggtaatgctcagcagttgttaagctgtctctttaaaacaataattggtcacagct

SEQ ID NO: 516276 - DNA, 1789 bp, Homo sapiens
  misc_feature (382)..(382): n is a, c, g, or t
cataaccgtcttgttttggttgggtccttcttgtccccgacatgtgatgtaccgacatacccactgtggtgggggtggcctcctcttataaccagcctgacttccttcgttgtgatgtgactcaccaccaggcgtttggttgttagtatatatctttcttgtgtcggagcgatctcgtttctctgctcttgttgatttacggcaactctgtctgttgtactgacatcatatgttggcttgatcagtgatcacggtctctatgatgggtgtgcgggtcatctcctgcgcccacccccctgtatgtggtgttacctccccttggtaacacaacaccctcgtggtggtgtgtgcgtctaagtcacattgtgagtttggggtgggngtgtcacatacaaacccacgctggcccctgggaggcgttgttatcaccatgggcccccaacggccgtccccaaaagtctgtggtgaaccccttgcccggggaataacctcgggccgtggatggggaaaaaacaagagggtgtccaccacgccagtgtgttgccccacgccgcgccggtgccacacgatgttcgttgtgcgatgaagagcgccccgcggagtcgtgttttgttggccgcccccccccagcatggtaacccacatagagcccagggggggcctaagtacccccacgacccgaatgtttactaccagcgggggcgatgcttggagaccacaccgtgccgcccctcgaataggcgctctcaccaccccccacacgcccaaggaaagattgtgttttgtgaaagttccccccctcagagagaaccacatctatgtatttggggctgattcgccccagttgtcgagggaccatctcctccccccgctccctcaatatggtccctccccgcgtgtatcacctcgttgtacaccggcgatttgctgctcccgccgcgacggcttgtgtttctcataggggcgcctcccgcgcagagtggccccacatcgcaagagtgagtgcttttgtgatatgaggcccacacataggggcttgtaaatatgtgttctcccactagcccccacatataccacgccacgcgcgtatatgtgttgtgtgtgtagagtggggattgtgcgctcccacaccccatatgtgtggagaataactacgcgcctctgtgttttgtgaaaaacttcgccacacctctcgggggggcgtttatataatatggtgtcccgcccacccttctgtcacatttgcgccacacacaggcacaccgggccactctcccacagcagagctctgtgtgtcacaagcgcgcacttttttcccagcgcacagttgtcacccgcgccacaagtgttccgcggcccacaaggcgctctgctctcgcacacttggtgaacacacgcgggcgaaggggcacttggaacgcaagaatggagatgttcacccgcagaggccgcagagagaggcacacacactcgagaaggacacctcggtgtgttctcgagagtgagaccacccacgtgataccacaggagatgccaccacacccgaaggaaggaagggcgagagtttcgaaggaaggaaggctgaaggaaggaaggtggcctatgagagccttcacagtcacactggggaaaagccacagggaaaccacactgtgaaactctttaattcacctcccacagcctgtcctgtggcctgtccccactgtgctgcaccttgctggtttcccctgtccaacacatccacatgctggatcccgagcaccaccccattaagcacattttcaataaa

SEQ ID NO: 516277 - DNA, 480 bp, Homo sapiens
aacccggacccctttgatgaggttgtttgcttttttcttgtaaatttaagttcctgttcattctggatattagccctttgtcagatgaatagattgcaaaaattttctcccattctgtaggttgcctgttcactctgatgatagtttcttttgttgtacagaacctctttattttaattagatcccatttgtcaattttggcttttgttgccattgcttttgatgttttagtcatgaagctttgcccatgcctatgtcctgaatggtattgcctaggttttcttctagggtttttatggttttaggtcttacatttaagtatttaatccatcttgagttaatttttgtgcaaggtgtaaggatggggtccagtttcagttttctgcatatggctagccagttttcccaactggctgtgacatctgtcacccattgatctccaaggttgatttgggcaatctggctcgctaggcgggtgtc

SEQ ID NO: 516278 - DNA, 804 bp, Homo sapiens
aactaatctccagttttttcttctttttggcttactatactttattggtattaatacaggcaatctccataagcaccaagctaacattttacccctacaccagagaaaccaagtccaaagaattatatattaatggcaagagataaaccccgaatggcttccacttcccacctcactagtcctctataacaaaaacatactaccatactttggacaatttggcttataattgggttaacatcatttgatattgacacccagggtggatattttaatcccaacttctatttctccatgggaaaaagctctcttcatcacaaggtgggttgagtttcccggacatcaaaccatccatttcccacagggggggttattggagagaacacccatccagggtatacgggccggtctgtattattatattccctttgtaaacgcaacggggtccccagtatatcatggttatggtctccaaagtaggccctccccaaacaaggccacaccaataagcttttgcaagtgtgagttgacttcccacagtcttcaatggccaatggctttttaatatagaggtatcctaccaaaaccttaattctggcaccatctgtggagaaatcttgaaattgcaatgtcccaataccaccaaactcgtgaaatagtccggaggaacgcgacccgaacggaaccccccaaaggcgccgagaggcccaaaacttccctccccaggaccgtacccccgataacccccccagagacaccaggcgagggggactaccccacgcacaagcacccaactccacgctc

SEQ ID NO: 516279 - DNA, 258 bp, Homo sapiens
  misc_feature (30)..(30): n is a, c, g, or t
  misc_feature (91)..(91): n is a, c, g, or t
  misc_feature (115)..(115): n is a, c, g, or t
  misc_feature (160)..(160): n is a, c, g, or t
  misc_feature (171)..(171): n is a, c, g, or t
  misc_feature (216)..(216): n is a, c, g, or t
  misc_feature (225)..(225): n is a, c, g, or t
cttccaggcccggaagcatcggcccaagcngcacctggacagcaagatgctggctgcctggaatggcttgatggtgtcaggctatgctgtnactggggctgtcctgggccaaganaggctgatcaactatgccaccaatggtgccaagttcctgaagcgngcacatgtttnatgtggccagtggcgccttgatgcggacctgctacaccggccctngggggactntggagcacagcaacccaccctgctggggcttcc

SEQ ID NO: 516280 - DNA, 189 bp, Homo sapiens
ggcattcacactgtgtgagatgctggtgactcatactagtcatgagatatctacgtcacaggctgtctgcgttatcatacacattctccgctagcgtgataggatgatacacgactaaggatacctgctgatgcagatgcgaacatcttcagaggaccgccacaatccatgatacgccagatacaggcg

SEQ ID NO: 516281 - DNA, 2331 bp, Homo sapiens
ttttaaaatatgtaaatttgttaaattagcatgcagaatatggcagtaatacccaattgaaacactagttggttgtatattaaatctaataataggaaatatgaatttgcctttaaaatgtatttcatttcacttctatttatctaagaagacccgggcatacacaacagtggtttttaaaaatttaccgtcaacttgaagtattttcctttctcttccatgaagagcagtaacattttttctcttttcttatttttagtaacttttatcttcctgacttccatagccagcatcttattttcttcttggtgtcctttttcccttatcaaatgtaaccaggatctttattatagtggaaatggggccagttgatgaagtctaatatgaaacgaatattttaactttcaaatgcagaagagctaagttgcaaagatagcagaactgtccaatctgtctaccttcacagcagtgcttcttacatttaagaagcagtctgttgaagaccagttttgttttttaaaaaaatgttcaattcctcaccaaaaatacataaaaacatacaatccgattattttattaggttaattgacataaaaatagtcatttttccatgaaagtttctaaatatttactttcagtttgtataattacctcatggtggactggtagtgaagtttgtggtctggcactgatatgtagaccatactttgggtagcattgctctagattttctagcaaatcaggaaagccaaggatgttgagctcttgtttacataaccagattgaaagctcttcaaaagcaggtccatatgctgttcatcttatttgaaggattgggacagggcctgatacatagtaggcaggtggtgaaaactataacttaggccacagactataagctgataataagtgggatcataaagctgaatgggctagtacaaattctgcgagtattccaaaatatgaattgtgaaatattaatagtaatttaggagggtttccatatcagagtatcatctttttctttgctttaaaaaatgtctgataaagtgtattcagtcctgaatgtcaattgagaactggctctcatcactggctttcataataatgttaaacattttgctctattttaagaaaataggctgggtgtggtggctcatgcctataatcccagcactttggaaggccaaggctggcagatcatctgaggtcaggagctcgagaccagcctggccaacacaatgaaaccctatctctactaaaaatacaaaaattagccgggcgtggtggcgtgtgcctgtgatcccagctacttgggaggctgaggcaggagaactgcttgaacccaggaggcagaggttgcagtgagccaagattgtgccactgcactcctgcctgggtgacacagtgagactccctctcagaaaaaaaaaaagaaaacaaaagccgcttggtgccaaacatagtctataggggaaaataaaatttaagagatttagtaaggttgaaccatttgaaattagcatacttgtgagtccaaaacagttgaatactgttgtatttatatggctcaacctacagatatagcaatatggaatgtaattacttgggggcacatgcagctcatatagcaaattctctttgcttaattttagggaaattgaagcccagagaatacatttgaaacagtaaaaccatactataattaattgtacagtaaatcacatttcacaaatttactgaaggtgaaaagaaaggacaaaatcagtttgcttttctttttggactatatctacttagagttttggaccattttccttttcttgatggaggggagggagggagggtatcactctgttgctgggctggagtcccatggtataattttggctcactgcagccttggccttctgggctcaagtgatcctcctacctcagcctttccagtagttgtcaccacaggtgcatgccaccatgcctggctcattttttgtattttttatatagttgagatttctccatgttgcccaggctggtttcaaattcctgagctcaagcagtccatttgcctataatcccagcactttggaaggccaaggctggcagatcatctgaggtcaggagttcgagaccagcctggccaacacaatgaaaccctatctctactaaaaatacaaaaattagccgggcgtggtggcgtgtgcctgtgatcccagctacttgggaggctgaggcaggagaactgcttgaacccaggaggcagaggttgcagtgagccaagattgtgccactgcactcctgcctgggtgacacagtgagactccctctcag

SEQ ID NO: 516282 - DNA, 768 bp, Homo sapiens
ctgaggtgggagaatgtatgaacctgggaggcagaggtagcagtgaactgagatcacaccactgtactccagttgaggcgacagagtgagacccagtctcaaaaaaaaaaaaaaagtgtgtgtgtgtgtatatataatctatatgtttgtacacacacgacacactttccaataccagtcggaataaacccgcccttagggttgcttgggcttgggatctcgagcccccatatcatttctgggtaacgagagcacagcaatagaaatttctggggaagcagacctggtgaatcgtgcctgtgtcttaattcacaaggggtaagtgaatgccgttgaagggtgtttcatacacttacgccagaaaatgagagcctgtctcatgcaggagtcgggaggcagcgatgtcagggaacggggacatatgtctttatgactgtgatggtggtaaccaagtggggtggtcccctcgtggggagctgagtaagaacgcaaaggttggggtcaggattaggaagactataatatgacttgtgtgcatgcccgggaagggtctgctttgtaaagaggatgtgagcagtttagtcgctcatgtggcccgtgttgattcaggcttatggaggcgttaaaaaataagccggtgtcaaatggcctagacttggtaaacgcccattgtgtggtaggtggaaattctgaatgggttcctttctggagacctggtacttctaagaaggtttgaagaaaggaattgtcttaaaattgacctgttat

SEQ ID NO: 516283 - DNA, 124 bp, Homo sapiens
gatggcgaggcaggacactgacggatttgcttaggagccagagtagctgccgccaccagagctcggagccatgagcagggtttaattttggcaggcactggggcccctacatggcgggttcacg

SEQ ID NO: 516284 - DNA, 128 bp, Homo sapiens
ctgaggtcaccattttacagaggttctgactgctgtctgcttacttggagcgtcgatgattcacaaagcttccagaacttaagcaactggtagaaagatgtcatatattatgcagatgtgaaagagcc

SEQ ID NO: 516285 - DNA, 359 bp, Homo sapiens
  misc_feature (119)..(119): n is a, c, g, or t
ggatgtttttgcgttcgtttaaagcgcgcagccggccaacgacatggcgatggccagcacaacgctcctatgtagggacgaagtcattgtctactcctggattattgagcgcgctggcnggattcagtaacgcgaagtacgcggttttccgtgtacagcactactttcaggtttacgtctgaagtcgaaagggaaaggaaaagtaatttcaccgcacttttaaagtcgctgtttaacgacgcgctaactgttactggaacatccactgacgcatcccacgaaagttgccaaccttctttggtagcccacttaaccaagacacgccgcagcgtcacatcactaagcgacacaacccacgg

SEQ ID NO: 516286 - DNA, 714 bp, Homo sapiens
gtgctctgctcgtgctgcacccacgcctcgctgcgcccgcttcctgccctcaacctgggcatgctgcccagaagccttgcttcctgacaacaagtgcatacgaggactacatatgctagaccaaatagcagcactgtagacgacacatcagggacccacgaacgtgcatgcacgaccatagcgcttgacgacatgagcaagactgcaggcaaaacatagactacgaaaactgaggagatgccagcggcctccgagaaacagaagccacagggtcacacaatacagagagaaccattgaatacgacccatgagaggactatcgagagataagtacgaagcacacagacgatatggataccatacacgaaaatacgatacacataggacaaaagtaggtagacgacatcaatggagactcagatgagacagaggagcacacaccgaattgcaacacacaacggagcacaaagaaccaggagttacgagacacacgaaggagatatcacgagaggaaacataaacgcgagaccacataacacgacaacacagcacaagaccaagtagcagatagcgcacacaattaaggagaggcaggaaaacggggcaccagaacgaaagacacaagacaatagcagaaataacacccacacagaaaaaaagccaaccagggaacagaggacacaatgccgacgaatacataagagataacacaag

SEQ ID NO: 516287 - DNA, 459 bp, Homo sapiens
caacagaacaggaagcaacagcctgggctccagaattgaccagtagtccgtgcacagacgaggagaggtcccatgaaacttcggcgcagtctgggaaccgagctctttttgtaacaagttgtttgtcaggaggcccggtcatgaaagcccttcctgactgggctcaaggaatacaaaaaggacaacttgtttttgccattgtctgttgtttttcaataactagttctccgaaacagcactggatgaatgcctcaaggggctcacacaactcgttccaggacttagtgaccattgtttctgtccctgttcaatagagttcaaatttaatatttaaattttgctccacaatgtgccatattatctgtatccaacctgtcattgggcatttaggttgattccatgtctttactattgtgaataatgctgcaataaacatttacgtgcttgtgtctttaaaaa

SEQ ID NO: 516288 - DNA, 174 bp, Homo sapiens
acaacgaagacaacatgtcttcaagacaattacattggcaatgtgtaaatgtttaaacagttcagtgatctttgctgcattgctttatgtgtgggtttctctctcccctcccttggtcttgtttcttacatgcaggaacagctcagcatgacacacgtatgcgtggccagaagg

SEQ ID NO: 516289 - DNA, 461 bp, Homo sapiens
  misc_feature (160)..(160): n is a, c, g, or t
  misc_feature (408)..(408): n is a, c, g, or t
  misc_feature (448)..(448): n is a, c, g, or t
tgatcctcactcaaggtctggcccccagacccaaacctcagggaaactgggcttgttggggtgaaagccctgaaacctctggctctccatactcgcccgtgttggacacccgcaatgttctgacgagctttcaatctgcttcaatcggtccttgtccacnttcctgcttggtgaggacgaagaagaggataccacaggggagaccgatggcccaggctaccccacggctttcatggggttcttgcccctctttctgggaatgtattctagctcaggggagaggggctcgggctcctccttgcattctggtgagctgtggctctgcagtgctctggtcctgttctgggaagccttgttagctgtggctccagagaggatcccccggaggacgcgggcatttctcgccgncccggcccttcagcgccgtagcagctaccgaccgccgccnatgttcggctagt

SEQ ID NO: 516290 - DNA, 1231 bp, Homo sapiens
tagggttcgaggggggaaggcgggaaatgggaaggggtatggagacttttcctataagtaagtgctgaggggtggaggtgggtaggaagttttttctcatagggagggtgcatagtgaaggtgggctcgtaggcggaactgcgggggaatagtgcgtggtccgaaattcataagaacacgaggggaggttagaaagatagggtctggggtgaccacaaattgtgtgtgggtggtagaagtttcgagggggagagaatgtgcggttcccattgtgtgtgtggttcctctgagagaaagaatgtggtagagtggggagagaggggtggtatatatatatcaatagagtggtggggtgaatatctcgggcttcattgcaagaaaaataggggggcagagagagagggcaccgagcggagaggatatctccgagagctggtatagaaccgcctttagaagcacatagagtgagcgagcggacctccctcacttctcgcgagcacaagtgggggcacgacaggggaggggtcacggggggctggggtccctcaggggcacaacggggggggggaagagacaaaaaatatcacatatattaagtgggcgcccaaaaggggggcacaccgaagaaggtggggcacagaagaggcataaacccaaaagaggggcgggcgcccccacggagaggtgccgagagacaacagcggggccgcggaaaaacggggtacacaaagaggggacgcccccacatataactacaaagacacaagcgggtcagagaaatagcagccaaaccaccagacgagcggggccgccacagagggacagacgagcaatctccatcatatgcgacacaaaccccgggcagcgggggcgccataacatatagcactcccgaccacggtggcgcgcccgaacacaaggggacacaggaaacagcagagacgacacacagagagagagcacaccaccccttaagaatccaagaaagagaatttagcacgcaaaacagcgacaaacgacgcgcaaagacagggggtcgacatacacaaataacacacaacgcaagcgccccaaacgtcatgcaaaggttcgcccccacaggacagacacggcaacaaacatgctgaacacgacgacgagccaacaccgctgaccaacacaccaaagccacactacgctcaccacgcaccacgcaccggcgtcggccgagccaagcaaccaacgccgtgac

SEQ ID NO: 516291 - DNA, 175 bp, Homo sapiens
ctcagagccagagtgcctgaggtctgcttgagaacctgccccctggatcttggacacttacagagtgagctgtatgaattcagcgggtctcacgtccagagggtcagaacgtttgctttaggttttttcatctgtttgttccttgagtcagtgctattgaaacttctaaaactag

SEQ ID NO: 516292 - DNA, 658 bp, Homo sapiens
  misc_feature (142)..(142): n is a, c, g, or t
atgcaaaaaggaggcgagcagactagctggctgctagccaaacaagcaaggcagagaagcacgcagccaatcaatagctagagtagggccaggtcggcacggtaggggaggtagggaggttatgcacgcaacgcacgacccnactacgaccacgactgagcgcagtaacgtaccactatctactacgacgtacccagctagccaggcaggcacgaagaactaacttctgcgtcgctcctatataggaagtcagcagaaggacgacttctggctcagcaagcgtaggaagaaggagcggcggtgggagtagcagcaacagcatcagcgcagcagcagcagcaccacagcagtagtagcaccaacacacgacagcagcgcggagagaagcgcgcccagcagcaggagcgcttccactccactactaaggtcacgcacacacgcgccacatcacacacgtcgcagcgcagagagaagcatagaagagagcagatcgtcccacgtgagaggtgagagagagagagaaagaagagcgagaggggagaaaggagagggggagagagagagggagcagaggcatctccagcagagagcagaagaagacagagataaaacagaagagacacccacccgcaagcccgcccacaacaaagaacaggaa

SEQ ID NO: 516293 - DNA, 333 bp, Homo sapiens
  misc_feature (41)..(41): n is a, c, g, or t
cttcatgtagagatatactcaccaatcatatggtgcccacnaaagggtggcatttcttggatctaaaatagaagtccatctttactaacctgctttttgacggtcatacacttagcaaggggtatggccataattgaaacccagacaaacgggataggtggagctttaacacctactttatgtagctgttctgtttattaaaattcagtgtaaaaagtgcaaaataaagaggtaatacacaatgagatcaaaacctaaaatattgggagaggaaggtgttacagaagctttctgcaagaggtaataaactgatttttaaatgatatctggtag

SEQ ID NO: 516294 - DNA, 766 bp, Homo sapiens
  misc_feature (13)..(13): n is a, c, g, or t
  misc_feature (61)..(61): n is a, c, g, or t
  misc_feature (72)..(72): n is a, c, g, or t
  misc_feature (82)..(82): n is a, c, g, or t
  misc_feature (94)..(94): n is a, c, g, or t
  misc_feature (133)..(133): n is a, c, g, or t
  misc_feature (139)..(139): n is a, c, g, or t
  misc_feature (161)..(161): n is a, c, g, or t
  misc_feature (166)..(166): n is a, c, g, or t
  misc_feature (176)..(176): n is a, c, g, or t
  misc_feature (209)..(209): n is a, c, g, or t
  misc_feature (220)..(220): n is a, c, g, or t
  misc_feature (236)..(236): n is a, c, g, or t
  misc_feature (242)..(242): n is a, c, g, or t
  misc_feature (254)..(254): n is a, c, g, or t
  misc_feature (277)..(278): n is a, c, g, or t
  misc_feature (302)..(302): n is a, c, g, or t
  misc_feature (333)..(333): n is a, c, g, or t
  misc_feature (336)..(336): n is a, c, g, or t
  misc_feature (390)..(390): n is a, c, g, or t
  misc_feature (415)..(415): n is a, c, g, or t
  misc_feature (460)..(460): n is a, c, g, or t
  misc_feature (479)..(479): n is a, c, g, or t
  misc_feature (499)..(499): n is a, c, g, or t
  misc_feature (501)..(502): n is a, c, g, or t
  misc_feature (536)..(537): n is a, c, g, or t
  misc_feature (540)..(540): n is a, c, g, or t
  misc_feature (547)..(548): n is a, c, g, or t
  misc_feature (550)..(550): n is a, c, g, or t
  misc_feature (572)..(572): n is a, c, g, or t
  misc_feature (574)..(574): n is a, c, g, or t
  misc_feature (577)..(578): n is a, c, g, or t
  misc_feature (620)..(620): n is a, c, g, or t
  misc_feature (633)..(633): n is a, c, g, or t
  misc_feature (635)..(635): n is a, c, g, or t
  misc_feature (649)..(649): n is a, c, g, or t
  misc_feature (652)..(652): n is a, c, g, or t
  misc_feature (656)..(656): n is a, c, g, or t
  misc_feature (658)..(658): n is a, c, g, or t
  misc_feature (660)..(661): n is a, c, g, or t
  misc_feature (666)..(667): n is a, c, g, or t
  misc_feature (681)..(681): n is a, c, g, or t
  misc_feature (726)..(726): n is a, c, g, or t
ctgggcagttccntccccagaaggagagattcccccgccatggagtcccacgatgtgatcnccaaccagccngtcgtgatcnacaacggatccngtgtgattaaagccggttttgccggtgatcagatccccnaatacngctttccaaaccatgtgggccnacccnagcacgttcntgtcatggcaggagcccctgaaggcgacatccncattggccccnaagccgaggagcaccnagggcngctttcaatccnccatcccatggagcatggcatcnncaaggattggaacgacatggaacncatttggcaatatgtctattccaaggaccanccncagactttcccagaggagcatcccgtgcccccgactgaggcgcctttaaacccncgaaaaaacccggaacgagctgccnaagttttcctcgagacccccaatgtgcccccccttttcacccccntgcaagctgtactcagccnttacgctacaggcaggaccncnngggtggtgctggattctggggatggagtcacccnngcngtgcccnncnatgagggctttgccatgccccncnccnncatgcgcatcgacatcgcgggccgggacgtctctcgcttccngcgcccccacccncntaaggagggctacnacntccncncnnccccnnagtttgagattgtnaaggccataaaagaaagagcctgttacctatccataaaccccccnaaggatgagacgctagagacagagaaagctcagtactacc

SEQ ID NO: 516295 - DNA, 212 bp, Homo sapiens
atctagaggatccctacgtaatatgtaaccgatttcagtataactaaatattggtcatgaactgtgtaagggcatgcttattgggatcagttttaaagttaattcttttgatattaataccagaccatagacatattctgtttcctggaaaaaaaaaatgaatcatgtaaggctttaggtgagagtagattttttacagagtagctatagtc

SEQ ID NO: 516296 - DNA, 193 bp, Homo sapiens
gtctactcgagtggcgcgctttgtgcctgtggtcaacatagcgtcccacctgtaacagctgcccgtggtgatggcgcctgggttctgcctgtgatcccagagcatggtgccggggtcagctgggatcttctgccaccatcagggacaaaccgggggcagggggaaagtcactgatgcccagctgtttgcatcc

SEQ ID NO: 516297 - DNA, 100 bp, Homo sapiens
aagaggcgagaacgacccccggaaccggaccaaagccccgcgcgccgttgaattcccggggtccagaaccttacgttcccgtttgccgttggccgccgcc

SEQ ID NO: 516298 - DNA, 115 bp, Homo sapiens
  misc_feature (33)..(33): n is a, c, g, or t
  misc_feature (72)..(73): n is a, c, g, or t
ggaagaaccatttacttttctggggagtcctgngcggtgttcattaacgctagttcatagtaaaagcccaannagatgctacggcactgttcttgttgacaacaaatagtaaagt

SEQ ID NO: 516299 - DNA, 1002 bp, Homo sapiens
gcttggatttgacattgataacgtgctattgaattaatagaacatttggattcaggtgatctggccagatttcctgcaagctggtattcgggtacctgtctccatccatgatggtcatcagcacaccaaactctgaattcaatcccctgctttccatcagtgaccttaagagattcagatcataaatttgacgtggaccacgaatggcagctttcagacctgggctttatatgtggcaaatcgctatgattactctgctggagctttactggtgtcggggaaaccaccagctggagctgagaatgtcggatactgtacccagataggaatcttccggaaacatggagcgcaaggcaacagaatcatgtctttcagaccagcatgatcagcatgctcataaacgctcgtcacacccaccctcatacccaagctcacagccaggacaagggttctcaccacctagcgctaggctcaaccgacgcgtgctcccacacaagctgcgacacgcctaaagcagtgaagccaaccctgccacaagggcggaacagacacaggcctgccgcaccgggcggcggctaacgacccaacgacaccggccggcccacacggcccctagacccactgcctccgcaccacgacaccacagacggccgacacccgcccaagatacgacgaacctacccccacaacacccgaactggcgccgccacgctcaccaactcgccgaaacccctagcacacgagcaaacccatcagaaacccccacgataggcagcacggttaactgtcgcacaccgtggcccacagcaagaaggcgccacacgcacatagccagacccaacacgtccactggcacagcaagcagttcgacacgacaccgcacgaccggagaaagaaaacgagaacaacacacagcacctacaccactcgacacaccgaaaaccacggccccacagacacacaggaccacaaacacaaacgccaagcgcaagaccacacacg

SEQ ID NO: 516300 - DNA, 807 bp, Homo sapiens
  misc_feature (31)..(31): n is a, c, g, or t
  misc_feature (63)..(63): n is a, c, g, or t
  misc_feature (67)..(67): n is a, c, g, or t
  misc_feature (70)..(70): n is a, c, g, or t
  misc_feature (73)..(73): n is a, c, g, or t
  misc_feature (111)..(111): n is a, c, g, or t
  misc_feature (116)..(116): n is a, c, g, or t
  misc_feature (141)..(141): n is a, c, g, or t
  misc_feature (145)..(145): n is a, c, g, or t
  misc_feature (151)..(151): n is a, c, g, or t
  misc_feature (161)..(162): n is a, c, g, or t
  misc_feature (204)..(204): n is a, c, g, or t
  misc_feature (207)..(208): n is a, c, g, or t
  misc_feature (222)..(222): n is a, c, g, or t
  misc_feature (224)..(224): n is a, c, g, or t
  misc_feature (228)..(229): n is a, c, g, or t
  misc_feature (237)..(237): n is a, c, g, or t
  misc_feature (239)..(240): n is a, c, g, or t
  misc_feature (251)..(251): n is a, c, g, or t
  misc_feature (258)..(258): n is a, c, g, or t
  misc_feature (266)..(266): n is a, c, g, or t
  misc_feature (268)..(268): n is a, c, g, or t
  misc_feature (273)..(273): n is a, c, g, or t
  misc_feature (275)..(275): n is a, c, g, or t
  misc_feature (281)..(281): n is a, c, g, or t
  misc_feature (289)..(289): n is a, c, g, or t
  misc_feature (292)..(292): n is a, c, g, or t
  misc_feature (319)..(319): n is a, c, g, or t
  misc_feature (366)..(366): n is a, c, g, or t
  misc_feature (375)..(375): n is a, c, g, or t
  misc_feature (381)..(381): n is a, c, g, or t
  misc_feature (398)..(398): n is a, c, g, or t
  misc_feature (439)..(439): n is a, c, g, or t
  misc_feature (480)..(480): n is a, c, g, or t
  misc_feature (492)..(492): n is a, c, g, or t
  misc_feature (536)..(536): n is a, c, g, or t
  misc_feature (540)..(540): n is a, c, g, or t
  misc_feature (570)..(570): n is a, c, g, or t
  misc_feature (596)..(596): n is a, c, g, or t
  misc_feature (640)..(640): n is a, c, g, or t
  misc_feature (694)..(694): n is a, c, g, or t
  misc_feature (717)..(717): n is a, c, g, or t
  misc_feature (723)..(723): n is a, c, g, or t
  misc_feature (730)..(730): n is a, c, g, or t
  misc_feature (798)..(798): n is a, c, g, or t
gtcgagtatgttgggcctcctctctttcccnggagggctgaggtattggcaacagtcagtcgnccantgntgngggggcttgggacccagcagaagtcaagggtcattagngcccngcagcggcagggatagcctcacttngggngggganggggtagcgnngcggggcaggacagggcctagggaaagagggagggtgcgggngcnntcctgggtgcagtngnttcnngtttgtcngnnggcaggaaatnggagctnacggagtntngggcnanaggttntcttttanatngggcataggatcagggagctgggagcntcactagccactgataacttccaggcgtccacccgggtgacagaaanggcgcaganatggantgtgttaggttcagggntagccaggcaggcccctccttttctccccgcagagcgtgcnggggggaggccgccgtgggttggtgctcgcggtgcctggcnctctcttcactntgccgttgcttggtcactcggccccatcttcggtgcggtatgtntcgnagggaggaagaagggcagccggtgctggcncgcacaaaatcacttctagccacccnagaaaggctggtgctcgcaactgtgagtgtcttggtcaatgggngctgaaggggcagccccagcccagaaaagcccgccccacatgtggcctatgagntcccacaaatggcggtggggagngtgccnacacaangtttgggagggggcactctcggtttggctaatgactccaaaacaggggcaaatgggggccaatacganggagaaacc

SEQ ID NO: 516301 - DNA, 110 bp, Homo sapiens
cccaccttactgccgtgggcccaccttatgccgggctggtagactgggaacgccgactacggatcactttgtggatgggcgcgaagagaccaaacttgggtgggcactgg

SEQ ID NO: 516302 - DNA, 135 bp, Homo sapiens
cacgtggccgaagggtgcacttcgcattcccgggcgatgtcgctgatccggtcgaccatgatccggtcactctgctgactcatgtagctggcgatacgcttgagctggcgcggcaggctctcgtattcgtcggtg

SEQ ID NO: 516303 - DNA, 218 bp, Homo sapiens
gcgacgttagaggatcccaaataatactggtttggagaattagtacagatggtcataagatgccgcataaagtccgtaggattcggtacaggtatttccaaatggtcgataggtaatgcacagcagcttgacgtggtcacaaatcaggtgccatgatggcgtgggccacatggaatgatgccatgacgtcttgacgaacacttcggtacgcgagctct

SEQ ID NO: 516304 - DNA, 124 bp, Homo sapiens
agggccacgccatcctcgcagccagaagcctgtgattgctgaatcaggatcagggaccctcccccccaagagctcctgagccccctgcccccagagcaataaagtccgcgggctttctcaaaaa

SEQ ID NO: 516305 - DNA, 351 bp, Homo sapiens
  misc_feature (334)..(334): n is a, c, g, or t
agactgcttagtatgctaatgtgaacacaaaatatctgagacaggtctcagtcaatttaggaaagtttattttaccaaagttaaagatgcacccatgacacagcctcaggaagtcctgagacatgtgccccacggtggttgggggtacagtttgcttttatgtatttcagggagacatgagacatcaatcaatatgtgtaagatgtacattggtttagtccagtaaggcagcaacaacttcaaagtgggggtttccacgttagacatagataggagacaaaaggtggccttcttttgatcagccttccactggattacacattgtagtctgggnttgagtgtgggagccct

SEQ ID NO: 516306 - DNA, 1012 bp, Homo sapiens
  misc_feature (780)..(780): n is a, c, g, or t
  misc_feature (1012)..(1012): n is a, c, g, or t
aggctgagacaggcgaattgcttgaacctgggaggcagaggttgcagtgagctgagactgtgccattgcactccagtcgggttaacagagcaagacactgtctcaaaaaaaaaaaaaaaacatttttcacccatactaattgttcccaagataagggtgacttcatgagggaaaatgtcccttttattttgtcattaccattttccaaaagggggcttgggtgctttgccaccattaacatgttggacaacccgcggttattgtttacctcgtaattgtcaagttttcaacagaagatacggggctattttggaacatgtggcacccttattatattatttgcttgaaatatcctgtttaagaattattggcagattgagcgatttggttttcctccaattttctctgggtcgccgattttcgaagttgttaccctttggagcattccgagcttttagacgagaattatattaaggccacccttgggcgtgttcaccctttgaatttgccttatactggacgatgttgtccatggtttggacttggagtttgaccaccagaaaagtttcacgacacgatggcgtccacaagaaatgctccaggtttcaccaatttctttccaaagctcttatagggcacagtgttttccaaattgggtgctccttaaatttggatcaacgtgggcgcttaatccattctggaaaaactccaggatacacagggtttaattacatacgacattggggggggtctctccagttaaagaagagattggttaanaaacgttttggtgccccttttgctgggtgtgtgttcgttactggcaacttttcgtcttaaaccaaaacttcgtttttggggacgaaacggtttaaaacactaaggtttacaaaggtacggggttgaaaaaacctgtgacggtggtctttcaactctaaaaggattaaacgccctgtggttttttatcccaatattctttttgggcggggtcaaaatactgtccttctctcan

SEQ ID NO: 516307 - DNA, 551 bp, Homo sapiens
  misc_feature (76)..(76): n is a, c, g, or t
aagctgaacactattggctgcttgtgtgctgattacatcactgacagtgtttcaagctttggagaaagcatttaanaacatagtcaaatcagctgatttatcagcggattaatcactcatctgcaaggttccagtggatagatacacagagagtttttaatttttgtaattgtataactctttgaaataaaactaacaaataacaccctgccgttttctaactatcagtttatttctttctgacattgtaattttttttattacaaaacagtaaagaactgagcatttctgccttaaatacccatattggttaaagggcacctaggttaccccttttttcagatttaatataagtcttttgcgtctctagaatgtgtatataaagtttcagatcaaaatacccatcagatttttcattataccttttacaagatgctgttttatactgatttccagcagggggtggttttgtcttagttaaggctaacctcaagtactgtgtggatatctgttatgctaatgtacaaaataaacctgatttaacttccaca

SEQ ID NO: 516308 - DNA, 1095 bp, Homo sapiens
gcggcgagccaggcgctaaaccagccgctactagcgccccgcgccctagctatagcccccatataataccagcctatagccccggcgccctagacctagacgccctaggcctagacgccctagctatacgtacgcctaccttatactactacccaggtagctaggaccagggactagagcgtacccccggcacgagggtaccggtagtagaccaccgaacacacgaacgcacgacaacatgggcgacacgaaaccatggacatcatttccaacgccatcaccatgacatgaatgaacggccccacggcacatgatcatagggacacgcataggacttcaatcgacgaccatatctcggaacccatcccgacacgggaccaccgacacgaagtgaaactccggccaatcgaacggccagcatactgacactgcggtgcacaagcgaccatctacaccgacaccgcgacacaccgccatcacacacggaaccgcgcgacctgcctatgaccatatctcccagaacccacccatggcccccccactaaccttagcaccaccgggaaacggaaacgcgcgaaccgtaggcgcgaccccccggcacctaagcgccccttagtccctcaacgaccgcccctaaaacccctgacgagcctaggccctacgtaggcttacgcacaataattaaactggtctccgacccacactggcgggccccatgagccaggacccccctatagcgcgccaagcacttaggattaaggtgagcccccccttaccctaattacccaaagcaaccataaggccccacaacaccacccacgcgccattagggcccagcaggcccccccagcccgagacgtacccccgcgaaccccccccccgtgatgcccccacagcgggccaaaacgccgcccaaagccgggggtccccgacccctagggcggcccacaaattaccgcttaggtcgctgccacgcaaaacaccccgccgccgcagttagagatccagctccaccacaatacccccttagggtgtgaccctcccacaggctcacaacggcacttctcctggcggttagcgatcacacgcagcgca

SEQ ID NO: 516309 - DNA, 106 bp, Homo sapiens
tgagactgacagtagggatggcttagtgtttggcttggctgtagaggttagagatacagaggtgtcatgacatgatggacttacgaggccaagagaacagacagaa

SEQ ID NO: 516310 - DNA, 457 bp, Homo sapiens
tataaaatacattatttggctgggcacggtggctcacgcctgtaatcccagtgttttgggaggccaaggcaggtggatcacgaggtgaggagatggagaccatcctggctaacacgggtgaaaccatttctaccaaaaatacaaaaaattagacaggtgtggcggcgtgcgcccgtagtcccagctactcgggaggctgaggcgggagaatggcgtgaacccgggaggcagagcttgcagtgagccaagatcgcgctactactacactccagcctgggcgacagagcaagactccgtctcaaaaaaaaaaacaaaaaacaaaaaactatttataattatctagactaccaagactcacttcaattcccatcataccatgtttatagtattacctaactgttggtttggaatttgagtacaattaagaaacaaagaggctgggcgcaatggctcacac

SEQ ID NO: 516311 - DNA, 779 bp, Homo sapiens
gaggaaggacctggtgtttgatgaccggtgtactgtcgagcagatacttgcacgggtttacagaaaattgggtgccctgggtagtgttaggaaactggagcgaagagaggtcataaggatgaagagcagttcagttggccagcgggggtgctggcacggctcttctcatgcaggagttaagatccaaggatgtaatataactcaaggcctctatagccctcaaaccaaagagaaaccaacttggaaagttgagtataaacaaacgacatctgaaagaagagtctcgctattgggcaaaagaagctagtggacatggatcccggaatagtcaaattggtataatttgccagttctgagaaagatcaaggacccgagacacattaatgacaaagcatacattcagcagtgtattcgaaaatctgtgagtttcttacagaatatggtaatgcacataactgtgtcccatgacacatctgtaccagctccctctgttcacagactttcctgaaagaatctttccacatattcattttatgggcattacctggtgcccctcattacgaactttcactgaggacacaagttctgaagaaagaaggttccacacaaatcttaacagaccttgggtatccttttggcactatccaacacgctccagtgtaacaccgggtgggggctccttcatacatgggctgtacataggggcacagctatagcttggtaactcaaattgattaagatacatactgcacatgacaacagccaccctatggagacgg

SEQ ID NO: 516312 - DNA, 181 bp, Homo sapiens
  misc_feature (165)..(165): n is a, c, g, or t
aggctcatccggtttctctatcaatcaatttttcttgagtggcttctgaaacagatactgtcttgccggaaaagtggttcatcaaaaccagtgatagctttttctggtgcatatatctgctgacggtcatcgaacgtcaactgaggtcccgacgctatggcactngtcgacaggtcagctt

SEQ ID NO: 516313 - DNA, 658 bp, Homo sapiens
  misc_feature (532)..(532): n is a, c, g, or t
tagagacggggtttggcgatgttgcccagtatgggtctcaaactccggagctcaagtgatctggccggcctcagcctcccaaagggctggggattacagacgtgagccatggggcccaaccgggtggtctatctggatatcactttttccactttagaaatggggagtggggggcaggtttcctatgtcctgggtcccaggaagattgagggaggggatgctgcagatgtggaagtccagttttcttaccaccttgtcagaattttttcccttctctggggtcccaggaacggtctcctacttcataacttgagttcggggatttcacgggggataatctgggggcggggtataggggtagggtaccggggaggaagagtgaagccagctggcttctacacggccatttgggaaccagaagtccctattcttagatacttaatcctttagggggctgttgtgaatgggaatggggtatatcattttgacatgtggttggatgggggcaagtttgtagaactaaaactaactntcgggtatggatggggtattctgtgaccttactaaacgttgggaataagttctagtaggatcaacattggataaaggtcacgggactgctttactcctcctctttgtaagacacacacacaaaaac

SEQ ID NO: 516314 - DNA, 100 bp, Homo sapiens
ctctgaccaacacattacacccttatacatctctagcactgtgtcttcgactaacatagaccttaataaatgggggaaagcaaatcagatgacaccatgt

SEQ ID NO: 516315 - DNA, 438 bp, Homo sapiens
gtttagatggtcatccgctggttctcgattcaagagccaattacacgaaactatgaacttgacctaattctggtttctgacaattatgagacagaactaacgaatggcacagcagtgcttttcgttgcacactgaccatttttaagttacatcatcctctatgatgatggtgctttcacaactgcagctctcctgtatgtcacaatcattctgtatctctaacattaaggaagataactccatttacagctggtatagccttaacactttcccaacactcgctaatttcccctatgtaacagacagacagtatttcactacaatttcataacttcttaatctcagttcgttccttcctactgattactcacccatttgtggcaagtggcacgggcttcccattcaccatcaggatcacgtctcaaggcacccccttta

SEQ ID NO: 516316 - DNA, 265 bp, Homo sapiens
tacaacggacctacatggaggccacaccaaagttttatttccctctctcgtgagatgggggatgctgtgcaggctgatgaggcacccatgagaaaagcccaacaagattgcttattacagataccccctcaattccaggagccaacatgccaaagaatgatgctggatacaggtatctccgagggaggacttatgggatgagatctcggcctggcaagcccagcatccacttatcccatacaggctccaccacgagatcaagcaa

SEQ ID NO: 516317 - DNA, 338 bp, Homo sapiens
caaggggaatatgaacccatgcaagtatctagcgcagttagtctccagtagtataacccagttggcaccggcgactctgttcttcctgctgtgcactccccatatgctaaactcacacctgctccctcatccctcctcaccatgctgccctgggaatatcccctacaggacctgctccctggccctgcatgcaagccccattgctctgtctctcactagattccggactcactgacgtagtcatgaaactttacatccacataactagaatattttccacaaattttaatttgctcattactactactaagaagaggataatcaaaactcaggctgta

SEQ ID NO: 516318 - DNA, 332 bp, Homo sapiens
gccccccatggggctttgggggcccctttcctcctgaacaagggcccattgggcaaaacaaatggcctgtttcaaaccggggtccctgtaggttcaaaggccttaaagcctttttggaaagggggcccttatccctgggccttttttatggcccggggcccctgtttaaatgcccttccaaaactgggggatgcgggaaaaatccggcccgttttttaaccaacccttcccttttttaaagttcccaaagccctccttaagggggaaaaagggccccccccaggaaaaactgtaattaatgttgttttaataaaaaagccgttttgggttta

SEQ ID NO: 516319 - DNA, 100 bp, Homo sapiens
gcccccggccagcggggggggcccttttttaaggctttttggagggccaaaacttccaactaacctttttaaagaattaaacttttatgagggggcccca

SEQ ID NO: 516320 - DNA, 939 bp, Homo sapiens
gaactgatggaaggaatgcgtgtcagcctgagactcagtgaagacaacttctggcagggctcactccctgggcttctggaggaaagagaaggagcgcagtgctccagtggtacagaagtgagacataatggaatcaggcttcacctccaaggacacctatctaagccattttaacccatcgtggattacctagaaaaatatgacaagtttggttctaggcgactctgcagagaagccagattcttaagcaccttctgtaaaaatcttttgcaagatattctgcctaggacggtgtgaagggagacctgctgattgacatcggcgtctggaccccactagtctattcagtctcctctctggcttgttgaatcctttaaggagatcgtcgtcgctgactactcagaaccagagacctgcaggagctggagcaagtggctgaagaaagagccagaggccttggactggtcccccagctggtgacctatgtgtgtgatcttgaagggaacagagtcgagggtccagcagaaggaggagaagttgagacaggcggatcaagtcagcgtgctgaagtgtgtactgtgacgtcaggagccagcctactggggtgccgtaccccttatcccctcggactgactgccgtgctgcagcgacactgtgtctggatgccgactggcccatgacctcgcccaactactgcaggggcgctcaggaacctcggcagactactgaagccaggggtgcttacctggtgatcatggattgcgctccaagagcagctactacagtgatcggggagcagaagttctccagacgtcccccctgggccgggaggcagtacgaggctgctgtgaaagaggctggtaccacaatcgaatggttgaggtgatctcgcaaaggttattcttccgccattgggcacaacgaaaggactttttctcc

SEQ ID NO: 516321 - DNA, 1131 bp, Homo sapiens
  misc_feature (158)..(158): n is a, c, g, or t
  misc_feature (183)..(183): n is a, c, g, or t
  misc_feature (189)..(189): n is a, c, g, or t
  misc_feature (206)..(206): n is a, c, g, or t
  misc_feature (208)..(208): n is a, c, g, or t
  misc_feature (219)..(219): n is a, c, g, or t
  misc_feature (223)..(224): n is a, c, g, or t
  misc_feature (238)..(238): n is a, c, g, or t
  misc_feature (293)..(293): n is a, c, g, or t
  misc_feature (311)..(311): n is a, c, g, or t
  misc_feature (315)..(316): n is a, c, g, or t
  misc_feature (328)..(328): n is a, c, g, or t
  misc_feature (333)..(333): n is a, c, g, or t
  misc_feature (348)..(349): n is a, c, g, or t
  misc_feature (364)..(364): n is a, c, g, or t
  misc_feature (372)..(372): n is a, c, g, or t
  misc_feature (374)..(375): n is a, c, g, or t
  misc_feature (378)..(379): n is a, c, g, or t
  misc_feature (397)..(397): n is a, c, g, or t
  misc_feature (399)..(399): n is a, c, g, or t
  misc_feature (401)..(401): n is a, c, g, or t
  misc_feature (416)..(416): n is a, c, g, or t
  misc_feature (441)..(441): n is a, c, g, or t
  misc_feature (452)..(452): n is a, c, g, or t
  misc_feature (500)..(500): n is a, c, g, or t
  misc_feature (517)..(517): n is a, c, g, or t
gctgtcctccgcggcgcccccttccgcctgacggcccccggcggcggccggcagccctggctcctcgcgggctcgggcggcggctgcggcggggctatggcgagcggcggtggcgggggtaacactggcgcgggtggggggccggggatgggcctgangcctgggcctgggtctgggtctgangcctanggctgagtgaggccccnangtgaggcagangganngaggcggccacggncgaggcggtgggacgcctggccacgacgctgtggctgcggctccgcggctggganggcggtgctggcggcggngcanncggttgctggtntgggngaagccgctgcacanncctggtcacggcggncgcgctcnannggnnctcttctggttgctgtcntncntcgtccctccggccnttcttcctactcagcgtctcacttntggcctatttnctgctggatctctggcagcctcgctttctccctgacgtttcagcatcntccccagaggagccacnctctgacagattcacctgcaggagctgctgcagtacaagaggcagaatccagctcagttctgcgttcgagtctgctctggctgtgctgtgttggctgtgttgggacactatgttccaggaattatgatttcctacattgtcttgttgagtatcctgctgtggccctggggagtttatcatgagctgatcccagaagatgtacactctgcttggagcccctggttcattgcgttgggactacgcctgaaggcagaaagcatgcctgcttccacaaccgaccaaggaaccgtctcgggcaaatggcctccgaggttgtagagcccctgtgaaagcacacgagttgaaccaggtcagacatggtcggtatcccccacagggtagtttgcatgaaaaaaggctggcttgtcgcgatacacaatcaggggaaaaacaaagggcacatagtcgagggagggagcaacaccagccacacaaatgcatcagagtagcagatgagccaccacggtagacaaagcatgagactagtagaaagagagacatcactacaaggcaagcagtaagaaggagaggatccactaacgcaccagcgagtctgtatctcctgttacagttat

SEQ ID NO: 516322 - DNA, 292 bp, Homo sapiens
  misc_feature (36)..(36): n is a, c, g, or t
  misc_feature (59)..(59): n is a, c, g, or t
  misc_feature (98)..(98): n is a, c, g, or t
  misc_feature (138)..(138): n is a, c, g, or t
ccatgcaatctctagctgtggtttccttcagtcctntgaacatactgaggatagccatngtaaagctttttcctgttaaccccaacatccggacctcnccaggcaatttctgttgcctgctttcttcctgtgtatggnccaaggctccttgcatgtcttatcatcttttgttaagaatcagacaccgcaggtgatacattgtagcaacagtggaaagcagttctcctttctctgggatccttgctgctgtcagcttgtttattactcaggtacggagctggactatcttact

SEQ ID NO: 516323 - DNA, 1227 bp, Homo sapiens
  misc_feature (158)..(158): n is a, c, g, or t
  misc_feature (183)..(183): n is a, c, g, or t
  misc_feature (189)..(189): n is a, c, g, or t
  misc_feature (206)..(206): n is a, c, g, or t
  misc_feature (208)..(208): n is a, c, g, or t
  misc_feature (219)..(219): n is a, c, g, or t
  misc_feature (223)..(224): n is a, c, g, or t
  misc_feature (238)..(238): n is a, c, g, or t
  misc_feature (293)..(293): n is a, c, g, or t
  misc_feature (311)..(311): n is a, c, g, or t
  misc_feature (315)..(316): n is a, c, g, or t
  misc_feature (328)..(328): n is a, c, g, or t
  misc_feature (333)..(333): n is a, c, g, or t
  misc_feature (348)..(349): n is a, c, g, or t
  misc_feature (364)..(364): n is a, c, g, or t
  misc_feature (372)..(372): n is a, c, g, or t
  misc_feature (374)..(375): n is a, c, g, or t
  misc_feature (378)..(379): n is a, c, g, or t
  misc_feature (397)..(397): n is a, c, g, or t
  misc_feature (399)..(399): n is a, c, g, or t
  misc_feature (401)..(401): n is a, c, g, or t
  misc_feature (416)..(416): n is a, c, g, or t
  misc_feature (441)..(441): n is a, c, g, or t
  misc_feature (452)..(452): n is a, c, g, or t
  misc_feature (500)..(500): n is a, c, g, or t
  misc_feature (517)..(517): n is a, c, g, or t
gctgtcctccgcggcgcccccttccgcctgacggcccccggcggcggccggcagccctggctcctcgcgggctcgggcggcggctgcggcggggctatggcgagcggcggtggcgggggtaacactggcgcgggtggggggccggggatgggcctgangcctgggcctgggtctgggtctgangcctanggctgagtgaggccccnangtgaggcagangganngaggcggccacggncgaggcggtgggacgcctggccacgacgctgtggctgcggctccgcggctggganggcggtgctggcggcggngcanncggttgctggtntgggngaagccgctgcacanncctggtcacggcggncgcgctcnannggnnctcttctggttgctgtcntncntcgtccctccggccnttcttcctactcagcgtctcacttntggcctatttnctgctggatctctggcagcctcgctttctccctgacgtttcagcatcntccccagaggagccacnctctgaccgcagagggttgcggggtcaggcgccccggtcgccacctgctgagtgtgcccgagtttgtgccagatacctggctgaggcggctggtcaccttcccagattcacctgcaggagctgctgcagtacaagaggcagaatccagctcagttctgcgttcgagtctgctctggctgtgctgtgttggctgtgttgggacactatgttccaggaattatgatttcctacattgtcttgttgagtatcctgctgtggccctggggagtttatcatgagctgatcccagaagatgtacactctgcttggagcccctggttcattgcgttgggactacgcctgaaggcagaaagcatgcctgcttccacaaccgaccaaggaaccgtctcgggcaaatggcctccgaggttgtagagcccctgtgaaagcacacgagttgaaccaggtcagacatggtcggtatcccccacagggtagtttgcatgaaaaaaggctggcttgtcgcgatacacaatcaggggaaaaacaaagggcacatagtcgagggagggagcaacaccagccacacaaatgcatcagagtagcagatgagccaccacggtagacaaagcatgagactagtagaaagagagacatcactacaaggcaagcagtaagaaggagaggatccactaacgcaccagcgagtctgtatctcctgttacagttat

SEQ ID NO: 516324 - DNA, 168 bp, Homo sapiens
ccgacggcagtgtgtactccagcaggtctccctgcgttcatctggccctcttgcaggactgctacgtaattggcaggcccagtgcaaaacatgaaacatgcaagtctccttgttaacaaaacaaaataagaatttcaaaatgatgacagcagaacattaaaacaagcg

SEQ ID NO: 516325 - DNA, 149 bp, Homo sapiens
tagacttgtgagcagtcgggcacttgttgggcttggcctctgtagtcgacttggagtggatctgcatctctgacttggtgaaaaagagtcagtgggcatatccttacacctgtacgtcttgccctcctttggagctcgcccctcaggtt

SEQ ID NO: 516326 - DNA, 410 bp, Homo sapiens
caaatcaggcaaatgatttggggtcccagctccatgtctcagtttgctgacatagaagtacctgcagggttaggcaacattgaaggacctactgtgccctacaatgtactctttaagcctgttctgaacaataggagagatgccttagttgttgttaccagctgattgaaagtttgtgtctctccataaatctttaagctgaaacccctgccactcatgtgatgacattagaacgcgggttgtagaaaatgattagatcatagtatagattatacacttcccatccttgtaatagagatcacagagagctcccttgtccctttcacttatgaggatgtagcatgaaatggccatctataaatcaggaaatgggcttaacaaagctctccactcttctagcatcttgtccc

SEQ ID NO: 516327 - DNA, 421 bp, Homo sapiens
  misc_feature (213)..(213): n is a, c, g, or t
  misc_feature (366)..(366): n is a, c, g, or t
  misc_feature (388)..(388): n is a, c, g, or t
tatttccacaggggggggaaaggggggaaagacaggattctcaaccctcagccctggctgtccttaagaaccatctggaagagctaggaatcatttgaaaatacccctgccacccatttttaatgagcagtcagggctgagaatcacaactttaagatattttgcctgtaattaatatttatattttaaatctacattttctgagaagctcgnaattttaaaaaatgtattagtatctttctgaagataatgaaaacttgtgtctttagattagctttacatatctgacacctaaatggtagtgttcattcatattgataggataatgaaggaaagaagagctttgatcaacgcctgggacaccanagatttatctctggtcccaagngtggaaatctcgagagtggccctgtggaaagta

SEQ ID NO: 516328 - DNA, 660 bp, Homo sapiens
gatttcccacgtacactgatgttcccttctctacagctgctggagtgactgcgactgctactactacatcctggcatgtggcagtgagaagaatcctggcacgacagaagaaaaaactatgcgacttggtagcgagaaaagggtaaagagtcagagaaatgagttggctctactgaagaggctgaaaccactgtttactaaaagctttgagagcactgtgggccaggattcagacacatacatctatcatcgttcagaggctgtgccgggaagctggtcgaaccacacttctgggcgcaggcctgcgtcgcaaactcaatcaatacaccgtacatggcgcaacggatgatcacgtgcgtagcggcagactcaacgagactcacatcttcaacggaagtaatcggcatcatgctgatctataaagggggtgatgaatatgacaaccactgtggcgaggagcagctgtcgtgcacgtggtgatgatctcctgcaatcgacacaccctagcggacaattttaaccctgtgtctgaggcagcgtggcgaagtccaacgatcgtctctacctcttggcaactggcatagcagcctggcctgttcaccacgagtatctcccaacgtcagaggtgggctatcaaacttacttgtcaccgttttgcat

SEQ ID NO: 516329 - DNA, 326 bp, Homo sapiens
  misc_feature (261)..(261): n is a, c, g, or t
  misc_feature (264)..(264): n is a, c, g, or t
tgaaacttgagaggttgtgaccagagattagattattaatatttaggccaagtgcagtggctcacgcctgtaatcccagcactttgggaggccaaggtgggcagatcacttgaggccaggaatctgagaccagcctggccaacatggcaaaacccgtctctactaaaaatacaaaaattagccaggcgtgatggtgtgcacttgtggtcccagctactcgggaggctgaggcaggagaatggcgtgaacctgggaggcggnttngcagtgagccaggatcgtgccactgcattccagcctgggcgacagagtgagactccgtctca

SEQ ID NO: 516330 - DNA, 152 bp, Homo sapiens
attccccccccaaatttaaacccttggtttgtttcaacagggtggaaaccctctttttgtagttgggcgaaaggacattttttagtccccttaggcctatagtaatgaacagaatatcctgccataaaaattaaaaagaagtgtttttggga

SEQ ID NO: 516331 - DNA, 564 bp, Homo sapiens
  misc_feature (134)..(134): n is a, c, g, or t
  misc_feature (148)..(148): n is a, c, g, or t
  misc_feature (157)..(157): n is a, c, g, or t
  misc_feature (160)..(161): n is a, c, g, or t
  misc_feature (163)..(163): n is a, c, g, or t
  misc_feature (173)..(173): n is a, c, g, or t
  misc_feature (175)..(175): n is a, c, g, or t
ggaacgagaaggaggccatggaagacggtgaaatagatggaaataaagataccttggactgggccaaacctaagggtgaaggtggcttcgggggtcgtggtggaggcagaggcggctttggaggacgaggtggnggtagaggaggccnaggaggatntgnngncagaggccgngnaggctatggagggcgaggaggcttccgaggaggcagaggaggaggaggtgaccacaagccacaaggaaagaagacgaagattgaatagattaaggccctatgcttatccctcttccattagaaaaaaaggacaatgggggttatactgttacctgaacaatgacagagccttctgaggacaaaccaagacaggatacagtcctgggggctccatggaaaaacgactagtaaaaatttaaagggcaaaaacgggtaaggaatgaatagaaaagtcataaaaaacattcaaaggaacagagggaaaaggagcaaaaccaccaaaacatggaagggaatacaaaaacaaaaaatggagcgtagaaaacccgaaggtaacaaaaaaaacacaa

SEQ ID NO: 516332 - DNA, 603 bp, Homo sapiens
aaaaattttttaaaaaaaatttttaaaaaaaaacataaaaaaataatacaaaaaaaaaaatcttaaaaaaaaaaaattttaaaaaaatttttcaccaaaactttcaaaactattaaaatcccactccacaatttccttcccatataaatttctaataactccccacccaaatgcccaaaatctcataaaaaaaaaaaaggtcacccccccaaaaaaaaaaaaacaactccaaaaaacatattcttttcctttaatatcattaataattccaactacataaaatctcccccatacaaatctcaaatcaaattcttttattccctacattttaaccaaaaaaaccccaaaaaaaatcacccacaaacaacccaaaaaaaccacccccaaaacctctaacaaaaattttcacctattattcacatttaccacatcccctattacaaaaaaattaccaacttatatattcaaaataccccattaaaaaagctcaaaacaattactcataaatttatctcttttaaaaaaattcggccaaaagcccaccccacaactccacaaacaaaaaaatccaaaccttttttctacaaaaatattcctcatact

SEQ ID NO: 516333 - DNA, 492 bp, Homo sapiens
ggacagcaccaaccagtagggttttcactggtcccctgggtttccttcaatacaattaactttaaaatctttaagttaagaatccaggttgaatacctaaacggcaccatgttttccaagagagggtaatagtgaaataaaatctggtttagggaattcctttgaggtccaaacccagctcttttcctcctgccttctaatttgctgcattcacccaatgcatacccaattctatccttccaaacaaaaacctagtttcatagtcaactgaccgaaaatgacaggcagtggatccctggtcctctagagtattactgctactcaagggccagttagaagacattctcattggcaagacaaacaagaaggttattggtattgttcacaagcctttgctaagatcacttctttgtgttatacctggattgcatcactccacactgcctcctttgctcttcacgaatgtgaagaacctcagctactgccaagtca

SEQ ID NO: 516334 - DNA, 394 bp, Homo sapiens
  misc_feature (16)..(16): n is a, c, g, or t
  misc_feature (290)..(290): n is a, c, g, or t
  misc_feature (387)..(387): n is a, c, g, or t
tttttaaaaaaatttnttgagacagggtcttgctctattgcccagcctggagtgcaatggcacaaacactgttcactgtaaccttgacctcctgggcttaagtgatcctcctgccttagcctcctgagtagctggatgtacaggggtccaccaccatgcctggctaattaaaaaaagaaaaaaatttgtagagacagggtctcaccatgttgcccaggctggtcttgaactcctagggtcaagcaatcccccgatcttggcctcccaaagtgattacagggattatcggncatgagccactgtgcctgggccagcctggctatttttgggaataaaaatggggtttcatttacattcttggactacgtttattttaaggttaactcntttaaat

SEQ ID NO: 516335 - DNA, 988 bp, Homo sapiens
gcccagctctgggttacccggctctgcatcgcgtcgccatgatggcgccatcgtgctcagctgctcgtgcttctagcctatgaatacaaagcgtgaatccgtgacacggaacagagtacaatctgtcaaacttcatttgctgcgccatggacgtattgcatgatatcatccgagacatgattatggggacccagagttccagtgactgaaggatgcttagtggaacccattgggatggcattgtgaatgcaatcaagtgactgtgaccacacttgccattcgttcgaagagcattcaattccagtgaatccagcggtcattcgtcctattgatcagtatatatgtaggcccgagtaatcgccagagatcgagggaaggtagagacgattgggagagcgacgagtccaagtccaattgattccgtttggcaagagcggtgcatacattgttgagtctggtgcaagcgtgaggcgacgttcgcgttggatgctatgcttatgattgcaatctcgagacgagggttgagtgatcgatgtgggcttgtagcactgcgaaaggcacttcggacttgattacttgatcgaggtaactcgctatagaggaaagatactaacggttaattccaaggtctgcactaatcaacgttggacgcagttgcatatgcattgggtgagagcactcatcagagcaaggctcgtaatcaacttagccgaaaacgccaatccatgtcagagatgagtcaatcgtaattgggcgttttgcccaattcaaattggcaccgcatgggagattggcttggataccaaaggaaattgggtaaccaaggatcttgcacgcgcaccgaaactgggcttcggagaacacataatgcattctggaacgaactacgatatctaaaacatttagttgcccgaacggaagcatgcggacaaaaaaggatcaacggcacatgagtaaggtgacagattgagatacgcacgaggaacat

SEQ ID NO: 516336 - DNA, 398 bp, Homo sapiens
  misc_feature (6)..(6): n is a, c, g, or t
  misc_feature (292)..(292): n is a, c, g, or t
  misc_feature (358)..(358): n is a, c, g, or t
aaaatntcctgggaatgacaaaacctacgcattcatttacaactcattagccctaaagagcaaagacccaaatttatgcttattcaggcaatgacaacctatgtggcaacacccacaggataaacaatgattataagattttttggggctgggtgtggtggctcatactgtaagcccaacactttgggaggctaaggtgggtggattcgcctgaggccagcctgggcaacatggagaaaccccatctctacaaaaaatacatgtggtggtacatgcctatggacccagctanccagggaggttgacgtgggaggatcacttgagcccaggaagttgaggctgtaatgagctgcgagtngccactgcactctagcctgggcgacagagtgagaccttgc

SEQ ID NO: 516337 - DNA, 159 bp, Homo sapiens
gtcatacctttattgaaaatcctgctacccctgttgtgatcataagacggactcagcacgttggaacctattctgttgtgtagggccttgcctagaatgtcgatgggctgctgcctggggtggttactactaggtgctattgaaacttctaaaactagg

SEQ ID NO: 516338 - DNA, 713 bp, Homo sapiens
  misc_feature (98)..(98): n is a, c, g, or t
  misc_feature (252)..(252): n is a, c, g, or t
cagaattacaatggcatttatctgccttcattaaattaagctcaggaaactaatgcagactccaaattgcccacagtctaacacagtctctgcatctncggttaacaaaattaaatttgggaaaatcaagagtaagacttttaatgtttctaccacctgtcagcctggaaagttttcttagtttttctttttggagaggcatttgagatttgtgttcctgtcaacttgagagaggaatggaggaagtcaaanggaagaagaggagctgatgttgcagtccgaggggaaacaggagtgagggcagggagcccagaagagggtcagggtgaagatgggtgtggggaaggcagagcaaaccagctgctgctgtcaaccctgacctatttcctggagctctgggagccctcccatccctgctctcagcaacagtgatgctgcctttgggcggctgtgcagccaacccacactgatagctgtccctgtcattttcttaaatgtcaccagtgaaagagacatttccacctccctggagtacacatactccacttgtggataagtggacacttggttccattttcacagcttccaaaaattggtcacagatgactaacaattgtgtcaacttctctggtatgagaagccatagatggaggtatacagaaatgatttcttaaaaaatgtaatgtcctttctatgtggcagtaaaacatctt

SEQ ID NO: 516339 - DNA, 157 bp, Homo sapiens
attcgagttcaggcaaaaaaatttttgttactcaattatactgggaagtatagaacttctaaggccttggtctgcttacacatcactgactgcggtgaagccctcagagaggcatctgacacacagcccatgaagacagaacaggctcactaagcct

SEQ ID NO: 516340 - DNA, 135 bp, Homo sapiens
ctcctgcatcaggaaacccagtagctggattacaggcatacagccacatgcacggctaatttgtattccagtagagacggggtatcaccactggttaggctggtcttgaactcctgacctgaggtgatccaccag

SEQ ID NO: 516341 - DNA, 119 bp, Homo sapiens
tttagtctcagctcatgattgcctcagctttgcagctgtcccctggcaggctgtggtctcctctgcaaagcattttacttaaaaacctcaatagagatggccctgcccaaaaaaaaaaa

SEQ ID NO: 516342 - DNA, 210 bp, Homo sapiens
ccgggatggggccctggccaatactttgatttttccccagtgaaactcattggggttcgggcccccagaactgggaaaaaataaatttttgttgtattaagcccccaaggggggggcaatttttttccagcagccatatgaaacaactccagggtttttacaaaacatttcgggcaattaagtgggccccgtttattcagtgccccccca

SEQ ID NO: 516343 - DNA, 559 bp, Homo sapiens
gatgataaatgtccaccatgagctcatatatgcacacgcatacacaagcacacaatagggatctttaaatagcttctaatttccggtatgttatgaccccggcggatcccctatcaagccatcttgggctgtctgatatatatgagcagacttggtaaaaacagattttctctaaaaatgcttaacacttcctgagtccaattacagtagtgttaaggatatgagaacggagtaatgcaccaaaaactgtataatcatgtctgagtcaacaaaaaggcaagtaaaattacacaaacacgaaaataatttgcaaatatattattaaaaaagggttagaagtaaactgaaaaggctaggctcaaattttaggccagtcattgtggttcttgctcctaactcattttcaaacattatttacagaagtccaagctatttgacatcctctgaagtatatttgcattaaaattctattttgagtatagcctttgtttagctgagacaattggcttaatatttgaagccaagaaaaactcccactagacaaggtagagccgagggg

SEQ ID NO: 516344 - DNA, 859 bp, Homo sapiens
ccggttctttaaagagccgtttctgccttcctgccgggtgtccccctcgcccccttgttggtctcccccgtgagggatgtgtcccctgtaagccgcttccactcgtgggtactgttgacaaaagggtaacaccttggtccctgagggagcaaaacaaactgtctgggtgaacccgctggtcattttttctacagacaatgccctaccaatcctttgtgcacagtcacgggcaacatgtaccttcccctgagggaaatggtcgtgacaccccacgagcaccttcccgtctcggccacgtgggggccacctccactgccaccggcggcatcccacaagggtgttaatttctctgagaccccacttcatgctgcaacacccaccccggtgttttgcccttttcctatataaggtccacgtctttctatccccggcacctttgttagagttttgcccgcccccttattggcgaggggaaatcaaccaagagaagtgaatgcttatattcgcatcgtctgcagtaaaagattcatgccaccagaatgggcggaagcgaaacaatccgttgtatcacagtgtgacagggaggcgaggtgtgcttcaagaggcgcctccatgtggcccaccaccgtgctgccattgaggtgtcatgatgcatgtgtcggatcgtttttctccccgaaggaagtcaccctgctggccaatcaggcctggattagctggcgcctgagtataaggaacccaggattcccgtttcgacaaatatttgcgcatggaagaaaagacattgacgaagaaaacaagatggctgatacccacgcccaatagcgtaaaaaaaacaaaaaggcaatagcccacaaac

SEQ ID NO: 516345 - DNA, 1131 bp, Homo sapiens
ggccaagtaaccgctcctgtattaaacgaagaaagtgcttcatgcgtttgcaggaggcccaagctcctatatatagggtttctattctctgatattatagtgcgtatcgtatcagagaatatcggtagaggaacaaagaaagaaggtcatgtttgccaggtacccttctcgctcttatgccacttagaccaacggatagaaagcgtgccgtggtattagattgttgatgatacactctttcaagatcagcttcatgtggcttcccttgatctctagttcaggatgagggccaggagggtgaaacatcacgagactgtgcctaaaacctgtttcctggaggtcagcattgtgactctgtatgccaagaccacctctttgcgttgtcactcactcttctctaccctgtgctcccatgactttgctcctcacactttctggaagccattgccgttccaggggcggtgcgccatcgtctttactggaccagtcgcgttgtcatctgggcccacggttggcagtgtgtgataaatccagtcaagctgttgaagtcttcaggagtctctggctagctcgtgccagacagtaaagcctccatccatcaggagcctttcctcaaaacgtggagtcccaaagtgtcatcaggttctcgtagtcctattcacgtcgcacgtaagaacccctctgctttgaactctagaatttgggcttggaccagatctaacatcttgaatactctgcctctagagccttcagcttaatggaaggttggatccaaggagggtgtacattggagcatctaagccaactcggcggcagcatggagctataactaaggcatcctttagggttcttgctcctccagagcatttaggcctcaaataactctaagtactgggggataggtataaccctgggcaacactttggaggccaatcctaaacctgggaatggggtgcataagacttaggcatatcttgaatttgttgtcacaggccctaattcttccaacgtttcacctttgggaccaataaaaacgtttctgtcacccctatattccggggggaacaacatgttgcgacacaataaacccctatacatattaacacacttgacaacgttacgggcccaaga

SEQ ID NO: 516346 - DNA, 143 bp, Homo sapiens
  misc_feature (1)..(1): n is a, c, g, or t
naccccttttccagctcttgcaccgtttctgcatgagttgcttgcagctctctcatagagcgttctagatctttattaatttcactatctactttcactaaaaaggaaaggtctccatttttttgttctttttgagcctttat

SEQ ID NO: 516347 - DNA, 297 bp, Homo sapiens
  misc_feature (297)..(297): n is a, c, g, or t
gaggatccacaaaccatggaacactctcgcggctgccactcccccatgaccaccctacaggccctaaccccagcccctcacgttatcgtccagccacaaatagctgccgccctgagatctccacctcagaccctctcccgaagcccacagcggcccctgccgggcaccccagcttcctcgcaggcaccaaaagcgcagttccaggaatctctaccctagagtgatccggcgccagttgccagttaagggaccaaacctcgccagaaggcttcttttcgggttgatcgccatctattn

SEQ ID NO: 516348 - DNA, 152 bp, Homo sapiens
ttaaggggggttttggggggttcccccccccccccccctttattttttttcctgggggggggggggggggggcttaagggggtccccccttgcttaaacccccctgggggggttttgttttcccctttttgtttaataaaggggaaccccca

SEQ ID NO: 516349 - DNA, 198 bp, Homo sapiens
tatgtgcgtgtgtgtggtatgtatgacgtatagctatgtgtggtatgtgtggtgtgtgtggtgtgtgtggtgtgtgtgtgtctgtgtgtgttgtgtgggtgtggtgtgccctatgtgtagtatgtgtggtgtgtgtgtggtatgtctgcgtggtgtgtgtacatgtgtgttgtgtgttatgtgcgtgtgtgtggtatg

SEQ ID NO: 516350 - DNA, 210 bp, Homo sapiens
agagatctcccaacttgtgctctcaagtgctggaattacaggcatgagccaccgtgcccagcctgcagttatcttttttacaggaccgcaactcatttgtgtctctacagaccatacgccatctgccttgctgttaggatggaataatttacttggctaattggttttttaacaagttaacatccctagatggagtcgtaaataatccta

SEQ ID NO: 516351 - DNA, 275 bp, Homo sapiens
  misc_feature (4)..(4): n is a, c, g, or t
  misc_feature (10)..(10): n is a, c, g, or t
  misc_feature (55)..(55): n is a, c, g, or t
  misc_feature (89)..(89): n is a, c, g, or t
  misc_feature (93)..(93): n is a, c, g, or t
  misc_feature (120)..(120): n is a, c, g, or t
  misc_feature (127)..(127): n is a, c, g, or t
  misc_feature (241)..(241): n is a, c, g, or t
aatncctggngtgcagctgaagctgagccacttgtgtttcttcacagtatctctntcgggagggtgtattatttccttttatagggganctcntataatgaagtgagaatcttgtaaaanataagtnttatcctagatgggaggtgttaaaggttttgtcctttggaattttgtcatatttgttgcacagcaaggaaggactttcagaaaagcagggatgtggtgaggaagagcaggcaanagagagcagggaggaaaggctaagtagcatctgg

SEQ ID NO: 516352 - DNA, 212 bp, Homo sapiens
gcttatatacacgacgaaacatgagccgtggtatcctgtcccatatttctatgaacacgtatatattctcccagggtcgagtttccactaaaacaaaatgtatccagaaaacaaagcactatgatcagcttgaataaccgccaggcaaaaagaaaaccgactcccaaaaccaaacacccatcaccatcatccactctatccaaatcaagcaa

SEQ ID NO: 516353 - DNA, 1230 bp, Homo sapiens
tatctctctaaatctctttgtcgttccctatggttcgtatctcctgtcgttcgctaactctctacatttctaatgtgagtcctatgcttctgtttgattttttggtgcatcttctcgctgctgttcgttctgtccctgattggagcgtttctatttgcctgtttgcaatcccctgtattgtgtgctctttctgccgattgtggttatcatctacgcacttctcctgggtggcgctacttgttttattgttattgaagcttgtatgtttatagtggtgtgaaaatttgtgttcctatttaggctttagttgttaatactatgtggttattttaggagtccgaatgttatatttccatgatattatttttctatgttttctgtgatgtttggtatggttgaggatatgaaaatttatcgatataatactgtttttttgtggtagtatttggaatggttagatcttgtattggcttttctctgtatgttatgttatggtttgtatatcatgggtggatatcctatgggctgtttattggctgtgtttgtgttacgtgatctattagtgcttatgtgattataggtacttgtgtgtatgttgatatattgttttcgatctcggtcgcttgtcattgtgattgctccccttcttttctctccttcacatgagactatagtaggtcaatggtttcatgatattgtattgttaaatgttagttattggctagtcttatgggctatcattgggcagagatctatatgtgcttggttgtgtttccatttcttggaaagtccattgaattggggtacactcgcatgtagtttttgcatgtttactagagctatagttggttagtgcattgtttgttgttgtgatgtatgctaatgttatgtttacattatatcgctataggttattttattgctgcatagcgttgtatgtctgatatgcacattagctgggtaatttttaagagtatgtactctatctacctatactatacatactatctatatatacacagtacatacaatacgctgtgtgccatagtgacagctatttttttatatacatggtagttcattaaaattgccttagtaatatattagaatatacgaatgatgtgtgtatataataaacatactacacacagcacacaccccgtatgtagtttttaagacactggcaatgacccactccccttgggaatgcatgtatgaagtacatacatc

SEQ ID NO: 516354 - DNA, 565 bp, Homo sapiens
tcctgaagatctgtctgcagaaacaagtggcaaaagacgttggctaaatgtggttgaagccactgtatgggagacctgtcctccatccaacttgatgtctggattggcactgtaggcatgggctggtggctactggacagtccacacgagcagtcatcgcaacccggtactcaatgcctcttggagttctgtgcactgatttggatgttgatagaagggtacgagctatggaggcgacttaatagcatgcagaatttcgttgacaggggtcgtcacttaagaatcttccaagtctcgtgggaagaatgctatggaatggagtgtggaagagtgggcaagagtttgagatactggagcccctcttgctagcatcaggcgatagatctgacgttcataactgtcttctccagggctcagggacctccatgtccttgagatggtctgaggcaatggtccgagcccgtgcctcatgggatggacaatgcatggggtggtctttattgtgtccctttcaaagtaaaacacgtagtcaggtacgcgtggatcccagtcgtactcttccagg

SEQ ID NO: 516355 - DNA, 219 bp, Homo sapiens
aagtaactacgatgaacagagtacagaccggaagtaataccaggtcggatttctatctacatatcaaataccaccctgatacgaacaggacaagagaaataaggcctacttcacaaagcgcctacccccgatacataatatcatctcaaacataagtataatacccactaccctacccatcgagcgtggaggaatccatctcagacgtcgacctgcagg

SEQ ID NO: 516356 - DNA, 209 bp, Homo sapiens
ccacatttgcaggacatgcagcttgtaataaaatgtcagagtgtgtgtgtgtgtgtgtgtgtgtgtgtgtgtgtatataaaaccacatgtaattcataaaatatatagtggtatatatagatggttttaaatgatttcagtgtggaatccagcataagtggaacaatatccaaggtcttcttaaggggaacaatcttatcgctaggcaa

SEQ ID NO: 516357 - DNA, 181 bp, Homo sapiens
tcaatttctacacacacacaatacacatagcacgcacacacacacactatacacatcacacacacatcacaccacacacacacacacacacacacaccccatctgcgagacgagggtgcccgcgggtggtcgcgcagcccgaggtaggggcggcgggcccaggtgggagggtccaggagag

SEQ ID NO: 516358 - DNA, 413 bp, Homo sapiens
cgtgtatctcaaggacccttatctctcctctacacatgcacacgcaaacatcacatgcccacaaactcacacaataaccgtgtgtatctgttctaataatataatattaaacaccaatgaaaatgattgatctctatacacaacaatatagatgactcactctatgtcgatcaatcaagtaagacatcaaagaccatatactgtatcactctacctaaaaagttcctttataaaagaaaagcaaaactaatatatgatattataattcatgatcatggttatcctgatccataaacactgagagggagcacaatgaatgattctgagtggatattgatattctcacactagacctaatgacttactacctggatgtatacactgtacaaacattcatgcctactgagtaacca

SEQ ID NO: 516359 - DNA, 484 bp, Homo sapiens
  misc_feature (34)..(34): n is a, c, g, or t
  misc_feature (45)..(45): n is a, c, g, or t
  misc_feature (68)..(68): n is a, c, g, or t
  misc_feature (475)..(479): n is a, c, g, or t
accctctggtttctggcttttcattctcccccanggctacccatngaaactggaaccctcttccccanggcgggtcatcgggaaacccagaaccggttttaccccaaagccagcccataaaacctaaaaatagtcctctcactccccattcccctttctgtgtaaaaactggttggaaagaaatgatctgacctaccgtgtttgactgtcgtaagatacccattccagagagggtcccaccccgtgcccagaaggaaggaatcctgcacagagaggccaagaagaatctagacagccttgcctgggtttcccctctcagtctattactattagatcatacccttcttgtccaatcatatttctacacagtccataatctgttgaacctaaacataaaaatggacaattcccctgtatcttggggtcttcattctgagggctcacatacaattatgatcaaataaatttgtttgcnnnnnctcct

SEQ ID NO: 516360 - DNA, 607 bp, Homo sapiens
ctgcgcggcgactctagaggacccctcacgcttatacttcaccaaaaagagtagaactaataaacaaattcagtaaagtggcaggcatatcaatatacaacaagcagatagtgtcacaaaatataaaatacttaggaataaatttaaccaagaaggtaaaatatctctacactgaaaactgtaaaacattgacataagaaattaaagtcacaaataaatgcaaaaatatcccacattcatagatgggaagacttaatatggctaaaatgtccatactaaccaaagtgatctaaagattcagtgcaatccctgtcaaaattccaatgatattttccacagaaatcgaaaaaacaatcctaaaattcatatggaaccactaaagaccctgaatagccaaagcaatcttgagcaaaaagaacaaagctagagatatcacaatacctgatttcaaaattactacaaagccatagtaatcaaaacatttttgtactggcataaaaacagacacttaaaccaaaagaataggaaagagagcccaggaataaatccatatatttacagccagctgatttttacaaacgtgtgaagaacttaatgggaacagaca

SEQ ID NO: 516361 - DNA, 828 bp, Homo sapiens
ttttgtcctttccttttgcagctttccgtcgtgctcgctcttgcgcctgttgtagtattctgtcctcctgcggttcccttggctttcctcactgtttctgtccggtgttctgggtttccattctctgtcggcctgtgtcccggctgttgttcccccttctctgttctgttgtgctgcgtctcgtctccatgctcgctatggcttccctcatgtcatgctgtcgggtgctggcaactcgtcgtgccagcgcggcatttctaaggcctccagcccacctgtcccaattgtgatgaagcagagatgcggcttctgtcgcacactgctctgttggctcccctgatgccaggcccagccctcaggccaagtcagccgcagacttttgataattagcccaacgtaccatgtgtagagatgggccgtgtgccatggtggtacggactcccgggtctgggtcttttgaattggtccttgttgtatctactctggctctcactcagctcccacgggtactcagatagtgcgccgccatgtctgcctagggtatctgtccccacatctgtcccaaccctaatgtctggagtcctggtctctccttacaagcccctgggcccagccctcattgctgggggccagggccttggatcttgagggtctggcacatccttaatcctgtgcccctgcctgggacagatatgtggctccagttgtctctgtctctcgtggtcaccctgagggcactctgcatcctctgtcattttaacctcaggtggcacccagggcgaatggggcccaggcataccttaggccagagaccggcggaggagagcc

SEQ ID NO: 516362 - DNA, 372 bp, Homo sapiens
tagacatgatacgacttgagttcggtacctgaacagtcgtgtcaaggagctggaactctttccctgccccttggttctctgtcccttcccctccccgacctggcacagctgtttttcctgctggtaccaggtcccacagaaacctggcacatgcactgctgagagcccaggggcacaggtctgttcttagcatggttcttacagcacaggcagcaaagaagcatatgcaacccatgagggccaggaccacccaatctgggctcccatgcatgagatatccatatggtatttggtagatagggtggagagggtggagagggtgaatagggtggttagggtggataggatggttagggtggacacgaatgttca

SEQ ID NO: 516363 - DNA, 710 bp, Homo sapiens
  misc_feature (34)..(34): n is a, c, g, or t
  misc_feature (82)..(82): n is a, c, g, or t
  misc_feature (97)..(97): n is a, c, g, or t
  misc_feature (140)..(140): n is a, c, g, or t
  misc_feature (204)..(204): n is a, c, g, or t
  misc_feature (241)..(241): n is a, c, g, or t
  misc_feature (243)..(243): n is a, c, g, or t
  misc_feature (252)..(252): n is a, c, g, or t
  misc_feature (264)..(264): n is a, c, g, or t
  misc_feature (323)..(323): n is a, c, g, or t
  misc_feature (521)..(521): n is a, c, g, or t
  misc_feature (650)..(650): n is a, c, g, or t
  misc_feature (664)..(664): n is a, c, g, or t
cacaaacatctcagttcagttaagagcagttttnccgccagcatgtctcacctccagccataaggcggttttctcctatctnagttaatagaatgtncaatcaggttttacagcgagacgttccattgccaggccgagcnggagacacatgccttcctcttatctcaactgcaaagaggtcttcctctttcactaatcctcctnagcacagactctttacgggtgttgggctgggggacantnaggtctttnccttcccatgangccatatctcaggctgtctcagcaggcagaaaccttggacaatacccaggctttctggngcagaggtccctgtggccttctgcagtgcattgtgtcccttggtatttgagactggagaatggtgatgacttttaccaagcatactgcctgcaaacacattttaaacaaagcacatcctgcacagccctaaatccattaaaccttgaatcaacacagtacgtttctgtgagcacagggttggggctagggttacagantaacagcatctcaaggcagaagaatttttcttagtacagaacaaaatggagtttcttatgtcttcttctttccacataggcacagtaacagtctgatctctctttctttcccaacaaaccccttgtggnttggatggaatcangtttcaggggataaaaccctcgtggctctgggatgtgctagacttg

SEQ ID NO: 516364 - DNA, 152 bp, Homo sapiens
gtgatctagaggaccccccaggtggggcatcacggccagcattctggctccggaagcagaaggcgtaattcaaccatctcatcagggtttctagatcttttaaatgctggttcctcttccatatcttctggcagggcgtttaccaaatttca

SEQ ID NO: 516365 - DNA, 943 bp, Homo sapiens
gagtgcgtgacttacctcgactcttatctatgtcggggacggtaagcgtgacccggtgtctgctcctgtcgccttcgacctcctaatccctagccacatagtgcgtgagtgcgatctccagccacggtcgggccaggctggttgtccagattggcaatgtcctgttgggagctctatttgccttggaaacaatgggcaatcctagcctcgatggccaggatgccatggtgacatgacctattgtgggatggcagatgacgtcctgtcaagaaccttccttcagggagacgggcgctggcgaggcgacgtggccccggcgctgtggtatgtagacgtggtaattcctcaggtcattgatgacacttcgcactgggacctaccgcgcaggtctttccatgctgagcagctcatcgcaggcaagggaaagatgctggcaaatatactatgcccgaagaggggcaagtacaagccattggcaaggagatcattgattcttgtgttcggacccgacatgcggctagagcctggatgacccagtgccggcgggtcttcaagggctacttgggtttacccatagagtctggggacgggaacatggtcctgggttccacctcccgtgcttcagtgggaaccgttctcagatgatgatgggcaagaacgtccaagcttgagttgttgcatttatgcccagcgagcccaggtttcccaaggttggagtgagccctagagaatccatttcttgaaggcatgccaagcgggagaacctgatggtgcttcatggattacaatgaggctcttctgacgtttgtgggaaaccctcgaatgaggccagtaaataacttaccgccataagcaaatgtgcccagatggcgggatagtgggggcgctgtctgcaaacaacacgggggccccaactggaggatcgccttgggagacaccggtg

SEQ ID NO: 516366 - DNA, 431 bp, Homo sapiens
  misc_feature (35)..(35): n is a, c, g, or t
tctgatggctgttctccttaaaggagtacgagagnatcctccctcaggattgctatcccaagagagtggaggcttttctcctgtagctccttttcaaaggtgcaagtgccttctgtgctttctgctctcatctggaggaattctgcccttacctactcacctgtttttttctttattacaaagcaggcacagggctgccactgactacacgatgatgggaggatggacgccgccttcaggagctggaggagcagaagacgtgaacaaaggtgctgtccaggcagaggcagaaatcatggtcagatcccgaggaagagcaagacgagttcaactgtgtcctgaggcctccccagaaactgagaagatgccagagtcatgcctcctgtacagccagcagaactgtgagccaattaaaccttttttgtttaaaa

SEQ ID NO: 516367 - DNA, 875 bp, Homo sapiens
aggcccagccagaacaaaagaactaaagaagtaacaagcaaaacgacaacccatgaaaaggggcaaaaacaggagagagcttctcaaagaagacaaacatacggccaataacatagaaaaaaaatgggacatgtgatcatagagaaatgcaaatcaaaaccacaagtgagataccatctcatgcccatcagactagctattattaaaaagtcaaaaaataacaggtgctggcaaggttgcagagaaaagggaatgcttacacaccactggtgggaatgcaaattagatcaaccattgtggaaaatagtttggcgatttctcgaagaacttaaaacagaactaccatttgacccagaaatcccattattgggtatatactcaaaggaatataaatggttctaccataaagacatatgcacatgaatgttcactgcagcactacccacaatagcaaagatatggagtcaacctaaatggccatcaatggtagactgaataaagaaaatgtgatacatagacaacatggaatatgcaacataagaaaagaacaagaccatgtcctttgcagcaaggaagtgaaggagctggagcaagaccatgtccttcacagcaaggatggatggagctggagatcattttcataagcaaactaacacaggaacagataaccaaataccacgttctcacttataggtgagatctaaacactgagtatacatggatacaaagaagggaacaacagacaccagggcctacttgagggtggagggtgagaggagagggaggattgaaaaattacctgttgggcactatacttattacctacgtgataaaataatctgtacaccaaacccttacgacacagcaatttacct

SEQ ID NO: 516368 - DNA, 1011 bp, Homo sapiens
ggtcagcaaagccatggtggtcgccccgatgtgcttcctcagcgattcaagagggattgtcattcaacagttcactgtcttgtaacaatagagtgcttgtatgactttaataagatattagagaataggtaagatccatgggaacgccccttgcaaaaactggtgcatgagaaaatcttggatgatgtagcagcatttggcaacctagactggaaagttgccaaagagtgatacccaaatatgtctacagaggaccttatcgaggaaatgacagttgagtgcaagacgaatttatatgcactgaacgatatccagatcgttcgttccccacgtacgaggtcgaaagaaagcagggcataagccattgaatacgaagtgcactgcgctctcgagaagatccagtaggtgccttggaactcgaaacataggggacgggtaaccctcacctacataattcaacgaggggtacagaggaggggcagcgtcgattcccagaggaatttggagttctacgagaagtggaattcctcgaagacacttgtgagtttgtacgaacgagggcatgaaaatactttcccctgcgaaatgtaacctgattacaagacaagggtatcctagtcggctcgcatcatcaaagggtcggagagacgaatagaatcggtgtatactgggcgaacttttaagtacctagttcctgggagaaagttgggggggccacacacgtaacgcaaacggggaggcccataagcaaccagggaacggctggcaacatagccaaagagaccgaggcaaggtgcccataaagtgacgaatcggtctccataattggcgtgtgcaagtatacttcctgccttggatagataggatgaagggggctaatttgtaaggggaaaaatcatgtagcacaagaaaggaaaggaagagaaaccaggaaaaaagattggatgaagatcgatttgatgagaaggcagtgaaagaatctttggattgtgaagaatagagataatatgg

SEQ ID NO: 516369 - DNA, 507 bp, Homo sapiens
tccaagaacagacactctgggttgtcgatctgcggggcttccactcacccttgtatcagggttctgaatgcactgggggttcccagtctccgtccatctcttcatcccagtcctcgggctcttagcatcagggtcagggatatgctcgggcttgtcccagtcctcaggcttggagtctgtgggatcatcgatcttggcccgctcatcccagtcttccggttttgaagcatcaggatcctttatcttcttgggtggcaggaagtcccattcgtcttccaaggagccgaactccacctggttgttgtcaatcttcacctcataggtgttgtctggccgcacaatcagtgtgtacaggtgtgtaaactcatcatccttgcaagggatgtccttgtggatcagcacgtccttgcccttgtagttgacgatgacatgacccttcttggtgccagcgccacagatgtcggcaccaaacatgatgttgtatcctgagtctccgtgcatgtctgt

SEQ ID NO: 516370 - DNA, 147 bp, Homo sapiens
aaacttatcactatatgcatcttatattttaagattattagaatattctaggtgccacatattaactatatgttgagtgggctgtaattaacgaatgtcctttcataatatatcatactatatgattttacattttcgactgcacgc

SEQ ID NO: 516371 - DNA, 980 bp, Homo sapiens
  misc_feature (980)..(980): n is a, c, g, or t
gcgccctgttactgccctggagatttgggcctctctccctccttcctgcagttcccacgcctgagggaggggatgcggtgcagtgtacatccgtgggcagctgtgacccctctgactcatccgacgggtgcagctcaggctccctgctgccacaccggacccccccaggcggggatttccccaagatgagaaatcagcctaccggaagtcacgccgagacgcttggacagggcatgacatgaggctgggaggagttctggagctgcagagtcccctcaaactgtgctctcatctcttgctctggggtaagccagtggccatgctataaggacactcaagccaccctatgtaagaagcccacatgaagaggaactgagatatctggccaacagccagcacgagtcacttgagcctgccaaccacagctgtgagcaggtacctccagcaccagacaccctgaagacatccactgaaaagctcaatggcaagcctcatgaggaccctggaccggaaccaaccaaacgaagcgggtcctgtattacctgatttgacagaaactacgggatcaataaatgcttgcatgttcagtcaacaaaaaacacacagcaaacaaacgaataaaattaaaacaaaaagaaaagagagagcagtgcgagaagtgaatagacaagaatgtaaaagagagaccagagacgctgagtaacagcacaagaaggcagatgatgatgaacatgagagggtgctcctaaagataacacgcacatataaccgtagcacaagagcacaaaaagccatagaacaccataaggacgcattatcccagaaagaaaaaacgatcagcagcaataaagcctagagagcaactaatacaagcaaatataacatgaagagacgaagaagagaagacagaagcacactatacaaaacatatctgaaagagagacaaaaaacaagataatagcgaacagccacctacaagn

SEQ ID NO: 516372 - DNA, 113 bp, Homo sapiens
ttcatcggcacttagacaattatttacatccccctcccagaagaagtggataaaccttcaggcctttcaggagtcccttctccagattgctcattggtgcctgataatagcga

SEQ ID NO: 516373 - DNA, 288 bp, Homo sapiens
  misc_feature (17)..(17): n is a, c, g, or t
  misc_feature (29)..(29): n is a, c, g, or t
  misc_feature (48)..(49): n is a, c, g, or t
  misc_feature (165)..(165): n is a, c, g, or t
ggggggccgaagaaacncccccccctgancctacatgccaaacggccnnagtgttggctggacctgcgccgaccccttcagccgccccaacagcggcccggcgcccggcgcagtggcccgccctgtggggcgcaaggggggcggtgccttactaccctgtgtcgntctgcccccccttgaggaatactggcgcctgtctgaaaggcccaggccccccgggtcccccccctttagttgcatgagtttttctttgttcatggaatgttttttccttattaaatgttgggg

SEQ ID NO: 516374 - DNA, 593 bp, Homo sapiens
accccggtctctgtggctggagattcgagtccatgagaaccagtctcagtgtaggcagacggaatcacagtgcaagtagtgccaactggtacccatttgagaatggaaaattttcaatgttccctcccaaaggagtccagataaccacacaaaagaggagtttgctgattcagtccgtcgcgattctccaataggatgcatacagactgtgaaataagaacgttatttctgcaaccgattacatggagtaagaggccaagtaactctaccagaccaactcatggttacaagtttatctctagtgtttatagacatcttatggtccacggtatgtgtgggactgcacctacaagcagaagtgttgcattaaatcaacatctaatctttaactagggcctagggtctggaaagatttctctagagtcttggaaagtttctgaatcttaagacaggctgaggtgaatgtgtaagaatgctattattattcgatcagactttaggatctgagaagaccaaggcagggtcttaatgggttcgttttcgcattccatccctgatactcaggcaccagtttctccatttcttcaacgtgt

SEQ ID NO: 516375 - DNA, 242 bp, Homo sapiens
ctcaacattctacttctgacgtggtatcagagacgatgctgtagactggaggtgtaaacatggatcagaggaacagcggcctctcgagtgttcgcagtctgactgggactcactctccggagtacctgggattacaagcgcccgtcatatatgcccagctgactttttgtacttataagtggtgacagggtatcaccatgtggaccaggctgttgtcgaactctgaccccgtgattcaccca

SEQ ID NO: 516376 - DNA, 251 bp, Homo sapiens
  misc_feature (24)..(24): n is a, c, g, or t
gccccacccagcgactggattttnttctgcctctctgtgtgggtactgtgtgtgatatctgtaaaaagtgcgctaattaatttggcctaaagaaagacaagaacttggatcaaattttttttaagggaagttaaaagctgtggtatctttcagttcacatgactttaatctctgagaaataaaaacagccctaaagactattggtaaaatgcaggtgagatgcaaggttttctaagtgttttgaggttaaa

SEQ ID NO: 516377 - DNA, 267 bp, Homo sapiens
cggtctggatcgagaacagccttcacggtgtgtagctggcctggagcagtggctgtctgccatcgaggtggaccccgccattgcccaggcctgcgcgccgccccatctgatacgcatgctggcctttgccgcaggccactgcagcccgtgcgcgccagtggagaccttgcgcgcgatgcggcgctcttccagcatttcggtcccgcctgaggacagcgccatgacacagccttgcaacagacgtactcatcatcggcgccggcctgg

SEQ ID NO: 516378 - DNA, 130 bp, Homo sapiens
gatacatatcccagtacagatgggaaatgaactacatatgagatgctgacagaccactgcctcttacagtaggaaacaagtgaacccatcaataagaaacaaggatcgaaagggacccagcagctccctc

SEQ ID NO: 516379 - DNA, 124 bp, Homo sapiens
ggaatactcctgcggctgctggtcttacattacataagcccaaagacaaactccgagccctgcctctggtggttatctttacaatactatggtgacttgatagggtgtgagtgagatggatcaa

SEQ ID NO: 516380 - DNA, 439 bp, Homo sapiens
actctgttacccaggctggagtgcagtggcacaatcattgcccactgcagccttgatctcccaggctcaagatggtcctcctccatcagcctcctaagtagctgggacttcaggtgcgcaccaccactcctggctaattttttttttattttaatttttttcagtagagattagacctcattatgcccaggctggccctgaactcctgaactcaagcagtcctcccaccttgacctcccaaagtgttaggattataggcatgagcccctcacctgactacctctattttcttttcttttctttttctttctttcttttttttttttttttttttttgttttttttgtttttttttttttttttttttttttttgggggggttttccccccggggggggggggggaaacagggggggaaccgcttgttgaaaaacaaaag

SEQ ID NO: 516381 - DNA, 759 bp, Homo sapiens
  misc_feature (31)..(31): n is a, c, g, or t
  misc_feature (90)..(90): n is a, c, g, or t
  misc_feature (139)..(139): n is a, c, g, or t
  misc_feature (166)..(166): n is a, c, g, or t
  misc_feature (183)..(183): n is a, c, g, or t
  misc_feature (309)..(309): n is a, c, g, or t
  misc_feature (437)..(437): n is a, c, g, or t
  misc_feature (463)..(463): n is a, c, g, or t
  misc_feature (631)..(631): n is a, c, g, or t
  misc_feature (636)..(636): n is a, c, g, or t
  misc_feature (651)..(651): n is a, c, g, or t
  misc_feature (665)..(665): n is a, c, g, or t
  misc_feature (670)..(670): n is a, c, g, or t
  misc_feature (681)..(681): n is a, c, g, or t
  misc_feature (706)..(706): n is a, c, g, or t
  misc_feature (734)..(734): n is a, c, g, or t
  misc_feature (747)..(747): n is a, c, g, or t
  misc_feature (750)..(750): n is a, c, g, or t
  misc_feature (756)..(756): n is a, c, g, or t
aaacgagtttttatttattcaagagtaaatntccaggtgtagaaagaggccacaagttaatgttgttaaaaaaaaaattaaacatctgcnaaccaagtcctgcatttaatgaaaccacctaagaaagaaaaagagaaangagaaaaccactgagaaccagcaaccnggagctcagtttctgcnacagagcacctcctcttcaacgaattattggataccattggagagcaagttactgtggtggaagcagcagaactggaggggctgttaagagttttagcagatttattggccagaggcaccgaactnaatgaggcacttagagatgagaaacgatctgtactgggatttcccagcggaagagactttggtttttgttatcctgaagtggccacttcacctccagttttatagagggatattcgctttttactggnagtttattcaggtagctataggtctngtttttttggatagggcagttaatttcacttttacaaccatcaggctcaggaatgggaaagggaactgggacgcccattaggatgccatggaccagggccttgctgcttttagactgaatattgctggtgaaggtgagattgaggctgtgagaatgttctttgctcanctggnagggttgggtggggnatgggctcaaattnacttnctttataactncatccacagaaccgcagtccttganctgcaccggttcggcctgggcagcggtnctgaccgccaggngcnggaatnttg

SEQ ID NO: 516382 - DNA, 509 bp, Homo sapiens
  misc_feature (1)..(1): n is a, c, g, or t
  misc_feature (92)..(92): n is a, c, g, or t
  misc_feature (133)..(133): n is a, c, g, or t
  misc_feature (279)..(279): n is a, c, g, or t
  misc_feature (349)..(349): n is a, c, g, or t
  misc_feature (497)..(497): n is a, c, g, or t
nttgagcatgggagtgctcccatttgtttgtgcatctatgatttctttcagcagtgtttgtagttttccttgtagaggtctttgactccttngttaggtatattcctaagtatttttttttttggcagctgtngtaaaaggggtggagtttttaattggattctcggctgggccacggtgggtgtatagaagagcttctgattggtgtacataaatctggtatccagaaacttggctgaatcctttaatcagttctaggagctttcgggaggaggcttnagggtttccagggtaaacgatcatatggtcagcaaacagtgacagttggacttcctctttaccagttggnatgccctttctttcttcccctggtctgaatgtccgggctaggacttccagtactatgtggaagaggagtggtgagaacaggcatccttgtctggtactagttctcacaggtaaggcttcccacttttccccatccagtataaggttgnctgaaggtgtgt

SEQ ID NO: 516383 - DNA, 409 bp, Homo sapiens
tcagtataaagtgaaaaattctaaaaaatcacaggaatggccaggcacattggctcatgcctgtaatcccagcactttgggaggccgaggtgggtggatcagtggtcaggagttcgagaccagcctggccaacatggtgaaaccctgtctctactaaaaatacaaaaaaactagctgggtatggtggcgggcacctgtaattccagctactcaggaggcagaggttgcagtgagccaagatcacgccactgcacttcagcctggtgacaagagcaaaactccatctcaaaaaaaaaaaaaaaaaaaattccggggaactactttggaccaggttgtttgacagaacccagtgaccttttccatagtgatcaaggcacccaaaagcgggtctttctagactgatctatag

SEQ ID NO: 516384 - DNA, 581 bp, Homo sapiens
  misc_feature (15)..(15): n is a, c, g, or t
  misc_feature (26)..(26): n is a, c, g, or t
  misc_feature (50)..(50): n is a, c, g, or t
  misc_feature (55)..(55): n is a, c, g, or t
  misc_feature (61)..(61): n is a, c, g, or t
  misc_feature (88)..(88): n is a, c, g, or t
  misc_feature (105)..(105): n is a, c, g, or t
  misc_feature (112)..(112): n is a, c, g, or t
  misc_feature (122)..(122): n is a, c, g, or t
  misc_feature (124)..(124): n is a, c, g, or t
  misc_feature (129)..(129): n is a, c, g, or t
  misc_feature (139)..(139): n is a, c, g, or t
  misc_feature (150)..(150): n is a, c, g, or t
  misc_feature (158)..(158): n is a, c, g, or t
  misc_feature (164)..(164): n is a, c, g, or t
  misc_feature (166)..(166): n is a, c, g, or t
  misc_feature (183)..(183): n is a, c, g, or t
  misc_feature (193)..(193): n is a, c, g, or t
  misc_feature (197)..(197): n is a, c, g, or t
  misc_feature (200)..(200): n is a, c, g, or t
  misc_feature (213)..(213): n is a, c, g, or t
  misc_feature (229)..(229): n is a, c, g, or t
  misc_feature (234)..(234): n is a, c, g, or t
  misc_feature (256)..(256): n is a, c, g, or t
  misc_feature (266)..(266): n is a, c, g, or t
  misc_feature (277)..(277): n is a, c, g, or t
  misc_feature (284)..(284): n is a, c, g, or t
  misc_feature (297)..(297): n is a, c, g, or t
  misc_feature (299)..(299): n is a, c, g, or t
  misc_feature (323)..(323): n is a, c, g, or t
  misc_feature (336)..(336): n is a, c, g, or t
  misc_feature (347)..(348): n is a, c, g, or t
  misc_feature (353)..(353): n is a, c, g, or t
  misc_feature (371)..(371): n is a, c, g, or t
  misc_feature (391)..(391): n is a, c, g, or t
  misc_feature (398)..(399): n is a, c, g, or t
  misc_feature (422)..(422): n is a, c, g, or t
  misc_feature (440)..(440): n is a, c, g, or t
  misc_feature (459)..(459): n is a, c, g, or t
  misc_feature (493)..(493): n is a, c, g, or t
  misc_feature (509)..(509): n is a, c, g, or t
  misc_feature (532)..(532): n is a, c, g, or t
tgggtctacagtaantttattgtaanaaaaaaaccaggccgcaaaaagtntacanggttanagcagaagggggttctttccagtgggngaagcctgaacccagcnagcagcncgcaaagccnanaaaancccctttccnggtaccacccngcgccgcnggactnanagtgtgaaaagagaggntgcacaccanaatnaanaaagggaggaggnccaaccgggcagaaanaacancccaactggagaaacttgcacnaacattcaanaggatgccganaaaaagnacagtttcccacncnccactattctttgctgaaaagggngagggtacggcancagcagaaaannatgtncttcattcttaaaaaaanctcgaaaggatggagtgganggtcaannaagcagtagaatgggatgaaaanctgcaaaagtaaaaaaanctttgcgtgtaaggaaaanaacggcaataacaagggagaaaagagagccttcnctttttcttaaaaaanaaaggaaactgcattatttcccntgctggagtggcagcagcctcattggttttcataaaacatcatttctgc

SEQ ID NO: 516385 - DNA, 769 bp, Homo sapiens
  misc_feature (386)..(386): n is a, c, g, or t
tctcagctactcgggaggctgaggcaggagaatcgcttgaacccaggaggtggatgttgcagtgagccgagatcccgccactgcactgcagcctaggcgacagagcaagactccgtctcaaaaaaaaaaaaaaaaaaaagaaaagggaagggaatcccatttggtgatgattggggcaccctacttgagctggaggcttagcagtcgacaatgattttgggctggtctctgacctggaagcttttggaagtaagggttatggtctcttccctgaaagcttggttaatagtgggtaaattgggtggagttggagcttggagctggtcttagaaatataagactggtccacctgggggggacgggagacgctatattaggggagaacncccggtgtgttaacctcaagaattggctgacagagaaacggtgcgcctttttacgcccaacgccaaaaggtaacagatttaactattttctaagaacgggttgggacacacggaaggtcattgggcttcttggttgcccctctcacagaggcaaagctcaagggttgagagctctccataagggggttttacccccattttgtgagcggtttataatataatttcgccccgagggtttcctttataaaatattagctttaaaaacacccttattatttttgaggagacccattttccccgtaatttcacagggagaaaaagggcacacaaacaagaaaacaaagcgcggtccattttttaaaaaaccccctgggggagatatg

SEQ ID NO: 516386 - DNA, 461 bp, Homo sapiens
atggatcccctgctttgcagctgctgacggcagcacgaaaacggagatgacttcaggtcgtggctgagaatggcctgtgcgttggtattgcagcttggagctggaagaagagcagccagaactgaagatgtgtggctacaatggctctgtcccttctgtggaatctgttacaccaagaggtctcagtcctggtccctgaacccacagtgagctgtttagatgatccttcacatcttcctgaccaactggaagacactccaatcctcagtgaagactctctggagcccttcaactctctggcaccagaaccagtgagtggaggactggatggtattgatgacacggcgctgatgggtgccgcggacaagctggctcttgaagacaggcctgtgatatctggccttgattggccttccctccataatggtactggcttcaattactggccgatgaaaatcaaa

SEQ ID NO: 516387 - DNA, 510 bp, Homo sapiens
taaggttttaaaaaactaatttggcttttgttaaaatcaaaaggggggaaagttgttttttccaaaaaattttgaccaagtttgggtccaaaaaaagcgggataaaagggctttttttctacaattttgtggggacacggattggtggtaaaaaagaataactttttgtcttttgctaaaaaaaaagatatgggggaacaggattttgtggaattcttatagcgggtaaaaaaacctttcttttggggtaacctattagccggggcacttttttgcttctcacatttgggggttcaattacctgggaacttttggacccatgatcctcgttgcctcccaaacgaaacgcccctttgtgaaagtgtcttttgctccggcccaaaaagtatagctcgggcgagaacacgcatgattgcccaggccctttttggcgagtggggggtattaatgagaagaagacctgcgttgtataatcttaacagctgttgtacgaacgcaaagcccgcatac

SEQ ID NO: 516388 - DNA, 1108 bp, Homo sapiens
gcgcccgcgccctccgcgccttctccgccgtggacctcgtagcgaaagacgcccgtccgtccgcccagtccctcgtcctccctgcccacgcgggtcagcaccgcggccgccaccccgaccaccgttgcgcacggacctgtccgttgcacaccagctggtcggccgtcttcgtcgccgcgctcgccccggggctacttcgctgcgcagccacaaatgagctcccgcattcgccagggcgctcgcctttaggtcgtcaccctttctccacttgagccaggctggcgctctccacctgccccgctgcctgctcaactgccccctgtgagtggcgcccaaagtgcgcgccgggaagtcgggcctgtgtcctggcgcacggactgctgagctgctggtacagggtcatagcgccaagcagtttcaacgaggatctgcagcgagaaagcgcagtcccatgcgagcacacacaagggggctggactgcaacttcggcgccaagctccactcgctctgacaggggatctgcacgagctcatgtcaagagggcagacccgtgtgcaatatgacgctccagaaatctaccaaaacgggggaaagtttccagaccagactgtaacacatcagtgcacgatgtattcgatggggcagtgagggtgcattcctctgatgtcccaagaactatctcatccgcaactagggcatgtccgaacccttcggactggtcaaaggtatccgcggcagtgctgcgaggagtggcgccgagacagaggatcgtctcaagggaccaatggaggcacagccacggcccttgcaaggacctagagtacacagacaaccaaggctgagtacatagaccacagggaccgcgtgccaatgcgaaccgcacccacatgaacgagaacacgggattgggagagggacaccgcgatgggacaaccctccaaggcacaaacggctggtcacaacaagagcgacccgggacaagccgaggaagagcaatcaacgaggcacgcacaaaaagcgccaggagacacgcacgtggagcagctgaaacaaacgagaaactaagagtgggcagtgaaacgccagaacaatgagggagtagaaaaag

SEQ ID NO: 516389 - DNA, 306 bp, Homo sapiens
tgcgttcgcaggacgttggacgaaagaagtgactatctcacttgcaggatcaggccgaggggcgatggcaacatgcacatcaccctctgttgacttcatcgtgccctggaacacccttagcagccacccagaagaagagcctgaaccacaggtaccacatgggctgcgagtgcaagatcacgcgctgccccatgatcccgctgctacatctcctccccggacgagtgcctctggatggactgggtcacagagaagaacatcaacgggcaccaggccaagttcttcgcctgccctgcgaacctatga

SEQ ID NO: 516390 - DNA, 1148 bp, Homo sapiens
caatactccgttgcactgggtttgctccctgattaaagatgcctatcaggccaagaccatctgctcccatccttggtgaagtgtgacttcgaattagtttgcacttcctattggataggtagagcccactgctcattgtataatgccccgaggcctagagtggcagacaatgatgccgagtctgaagccatcctctcatgcctgttcctcccaataggccagggtggccaggggtggtgagggcagttctgagccaggcaaacacataacaataaaaaccaaactctgtggtcaggcaaacaaaaaaatagagggagagctagaacataaaacatacactgaaacgacaggggggccggcgctcgcaagcaagcttgccaccgcaggagcgtgtgcaggcctgatatgatatcctggccaccgcacaattgatgaataacaagcgggacccccctgagtagatggcgtcaacataaagaatgacaggtaagaggaggccagagaaggaagtaagtgaacacagtcgagtaggagtactaagtggcgcaaacattgcagttgaaaacgcgcgcggaagattccccagttgttgaagatagggagcagaccactgacatacacaggccgggagggggggggacgacaatacaatgtctttgggagacaacagtatgtatgcctgtataaacgaacgtacatattaacgttggattatccacaaaggtagggataggaaataaaagatagcgacgatcggttacttggacgaacgatgaagtacgttggtgtttgtagaacataagcttgcaagtacggagtgaaagcaatgcgtacatggcagtgaaagttagaagaaaaaaatgagtgagcagcgtgaatgaaatgagagtatatactggttgttgtccctctgtagcaacaaaatttatattctacacagaaaaggtggagcagcgaagtgaacaggagacagtaaagaaacatggcagagtgaaaacgaaatttgaaatgtaaaaagaaaggactatagaccgtccccaaagtcgatggagagagagagacgataacactcgaaattgagacaaggaatgtgcagactgagtagaatgtgaaaatatctaaagagaaaaggaccagtgctagaagag

SEQ ID NO: 516391 - DNA, 320 bp, Homo sapiens
taatacatgggcgactgcttcaacaagtcagtatcacaagtgaacggaagtgggtaggctgttcttgttaaaagagacaaacggggctgggcatggtggctcacgcctatatcctagaactttgggaggccgaggcgggcagatcacttgaggtcaggagttcaaaaccagcctggccaacatggtttagtagaaaccctgtctctactaaaaatacaaaaaagttagctgggcgtggtggtgcgtacctgtaatcccagctatttgggaggctgagaaacggctaccacgtccaaggaaggcagaagtgcgcctgggtg

SEQ ID NO: 516392 - DNA, 725 bp, Homo sapiens
agattcccagggctagtccagttccaaggaagcagggttctacagttgtttgtcctgaagggcaaggtacccagttcagccaatgccgttttcctgggatatgggggtgccatgttggctcatccctggcaggtgtggctgctcagctcagccaagacactgattccctgtgaagcagggcagtgcttcagctctcgtgcagtggggggtgtgactgcttagactggccaagacactgattccctggaaagcagggcaccaagtcagctcaggctccaaggggcagggcacaatggcagctgggaggggaggggcacagcagcgtggccccgcaggtggggtgtatgctgtgatgtggacatcatttgttcccaccagccatttgaaatttcatccatttgaaatttgattccaaatgtggtggtgtgggaggtggggcctagtgggaggtatttgggtcacagggcagatcctttatgaatagattaatgccttttcatgggactggattagttaccaggagtggattgttatcagagtgagttcagcttcctagactctcgtgtttcctctcttgccatgtgagccccttgcatacacctgtttccccttccactttccctatgagatgaagcagcacaagaccctcgccagttgtgctgcccaatctcggacttttcagacacaagcagggtgagccaaataaaccttttttataaaataaa

SEQ ID NO: 516393 - DNA, 306 bp, Homo sapiens
ccgacctgcacgctcatacccctgctgtctttaaaatagccagttggaattatcttagactgtgcggtccaaccctacccaataggggaaaaacaagcagtagggactagctgcattaataataagatccccttctcctcccttgtctggtgtgctcttgccattgctccatccgtgagaggcacccttttatagaagtaaattgccttgctgagcaaacttttgcctgagtgctatattcacttggcagcaccgagcatttacttccaacaacatcaagtctaaaatgttgttctctaaaacctc

SEQ ID NO: 516394 - DNA, 527 bp, Homo sapiens
acggctcgggcgccccacgcccgccttccttcttctcccagcatgccccccccacgtgcagcacagcgcggcacgcagtcgacaggaaagggacggagccaagatggggggcgaggggacgactcgttgtaccccatcgcggtgctcgatatgacgaacgtccgcaattgaggacgttcagtcttcgcctcagacagcgatcaagaagctgtccaccatcgccttggcccttggggttgaacggacccgagaggtgagcttcatgcctttccttacagataccatctatgatgaagatgaggtcctcctggcctggcagaacagctgggaaccttcactaccctggtgggaggcccagagtacgtgcactgcctgctgccaccgtgggagtcgctggccacagtggaggagacagggtgcgggacaaggcagggagtccttacgggccatctcacacgagcactcgccctctgacctggaggcgcacttgtgccggctagtgaagcggcatggcgggcggtgactgt

SEQ ID NO: 516395 - DNA, 424 bp, Homo sapiens
  misc_feature (303)..(303): n is a, c, g, or t
  misc_feature (319)..(319): n is a, c, g, or t
  misc_feature (414)..(414): n is a, c, g, or t
tcgggcctgaccaatccagacgaggcagagagcagcagcgactcaagggccgtgtgtacatatgtaaatgagaaatagacatgtcaacaagatacattcatttctcccggaatgtgtattgtttttattttacaaaacagagaaacaacaaaaggcttggaactccttcattctacgtggaatactagatcccgtttgttagccttcgtgactccgtccttgtctcctgtaatatactgaccctgtgtgcagaggcgtttttgttcccttttgtttttatttttacctacatgtactatttancttcctgtgtcctggncctgccacctggtgtatttttaagggtgccaatgggaaaccaatggaagaggaaaccggggggatttcaagaaggaaaatttgtaaccaaattcnatataccttt

SEQ ID NO: 516396 - DNA, 271 bp, Homo sapiens
agcaaggcaaccttgatatcaccagcgatcaaagaagcatccaaaccaccagcagaactaattttatcgaaggcttcaatcataccgattacagtacccataaaccctaacatcggagcgatagagataaatagggaaatccaagaaacgtttttctctaattgtcccttttggacaccgccgtaagataccactgatttttcgaccatatcaataccttcaccagcgcggtctaaaccttgatagaagatagaggcaacagggccttttg

SEQ ID NO: 516397 - DNA, 424 bp, Homo sapiens
  misc_feature (399)..(399): n is a, c, g, or t
acctgcactagccttagacacggatcttgcgctgcttatgcgatctggtctgtgggtgacaccatgggcatgcctgcgcacatggctgatgacttccctggaccctgccaccttgagtgatccacacatggtcttaactatgcttaacctcatgccactagtgaagagcgctcttggacattacgaggtgatcgccatgctatgcttgctatcgaccgatgtccttgattacgctttgatcttgacggaggagcgggacttgtgcaactgatgagctatttatagcacacctatacagatgctgtgtctatactagcgctagacactcgactaagattgttatgctgtctctccaggggacccagcagtgctcattctcgtgcgtgtgtgtgtgcccgngtccctgtggcctatagtgagtcgg

SEQ ID NO: 516398 - DNA, 146 bp, Homo sapiens
tggcagggaagggtgcctggctgggctttggggctggtgggataggagggtgcccctgggaacacagtgcccaagcgaactgaggccgccaaaggctttgagctgctgtaccagcccgaggtggtacgtctctacctctccctcct

SEQ ID NO: 516399 - DNA, 149 bp, Homo sapiens
cgggtcgggagtgggtaatttgcgcgctgctgcttcttggtgtggtagtcgctccttctgattcccgtcaccgtgtatatgatagggcagacgttcgaatgggtcgtcgccgccacgtggtggcgaccccatttcgtgcatctgaccca

SEQ ID NO: 516400 - DNA, 213 bp, Homo sapiens
aatttccgctctctggggactgagtggggaccatccttctgaccatctaaaacattttaaatcgcgggttttgcccactgtgtgttccttaaccttaggggttccaactgccaaagccaccagagcccccttctgttgaggtggagtactacaccattgccgaattccaatcgtgcatttccgatggcatcagctttcggggtggacagaagg

SEQ ID NO: 516401 - DNA, 505 bp, Homo sapiens
gttgacatgtgagctacagccttcgtgcatcacataaccagcggagagcctgctcttgggatgacacaccgatcatcgagagcatagagaggtatggctctgcaattgtatctctgtctaccatgccacgtgcttcccaactgcatgaggctctgtggtagagttcctgatgactaaagacttttgatatgaagatgatacatcgttgggagtgataattgttcatctagtcacagaaccaaagccaccacagttgatgtgttcttccaggatcacatgaggtctggtatgctataagaccatttgctcattgcgaagagggtgtactgaaagatccagtagcttgacactatccagtgtttcacgaggtggggtgtgtccaataagacactgaggaaatcacagctgatgactgatctctatgactcggttgccagcctacggtctcgtggtagtaatttgagatgcatcatcatactcacagagcattgccggagttatctgc

SEQ ID NO: 516402 - DNA, 223 bp, Homo sapiens
gcatagtactatagtaaaaagtgctacagtaaccaaccacatttaagaaagagtacttagtagagaaacaataagacaaaataccaaaggtagtacacaataaatttatgtatacagctacatgatctaaaagtaacaggtcccaggagacccatcctggaacttagaaagtgtatccttcagcaggtagtctctggtacaacgcttttgatcttcctcttcc

SEQ ID NO: 516403 - DNA, 328 bp, Homo sapiens
  misc_feature (198)..(198): n is a, c, g, or t
cccgggaacccctttgcccccttgggccttttttggggcccttataacccggtttgcccaaaaaccggtgggtgccggggcggaattcccgggttttttttacccccggggccccccccggggcccatttactgggagggggtggtttttcccggggggggaaagcccccaggggtttttggggccccccccaaaagnctaaagaataatgccagggggggggggtttaaaccccccccaaatttttaaatggaatttttttttcccatttttcccaagggggggagaaaaggggtcccggggggcccaaaagcccgggttaaaccca

SEQ ID NO: 516404 - DNA, 374 bp, Homo sapiens
  misc_feature (37)..(37): n is a, c, g, or t
  misc_feature (76)..(76): n is a, c, g, or t
  misc_feature (165)..(165): n is a, c, g, or t
  misc_feature (242)..(242): n is a, c, g, or t
  misc_feature (371)..(371): n is a, c, g, or t
gaggacctgagctcctggaccgcggcggacacccgcntccagatcacccagcgcaagtgggaggcggcccgtgtgnggacagggacagagcctacctggagggcctgtgcgtggagtcgctccgcagatacctggagaacgggaaggagacgctgcagccgcggnaccccccaaagacacatgtgacccaccaccccatctcttgaccatgaggtcacccttgaggtgcttgggccctgggntttcttacccttgcggagattcacacttgacctgggcagcgggatggcgaggaccaaatttaggacaccgagtttgttggaggccagaccagcaggagttagaacttttccagaatttgggcagttttngtt

SEQ ID NO: 516405 - DNA, 967 bp, Homo sapiens
cggacgcgtggtgtcgggccagagcatagtgtcctcgatctctggaggactaaaccacccaaaggccaggcccccactgatagaagctccagagatggaacctccaatgagcctagtcatgaaggacagaaaaagcagaggactataccatggagatcaaagtcacctgagattctgtcttctactaaggcaggctgtcaggatgaggaccagtgggacggtgcgcaggccatggaaaacagaaccacctggctagaccctaggaagccaggagaggatcaggttccaaatggggaactgctagtgatacatgggcatgtgagacaagaagctcatcctagcctccctgaccagctctggcttctgctcctgcccctggtccatagtgtgactagtggggccagtgagaagctggagcagagagctggcatgagtatagggaaggaggatcgtgacacatttgcaatcctctgtcctgtagctcatatccaaatttgtggataagggggccggagtgcagtggcctcacacctgtaatcccagcatcttttgggaggccataggtgagtggatcatctgaggtcagaagtttgcgaccaggctgaccaacatggtgaaatgaaaccccatctcaataaaatataaaaattaggcaggcgtgtggtgcatgcctgtagtccccaggtactcgggagggtgagaccggagaatcgcttgaaccccaggagattgggatttgcagtagggcagatgatgccctgattccagcctgggctacagagcgagaccggctcaaaaaccaatggttggctaagagttcctgcggacgtaatgagaagctgtggaaaaagggtgcttatttaacacaaaagggggccgaaaaccggggccatcacccttgaaggcaagataaaaggcgaacgtgaaagtgttgcttgtgacaaccatttgttgtgtaacaatatgt

SEQ ID NO: 516406 - DNA, 150 bp, Homo sapiens
ctgagcagaagatatactgatattgcaaatacaggtgattgctactttcttctttgaactttcctgattttttaacttaaaaaacacttattcacacagtgttaccataatactattaatttttaaaatgattgtatacctttcccatat

SEQ ID NO: 516407 - DNA, 675 bp, Homo sapiens
attgagcacactttatcagtgtattaggtttccagtggtagcaatgggtgtgctgaagctgggtggattggactgtatcagaaccaaggtactttcagctgcagactgaccatacccctgtccacctggcgttgctggatgagatcagcacctgccaccagctcctgcacccccaggtcctgcagctgcttgtaaagctttttgagactgagcactcccagctggacgtgatggagcagcttgagttgaagaagacactgctggcacaggatggttcacctgtcctgagctcgcaggttatgctacttccctgtctgctcagccttacatccgacacagtgctctgcgccgcacagctggcacactgcacacttctcactcacttcgctatctttgtcacctgcagcgctgctggacgctcacttgctcctccttatacctctgacttcgtgcaacttttcctccccatcctggcagaatgacagcatcgcaggtaccatcaaaacggaacggcgagcactgaccctgtgacggcagctctatagctcactgcaaatctaacttcatcatggtgaactaatttagagcatcctccagagctgaagcagaacattccagaacccgttgtggaaaaaccctttcaagaagctgttccagaggctcgggcagcgtctt

SEQ ID NO: 516408 - DNA, 287 bp, Homo sapiens
tagctggattacagacatgcaccaccatatccagctaaatttgtatttttagcagaaacgggggtttttcatcatgaacaacatgctctcaccctcctgacttaagaagatccatctcccttgtcctcctaaagacctgagattacagccggcccctactccccccccttttctaatttatgaaaaacctcccctaggctgaaaccccttgtttttacactccatccctcatctgatcctcccagagggccacctttgccagcatgcccagcagccccttttccttt

SEQ ID NO: 516409 - DNA, 398 bp, Homo sapiens
gcggttaccgactgcatctgtgctcaaaacagtgctcttaactcacgcctattcccaaatctataagaaccagtgataatcacaccaccctttgtgactcctttttcggactcagcccgccgcacccaggtgaaataaacagccatgttgctcacacaaagcatgtttggtggtctcttcacacagacacgtgagacaggagttcgagaccagcctggccaatctggtgaaactctatgtctctactaaaaatacaaaaattagctgggcatggtggcgggcacctgtaatcccagctactcgggaagctgagggatgtatgaagtcagataggcgagtaatataacaataaatcctagaagtcagatatgtaagtattgagaggcacagattgcagt

SEQ ID NO: 516410 - DNA, 301 bp, Homo sapiens
ccgaggatccctgtgtcgtggtcgcgcggccgctcgcttaggcgggctagagcgattagaatgtgcggccagggactcgactgtatattaaacaagcttcggaagccccgagtgtgttgacgcgatgtgattctgaccagtgctctgaatgtcaaagtgaagaactccaatgaagcgcggtacacggcgagagtaactatgactctacttaaggtaggcaaatgcctcgtcatctaaattagtgacgcgcatgaatggatgaacgagattcccactggtccttaacctactataccagcga

SEQ ID NO: 516411 - DNA, 1510 bp, Homo sapiens
  misc_feature (363)..(363): n is a, c, g, or t
ggctcaacgctcataatccctatctagtcccaaatcggacctattgtcctcctagtctgagacacctgtcaagcactcacagatgcgagcctcagtctatcactaggtctacagctcctgccaaccacatagaaggccttatgatcttactgtcacatgatcctagaacacttactaccagatagctgaagaatcttactctggaccccgaacgtctcatgatctgagctagcagctatgatcctagattgtgacgcaggtccaatcacacttaatgatgacatgctagaagcgaggctagaccagctagacacctacaagtaagtcgaggctagtctactcacgcctactgacgtgatgtcntgtgtagaaccgactagtccaagcacaacacagccgtagtctttacacatgatattgctccgaaaccgtgtttttgcactccgtgagccgcctcgtaaagcaataggccctccatacctgaaatgaactttaattctacccatggctgtcgctaaccacctttctaggagattcaagtgtgtccaaaagtgcccaatctagacctaaagtctaaatcgctatgttctgcaaaccctgacttatatctacacccaattgaagatacatctttctcttcacctatctatccttaatgtacttaaactcttcccccgcttatctcaaatcacttagtccctctctcaaagttaactaaaccaaattctctagaccaatggtccaaccgacgtagaagcgataatacctcctaatataggtccacataaggtaaattccttaattcggtctccggaacaaaacccctaatcaggcgtttgaaattcactctcaaaactcttatggcggacagtgaaatacttattttcgacctcccagaaaattggaacggtgcctagagcgcggattgcaccaaggttacattcagcctccttcgaaacacgccgcccatagaggggcaaccgactgagacattttgcgctttcaaattcccattaacgaaacgcgcttcaatcattaaagcgtcttcccccagttttccccccccctataaacgtacaaattttctctgccagctttgagaattgtctaaacacatctttcctagcgaaagacaactcctctttaagaagtcatacccgactttcacatacgcatatctccataaagctttatgcttccgaggctgtcaatccggacgtgtggagccacccacaacggaaacacccttaaccttcgaaagggaggattcccctctgataaggaaacccgagacgcaccaaatccgggttgccacaagtttaccttgaaccctgtaggccgtaatacacgcacagaggataaaagcgcgtgtatacttgacactttgcggatgcaaacaatggcagttaccccctcttttttataccgggcaagcacatggcgaccgtgtgaattgaaacacatccccgttaaagaggggcccaatggtgtcggacaaggcgcccccacg

SEQ ID NO: 516412 - DNA, 1209 bp, Homo sapiens
  misc_feature (182)..(182): n is a, c, g, or t
  misc_feature (195)..(195): n is a, c, g, or t
  misc_feature (265)..(265): n is a, c, g, or t
  misc_feature (274)..(274): n is a, c, g, or t
ggtagatacgaggctctgaagaaatctctttccaagcaaaagggagatgaatcttacctctcgaagttcccaaacacccgaaagacactgaaccagaatggatgcccatacatccgcctaaatatgtacgagagatcgaagagtggagtacgctctaacgttattctcggactagcctgtgnattgagcatactngagcatataaatggccatactttaggcgacgtccgatcggtgtggacatagcaacataccgagtctcgtnttctactcnatttcaagtctcaagcttgttcctccatacggtggcaaccatagaggatctggaggagaccgacgacattagcgatgctacgctcgttggtagacacctcacctaaaatttacataggcgtgtcaacgcgttctcataaattagcacgcttaactgcttagtcattttctacgcgtggcttgcaaaggtttgttgcttcttcgaatcctctatttggcaccaatatacaacctagtttcaccaacaataaggcaatgtctgtgccattgtaccttatttaattgggtatacagatgtgtttggcattacgcgcgctctatttccacctctacaagtttactacgggtgcattcgaagagggcgtagacctggaaatactcgctttcaaactttgtgaagcaatgggttccccttttgcatgataatcctcatgttattagtcgttacatactataaggattgatcaaaattggactgtcttgaggaacaatgggagagctttgtgggtacaaatgcatcaagtacgacctccatccctgcgcaaattgcttgcacaacacctgttcacgagggcactttggaattcaagtacacccacatagttggatcttgaaagctgggttaaaatctgggtcagtcccccaaagagtcctgtggccccaccaagacggggaacacggttgggttttgtctaaaacatcttctgaagtacaaacaccccaacttttattaagaggttatcaattcaacgtaattacactgggtgtctacatactacataggggggcaggacggcacgctaagacacacttaaccaggaaaagcccacgagccaagcacgatcagtacgaatcacacataaaggacatgggcaagttaccaaaaagcaacgcatctcaagggtgggttggatgtagaacaaccaaaagaaacta

SEQ ID NO: 516413 - DNA, 152 bp, Homo sapiens
gaaagaggggccttggggcccccccttcccccttttttttcccccaactttaaaggtataaagggttttggtttccctgggggggggggggggcacccaggggtttcctgtacctttattttggccccgttgaataaaaggggcccccttta

SEQ ID NO: 516414 - DNA, 214 bp, Homo sapiens
cactactgccaccatctctaccgctgccagtggaggtgttccactgctcctgtttattcctgagctccaaatgcctatgcaatgtgaatacctccttataaaatgacacatgaattatcataaaaccactgaattcatttacaaggtggagtgggcaagttcacattttttacaagcatattttgggggcctaaatgaggcaaatacaataccg

SEQ ID NO: 516415 - DNA, 180 bp, Homo sapiens
  misc_feature (148)..(148): n is a, c, g, or t
gtccgtgtttgcgtggcttctgcggaaaatagtttgaaagttcctcaaaagttaacacagattatcataagactcaacaattctactcataggttatcctagagatttgaaaacatagactcaagattgggcactggtgactcacgcnctatatcccagcacttttgaaggctgaggtgg

SEQ ID NO: 516416 - DNA, 990 bp, Homo sapiens
aagggtcggaggcatacgagaatggtggtgtaccattgatatggagtgaggtgttccaaattttatggttgatgtgggaggtgttaccgctgactgacgtaatgtccgagagtggaggtgccgagaatatgacggtttagtagcaggacgacgagcgaatgtttgaactatctccccttgctcagtactttatgtgggctggggatcaaagagtaatagcatgaggaatgtcgctatgctcatagtgagagggacctagattggattacgatgaccagatggtagtatggaagtgaacatttatcctaaatcgggtgcactgatacttgaggctagaagaatgctatgtgttgataatatgagtgacttttattgtgccactgtagaacgaacgtgtggagtgaaggtctatactattggacgtgcggaaatatcattgctagggcaggagaatactctaagcgggtggagcaccagtggaatttgacaactgttgttcacttttcaattagattcgtggcttggggaatgaatattgtaggttatgcgtaggcaaggaaaccaagttaaattgtttttgactgcgaaatatagggtagttgaaaatatctataccatgaaaagcattttcttttgggggcggtttatgaacgcccatagaaagatttacttgacataaataggaagggaggtggggtgaaccgtaaccgtgttataactggcgccaaaggagttttcacctggagctactggctgccatacattttgtccgttgtttttcacacactttccacactccctcggggttggacctgccacttcctggaaaattggtcctgagagcacaaggtgaggtggcactggactttgaacagaggcacaaggagcagaaaataattacgggggagaagaaccgggataaacttcaaagtccatcgacagcacagggggtcctccacatgtgggagcaaatgctccttcgacaagcac

SEQ ID NO: 516417 - DNA, 708 bp, Homo sapiens
  misc_feature (675)..(675): n is a, c, g, or t
  misc_feature (689)..(689): n is a, c, g, or t
  misc_feature (707)..(707): n is a, c, g, or t
cgctaacggttaaaggatgagcctccattcactaacaatttcgattaaggaaataaccattggggatgggcgcggtggctcatgcctgtaattgcagcaccctgggagggtgaggtgggcagactgcctgagcccatcagttcatgaccagcctgggcaacaagagcaaaactccatctcaaaataaagtgaggggtgtttatccttacggtaaccatgaaaagaaacttcctgacagacagaaaggcaaacagaacgggcagatgtgagactgcaagtatgactgtccatggtggtcagtttgcaaagcactgcttctcgtattttctctgaaagccacagtgcctcttagtgttctctagacaccaaatttcaggtaggccggatgcagtgattcctgcctgtgctcccagcactttgggaggcagaggcgggcaaatcgcctgagctcaggagttcaagaccaactggggcaacgtggtgagaccctgtctctacaaaaaatacaaaaattagccgggtgtggtggtgcacgcctgtactcctggctactcaagaggctgaggtgggaggatcacttgaccccaagagtttgaagctgcagtgaggcaagattgtgccactgcactccagcctcagtgacaaatgagattctgtcgacaaaaaaaaagaaanaggcggccgctcgnattgtcggacgcggccgng

SEQ ID NO: 516418 - DNA, 253 bp, Homo sapiens
tgatagcgttagggctgcattcctagaccccttcacaggcagatagggcccaacagagagaacattctgacatatctatgaagtacctctcccacaccaggcatactcttactttaaaaaaaacaaaaatggccggagggaactctgaagcctcttaataatattcaaagagaagagagacctgtttgccaatttaaagaatgtgtcacttagataatcctccgtgtaaggatatttacatggcaaatcatca

SEQ ID NO: 516419 - DNA, 234 bp, Homo sapiens
accgcatactcgggtacaaaaaaagaaaagaggggctaagagttcccactgtggctcagtggtaacgagcccaactagtatccatgaggacacaggtttgatccctggcctcactcaatgggttaaggatccgggattgctgtgagctgtggtgtaggttgcagacgtggctcagatcctgagttgctgtggctgtggtgcaggcctgtagctgaggctctgattcaacccctg

SEQ ID NO: 516420 - DNA, 781 bp, Homo sapiens
  misc_feature (610)..(610): n is a, c, g, or t
gtatcgtctttgacacgcgggaccagaccccttgctacaacaggaatccggacggaacataaccagggactcttttctagccttcgaccgccctccgatgtactctcagctagcaacctacgtgaccatcttataggacatgtcctgcttatgggaacagtcaacaccgcttatgttgttagattgttcttgacaaccaaccatgagctcgcacattcgtcagaatcattccaccgtcgttgaggcagcacgtaacagcctcgccaatctggacctgcaagactcctacaacaacctttctctgggcttatatttggacaaaaatgatgtggctctcgaaggcgcaagccacttattccggaaattggcgaggagaaacaggaggcctatgagcggttaatagagacgcaaaccagggttgggggggagactctttgcatgtactcaaaaagcccactttagacgagtgggggaaaaccccagacgccatgaaaggtggcatgggacggggagaaaaagcaaaccctggcacttgggaatacttatacccggggatactgccaaacgggacccccatctctgggaatttcatggagacctacttcctggntgaggaaggagaagttaaaaaaaaaatgggggaaaccttaccaaacctcaacaggttggttgtccctagagaggggttggggaaatttttttataaagggccaatttttaatctcattaaagtctctttgccaaattattttaaagggccgttgaaaaaaaaaggcttttg

SEQ ID NO: 516421 - DNA, 1399 bp, Homo sapiens
  misc_feature (132)..(132): n is a, c, g, or t
  misc_feature (621)..(621): n is a, c, g, or t
  misc_feature (629)..(629): n is a, c, g, or t
aacctgtgacgaaaatgaatgcttcttggggcagaaagatgacaatcgcaaacctcgcccgatcgggtgagtagccagtaggatggccctgttgaatgttgcactcgtctttatcatcgacgactgaatagnagaagactcttttgaatagaagaacatcatatactagtgacaacttgccagtaaggagcatgccgttgaacttttatggccccgggaactcacttccagcttcgctgtaaatgcgtactacaagctgcatatgacaatgacactgtggcagtaagcttgcactgcatgaaccgctgtgcacttgtgctctgcttgcacaacacaagcatcggagtgagaacatatcggagggaaatcgcattaggaggagaaggcttatcagatgctgcccaaaatactaggagaacctcgaaagctgtgcaccaatggtccctctcatgcaggtatattgtggaagcacatgcagacttatcgaatagctcataggggcatcagttcagcatcggcacatggagcacaaaggaggtatatttccctgaaaagcatgataggttccgcataccagagttctccgaaaggatatcagctgaaaagagaagcgtgtaaccncaaggagnggtaccctaatctacctggggaacattggcatcgtcccaattatgggagggaactttcttttgctttgtgggtaaaagtcggtgagccatgggaattgcgtaaccatggcgcgcgcctggggatcacccttttggcgtccaatatcggttacattgaattaccgtagttttgaacacccacaagttgcgagaaaggatatttttcgggagtgcctttccccacatgtttgaaataaccggtaggatcacgcggggaccacttggccttagggtagaaaataatataccaccgttatcctttggtttccgggggaacgagacaaattttccggacaaggttgtggggctcaattttgtggggcctagaaataggctggtgaaatataatccttggagggtagaactgaaattaggccggtggcgtaggaatacggtatttgcacatttctcctagtataaatgggctgttggccttagggaattgaaacattggcttatcggcggaggaacggtgcaaaacaggggacatttgctgtgtctgtgggcccaaagagggattcaacttttaattggcgtcttggccagggtctaggacaggaggcactgggttaccttgttccctcggtgggagtacacattgggaaattatacggttagattaggcagactaattgggcatatatgtagatgtggggctattgcgccatgggtactttgaacctaccctatgggttcctctgttggccctggagtgagacattgggagagaa

SEQ ID NO: 516422 - DNA, 529 bp, Homo sapiens
  misc_feature (47)..(47): n is a, c, g, or t
  misc_feature (60)..(60): n is a, c, g, or t
  misc_feature (68)..(68): n is a, c, g, or t
  misc_feature (73)..(73): n is a, c, g, or t
aagtttcctgggcctcccacattatccagaacttgtaagtcaattanccctcttttcggnataaaganctacntaagctgggtaattcataaagaaaataggcttaattggctgatggatcttcaggtcatataggaagcatggttgcagaggcctcaggaaacttacaatcatggcagaaggtgaatgggaagcagacacagcctgcatggctgaagcaggaggaagagagagaagggggaggtgctacacacttttaaacaaccagatctcatgagaactcaccatcacaagaacagcaagggggaagtttgcccccacgatccaatcacttcccaccaggcctgtcctccaacattgggggttataattcaacatgagattggggcaagaacacaaatccaaaccatatcaggctgggcacagggactcatgcctgtaatcctggcactttgggaggccaaagcggaggattgtttgagtccaggagtttgagaccagcttggtcaacatagcgagaacgactcag

SEQ ID NO: 516423 - DNA, 167 bp, Homo sapiens
cgcgcccggatccctcagggttagcaggacatgagggagtgtagactctgatgcggtgagctgggccggagccctcggagctagcctcagcttagtgtggcagcacgccctgccttgtggagccacgggctcccgggacggactccccggctctcccccaggacgcc

SEQ ID NO: 516424 - DNA, 556 bp, Homo sapiens
aggtgactctacaggatcccagaagatcacctatcgtgcacagaagatcacctctacacaaataaactagaaaatccagaagaaatggataaattcctggatacatacaccctcccaagactaaaccaggaagaagtcgaatccctgaatagaccaataacaagttctgaaattgaggcggtaattaatagcctaccaaccaaaaaaagtccaggaccagacagattcacagccgaattctaccagaggtacaaagaggagctggtaccattccttctgaaactattccaaacagaaaaagagggaatcctccctaattcattttaatgaggccagcatcatcctgataccaaaacctggcagacacacaacaaaaaaagaaaatttcaggccaatatccctcatgaacatctatgcgaaggatatgaacagacacttctcaaaagaagacatttatgtggccaagaaacatatgaaaaaaaagctcatcatcactggtcattagagaaacacaaatcaaaaccacaatgagaaagcatctcatgccagttagaat

SEQ ID NO: 516425 - DNA, 741 bp, Homo sapiens
ggctgcgctctccctccacaccgccttgaaagctgagggagccggctcggctctgccagcccaggaaggggctcccacagtgcagcggggctgaaggactcctcaagtgccaccaaagtggagcccaggcagaggaggcgccgagagcgagcgagggctgcctgccaagccacgctgttcacgtctcagcaatagactgtctgtgagaaagacttcaccttcatctctgatctcaaaatggagaaggcccgtggatgagatccaagcaaagctaagcagactcaaccacaggtggaaggagcacagtgccgctgcaagaggggggcattaagaagcaaattcttttggaagaggtacctgagatggagaatttgtgtaatcgcagcaaaccttgataaggcacagggaaatattacaaaaagacccaggaagaaaattggttacaactttcaagagtgattccttaaagttatgggaacacggttccagggactaaccgtggtgcaggattgttgcaggttgggcctaccatgtgggtacacttattgtggccatggcaaggtttgcgtgcatctattaaccccaattacctaggttattaaggcccggttttctggtcattctggatggatagatctttcggtgaaacagcacctgtgtctctaacttcaaaatctggctgtcagtgccctaactttttgccgtggttctcaatttttcacaaattctgggattgctgac

SEQ ID NO: 516426 - DNA, 192 bp, Homo sapiens
gggccctgcggtcatcttcgatgcaagtgcatcatctcaactgaagcttcagcgcacctggtattcatctcgttctcagcgatccttctgtcctgcatcgactggctgatcaaaataaacagcgacaaaaagatcgcctcgcacgacgtccagaaacacaggaacggaaaccggaaacggtccggtgccccg

SEQ ID NO: 516427 - DNA, 190 bp, Homo sapiens
  misc_feature (1)..(1): n is a, c, g, or t
naaatttattttcctccaaaggagtttcactggagaagcaaactatttcttaaggggaggttgaccagcaatagatggccaacagaaaataaaactcaatggtacctttggggctctcttacctcataatgccctgtctgggttttgaattttaaaaaatattgaaggtagagtcgggtgtggtcgacgc

SEQ ID NO: 516428 - DNA, 1699 bp, Homo sapiens
  misc_feature (850)..(850): n is a, c, g, or t
gatggcccaggtgatacaactggccgcatggttccatggtgtgatggtttctttccaggcccttcatgctcaccagacgacttcccatgggggccccacggtccaaggccttgacgcgatatgcctgacgttcacgaccatcctgcggatgcgtcgctaccctgggacatttgcagccgcactaccctttccatggtggccgcaatggacgcgccttgccgcacagactccatggttgctactgcgacgacttggtgcggacgagattgcatgaggcgtgagcgtcacttcactcgaatggttattggcacagtgcgtggcgtctgcctaggaagatcataggggccgtggttgatgacaaacccccgttattccctaagttcccctactgcaccgagtgcctaaggcgctagattgtgggtcgatgtgagcaccatgtggtccctagtgatttatctgctcgcgacacctctgtttgtggaagccattcccacgcaacgatgcgaacacaacttccgtataacccactttagcatgcgctcactacaatgttcccctgtccatgggttaccttgcgagtactgcgctatgcagagggcagagctgtggccccctccctgggatatatatccgcatgtacatttgctggtaagtttcccctgtgttgtgagttgtccctaggaaccaaactaatgtcatgtctgttaacacatttatttgcctagcaacccataatttaacatgaataaacgccccaacttctgtgcagcgcagagggaccgaccacagggaccgagaggtgacattaaaaattttattcccccagacatccagggccccacatttgggnccccctgtggatggcgtggcccccccaaatggtctctggcaccaattggaagtgctggccgaatttgtggatgcccatacaaagcaactgttagacaaccggaggaatacccctttgtgtggctttcgtgtggccgaaacgattggtgaacagtggctgtttgccccggagacgaacgttataccacacccgggagaccgccccgtaagtggccccggttgcccttagaagagacaagacgggccgcgcgctgtaggagccacgccccactgatcgatgtaccgcgaacgcgtgggcaccgaacacgacatttggcgtcgtgtgcccggcccggagggaaccacattatcccgttggcaaccgcaggatatacctccggcaagccgcgaacaaagcgcgtggtttacagaccgaaccattggagtgtctgaaaactcccccacccaccccgagggtgactggcgcagattcagtgcgaccacggcaaatgtggtgcctgtggcgcgcagtacacatggcaccaccgtagcagtgtggtggtcgggcgccagtgtggtgaggcccaatggaagccaaatacacccgtttggaccccgtcgttggtgggagaccaaaggtactctgcgccaggggtagttgaccctattaccgcgttgttacattgtgtgtcgtgcacaacaccacggggccttcttatctgacgggactataggatatcttgcccagcgagaccccctgtcactacagggcaaagtggcaatgaggtcacaacccctcggggacactgtgacactcttgtgcaaataaggcattgccacttgtgtaggcccacagagaaagactctagca

SEQ ID NO: 516429 - DNA, 362 bp, Homo sapiens
gggaaaccctgcccgggttcccgggggttttttggtaaaaaaaaagaagcccccccctttaaggggtttttacgcccccaccaatgggggtggttgcccccccgagcttttccccttttttgccgggggggggaaaaaaacgggccctttttgcttggggggttggcccttttgcccccatttggttttcccccccccggttggccaaaggggggaaaattttttaaccccccttgggtttttttttccccttttttttttccgcttaacccccggggggaaccccccctttttttttctcccccggggggttttttttaatgttcccctttttttcttataaacctgtgggggacctctta

SEQ ID NO: 516430 - DNA, 154 bp, Homo sapiens
acccgcagcatttatcggtaaggatgataaggtcttgggcggaagactcagctatctcaatttaatggtaagagccgctcctgcgtgagcgtcgtgaatggatgctagtggcattatgtaaggcactggtagggggggtacgagctcgaatcgt

SEQ ID NO: 516431 - DNA, 227 bp, Homo sapiens
tgaaaaacaaaaaaaacttttttttttgtaaacgggcggggggcacaaaatttttttttacaactctccccacttaccgtacaaattttttctccccacaaacagaatagtgaccacaggaaaacacaaaaaaaaagcttttttcaaatgtgtgtcgcctctcttataaaacaccacagccaattctctcaccttttcttttataaaaaaaaacaaaagagaggggg

SEQ ID NO: 516432 - DNA, 210 bp, Homo sapiens
  misc_feature (28)..(28): n is a, c, g, or t
  misc_feature (30)..(30): n is a, c, g, or t
  misc_feature (33)..(33): n is a, c, g, or t
  misc_feature (52)..(52): n is a, c, g, or t
  misc_feature (58)..(58): n is a, c, g, or t
  misc_feature (67)..(67): n is a, c, g, or t
  misc_feature (69)..(69): n is a, c, g, or t
  misc_feature (71)..(73): n is a, c, g, or t
  misc_feature (80)..(80): n is a, c, g, or t
  misc_feature (82)..(82): n is a, c, g, or t
  misc_feature (86)..(87): n is a, c, g, or t
  misc_feature (99)..(99): n is a, c, g, or t
  misc_feature (101)..(101): n is a, c, g, or t
  misc_feature (103)..(103): n is a, c, g, or t
  misc_feature (110)..(110): n is a, c, g, or t
  misc_feature (114)..(114): n is a, c, g, or t
  misc_feature (118)..(118): n is a, c, g, or t
  misc_feature (127)..(127): n is a, c, g, or t
  misc_feature (136)..(136): n is a, c, g, or t
  misc_feature (162)..(162): n is a, c, g, or t
  misc_feature (173)..(173): n is a, c, g, or t
  misc_feature (190)..(190): n is a, c, g, or t
  misc_feature (202)..(202): n is a, c, g, or t
atagaaacaagccactatgttgcttttntnaantatgggaaggacgattctncctggntcttctttnanannntggccgntntgtnntggtggttatantngnttcaacnttcntcangttaccccntgttccagnttttggtgtttactttatgatttttntgtgtatgacnttctttttttgttttcnagttatttttcnttttgttt

SEQ ID NO: 516433 - DNA, 375 bp, Homo sapiens
gtgaggagacccctattctatatccaacagcatatttctgatttttcggtctaccctggaagtttcactattcttatcctaccatgcttcggtaataactctcccatattgtaacttactactccgtaaaaaaaagaaccatttggatacctaggtcttgtctgagctattatatctattggcttcctagggtttatcgtgttagcacgccatttatttcccgtacgaataaacgtaaactcactacgcatatttcacctccgctaccataatcattcgctttccccacccggcgtcaaattatttatctagactcgccacactccacggaagcgatttgaaatgatcttgtgcagtgctctgagccctaggatt

SEQ ID NO: 516434 - DNA, 218 bp, Homo sapiens
  misc_feature (58)..(58): n is a, c, g, or t
tcgatctagaggcccccctggtaagggcagtgcataccgacggagcagctaaaacttnaaaaccgacagtaccaacgcttccaggaactctcacccattgctggtgggaatacaaaaggctaaagccgctttagaagacagtttcacagactctcacagaactaaatataaatatattcttgggctggacgtggtggttcacgcctgtcatcccagca

SEQ ID NO: 516435 - DNA, 493 bp, Homo sapiens
  misc_feature (39)..(39): n is a, c, g, or t
  misc_feature (53)..(53): n is a, c, g, or t
  misc_feature (66)..(66): n is a, c, g, or t
  misc_feature (79)..(79): n is a, c, g, or t
  misc_feature (224)..(224): n is a, c, g, or t
  misc_feature (361)..(361): n is a, c, g, or t
  misc_feature (430)..(430): n is a, c, g, or t
  misc_feature (444)..(444): n is a, c, g, or t
tgaggtcaggagatcaagaccatcctggctaacacgttnaaaccctgtctctnctaaaaataaatnggctgggcgtggnggtgggcgcctgtggtcccagctgctccagaggctgaggcgggagaatggtgtaacccaggaggcagaggttgcagtgagccgagatcgtgccgctgcactccagcctgggcaacagagcaagactccgtcacaaaaaaaaaaanaaaaaatacggccatgtgcagtgcctcatgcctattatcccagcaatttcggaggctgaggcaggtgtgttgcttgagctcaggagttcaagaccagcctcgccaatgtggtgaaaccctgtctctactaaaaatanattagccagtcatggtggcgcacacctggaggctgaggtaggagaatcacttgaacttgggaggtgganattgcagtgagccnattgtgctgctgcactccagcctgggtgacagagtgatgagctccttgg

SEQ ID NO: 516436 - DNA, 272 bp, Homo sapiens
aatgacggcgtctcaggagcgaccctacttcatgtcgcccgagctgagagacatcctgttgaaggggagtgcggaaggatttggagtttctagctatggaaatgtatcgatgaatcatacaaacatgaacacgaggatgattgaattcttgaagaagaatcgtagtcccaaaaatggacaagtgaacatagaaaaagagaaagttcataaacatatgattaaagagaggattagaacagaaaaacaaaagcaaagttatttgaactcgtaca

SEQ ID NO: 516437 - DNA, 331 bp, Homo sapiens
caggaataggtcagtgtacaaagaatacagtacgtcattatgactgaattattaatttgacagccacaaaacaaattcatgtgacacatttacttatttgactgcttctgtggtatgtctgaggtgagtataggtgcgacattccagagaaggagagctggcgcaaggacagtgctccagaaaaaacagtaatagtttcaactgaccacaggctcaatatggaacaacactgggatgacattgttaatgtaatttaaggccacattaattgagtgtccaaaataaaggaggaaatggccccattgggagctacccaccccttaaaaaaaaa

SEQ ID NO: 516438 - DNA, 90 bp, Homo sapiens
cacgcgtcgcttgctgggagagtgtccgttgcttcccgtccgtgtcgcggccctgcggttggcggcctcctcgtggagcggagcaaggcc

SEQ ID NO: 516439 - DNA, 330 bp, Homo sapiens
ctgagtgtacaagccgcagagagagtccggaccaggtaaccgcgaggtccatgtagcttcatatcacaccttatccccccgaatggaggagaagggagcatggtcaaatcccaggaatcggctacccactgcaaaatacaaatctatacaacctagctactaaagttacacatacttcacctaacctcataaccttgggtacgaaatccctacatctacagccatgcaaattcccacaaaaaccataaaatgagtcctaactatgctccacaaaagactggtagctccaagggtcctcagggactaagtccctagtctaggcaaaccaca

SEQ ID NO: 516440 - DNA, 276 bp, Homo sapiens
  misc_feature (213)..(213): n is a, c, g, or t
  misc_feature (269)..(270): n is a, c, g, or t
ggcagcatcctccaacttcagctacaagggacaaagtaccctgctgcccgcctcattgttttaaatgagggaggaatgtcccgaagggagccaaatgtctgcgctctgcagccaatgtacttacccatgggtgggaccagaggatggtccattccaacgctaggcaacagcgtgaacattcctgacaatcttacgggataggcgagtgctaantgactgtagcagtccagaaagccatgagcgcagcaagttgtagtagaacggaacanntggggt

SEQ ID NO: 516441 - DNA, 265 bp, Homo sapiens
caagctatgagtgtgacatggatcaaagtacaacatagcatatacttttcaggtggcctgggcttatggggctacttttctattctcggtcggaacatagtgggatgaggaattaattagatggaagggagattttgacagctggaatttcatcttagcttgagtttaacatctatcatgggtagtgctcagggaggcagcatgtgcagggtgcagcatactaaaaaatatctcatatgtcatatgtgtgtgtgtatcatgggtc

SEQ ID NO: 516442 - DNA, 650 bp, Homo sapiens
cgggaggcccatcccgccaggtttctttcagccttttatgtcaccgcgatacgcaggcggcccaggcccccgatcagaatgggaaaccagcctccgggaggagttccgtgggacacgagccattgcttgcccaattcatatggatcccaacacgaacaactaaggccaccctcaaactatgggaggcatcagatgcagtagatatgaaacccgtcccgcgaaggctatgtggtgcccaattggtgtccccgggccccaacatgaatttacgggcaaggcggcaattgaggaccaaaccaatgcacaaaattccctatcgggcccccggcccaatgcccgggggtattaactatgggccctgggagctgggctagaccctggcccaatccttaacagtgctaacttcaattccatactcctcctcattcaccgtggtacctatgtgggaccccctggtgtggcggtcctccaggaacacccattatgcccagtcccgcagattcaacaaattccagtgacaacatctacacaatgattaatccagtgccgcctgaggcagcggtccaacttcccgaatgggtcccggctcggacggtccgatggcggcatgggtggcatggagcacaccacatgaatggatcattagggtc

SEQ ID NO: 516443 - DNA, 302 bp, Homo sapiens
  misc_feature (11)..(11): n is a, c, g, or t
  misc_feature (50)..(50): n is a, c, g, or t
  misc_feature (63)..(63): n is a, c, g, or t
  misc_feature (282)..(282): n is a, c, g, or t
cctcccctggncctgcccccactgagagctggaaagaaccccctctctgnactttggggaagnccaaggctggagggatcacttgagcccccaggagttcgagaccagcctaggcaagatagtgagactcccatctctactaaaaataaataaaataaaatagcccaggtatggtggtgcacgcctgcagtcccagctgtttcagaggctggggtgggaagatcgcttgagccctgaagcttgagactgcagtgacctaggatcacggtcactgtgctccancctgggcaacagagcaaaac

SEQ ID NO: 516444 - DNA, 390 bp, Homo sapiens
tctttagagaaggggtctcactctgtcacccaggctagagcacagtggcacaatcatagctcactgcagccttgaactcctgggctcaagtgatcctcccgcctcagcctctggggtagctgggactacaggcatgcaccaccatgcccagctaattttaaaacattttaaaagagatggagtcttgctatgttacccaggttggtcttgacttcctggcctccagggatcctcctgcctccgcccgccaagttgctgggattacaggcatgaaccactgtgtctggctggccttacccttttaagagacccactctggtatcttctggccatgctctttcacactgggtaagaagtctgtggtgctgagagggtggccctccttcgaga

SEQ ID NO: 516445 - DNA, 1222 bp, Homo sapiens
  misc_feature (72)..(72): n is a, c, g, or t
  misc_feature (124)..(124): n is a, c, g, or t
  misc_feature (131)..(131): n is a, c, g, or t
  misc_feature (138)..(138): n is a, c, g, or t
  misc_feature (140)..(140): n is a, c, g, or t
  misc_feature (1222)..(1222): n is a, c, g, or t
agaggatcccccgcaaaaaaaaaaaatgaagaaagaaaacaaaataatagtggaagctaaattaagagctanacaggagcaagaagcaaaacaaaagttagaagaagatgctgaaatgaaattntagaagnaaagatngnatgcttgctggcaaattttcggggtgcatttagcatgatcgagacctgtagagaagatttacaccatacttttctcgaaatcatggtggacaataaaatggatagacttcggtcagaggagccaaaagcaggggatcaattctcatttcaacagcaaacaagccaaggaagccattgggtaaagccaaagcatgcaacataatggtaaccctacaattaaggaacaaagcaagtgacttgggaagtcactagcacaggagcaggtggcaacaaagcaagccactgcaagcacaacatcaatcagcaagcaccaacaagcaatccctcaaacacaatggcacagtccacaaaggtcgatcagcatttcaacaggcacacacaggcacaagggtcaatgaaagctgccgcagcctgggtcatggtcaacaggcaacaagttacagtttgcagggcgaagaacaacgaaattgtgctcagtgcatgcatgaacatgaatgaaccatgatgcaaacatggtgcaactgagacctgtgaaacagcagcaagcagaagaaacagacacacagaagaacctgcatcctaaacaacaggaagaaacagaaaatggtgctggagaccagtagtttagtaaaacaatttttaattcattttaaataggtttttaaacgactttgtgttgagggggcttataaagggaaacgaaattaggtcacttcaatgtacaactgtgagaagggaaaattttgggagttaacttgtgatgaaagtaatgcaatgagaatcacgggactggtatggccaggacaggggtaatcagaagaatcaacaatcacaaggacgatctaccagcaaatggcgtggaaacttcgggacgggttaaagacaaaaaaaaaagaaacgcatccaattggaacaggccacaaaagataaagaagggcggggacaaaataacaaaggcacaaaagaccacaaacgcaagagcacagagaaacacaaagacagagagaaacgatacaaacaagagcaaagcaccaacggacagaacaacacacaaaaagcaacgacgagaagacacaaacgan

SEQ ID NO: 516446 - DNA, 444 bp, Homo sapiens
cgtgattattccctcggtttttttctccccccgggggggtgggtgggggagaaaaaaataccccccccccccccgtgggagattttttcccccccccctcccccccccctagggggggggggggggggtttaaccccccccaataattcccccccccttttttttttttttccccccaaaaaagggcccccccggtggtttttttttttaattaccccccccccccccccccccccccccccgttttgccccccccggttcccccccgggggggtgggggggggggaaaaaaattttttttttaaatttttttggaaacccccccgggggggtttttttttaaaattgggcccccccccccccccccccccccccccgaaaaaaaaccccccacccccttttttttttcccccccccaaaaaaatttttcggggggggccccca

SEQ ID NO: 516447 - DNA, 432 bp, Homo sapiens
aacgaggctacaactcgattttagacagccagagtgaagcgacggcgcagttggacagcattgacttcagcataatcaggaactgcatccatgctgaggaaaccagagaactgttcagatgctgactttggcaagagaaagaaaagcttcttttgccgctgatgactgaactaacatgagggctgaagcgggcagcacatccgcgaaatcctagacagctgtgccaaatcccactcgttagctaagagctgagctgagtgacagaggactttaattagagcagtttttaggaggactgccggacgttttatctgcgacagaacctgaacctctcaccgtttcttctttcagtcccgcacagactttggctcttcttagctaccataccacttctcagcacctgtttgcgtccttctctcccctctcttcttc

SEQ ID NO: 516448 - DNA, 275 bp, Homo sapiens
taatcctaaaatacaccaaattaaaaccattttaaagtggttaaatggtaaattttgggctgggctgtgtggcgcatgcctgtaaacccagcactttgggcggcgggaggacagcagcagagggattggggacagcagaggccagagaaaggaggtgggagagcaaagggacaggaaagtgaggggaacaacagacgaccaacccccgccccaagagaaactcgcatctaggtgatcccactcgcccctcactagtgccccacgtaggagaaact

SEQ ID NO: 516449 - DNA, 447 bp, Homo sapiens
aaacattaataagagatcaaagatttttgtttaccttttaagtaaactacaggaaaaaaaaaggagagagacagacatttagttggtttcctgctgtcttcattggatcttacagttggggaaactgagtctccttcatatcaatgagtaaaggtctttggtgttttggttttttgtttttttggaaatctttgaattatcgttttggctaaatgaataactattttataatgaaccgtgatcctattttgtggcatcaaatgttttaaacttttgatattcgactgatgaacttcccaacatcaagatttcaacttctggccggctacagtggctcatgtctataatcccagcactttgggaggctgagaccaggcaggcagatcatttgagttcaggaatttgagattagtctggacaacatagtgagacctcgtctctacaaaa

SEQ ID NO: 516450 - DNA, 296 bp, Homo sapiens
ctcacagttgcacagtagaaagcagataacatgggcatccaccaaggtggaaatgtccattggcataataagattagggtgggggggtcagcttcttccagcactatgtaaatgtcacagctgatccaaccaatctgtgggccctatggaaatcagataccacctcttcaaacccgtctataaaatccagtgcactcggcggtaggcgggaagtcccattcaggtgctgagagagagagagagagctgttcttctttctctctctttggcctattacagcccgtgttcctaaaccc

SEQ ID NO: 516451 - DNA, 300 bp, Homo sapiens
cataaggaataggagtagagaatatcatacggatgctgtcccatccacaaccaggtcttcagagaaaagcaaccgtgacccacaggcctctgaattgacgctcagatgctatcaggataaggaatgccactgtcagatgctcggctgcctgcaaaccttagccaggacatcactgacaacatcaagatcgtgctgcagctcgttcatggcactggttatgctcctggtgtctttcaagatctgaatcctccgtgtatatagattatacttcactccaaatggacgcctgattgtttaggt

SEQ ID NO: 516452 - DNA, 228 bp, Homo sapiens
gcgatttcactgggccaccctacagccagaagatatataggaaattgttaaggaagtcagcacttacattaagaaatattggctactacccccacacagtatcatttgtgccaatttctggtttgaatggtgacaacatgctgtagccttgtgctcacatgccttggttcaagggatggaaagtcacccgtatggatcgcattgccatgtaaatcccagcggtttgcg

SEQ ID NO: 516453 - DNA, 138 bp, Homo sapiens
ggctatcacattatctcccagagtacttcaactctgggttggcccaaatacaactaatggcaccacaaggcggtggtggtgccctgcagtcaacagccagtctcttcgtgggctcactctctcttctgcatctctact

SEQ ID NO: 516454 - DNA, 298 bp, Homo sapiens
  misc_feature (47)..(47): n is a, c, g, or t
acccgcatcggcgtaacatcaacacgattaggtgccgcccgcacatngcaacgcgccagcatcaagagcccgcaatgcgcggctgcacacacgtgcgatcaaggagatttcaatgaacgattcatccgcatcccccgctaaggtcctggtgtgggacatgcccgtgcggctgttccactggctgatggtgctgtgctttgccggcgcctacctcaccgccgagaccgaacgctttcgcctggtccacgtgaccctgggctacaccatggctggcctggtggccttacgccgatgcggg

SEQ ID NO: 516455 - DNA, 162 bp, Homo sapiens
cgtctcttacgaggttcccctgctagcgctcgggtgcaggccagagtcctggggctgttctctttggctgttacacatgcccagagaggactgagactggcacttagcccaagaggtctgagcccttggtgtgtttccagattcgatcctgtgcattcactc

SEQ ID NO: 516456 - DNA, 110 bp, Homo sapiens
  misc_feature (48)..(48): n is a, c, g, or t
tgtctcgctccgtggccttagctgtgctcgcgctactctctctttctnggcctggaggctactccacgcgtacctaccaaaggtttcacggtttacctcaccgtcactcc

SEQ ID NO: 516457 - DNA, 976 bp, Homo sapiens
gcatttccagctgcgcggtcccaggcccccctctttttagtgtggtgtcttctctttcctctccctatttttgtgtccctctgtggacccggctgctaactttgccaggggcccccaattatcccgccgagatctgagggtccctccctctcttaccccctcggtttcttccctgggggttgtttagccctctcctcagtggtgactcggtcccgatgttgttgagactactgtttgcccccgcatgtaattggcctcttttggagagacacttgtggcccgcagaacgttttcttctccgcccatctctcttctatgagggacgagaggacaccactcttgatgacaacgctgttgggtgagcttaccacggaaacacccaccgagtggggccccgaaattttcctttttcccggagtattcctacatacacccccgcgctggtgatggtatctgtggggagcaccggcgctatgtagaacgcccaatgaggggtgccgccactacaccacattgtggaaagaaaatgtatggaccaccacagctcacttcactttgtggacgattccacaccaacatgtgcgcccgttcgccgcaaaggtgacacccccacttgggggcactcttctgagacgacacaatatctgggatgggaccagggtggtgagcaccatcccaagagatatggggggacacacagaggcacccaattgcgcgccagaattgggggcggccccggatatggcgttggcgcggaattattttcgtttgacgacaaagaccacccgggggcacccatggataatgaaagatcagcctccgggcggtaatttccccaaaccctcgggggggatttcccgggtcccccaagccagcaagacattgggggttccctaccctttttaaaaagggcccccaaaaacccccaaattttttgagttggcccttccttccaaaaaaggaaatgggaccccga

SEQ ID NO: 516458 - DNA, 104 bp, Homo sapiens
atgctgagactttctgaaatgtggggcctgagtgactatcccggttactcaagctggcctgccagagctgttaactggtatgttctacaggggtggtatcagga

SEQ ID NO: 516459 - DNA, 1209 bp, Homo sapiens
gtcgtcctccccgacgcgtctgcagcagctgccagtggagccgcctgacaaggactgccatccaccatggtgaagctgggctgcagctatcttctagtggaagccaggtagaatgatccctggggaccaggatggtggcatcccaagtatgaaaatgagcctctagttatgaacccgctgtggacaacagccatggcgatcaaccagcatgacccagaccattatatggacaactaatgatcactaacacaatatataccattctgaaacctgctccaggaccatacatagatagccctagagcgcatgaaattggcgagatgcgaagctagcgactgaccctgaactgataaactgctaggggagctctcgacgcatcacaagagagatgcatgcgaacggcataaactgcgaacatgaacgatgcgaatgaaatgcaggagactgatacgcgagcaagattcgaccatgaaacatcgaggcccagacatctgggccaaggtaatattcgcaaaaactaacgcaccgcgaacccagagagaagggcgaatacagagaaagagggcgccaaagcacgaccagacatacctaagaatgctacagaacctgacccatgataaccatggagcgggaacatatggaagcggcaacatccaagggaaggggcagccttcacaaccaacttaaatgacatcaagggtatcccacccagatattagcaatgaagggggagtcgatgctaaccccttcaagaagcccaacgggccatatggtaataaaaatcaagcacgtggtgacattccggggaccccggatcccccggttctgtacttttagagtggggatccattccccgcataattcctaccttggatttgccaccacgagaacttataaaacaactctcggtcgcccggtgggcacaccattcgtggagcaagtactcgagattcatcttcaccggaggattccccttctgccaggagagcaacaaaactacaattcggtggatcttctattgttataagaggttgcctagacggtctttagtggattttttagtgctgttgggtcaatttttggggtttgaattaggggttggggggcatattagttttatgcgtgtgtaaaatcttgggaggctaatatggagtggataattcgatttggggggaatttatcatatgtgtgagtaggtgatatatgggg

SEQ ID NO: 516460 - DNA, 127 bp, Homo sapiens
ttggcctatctgttcaaagcagcctcttaactcctgggctcaatgtgatcttccctcgtcatctctcaagtagctgagactatacgtgtgcaccaccacgagtcacttttttttttttttttttttt

SEQ ID NO: 516461 - DNA, 345 bp, Homo sapiens
cttccttggtgagcagagatccagaatataagaagttgggtagaaatcctaggtgtgtggaggaagagaagaccagtgccaaccctgagactctgctgggggaggatggaggcgaaagtacaagagagctcatagctagaagcaaccgaacacctcttttggaatatattaggaatagatgaattagaaaagcagagaattaccgagaagagaagcgagaagaacggaggcaggagaggagtctaggacaaagacaccacggtggtgccggggaaagtaggcaaaacacatggaaagtaagaagagaacgaaggaaaagagcgcaccatacagagaagcaaaaag

SEQ ID NO: 516462 - DNA, 291 bp, Homo sapiens
ggagattgcgagtgagattattgtgcagttgcttgtctacgatcgatctatctttgattaggctataaaatgacccatctcactctgagtcgcttgacaatgcatattcccaggatacagtgggaattggagacatttagatgtatactccattgccatctgcctgaagagttcaataatggggtggcctatcaatgcctattctgtctccattcaataccaaggctcaatgttcgggcttggaatgtgagccccagcacaatttatacccccagctttatctccctgttg

SEQ ID NO: 516463 - DNA, 936 bp, Homo sapiens
  misc_feature (47)..(47): n is a, c, g, or t
  misc_feature (80)..(80): n is a, c, g, or t
  misc_feature (125)..(125): n is a, c, g, or t
  misc_feature (128)..(128): n is a, c, g, or t
  misc_feature (133)..(133): n is a, c, g, or t
  misc_feature (209)..(209): n is a, c, g, or t
  misc_feature (271)..(271): n is a, c, g, or t
  misc_feature (297)..(298): n is a, c, g, or t
  misc_feature (315)..(315): n is a, c, g, or t
  misc_feature (318)..(318): n is a, c, g, or t
  misc_feature (410)..(410): n is a, c, g, or t
  misc_feature (412)..(412): n is a, c, g, or t
  misc_feature (424)..(424): n is a, c, g, or t
  misc_feature (435)..(435): n is a, c, g, or t
  misc_feature (444)..(445): n is a, c, g, or t
  misc_feature (520)..(520): n is a, c, g, or t
  misc_feature (584)..(585): n is a, c, g, or t
  misc_feature (611)..(612): n is a, c, g, or t
  misc_feature (639)..(640): n is a, c, g, or t
  misc_feature (646)..(646): n is a, c, g, or t
  misc_feature (701)..(701): n is a, c, g, or t
  misc_feature (703)..(703): n is a, c, g, or t
  misc_feature (714)..(714): n is a, c, g, or t
  misc_feature (820)..(820): n is a, c, g, or t
  misc_feature (881)..(881): n is a, c, g, or t
  misc_feature (883)..(883): n is a, c, g, or t
  misc_feature (887)..(887): n is a, c, g, or t
  misc_feature (891)..(891): n is a, c, g, or t
ggccacatagctgtgagtgcagccgttttcccgactggaaccaaagntcaccttcttgactcctttgcccgttcagcttnatgggattcaggcctagatacttgcacgggactggacatggtgtnggntcttntttgaatgtccatgagggtccttgcggcatcagttacaaaacattctctgatgagcccttggaggcaggcatgatngtcactgatgagcccgggtactatgaagatggggcttttggaattcgcattgagaatgttgnccttgtggttcctgtgaagaccaagnnataattttaataaccgnggnaagcctgacctttgaacctctaacattggttccaattcagaccaaaatgatagatgtggattctcttacagacaaagagtgcgactggctcnancaattaccaccntgacctgcagngaatgtganntgggaaggaattgcagaaacagggccgccaggaagctctcgagtggctcatcagagagacgcaacccatctccanacagcattaataaatacctccccggttttgtttttgtaaaatgctctggaggaaggaagaaacnnggcagatccctgacatctttcccctnncctttccgtcttccctacctccccttnnatactntaagactttaagaagaacagaaaatcttcttatcctctttgatattttagtgcanancactcagtgtnttatgattttttaattgttgagaacaagccaagaataaaattgctgcaccagaaggagggtccctccaaagttgaacacttggtgaaaggaagatgccccgacttntttggccagtgatggggaatcagtgagtgctccatgatggtcatgttccaggtgctagtanancatncagntcaccttaatgctcatgagactatatttataatcgagtgaataaa

SEQ ID NO: 516464 - DNA, 249 bp, Homo sapiens
ctctccaaccacatgcacttacaggcgcccagcacatcctctgcctcttccttcataacacaccatgccctccacagacactctttcagccctgtacttgtctaactcgtacttgtgtatgctatagcaagctactcccttgctagtaggagctactgctggcaaaatatcagctatgcccaaactgtcctccatagccaaccacatttccagagactactgcatgtgctccatcctttagcccacttt

SEQ ID NO: 516465 - DNA, 214 bp, Homo sapiens
actcattccgctattctcaaacacaagctacgatacaggtcctggtagagaaccattcacgactcctccgggacctgtaccaccctccccgtcatgcaccgatgatcttagtaaccagagtaagattctgcctaagacacgagtcttttttcctggctccgagggctagtgccaaagtacctccctccaccgggtagggaggcgagacttgagt

SEQ ID NO: 516466 - DNA, 117 bp, Homo sapiens
agaattactatgaagacatgctcaggcagaagtcattagcggagaggcgggaaaagtagattatgatcatcacgtccagcatgagcaggatacccagcagcaatctgcccatgtgag

SEQ ID NO: 516467 - DNA, 200 bp, Homo sapiens
tcccaaaacgggttttttttttattgggggtgatgaaaacatttccctaagaaacccattttgttttacttaagaggggaagggcagtttttttttggcagttcagaatccaagcccttgatttgtggggtttggaaaactccttttttggccttttatgggtttacccataccaattcctttaagcaaaaaggtaagca

SEQ ID NO: 516468 - DNA, 792 bp, Homo sapiens
  misc_feature (496)..(496): n is a, c, g, or t
  misc_feature (519)..(519): n is a, c, g, or t
  misc_feature (523)..(523): n is a, c, g, or t
  misc_feature (552)..(553): n is a, c, g, or t
agcgggcggccgggaggctccgggaccgtggcggcgggcggcggcggcgcagccctccgcgggccatgtcctctccggcggtggcgaggacctccccaggagggagtcgggagatggccccagcgccgcagggccgaggccggttctgggaagtgggcggcggcagcggccatcggctggagcgcgcggcgcggagtcggagcgctgggagctgctgctccgccgcggggagctgctggcgctgggcggccacctgaagggcgcgctggaggcgttcgcggcggcgctgcgccgcggggcccccggccaggcccgagtgcctgggcgccctggtggactgcctggtgttcaactaccggctccgccacgggctgggctggagcgcggccccggttgcaggcgctgacggcggcgccgcgggctcctcagatgcctgggctgccggggcttcctgagcgagccggtgaccgtgccctgtggccacagctactgccgncgtgcctgcggagggaactccgngccngtgccgctctgccgggaccgctgccgccnncaccgccagtgccactgatgctgaagggaccgcccgcggccgccgctctggcgccgccatcgccgcttcagacttcagaaccagcgtcgtcctcaaccacctggccgagaagtggtttccgggccagcgcgagcgggcccgggcggccggcagctcggagagctaatggaccagggcgctaccgggaggccctggcgcgcttggagggttggagcagaacccagggacttgattgcaca

SEQ ID NO: 516469 - DNA, 636 bp, Homo sapiens
tgttacctttgtctttcattatcaagcttaattattcatctgtgggtgactgaaaaatgaaaaccacaccttcgagagatatcttttaaaaaatagaaatccctttacctacaacaacgacaacaaagggacaagtacacatgaactcaggcagcttactgggaaactggtcttctcatccctttgccctcccttcctccccctttagtaaagctggtggggcacatttgctaggatctgtgggtttcatcacttcaagccttactgcttaaaaaaatgaggtaagaaattctttatcggaaaagtgaaactgacacataaaccaaaccaggggtctcccctggctgctgcggcagccgtaatggctctaagtgggagtgtcctgtatggctttaatcatgtatacggagtccttatggccattcgggctggcctcgtcgttggccaatggagaacttgactggggaaggagctcggtcgcctgcttcccagcttgctcagtcccaactttctgcccgcatgcggccctgtcctacccttgctgggagccagctctggttctggggcccccagggcggctctaactgctgggagaaggtgttgatggggcttgtccggtaggcaggctgctggggc

SEQ ID NO: 516470 - DNA, 2476 bp, Homo sapiens
  misc_feature (2215)..(2215): n is a, c, g, or t
  misc_feature (2224)..(2224): n is a, c, g, or t
tataaaaatagctctgttaccggaaataactgttcatttttcactcctccctcctaggtcacacttttcagaaaaagaatctgcatcctggaaaccagaagaaaaatatgagacggggaatcatcgtgtgatgtgtgtgctgcctttggctgagtgtgtggagtcctgctcaggtgttaggtacagtgtgtttgatcgtggtggcttgaggggaacccgctgttcagagctgtgactgcggctgcactcagagaagctgcccttggctgctcgtagcgccgggccttctctcctcgtcatcatccagagcagccagtgtccgggaggcagaagatgccccactccagcctgcatccatccatcccgtgtcccagggtcacggggcccagaaggcagccttggttctgctgagtgcctgcctggtgaccctttgggggctaggagagccaccagagcacactctccggtacctggtcctccacctagcctccctgcagctgggactgctgttaaacggggtctgcagcctggctgaggagctgcgccacatccactccaggtaccggggcagctactggaggactgtgcgggcctgcctgggctgccccctccgccgtggggccctgttgctgctgtccatctatttctactactccctcccaaatgcggtcggcccgcccttcacttggatgcttgccctcctgggcctctcgcaggcactgaacatcctcctgggcctcaagggcctggccccagctgagatctctgcagtgtgtgaaaaagggaatttcaacgtggcccatgggctggcatggtcatattacatcggatatctgcggctgatcctgccagagctccaggcccggattcgaacttacaatcagcattacaacaacctgctacggggtgcagtgagccagcggctgtatattctcctcccattggactgtggggtgcctgataacctgagtatggctgaccccaacattcgcttcctggataaactgccccagcagaccggtgaccgtgctggcatcaaggatcgggtttacagcaacagcatctatgagcttctggagaacgggcagcgggcgggcacctgtgtcctggagtacgccacccccttgcagactttgtttgccatgtcacaatacagtcaagctggctttagccgggaggataggcttgagcaggccaaactcttctgccggacacttgaggacatcctggcagatgcccctgagtctcagaacaactgccgcctcattgcctaccaggaacctgcagatgacagcagcttctcgctgtcccaggaggttctccggcacctgcggcaggaggaaaaggaagaggttactgtgggcagcttgaagacctcagcggtgcccagtacctccacgatgtcccaagagcctgagctcctcatcagtggaatggaaaagcccctccctctccgcacggatttctcttgagacccagggtcaccaggccagagcctccagtggtctccaagcctctggactgggggctctcttcagtggctgaatgtccagcagagctatttccttccacagggggccttgcagggaagggtccaggacttgacatcttaagatgcgtcttgtccccttgggccagtcatttcccctctctgagcctcggtgtcttcaacctgtgaaatgggatcataatcactgccttacctccctcacggttgttgtgaggactgagtgtgtggaagtttttcataaactttggatgctagtgtacttagggggtgtgccaggtgtctttcatggggccttccagacccactccccacccttctccccttcctttgcccggggacgccgaactctctcaatggtatcaacaggctccttcgccctctggctcctggtcatgttccattattggggagccccagcagaagaatggagaggaggaggaggctgagtttggggtattgaatcccccggctcccaccctgcagcatcaaggttgctatggactctcctgccgggcaactcttgcgtaatcatgactatctctaggattctggcaccacttccttccctggccccttaagcctagctgtgtatcggcacccccaccccactagagtactccctctcacttgcggtttccttatactccacccctttctcaacggtccttttttaaagcacatctcagatacccaaaaaactaacanaaaaacaanaaacacaataccacaaggggggggcgcgccataaaagttcccccccaggggggccacaataatttagcctgcaaccacaggttgtctgggacacaagggggggcccacatcaagagggacggagagattatcaagacatggcacgtgcgccgtcggttgaacaacatgcgaagcgtgagaacaaggtgctacgagggggaacacagagaagggcaccaaacatatggtggggagacgcaggggcaccatcac

SEQ ID NO: 516471 - DNA, 409 bp, Homo sapiens
gcgtcgacataaatatctaaaccatcacaatttagctaatggaataaaatactgggtctatatggaataaattttacacatgagtgtttattcatttaaacaatgaacgttttgatagaaatatttttacaaatgtataggcagatttgtcactttcctgcctttttagacagagactacaaaaatagcattttaaagtggcatgatgacccacacagctgtaatatgctcaactaaagagcctaaaaaacctatacaattatcactttatactcaacttatgttgtatatataagttgatgcccttagagtctgatgaagcaaatatatatcaccctacattagtatcccattgatgtgtgttttgactagcagtgcctccattttaagctttttttttctttttttg

SEQ ID NO: 516472 - DNA, 3020 bp, Homo sapiens
tataaaaatagctctgttaccggaaataactgttcatttttcactcctccctcctaggtcacacttttcagaaaaagaatctgcatcctggaaaccagaagaaaaatatgagacggggaatcatcgtgtgatgtgtgtgctgcctttggctgagtgtgtggagtcctgctcaggtgttaggtacagtgtgtttgatcgtggtggcttgaggggaacccgctgttcagagctgtgactgcggctgcactcagagaagctgcccttggctgctcgtagcgccgggccttctctcctcgtcatcatccagagcagccagtgtccgggaggcagaagatgccccactccagcctgcatccatccatcccgtgtcccagggtcacggggcccagaaggcagccttggttctgctgagtgcctgcctggtgaccctttgggggctaggagagccaccagagcacactctccggtacctggtcctccacctagcctccctgcagctgggactgctgttaaacggggtctgcagcctggctgaggagctgcgccacatccactccaggtaccggggcagctactggaggactgtgcgggcctgcctgggctgccccctccgccgtggggccctgttgctgctgtccatctatttctactactccctcccaaatgcggtcggcccgcccttcacttggatgcttgccctcctgggcctctcgcaggcactgaacatcctcctgggcctcaagggcctggccccagctgagatctctgcagtgtgtgaaaaagggaatttcaacgtggcccatgggctggcatggtcatattacatcggatatctgcggctgatcctgccagagctccaggcccggattcgaacttacaatcagcattacaacaacctgctacggggtgcagtgagccagcggctgtatattctcctcccattggactgtggggtgcctgataacctgagtatggctgaccccaacattcgcttcctggataaactgccccagcagaccggtgaccgtgctggcatcaaggatcgggtttacagcaacagcatctatgagcttctggagaacgggcagcgggcgggcacctgtgtcctggagtacgccacccccttgcagactttgtttgccatgtcacaatacagtcaagctggctttagccgggaggataggcttgagcaggccaaactcttctgccggacacttgaggacatcctggcagatgcccctgagtctcagaacaactgccgcctcattgcctaccaggaacctgcagatgacagcagcttctcgctgtcccaggaggttctccggcacctgcggcaggaggaaaaggaagaggttactgtgggcagcttgaagacctcagcggtgcccagtacctccacgatgtcccaagagcctgagctcctcatcagtggaatggaaaagcccctccctctccgcacggatttctcttgagacccagggtcaccaggccagagcctccagtggtctccaagcctctggactgggggctctcttcagtggctgaatgtccagcagagctatttccttccacagggggccttgcagggaagggtccaggacttgacatcttaagatgcgtcttgtccccttgggccagtcatttcccctctctgagcctcggtgtcttcaacctgtgaaatgggatcataatcactgccttacctccctcacggttgttgtgaggactgagtgtgtggaagtttttcataaactttggatgctagtgtacttagggggtgtgccaggtgtctttcatggggccttccagacccactccccacccttctccccttcctttgcccggggacgccgaactctctcaatggtatcaacaggctccttcgccctctggctcctggtcatgttccattattggggagccccagcagaagaatggagaggaggaggaggctgagtttggggtattgaatcccccggctcccaccctgcagcatcaaggttgctatggactctcctgccgggcaactcttgcgtaatcatgactatctctaggattctggcaccacttccttccctggccccttaagcctagctgtgtatcggcacccccaccccactagagtactccctctcacttgcggtttccttatactccacccctttctcaacggtccttttttaaagcacatctcagattaacaagagagaagaacaagaagacacaaaaacagagaaaagaaaaagaaacacataagacaaagaacaagagagaacaaagaaacaataataacaagacagaaaaagagacaacaagagacgaaagagaaacgaaaaacgtgcgcgggggcgccgtgcagagtcatggacggccccgtgaggggactccgaagccgtcagcatcccgggaccaccgcaagacactgcatgtgtgcaacaccaacagtgggggggccctccaacgtgccagagagagacgagtgacccaatagggaacgagtaggaggacgagcggagtcccgtagcagtccgcggtcatacataggccagagcaaggggaggaatgcatagagaagcggaacaaacaacggacccggtaagggaccgaacgcgaagagaacgagcgggaacaggaacgggcacaatcgctaagatagctcacttaacgaggtgaggaggagagagagtaatacaaatcgagggagcggagacaccaaacagagccacgcaatcaccatagaggtaaacctaaggcacacgcggtctccgacagccgacacctgagagaggagagaagccaaattgacaaggtcaccaagagccggagaccgactctcgtgggggagcagttcgatcgaccgaacccaaattgcaccgaggggctagactcgataatgggcaaaccgaaggggacgtcgcaagaaaaagcgcagatagcgataggcacagcgaaacaggatgcaaaaaacccacaatagagcaaagagggacgacacacaagaagatttaaccccgaaggag

SEQ ID NO: 516473 - DNA, 2611 bp, Homo sapiens
  misc_feature (2350)..(2350): n is a, c, g, or t
  misc_feature (2359)..(2359): n is a, c, g, or t
tataaaaatagctctgttaccggaaataactgttcatttttcactcctccctcctaggtcacacttttcagaaaaagaatctgcatcctggaaaccagaagaaaaatatgagacggggaatcatcgtgtgatgtgtgtgctgcctttggctgagtgtgtggagtcctgctcaggtgttaggtacagtgtgtttgatcgtggtggcttgaggggaacccgctgttcagagctgtgactgcggctgcactcagagaagctgcccttggctgctcgtagcgccgggccttctctcctcgtcatcatccagagcagccagtgtccgggaggcagaagatgccccactccagcctgcatccatccatcccgtgtcccagggtcacggggcccagaaggcagccttggttctgctgagtgcctgcctggtgaccctttgggggctaggagagccaccagagcacactctccggtacctggtcctccacctagcctccctgcagctgggactgctgttaaacggggtctgcagcctggctgaggagctgcgccacatccactccaggtgactcactgcagtacccagggacggggtatccaacgtgtgtcactcccttgatgcctagccctgcccctccttgaacctctctggctgagctgggctgggggctggggtctggggtctggctgtcactcacaggtaccggggcagctactggaggactgtgcgggcctgcctgggctgccccctccgccgtggggccctgttgctgctgtccatctatttctactactccctcccaaatgcggtcggcccgcccttcacttggatgcttgccctcctgggcctctcgcaggcactgaacatcctcctgggcctcaagggcctggccccagctgagatctctgcagtgtgtgaaaaagggaatttcaacgtggcccatgggctggcatggtcatattacatcggatatctgcggctgatcctgccagagctccaggcccggattcgaacttacaatcagcattacaacaacctgctacggggtgcagtgagccagcggctgtatattctcctcccattggactgtggggtgcctgataacctgagtatggctgaccccaacattcgcttcctggataaactgccccagcagaccggtgaccgtgctggcatcaaggatcgggtttacagcaacagcatctatgagcttctggagaacgggcagcgggcgggcacctgtgtcctggagtacgccacccccttgcagactttgtttgccatgtcacaatacagtcaagctggctttagccgggaggataggcttgagcaggccaaactcttctgccggacacttgaggacatcctggcagatgcccctgagtctcagaacaactgccgcctcattgcctaccaggaacctgcagatgacagcagcttctcgctgtcccaggaggttctccggcacctgcggcaggaggaaaaggaagaggttactgtgggcagcttgaagacctcagcggtgcccagtacctccacgatgtcccaagagcctgagctcctcatcagtggaatggaaaagcccctccctctccgcacggatttctcttgagacccagggtcaccaggccagagcctccagtggtctccaagcctctggactgggggctctcttcagtggctgaatgtccagcagagctatttccttccacagggggccttgcagggaagggtccaggacttgacatcttaagatgcgtcttgtccccttgggccagtcatttcccctctctgagcctcggtgtcttcaacctgtgaaatgggatcataatcactgccttacctccctcacggttgttgtgaggactgagtgtgtggaagtttttcataaactttggatgctagtgtacttagggggtgtgccaggtgtctttcatggggccttccagacccactccccacccttctccccttcctttgcccggggacgccgaactctctcaatggtatcaacaggctccttcgccctctggctcctggtcatgttccattattggggagccccagcagaagaatggagaggaggaggaggctgagtttggggtattgaatcccccggctcccaccctgcagcatcaaggttgctatggactctcctgccgggcaactcttgcgtaatcatgactatctctaggattctggcaccacttccttccctggccccttaagcctagctgtgtatcggcacccccaccccactagagtactccctctcacttgcggtttccttatactccacccctttctcaacggtccttttttaaagcacatctcagatacccaaaaaactaacanaaaaacaanaaacacaataccacaaggggggggcgcgccataaaagttcccccccaggggggccacaataatttagcctgcaaccacaggttgtctgggacacaagggggggcccacatcaagagggacggagagattatcaagacatggcacgtgcgccgtcggttgaacaacatgcgaagcgtgagaacaaggtgctacgagggggaacacagagaagggcaccaaacatatggtggggagacgcaggggcaccatcac

SEQ ID NO: 516474 - DNA, 233 bp, Homo sapiens
tatactacgggtctcagtctccaacccactaacaacctcccctggctccccacgcacggcgcggtcccgccggcttataacacaactacagcaaaagaaagccaagtggcctaatggttaccagtgtgctaggccatcttagcatggtatactagtccagatgtcgctcataagttttattctacaactacacggttggtggataagccaccaccaaaccctgctctccctca

SEQ ID NO: 516475 - DNA, 1140 bp, Homo sapiens
ggagaggccgtgtagcgtcgccgtgactccgaggagataccagtgccggtagaggggtgcaaaaatgcagagtaataaaacttttaacttgtgagaagcaaaagcatactccaagaaagcatcatcaacatcagcaccatgcagcgagcaccaccagcagcaacacgcatgcagccgtcaccaccgccaagtacctgcaagatgggcaacaggacagcagccaaaatgaacggcttgacgtattgacctgaaagaatttgacgaaaaccagtgagagaagaccttcacccaacggaagcctgtcattttctgtgggaaatcttcactcccgacatgcactgtaggaagaaatgaggcaccactatattgacgcaaatatggcaaaggcaggcgaagtcttcattcatagcggactaacaggactttaggcttcaatcctgctgtggaaaaccccgaaccctgatgccgggagattgccacatgtggacgcttggacaaaatatgccacatcctgtggaatatgcagagtgcgatggtagcgcttaagcctgaccaatagatgcatcacctatacagtgtcgaaagccttccatcaagtatgctgttccaacggaaactagactgggcaagtaacgccttaatcatgtggttagggagcaaggctaagaagagaggcatggacgtcaattggttggaattgactcgagcgaagggccccttcacggggaaccaatagggaacatcaggttggccagctgtctacaagtggcaagaggccacaggcatggccatcgtgaaaacgggcatcatgggaacaggaattgacatgctgaacatgtacatcactatcactgactaaaaaccagacaattgtcccgtacgttccatggttgaaactaggtgaaaaggcccaaaaggggaacccggggatgacgagtgacaggcacagacggagaactgaccacagaagaagagccaggcctaacaaaagaacaaaccacaggcaagatacacacaacagcgacacaggagcaaacaagcacaagcgacagagaatggcgcgacaaggactggggggccaacaggaccggacatgaacagaagatgaccaccagcgagcacggaacagaaacatacaag

SEQ ID NO: 516476 - DNA, 2289 bp, Homo sapiens
  misc_feature (2028)..(2028): n is a, c, g, or t
  misc_feature (2037)..(2037): n is a, c, g, or t
tataaaaatagctctgttaccggaaataactgttcatttttcactcctccctcctaggtcacacttttcagaaaaagaatctgcatcctggaaaccagaagaaaaatatgagacggggaatcatcgtgtgatgtgtgtgctgcctttggctgagtgtgtggagtcctgctcaggtgttaggtacagtgtgtttgatcgtggtggcttgaggggaacccgctgttcagagctgtgactgcggctgcactcagagaagctgcccttggctgctcgtagcgccgggccttctctcctcgtcatcatccagagcagccagtgtccgggaggcagaagatgccccactccagcctgcatccatccatcccgtgtcccagggtcacggggcccagaaggcagccttggttctgctgagtgcctgcctggtgaccctttgggggctaggagagccaccagagcacactctccggtacctggtcctccacctagcctccctgcagctgggactgctgttaaacggggtctgcagcctggctgaggagctgcgccacatccactccaggtaccggggcagctactggaggactgtgcgggcctgcctgggctgccccctccgccgtggggccctgttgctgctgtccatctatttctactactccctcccaaatgcggtcggcccgcccttcacttggatgcttgccctcctgggcctctcgcaggcactgaacatcctcctgggcctcaagggcctggccccagctgagatctctgcagtgtgtgaaaaagggaatttcaacgtggcccatgggctggcatggtcatattacatcggatatctgcggctgatcctgccagagctccaggcccggattcgaacttacaatcagcattacaacaacctgctacggggtgcagtgagccagcggctgtatattctcctcccattggactgtggggtgcctgataacctgagtatggctgaccccaacattcgcttcctggataaactgccccagcagaccggtgaccgtgctggcatcaaggatcgggtttacagcaacagcatctatgagcttctggagaacgggcagcggaacctgcagatgacagcagcttctcgctgtcccaggaggttctccggcacctgcggcaggaggaaaaggaagaggttactgtgggcagcttgaagacctcagcggtgcccagtacctccacgatgtcccaagagcctgagctcctcatcagtggaatggaaaagcccctccctctccgcacggatttctcttgagacccagggtcaccaggccagagcctccagtggtctccaagcctctggactgggggctctcttcagtggctgaatgtccagcagagctatttccttccacagggggccttgcagggaagggtccaggacttgacatcttaagatgcgtcttgtccccttgggccagtcatttcccctctctgagcctcggtgtcttcaacctgtgaaatgggatcataatcactgccttacctccctcacggttgttgtgaggactgagtgtgtggaagtttttcataaactttggatgctagtgtacttagggggtgtgccaggtgtctttcatggggccttccagacccactccccacccttctccccttcctttgcccggggacgccgaactctctcaatggtatcaacaggctccttcgccctctggctcctggtcatgttccattattggggagccccagcagaagaatggagaggaggaggaggctgagtttggggtattgaatcccccggctcccaccctgcagcatcaaggttgctatggactctcctgccgggcaactcttgcgtaatcatgactatctctaggattctggcaccacttccttccctggccccttaagcctagctgtgtatcggcacccccaccccactagagtactccctctcacttgcggtttccttatactccacccctttctcaacggtccttttttaaagcacatctcagatacccaaaaaactaacanaaaaacaanaaacacaataccacaaggggggggcgcgccataaaagttcccccccaggggggccacaataatttagcctgcaaccacaggttgtctgggacacaagggggggcccacatcaagagggacggagagattatcaagacatggcacgtgcgccgtcggttgaacaacatgcgaagcgtgagaacaaggtgctacgagggggaacacagagaagggcaccaaacatatggtggggagacgcaggggcaccatcac

SEQ ID NO: 516477 - DNA, 321 bp, Homo sapiens
cgactcttgggatccccctgtatcccgggagagagaaaaaaggttttagatgttgggggctgttttagtctgttttcatgccactgacaaagacataaccgagattgggaaaacaaagaggtttaattggacttacagttccacatggctggggaggcctcagaatcacggagggaggcagaaggcacttcttacatggcagcggcaagagaaaaatgaggaagaagcaaaagtggaaacgctgataaacccatcaggtcttgtgagacacaatcactatcataagaatagcacaggaaagactggccccccgggatacag

SEQ ID NO: 516478 - DNA, 416 bp, Homo sapiens
gatcgcttgaggtcaggctcgtcttgaactcccgacttcaagtgaccactccatctcagcctcccaaagtgctgggattagaggcgtgagccaccgtccctggccttgagctacacttgtatcaagcactccgacacctactatcttattgataagtccccgagggggctgtcaagcagggacctagcggactgttcacactcaaattcctcccttttactgttttttgtttgtttattgtcttcttctacagcccctggcgatataatctgtcacgggagcaccagcttctttttcttcttcctgttcagtatccactatctggaaggcccctttcttgcggtctttcctttttaaaggctgtagtaaaatgaggtacttaccctaaaagtttctctgactctaaggaaaaaaaa

SEQ ID NO: 516479 - DNA, 2253 bp, Homo sapiens
  misc_feature (1992)..(1992): n is a, c, g, or t
  misc_feature (2001)..(2001): n is a, c, g, or t
tataaaaatagctctgttaccggaaataactgttcatttttcactcctccctcctaggtcacacttttcagaaaaagaatctgcatcctggaaaccagaagaaaaatatgagacggggaatcatcgtgtgatgtgtgtgctgcctttggctgagtgtgtggagtcctgctcaggtgttaggtacagtgtgtttgatcgtggtggcttgaggggaacccgctgttcagagctgtgactgcggctgcactcagagaagctgcccttggctgctcgtagcgccgggccttctctcctcgtcatcatccagagcagccagtgtccgggaggcagaagcaggtaccggggcagctactggaggactgtgcgggcctgcctgggctgccccctccgccgtggggccctgttgctgctgtccatctatttctactactccctcccaaatgcggtcggcccgcccttcacttggatgcttgccctcctgggcctctcgcaggcactgaacatcctcctgggcctcaagggcctggccccagctgagatctctgcagtgtgtgaaaaagggaatttcaacgtggcccatgggctggcatggtcatattacatcggatatctgcggctgatcctgccagagctccaggcccggattcgaacttacaatcagcattacaacaacctgctacggggtgcagtgagccagcggctgtatattctcctcccattggactgtggggtgcctgataacctgagtatggctgaccccaacattcgcttcctggataaactgccccagcagaccggtgaccgtgctggcatcaaggatcgggtttacagcaacagcatctatgagcttctggagaacgggcagcgggcgggcacctgtgtcctggagtacgccacccccttgcagactttgtttgccatgtcacaatacagtcaagctggctttagccgggaggataggcttgagcaggccaaactcttctgccggacacttgaggacatcctggcagatgcccctgagtctcagaacaactgccgcctcattgcctaccaggaacctgcagatgacagcagcttctcgctgtcccaggaggttctccggcacctgcggcaggaggaaaaggaagaggttactgtgggcagcttgaagacctcagcggtgcccagtacctccacgatgtcccaagagcctgagctcctcatcagtggaatggaaaagcccctccctctccgcacggatttctcttgagacccagggtcaccaggccagagcctccagtggtctccaagcctctggactgggggctctcttcagtggctgaatgtccagcagagctatttccttccacagggggccttgcagggaagggtccaggacttgacatcttaagatgcgtcttgtccccttgggccagtcatttcccctctctgagcctcggtgtcttcaacctgtgaaatgggatcataatcactgccttacctccctcacggttgttgtgaggactgagtgtgtggaagtttttcataaactttggatgctagtgtacttagggggtgtgccaggtgtctttcatggggccttccagacccactccccacccttctccccttcctttgcccggggacgccgaactctctcaatggtatcaacaggctccttcgccctctggctcctggtcatgttccattattggggagccccagcagaagaatggagaggaggaggaggctgagtttggggtattgaatcccccggctcccaccctgcagcatcaaggttgctatggactctcctgccgggcaactcttgcgtaatcatgactatctctaggattctggcaccacttccttccctggccccttaagcctagctgtgtatcggcacccccaccccactagagtactccctctcacttgcggtttccttatactccacccctttctcaacggtccttttttaaagcacatctcagatacccaaaaaactaacanaaaaacaanaaacacaataccacaaggggggggcgcgccataaaagttcccccccaggggggccacaataatttagcctgcaaccacaggttgtctgggacacaagggggggcccacatcaagagggacggagagattatcaagacatggcacgtgcgccgtcggttgaacaacatgcgaagcgtgagaacaaggtgctacgagggggaacacagagaagggcaccaaacatatggtggggagacgcaggggcaccatcac

SEQ ID NO: 516480 - DNA, 2711 bp, Homo sapiens
  misc_feature (2450)..(2450): n is a, c, g, or t
  misc_feature (2459)..(2459): n is a, c, g, or t
tataaaaatagctctgttaccggaaataactgttcatttttcactcctccctcctaggtcacacttttcagaaaaagaatctgcatcctggaaaccagaagaaaaatatgagacggggaatcatcgtgtgatgtgtgtgctgcctttggctgagtgtgtggagtcctgctcaggtgttaggtacagtgtgtttgatcgtggtggcttgaggggaacccgctgttcagagctgtgactgcggctgcactcagagaagctgcccttggctgctcgtagcgccgggccttctctcctcgtcatcatccagagcagccagtgtccgggaggcagaagatgccccactccagcctgcatccatccatcccgtgtcccagggtcacggggcccagaaggcagccttggttctgctgagtgcctgcctggtgaccctttgggggctaggagagccaccagagcacactctccggtacctggtcctccacctagcctccctgcagctgggactgctgttaaacggggtctgcagcctggctgaggagctgcgccacatccactccaggtgactcactgcagtacccagggacggggtatccaacgtgtgtcactcccttgatgcctagccctgcccctccttgaacctctctggctgagctgggctgggggctggggtctggggtctggctgtcactcacaggtaccggggcagctactggaggactgtgcgggcctgcctgggctgccccctccgccgtggggccctgttgctgctgtccatctatttctactactccctcccaaatgcggtcggcccgcccttcacttggatgcttgccctcctgggcctctcgcaggcactgaacatcctcctgggcctcaagggcctggccccagctgagatctctgcagtgtgtgaaaaagggaatttcaacgtggcccatgggctggcatggtcatattacatcggatatctgcggctgatcctgccagcctggagtacagtggtgacaagatctcagctcactgcaacctctgctcccaggttcaagtgattctcctgctgacctctttgaatagctaggattaccggagctccaggcccggattcgaacttacaatcagcattacaacaacctgctacggggtgcagtgagccagcggctgtatattctcctcccattggactgtggggtgcctgataacctgagtatggctgaccccaacattcgcttcctggataaactgccccagcagaccggtgaccgtgctggcatcaaggatcgggtttacagcaacagcatctatgagcttctggagaacgggcagcgggcgggcacctgtgtcctggagtacgccacccccttgcagactttgtttgccatgtcacaatacagtcaagctggctttagccgggaggataggcttgagcaggccaaactcttctgccggacacttgaggacatcctggcagatgcccctgagtctcagaacaactgccgcctcattgcctaccaggaacctgcagatgacagcagcttctcgctgtcccaggaggttctccggcacctgcggcaggaggaaaaggaagaggttactgtgggcagcttgaagacctcagcggtgcccagtacctccacgatgtcccaagagcctgagctcctcatcagtggaatggaaaagcccctccctctccgcacggatttctcttgagacccagggtcaccaggccagagcctccagtggtctccaagcctctggactgggggctctcttcagtggctgaatgtccagcagagctatttccttccacagggggccttgcagggaagggtccaggacttgacatcttaagatgcgtcttgtccccttgggccagtcatttcccctctctgagcctcggtgtcttcaacctgtgaaatgggatcataatcactgccttacctccctcacggttgttgtgaggactgagtgtgtggaagtttttcataaactttggatgctagtgtacttagggggtgtgccaggtgtctttcatggggccttccagacccactccccacccttctccccttcctttgcccggggacgccgaactctctcaatggtatcaacaggctccttcgccctctggctcctggtcatgttccattattggggagccccagcagaagaatggagaggaggaggaggctgagtttggggtattgaatcccccggctcccaccctgcagcatcaaggttgctatggactctcctgccgggcaactcttgcgtaatcatgactatctctaggattctggcaccacttccttccctggccccttaagcctagctgtgtatcggcacccccaccccactagagtactccctctcacttgcggtttccttatactccacccctttctcaacggtccttttttaaagcacatctcagatacccaaaaaactaacanaaaaacaanaaacacaataccacaaggggggggcgcgccataaaagttcccccccaggggggccacaataatttagcctgcaaccacaggttgtctgggacacaagggggggcccacatcaagagggacggagagattatcaagacatggcacgtgcgccgtcggttgaacaacatgcgaagcgtgagaacaaggtgctacgagggggaacacagagaagggcaccaaacatatggtggggagacgcaggggcaccatcac

SEQ ID NO: 516481 - DNA, 2289 bp, Homo sapiens
  misc_feature (2028)..(2028): n is a, c, g, or t
  misc_feature (2037)..(2037): n is a, c, g, or t
tataaaaatagctctgttaccggaaataactgttcatttttcactcctccctcctaggtcacacttttcagaaaaagaatctgcatcctggaaaccagaagaaaaatatgagacggggaatcatcgtgtgatgtgtgtgctgcctttggctgagtgtgtggagtcctgctcaggtgttaggtacagtgtgtttgatcgtggtggcttgaggggaacccgctgttcagagctgtgactgcggctgcactcagagaagctgcccttggctgctcgtagcgccgggccttctctcctcgtcatcatccagagcagccagtgtccgggaggcagaagatgccccactccagcctgcatccatccatcccgtgtcccagggtcacggggcccagaaggcagccttggttctgctgagtgcctgcctggtgaccctttgggggctaggagagccaccagagcacactctccggtacctggtcctccacctagcctccctgcagctgggactgctgttaaacggggtctgcagcctggctgaggagctgcgccacatccactcggcctggccccagctgagatctctgcagtgtgtgaaaaagggaatttcaacgtggcccatgggctggcatggtcatattacatcggatatctgcggctgatcctgccagagctccaggcccggattcgaacttacaatcagcattacaacaacctgctacggggtgcagtgagccagcggctgtatattctcctcccattggactgtggggtgcctgataacctgagtatggctgaccccaacattcgcttcctggataaactgccccagcagaccggtgaccgtgctggcatcaaggatcgggtttacagcaacagcatctatgagcttctggagaacgggcagcgggcgggcacctgtgtcctggagtacgccacccccttgcagactttgtttgccatgtcacaatacagtcaagctggctttagccgggaggataggcttgagcaggccaaactcttctgccggacacttgaggacatcctggcagatgcccctgagtctcagaacaactgccgcctcattgcctaccaggaacctgcagatgacagcagcttctcgctgtcccaggaggttctccggcacctgcggcaggaggaaaaggaagaggttactgtgggcagcttgaagacctcagcggtgcccagtacctccacgatgtcccaagagcctgagctcctcatcagtggaatggaaaagcccctccctctccgcacggatttctcttgagacccagggtcaccaggccagagcctccagtggtctccaagcctctggactgggggctctcttcagtggctgaatgtccagcagagctatttccttccacagggggccttgcagggaagggtccaggacttgacatcttaagatgcgtcttgtccccttgggccagtcatttcccctctctgagcctcggtgtcttcaacctgtgaaatgggatcataatcactgccttacctccctcacggttgttgtgaggactgagtgtgtggaagtttttcataaactttggatgctagtgtacttagggggtgtgccaggtgtctttcatggggccttccagacccactccccacccttctccccttcctttgcccggggacgccgaactctctcaatggtatcaacaggctccttcgccctctggctcctggtcatgttccattattggggagccccagcagaagaatggagaggaggaggaggctgagtttggggtattgaatcccccggctcccaccctgcagcatcaaggttgctatggactctcctgccgggcaactcttgcgtaatcatgactatctctaggattctggcaccacttccttccctggccccttaagcctagctgtgtatcggcacccccaccccactagagtactccctctcacttgcggtttccttatactccacccctttctcaacggtccttttttaaagcacatctcagatacccaaaaaactaacanaaaaacaanaaacacaataccacaaggggggggcgcgccataaaagttcccccccaggggggccacaataatttagcctgcaaccacaggttgtctgggacacaagggggggcccacatcaagagggacggagagattatcaagacatggcacgtgcgccgtcggttgaacaacatgcgaagcgtgagaacaaggtgctacgagggggaacacagagaagggcaccaaacatatggtggggagacgcaggggcaccatcac

SEQ ID NO: 516482 - DNA, 478 bp, Homo sapiens
  misc_feature (171)..(171): n is a, c, g, or t
  misc_feature (223)..(223): n is a, c, g, or t
ctgctcgaactggtcaccgcgcagcgggtccagcaggtagtagctgaagtccgaatacaggtccagcttgtagcgcagcgcataggccgagccggccagctcgccgccgccgatcatccgcttgaagccgccggacaggctgtagcgatgcgtcttgccgccgtcggcgcngccgccgtcgaagcagcccaggcgatcgaccaggccctcgtccaccgcgcgntgcggaatctggtcggtggagtcgaagcgggcgttgtaacccatcgcggtgagatgaaagccgcccgacccgtcctgccgcgaatagcgcaacaccacgctgccgttgaagaagttgtcgttcttccgataggcgccgtcgtagtgctcgccttcaacgccgtagagcaggctaccgccggacaagggcgcggaacccgcggcgaggccgcgcgcgtagccgtactcgcacgccgctgagctgcagcagctgctg

SEQ ID NO: 516483 - DNA, 1921 bp, Homo sapiens
  misc_feature (1660)..(1660): n is a, c, g, or t
  misc_feature (1669)..(1669): n is a, c, g, or t
gtacgggagtgggactggtttaaaggctggagtccatggagtagaacctataatgtcctggaacagtgggtttggcaatggcaaaagagggatcaagtcaggagcaggttgggaagccttggaggaggaggaggagttctctgggtgtccttgatggaggccccccagccacatcctgctgtccacagggcctggccccagctgagatctctgcagtgtgtgaaaaagggaatttcaacgtggcccatgggctggcatggtcatattacatcggatatctgcggctgatcctgccagagctccaggcccggattcgaacttacaatcagcattacaacaacctgctacggggtgcagtgagccagcggctgtatattctcctcccattggactgtggggtgcctgataacctgagtatggctgaccccaacattcgcttcctggataaactgccccagcagaccggtgaccgtgctggcatcaaggatcgggtttacagcaacagcatctatgagcttctggagaacgggcagcgggcgggcacctgtgtcctggagtacgccacccccttgcagactttgtttgccatgtcacaatacagtcaagctggctttagccgggaggataggcttgagcaggccaaactcttctgccggacacttgaggacatcctggcagatgcccctgagtctcagaacaactgccgcctcattgcctaccaggaacctgcagatgacagcagcttctcgctgtcccaggaggttctccggcacctgcggcaggaggaaaaggaagaggttactgtgggcagcttgaagacctcagcggtgcccagtacctccacgatgtcccaagagcctgagctcctcatcagtggaatggaaaagcccctccctctccgcacggatttctcttgagacccagggtcaccaggccagagcctccagtggtctccaagcctctggactgggggctctcttcagtggctgaatgtccagcagagctatttccttccacagggggccttgcagggaagggtccaggacttgacatcttaagatgcgtcttgtccccttgggccagtcatttcccctctctgagcctcggtgtcttcaacctgtgaaatgggatcataatcactgccttacctccctcacggttgttgtgaggactgagtgtgtggaagtttttcataaactttggatgctagtgtacttagggggtgtgccaggtgtctttcatggggccttccagacccactccccacccttctccccttcctttgcccggggacgccgaactctctcaatggtatcaacaggctccttcgccctctggctcctggtcatgttccattattggggagccccagcagaagaatggagaggaggaggaggctgagtttggggtattgaatcccccggctcccaccctgcagcatcaaggttgctatggactctcctgccgggcaactcttgcgtaatcatgactatctctaggattctggcaccacttccttccctggccccttaagcctagctgtgtatcggcacccccaccccactagagtactccctctcacttgcggtttccttatactccacccctttctcaacggtccttttttaaagcacatctcagatacccaaaaaactaacanaaaaacaanaaacacaataccacaaggggggggcgcgccataaaagttcccccccaggggggccacaataatttagcctgcaaccacaggttgtctgggacacaagggggggcccacatcaagagggacggagagattatcaagacatggcacgtgcgccgtcggttgaacaacatgcgaagcgtgagaacaaggtgctacgagggggaacacagagaagggcaccaaacatatggtggggagacgcaggggcaccatcac

SEQ ID NO: 516484 - DNA, 1298 bp, Homo sapiens
  misc_feature (1037)..(1037): n is a, c, g, or t
  misc_feature (1046)..(1046): n is a, c, g, or t
ggtagggagggttaggggatcttcccagcaagttctctaggtatgtttgagtgggaatgggtaagatcctcattactctctcccctatctccctgtccagaacctgcagatgacagcagcttctcgctgtcccaggaggttctccggcacctgcggcaggaggaaaaggaagaggttactgtgggcagcttgaagacctcagcggtgcccagtacctccacgatgtcccaagagcctgagctcctcatcagtggaatggaaaagcccctccctctccgcacggatttctcttgagacccagggtcaccaggccagagcctccagtggtctccaagcctctggactgggggctctcttcagtggctgaatgtccagcagagctatttccttccacagggggccttgcagggaagggtccaggacttgacatcttaagatgcgtcttgtccccttgggccagtcatttcccctctctgagcctcggtgtcttcaacctgtgaaatgggatcataatcactgccttacctccctcacggttgttgtgaggactgagtgtgtggaagtttttcataaactttggatgctagtgtacttagggggtgtgccaggtgtctttcatggggccttccagacccactccccacccttctccccttcctttgcccggggacgccgaactctctcaatggtatcaacaggctccttcgccctctggctcctggtcatgttccattattggggagccccagcagaagaatggagaggaggaggaggctgagtttggggtattgaatcccccggctcccaccctgcagcatcaaggttgctatggactctcctgccgggcaactcttgcgtaatcatgactatctctaggattctggcaccacttccttccctggccccttaagcctagctgtgtatcggcacccccaccccactagagtactccctctcacttgcggtttccttatactccacccctttctcaacggtccttttttaaagcacatctcagatacccaaaaaactaacanaaaaacaanaaacacaataccacaaggggggggcgcgccataaaagttcccccccaggggggccacaataatttagcctgcaaccacaggttgtctgggacacaagggggggcccacatcaagagggacggagagattatcaagacatggcacgtgcgccgtcggttgaacaacatgcgaagcgtgagaacaaggtgctacgagggggaacacagagaagggcaccaaacatatggtggggagacgcaggggcaccatcac

SEQ ID NO: 516485 - DNA, 1305 bp, Homo sapiens
  misc_feature (1044)..(1044): n is a, c, g, or t
  misc_feature (1053)..(1053): n is a, c, g, or t
tataaaaatagctctgttaccggaaataactgttcatttttcactcctccctcctaggtcacacttttcagaaaaagaatctgcatcctggaaaccagaagaaaaatatgagacggggaatcatcgtgtgatgtgtgtgctgcctttggctgagtgtgtggagtcctgctcaggtgttaggtacagtgtgtttgatcgtggtggcttgaggggaacccgctgttcagagctgtgactgcggctgcactcagagaagctgcccttggctgctcgtagcgccgggccttctctcctcgtcatcatccagagcagccagtgtccgggaggcagaagatgccccactccagcctgcatccatccatcccgtgtcccagggtcacggggcccagaaggcagccttggttctgctgagtgcctgcctggtgaccctttgggggctaggagagccaccagagcacactctccggtacctggtcctccacctagcctccctgcagctgggactgctgttaaacggggtctgcagcctggctgaggagctgcgccacatccactccaggtaccggggcagctactggaggactgtgcgggcctgcctgggctgccccctccgccgtggggccctgttgctgctgtccatctatttctactactccctcccaaatgcggtcggcccgcccttcacttggatgcttgccctcctgggcctctcgcaggcactgaacatcctcctgggcctcaagggcctggccccagctgagatctctgcagtgtgtgaaaaagggaatttcaacgtggcccatgggctggcatggtcatattacatcggatatctgcggctgatcctgccagagctccaggcccggattcgaacttacaatcagcattacaacaacctgctacggggtgcagtgagccagcggctgtatattctcccccccaccccactagagtactccctctcacttgcggtttccttatactccacccctttctcaacggtccttttttaaagcacatctcagatacccaaaaaactaacanaaaaacaanaaacacaataccacaaggggggggcgcgccataaaagttcccccccaggggggccacaataatttagcctgcaaccacaggttgtctgggacacaagggggggcccacatcaagagggacggagagattatcaagacatggcacgtgcgccgtcggttgaacaacatgcgaagcgtgagaacaaggtgctacgagggggaacacagagaagggcaccaaacatatggtggggagacgcaggggcaccatcac

SEQ ID NO: 516486 - DNA, 391 bp, Homo sapiens
  misc_feature (78)..(78): n is a, c, g, or t
  misc_feature (391)..(391): n is a, c, g, or t
gatcttagctcatacgcagatgacgggctctgcgtcaggtctccaggagcagctccgcctccttcacagacaacggtnataacctcctccccgcaaaggctttctgtccgatttccgtttcaggacagatgaagtggaaggcccaggactgtcttcctcctggggcttctttgcatttcctttgtaactttttccttcttgcatgctgtcccacatttcaatcttctgtctccttttttcttcttcaagttgtttcagtttttccttatgcttttcaacttgcgcatttagttcttcttgcattttcagtcgagcagctgctaaggcttcttgtcgtttaacaacaacatcaggttccacagcagccgcagctcggtccagctgcctctgn

SEQ ID NO: 516487 - DNA, 296 bp, Homo sapiens
gggtgatctagaggatcccggacaagtggcagtcagggctgaatataagaaagtcacctaatagcggaagcaagcagtcactgaatgtaagaaatacatagataagttacaaaaaaaaagtgaaaggaaagtatagctcctgaaaaatgcataggctttaaatactaaagtaatatacagagaactacacaataaggatactagctacaaaaccactgggaatattaaggattccctgatactatatacaagaaaaataagatttcatagaaaaacggtgcactagacaacggcct

SEQ ID NO: 516488 - DNA, 506 bp, Homo sapiens
  misc_feature (290)..(290): n is a, c, g, or t
  misc_feature (459)..(459): n is a, c, g, or t
  misc_feature (464)..(464): n is a, c, g, or t
  misc_feature (469)..(469): n is a, c, g, or t
  misc_feature (474)..(474): n is a, c, g, or t
  misc_feature (500)..(500): n is a, c, g, or t
atgttgtctgctgtctgagaaaccacctgtccctgtcaagggtgattttattggttttaagtggggaagtaatcccatgtacttatttcttaaatacctaggaagttcttcttggtggctcctcttggccctcccctctttctcccccaacccaccatcctgcaaggcaaggaatggcctctccctccacagggcaacggctgcagagggagcactgtggctgccatcccagttcctcttcaaagccaaacagacacgcgtgacttcaaaccctacagtatgggagggtnggcgttgcatttgaaattccaggggcttgagttttgatagtgggatttttaatgtagttgtttaaagggtattgaatttcatgtttttattaactgttaggagggcaaggcaagtttttttattttttttaaaaaagttttttgaggaggttaattttttaagttttcngttgncagcnaagtnggctaatttaccccctttaaattacnggggga

SEQ ID NO: 516489 - DNA, 474 bp, Homo sapiens
cgcgatgcacgatgcaggtatttgtgtgggatagtgagtagagacggggtttggcgatgtggccaggatggtctccatcttctgacctcatgatccaccggccttggcctcccaaagcgctgcgattataggcgtgagccaccgcgcctggctgaaaatcccctctacctcatctcctccacgcactgtccagcacagctctggacgctatataccacgtgcccaccaggcttcactgagagaaaaacctttcttctcaggattccagccacaacccacaactgtatgacaaagtgcagcaaggtgctccccaaatctgcaaacaaaatagtctctctattggggatctacagtcccttctagagcagttagactagatttctacaaaaatcacttcaggacagcaatcagttatttcacctccttcagtgctcctgtcatcttcagatctgacacggataacacgttcgcgag

SEQ ID NO: 516490 - DNA, 722 bp, Homo sapiens
aaggcacgatgcatcgtggtagtccatgcctttcttggacatccagaaaaggttcggcctataacatagatcgagtggttgacaatccagagtggtgaacagccctcacaagatggctggtcgatgccatgcttttgaaaacagaatggatagacatgtgcacatggaatcggcttactagctcgggccagagaacagagtgcaagatagaactagtgatgatttcgttagagtgtttgcttcggctggaaaacgatgagacgtgcagtgataccatcaggaagcagcgggaataagcgtgataaacggaacggcaaagtacaccccgtccacctcaccacattggacaagggggagacctcgtgtccctgcaacagagtcagctgctgatgtctggtaggctgattttcctgttctctgttctccactggaaaggttgtttacgacaaacctcctatgtcaaagtgtgtaaaacttcaggattgctccatcctagatgaaagatgacaaggggcctagaggacaccccgacacacaacacatcaaaacataaagaaggtccaaggaaagccaaggtggcacgatgggggtggcagcagcatgcatgtgtaggcaccattcgtggcctttggacccattctggagtgaacgtggccaccaaagtcttctcccaaaaacagggggcagcaaaagtacggggcgcgcaccctgtctattggcct

SEQ ID NO: 516491 - DNA, 441 bp, Homo sapiens
cgtggattacaattccgaacatgaagatttgggtgtggaccagagagcccaaacccatataacccaagatacctatactaagaaacaatgcccagttcccctaaagacaagagatgtgaaggagcccagagaagtaggtggaatgacaagaggaaggggcatgaaggacaagaggaaaagcatgaagaccaaatgtacttcccaagtttttgcatgtaacaagaagaaaaaagaaataaagggttaagtcagttccaatggtggcagatagatcagatttttgtttaagtgtttagatgtcttttggcagagacaactggttatgccacacttcagcatacctattgcctacaaccttgttctgcatttcccatgagaccatgaggctttttattcaagatcattttgctctgaaatttacctttctctgaaaaaaaaaaa

SEQ ID NO: 516492 - DNA, 277 bp, Homo sapiens
tggagcgtaccgggttttctccaggcgggtttcttatactctccttcttgtggcaccccttcccattttccctgcgggtttttcttggaaaattttcttccccccctccagtttcgcgtggtcgggccctcagcatgtggtggtgaagaggggcaggggtgccggttaaagtgggcgcggggcgcggggcaaccggggccggcgcctgggtaagtggcgggggcactatggtgagaagtctggcgtgggggggcgggcggggtatccgggcaacctc

SEQ ID NO: 516493 - DNA, 243 bp, Homo sapiens
tcgcgaaggaggtaggacacagaactaaaactattatttacatctaacagacacactacaagtagaatcaattggaaaatcatgtatttatgcttccatagggaacatttgggttatttaaatggtccataaggtcccatatttcaccggttcagtgtatacggtacttggcaatcatctttccttttttcacatagggtaaaaataagtgggcatccgataggatcatggattttataattg

SEQ ID NO: 516494 - DNA, 151 bp, Homo sapiens
cgactcgtagcagtgatccccggcatatatgaggactaagcggcaaagtgaaaccagaccagaggactggatgagtgagattgagctgagatggagtcctggatatgaaaaagactagaggtgaacttaatgcttgtcatatggtggccag

SEQ ID NO: 516495 - DNA, 274 bp, Homo sapiens
  misc_feature (15)..(15): n is a, c, g, or t
ggcacctgacagtantgggtgaaggcgagcatagcacttgcgacagatcatcttgacgcagtgtatatcttgggcaagctggctggagagaaggctcaataatgccacctcgcaggccgcaacaccaggtgccagggtggactctatatctaggatgtagtagtactagagagagtgcggccatcctccagctgtttgccggcaaatatcagacgctgctggtcaggtgggataccctccttgtctttgaatatatggcttttgacatatctca

SEQ ID NO: 516496 - DNA, 215 bp, Homo sapiens
accaggccacgaggaaccgcagagagaaagggcagtaagtttcaggaccctggagttgctaggcagtgttaattctcttccccttccttgagatagctctttttttgttctgtagcaaaaacttagcagtccttacacagtgggaatgaggattagaacttccagatgtgggccattctctcctgagtctgtatttcctctcccacagagctaaa

SEQ ID NO: 516497 - DNA, 1169 bp, Homo sapiens
gcaggaggcccctcaggcccgtgcgggccattgtctgctgtccgcctgccggggtggcagagtgagttgtctcaggaccgccgtctactgcgacgttgacacgtcctctcccttcccttcctcctcacaattgccccaaacactgtggaaggggatgaaggaagtgatccacagcattcaggccacttggggtctagaccatggtggtgccgagcctggggggggcagtggtcctcagctctgcccgctggatgcggttgatgtgcatgacagggtgcgcctcttccctctagccccgcatcacctgctgtgtgccatgcctgagacggttcctgcctgtcttgcggggtcggtgggagcgtggcggcacgttctgccagccgttggcagggctggctatggggcatccaggactgtgggggtctggaggaggggacatgaggtgagaggtatcctggaccgagggcgtgaggcagacgggaggtctccctaccgtgactacctcagggatgctgagcggtgcagggcatccagggcgaggccctgggcacagagtcaaggctcagaggacttcacggttagctagtctcatcataacacttgccattacgaatggtgctcgcttgctcgcaactaaccacgttgtgacctctcaacgacgcccgccacccacgacccccccacggccaacatattacccgagatcgctccaccacacgtgactaccagagcggtacctcgtggcaccagcgtgcagcctcgacccaacgttcctggtcccaacgggaaaaaccggcgggaccaccaaaaagtacgatccatataactctggaaaacccgtgtaaccggcatagtactcccaagaacccaccccccaccgcgccctgacctggtgcgtcaaccgctatcccacacccaacgcgacgagcatcgtaccacccagcgccgcacatccaccacaccctctgaccccagcgtgccccgcacctcaaacaccaacacacattcgcccgctggacctgttccccatcacagaggagctaaccacgcacacctccagcgctcgacccgaacctgacccaccgagcgattcacgtacccaacacacgcgcgcagcgagacaccccaccataccccaccacaccggctccctacgagtacccacaccg

SEQ ID NO: 516498 - DNA, 196 bp, Homo sapiens
  misc_feature (76)..(76): n is a, c, g, or t
gcctgagtcacatttttacatggttctggtgctcttcctgcaggtcaagaaggagccagtatcttcagggggagtnagagagttctctgccaagtgtgaagtgtgaattcttgagaggctgttgcaagggtaccatggcttaatgtgtagagacaagagacaacttgagagcttttgctttctctcagggagagag

SEQ ID NO: 516499 - DNA, 194 bp, Homo sapiens
aaatccccgtgcggctccagccccgggtctcgctcaggagcgatgagaggggcgccctggccacacaggctttcctgaagcgtgcacagtgggtgaggggctccacgacaaaaggacaagatttgacttaaattaagtttttcccttgaggatattttcattttctttaaaagaatataattttcttttaagga

SEQ ID NO: 516500 - DNA, 399 bp, Homo sapiens
cagttatttctctcttctaatgatcattcaatcaggaggtcagcatgcagagattgggtaacagcaaaagcccatctccagagataaaattcaaaatggtacagctcgtcgtgctgactcacaccaggcaagctgaggccctgaactgtgtcactgacttaactgatcataatttgtgcttttcagatgaatgaagttacttattctaccctgaactttgaagcccagcaacccacacaaccaacttcagcctccccatccctaacagccacagaaataatttatacagaagtaaaaatgcagtaatgaaacctgtcctgctcactgcagtgctgatgtatttcaagtctctcaccctcatcactaggagattcctttcccctgtaggggtagaggggt

SEQ ID NO: 516501 - DNA, 598 bp, Homo sapiens
taataaagtcaccacccttctgtcaacaacctccaccaaaatttcgtgcagaaacacttaattctcgccacctgtcgctccactcttcaataccacaaatgttgcccacacaaaatgtttttttcactctcttttcgaccaaaattttggttcgaacatccgctgttgaccaatgaccctctgtttataatcgttgaacaactgctcgtacatctagcaccaagaagttcgttcgacacttctctaatcaatcacattggggaaaacatcttctctttcctcttatttactcataatcacctcattttccacacaattatctaactgaggtggctccacatgtttcactgcactggagcataatattcttttttagtacacacatatgataatgtgcccccaccgcgtgtatctttctcttattaaacaatttttaacggcgaaagtgtcccccaaatgaaagatgttgcccttgttacacccaactacaattatccccgatttttaataaacttgctgactaataccacctaagaaaacatttgggtaatcttggctttgttttccaatataaaaattgaaccccaaaataaaaaaa

SEQ ID NO: 516502 - DNA, 188 bp, Homo sapiens
attcgcggccgcgtcgacgaggaaaacagaggggttttttttttccccaaaatggggcctgtggcacctgctctgttttcccaatgagttctaggttaccggaagttattttagggtctttcctgtgtgcattatgtgtggctagactaacacaagatgaactggatgttttaggaaatggttccctc

SEQ ID NO: 516503 - DNA, 528 bp, Homo sapiens
ggtatgggaagaacccagcaccactaataaagctgctgctggctggaaaaaaaaaaaaaaaaaaaaaaaaaaaaaaaaaaaaaaaaaaaaaaaaaaaaaaaaaaaaaaaaaaaaaaaaaaaaaaaaaaaaaaaaaaaaaaaaaaaaaaaaaaaaaaaaaaaaaaaaaaaaaaaaaaaaaaaaaaaaagaagcggaggtgcgcggcgcgggcggcgccgcccgaaatactacaaacgcaatacaagtagggggagcgcggccgcagcgaccgcagcgagcaggagtgaaatgcgaaggcggcgcgagtgttatacaatgcatagataggcgctagcagaagtcgaagagatgtgagggagcttggaggtagaaacaacacaccagtcgaggagcgctggggggtagcggggagtcatacgaactaacgataaaagggtgtggagggtggaagagtaagggaaaatacaagagtgacacatgggtcgcggcgccgacgcgtatgatcaactagccccccgggggggttta

SEQ ID NO: 516504 - DNA, 215 bp, Homo sapiens
actgtgtattattcatctccttcataaatttaatgtagcatacgaataggagtccctaaagacccattgttccattaggcttgatgtccaagggcagttattcagcaaactcaaccaaaccctttttaaaagtatttcgaagtgaaagtggacatagtattcatacgagggaaaaagctcctttagaaacggagaacacagtcatattgagacgt

SEQ ID NO: 516505 - DNA, 609 bp, Homo sapiens
  misc_feature (29)..(29): n is a, c, g, or t
  misc_feature (73)..(73): n is a, c, g, or t
  misc_feature (134)..(134): n is a, c, g, or t
  misc_feature (152)..(152): n is a, c, g, or t
  misc_feature (164)..(164): n is a, c, g, or t
  misc_feature (191)..(191): n is a, c, g, or t
  misc_feature (202)..(202): n is a, c, g, or t
  misc_feature (226)..(226): n is a, c, g, or t
  misc_feature (242)..(243): n is a, c, g, or t
  misc_feature (339)..(339): n is a, c, g, or t
  misc_feature (343)..(343): n is a, c, g, or t
  misc_feature (398)..(398): n is a, c, g, or t
  misc_feature (412)..(412): n is a, c, g, or t
  misc_feature (421)..(421): n is a, c, g, or t
  misc_feature (436)..(436): n is a, c, g, or t
  misc_feature (558)..(558): n is a, c, g, or t
ctcacaccctggaggcagcagcataagcnccagtttccactatggtgtctcctcaatgacaagaatacccgcnagttccaggggtcagcaattccattctctctctccggctcagttcagaagctgtgatggtnctgttagagagcactgcntgcaggtcaaangctggaagaggctctcccaggccaggngacaacccttnaggtgcagagggggaacaaaaggnttaagctgtgataatnncaacaccttctgaaaaaagagtaaaagttatccagcaacgggccatgggtaggggcgggcggtagcaggggaactgtcccctgcctcagcatgttntgtncagagggtgggcacagatataggctcgctttttaaggatttgctgggacactttnttaatttgctgatntaggttttntggagcatacttgtncagctgagagaggctgaagagattttgcaagtaagcttccacgcagaaggtgttggccaagagaacctcgtggtcgtggttgctgagcccaatggggatggagcggctggaccgcgaaaganggccgttatgccataaaggttgatgaggatgttggccacccgctttagtac

SEQ ID NO: 516506 - DNA, 225 bp, Homo sapiens
  misc_feature (208)..(208): n is a, c, g, or t
tgctgaggtcgactctacgacggactcccctctaccctgcgcgggtgcattctaccctcgcgggtgccttctaccctcgcggggtgcctctaccctacgcgggtgcctgcctacgtgctggacgtacggggaccacactgggacactcctacgacggggactggacagaccgctggggacgtgacgcgtgggtgcactttttacactncttacgacgcgggtacc

SEQ ID NO: 516507 - DNA, 308 bp, Homo sapiens
tagctgagttggtgagaggcctggaatgctgctgatggtctacccgtgtacccagagagtcgatgagtcctttggggatctgaccactcctgatgctgtaatgggcaaccctaaggtgaaggctcatggcatgaaagtgctcggtgcctttagttgatgggctggatcaactggagcaacctcaagggcacctttgccacactgaagatgagctgcactgtgaacatgctgcacgtggaatcctgagaacttcaggctcctgggcaattgtgctggtctgtgtactggcccctcacttttggcaaaag

SEQ ID NO: 516508 - DNA, 119 bp, Homo sapiens
tttcggctccattataaaagacataacagtattagatcccacagctaccttggaaaaaagtccttctccagcacgggaaataagagattcagcaacataaaccctttctgattcatagg

SEQ ID NO: 516509 - DNA, 100 bp, Homo sapiens
acggccgtgtattactgtgcgagaggggacattgacttgtattacgatattttgactggttatacaaagtggggccagggaaccctggtcaccgtctcct

SEQ ID NO: 516510 - DNA, 135 bp, Homo sapiens
ttgggctgtcgtgccggagcaaggccaggaggctgaaggagtcatgcgcatgatggggctcagcagtgtggctgcactggagtgcctgtttcctctttttcttcctcttcctcctcatcgccgcctccttcatga

SEQ ID NO: 516511 - DNA, 967 bp, Homo sapiens
  misc_feature (78)..(78): n is a, c, g, or t
  misc_feature (126)..(126): n is a, c, g, or t
gctgagctatgattaggtagagacacatcagggtggctggcatagtcggcgcgactgaggcgcccagcgctgctaganggaatggtcaaggcgctcggtatgtgtcagtgccatcctgacaagccntctctggtgcttgtcgtgaacttgcgtgcctcagagctcgagcagattgcttccagcgtctgcattgctcggacaagctggggtatagagatgatccccgttcaggcaaagtccgaggcatgaagtgcagtcgcacttcaaggtcgcgagtcacgtggagggacctcgggactgctctctggttgggcccacggggctctacaggtactgtgtggcactggtgggatagaagactaggcctaggtgggtaattaggtcctctggcgacccaagcgatcgtagactagaagcaatggcgtagaggaggaccgcgaagcttgaccttgcgggaccgatgtcgctttggattcgtcgctccggcgtacgaaggtcggacttagtttggttaacgaaccacccttaaccggacgtgggaggatctattggggcgttggaacacgaaagacattgcacatgtccctaagggggggacaactcaattggaagaacgggctcactcataccttaaaaaactttaaccgcagtttgccaccgccataacttggttcaccagatggggctaattgggcattggcctccatttggagacgccatagggagatagcgggtgccatgcgtccttttaggtccaaacatgacaaccggcggccctttgcggagcgaatggggtttgcccctagaaagcgacaacggacaccccttgtgcgcccagggcaaggtaaatcacgctcccgggtcgacagcgacagcacatcacaaaacgcgccacagagtgaagctccgcagtaaatggaaccccaattggggcagaaccaccacacacattatacagaaaagacac

SEQ ID NO: 516512 - DNA, 405 bp, Homo sapiens
gatcggtaccagttacaagtcaggagttggaaaccagcctgacggcatggtgaaaccccgtctctactaaaaatataaaaaattacccgggcgtggtggcgggcgcctgtagtcccagctactcaggaggctgaggcaggagaatggcatggacccgggaggtggagcttgcagtgggccaagatcacgccactgcactccagcctgggagacagagcgagactccatctcaaaaaaaaaaaaagaaagaaagaaagaaaaagaaaaaaaaagaatttctgggcttggaacccaggcactggaactgtgaaaactttctcaggtaatcccagtgggaagtaactttgagaagcaatgatttcttgaccttaggagttctgcaaagggagggaagctggactctgg

SEQ ID NO: 516513 - DNA, 641 bp, Homo sapiens
tggcccttagtctcttccacatattataataaatgggggttagatactctacaaacaagactattatataagatttattatatgactcatcctaatggtttaaatctggaaaatttaaaattagactatttacacattttatctaaaggctttcccttcatttcaaaatatgttcaacatttctagcactatttaaaattgaattgggtttacttcttctctcctgggatttaaaagagaaactatttgctatgtatcaagataaaggtttccatgtaaatcactcttatatttctcaagcctacaaataccttaaccaatgagattgaaatgtgagctactttttatactagtggggcttcggattgtgcattcagcattaaaaaacaaagcgattatgccaaattatagcaagaccctcaattaacaagtaaccattaaccatgtgagcggagacaactaagacgcaatagcacagaccaattcagtgtgccagtctttttaacacagtgagcaccatgggctgtgaatgggactctcatataaggccacttatttccccttaagaaccgtgcgtgtttgtgctttacggctgctccatagaggcctgaacctttcctacccgtgtaagcctattgccc

SEQ ID NO: 516514 - DNA, 97 bp, Homo sapiens
  misc_feature (58)..(58): n is a, c, g, or t
gagggagacatggcacaagtcagagcacagcaggagccaacctaattgtgggaagaangttagaattacgccgatgaatttgataggggaaatggat

SEQ ID NO: 516515 - DNA, 963 bp, Homo sapiens
  misc_feature (86)..(86): n is a, c, g, or t
  misc_feature (312)..(313): n is a, c, g, or t
  misc_feature (315)..(315): n is a, c, g, or t
  misc_feature (323)..(324): n is a, c, g, or t
  misc_feature (409)..(409): n is a, c, g, or t
  misc_feature (412)..(412): n is a, c, g, or t
  misc_feature (421)..(421): n is a, c, g, or t
  misc_feature (428)..(428): n is a, c, g, or t
  misc_feature (442)..(442): n is a, c, g, or t
  misc_feature (444)..(444): n is a, c, g, or t
  misc_feature (446)..(447): n is a, c, g, or t
  misc_feature (453)..(453): n is a, c, g, or t
  misc_feature (463)..(463): n is a, c, g, or t
  misc_feature (466)..(466): n is a, c, g, or t
  misc_feature (478)..(478): n is a, c, g, or t
  misc_feature (480)..(480): n is a, c, g, or t
  misc_feature (482)..(482): n is a, c, g, or t
  misc_feature (498)..(498): n is a, c, g, or t
  misc_feature (504)..(505): n is a, c, g, or t
  misc_feature (512)..(512): n is a, c, g, or t
  misc_feature (523)..(523): n is a, c, g, or t
  misc_feature (548)..(548): n is a, c, g, or t
  misc_feature (553)..(554): n is a, c, g, or t
  misc_feature (562)..(563): n is a, c, g, or t
  misc_feature (567)..(567): n is a, c, g, or t
  misc_feature (575)..(575): n is a, c, g, or t
  misc_feature (585)..(585): n is a, c, g, or t
  misc_feature (590)..(591): n is a, c, g, or t
  misc_feature (932)..(932): n is a, c, g, or t
agcgggaccgcgagcgagagcgcccccgagcagcgcccgcgccctccgcgccttctccgccgggacctcgagcgaaagacgcccgnccgccgcccagccctcgcctccctgcccaccgggcccaccgcgccgccaccccgaccccgctgcgcacggcctgtccgctgcgacaccagctggttggcgtcttcgtcgccgcgctcgccccgggctactcctgcgcgccacaatgagctcccgcatcgccagggcgctcgcctttagtcgtcacccttctccacttgaccaggctggcgctctccacctgccccnntngctgccanngccccctggaggcgcccaagtgcgcgccgggagtcgggctggtccgggagggctgcggtgctgtaaggtgtgcgccaagcagccnaangaggactgnagaaaanggcagccctggaananannaagggngctggaatgnaanttcggcgccagncnancgctctaaaggggatntgaaannatcagtnagagggcagancctgtgaatataatccagaatctancaaannggggaaannttcnagcccaantgtaaacatnagtgnncatgtattgatggcgccgtgggctgcattcctctgtgtccccaagaactatctctccccaacttgggctgtcccaaccctcggctggtcaaagttaccgggcagtgctgcgaggagtgggtctgtgacgaggatagtatcaaggaccccatggaggaccaggacggcctccttggcaaggagctgggattcgatgcctccgaggtggagttgacgagaaacaatgaattgattgcagttggaaaaggcagctcactgaagcggctccctgtttttggaatggagctcgcatcctatacaacctttacaaggcagaaatgtattgttcaacaacttcatggnccagtgctcaagactgtggactggtatctca

SEQ ID NO: 516516 - DNA, 376 bp, Homo sapiens
cgtcggactacatatgtgtagtttttgttaccaagcatccatagcacacccgaggatgacaggcctccaagtgggatctggaccgagtcaacttcttgctcggatgattatggtggggcctcaactttcactaaagcaatgctgttgttacagaattggacctgactttgaagaacaaaacacaacagacatacacgagtataaaattttatgctaaaaaatgactcgcaatgaatcaatcagtagcacattgcatctgttaagtgtcccaggtccctgtaatggttatgtttccaacggttgcttcgtttccaagataatggtgtaggtgttacaccccaatcttcatgtccacattctgcaggttccttgtctc

SEQ ID NO: 516517 - DNA, 391 bp, Homo sapiens
gaggggtaggaaagaggactagcatctattcttatatttgtggcgacacatgatgacgcttcatgtaaaacagaacatacagtgaaccccaaaatcataaatgccaagtactccatgtacatatggactcatcactatgagttactagtagctggatgccatttctcctcatcaacccaaatcccgcatcccagatggaccttgacattgtctaggatatacttgatccatgaccggcgcaggagcgggataataggacgacgtattagctacctcactgaaaagtgctccgtacctccggctcgggctcgagacattctgactttactttatccagatcaatggcgggaccgctgccaagcttcaggagcagcacgtcctggagcctccg

SEQ ID NO: 516518 - DNA, 275 bp, Homo sapiens
ctgcagagctccaagctgctaactatagcatttggagccatcatgtccagctacctcggcccagagcccagggaaggctggcaggcgtctcatctcccatgtggagctgacaccagcggctgagtcggaaaggagggagccttaccaagactcctgcaaaacccttgacctctccacgtggtgccgctctgcccctctcaggctgtgttacctgtgacagcagctctgccccaccccatgggcctcatgaataaatggcttcttgccggcttcct

SEQ ID NO: 516519 - DNA, 109 bp, Homo sapiens
gtcaaattatttttttcaccatccacatccaacagcatcattcccatcacaaccattccactgttcatcaccatgttccaacattctccacaccatcgccacagatgcc

SEQ ID NO: 516520 - DNA, 253 bp, Homo sapiens
  misc_feature (34)..(34): n is a, c, g, or t
  misc_feature (42)..(43): n is a, c, g, or t
  misc_feature (147)..(147): n is a, c, g, or t
  misc_feature (197)..(197): n is a, c, g, or t
  misc_feature (206)..(206): n is a, c, g, or t
atacttgctggtctgatccatgcacaaggcgggnctgctagnntcttgtgccggggcttggaattcggtgcggatggcagctccgggatgacccgccggacccgctcgcaaataaggtggcctggtaacggcttcaccgacgggatnggctttcgcatcgcccggcgtttggccaggacgggcccatgtggtcgtancagccgaanagcagaattttgacaagccgtgcacgctcaggggaagggcttaacgt

SEQ ID NO: 516521 - DNA, 303 bp, Homo sapiens
tggtcgactctacgacggactccccctactgttctcgactcgttactgacgacgaactacggtccggaccaacgtctgactggtacgtggtcatacctcccacagtctgacggacggggaggactcaccattagcctcgggtgcctggaaacgacgaaccactatcccgaggcagaccgtttacagaatgagctgtaggaaactggcgcagctgtacaatggctagttccaaaacttttccccaaggtatggactgtgtgcatacccgtaaacaccggtccggcacacctacctctccctctt

SEQ ID NO: 516522 - DNA, 1335 bp, Homo sapiens
gcgcgtgggtgagggatgggtcaggtctagaatatgccttccgtatgtctcgtctcagtgcccggctactttggtctgaaggtcgaccagggcctacgtaagttccaagatctatgagaagtggtgaaactgtattagatgaacgtgcccgtaggccgagaggaagaaggagacttatgatgggctatccgaaatcaccacagcttacgcatggagctcattgcacgtagcagctccgactttcgttgagacctctaccatgacgatgatgcatcacggattttagtggattgagcatcaaaggactaatatgaagcttcgtcggaaacggagaaatgcaaagaaagtgatgagagggaagaagagcgaggctgaagaggacattagtggtcggtcctctcactcagggagacctttcattccctcagatgcgcgcgagagacagaaagtagcatcttagtatggtcttatccgaacatacttggacggacatggtcaatctttccttgaacatgaatgctgtatctcggagggaaacatgagtccattctcctttggtgtgaagaatcgtaatcgcggatcacacttgtagggctgggtatcgtgggaaacaagcagtgctagactcgtggcacaagttatcttggccatagagccgcggtgaagtcgtcgaagggttaaccctgaattccttcctaattgacaactaaaagtaaccctaaaaaaaagaaaaaaggaaaaacacacaacacaaaggccacacacgacacacaaaacaagagacaacaaacagcgcggagaggaatacatatcacagggggccggaggaaaaaaagagagagagaaaaacaaagaacggcaagaacggtgagcgcaaacatacaaggatgtcgagtagcccgccgcaacttctgctgatcacacaagaggagggagaacgagacacgggagcccacacacaataggaaggggggcgacgatcaatatcccaaaccaagccgggggttccctgtattatatcaatagacgcgaaagacagaaggaagggcagcgaggaaagggacggaacgcagagcacacgcgaagagagaggcgacacaaacgagccggaagaagggaacgcgggcgaaccgcgcggaagggaacacacggagaggaagcggaagagaagagcggagcagacgacaaaccaacgccaaggcaaaagagagaacaaagaccagggacgcgagagagaaggaagaatagaaagacagactgaagagaagaagagagcgggcgacgcaagagagaagcaagggaaccaagaagaaccggagccgcagcagaaggcag

SEQ ID NO: 516523 - DNA, 147 bp, Homo sapiens
ttaaggtcgggcgcggacgtcttgcatgtgtgactgcgtcgagtcgtactctctcggaggagctgagcgcgtgctctcttgctcgagtcaggcgagtagccagctctcttatgcacgctattccgctcgcgtgtgtgagtgagccgg

SEQ ID NO: 516524 - DNA, 242 bp, Homo sapiens
aagagacatatacaactcatctcggtacctggttacgggagtggctggaccagcgcgatggtgccttcctccagaaaggtgaggggattctggggttccaacgccccctgaggccacttcttggctgtgtggcttgggcgagttacttaacctctctgggcctgtttcgccagctgttacatgggagtgctccgaacagaactgccttcgtggtgtcactgtggaccccactcccgtaccag

SEQ ID NO: 516525 - DNA, 168 bp, Homo sapiens
actataagaatgaattttgcaaaaatttgtaagtaagctattttggggccggggaaaaattttctgttgggaactgttttttgttccccaaaccagataaaaaccgcatataactttgtgacattttttttgttttgaaacatcattaaaagaaagacagtccattga

SEQ ID NO: 516526 - DNA, 819 bp, Homo sapiens
tggaaacagattctcgctctgtcatccagaacgggagtgccggggtgtgatctgggtataggaacctctgcctccggggttcaaggtggattctcctggcctcagcctcccaagtagctggggacttgctgggcacttgccaccatgcccagttaattttggtattttaagtagagatgggggttccactggtgtgggccaggctgggtctcaaactcctgacctcgtgatccgcccgcctgggcctcccagagtggctggggattacaggctgtgagccaaccacgcttgggcctgggtttggtattcttaccagtagtcggggtcataaatataagaggaacaaggatcaaatacgtggctaaatggccggtagcactcagtaacaatttcttcctaagggtagtccagtcgtgtcctggacctggctctgtgaggttccagttgttttcagcacaggaaaatctggcttaagcatggagacccgccggaaatgaggtgaataactcctctaatttcctgctattcttagtgtcatgtcactcatgacttagactggccccttagacctggtgtgaataatctccatagtttcccagaaattaagactccaccatcttggccccacgcgggaggtggtggcttcacaccctgtggtataccccataatcgtgctgcttgtggtggccgcctgtgagaacgggataaaaggaggccgggggatactggacaaaaggggacattgcctttggtcgtgccccaggcctggccaaaaacccgcggcgagcggcgccaacggggggcgcgcgattacaagag

SEQ ID NO: 516527 - DNA, 1812 bp, Homo sapiens
gggatttcccagctgcacagcggaactccgacggccacccctcttgcgtctcaggggttttgggcgtcaggaccagccaggctgtgttgaacgaggaggccagaaggctagtccagtgaataggggtactctatgtatcagcaattccgcgtgaccggatgctactcgagaattagctagaaggctaggcccatgatccatgaagttgcttcatcgtgacagcggcgggagactcgtaacgaataactcgaaaggcgaaacagacctgcttgctacagtggaggcatactactagatgaaccgtgcacgtgataagctgcacggaaacccgaagcctttgagtacttgcttatccattggggggactggagtgagagcccttgaaggaaccgcccgctaacgtgggtaaaacattcgttccgcgatcgtgtttctcggagaacaaaccgtgcgcaaaggtggagaggcaggtgatcgcagcggagaatggcctgaaagttaggtcgtcgggagtaagttgaaggcaggcgcattggatgcttgactggtggacgcggccgtagtgtgagcaatagcgtacaacccggaacaatttgtggagagaatagttccccctggtcgcgagccagtgcctgggcgaggcgccgcgtaggccacgggtccaaacccagggccatgggaggcactggccaaagagtgggaagcctgaagggtaagagacgaacgtgggatctttcccaggtgagatgaaaaatcgcatttgaaggcactacggaggcccatttcgctttgtgggtctgcttgggcacgaagagaccaagcaaaattggaggaagttctcaccgtttggactgtttacaacacaagacataagatggacccaggcaaaacatcggttctgaattcttggccttgttccccccaaaggggagagaaagtggcattcacgcaaacagtttaatgcgccgtttgtctccactccggtcccattttgcagtggtggactctctaaggtgggtagcccgcaggcatttgtgcagcacagtgggccccaatggcgatttcattgggcgatgtcgcaaatggggcacgtcgcatggggggaacacatgttgagcgttccaaagctttgtggaatgcgcaacgtgacatggtcttggtcatcaggaataaaaaccaggggtgggagaccaaatgtgggtcccctttttcgtgcccatgtcaatgtgaaactggtgaaggacaaagccaaattgtggtatagcgccgcgtagcgagtggttcacatagggcacacaaacctccatttaggcgtagtgatcacccgttttaggtcgcaaccattgtgtagacacggataattgtcaactgggcacggagctattaaaaacgggcagcggataccaaggcgagagtctattaggagcagcgaccatgagccaaccaggcagtgtgtctctaagaagagatgataggacggaaccctcacacaatcttcatactcactttgcaagagtagctgcacaaaactcttggattgatcacaccaacacaacaaacaccgcaatgcactcacgtgacgatacctacaacaacacacgaaacactactacatcattatactctatcacaccaactatgatacacaactaaaacaacaagaccaacttatctagcacgacaacatagtaagaccatcaatataacactatacatcactaaacacaagtgacaccatcccatcaactaaatcatagctactgttacttatctatcattgactctctttatacttaacattagggcacccac

SEQ ID NO: 516528 - DNA, 152 bp, Homo sapiens
  misc_feature (16)..(16): n is a, c, g, or t
  misc_feature (82)..(82): n is a, c, g, or t
  misc_feature (110)..(110): n is a, c, g, or t
attatttttacttatntggaatttacagagcacacctaagcaattaggatataaccaaaactaaccatttttgcaaccattntgttttttaagcctttttatttctaaanagatgaaaacttataaataaattcttaatttgtaattacttt

SEQ ID NO: 516529 - DNA, 343 bp, Homo sapiens
gagctctggctaattcttgtatttatagtagagacggggtttcacccatgtcggccagtgctggtctcacactccacttgccatggtgcccatcctcaacggcaatgtgagcgcagcgaatgcgaagatcatcttgcagtgctgcacctcttgctatgagactcttacctgaggttagcgacactgtctgagattgctgggccctgcaggggctggatcttatcagacgctaagatacagcccctgcaggaacacggtcctgcgggtgggctatgggcgcagcccagggctggcatgtgctacgagcagtgtaccaccagcgggaacagatgtcattaagaac

SEQ ID NO: 516530 - DNA, 201 bp, Homo sapiens
ggactttcgctgtgtctcgtgctcagagatgctgcactcccattgtgtcacagcgggcactcctgaagttacatttgaaggaagtatttctaagcgtgattaatgcagtcaatgtttctgatgcacactgagaaactgctttagcatgagtattcctggagaaattcagtgtgtgttttttaagtcgcgaaagtcaaggat

SEQ ID NO: 516531 - DNA, 204 bp, Homo sapiens
  misc_feature (50)..(50): n is a, c, g, or t
  misc_feature (61)..(61): n is a, c, g, or t
  misc_feature (64)..(64): n is a, c, g, or t
  misc_feature (69)..(69): n is a, c, g, or t
  misc_feature (86)..(86): n is a, c, g, or t
  misc_feature (93)..(93): n is a, c, g, or t
  misc_feature (107)..(107): n is a, c, g, or t
  misc_feature (109)..(109): n is a, c, g, or t
  misc_feature (156)..(156): n is a, c, g, or t
  misc_feature (164)..(164): n is a, c, g, or t
  misc_feature (180)..(180): n is a, c, g, or t
  misc_feature (184)..(184): n is a, c, g, or t
  misc_feature (190)..(190): n is a, c, g, or t
  misc_feature (199)..(199): n is a, c, g, or t
cccccccagccccccggcttcatctgcctggacatcagtgaaagacatcnccgtgttaacnggntagangtcaacacactgaaganaaatgtngggattcgcctggngngggaggaatgaaagtagggtaattaatgaaagcagcttacatatttnccattgcnctcttagcaatatgcncccntccccnttctgcctnttctc

SEQ ID NO: 516532 - DNA, 379 bp, Homo sapiens
  misc_feature (18)..(18): n is a, c, g, or t
  misc_feature (366)..(367): n is a, c, g, or t
  misc_feature (369)..(369): n is a, c, g, or t
  misc_feature (372)..(372): n is a, c, g, or t
gcggtaattttggtaccngttaaattaacctctcccctagcctcccctccccctacccttccccaatctctcataacccacaattcctactctcctagatcctatgagcctcattttttaagtccctgcatttgagtgagaagatgaagtatttatctttctgcgcatgacttgctttgcttaacataatatcctccagattcatccacgttggtgcaaatggaaggattccatactttattttatggctgattattgttccattgtgtgtataccatattttctttattcacctgtttatggatatttatgttgattccatacgtttgctattgtgaatagtgatgcaataaacataggggcatnnanatnacctttg

SEQ ID NO: 516533 - DNA, 249 bp, Homo sapiens
ctggagtgcagtggcgtgatcttggctcactgcaacctccacctcctgatcttcctgcctaggcctcccgagtggctgggactacaggcacataccacgcccacctaatttttttttttttttttttttttggaattttaagaaaagagggggtttaaccttgtgggccaggagggtttggattttttgactttgggatcttccaactttggcttccaaaagggttgggaggggtcccgagctcaaatt

SEQ ID NO: 516534 - DNA, 124 bp, Homo sapiens
ggctggcttcagagagactatagtcattttgtccaatattggaagtaacaagctgtttaatattggacaaaactggctggcttcaaaactatagtcattaataaactaagcttgtatgtgcaag

SEQ ID NO: 516535 - DNA, 386 bp, Homo sapiens
ggaccaaaggtgggcgcatcatgccaggacgaggtggaggaatacctggaggtgcagtgggaggtagccttggtgggggtcacgaggagtggggaccaggaggcagacctggatggtggacctggtgggagtggccagtgggtcggcctggatggtggtcctgtgaggtaaacagtcggggataagggccctctggagtccatggcattccagagtggtctcagtgaatggaaggagctccgtggagagtggaccaaggagagaaggcctgataggatggcccagtgaggcctgtaatggtcggagccaggtgagtggtccaagcaggtaggtggtcctggcattgggaggtgcttgtatctagagaaggaggaacagactgcggc

SEQ ID NO: 516536 - DNA, 286 bp, Homo sapiens
  misc_feature (127)..(127): n is a, c, g, or t
cccgaaaaaaaaaaaaggggggggcccctttggggccccccccccccccctttttttaagttttttccttttggcgggggggggaaaaaaaattaaggcgggggttttttttcccctccccaatttnaaaccggtttcccctaaaaagggtttaaggggggcccggggctttcccccccccttttttttttgggggttttttttttttgggaaaaaacccccccaaatttttaatttttttttttccccccctttttttaaaaaaaaagggggggggcccccccca

SEQ ID NO: 516537 - DNA, 1108 bp, Homo sapiens
  misc_feature (251)..(251): n is a, c, g, or t
ggagagagagagagaactagtctcgaggtttttatttttttattttttccagggtagtaaaccatttaatgggaaacgggttaaaaattagggcaccccaagcctttatggttcccttgaaggtaacaggtttgggtggggtggctcttaaggtggttatttcaagaaaaaacgcatgttgggactagaaaaccggaccttacaggactgtgggtgtttctacaactggagccgcaagggcgctgactacngctggtattctcaaaaccagacgccctagccgccagttcagacaccctacgctcaggaagcggtattttggcaaccgccaccactaactggctatcctatacagatgtccactggaatgtcttattacaccaagtggtctttaatggatataaacatatacaaagtccaatttggatgggctggctataaatatcacttagagaactcttttgccaaaatcctttatacatacaaattcacaaattcgcccaaaaggctcaggggaaaactcacgccttgaaaacacggcggctacagggttcatatctctttggggagaaaattctcaggcccatagagaattgtatccccgcgtcaacagaatttctaccaccgagctccaaaaagggggctatatcagagcgtgtttgagaacgaagttctctgttgaaaggtgtctccggggaactcaggtgaactcgtgcgcgtggtaacacctcttagttcccacccgttgaaaaaacaggtcctctcaccaagatatttctccaacttgaaacgttggggaaaacgtgtgtctgcaaaaatgtgtgaaaacgcgcatcttcctggaactccttgaaagggtggcgtggtcgtgaaaccataattttttcccccccagagaggccaaaaagtgttgttttaaaaaactgccgagaggccacatctcgtggaaaagcggggcacctaaattttcccaaaagctttcctcttgagggccagccaccttctacgaggggaaactttcccccgacaaggccttgcttttccccgttaccgacaaaagcggcgcgtgtgaccgtgatcacctaagagggcccaggttaatccggga

SEQ ID NO: 516538 - DNA, 131 bp, Homo sapiens
  misc_feature (50)..(50): n is a, c, g, or t
aacactgtggaatattagattcacagtattcagttactttaattgtcagncaatattaaattttatagaacttggggaaatttgacttgcgggttgatggatttccatgagtcttcttcttcctgaacgtc

SEQ ID NO: 516539 - DNA, 311 bp, Homo sapiens
  misc_feature (35)..(36): n is a, c, g, or t
gggccccccccttttttttttggtaagggcccctnnagggggggccctttttttttgcccctggggtccttccctttttggccggggttccctttttgttccaagaggattggggctttaaccccctgggggaacccggcttttgtttccccccgccccggttttttcccgggttttttttgggggcgggggggaccctttggggggaaaaaaaaatgggggggccgggggggttcgggttttttggggagggggggccctttggccttttggggttggttgggccctttaacccatttttgggcccttta

SEQ ID NO: 516540 - DNA, 1583 bp, Homo sapiens
acggagccgcagcggctgaccgcggcccagaggctgcccagtggtgttgcagctgcatgcctggccgtgcgcttcctgctactcaccgggtatcggtgcgatcgccgtctcggcggtagcgccctctgctttccttccgagactggtaattccacactccctgcaagcgcatggggcgtggtgcgaatcggttctgagcggcagtggcgaacgtgcaattcacgatttgaggcaacggccgggcgagaaccacgtgaaaatttggtgacactgttggcacgcaaatttatgctccttgcttggcaagaaaacgcggcatgggggtgccaagaaacttcaaataccacatggggtaatccccgaagctgcccgagaagcctggaagggccaattcagccttttcggcccaagcctttccaagccctttcagaagattgcggcgagccttggcccatctgtaattattaccaacgacgggggccaacaacccgccgtatttatccaatataaaccccacaagtcaccgcgatttcacccgactgaaaaacgcacgtgggcgctcacatggcagcaaccgcctaagttggttagccgcgcttgggcatacggccatctctttggtaaatcgcccccctttttggccgcctggtcgaaccaagcaaagagcccacattaaggggcttggcgagcactttggggagctttgggcccccagggtatttggcacgtactacagccctttccaaagtatggcacggccgtctgtgagtgagtaaattttcccccccgtttgggggcacactatgtgcacggaagaacgtataactaaggcgggcctatctatccttacatatttttaccccaccgttaagcggcaaacggcggatccgcgtgtgtgtccgctcaccagaagaatgctatttgggacgagaatccccctctcaaataaacaagtgtttcacacgttggcgtcgctcacacagacaatatctgcacaaaaagcacgcaaaaaacgagccgtcaccccaagctaccattccgattaggactagaatccccattttgtgggggcggcacaagcacattcccttatattccgttttgtgagccataacaggaggcgcccatttacagtttgttcacttaaaacacgcctttgggcttgggtgatgaccccttttgtggccgcccccacccaaagtctttgcgaaattgaagggaccaatctaaacagcacagagagctcgagggactcagtggccgagccatacgtttttaacaagtacagagccaggcacattcatcccggtatataaaaggtatatacattgtgtggcgttacaccacaccacaaagaagagagggccccagatattactccttcaacaagagggaggaggcgcctaacagtattagtaagatagtaagacacgccacatagagcacactaccttgtacgtagagcgcacgcccaatataattataacacagactcatcatatcgtcgtcgagtagtaagcagtcagtatagacgtaggcaactcaaacagtcatatcgccacaaggagcagcagcatctctca

SEQ ID NO: 516541 - DNA, 386 bp, Homo sapiens
agcatacaaactaatgacttttagtgttactgcagatgcaacgcatgttcactgtagaccaatttaaaactatagatcaaccaaatcaacaaactttttcttttttttaaggagacggagtctcgctctagttgcccaggctgtgagtgcagttggtgcaatctcgcgctcgctgcacacctcagcctcccaggttctagcaactcctgcctcagcctcttgaagtagctgggactacaggcgcacaccaccacacccatctaatttatggtatataaatagagacggggtttcaccttgtaatccactgtggtctcaaactcctgagctcagacaatccgcccgcctcgcctcccaaagcgctaggattacaggtgtgagccacc

SEQ ID NO: 516542 - DNA, 354 bp, Homo sapiens
gagagaactagtctcgagtgcttccggtctgtttttcaatattaggccacatgatttattcagtcgttcttatggtcccaaattacaatttatgtgtattcataggactacaaaagttcccattcgaattgtctgagcttataaaataccaactttttttttaaactggtacatatactcattaacaccagtctgcaacaggttacatagaatcagaggcacttgaaaggcttcgacgtttacaccttaaatgcatttttaagaacacaaactgatttttctttaaacctctactcgtactcttgaattgctagatgcttacagatacagtggccggaatctgcagccttgttg

SEQ ID NO: 516543 - DNA, 239 bp, Homo sapiens
  misc_feature (104)..(104): n is a, c, g, or t
  misc_feature (110)..(110): n is a, c, g, or t
tcggccgccggattccttcggccgccgggattccttcggccgccgggattccttcggccgccgggattccttcggccgccgggattccttcggccgccgggatnccttcngccgccgggattcctcggccgccgggattccttcggccgccgggattcctaccgacagcttagtcaaagaaggcattgcggcctcatttgctgtcaagcttttcaaagcatggatggcagaaaaagatg

SEQ ID NO: 516544 - DNA, 607 bp, Homo sapiens
ctctagaatgcactagatatattgctcttggagtcataatcatgatgcataccaacacaagactagtcaaattatatttcatggagatgcatgtgcatggaggagtcgactgacatagagtggagacttttccaaaatggcttttacatcctacatgaaagtttgggacagtagtatcctcatctgcgcgtttatcactcaagtgctttgtgggtccagcgtggcagcgctttctgaaggtttgtggtttctgctgcctaacatggtctttgtaccctctatagatacggaggaggactcatagaaacagtcaatgattgtcgaggacacaatggcagacgagcatgccatacatggaagcaccgccctggctgtcttattcttcggttcctatttgagattgactatgtgtataggcgcgccgtagtgtactcttgctgaaattactgaagtagtatcatgacctaccatgttccttgagaaagcgaagaagaagcgtcttaggcttcctggatgattcgcatagtactggcgcgtatccgcgatggtgattcgacgatacattaggagcaagtagtgtacgacgacttgtattcttgtaactcct

SEQ ID NO: 516545 - DNA, 132 bp, Homo sapiens
aagggatttattccccccctgcaagggtaaagtcaggtgagagtcccttggtgagtcatttgtacatcagggtcatttttttttaacctttgaaaaagatgggcatcagaaataaagacaaagccctttcca

SEQ ID NO: 516546 - DNA, 200 bp, Homo sapiens
  misc_feature (54)..(54): n is a, c, g, or t
  misc_feature (95)..(95): n is a, c, g, or t
acgatggcgcgtcctgggtttatggggggaagaggaagactgacggtcctgccnacaggtggtgctggcgcacggtgggcactcgacacaacatnttgcgctcaacgtgtcttgtcccacctatggtgtttgcttggcgcttgtgatctaactgttgcagtgtgtacggtcttgggtagccgaaggttgctgtgagggca

SEQ ID NO: 516547 - DNA, 206 bp, Homo sapiens
  misc_feature (124)..(124): n is a, c, g, or t
ggtgtttcctttgtctcaaacaaaaaaaaaaaaccatgaaagaatgccaacatcactaatcatcagagatgcaaattaaaaccagcagtgagataccagtcagaacttagaccagtcagaactngctattattaagagagttggctggacatggttgtgcttaccacggcaaatctacagcactgagggcgggacggatctgctgt

SEQ ID NO: 516548 - DNA, 210 bp, Homo sapiens
  misc_feature (53)..(53): n is a, c, g, or t
cgcctgacataacctaggaagcattgctatcatagctcagaccatacctatgntcccaatggtcttttattccgggtagtaagttacaatatgggagattattccgaagacctggtaggataagaatataaacttcagcgtgcccgaaaaatcagaataggtgtgcgtatagaatggcgtctcctcctcaggcggggtcgaagaaggtgg

SEQ ID NO: 516549 - DNA, 248 bp, Homo sapiens
  misc_feature (109)..(109): n is a, c, g, or t
gcgggagtagttggaaagttggaaccgtgtccagcacagaagggattctgtgcagatgagcagtcacactgttactccacagcgggggagaccagttcaaaggccaggnttcggagcgaagaagagaggttggggactggggttttaacccccggccttccttaaccaagaccctttttcaaccattggggctttttgttgccctgcgatgggcagaagggttttttttcccctttccttgggggccc

SEQ ID NO: 516550 - DNA, 211 bp, Homo sapiens
ctcccgcacagctctaaaaaaaacataaataggccgggtgccgtggctcacgcctatattttcaacactttgggaagctgaccttgaggtgggcaggatcgcatgaggtcaggagtttgagaccagcctagccaaaatggcaaaaccccatctctactaaaaatacaaaaaattaattgggcatgggggcacacacctataatcccaacta

SEQ ID NO: 516551 - DNA, 842 bp, Homo sapiens
aatttctaacacaaattgaaagatttccataaaaggaatcaaacaaccttccaagctcactcatttttgcatttcacgtttcttatgagaagtcccccttttactgctttgtccacagtggaatttaagagtagattatctaagcttttttttttttttttttcccgtgaatcttcactcaatccaacttggagaattattccaaactcttggatgtggatccctcaagttgcctccttttcaaaagaaagcatacaagtgggggggggtgggttatttctctttacacctttagcaagccagtttattcccttagtggaagcagaacgggaaacagcagatgtccaccatgcttatacgggacactacacctctgtctcgacaagccaggtgctttcctccctcttggggagcacttcctcgggggatgagtagtagggactattggaccctcaaaatggggcctctcaccaaaagccaaatgaagtagcgtatgccaggatgatgtccttgggagccgtggccagtcgaaacggctaagacaggcgcctaaggttgggtggtggcaatgtctagcaaaatggttccctcttttcaaggggcaccactaccattctggggttgacacactggactttctattaaacagtctgtggccccccaaaaaaaccaatcttgcacacacgcgttggttttgcagaagccgggtcttgcgccagcctaacaagaccttcaatatcaccggggtctcggatgaagctccctgggcgtaataagcacaggcgggttccttcctcgtcgtctttggtttatctccacaccaaagtcaccatattggctaa

SEQ ID NO: 516552 - DNA, 444 bp, Homo sapiens
  misc_feature (15)..(15): n is a, c, g, or t
  misc_feature (41)..(41): n is a, c, g, or t
  misc_feature (97)..(97): n is a, c, g, or t
  misc_feature (107)..(107): n is a, c, g, or t
  misc_feature (406)..(406): n is a, c, g, or t
aaaaacaacctcatncataaaggatggtttattttacctancccatataagggatggcaaaatgggtatcccctaacaggccaatacacagaatcanccctaagtgnccatcaacagatgaatggataaagtcacatacatatgtatacacacacacacacatacatacacacacacacacacacacatacacacacacatatatatgcaataggatactatgtgttctaagaaaattctgttacttgcaacaatatggatgaacctggaggatactatgttaagtgaaataagtcagacatagaaagacagatactgtatgatcccacggtatatgcagaatcctaaaacgtcaagttcaatttttttttttttagaaagaatctcgctctgtcacccaggctgnagtgagtggcatgatcccagctcactgaacctccacct

SEQ ID NO: 516553 - DNA, 1490 bp, Homo sapiens
ggggcagcgcagggcagacggcggcaggagaagcaagatgaatgcaggctcagatcctgtggtcatcgtctcggcggcgcggaccatcataggttccttcaatggtgccttagctgctgttcctgtccaggacctgggctccactgtcatcaaagaagtcttgaagagggccactgtggctccggaagatgtgtctgaggtcatctttggacatgtcttggcagcaggctgtgggcagaatcctgttagacaagccagtgtgggtgcaggaattccctactctgttccagcatggagctgccagatgatctgtgggtcaggcctaaaagctgtgtgccttgcagtccagtcaatagggataggagactccagcattgtggttgcaggaggcatggaaaatatgagcaaggctcctcacttggcttacttgagaacaggagtaaagataggtgagatgccactgactgacagtatactctgtgatggtcttacagatgcatttcacaactgtcatatgggtattacagctgaaaatgtagccacaaaatggcaagtgagtagagaagatcaggacaaggttgcagttctgtcccagaacaggacagagaatgcacagaaagctggccattttgacaaagagattgtaccagttttggtgtcaactagaaaaggtcttattgaagttaaaacagatgagtttcctcgccatgggagcaacatagaagccatgtccaagctaaagccttactttcttactgatggaacgggaacagtcaccccagccaatgcttcaggaataaatgatggtgctgcagctgttgctcttatgaagaagtcagaagctgataaacgtgggcttacacctttagcacggatagtttcctggtcccaagtgggtgtggagccttccattatgggaataggaccaattccagccataaagcaagctgttacaaaagcaggttggtcactggaagatgttgacatatttgaaatcaatgaagcctttgcagctgtctctgctgcaatagttaaagaacttggattaaacccagagaaggtcaatattgaaggaggggctatagccttgggccaccctcttggagcatctggctgtcgaattcttgtgaccctgttacacacactggagagaatgggcagaagtcgtggtgttgcagccctgtgcattgggggtgggatgggaatagcaatgtgtgttcagagagaatgacaatgtgtgttcagagagaatgaattgcttaaactttgaacaacctcaatttctttttaaactaataaagtactaggttgcaatatgtgaaatcagaggaccaaagtacagatggaaaccatttcctacatcacaaaaacccaagtttacagcttgtactttactttaatgtgtaatactcaactcacggtacaagacaattgcatttaacattgttataaataaaaggaacatcagatcaatcattaaaaaaaaaaaa

SEQ ID NO: 516554 - DNA, 451 bp, Homo sapiens
gtcgcgtgacccaagaggaggagaaggagcggcgccgccaggagaaaaaacagcgcggggctgagaacctgaaacgccgcttggagaatgagcggaaggcagaggtcgtccaagtgatccgaaaccccgccaagctcaggcgggcaaaaaagaagcagctgcgctccattgagaagcgggacaccctggccttgttgcaaaagcagcctgccaagtagccggcagccaagatctgagctcaggagggcccgaggccttccatggccaacaattatgtcagacacagcacctcagggcgatgctcagatgcctctggtggagttggcactccaaaaccatggttccagagcagggacccacccgagcgggctctcagcttgaaggctcaggcttgttgttgacaaagccagagggctggactggaaatgggcgaaagttagtccatctcttc

SEQ ID NO: 516555 - DNA, 1292 bp, Homo sapiens
ggggcagcgcagggcagacggcggcaggagaagcaagatgaatgcaggctcagatcctgtggtcatcgtctcggcggcgcggaccatcataggttccttcaatggtgccttagctgctgttcctgtccaggacctgggctccactgtcatcaaagaagtcttgaagagggccactgtggctccggaagatgtgtctgaggtcatctttggacatgtcttggcagcaggctgtgggcagaatcctgttagacaagccagtgtgggtgcaggaattccctactctgttccagcatggagctgccagatgatctgtgggtcaggcctaaaagctgtgtgccttgcagtccagtcaatagggataggagactccagcattgtggttgcaggaggcatggaaaatatgagcaaggctcctcacttggcttacttgagaacaggagtaaagataggtgagatgccactgactgacagtatactctgtgatggtcttacagatgcatttcacaactgtcatatgggtattacagctgaaaatgtagccacaaaatggcaagtgagtagagaagatcaggacaaggttgcagttctgtcccagaacaggacagagaatgcacagaaagctggccattttgacaaagagattgtaccagttttggtgtcaactagaaaaggtcttattgaagttaaaacagatgagtttcctcgccatgggagcaacatagaagccatgtccaagctaaagccttactttcttactgatggaacgggaacagtcaccccagccaatgcttcaggaataaatgatggtgctgcagctgttgctcttatgaagaagtcagaagctgataaacgtgggcttacacctttagcacggatagtttcctggtcccaagtgggtgtggagccttccattatgggaataggaccaattccagccataaagcaagctgttacaaaagcaggttggtcactggaagatgttgacatatttgaaatcaatgaagcctttgcagctgtctctgctgcaatagttaaagaacttggattaaacccagagaaggtcaatattgaaggaggggctatagccttgggccaccctcttggagcattgggggggcccatttttgggccccggtccccccccctgaagagaatgggcaggaattgagtttttccagccctgagctttgggggggggatggggaggtcaacgtgggttcataaagcatgacaggagcattttttgtacaacgtctatttatttttgcactaaaaaagccgtgggtttctaa

SEQ ID NO: 516556 - DNA, 690 bp, Homo sapiens
  misc_feature (320)..(320): n is a, c, g, or t
  misc_feature (485)..(485): n is a, c, g, or t
  misc_feature (491)..(491): n is a, c, g, or t
  misc_feature (531)..(531): n is a, c, g, or t
  misc_feature (539)..(539): n is a, c, g, or t
  misc_feature (570)..(572): n is a, c, g, or t
  misc_feature (574)..(574): n is a, c, g, or t
  misc_feature (576)..(576): n is a, c, g, or t
  misc_feature (578)..(586): n is a, c, g, or t
  misc_feature (597)..(597): n is a, c, g, or t
  misc_feature (652)..(652): n is a, c, g, or t
ggagtctctctaaagaattcggtcaaaacatagatcactcacgttcacccctagttagtgttttgcctcacttaataggttgggagacgaaagactcagcccgggtggggctgcagaaaaatgattggccccagtcccccttgtttgtcccttctacaggcatgaggaatctggaaggccctgaaacagggaatttgcttcattccaatctattgcttccccatggccttataaggcaggtgagagatgtttgaatttttctcttccttttagtatttttagttgttcagttgccaaggatccctgatcccattttcctntgacgtccccctcctaccccataggagttagaagttagggtttaggcatcatttgagaatgctgacacttttcagggctgtgattgaagtgagggcatgggtaaaaatatttcttaaaagagggatgcccattttttttaattattccggttaatacccaatagnagagtnggctttttttttttttttggtcatagtgggtggattgttnccatggcnccttggggttttgtaatgacagtgaaaaaannnangnannnnnnnnntatgatttgtntctgtcacccttgtccttgagtgctcttgctattaacgttatttgtaatttagtntgtagctcattaaaaaaatgtgcctagttttatagtta

SEQ ID NO: 516557 - DNA, 611 bp, Homo sapiens
agcggggtggggaacggcggggtgacggcggggaacagcgggggacggcggggaacagcgggggatggcggggaacagcaggggactgcgtggtcgcgtccatggccgccggggagctccttcccttcacagagctgagagaggcatctggcgctgcacgcatggaccagcgatgagcccctgcctcccgctcctgcagaaacatgaacactgacatatgataccacactcatactgacgaggcagagggagaacagttcgatttcggcagtggcgctgcagtcaccagaagcggacacgcacaggcccccatccgccccatgcagcacaggagcgtgctggagccagatgcaagcccctgcacccacccggacggtgcaggcactggagcctggacgcacgagaacacagcaccagctgggcacggagcactatcctaaaggccctggctgacttcgctcgcaatgtaagcagtcacatccccaactacttcttgtcgctcatagaactgagtcaccgccccgattcccaggcagggaacctcggcatgcgcctaactcagcgtttgcccccagcggctgcggcaggcagaatgttggctctcgcacggg

SEQ ID NO: 516558 - DNA, 425 bp, Homo sapiens
ttggaaagccaacgttatcctagaaaagctttttaaatgacccagcaggacaagtctccggatggccttggccaacccggtgcttccctctttttttggttgtagttctcagaataactaaagaatgtactgggagtgttgtcctgagataaggaggaactgtcctaaacctggactctgttcccatcacccctagaacaggatgtcctgcaacgctttagcccaatgatccaagttgcccttggggtataaaacttgacaccagagggcgttcagggtccctcagctgcagtgtgaagtgggacacacaggtgagactccatttgccctgggcaggttcctgagccttgggggaccagttccccctacatcccaggcttttgttgtcccttgcctgcctgtaaggaataaagttgctttgctta

SEQ ID NO: 516559 - DNA, 1378 bp, Homo sapiens
gggccgctcttgtcggcccgtcggtcgcctctgttgggggcacggctcgcttttcgatacccgacagggggcccctattgcgcgtacgcgtctcggtcgtctgtggccgtggctcccagggcgtggagactcccccgcagggcggcgcgccttctgagggctctgtctcctgctcatctctggcctttgtactggcggcgccgggatcctggtggttggccggcgtctcgtccggcgcgtctggtgcggtcctgtcttcttcgcagggagtttgctgagctcgcccggcgggagttttgcctggccctccctaatgcgccctgcgtcgttgcgggtccacatccgacgggcggtcgcctgagctgtgcgggtgtaagccgaagccgctgtcctccgtgtgtgtccgtctccctccgtgtgagcgtgccttgtgtctcctgccttgttgtcccccggcccgttaccggccggcttaggccgccgcgtgtccgcccccctttgggtcgcgccgcaggcgggttgcacgctagtgcgcggcctgctgcaggcctgcaagggaagtctcctcggtgctttacggtgcgtctcggtcttctcgtgggcgatccgcatctgtcgactcgtaggggtttcgtgcccgcgggtcccccgtggggcttgtgcaattgagcatctggcgaaaaagcacgggcgcgtggcgccgtttggcaccgtctggcgatagtggtctaccacgggcgccgacggtgcactgcgtgcctttccccctgggtgagccactaacttgggcctgggcgacgctgtgctccccttgtctcggttcactgggtcgctcaccttggctgttcccatcggcgtcccctttgggccggcgtgtgtcatctccgagaatccgcttgccccgacccaatttcctattgacaggtcggtctccccatgggcgacgacgccctcatgccttctcgtacatgttgcgcatgccaactatggaaacgcagatgccttcagttcttacctgtctcttcgcttgatggttacgcgaaataaaccagcctgttgttccaacgggcgtagaggagcaggtagacctcgacgggtgcccgcggacggggacctcgttcattggcccacgcttggcgaaacgcgacgcgcaacacgtgcattacatgaccttggaggttgtggaagatggacaccgtgacctcgtggaggccgtgtgggggcagcagcctggccgtgtgccatggtgggtgctcctaggggccatgtgcggaagggacgccacctcatccttagcagcccaggttgcaaggtgtggcattgtttctccttgcccagcagtgctgccattaacgcccgggacggggccaggcccttt

SEQ ID NO: 516560 - DNA, 615 bp, Homo sapiens
agcggagaggaagctgcggacaggggctgtgaggtggcagcggctgcagcggcggagaccggtcgcctcagcggtgcactggggtctgttcccccgttcccagctcaccatgactcccatgctcaggcagacgtgcgggacggaccgcttcttgagtcacccgacgccatcacgaacagagtgaaggagtctggaccgtgtgacaaaggctgtcagtgcaattgagtgtgatgctcggacgtcaatgcggactctgatactcctgggcttcaattcctactacgtgcctgctctcgagctcgtcactccgagcgctgcatggcgcttacaggggctgttccaggagtagtctacgttggttgccgcgaacttgaaggcatggacgaggaaatgagcccatggaataaggaagcgatctagttgggccgttgtgtttacacgcgacgtggggaaaaccgagaggagcgacatggatcaagcccagctgaagatgtaacacttagcaggagagacgactgaacagacagattaaggtgttgctaagaacccgtctgagcaaaagtgtcttcgagtaatgaaggaaggtttcgtttgcatacaagggaacggaatcaa

SEQ ID NO: 516561 - DNA, 246 bp, Homo sapiens
  misc_feature (144)..(144): n is a, c, g, or t
cccattgtcgagagaaataggctacccgccgcagtactgatattctatttccccctctattgatccccacctccaaatatctcatcaatcatccgactaatcagccagctccaatcaagtgactaacttaaactatcctctagntacaaatgataaccatacacaacactaaaggacgaacttgatctcttatactagtatccttaatcatttttattgccacaactaatttctctcggaccaatg

SEQ ID NO: 516562 - DNA, 226 bp, Homo sapiens
tctagagtggccgcctactactactaaattcgtggtcgagtcgaccccaaatgttgacataaatgagttagtcccactacttacgaatatttagggacaaaacccataaagcttcttggactgagtctatgagccccactcttcagtgttcagataggagaagggagactccctcaccttcttgatgaggacaaattcgttctccgatgaaccgtccgcttaactt

SEQ ID NO: 516563 - DNA, 245 bp, Homo sapiens
  misc_feature (10)..(10): n is a, c, g, or t
  misc_feature (80)..(81): n is a, c, g, or t
  misc_feature (107)..(107): n is a, c, g, or t
  misc_feature (138)..(138): n is a, c, g, or t
  misc_feature (153)..(153): n is a, c, g, or t
  misc_feature (200)..(200): n is a, c, g, or t
  misc_feature (212)..(212): n is a, c, g, or t
  misc_feature (215)..(215): n is a, c, g, or t
  misc_feature (234)..(234): n is a, c, g, or t
agcacgttcnctgccccgggtgggctctgcggcctgctcaagtgcacgtgtccattacacgattcaaagcccccggtggnntgtgggtgacttcactttgggtcggnggtcctttctcatagctgtgaagtgcttggntcggctattcgtgtntccctcctgtgggcagagctgatctcacccccattccccatgggcancctgtgtgcaantangctacttgggtcccggcanattgtgagaaa

SEQ ID NO: 516564 - DNA, 164 bp, Homo sapiens
tccagtttttatatgtgctactgcgggggtgctggtacaagtcgtgggactgcatgctactgtctagagcttgtctcaatggattctagaactttattgtcctctgattgccgatcacctctgagacccgcagtcaatctcaataccatatctaacacgtcctg

SEQ ID NO: 516565 - DNA, 223 bp, Homo sapiens
  misc_feature (139)..(139): n is a, c, g, or t
tcactgccggctcgcctctactagcttcaagtattcttctaaattggttctggtctacgattaacaccctcatcttctcaagctttacctgtctaagcttctgcaccaccatgaaatttaattagcttggcttgtaaanatatagttggttaccagctcatttcctctattgtttcatgtgctgattttatcctagtttttcggcttccatattttgtctatc

SEQ ID NO: 516566 - DNA, 343 bp, Homo sapiens
  misc_feature (33)..(33): n is a, c, g, or t
  misc_feature (66)..(66): n is a, c, g, or t
  misc_feature (72)..(73): n is a, c, g, or t
  misc_feature (91)..(91): n is a, c, g, or t
  misc_feature (100)..(100): n is a, c, g, or t
  misc_feature (102)..(102): n is a, c, g, or t
  misc_feature (108)..(108): n is a, c, g, or t
  misc_feature (122)..(122): n is a, c, g, or t
  misc_feature (129)..(129): n is a, c, g, or t
  misc_feature (157)..(157): n is a, c, g, or t
  misc_feature (163)..(163): n is a, c, g, or t
  misc_feature (165)..(167): n is a, c, g, or t
  misc_feature (196)..(196): n is a, c, g, or t
  misc_feature (198)..(198): n is a, c, g, or t
  misc_feature (201)..(201): n is a, c, g, or t
  misc_feature (214)..(214): n is a, c, g, or t
  misc_feature (218)..(218): n is a, c, g, or t
  misc_feature (220)..(220): n is a, c, g, or t
  misc_feature (224)..(224): n is a, c, g, or t
  misc_feature (227)..(227): n is a, c, g, or t
  misc_feature (261)..(261): n is a, c, g, or t
  misc_feature (274)..(274): n is a, c, g, or t
  misc_feature (323)..(323): n is a, c, g, or t
attattattttaataacaacctgaatcccagancttccagatactgtccacactccctcccctggncagccnncaggaggcacctcaaggnaacaaaacncnggtggngtgtctcccgggcngcctccnactcccccaagccgtctactgccccccnctcccncnnngcagggtgggggttggttccctcccaaananggntccctctgaaganccgncntgangcnctccctcctccatcaaggttggggatgatgaggngatggggcagggnctgggggaccaggccattactgagccttgaactcccaccccggggacanggggacattaaagctgcata

SEQ ID NO: 516567 - DNA, 117 bp, Homo sapiens
tgcattccgactgcacgacactgtccttcactgacgacggcgaccttttcacggacctttacctctgcgttcaaactcaattaactacgtttgtacggttactccacctacttacgc

SEQ ID NO: 516568 - DNA, 1131 bp, Homo sapiens
cgttcccagccacatgctccctgtgcctctgtttcaaggttcccaaacattggcaaaaaattctccatgcccctacatgagactgagctggttgcatcgagtccccgattggcttgtcttaccagaagtatgctggacaaggattggttataaactaacatctctactccaagaccagagttacctaaagcttccatggaatacaggacactagcttgcctttcacaagatgaacccagaagggacccttgtgtggtccttttgacccggcattgcatgaaggaacactgggaccaccaaaccatgtgcactggggtccacgctagaatttcctcagcacattatctataactctcgcattgggtatggccatagcttattgggctttggccaagtgacatccactataccgtcaagggctttggtcccctttccccaagaaaggccggaacactttgaggagaacccccatattgggacccttggtgcccttcttcagagagcgcaaagacaccctttttccctttcccatggcattttaactgggtccaatacattactaccaaacaagctcacagccaattacccacattgacggcccaaacaacagtaaacgccccatcccttacaaatgtggcattggggccccccccaaatctccttgttggccccaaatttaacgggtacatctcaaacgcgcgacaacagttggctccaccgtttacttgtataacacacaacacccatttggaacgcacacgatagtccaaaaacaagtcccaacagctcgatcagagagcagcaaagcaagaaatacaagaacgacccaagctaatgtctgctactcgagcccgccccatacagggcaaccaacggtaccaggagagaaaaggcacctagtcacgaggaaaaacaaccaaaacaaaagcacgaaaataaaagcaagacccgaccggatgaaaggaacaccaacaacaatgcagaagcgacaaaagcggcgaaacaaacagaaggttgaaacaaaagagacggtgaaccacaacaacaggggaagaagaaacccccggtgcgggggaaccacaaaaaaaacaagaaggaagggagaagagggagaccacaccacaaccaaac

SEQ ID NO: 516569 - DNA, 657 bp, Homo sapiens
  misc_feature (8)..(8): n is a, c, g, or t
  misc_feature (72)..(72): n is a, c, g, or t
  misc_feature (192)..(192): n is a, c, g, or t
  misc_feature (217)..(217): n is a, c, g, or t
  misc_feature (222)..(223): n is a, c, g, or t
  misc_feature (226)..(226): n is a, c, g, or t
  misc_feature (242)..(242): n is a, c, g, or t
  misc_feature (244)..(244): n is a, c, g, or t
  misc_feature (246)..(247): n is a, c, g, or t
  misc_feature (263)..(263): n is a, c, g, or t
  misc_feature (267)..(267): n is a, c, g, or t
  misc_feature (272)..(272): n is a, c, g, or t
  misc_feature (297)..(297): n is a, c, g, or t
  misc_feature (358)..(358): n is a, c, g, or t
  misc_feature (375)..(375): n is a, c, g, or t
  misc_feature (393)..(393): n is a, c, g, or t
  misc_feature (399)..(399): n is a, c, g, or t
  misc_feature (416)..(416): n is a, c, g, or t
  misc_feature (440)..(440): n is a, c, g, or t
  misc_feature (456)..(456): n is a, c, g, or t
  misc_feature (461)..(462): n is a, c, g, or t
  misc_feature (466)..(466): n is a, c, g, or t
  misc_feature (474)..(474): n is a, c, g, or t
  misc_feature (481)..(482): n is a, c, g, or t
  misc_feature (490)..(490): n is a, c, g, or t
  misc_feature (508)..(509): n is a, c, g, or t
  misc_feature (512)..(512): n is a, c, g, or t
  misc_feature (515)..(515): n is a, c, g, or t
  misc_feature (536)..(536): n is a, c, g, or t
  misc_feature (575)..(575): n is a, c, g, or t
  misc_feature (581)..(581): n is a, c, g, or t
  misc_feature (594)..(594): n is a, c, g, or t
  misc_feature (609)..(609): n is a, c, g, or t
aaacaaanagaaaaaagaaggaaaaaaagaaaaaaaaattattggaaacttcatggttcaagtcggcgaganaggaggaggaacatggagctaggtctccaggcctctccagagaagtcctcaccctcgaagcaccctcttgggggacagcagagccaggacagccccccccacgcccagcctccgtctgangaagatggcagaatcacagtggtgngaggnncanaagggttggagggggnangnnccgggcggggtcacangaantagtnggccaagggctttttggaggggatnccccgtgtctcttgggggagcagcctccaaagatgatgaaatcttttctgggagatgctcntccagctccaagatggntgccacattcccacagcnggtagnggtagttggggtgccgnccacacagtgagcacccgtctcantgaaagtgccacgggnaaccnnccancaccaggnggggggnncggcagancatgtcaatgtcattggnngcnttnaactgggccaccacgtcactnccaaataggtagcccgctcctcgggggctcacgccccancctgtngtgtcttctgggncagaccagaggaggncacacatgggcccatcatgaggcacctcttgctttcggtcgattgtcc

SEQ ID NO: 516570 - DNA, 268 bp, Homo sapiens
  misc_feature (26)..(26): n is a, c, g, or t
ccccgggttttttatttggccccccngaaaattttttccccggaaagggccccgggggggaaagcccccgtttccccttttttcccccttttttaaaaagccccttttttaaatggggcgcccaaaaggaaccggggggggggaggggggcccccttttttttttttttttccccccaaggggggaaaatttttttttgccggggaaccccccccgttcccccccccccaaaacccgggggtttttttttttttttaaaaccccccca

SEQ ID NO: 516571 - DNA, 939 bp, Homo sapiens
ggagacgggggtcgagtgtgagactgggacttcttttggttctgcttcacttctgaggggcacctctggcatctcacgtccccatccatgatagggtcgctcgaggcacgcggatgcggacgtgctgcatattgatggcggttgatgcatgccatgatcgtgaactgctaggtctggacgatcggcgccggacgggtccagcaggtgaatggcgcaccggcaagcctgaaggagcctgcgtgagtcttgcatgagacgagaatgaagcactgctactcgcggctgcgggaactggtacccggagtcccgagaaggcactcatgcttatgctcaggtggaaatcctgacatggtgtgtcatcagactatcaattctctgatcttgacaaggtatgtcctgtgcctgggccatgtccctggaccccctggatgtgtcccgaacttcccgatccagggtatgcctcgaagtcgggacagggctgaacagccatggctaaggatgctgctgggaccctcggagctcccgattgcctcgcgtaactcttcgcctcttttgcgctctaatcagacagcgggagctcgctccggaacttgtcgatctccaacgacaaaaggagcttttgccactgactcggccgtgtcctgacaccgtccaggtgagtatctcctctcttggagagggaggtttaaacggcaaggtcctggagttggcagacgttttgaaaaattgcactcactcggtttagggaaactgaggccagagagggacaagtgacttgcccatggttgcatcaaatgaatggcagagtcagtttccatgtgatgtgcattttaaggccttaaatgcgcctgggggcctgccctccgcaggtggcgaggtcttggcaaagtagacatgggtccgactaaatacaagtctttctgtccatgttgtataggg

SEQ ID NO: 516572 - DNA, 339 bp, Homo sapiens
cccagaactcctgggctcaagcgatcctcccacctcagcctcccgagtagctgggactacaggcacgcgccaccgcgctcggctaagtgtgtataaatcttgattgttaacagttgaccacttgataaaaaataggtttaagatagtttacttcgttgttttgagacagggtcttgctccatcgtgcaggttggagtgcagtggcacaatcagagctcaccgcaggcagcctccccatcttgggctcaagcagtcttcccacctcaggctcccaagtagctgggactacaggtgcatgctgccacactcagctaattattatattttttgtagagacgg

SEQ ID NO: 516573 - DNA, 285 bp, Homo sapiens
cgccaaattaaggggttccgccaggggttttgggaggaacccgcttattccaaccccagcctccttttggggccccctcggtcccatagcaaagcccttgcacagattccagcggggcccacccctggttataaggtgggccaggggaagcgcttcttttcctccgtggaggatttccccgggtttgtgtggggccggggccctccctcctgcattggccttggggggttttgcctgtcagtgaaataaatagtcctgcccccagggcccagacataggggccca

SEQ ID NO: 516574 - DNA, 120 bp, Homo sapiens
agagtatattcacgatactgttaacgatgaatatagatctcaagaacaattacgaaatgctcttgagtctcgtgaaacaacatcaagaaacaattaatacactagcatacgaaatatctg

SEQ ID NO: 516575 - DNA, 443 bp, Homo sapiens
tggtattttaaatagagacagggtttctccatgtgggtcaggtgggtctcgaactcccgacctcaggtgatccacctacctcgacctcccaaatggcggggataacaggcgtgacccaccgcgccgggctggtcctgggcccacttctagctaagtaatatatgctggggtgagtcacgccctcctctgtcagtttccctgaatgaggggatggcctcgttaagcaccttacaggtgttttctcccattgaagagcatgctgggccaatacgttctggcagctaaaatcaaacaggggtctctcccaagacctttgtaaattaacaccggcaataatatttattggtccagaggttccacatggtaggttctccccccataaatatctccaaatcgggggtaccggctacccggtatataagactatattacaatgggtgtct

SEQ ID NO: 516576 - DNA, 198 bp, Homo sapiens
  misc_feature (69)..(69): n is a, c, g, or t
  misc_feature (133)..(133): n is a, c, g, or t
gcttcccttcagtgttttatcagagcccttaataaaatgtaaggctggatttatttgaagttggacagnatgacttaattcacatctgttggaatagaaaatatattttgttgagtatttaaaaggcggacangttttcttttgtgttggattcttggactttttcatgtcaggacatcataaacaaagttgaaggga

SEQ ID NO: 516577 - DNA, 209 bp, Homo sapiens
tttacggctctatcctcaccctttcacttgatgatatcagaatgttacatctgtgtacaggtgcgtacacaaacccagaaattatgtagaaaacaaaatgtggagttgcaatccaaagttacaataatactgatttttaaataatgacttttcaaatgtacgagtttcttaaatcatacagaaagcaaaaaatggagttacaaaccttt

SEQ ID NO: 516578 - DNA, 114 bp, Homo sapiens
gcagcagcggaggcgaggacaatctcaggacactgagctggtggagacagaccagcaggagatagaacttccagaagtgggcagctgtggtggtgccttctggagaagagcaga

SEQ ID NO: 516579 - DNA, 169 bp, Homo sapiens
acgcgtgtacttcaaatgctattttatctcagcggaactgtactatgccctgtatttcctcgccacgctactgatgatcacgtataaaagtaagtcagtgacgggcacagtggctcactgcctgtcatcccaacatcttgggaggccgatgtgggcggatcacttgagt

SEQ ID NO: 516580 - DNA, 258 bp, Homo sapiens
cgtggatgaagagagatggagaagaccaggcatgagactgtggagaagccacaccaccagaaacccctgccccatgcgccgtccagcccacacctgtggatgcacgggggattgcaggcagggctcccaccgtggactcaggaacaggcagggaagctgctgcctcaccaggcgaagggctcaggagggggaggcggagaggcccgtctagcccctgcggctgtcaccgtggtgcctcctcactggccagtgcggccg

SEQ ID NO: 516581 - DNA, 222 bp, Homo sapiens
  misc_feature (15)..(15): n is a, c, g, or t
  misc_feature (25)..(25): n is a, c, g, or t
  misc_feature (39)..(39): n is a, c, g, or t
  misc_feature (47)..(47): n is a, c, g, or t
  misc_feature (54)..(54): n is a, c, g, or t
  misc_feature (69)..(69): n is a, c, g, or t
  misc_feature (72)..(72): n is a, c, g, or t
  misc_feature (75)..(76): n is a, c, g, or t
  misc_feature (120)..(122): n is a, c, g, or t
  misc_feature (133)..(133): n is a, c, g, or t
  misc_feature (139)..(140): n is a, c, g, or t
  misc_feature (173)..(174): n is a, c, g, or t
  misc_feature (176)..(176): n is a, c, g, or t
  misc_feature (180)..(180): n is a, c, g, or t
aactagggagtaggnctggcagggnaaggggcagacagnctcgcctngcacccntcatccctggctgcnggnccnntccgtggagggactaagctgggggtgggggacatgagtcccccnnntgcccctgccncatccnngtgggctctgaccccctgatctcaactcgtggnncnaacntggaaaagggttgatttaaaataaaagggaagactattttgt

SEQ ID NO: 516582 - DNA, 231 bp, Homo sapiens
tacaagactatcattctattactagtccttacgaaacggatctcagggagaagaatgcagtaatagctgtccgtgtctcatcattccagtttctaaaacacagcccagccagcttttttccttattaagattctccagcacaggctgccaggccagcacaccacaaatatcgggtgccttcctttggaaatatttgacctctcttctgtgacaagaatggtacttaacagc

SEQ ID NO: 516583 - DNA, 673 bp, Homo sapiens
  misc_feature (656)..(656): n is a, c, g, or t
tgggtcctgcccgtatagagacggcagtgcgggggcatagccggcaccccaaacgcgcggcgttgcgtaattcgccgagggtcaggttcagcgtaccgcaccgtacattgagcgccatgcttagctcgtcgaatggttcatgcccgaacacatccatcaccgctgtttcatcctcatgctctgagtagggctgtgttgcaaaatcctcatccacaaacatatcctcgatagaagtaagggtcagacgcatcggcccggattcagcgtcgatccagcccaccaggcgctgtttgccaacctgcacgtggccggttcccgacgcactgaaaaaggctcgctcaagcaccagcacgtcaccagcccgcaagccgcgcagctggtgcatggacaaccgcaggtgcccaagcgttacgtcaaccgccagccgaaactgcgccggcatcggctcagccctggatcgccacggccccgccttgcatagcgccagaaagctctcgacagacagccacagatagcccgccacgcgagaggccccaagcgtcacgcagagtcgacaaccaaagttcatggggcgagcgcctggcagcaaacgcaggtacccaaacaacgcctgcacctcaagtctcagatgatgctggaacaactcccagaaccangcgtccggatcatcccg

SEQ ID NO: 516584 - DNA, 134 bp, Homo sapiens
tcggtccctcctgagtagttgggatacagtcatgcacaccatgccagctatttgtatttttagtagagatggggtctcaccatgttggccaggctggtctcaaactcctaacctcgggtgaggtagtctaccca

SEQ ID NO: 516585 - DNA, 363 bp, Homo sapiens
  misc_feature (36)..(36): n is a, c, g, or t
  misc_feature (75)..(75): n is a, c, g, or t
  misc_feature (83)..(83): n is a, c, g, or t
  misc_feature (104)..(104): n is a, c, g, or t
  misc_feature (106)..(106): n is a, c, g, or t
  misc_feature (114)..(114): n is a, c, g, or t
  misc_feature (238)..(238): n is a, c, g, or t
  misc_feature (242)..(242): n is a, c, g, or t
  misc_feature (248)..(248): n is a, c, g, or t
  misc_feature (254)..(254): n is a, c, g, or t
  misc_feature (280)..(280): n is a, c, g, or t
  misc_feature (291)..(291): n is a, c, g, or t
  misc_feature (329)..(329): n is a, c, g, or t
  misc_feature (333)..(333): n is a, c, g, or t
ctgtgaggatatagagttatcatatatgagataganccacatatttgtgtttttaacacacacgagggaatggtnagaatcangagagattactaacctggcanangagctatnacaatcaccaaggtgggtttttcagggcacgggttattcattacacttcagaagtgctgacccctggcattttcccaaatgtgggaaacccaactgtgcaggttgtagtaatgggtgactgtgntcangcgctnccctgngaacaacaaccaccaccaagaatcanaagagatactntgctatctaattcctaaattccctgagatttctaagtnagantatatgtttttttgcgttttctggttggtt

SEQ ID NO: 516586 - DNA, 1354 bp, Homo sapiens
  misc_feature (1316)..(1316): n is a, c, g, or t
gggtgctcggtccttccgaggaaagctaagtgctgcgttgggtgtgaggccctcagttcatccgcgtgagctagcagcccgggtccgcgcagcgcttgctctacgctcgcccgtgccatgcgcctctgtgctccgagctcagccttgcaatctagctcgggcccgtcattctgcaacgatcgaacgagtgtagacatgtcacggagtgataacgctgcaagtgaccgtcacttaaatgcatggcggagtaaggtattgttgaggccgtcttgattggccctcggctttggttcctggcgacactgggcccttgtggccagagtgttcaaacaggtaatggggatggacttcagtactttgggaaacctgtagtgaggcggccctaggcttggacccgatagtctgcccaagacagcgacataagagttagcattggcgagctcagagcgatgtgacggtgtcactaagcctccaccattcgcagtatatggcggtacggcgtttggggtcacccattgtcggttagaatggcgcattggacaccaagacacgagtggctaggggaaagggccacagtgaccgaacagactggacaagggaaaatacctctggaaatgcaggacaggttccataggacttcggacttctgcaacccagttgagggcaggccatttcagggtgctgaccatatacactctgaggacaccgttcaaaacaacgacgtctcgtttgatagtgagtaaacagccacccttggctttgaccaagaggatacaagcaaccaacgggcctttggcaacaccgttagtctagcagagcaacagaacaaagagagaaacgaggcacaaggcaacatcaccacatctcgcacgaacgagggagcaaagagcgacacaaaaaggacggcacccgacgggagtgcgaagccgcgggagagacacacaacgacgcacgacagggtgcgactcgaagcgcgagcacaaaagcaagagagggcgcgcccaaagaaggtaggagggcacaaccgaggaaacgaggacgtgagtcaagaccgcgaagaagacacacacagcgagaagcattaccaaattgtcgaccaacaccaacaagaaggcaggagtggaggacaacgacaatacaggagcagcaccgacgaaaacccgccccccagcaaataacagaggcagaagggaaaaagaagtaagcggacagaaaacataggaaaagaaagagacagcacaaaccgaaactaagtggagaccacccggagaggagtacgaaacagcaaccgagcgcgctggcacgagacgggtagnaccaagagtgacaaacaagcgacgcgcagaaacaaggc

SEQ ID NO: 516587 - DNA, 141 bp, Homo sapiens
ctgagaagacaggacataatcttgtcagcgatcatcagggtatgactggaaagtgagaaacagtagtccgtaaaacatttacctaactaatagctttcccaagacagtacttcccctgcgaattaaaacagagaaatacaa

SEQ ID NO: 516588 - DNA, 389 bp, Homo sapiens
tgagatggagtcccgctctgtcgcccaggctggagtgcagtggtgtgagatggagtcccgctctgtcgcccaggctggagtgcagtggtgtgatctgggctcactgcaagtccgcctcccaggttcacgccattgtcctgcctcagccttcccagcagctgggaccacaggtgcccaccaccacgtccggctaattttttgtatttttaatagagacggggtttcaccgtgttagccaggatggtctcgatctcctgacctcatgatccacccaccttggcctcccaaagtgctgggattacaggcatgagccaccgtgcccggcccacttctgttttcttgtaagagtttgctagttttagctttcatcgttttttttgttttttttg

SEQ ID NO: 516589 - DNA, 378 bp, Homo sapiens
atcgttagtgtctcatactaattttagactcaacatattttctaatgaagcttctggaaatagctggtatcatattacggaaacttattattggcacagtgccttaatgattagttggcttggggggtggggagagaccctagctatcaaggatggacgtaaaaatactttgctaatatgagcactgctgaggtttaagtcattcctgaggtaagctaaaatatgtttaaaggttattaaaaaggcacacagtttctcatttaacattttggtattaactttagaggccaagagtttcaagtagtctctgtaggatagcttgttaccattccattccttcctcccttcccattcactttccttccttccttccctcct

SEQ ID NO: 516590 - DNA, 319 bp, Homo sapiens
tctcagttactttggtactgtcttgctctgcaccgatcggttccacttcggtctgatgggtggctcctaatcggtatttttggtttacatctcaactatcacagcagccgggcgcggtggcttcacagctgtaatcccagcacattgggaggctgaggcaggggtatcacctgaggtctggagttccagaccagcctgaccaacatggagaaaccccccgtctccactaaaaatacaaaattacccgggcgtggtggtacatgcctgtaatcccagctactcgggaggctgaggcaggagaatggtgtgaaccagggag

SEQ ID NO: 516591 - DNA, 456 bp, Homo sapiens
  misc_feature (28)..(28): n is a, c, g, or t
  misc_feature (328)..(328): n is a, c, g, or t
ctcccatgtgcatggtccttcacgttancaaaacgctttccctatgcatgttgccctttgatccctcccagtcagctggatgaagtatccctccttcttctcccagatgaagagactgaggccctggtcattacacacccatgttcagggtcacttgtgaaattggaactccctggctgggcacagtggctcatgtctgtaatcccaaaactttgggagcctgagtggacagatcatctgaggtcaggcattcaagaggagcctggccaacatggcgaaaacccatctctactaaaaatataaaaattagctgggagtggtggcgcanacctgtagtcccagctactcgggaggctgaggcaggagaatcgcttgagcctgtaaggtagaggttgtcgtgagccgagagcacatcactgcactccagccagggtgacagcaagattccatctcaaa

SEQ ID NO: 516592 - DNA, 609 bp, Homo sapiens
  misc_feature (19)..(19): n is a, c, g, or t
  misc_feature (29)..(29): n is a, c, g, or t
  misc_feature (34)..(34): n is a, c, g, or t
  misc_feature (40)..(41): n is a, c, g, or t
  misc_feature (53)..(53): n is a, c, g, or t
  misc_feature (92)..(92): n is a, c, g, or t
cctcgcttgaatggggatnatcgggaagntgtgnagaagnnactcgggtctcngactttgtcctcagaggagctggcctacgggaagacaangatcttcatcagaagccccaaaactcttttctacctggaagaacaaaggcgcctgaggcttcagcagctggccaccctcatacagaaggtctaccgcggtggcgctgtcggacccactaccagcagatgcggaagagccaaatcctcatctcggcttggtttcggggcaacaagcaaaagaagcactatgggaagatacggtcgtcagtgctgctgatccaggctttcgtgaggggctggagggcccgcaagaactatcgaaaatacttccggtcaggtgctgccctcaccttggcaaattttatctaccagagctgtactggttttatagatcacccccaattgtatggcttaaaacaagctacatggtcatggtttgctgtgtgaccgacagataaccacaatgaaactagtctggaaaaaaaaacttgctttttgttgtagttaccacttaaccctgtagtttaacaaggaatgtctgtgccaataaaccaattctccctctgcttgaaaaaaa

SEQ ID NO: 516593 - DNA, 449 bp, Homo sapiens
aggaacgaacacttcacgagaggacaaatgccacctctcagctgcatcttgaagctggtcacttctgggtctgtggcaggcattcgtcaatggcccagtgcagttctctggagaaagctaccttttcccaaggcatctgcatccatcgacattggtaatgtggccagctctccttggtcctgtcctcagccgatgctttttcaataggatttttatgctttgtgtacctcaaccaagtatgaagagctgtactggttttatagatcacccccaattgtatggcttaaaacaagctacatggtcatggtttgctgtgtgaccgacagataaccacaatgaaactagtctggaaaaaaaaacttgctttttgttgtagttaccacttaaccctgtagtttaacaaggaatgtctgtgccaataaaccaattctccctctgcttgaaaaaaa

SEQ ID NO: 516594 - DNA, 346 bp, Homo sapiens
  misc_feature (87)..(87): n is a, c, g, or t
  misc_feature (219)..(219): n is a, c, g, or t
  misc_feature (225)..(225): n is a, c, g, or t
  misc_feature (265)..(265): n is a, c, g, or t
  misc_feature (299)..(299): n is a, c, g, or t
  misc_feature (308)..(308): n is a, c, g, or t
atgggcattccgccaacaggggtcacttccgcataggcggcccgggcaggcccaaggcacccttcctaccctttcctgcctccctgnaaggtccaggcattaatcccctacccgggcgtacacccgggcaggccccttcacccctgtgtacctcgcaggatgcagagattgtgcgggacccgggatcccgaaaaactcgcttcctgtgacatcgtggtngaagtngggggcgagtacgaccctcggagacaccgatatgaccatnaccagagatgtatgagaactttgtggaggaggtngatgctttngacaatgggatcttcccagttgggcagagggggagcct

SEQ ID NO: 516595 - DNA, 143 bp, Homo sapiens
acctgtaagcgtcctttctattctataactgatataatatttctctagagtcctatctctgttcagcaaaagccagagagatatccaaaaatcattctgtcttatttataggtttaaaacaacctccgattagctgtgaaacg

SEQ ID NO: 516596 - DNA, 122 bp, Homo sapiens
ttcaaggccccgtcgtgcactgcatgctcctcccgcgtgcatttgcaatgctggcatgatctttctgagggggccaggatgggggtcaattactaatggagttgcccacctcgaacccctcg

SEQ ID NO: 516597 - DNA, 1274 bp, Homo sapiens
tcaggttttttgtttgtttaaagtgaaacttgatgattttgaaacaagtaattaaaaaaaggtccaaaacaccaggtgggccaaacattggtttgagcctgggggccaccagttcgcgaccactgccttacgtagttaacaccctgagtatgtatacagtcatatttttaggtatatgggatatagatagtgttatatatactatgggggcgtgcatcattggaagtcatctttatctctcagagttaagctttattgtagaagacaaaaaaaaaagttcaacacagccatagataacacttaactcacagttcccaggaggacactggatctcgaagctgctcttttggagtcagatcctacatcaaaccacttagggccagttttgggcatttccttcctgggtgactgggggtaaacttcttggcctcggtcggagttcgcagatgagtaactcagaaggatggcccgaatacctgggtccccttggatataaaattcttacattatcaccttaatctcgggggggataaggggtatccctagctcgggccctttaccggggcatgcactggcggggccaagacaacggggtagcacagactactataggctcataccatttcaaactaccaagaaacacaggcacaggacacggacacggacacagggccacgcgactaggaagacccagcgctcgagctgcacgggggcacagataggccagctcatcggcaggccattgacaccctccctggggctcaagggaaagctccaggactagggaccctccacacaacagtgggaacaccagaacagtggcccagaacacccagggaacttcacacacacctgcggcaacgacgggggacacccaaaagatggccaccgcgaggatacgtacacaacagcggacaacaggcacaactcgcacagctggcccccccaaggtgttgggtgcatcatctgtggctacacgacacacaccttgtcatcacaaaacctggttattcgatgcagctaaaaccagcaagtgtgtcctgacaaactagcagcagatatgctagtagaagaaagaccatactgccgtaataatgcacgactaggcaggagacaatcggacttcagtcgactccctcatctcagccaacgtgacgtctcgcaagtaatagaagacgaacgtcgcgatacctatactttggtccaggacagaagctgccacaatgacgtcagactatgtattatgtaacagttcatacaggctaactaacggc

SEQ ID NO: 516598 - DNA, 605 bp, Homo sapiens
ccgaagaggccatgaaacagatcaacgattacgtggagaagggtactcaagggttgtggatttggtcaaggagcttgacagagacacagtttttgctctggtgaattacatcttatttaaaggcataagggagagaccctttgaagtcaaggacaccgaggaagaggacttacacgtggaccaggtgaccaccgtgaaggtgcctatgatgaaacgtttaggcatgtttaacatacagcactgtacgaagctgtccagctgggtgctgctgatgaaatacctgctcattgtcaccgccatcttcttcctgcctgatgaggtgaaactacatcacctgtcgtctgccagcttacatttaccccgactgtgcattactggaacctatgatctgaagagcgagctgggtcaactgggcatcactaaggtcttcaacaatggggctgacctctccgggtcacaaaggaggaccccttgaggctctcaaaggccggcataaggtgggctgacatcgacagagaaaggactgaagctgttgggccatgtttcaagagggcatgccaatgttattcccccgagggaaagtttaaccactttggcttttggcg

SEQ ID NO: 516599 - DNA, 557 bp, Homo sapiens
  misc_feature (5)..(5): n is a, c, g, or t
  misc_feature (144)..(144): n is a, c, g, or t
  misc_feature (172)..(172): n is a, c, g, or t
  misc_feature (199)..(199): n is a, c, g, or t
  misc_feature (211)..(211): n is a, c, g, or t
  misc_feature (320)..(320): n is a, c, g, or t
  misc_feature (332)..(332): n is a, c, g, or t
  misc_feature (355)..(356): n is a, c, g, or t
  misc_feature (368)..(368): n is a, c, g, or t
  misc_feature (408)..(408): n is a, c, g, or t
  misc_feature (420)..(422): n is a, c, g, or t
  misc_feature (426)..(426): n is a, c, g, or t
  misc_feature (430)..(430): n is a, c, g, or t
  misc_feature (473)..(473): n is a, c, g, or t
  misc_feature (481)..(481): n is a, c, g, or t
  misc_feature (515)..(515): n is a, c, g, or t
acatncagcttaattcagatgtactgcctgaatgacccagacataaaaagaaaccccccactctttcccactggtttttaaaataaaatcttcacttataaaactgaaacactaaagcattaaaatacagaaagctcgtttaantcacttcacaaaagcattaacaaatgangtatcccttctgtaactatttaaaganaaactgagttancactaacacgaaggggaaattatgacagatgggatactgaacttgtcaaaaactcaaaaactctacccagacaaagtggtaatggcaactaacaaaccattgaagaaanggagtttcaaanacggctaaatatgggtgacaggnnggggcacagggngacccgctgtcacctcacgatacagcaacgtggaggggangggggggggggnnngtgngggnagcggacatgttaactgtgatgtataaaattcgatcttctganggggaggnagttcagaagggagaaatctccgccccgcggggnttatctgtactggttgttcatgcggtggtctgcgtttctgtc

SEQ ID NO: 516600 - DNA, 548 bp, Homo sapiens
ggtgcatgcatgtgactaggtgattgtgttctcagccctatctttgtcagcctcatcaggattagtgggatgggctttttgaaaaagaagaaatatccgccagagcactgctggagaagagggcctgcctgtgctgatgctgaggctgcaaaaccaacgcccaaactagagccaaagcaagcactgctgaccctgtcttgggcctctaggccaagcactgggtaaatatgacctcattgatcgatgcatagggtagcccagccacagccttccgcaaaggccaaggtgaaaaagtggagcagtcacttgagctgcattcttttcagggaattgctgagctttcctagaagcaaaccagggaggcttgggatctgagatattggggaagaggtgggggaggtgggtgttcagaatcagagtgaagtaaagtccagatctttgctggccacagacttcagggagagaaggctgagggccattttcacattgtctaaatgtagtgcatctttgttggaactttgaaaaatatggtactccatggcattaaa

SEQ ID NO: 516601 - DNA, 181 bp, Homo sapiens
tacttaaccagggagagagacacacacacacacagcacacacacacacacacacacacagagagagagagagagagagagagagagagagagagagagagagacagtctgtgtatctatctgtgtctgaagcgtgattttgtgtagagttgtctctatatatctctatctttgctatatat

SEQ ID NO: 516602 - DNA, 677 bp, Homo sapiens
tactgttttactgaacttttagggccaggaaatgggtaggctccgagctaacatggcaatctgattgtcctcagaagctactcaatccaaatacatcctacagaattccgctaatacgatgtgcattctataaggtgcctatgtttggaaagagtgcaatagatacacagcccgtccattcttgacctgaggtgaagtaatggattgttgccaaaatttctatctgtggcttcgctagggtctggacttaaagacaggggttgtagacctgaaaagaattcttgctccttttatagaatttcacacacaggaggatttcttgagctggcaggctgtagaaacttcttctctgtggggagggagctgattctagctttcagggccctcactcgagggaagctcgagataacaccgtggctgagctcctttccgttttgataagtgcccccagctgatagggagaccgggtcaacttgtagtcgaccagggaatcctggccatggccctcttagacattttaacaagcccgggagcagcgaaaggttcagttttccctttatgcagggaagcctgggctcttttttcttccgtggacaaaccggccggaggccgatcttttcgcccaaaacggtttacctttttttttcagccaaccagggcgtgttttttttttgttt

SEQ ID NO: 516603 - DNA, 141 bp, Homo sapiens
tcctagtcctatcgccctccatccctacgaatcctttacatacaagacgaggtaaacgaatcctccttaccatcaaatcaaattggccacatggtactgacctacgagtacaaccgactacggcgaattaattctcaactc

SEQ ID NO: 516604 - DNA, 168 bp, Homo sapiens
gctgggcgacaagagggagactgtctcaaaaaaaaaaaaaaaaaaaaaaaaagagagagagagtctgactctgttgcccaggctggagtgcagtggcgcgatcttggcacatcacaatcccttccctgccccctatcttgtcctgaaatatttttggggttggaactc

SEQ ID NO: 516605 - DNA, 457 bp, Homo sapiens
gtggatctggagtctgaaggagaggagtgcgctagagcattctggggtggggcttggaagggcgctgagggcagggttctagaaggggcgaggctttaagcgaggcagaatggtggcgctccagagtaggtggggtctggagtggtaccagagcctatggtaaagggtgtggctgggaacatttgggagacttgagcttgattctaaaggggacagatcgttgagcaaggcaagaagtgggattcaggaatgggccaagtccaggatcgcagacagggtgtgggcttcagagatgtggtgcttccatggtggttgtcagaagagggcagtgcctcctcatggtgcagtgagggagacatgttttgagcaatggctgggttgtggtgcagtggagaggggacgtggataggatgcttccgagatgggatatggtgatagggtgtggtgagagatatga

SEQ ID NO: 516606 - DNA, 440 bp, Homo sapiens
agagttaagttcctatggcatatttctgggcacaaaaacatcaccaaacttctaaataaagacccaagacacttctaatattaaatattgatgtaaacgtgagatatgcaaacatttaagcaagattaatacaaatatgataattattggcttggcacagtggctcactcctgtaatcccagcactttgggaggctgagacagggagatcacctgaggtcaggggttcgagaccagcctggccaatgtggtgaaaccctgtctctactataattacaaaaaaaaattggccaggtgtggttgtgcacacctgtaatcccagctacttggaagagtgaggcaggagaatcgcttgaacccaggagacgaaggttgcagtgagccgagatggtgccactgcactccagcctgggcaacacagtgagactccatcttaaaaaa

SEQ ID NO: 516607 - DNA, 920 bp, Homo sapiens
ttacgaatggcggcgagcagggagccaacgacgaacgtggtggatccattttctaagaaagattggtatgatgtgaaagcgacctgctatgtgcaatataagacatattggaaagacgctcgtgatcaggagccaaggaatcataatggcatctgatggtctcaagggtcgtgtgtaggaagcttgagtcttgctgatttgcataagtgatgaagttgcgatttagaagaacttcaaggctgatgtactgagagaatgttcaggggtaagaaactgcctgactaacattccatggacagtggatcttacccgtgacaaaatgtgttccatggttcaaaagaatggcagacaatgattgttgctcccgtcgatgtcaagactaccgatggttacttgtttcgctctgttctgtgtgtggttgttaactagacaagatgcatacaatcagatacggaaagaccttcttatgctctagctaacattgcaggtctcagccaaatccggaacgaagatgatggggccatcaatgaccgcgagaggtgcagaccccatgcacgtggaacgaaagtggtcggtgatttgattccagacgagtcattggaagacgacctagaaaaaggtttgcatctagttattgttcgtccatgaatgtcttcgttagaaaaacgtgaagattcgtggaattgaaagcccagttttgtattcgggaaaagcctcattggagccgtcatggttgaacaggccgacgctcctgggaaaagcccatggggaccaaaaccggggcccagtgaaaacacctcgttggtttaaccccgtccacaactgtttaagcacaggcccctttgcgcctccacagtgctctgtccccaccacacaaaccgggggggctattccggggcccaaaccccctttaaagccca

SEQ ID NO: 516608 - DNA, 202 bp, Homo sapiens
cctcatgtaatgtgcgtcaggatctctcagcctcgcatgtcgctgcctcttccatgtggatggtggcgtcgggttctctccagcactcgcatgtcacctccctcttccatgtgacatgctggcgtctgcggttcctctccagcactcgcatgtcgcctgccttttcatgtgagatggtggcgtccgagattcatccacaggt

SEQ ID NO: 516609 - DNA, 760 bp, Homo sapiens
gcagacactgaccttcagcgcctcgggtccagcgccatggtgcccttccaggaagctcttcgtgtgggggaaactggaatatgaacgggcggaggcagagtctgggggagctcatcgagcgactcgtgaacgcgggcaaaggtgctcgagacagaatacccgagtgtggtttgtgcctcccactctaacttggcctatatcagacatggcgctccgggagaagctagaatctccaagtattgctgtggctgggcagaactgctacaaagtgactaatggggcttttactggggagatcagccctggcatgatcaaagactgcggagccacgtggtgtggtcctggggcactcagagagaaggcatgtcttggggggagtcagatgagctgatgtgggcagaaagtggcccatgctcttggcagagggactcggagtaatcgcctgcattgggggagaagctagatgaaagggaagctggatcactgagaaggtttgttttcgagcagacaaggtcatcgcagataacgtgaaggaccgggagcaaggtcgtccgtggcctatgagctctgtgtgggccatgtgtactggcaagaatggaaacaccccaaaaggcccagggaagtacacggagaagctccgaggatggctgaagtccaaggtctctgatgcggggttcagagcacccgtatcatttatggagggtctggtgactggggcaacctggaaggaggtggcagcagcttgatgtgattgtcttgg

SEQ ID NO: 516610 - DNA, 231 bp, Homo sapiens
  misc_feature (216)..(216): n is a, c, g, or t
  misc_feature (229)..(229): n is a, c, g, or t
accagtgaataaggggcgcaacgtcatcggcctgggctggatgctcggcgggctgtcgtttgccgggatgctgtttggcccgagcaacatggcgatggtggtcgggctctacagcctgggcctgttcttcctgatcgggccgtactcggcggcactgtttttcatcagcgaaagttttcccaccagcattcgggccaccgcggccttattcactgntaccgcaaccatntg

SEQ ID NO: 516611 - DNA, 875 bp, Homo sapiens
gatgagctggtggaggagatggagcactttggccagtggtctctgtggcaagcaatcaaggacaaccgcatccaggttggctacgagaacgtgccgacatattgacatccacatgaaccagatcggcttcgagcgggagtggtacaaattcctgctggagtacattgcgcccatgacggagaagctctaccccggctactacagccagggcccagtttgacctggtccttggtcgtccgctacaagcctgtatgagcagccctcactgtatgccacaacatgatgcctccaccttcaccatcaacatcgccctgaaccgagtcggggtggattacgagggcgggggctgtcaggttcctgcgctactagactgttccatccgagcccctaaggaaggggcgtgtgacccctcatgcgtcctggtactggactcaccgcattaccatgaggggctccccatcacaggggcacccgatacatcgcagtctccttcgtcgatccctaattggccaggcctgagcctctggacctttcttctttgccgaaaacactgcaagcaggctctgggacctcggtgttccaggaaccagtgcagcctcctggctgttgacttcccggttgctctggagccagccagtcaaagagatgccacgagattcttgcaggcgacggcggaccccaccttatggtggggtccggggtgtttgggcccgccctgggacgcatccctgcctgcttcggatggcccggcctccacctgggtctgaacggggccttcccacttcttcgtggtgggctggcgacacgcgtccatttccagaatgtgtgggaccggcggtccgcggtgcagctgttgggaagccaacacagggcgg

SEQ ID NO: 516612 - DNA, 138 bp, Homo sapiens
  misc_feature (40)..(40): n is a, c, g, or t
gttcgagtccagagtccgctcagagttccatgtcgatcangtgacagtctcgacagacagtttccgtccgtctcatcagccccgtactactacgtactatactatcagtcagtctagggtacgttagacaccgagacc

SEQ ID NO: 516613 - DNA, 219 bp, Homo sapiens
gcggccgcctactactactactgctcgaattcaagcttctaacgatgtacggggacatgaagacagtggctggcaggtgtctggacgtacaatacaacttacgctgtaacggtaaagttcgtataagaagactgaaggagatgaaagaccagtagacgctgctatactctaagagacatgactggagtataataaatgggataatgtatgttacaaaaa

SEQ ID NO: 516614 - DNA, 881 bp, Homo sapiens
ataatttgtactttttttttttcagacagtctggctctggttgcccaggttggagtgtagtggcgtgatctgggctcaaggaacctccacctctcaggtgtaagcagtctcctgtgccttagtcctcccaagtagctggggataataggcgtgtgccaccacgctgttaaagttttggtggttttgacatagagaggggttttcaccaattgttgaccaggctggtttctggaactctggacctctggtgatctggcccacctcgtactctcccaagagggtgctaggatacacgggcgttgaccccatttgccaccgggcatatatttcggacttctggatagaacttcttgcagtgctccaggaccttactcccaatggacatgttgtgtcccaaaaaaaccttttcgcttggcccagtttccaaactcaattgttttgacccataaattgtggctgtgacagggtagtggggcctaattatcactctgggggaagatgagagcttgttgtggtcgcccaagatgggattgcaggggcgcatcgacctgggcctcgttgaaacctttcttgctcccgcgggttcaacagcaatttctccgtggcactaaagactccggaagtagccttggggatacgggtttgccaccaaacaaaccaggataattatcatatctcacgcagagcggtggggttccaaccatcttttgggcatggcttggttttgactctctttgacttgtggtccaaccacattttgggctcccaacagtgggttgggctaacaggcgtgcgccacacagccgggaggtttattgtacacttaggaactcgaaacaagcgtactagaatatactccgtgttggtggttggtggacacc

SEQ ID NO: 516615 - DNA, 293 bp, Homo sapiens
catgcattttttcgctattgcattgtaaggaaaaagatgctaacgtttaaagtggctttaacctccaaagatgttttgaaatgtatgtaattctttgggctaactgtccatcttatgtgaaatatgcttggaaaaaggctttaaaactggtgattatatatccgggtatgcgtacatatccctacacacctctgaaaacccttaaattagttttttaactcctcttgcgtattacaattcctcaagttaatctcggtttaggtccagtttaggtcctaaggtccagggccatt

SEQ ID NO: 516616 - DNA, 202 bp, Homo sapiens
  misc_feature (61)..(61): n is a, c, g, or t
  misc_feature (76)..(76): n is a, c, g, or t
  misc_feature (115)..(115): n is a, c, g, or t
  misc_feature (142)..(142): n is a, c, g, or t
  misc_feature (158)..(158): n is a, c, g, or t
  misc_feature (199)..(199): n is a, c, g, or t
aaagtttagccgcttccctgaagctctgagcattggcattgatgctcaatgacatggagtnggtagaagacatctncacctcctgcaaggatgtggtagtacagaaacagatggnattcatgctaggccggcatggggtgtncctggagctgagtgangatgtcgaggagtatgaggacctgacagagatcatgtccantgt

SEQ ID NO: 516617 - DNA, 830 bp, Homo sapiens
ataggagctgtagaaggccctaatgctcaggccgagcacgctgagaaggagaaggagcggctgctgcaggagcgcatgaggagccgagaggacgaggatgcgctggagcaggcccggcgggcccatgagtgaggcacgtcggcgccaggatcagcagcagcagcatgcgccaggagctacatgcatgcatgcagcaacttgcaacgcagactgcggtgtgctagccagccggacacccctatatggcccaagagctcccaagccccaagtccattgcttgtggaccacgcagatgggagtttggcccgtgaagcgtggtagcaggcagcgaagacgccgggaagccatggcagctaccattgacatgaatttccaggagtgatctattgtcaagtatttgaagaacatcttttctgagcgcacctaggttggcttctgacttttgatttctctggcaaaaccatttgactttccatagtgtcaggggcggtggtggaggtgggcatcagcggccaggcgatgcctcagggccttggccctccttgcatgctatgcccgggggcaggcctgaacgggcagcttgaaggattttgcaggagcctgtcttgccttacgtgccaagtcgggaaagacgtcccgccaaccaccagcccttcacaggacgttcgcttcagaacacgccttgttaccgacgcaagttgccggtgtgtaccccaaagcccttgattccccaaattgcggggccagaggcccctttttttccgacaaatgttctaaaagtattgaccagggacattcgtttgcttgcgccgtactgggtttctgttcca

SEQ ID NO: 516618 - DNA, 546 bp, Homo sapiens
ccgatcccttggagaccagggtgagtctgatgctcaaagtaagtgagctgttgtattagatagtgttgagttcataggcaacgaatcactgaaacacacatctggtcactgcttggacttcgcacagggccctggaatctctgggatacctgaatcctgttgtccctatgcggagtttactaatccctcttaattggagccagttcttcagaacctagtatcaaccagcttgggtatcacgtgaattctgtggtctgccaggccctgtttttgccattcctggaaggggtggccccagctgttatttagacatctactggatgccagctatggattgataacagaaaggaagggagatgctgatgatgcgtgttctgacagggttcccactaaatagagagactgactctctccataagtatttgattttcactttatctcctcgttgacttcacagcgtaagtgcagtatgttctactcactagggtagatgcatgcggatgaatgtttatgtcgaacattagaagtctgcgtgtgtgggtgaac

SEQ ID NO: 516619 - DNA, 152 bp, Homo sapiens
tagggtcgagctgggaccggggcataggtggttactcttgtggtactggatttgatggcggagattcgggatcgcctggggatctcctcagcccattacccgccagtgaccggagtcattgtgactctggaggaagggggaattgatgtggc

SEQ ID NO: 516620 - DNA, 714 bp, Homo sapiens
aaatataaaaaaaaaaaaaaaacttaaaaaaaaaaaaaaaaaaaaaaaaaaaccctttgtgggccccctggcccaaaccattttaaacttgggcaaattttatcctgggggccgaattctaacatacttggccaaataccccttataggggggggattaaaaattaatgggcggcgtttaaaaaaggttgtaatgggaaaaccccggggttaaccaacttaaatgactttgagaaaaacccccttttaaccggttggggaaaaaggaaaaaggcccgaacatagctcctttccaaaaattggcaaaccttaaatggaaatggaaatttctacggataaatttttggaaaaaactggcataaattttgggtaaaaaaatctattttttaaccaaatgggcgaaactggaaaaaaccctttttaaaaaaaaaaaatcccccgaaaaggggtgaagggttttccaatttggaacaaggggcccttttttaaggaccggggccttaaactcaaaggggcaaaaacccgttttccagggggaggcccaattggggagaccatccccttattaaagtttttggagggcaaggggccccaaagcccctaaatcgaaccctaaaagggccccctttttaaagttttgcgggaaaagcggctaccgttgcaaaaaagaagggaccaggggcggccctatggcccttcgtataccgccccctcc

SEQ ID NO: 516621 - DNA, 128 bp, Homo sapiens
ctgtggtgccgtgcaccttatggcactggatggctgcacctagccctttctgcttgcagatatcggaggttagtttccagcggcgcagtgcggggatattgtcaatgccctcatgtcatcgttccaat

SEQ ID NO: 516622 - DNA, 642 bp, Homo sapiens
gaatggcaccggcggcgcagtaggacggaggacgtccgatagggaagcttcgaagccagtgcaatgactgatgccatgtcacatggggccccacaaaggattgctgaccgtgatgaacggtcatcattgaccaactggactttgctgttggcacaaagcccccgttcaagagcacaaggtgcattgtacgacgggttaacaaccacttcatttccacgacaggcaggaggttaaccccgggccaggacggtattgagcattggcacagctgagttggccctcggagacgcaatttgccctgcacatagccgcgagagggaaggtaatattggagaacgtgcccaaaaagggcacacctttggcattaaaaagttacccaaaaattacctccctgacgggggagatacccgtagaggccacagaaggaatcgctaaatgggggcgggcgcaccctgaagcttcacacatcgggcactggacctctggggggcaggaaccccttcgttgctcaccacacagcaaaagaccctggacaagggcaccatacttaacgcccggggaaccccaaacatggtatgccttgggtacgactcacaacggctcccaagaacctcataaccttccaagagactcccccctgtg

SEQ ID NO: 516623 - DNA, 789 bp, Homo sapiens
agcggaagggctgagaggcgcacccgggcggccagctgggctcggagcggaacggggtcaggatggacgaggacgtgctaaccacccatgcaagatcctcatcatcgagcagagagctgcgggtgggcaaggtccagccgtgctcttgaggttcacagagtgatacgtttgatccacgaacttgcagcgaacgaataggtgttgacttataaggtgaaaacaagtttcagtggatggaactaaggctaaccttgcatatatgggatactgctggtcatagagaggtttagaagaattagactcccagttattagtagaggtgctacagaggtgttagtattagtcttagtgatgtcacaagtaggagcatagcatggtgttgaaaactggataattggttgtgatgcaagttcggacacatcatactgctcacaaggagacatgacatagctagacgaatgctacttggagactcaagaatcgatacggaaaatcgggaatgtcgactagtacatgataggccttgtacatttgcacgaaagctattccagtgttatgttatagaggcaacgtgcaaaaacatgtgatggtgtacaatgtgcctttgacgaacttgttgataagatcattcatgacccctggtactgtgggaaagtgagaaccgagaagtaacggagtctaactgtcacacggggaagaaggccaaggaggaggagcctggggtggttattgctctgtgttataaactctgggaaatccatctcttgcatatttgagcagatagtgact

SEQ ID NO: 516624 - DNA, 187 bp, Homo sapiens
cgatctagagtatccccctggagcggttttctcaacagggctgctttgctgcgtgatcgaggacgatgccgatgaggccctggagatctactcaggcccagctgttatttgagaaccggcggtaagggacggcagcagcagcagaagcagcagctgccacagacacccccttcctgtttgaagactt

SEQ ID NO: 516625 - DNA, 196 bp, Homo sapiens
aaggtttggccccggggggggaaaaaaaacccccccccccccttttttttcccggggggggggggggggctttttccccaagacccctttttttggggggggtttccccggggggcctttaaaaaaaccccccgggggggggccttttttccctttttagggtttaaaaaaaatatttttggggggttttttttta

SEQ ID NO: 516626 - DNA, 1306 bp, Homo sapiens
ggaaaagaatccaagatgtgatcctagaagcctgatgatcgtcacagggcttgtctgcgttctcaggattcggaacgctcaatcctgattagtcggaggtatctggaccagctcattacgtgggagcgtatcgctaagcgtatagggatagatacgttggtccataatgagatctcaactattgctaggggcctatgtatatcggctccaccacttgtggcgcatgcaattactgtgtcaatccggaaaactggttactcaggggactggactattagacatggttgcaagaattatgatatggcggcaataacacgtgggtgacagctggactagagcagaattgtagggtcatacaagtaacattgacataggcccctgtgattgtggaccaggtggaacggaggtgaattcaggcattcattattccacgttccctaaaaaatgtgaaccttgttcacacatcgatctgggccaattttgcgcggaaaaggaattccatagttgaaccccaaagtttaatcggcgagcggattcaagccaaggttcccatgccgagaaggaattttgctacctagagggcacaatttgggcctctttccgtaggttctacgcgtaaaacagttagtggatatctggggggttgccattcagcaaattcgcgaacaggggaacttctgttagagagactttctacacaatgggtctttggacagttgcacaacttcgcggcggcaacccgcgaagggaactctactgtgcgcaggcgcggcaaaacgcgcaatcaggcacacactggtatacgcgttgtggaaagttcccaagtgtccctttccctgcaacatcgttggcaaaccgcttttgtgcaacacagcagggcggctttgggaccctagcggaaaatagcccacatttgccccccgtttgagggtccccacggtggaaaaaatagaggcgaggctcaacaacggggccacatgtggccatttcacacacctttgggacaaacgagtctgcctcctaatgttttcaaactctggggttggttgggcccaacgcatttgtatcataagtactcgccaacggggggcggtctttcccaacaaagtttcgttcccgaagagacagcttgtcccttcaacccccacggtgttaaaaaccaatggtgttgggacccgcacctttcacaaaccacaactttttgtgtttcgcaaattccggaaaagacggaaaacagggtacctttaaaggtggaaaccccacattgttgctcggcacaggggggggcccctttgttccacacatg

SEQ ID NO: 516627 - DNA, 110 bp, Homo sapiens
tgctaggtgtcatgcctagctgaagcccagagtctccgaatgaagcggtccccagcgtcgactcttgaagtcacagccatagcatttcgtgccacacatcttctcatagt

SEQ ID NO: 516628 - DNA, 1421 bp, Homo sapiens
  misc_feature (438)..(438): n is a, c, g, or t
  misc_feature (1421)..(1421): n is a, c, g, or t
taacaataatgtcaagttaaatctgccaaattttcaagttgaatttggggagcatgtttggccgtgggtgtgccacacagttaaacagaggtttcttgaaagtgactcaagtgggatagggcttgaaaagtgggcacgtggcccttagccagggtgagttaggaaccgggcagggaagggcaaagaagggtgagcgcccttaagggttcagctcaagacaggagattgacccaggtggaccaacgccatgtagaccctctctgaagggaccccacgggggccaacagggctttcccagatattatatatatggccccttcttctgtgaatgtgaggcaaccccagggacaaacaacaagtctcgcggggggcgtgtgtgtgtgtgtttcgcaaaactctgtgtgtacaggcaaggtgtgtcctctctctggtgggganacacaccacaccccctcttatacatgtgtcatatctctatatctcttatcccagaaacacatattgtgaaagaggctctcttcttcttatatccccacattctctctcgcgaggggaccacccccgcgagaacagaggggcccctcgtgggaattttcctataaaacagcgaagacaaaaaaaacaatttccaagagtggggtctcccattatgtgaaagagtggcgtgtctccgtggaattcttttcagtggtctctcaaagaattatgccaattttttgggacctcgagtttaaaaagttttatatagaaggggcaaaaagaaaacatgttggagggacacacagaatataattcacagaaaatgtgaaggttataaaagaagaggttttcaaaaaggggggcaggcctcctcctgttgaaaaggtcttttctcccccaaaaaaaaaagaccccccgtgggtttacactcaaaagggggatacctggaggtagcctcgacatgactagccattgatcataggactagacatgacttgacatagccatgacagacatgcacatggacatggcctagcattaaaaagtagtatccccagagagcaaaaagaaaaaaggataatccagcgcggccgcagcagaatgatcaaacaaagaagcgagtctcccaagggcccccaaagagaaggtggttcttttcttgtggccccaaaagaaaaatctggcctcacatactgtggcccaaaaaaaaaaagacaaagcagcgcgtgtggttatcccacaaaagactgtcttctatagagagggggggctttaaaaaagagtcactctccactgcccaaataaaaaaagcgacccgcttttgctcccacaaagagggtcgcttttgttggcaacagaaaacggtgctactgagggttgggcaccacctactaataaacgcgaatacaagagaggagctttatcttagagctacttgtgan

SEQ ID NO: 516629 - DNA, 382 bp, Homo sapiens
acttttgcaagagacacaacattcagacaattagaagacactgtcttgccttcaggtagttttcatgttatccaggccatttagaatgagtttattactcgtcagagtacaatattaaatatattgaaagttctgaagttgagatattatacagtgatagcacttgtcttgtatttcatattttagaatagtggttctccatgttactcacatattggaattgcttgggagatgtttgaaatttttgtgccttgtcgtcacccctgatcagttggattctactcttttatggctgatactatcgttctactagtgctggacttctgttgtgatccagttagtatttgagtgatttctttctttatgggcgtctagatgcctt

SEQ ID NO: 516630 - DNA, 419 bp, Homo sapiens
ctctacaggatcccctgcagctagacacagcagcgctgttagtgagcttagttagcactgacttcgtaaaataccatacatcggccagtcttggaaaagagaaaaatcaatggagtttcttcttttaaatacagacacaaacttatctcttccctggagaggctgataaatagcctttctgtcttttggccattgccgagtgtattgcctcgtttgggggaggatgagggactgtgttcagctgtggtgctttgtttgttaaggcagcctggcctttgctactcgaggagaaagatggagcctagggtctcaagcccaccttcgctgtacctttgctacatagtactgtatgcttgccagctagaaggagggtcagggcatttttttaccgtccgtgactaagtgtgtgtgacttacgc

SEQ ID NO: 516631 - DNA, 411 bp, Homo sapiens
ttacacagagacaccgtgtctcatcccgacgagaggatacactcgcggtagactcctcaataacagatgtctgtctgcatattaatgagactagcgcacgaataattggtgagtaaacatatcagtgtcagaatgaacccggaggccttatgttcatgcacacagacacccactcacccctaaactctccccttccacccactaggacaattgaaacagacgcccaagcaggctatgacccaataaagtgggacggggcaagacagggaaaccaccaaggaggacctgtaaggagaggggtgtataacaaggagggaaaaaccccccatgagttggtcctgggtattggcaaggtttcatatactaagatccacttgcctccaccaacctccctagaggggcacaaagcta

SEQ ID NO: 516632 - DNA, 157 bp, Homo sapiens
  misc_feature (85)..(85): n is a, c, g, or t
tcaagcttctaacgatgcacggggacatggtggtacatacctgttagtcttagctactcgggaggctgaggcaggaggactgatntgatcccaggaagttcaaggctgccagtaaagctgtgcctgtggtgacagagcaagaccctgtctctcaaga

SEQ ID NO: 516633 - DNA, 481 bp, Homo sapiens
gacagagtctcgcactctagtcacccaggcggaaatgcaggggcgccatctcagctcacggaaagctccgcccttgggggctcaagcaattctccggcctcagcctcccgagtagctgggttaacaggtgcctgccactgcccccagccaattttggtattttagcagaggtgaggtttcatcatgtgggccaggcgggtctcaaactcctgacctcaagtgatccacccgccttggcctcccaaagtgctggaataataggtatgagacaccaccccagccaatgtttctcaaagtattaaagatacttgtctacttaatgtggcattggctactttttaaaaagaaatattggtgaggtatttggcaagggagtaggaataaggtgaaggaattaccttgggagaaaagacttccacagagctctaatggctttacacttaaaggtgtatctcaatatagactacattttccccctgtg

SEQ ID NO: 516634 - DNA, 100 bp, Homo sapiens
caaagtccaaacagtgcccatagtccaaacagtgccagagtccaaacactgcctgggtggtggttcacaacacttataacttagagagtttgagagccag

SEQ ID NO: 516635 - DNA, 922 bp, Homo sapiens
ggcaggccaagtggaaaatccaagggaaaggcccgaagtaagagcaccaggctccagtacaacatggcctgtccggagaggcaagtcaatttccttataaaatgatgatatctgagtgctcccgactccaaaaggtcctcaacatcctgagcgaacaaatgatccttttattcaacgaagtagcctttggccactctggttaccaaatgcagccatattcatttaaccccagaatgccataccgtgaatgggggtggctgccccaattcatgtgcaacaactgataaaaaaaaaaaagaccccataattagggaacaagactttacaaatgcccttaataacctgtgagttgtgaacaccgcaagcaaaatcagggcaaagattaagagtgtaatccagtcaagtgtgtggtggacaccatggttctgtcgctggaaactcagctgtgcagatgggtgggtcaagaatgttaaaccaaaaatggattgttgatattcattaccaacattttgttttcctatttctttccagaattttggttgagttattcctggaaaatcatttccaccaagatacagattatgaaactacttataaatttactgaaaatcagcatgaaagagagtggtcagttgtaagtacatcagaatcgttccctcttaataagatgcacagcgacgtctctaatatccttacctattggattaacttgccacctacaaattgaggtcgtctcaaaaaacaaaaaaacaaaaaattggggccgcgcaagaattcaaccactctgtgggcggcccacaataaaagcacggccacaacacgacaaagtgtgtcccaaaacacgggcactcgaccaccgctcgtctggcacgcccaccccccccgcgcacgggaagaggcatcaacccacacagcacaacga

SEQ ID NO: 516636 - DNA, 156 bp, Homo sapiens
aaaataaagaattctttacaatatataaccacattatcatgatcacatctaaaaatttaataattgtaaaatatgacctgctatctagtcagtttcagattttctctagtttctcatatattttttgctcttttatgaatcagggtccaaataaag

SEQ ID NO: 516637 - DNA, 974 bp, Homo sapiens
ccggtgctcgcgtgctcgaggctttcgtgatctgtgggagccgggctggcaggtagcaggatggcgtgcggtgtcggctgccagggcgaggcgcgccgtgtgctggtgtactgtgggaagtggtgctctgtgttctcgatgcgtgtcaggctttttgtgtccgcaactggtgggttgccagcgttatgattgttggtatgtagaaatgacagaggccatgccgcataccattatttgtttaaacactgacagactcgtacactgcaagcagcgtatgacccagcgtgactgctgagtgtttggaaagcctcttgggatgaaagagaacggtggtatgtaaaacatctttgccgttgtctgtgcatgcgaactgtggtccgtgggcgtcaactgcctaccatccaaggtctctctttaatgaaacttgctgtaccgtgtttgtgtagagcctgaagcatttttggatcgtcggatccattctcctatgtccatctgtgctacccaagcatctcttagggcaagtgaggcctcctagtccttggcttggcgcatattgctgcccctggatgggatctccctgtgtatgatcgggtacgggcgatggccaagtgggtgctgttctaccagctctgcccagagactggctgtgggaagagatcgcgtgcgtgccgccccgggggcaggcgactatcgctgtgctcccggttaccctggatgaccctgatgaagagaaatccaattgcctgaggttgacttcgactctggacacccttagaaattctagttgaaatttttcatgactggatctccgggaaaaacccgccgactcggaaagctaatccgtgttcccacatgagggggaactaccccactatttaagccctaataacatataagggcgaaaaaaataacagttctgggtatacacgtttttttcccctgggacaagaaattatacaaaaagcttcacagaa

SEQ ID NO: 516638 - DNA, 1151 bp, Homo sapiens
cggacgcgtgggctagggaagcccaggctcgtaccagcagttcttccccacactgggagatgtcctccctacctgggtcccgggagcccctgctccgtgtggctgtgactggaggcacccacgggaatgagatgtgtggtgtctacctggcccggtactggctacagaacccaggggagctgcagagacccagcttctcagccatgccggttctggccaacccagcagccacagctgcctgttgccgttacctggaccgtgatctcaaccgctcctgcaccctcaccttccttggttccaccgctacccctgatgacccctatgaagtgaaaagagcccgagagttgaaccagctgctgggtcccaagggcacaggccaggcttttgactttaccctagacctgcacaacaccacagcaaacactggagtctgcctcatctctgaatccaacatctccttcaacttgcacctgtgccactacctacagcggcagaacccggggatgccctgccgcctctttctgtatgagccagctgggacggagaccttcagcgtggaatctatatccaagaatggaatctgtctggagatgggcccacagcctcagggcgtgctgcgggccgacctgttctcccggatgcgagctctggtggcatccattctggacttcatcgagctcttcaaccaaggcatggacttacccgcctttgagatggatatctacaggaacttgggcagtgtggacttcccacgcactgcggatggtgacctggctggcactgtgcaccctcaactgcaggaccatgactttgagccactgaggcctggtgaacccatcttcaagcttttcagcggagaagacgtactgtatgagggggactccattgtgtaccctgtgttcattaatgaggctgcctattatgagaagcacgtggcattcctgaagtctgagaagatcagggtcacagtgcctgccctgctgaggttgaccccccgctccacccagactccctaacccaaatcatacctggcctgatctcagttttcctatctgaacaatgggtcccaagcccagggtcccctatctcactctggacaccatatccctttccagacaactgatctcattatataaaatagactgtgcccc

SEQ ID NO: 516639 - DNA, 1296 bp, Homo sapiens
cggacgcgtgggctagggaagcccaggctcgtaccagcagttcttccccacactgggagatgtcctccctacctgggtcccgggagcccctgctccgtgtggctgtgactggaggcacccacgggaatgagatgtgtggtgtctacctggcccggtactggctacagaacccaggggagctgcagagacccagcttctcagccatgccggttctggccaacccagcagccacagctgcctgttgccgttacctggaccgtgatctcaaccgctcctgcaccctcaccttccttggttccaccgctacccctgatgacccctatgaagtgaaaagagcccgagagttgaaccagctgctgggtcccaagggcacaggccaggcttttgactttaccctagacctgcacaacaccacagcaaacactggagtctgcctcatctctgaatccaacatctccttcaacttgcacctgtgccactacctacagcggcagaacccggggatgccctgccgcctctttctgtatgagccagctgggacggagaccttcagcgtggaatctatatccaagaatggaatctgtctggagatgggcccacagcctcagggcgtgctgcgggccgacctgttctcccggatgcgagctctggtggcatccattctggacttcatcgagctcttcaaccaaggcatggacttacccgcctttgagatggatatctacaggaacttgggcagtgtggacttcccacgcactgcggatggtgacctggctggcactgtgcaccctcaactgcaggaccatgactttgagccactgaggcctggtgaacccatcttcaagcttttcagcggagaagacgtactgtatgagggggactccattgtgtaccctgtgttcattaatgaggctgcctattatgagaagcacgtggcattcctgaagtctgagaagatcagggtcacagtgcctgccctgctgaggttgaccccccgctccacccagactccctaacccaaatcatacctggcctgatctcagttttcctatctgaacaatgggtcccaagcccagggtcccctatctcactctggacaccatatccctttccagacaactgatctcattatataaaatagactgtgccccaaaaaaaaaaaaaaaaaaaaaatttggcaccaaacacattcgcatttatttttttttttaagcaaatggacaaaaacccaaattaccagcttttttaaacctaagcttaacattacatatttaaacaatagtcaaactggacggg

SEQ ID NO: 516640 - DNA, 1300 bp, Homo sapiens
  misc_feature (358)..(358): n is a, c, g, or t
  misc_feature (412)..(412): n is a, c, g, or t
  misc_feature (704)..(704): n is a, c, g, or t
tttttttttcccaggtttcccaggagaaaaatccatcttttgggtggttaatctggggtcagtctccctttcttaaagggcctggagggtctatctctctttcaactttctccagaacttgggaaagaactcccgcggctgtgttccacttctttagaaatgtgaagcccattttgtgtgccccttttcggtgaagaggtgttcccgtggatcaccacgcgtgacgtttatcggagggcattacgagccgcgagacaatatagggagggagggagggaggtataacagcgtgtgcgcgtgggtataacgcgtggtaacatctccttatctcatataatatagtctcgcgcggtggaanagagtctcatatagtctcacagagtctcaaagagagagggaggcgcgtatacanattctctcgcgcgctgtggacgagaaatctgtgtgttctacaacaaacgctgtgggcttttctcccctgcgaggtctccaacatttgtgtgggactctctgtggagaagccccgaggtgtataatatatctctataaaaaagcctgtgggccgaggacaaaatctatatatctctgtgtccaatctcctctctctcgctgtggcatacacgagaccaccgcccagtgggagacatattcatctctctctacaattataacacatactctgtgtggaacgcaggaagggacanacagccgcccttatatgtagaaaacagagagaggcaggccccacacaacattgtgtggtgcgcatattaccctgtcagaaaacaagagatgtgtggcgctctccacaaaaattgcgaagaccattttctcgtggggaaaccccacacaaagagagtgtgtgttgtgcaagaatatctccccccaatgtgaaaattacacgcgcgggggaggaaggtatcaccagaggggagagcacggagaggggaacctccgttgctccatgagtggtgggggcacaacaccggtcgtggcggtggggccccaacatgcggtgtgcgtatgaggaacgcggacggacaaggcggcgggctgttctctctacacacaaaaaaaggcgcggcggagaaaaaaaagtggattaagcgtcgatgaaacaggaacactacaaccaaacaaacattttccctccaacgaaaggacaagagggggggcgggcggggcgccacgcacaacagcaagagacattctcagaaaaaacgagaggaagggaatcctccccataaaacaacaccgggggagatacccaggcggaaacaaaaaaaaagacccgaaaacg

SEQ ID NO: 516641 - DNA, 145 bp, Homo sapiens
  misc_feature (11)..(12): n is a, c, g, or t
tgtacgagatnnagagagagaagaaagaaagaaagaagaaagaaagaaagaaagaaagaaagaaagaaagaaagaaagaaagaaagaagctacaacaaaaaccccagaaccaccttttttcaaattagtccctgtgcaaaggaaa

SEQ ID NO: 516642 - DNA, 343 bp, Homo sapiens
ctccactttaagttaagcctgggcaacatgttgagatcctgatctggtttggctgtgtccccaaccaaatctcacttgaattgtaattcccacaattcccacgtgtcatgggtggtgactgaattatgggggtgggtctttccggtgctgttcttatgatagtgaatgagtcttacgagatctgatggttttaaaaaccatcagtgcagggagttgccctgcacaagctctctgcctgctgccctccacataagatgtgtcttgctcctcttgccttctgccatgattgtgaggcttcctcagccatgtggaactgtaagtccaattaaacctgtttcttgca

SEQ ID NO: 516643 - DNA, 318 bp, Homo sapiens
atgagatgcctgctgactagcctatattagatgctgactcagttgaaagtaaggatgtttgcactatgctgaggcaaaggatgtcttcctgcgcatgatattgtatgaatatgcaagaaggcatcctgaatactctgacatgctgatgctgagacttgccaagacatatgaaaccactctagagaagtactgtgccgctgaagaacctcatgaatgctatgccaaagcgttcgatgaatttaaacctcttgtggaagagcctaagaatttaatcaaactagttccttacaccaaggtaccccaagtgtcaactcctct

SEQ ID NO: 516644 - DNA, 188 bp, Homo sapiens
gctgactcagcaggatcccgtcacatgacatctgcctaagaagaggtgctactaccttcgacacgtagtgacttccataaatggttatgttgggggcaagttctttaagcggaaatgtaaattcctcctgaactgttttttcatgcagttaccatgaactaatactacaatacaggatggtcttgtgt

SEQ ID NO: 516645 - DNA, 282 bp, Homo sapiens
tgttaatatatgcatggtagacctctatcactggaaactagagttagccgaggagataaaaacatttgctatctttgcttttggactatggtgtttttccttaagagacgaagtcacagaatattatatattatctcacattacctcctcattttacatactgcataatataggctcacgttattttcttgccccatgtttcactggaaatgcaatctattctaagaaacaaatatctaactaggtcggcgtgttggctcacgcctgtaatcccagtactgt

SEQ ID NO: 516646 - DNA, 410 bp, Homo sapiens
  misc_feature (29)..(29): n is a, c, g, or t
taccggttgacgccacgtggggttttgtntgcaagaataatccccttctctgcagctccctggggctctgtcattgcagagggggactgggatgactggggaggcacgcgccctgctgagggcagccacttctccagcccagcaggctgtaatccgacatccacagggattatcctggtaactggtggtgcatggcccctgtgctgagagggctgcagtgtgcacgccccgtttagagcatcgtatgggttcagcatgtgtccgcggatgggtgcttgaggagcacctgtcagacgggtgcctgtcaggccatatttttggcaatggtagcttcccgggaatgagggatttttcctgggataaaggcccccgtggagggtggtcagcagccctgaggacgtggcgtctgt

SEQ ID NO: 516647 - DNA, 223 bp, Homo sapiens
cgtgcaggcaggttcgtccgggcgcacggctaataggcgagttaaaactggtgcaggacctcgcgaagtgcgcagctgtgtaattttgacacaacgtgatgacatgcccgcggcgcttgttgacgcgatgtgatatctgcctcgatgcgtctgatatgtcggtcgtgaataactataatgctctctcgggtaacactggatggctgctttcttattgaatttc

SEQ ID NO: 516648 - DNA, 272 bp, Homo sapiens
atccaaagagttcggcacgaggcaccttactaccagacaaccttagccaaaccatttacccaaatagagtataagcgatagaaattggaaccctgcgcaattggttttgttaccgaagggaaggttgaaaattattaaccaggtttatttggcagggcttaccccttttacctctctgcatatgtgattaaacaagagtatatctttgacaggagagaccccaaatctaagacccccgagacacagagcgagctactttagaggcatcagct

SEQ ID NO: 516649 - DNA, 210 bp, Homo sapiens
ggaaaatatcgaccttttagccgctgacatccagctctgtgtccataggtaacaaagccaagtacacatttctaatgtgtgtgtgcctgtgtgtgtgtgtgtgtgtgattaaatcttgctctggctcccagactggagtgccgaggttcaaacttcacgccactgccgagacattggggacctgctctataattggaactccttgcaatt

SEQ ID NO: 516650 - DNA, 231 bp, Homo sapiens
tcaatgctttatattcctcaacgctttatacttcactaccgggaaatgaaatgagaagcgttgagaaagtataaagcgttgaggaagtgtaaagcgttgaggaagtttaaggcgtggagagagtataaaggcgttgagaggagaataaggagttgaaggggaatcagggtgataggcggtatcctgggtgaaagtgcggtatccgggacggaagtcgttttccgtgacgaa

SEQ ID NO: 516651 - DNA, 1547 bp, Homo sapiens
ttcgctctgtgttcgtccttttgtgtcgtgcgcacggacgtgtcgcacgaagattgttttgctgttgtgtctcgatttttaatcccacctgccatctctactctgagggtgaacgacgtcgctcccccctgcctgagtagagaagcccctgtggtcgtgcgaactgtcttgctgcggatcttgtctgtatccaactcccactctcggtgggggggggcctccaccactcctgaggagggtcgtccgccccccgcgcatcggtctgcgctgtgtgtttgggtcgcctaccgatggccgttttggtgtgttttccaccccagataagatcaaacccaccaatactcccatgccgacatgacgtgttcgttttaagagggtgtcacccctctagaaccctccgcccgttttggtctctccccctcccatcatctcctcttggcgccaaatttgttcgctcaagcgtgggtctgaataaggcgcgcgcatgactcttttgttgtccaagtggggtggtgtaaccacgctccggggggttctccaccgccccgcgaagcgtcctcgcttctgaacacaacccacccggtcctgctctcgggggttttttctccagaggggtgttggtggttgtccccacccaggcgcggtgttcgtgttccctactgtggggggtgcaccagccccgccaacgagaaagatgttgggggagtgtcccccccagtgctcccccccccactgagagccgccacccacgagaattgttttgtatatattttttgtggtgactactcaggagcgtgagatgtgttggctccccccgacacagtgtgatgccgcccccctcgttggtgaccccctggttggtgctcaacagacgcccctcttgtacgatgctcccctctaaatagggtgtcgccctctccggggagaaattgtggggagaccataatattgggcctctgtgggtttaaagcccactttaggaccccccccagtgttagagactcgcgcacaccaccccagagaggtcgtccacgcaccccgaggccccctctggcgcgcacacaccacgccacaccccctgtgtcgccacaccacagactctgtctttgtctaagcccctctctctcttgggttgctacacactctccccacccttggcccccccaccaccgcgagagaactcgagacttctataaaccccctcttcacttccaaattgggttgctataacccccgcgtcttcttcacccttgccccacccttcactcccaccccacgaagagatgcaccacgagaccccgcccacaggggcccgcgggcccacccgcacacacaccctttgttcccgggcctctgttctgggactgtgcctctcccgcgctcacaccacagctgaaggctcacgaaagggaacaccacaaagaagggaatggaaagaaaaagaacccaaagagaaacctgttcctcccacaccccctttccctgaatgcccggggcacccacgactgattttgaggccaccaataaaagaggcttcataccggaga

SEQ ID NO: 516652 - DNA, 217 bp, Homo sapiens
gtggaggatagactacagtgccgctgttatctatgaacttctgggtgtggatgatataaacggggacaggatccaagatgtcctttttctttataaaaacaccaaacagcagcaacaatttcagccgatcctgtgtggacgaaggcttttcctctccctgcacctttgcagctgttgtgtcggggggcaacgcgaggacgctctggaagagacctgt

SEQ ID NO: 516653 - DNA, 178 bp, Homo sapiens
tggagagggacaaggcagaggaatggctgcgtaagactgaggaaggaaatggggtttgaccactcccgaggctgcatgcggtgggaccaccctgactgtcctgtctccgtgtggctgccccatctgccctgctccgtgattggctccgcattgtcatctccaagcaatgacttgtgca

SEQ ID NO: 516654 - DNA, 101 bp, Homo sapiens
  misc_feature (49)..(49): n is a, c, g, or t
ataccttgcctgttgccccatagaaacagctgtattgtgtacactctgnttgaactgtgtttgattcctgctattgtgaactgaagactgcgtgggtgact

SEQ ID NO: 516655 - DNA, 731 bp, Homo sapiens
agaaacttcatctttaacttaacaaaaaaaggagggggctgtcccccagcacactgttagaactttacttatcctcttgcttgaagtgtgggagctggagaccattcaggaagctgtggttacagtcccagacagggtccctaaaagcaaggagccattcccaatgcttcctccttagggaagccttccctactttctcttccctcttctgggcagagtttgtaccttcctcctttttgctctctgtttatttctttaatttaacacttaacaacataataccatctttatttgttccatgtttgtatcttctactgaatgtggcttcaagaacagaaagcacagaacgtggcacgttggaggaaatcagtaagtgtttgctaaaggtccaacaatgaaacagaacagatatatccagtgctatgccgcgtcaaaagagtatgagaggtattgtggtgatgcttttgaatgctaatcagaataaggagggtgactagtccatagttatatagaatataggatatacagaatatacctttttctgtaacgggatgtgtcacttaactttgttccttaaagctccagaagcccaaggtcacccacaatgattcaagtattatcaatgttgagagcctgtaaaagcatcaagtatattatagtttccaaaaaattgtgaattagactgaaaaccagcatttaaaaaataaagtgatgttgacttaaaaaaaaaa

SEQ ID NO: 516656 - DNA, 375 bp, Homo sapiens
gtgcagcgggggggcccgggggccctgtggccctgtgatggtgaaccgcggtggcttccgcggaggtttcggcagtggcatccggtcgccggggtcgcggccgtggacggggccggggccggaggccgcggagctcgcggaggcaaggccgagcgataaggagtgggatgcccgtcaccaaggttgtgcgccgcttggctcaacggacactgcaacgactcaacgctccctgcggcaggagactctactcctcttcctccactgcccactctaacgcgcaactcacgagcatcactctgactctctcattcacatgagcgggcgcccctcttcatccacacggcactgaggcgctccctcagacagcactttaac

SEQ ID NO: 516657 - DNA, 293 bp, Homo sapiens
gggggggggggggggaccccccccccctggggtcctttgggcccccggttcccccgggcccggggtttcccccccccccctttttttttttcccccgggggggggggggggggtcccctttttttttcccccttttgggggcgggggggccccttttttttcccccccccgggaaaagggtttgggaaacccttttttttttcccaatttttttttggggggggggggggtttttttttttttccccttttcgggggggggggggggccttttaaccccgggcccccccccca

SEQ ID NO: 516658 - DNA, 751 bp, Homo sapiens
  misc_feature (366)..(366): n is a, c, g, or t
  misc_feature (751)..(751): n is a, c, g, or t
agcgggtcatccctgggccacaggcagccacggacctcgcctttcccacttggttagagtcggctctgccgggagaaagcgattccagaattccctaagttaaaggaatttcttactccttcttgagcgccatccaagggccaggccttagtctaggaactggcaacaccgtggcgaccacgtcagacaagatcgctgccctcattgagttcccaggttggcaggggaaacaaaaatgtaataaataactgcactttgcaagaagagctatgaagaaaaaacagggtgatgggagagagaatgcttggatgttgaagggaggcctttctgagatggcgacatcttgagctgaataaagaaggatgngaaaggatggggcttgcaaagttctggcttcaaagaattccaggcagagggaacaagagtgaagtctccaggggaagccagcttagtgtttggagactagaaagaaggggtgtgcggctggaagatggtgagtagggacaagtggggtcagactcatccatagactggatggcttatacacaacagaaatttttttctcacagttctagaggctgggaagccttagattaaagcacccgcagattcagtgtctgctgagggcctgcctcctaattcatagatagcacttgatatggttcggctctgtgtccccacccaaatctcaccttgaattataatccccataatctccacatatcaagggtgagaccaggtggaggtaacn

SEQ ID NO: 516659 - DNA, 524 bp, Homo sapiens
aagcattggatgaagaaacagaaaaaagagagagagagtccatctctttgaagagactcatacttccatgatttcaaattttacttcagagccacagtaatcaaaacagtttggtattggcttaaggaagacatatagataaatgggacagaattgagagtctggaattaaacccttacatttataattttcaggaagggtacccaggctgggcacggtggctcatgcttgtaattccagcactttgggaggccgaggcaggtggatcactagaggtcaggcgatccagatcagcctgtgcaacatggtaaaaccctgtctctactaacaatacaaaacaatttagcccggcatggtggcagccgcctgtaatcccagctacttgggaggctgaggcaggagaattgcttgaaccccaggaggcacaggtaacagtgagccgagatgagatcaggccattgcactccagtctgcgtgacagagcaggactctgtctcaaaaaagaaaagattccttgaccatat

SEQ ID NO: 516660 - DNA, 781 bp, Homo sapiens
  misc_feature (366)..(366): n is a, c, g, or t
agcgggtcatccctgggccacaggcagccacggacctcgcctttcccacttggttagagtcggctctgccgggagaaagcgattccagaattccctaagttaaaggaatttcttactccttcttgagcgccatccaagggccaggccttagtctaggaactggcaacaccgtggcgaccacgtcagacaagatcgctgccctcattgagttcccaggttggcaggggaaacaaaaatgtaataaataactgcactttgcaagaagagctatgaagaaaaaacagggtgatgggagagagaatgcttggatgttgaagggaggcctttctgagatggcgacatcttgagctgaataaagaaggatgngaaaggatggggcttgcaaagttctggcttcaaagaattccaggcagagggaacaagagtgaagtctccaggggaagccagcttagtgtttggagactagaaagaaggggtgtgcggctggaagatgggatgagaaaactaaaaatccagggggattttagcaacttgcctacctcacacaactagcagcagagccaggattttaacccagacagttccagggctcaggtccttaccctctgggctggccttccccctctactgccccctgataccctcacttttctgaacattggactcattcctgtagctggaggtagaggacggaaactcaaaagatgatcgaagattaaaaaacaagatgattgaggctggacttctcaaaaccttgctgcagcctgagcttgagcgtagg

SEQ ID NO: 516661 - DNA, 885 bp, Homo sapiens
  misc_feature (23)..(23): n is a, c, g, or t
  misc_feature (26)..(28): n is a, c, g, or t
  misc_feature (31)..(32): n is a, c, g, or t
  misc_feature (35)..(35): n is a, c, g, or t
  misc_feature (782)..(782): n is a, c, g, or t
  misc_feature (796)..(796): n is a, c, g, or t
  misc_feature (800)..(800): n is a, c, g, or t
  misc_feature (826)..(826): n is a, c, g, or t
  misc_feature (856)..(856): n is a, c, g, or t
  misc_feature (859)..(859): n is a, c, g, or t
aacatcgagctcgctccggtggncgnnnccnnganactgcgaaacgactttttaaaggacggttatcacattcaaacattaattttttatgataaacaattccatccaattgatttaatcaatacaacatttgaagatcaagcagataaatatattttttggcgttatgcagctgacagagccaaaataacaaatgcctatggcttcatttggatatcagagctatggctcagaaaagcaagcatctactccaataaaccaatacatacaatgccaattatagatgaaagacttcaggtaattggaattgattcaaataataatcaaaaatgtatttcatggaaaatagttagagaaaacgaagaaaaaaaaccgactttagaaatatcaacagcagactcaaaacatgacgaaaaaccatatttcatgcgttcagtcttaaaagcaattggcggtgatgtaaacactatgaacaattgagtcatagaacttccattattctcctgaagataataatcgccaaataaaccaatactcagctttacaatatactaactaaccgcagaacgttatttcatacaacgtttctgcggcatatcacaaaacgattactccataacagggacagcaggccactcaatatcaggtgcagttgatgtatcaacacggttcagcaacacccgatacttcttccaggcttccagcacgaggtttcttcctccgttgcaatttccagatctgcagcatcctgaagcggggcaatatgctcactggctacctgnatcagggttttttngggnttcttcccgcctcccggatccggaanaggtttcttgttccgttttctcaaccaggntgngcggcccattcttgatttcccccccg

SEQ ID NO: 516662 - DNA, 106 bp, Homo sapiens
ccccttgcggtcatcatatgaaagtctcaaggtggcagaatgggtcagatttttccattttcctgttttccattttaagcactgacagtcaagtagcctaagagtg

SEQ ID NO: 516663 - DNA, 466 bp, Homo sapiens
ggtttttgctgttacgatgtttgagtttcttttgtattctggatactaatcccctatcagatgagtagtttgcaaatatttcctgccattctgtaggttgtcttttcactctgttggttgtttcctttactgtgcaaaagatttttggttgatataagcccatttgtttatttttacttttgttgcctgtgcttttgaggtgttattcataaaatcttttttaagaccaatgtcctgaggtcttttccctgctttcttctagtagttttattgtttcaggtcttagatttaggtctttgagttgagtcttataaagagtgagtgggagggtttaagtttcattcgtctgcatatggatatctagttttccccagcgccatttattgaagagactgtgctttccccaatgactgttcttggcacttttgtcaaaaatcgattggctgtagatatgtggattaatttt

SEQ ID NO: 516664 - DNA, 1637 bp, Homo sapiens
  misc_feature (282)..(282): n is a, c, g, or t
  misc_feature (295)..(295): n is a, c, g, or t
  misc_feature (417)..(417): n is a, c, g, or t
  misc_feature (428)..(428): n is a, c, g, or t
  misc_feature (606)..(606): n is a, c, g, or t
  misc_feature (615)..(615): n is a, c, g, or t
  misc_feature (625)..(625): n is a, c, g, or t
tggaaaaagtagttagcattaaaggaaactccctccaggtggcttcaacgccaccagggacacagggcccccccaacactcttgaatcttctcctgcagtctcttctggctggaaagaattggggccttcacgagatgagacagggctggctatgggagagctttccctattcccaaaatcttgggtatgtacgccccgatcgcgcacacaacatacaatgagatgggagacgcaggccccatgttctggtgttttaaacagacacgactatatcacacccnctgtggtttctgngttcacactctggacacacagaagtgtccacacacatacttgtggtcacacaggtgtgtgagacacatgtgtgtgtggacagaaacagctctgcgtggttctcctctctattatagagtgtnggatagagtgncttctcaatcaccagacactttatccgcgagcagagatatagcgcgtggggtgtgtgtatatgtgtgtgtcgacaagtgtgtgaactcgcggtgtggtgtgcatgtgcagacaccgaccaaggctatgtatcacgcgggcgagccgcagactctctataggaagatatatattccctntgcgagagngggtggcccncaagagtctatgatagcggcgtttaacccccaagactaatatctcgtgtgtttaccaacacgggtgtgggtctcccctataaatagcgtggagcctgcgaataatttaataagggcatagtggccactggtggaccggtacgggttttaaacaacccggtcccgtgagacctgggcggagaacacaacgtggcagtaaaagcttgggagagacatctctggggtgcggaacaggggacacccttataaatttcctgggtgcgggtgggtgggcaccattaatatgtggggacccaaaaatcttaactcttaaacaaggaaggatttcaacaagggctcacataaggggttaacctaattatacaacacattttgcacaaacacgtgtgtaaatacagcgggtgggggtcaaccacattaatgcttgagcataatgggtatggttgggtttggaagaacgttatggggctacaaacggagaaggtaatgtgaagtgttagtggaccccacctatttaatcccacgggcgtagttgtattgtgtcatcacaaacatcggacatatacgaagccccaagcgacagtccaaagacgaaacatccaaggaggccacaagagcaacagactagctaaccaagaaggaataccagataggaagaaaaacaaaagaacaacgaagaagaaaaagaacaacaaggcacaaatagcaagcgaacagaaaaaaaaaaacaaagatacaacacagacacagcaagcaagagaaacagacaaaaaaacaagaagacagaacaaaacaggagcagcgagggaacaaacaaacaaaacgaagaagcaaaagaaagagccaaaagcgcgagcaaaacaaaagggaaaagacaagaccaaagccagagaggacggagagataaaagcaagaaagaagacgagacagagaaggacaagacacacaagaagacaggacgaacaacacaaaaacaaagaagcacaggcgtaccggaccgccgcagcagagac

SEQ ID NO: 516665 - DNA, 190 bp, Homo sapiens
gaaactcaacaaaactgttcgccagacggtacgaccatcatcttagtactcaaaggacctgccggtgcttcatatccctctagaggagcctgttctgtaaatcgataaaccccgatcaagcctcaccacctctagctcagcctatataggcgccatctatcagcaaaccctgatagaaggctacaaagta

SEQ ID NO: 516666 - DNA, 476 bp, Homo sapiens
  misc_feature (203)..(203): n is a, c, g, or t
atcctctaggaggatggtgttttctgagtgtggggaagggtggttcttgctggattcatggcagtaaagtaattaatgcttcattttaatttgatgttctgctagtgacctttgatttggaattagttattttgcatgtctgtcaactgtatatgtatgacaatagaaaaaaaacatgctttttgtaaaaacccctaagattngtatatgttcatctttaggcttctgagagggagagacatcatatgggaaatcagtgttggtgtactgaaatctgcttgtaaaactctcatctcattttacattgatattaaaacattttaacagtgctggctagctgattacttgattaattatactcccatggccccataggaagctgttgtgggcctctgttcaaaagcacagaaaagagcagaaggaaatgtcttagaaagaatcaaagctgatgaaatcagcacagattgggggaaagg

SEQ ID NO: 516667 - DNA, 221 bp, Homo sapiens
gccgacaacagcgaaggccgctgcgaataatgttttcaatttcatattcatgttaagcgagattttgtgcctggcaggccattgggttgagaatattagagtattggaagcgcattataagttcattccagctcacagtgaaatcagatgtgtacgaaatcacattttttcctttggcttgagtgtagaccttaagcgaggagcaggatcttctttcagac

SEQ ID NO: 516668 - DNA, 191 bp, Homo sapiens
aaaggggaagggcccccccagttttttttaccccaggcttttaagaaatttgggcccagatttttttatggtccggtggttttggattaaaaaaaccttttgggttttttgggggggggccggaaaggaaggaagttttttcctttgttattcattgaaactttccccattaaatgccctttttggtttta

SEQ ID NO: 516669 - DNA, 429 bp, Homo sapiens
ggtctttgatgatggagtacatgagaggagtgatgagtagagggcttaatctggcactctaatcccagagaaggagctgcggccagtcagtcaagcagaaactgcattcggtgggtctttctttgagagtggttgtcatctccctgttctgtgttccagcccccagggaaaggtatggcagtagaggatgaccaggtccaagcttgccaagtcagagctacggaagcatggtccgttcaccaacgccacgtttctagagagcagtgagctgattctcccatggtgagcaggggactacatgtgaactgggacctgcaggccaatgtatccctgaggaaaagtccaccagaacgattcaagaaactagtaagaaacaatgggcagaaagctgtgggacgaaagcacagcagggctgtgggtggcagaatt

SEQ ID NO: 516670 - DNA, 170 bp, Homo sapiens
tctaagtcttgtgaatgtgtcccatgagtgtctgtgcttcctcaagggaatagctgtgagctgctgattgccctaggacatatgcatggactgtgtgaccatagcttctggcatcattgccacctggtatcattgaccctggcatacttttctctttgcccaatataaca

SEQ ID NO: 516671 - DNA, 153 bp, Homo sapiens
cccgactccagattgataacggcaatcagccgtcggacactagtctcagactgctgactgatttcgcatccgcactcaagaatgtgtcgtctaaggattgcgcgccgtctcaccattaggcactctctgtttcttgtcttagactttttctct

SEQ ID NO: 516672 - DNA, 897 bp, Homo sapiens
gggagccgatctgccgagatggaggcgaccggcacctgggcgctgctgatggcgctggcgctgtcctgctgctgacgctggctggctgtccgggaccaggggaccgatggccatctgccccccgggcccacgccgtaccactgctgggaaacctcctgcagtctacggtccggggcgctgtattcatggcctcatgcgggaggaaggcaaaagccaggcacagaattcagcaacaagaacatgctgcatgacagtcatttatttgctgtatgctgggacgatgacgggtcagaagcacggtcggttataccctcctgctcctgagtgaaataccctcatgtccaaacatgtgggtacgtgaggagctgaatcgggagctgggggctggcaaggaccaagctgggcgaccgtacccgcctcccttacaccgacgcgggatctgcatgaggctgcaggggctgctggtcgcgtggtgaccatgggaaatacgcccggaccactcatgcggagcacaaccgcttccgatgggtatggaaccgtggcccaaggggcacggaggtcttgcccacatcgcttgggatccaatgcatggatgagcccaagatctttcaagcagccagaaagagttcaaaccagaaccgtttactggatgcagatggacggttccaggaagcatgaggcgttcctgaccttctacttaagggcaagcgtgtctgcgcttggagagggacctgggcaaaagcggagtctactcttcttcacacatctacagcttctcctggagagccgtgcccgcggaaaacctgagcttagccacggtattgctttcaacttccccagctccagatgcagtcgacacggcttaatccacacgcgacgtaagaggatgcatggggc

SEQ ID NO: 516673 - DNA, 365 bp, Homo sapiens
tttctcaaagctgcagtagattatgtcttcatcaagctgttaatttgtgcttatatcatatagaactctcatatccctgtgaagagctgcccccacctcaatgatatttctctgagaacaacttttgtaggactgtgtgttatctttatatacatttagtacaactgtaggtgacgagtagtcatatattgcttgctagctacacaccatggttgatccattttaaaactttggccattttgtatctcatgggccataaattcagaaccttgtattataattaaattcttttacaaaatgaggctcattcgcaatctcaatgtcacaaacctcatacagtaggatgtatttaaccacagatactt

SEQ ID NO: 516674 - DNA, 217 bp, Homo sapiens
cgttcactccttaagtcttatgtcaagcttctgatcctctgtggttctgcaggcacttccaggtgcttaagggtccctaggcagagtcagtcagcagctggtgacaaggaccctgaacaaggtgtttggttccccgggccgacatcaggactggagtccagcctccctgcagattccacaggtgcttccctcacccgcattgcaacacggtctctca

SEQ ID NO: 516675 - DNA, 100 bp, Homo sapiens
ctttacctagtactaaagatgaggcccggcacggtggctcatagcccgtaatcccatgcactattgagagcgtaaggtagggaggatcgcttagagccca

SEQ ID NO: 516676 - DNA, 265 bp, Homo sapiens
  misc_feature (230)..(230): n is a, c, g, or t
cctcgaattacttgagctcaagcaatcagccggtcttggcctcccagagtgctaggactacaggcatgagccaccatgcccggccaggaacttgttatctggcaaggaaacatttcagtattggtattgaaaaaaaaaaagtgttaagctgaacttttatttctctaaaaggtcctactcatgggtccatttctggcacttaaacggaaatacaacttggagtcttctcntctcctacaaaatatgggcaaccaaggggggaggg

SEQ ID NO: 516677 - DNA, 129 bp, Homo sapiens
ccgcctctctcttctctaacaacacacacaccctttacttcattcgcgcgctcacagtggatcagccggcgtgtggtcagtgagtgtcacagggtggatgagtggaagttgtgtggtggtgagatggtt

SEQ ID NO: 516678 - DNA, 237 bp, Homo sapiens
  misc_feature (25)..(25): n is a, c, g, or t
  misc_feature (32)..(32): n is a, c, g, or t
  misc_feature (74)..(74): n is a, c, g, or t
  misc_feature (91)..(92): n is a, c, g, or t
  misc_feature (105)..(105): n is a, c, g, or t
  misc_feature (111)..(112): n is a, c, g, or t
  misc_feature (135)..(135): n is a, c, g, or t
  misc_feature (149)..(149): n is a, c, g, or t
  misc_feature (162)..(162): n is a, c, g, or t
  misc_feature (171)..(171): n is a, c, g, or t
  misc_feature (192)..(193): n is a, c, g, or t
  misc_feature (201)..(201): n is a, c, g, or t
  misc_feature (205)..(205): n is a, c, g, or t
  misc_feature (229)..(229): n is a, c, g, or t
  misc_feature (232)..(232): n is a, c, g, or t
cagaccgtttctacctgggccagtngcgggancggcctcggcaagctcttcagcttcggtggcctgggaatatngacgctgatagacgtcnnctcatttgagttngctatnnttggaccagcagatggctctttntacatttagctgtngtgtgtgcttcanaaaggagcngggcttagaaaaagccctttnntccgtagngttnatgtggtgtgagtaatatatttcnatngtttt

SEQ ID NO: 516679 - DNA, 312 bp, Homo sapiens
cacagtgttggtttctggcctctgaaccttcctcaataggaactcacattttactctttacccacaccatacattagtacccaagaggaatgttctggcttcttctctagccttctgagagtttatcagagaggataattataatcatccacaatacatctctcaatgtcactctaagtcatgggtctgattcaacatggcaattctgaccttctttagagaagcaagtttgggttaagtatcactcattaccctaaataccatattccttgcaggtaacctgaaaccaactctaaatgcaaggtcatctct

SEQ ID NO: 516680 - DNA, 1368 bp, Homo sapiens
gtgcagatggagtacccggttccagtcgtcgcgcctcagtgtaccgcacgactgtcgccggcgccgccagccacctgctcagttgcgatgagagccgccgatgcttggtcggcgatcatgtcagcatgtggctcgatgcggtagctaggcgacatggacggaggagcgactgatagcatgaagcaaggaagagataggtgtgcgatgttgacaggctgtggagtcgggtgcagtggcgatgtgcggcgaggtgcagcacgagcaaaggcgaggcgcagtgggaaggtccgttgccgatgcgacgtagacccggcgttcatcaccatcgagacaattcatgagagtccatatcgcccgtgatgtgaagaagacacacggagaggcctggttccaaaacaaatcgaaggcctcgttgtactagctcccatgtctgagtctatgtcatacacacggtgttgcatgtcaactcatgtcctgtacggtccagtcagtcaaattcagttcgatctagaagtaaacgcacagtgaatagctcaagatgagctagtaacacactgtgcaaggcaatcgcatcatgtgactcttaagactaaaaaattgccttgtactccatagcgctcatttgcagactcagtctattatagcttgtcggatatacagcttttgtgtgcctacgcgacatgcctttcgttgcgcacttagtaacggagtcatcgaggtagatctcgtatagatcgataagaagaaacattggtagaccctcttcccaactgacattgaaacaaccaggaggtagtagcactgccagtcaacgcagctagagttaccagcgatttcccatcaataaaataccttcttaaggaagttcgaacaacatttgaatcagggatttcacacgacgccaccacagtcgagtttccaaccgaatacagttctgggaacgataccaaggccacggacaagcaccacagtgtcgcctcagacgtagaaccgtagcaaacgcactagttacaccttccaaaatcaacagtcccgaacacacaatttagtaccactccttaacaaattaaagacattgagcggccacatgtcttattcacatcatatcagacaagcaaccacacaaagtatacaaaacacacatagaactcgcctaccttaccaacaaccagaccccgccattaacatgttaactaagaccacaccatcaccacaaatcacacaccctatgcaaccacacaccagaacacgaactatatgcaacatgtacaaatttcaaatatcatacaacaacgaccagacttacacaacaaacacatcacacttggacacacaaattcaccacacaacaacacgcatcgaaacaaa

SEQ ID NO: 516681 - DNA, 184 bp, Homo sapiens
  misc_feature (51)..(51): n is a, c, g, or t
  misc_feature (135)..(135): n is a, c, g, or t
  misc_feature (171)..(171): n is a, c, g, or t
ggatatattggacattgggtcagctttaccttactctctaattttcatganaactccattcagtaattactattacccacttgaagctgggcacggttactcacgcctataatcccagcactttgggaggccgangcgggcggatcacctgaggtttggaggtcatggagnccccgtctttact

SEQ ID NO: 516682 - DNA, 442 bp, Homo sapiens
caacagcaacaaatatgcgttgtgatgatcatctcatttaatctttacttaggcaggtgtgatggttaatactgtcaactttattagattgaaggttacaaagtattgatcctgggtgtgtctgtgagggtgttgccaaaggaggttaacattggactcagtgggctggggaaaggcagacccacccttaatctgagtggacaccatctaatcagctgccagcgaaaataaagcaggcagaaaaatgaaaaagatagactggcctagcctcccagcctacatctttgtcccatgctggatgcttcctgcccttgaaaattgaactccaggttcttcagttttgggacttggactggctctccttcctcctcagcctgcagacatcctattgtgggaccttgtgtttgtgtaagttcatacttaataaactctccatatatta

SEQ ID NO: 516683 - DNA, 992 bp, Homo sapiens
gcggcttgcccgtcggtcgctagctcgctcggtgcgcgtcgatcccgtctccatggtcgctcttcgtgacggctgctggcctctcggccctggctctggccctgtggccccgaccgcgaacctggcgggtcccgccaagatcgccctaccagactggtgctagcagccacagtcagagctcgcgggtggccgtcactagtgagcagggcccccaacgtgtgatgcatgtgcaagcaaggttattggcatataattaggaagttacattcaccaagcatgcaagtcagatggctaccaaaggaagaatctgtggcaaatcaactggtcatcagtctactgagttgctgtcctgtgatatgaaaaggtccctggggagaagggctgtctcagcatgcctctacctactcttcataatacttttactggagtacgccctgggaagtcgcataggattccgatccaccacatcaggtatgtaacacggatcagtaacaggagaaactcatgacggcctgaagataggcagggggcccggtaagttatcaccatttattgtgctttactaagtgctggtctgggcctccctctgacaagctgaacagtgcattggattcccatggatcatagaagtgtcaagaactcggcagctggctcaagatagacctccggataccatatggtgggcaaggcgacgctctgactgattggagcctgaacaataccgggtatggactcctctatactctatgagacgagaagattccgaaactccagcatttaccatttatcctaatggcatgtaagtgttcatgctgcgtccagtggatgaatacggaggacatgtttcacgtgttggtgttcccctagatacgtgaaccagcgacgcgaaaacttcagttgcaatgaatgagaccctgagcccatggttattgtgctccgagcgtgatcttgagccgcgagttaaggccgcaggggttaaacttggtgacggt

SEQ ID NO: 516684 - DNA, 398 bp, Homo sapiens
gagaactaggctcgagtggatattctgagtctgaaactttaaacagatgtgtattacacaaaggtcgacgaatagttggatacttccctactttgggcactattattctcactctccacagagaggctgattagcttctcatctggtggcggtaagcactaccttactgaacttaacagaatactagtaacaatgccttagtgatttaagctgaatgctggacactggaacatggctcttgtacccagtatcaggaatgcacaaatgtgttccagttaacaatacaccttacattatctgtaggcatggacactgacagcagtgccatttcttttgtgacctgactccagtacctgatggatatagtgattatcagccacacttgttcttcttgtctt

SEQ ID NO: 516685 - DNA, 489 bp, Homo sapiens
  misc_feature (91)..(91): n is a, c, g, or t
tcctgaggatccccatccggcgaggcagtctcgaagaagctctgtctcattgccaatgtcttcgattatcaggcagattcctaggggcttncgcgttcatcttgtatctctcttcaggccgctctgaggcaaaaaagcttctgattcctgaatggatttcttcactggttcttgttgagcgccaagctgttccttaagtctttgttctttacttctcccattatggagcctgaagttatttgaaggatccttgagactcttttggattgctgcttggagaacattcctgtaacttgtccctgctccttgaacagactgcttgtacttctggatttttgccttcaggtctattctgtggatgttctttaggcatttttctaataaatccagttgatctggggcaaccagatttagtttctccaactcaaccacaaggtccaagaaactcttctccttgcttatcttgcctcggcccatgtaatccttcat

SEQ ID NO: 516686 - DNA, 1570 bp, Homo sapiens
  misc_feature (206)..(206): n is a, c, g, or t
  misc_feature (253)..(253): n is a, c, g, or t
  misc_feature (1093)..(1093): n is a, c, g, or t
ggctgcactggatgctgacagggcctttaggcgggcttgtgcgcactatcgcgtaaatgccatggaatcttagtaatgctcgaattctagctcatagaatggcacgacgttgcttgggatatcatgtattccgagacacaagccgcggagttgccgtaacgattctcggaattgaacgcttaggagtgcacggacaaggacgcaanggggcagacagctctgtatttccgagcacgcagacagcgctcgctgngatacttggttctccagtgccaagctctcctacggtaacgactaggaccacttgtagtgtcaggagtgacctatgcctgtcaaagggctgtctggcgggctcggcggacggccagtgttattccaagaccagtgggaaaagggaatgactttcacagggaagatgtgcacaggtgtctatgtctctatcaaaaggcatcagtggtttgggcccgcgggggaacccaccaggtccaggaggcgaattttttctaggcttgcggaaatcccctggagcgcagacacgggggccgggcgaaaaacctaatatttgtgtcgcgcgaccttgtgtaaggcagtttccccaccattgatcctaccggttgttcgcccaatagctgttggttttgcagaccggcgaagtcgcctcctttgtgaagactgagacacacgattaaccccacaaggttttcccccacaaaagtcgcttgcgacatgcgccattccttttatcccccggcttgcgaataagacgaaaaaatggccgttcctgtttcttgcggcagccccacaacggcggagaaggcggacaaaggcgtggaagcaccacgcacccggcattcggttgggcctgttgcagagcacttggtggcaggccagtcccaccactgttttcacgccaacacgtttttggggcgccacacactccccaaacagttcggttatgacttacacctgtgggttacacctctgtgggtgttatccaacagtaacgccccccctgtaggaacacaccacggggaaaaacgacggggatccggtaatgtgaaggattcggcaacttcgggcgaagcgggaaaancacagcgcgttccggacaattcgatatcagggttcccaccccttttggaacgcggtggcaaacccgcaaagacaagaagggcacaaattctttgtcgcacatatagagtgtcccttcctttgttacgatgcggaacatgacgtgtttccctatgacaccgcagaggattggacatcttcggggaccccccctggttatgggccggcattgaacccgagaactgaccaacgttgccggcgagattccaaaattttgcgggcgacctaggttaaacacgggtgttgctgcccttagtcagtgacacaagcgcaaaaggcgccccacaaaaagcgtgtctcacataggtgttccccgcgcaaattgttggacacccacaagaggcggacctgtcgtgtttgggacaatacacacatccctgtttggtcttccacaatgaccacatttcaatacaacaattagtgcacggtgactggaacc

SEQ ID NO: 516687 - DNA, 1044 bp, Homo sapiens
caaaacaccaaatggcggatgacgccgtgtgcagcagggggggccctggggtgccctgtgtgtgccctggtgatgggtgaacctgcggtgtgcttcctgctggaggtttctggcatctggcatcctgtgtggcctgggtgtcgctggccgtgtgactggtggccgtgggccgatgtgcctgctggatgctctgctgtgatgtgcaatggcccgcagtgactaagtgcagtgtcgatgctcctgatcacccaatgcttggagcctgctttgtgtccacaggaacattgcaagaatcacagtaccactaggcaggacgaatctactctactatctacccgtgtccgcatataacggacatcgagatgcatcgatctgacttctctatcactggagggaccatctcatacaaggcatgacggtccttgcaagaattaatgaccagctgccagacagcatgactcctgtgccaggccaagctgcaccaaggattcaaatggcactattgttcgcctactacagagtggacctaacaaacatggccactgtcgaggctcttggcgtgctacaaaccgtgctaccaatggacgcgtgagtcaccagacattccgttggtgagccacatcatcctggccacacgctcatccatctgtcccccagtgcagcacaacggctactaggggcgaacaatactcggcaattccccaacactagtccctttgcacacgtgacatggcccgctgctggcatcatgtgctggtacgccctcatccctgcaccccacggggcactggcatcgaactccgcaacctgtgcctaacaagctgctacaatgatggctgctatcgattgaattggcttaatctcaagccggggaccgacctgccacccttgggcacacatatggccaaagggcaacgtttgcattccatatataaagaactaaccagatacctgaacccggacctcttggaacggaaccatgtaatccacaaggtctccttctataggttcatgacacctataaagtcctaatctagtacaaga

SEQ ID NO: 516688 - DNA, 1284 bp, Homo sapiens
tgctcaggcgagcttagtagcgtgcagctactcgagctatctcatgggatccagacttgaggctgaaggatgctaggcaagatcccagagatcacggtcagcacgtcagtggtctccttgcgaagagaagctgccccgtaggggataccgtgaaagggcttggatacctcgggaattagaggctctcggcagatggaggctgcttttccagagatccatgtgggccagtatctactggcatgtgggacggaaagagaaaagatgtcgcaatgcgctggccgatgcagggtggagtgctagaaggagcaaagttaaatattgattgcaatgggctcggacatatggtgcaagtcaggagatgagcaatggttcttgttatatgcaaactagcgctggaggctgggtgtccagaagggaagggttactggaacttgcaagactgaaatccaagaaccctgcaaaggggcgccgatttgaccgaacgcctacttagcacgatgtataagcacgtaacagaagaccaacgaaggtacgcgcttaggagccgtaactcgtggttatcaccaaggacagtgatcagcacggacgaggcccaagtgagcagaggttgcagaagaccaggctgtgtacgcaaatgtggggccttccatggctttcccggttaattatcccaggaataatatcgagccgaatcatcaactgccaagggcaggcttggtccgtttcccacacgttcctgtgtgacggcctttgaaactcgatgacgcaggcggtataattcccagcgcaatggtggtactagaaacattgtgcacagcacaccagggatttcgccgacaatgggcgcgaagggcgcataccacaacagggcgttccgcagcggactttttagacctcaacgacaaacaattttcccctcccggggggggaacccccaaccaattatatagtagccgtgtgcgtatagcggagcccttggtctgacctggccagatttgaccctccccgttaaggtcccgaaagacagggaaagcgatcgtgggggaacacacggaggacgacaccacaaggaaacgactagggcgcaaggaaatccccagtgccgctgggagtagatgcgtaagccctcggtcgacacgacatggcgcgaagaggggcgcggtcgaacacgaacaggagcccgctaagaacacaaaacgggctacaggagctaccatcgtgcgtagggcgaagaaggacacgaacactcgacacgagcagcaccacttagagcagagaaacaac

SEQ ID NO: 516689 - DNA, 1232 bp, Homo sapiens
gagttcctccttgctctcgcccctactctttctggtgttagatcgagcaaccctctaaaagcagtttagagtggtaacaaaaaacaaaaaacacaccaaacggctcgcagccacaaaggggatgaaatttcttctgggacattcctcctgggttctcccgttactggatcgtctggcgtccctagagtccttcgtgaagctttttattcctaagaggagaacaactcagtcaccgggcgaaatcgtggctggattacaggagctgggcgcacgggcaactggggagactggactggcctatgaattggcgtaaactctaaaacgcaagctgggtcctctggggatataaatacacgcatggcgactgtggaggaacacagtctggccaaaatcgcacagggcactggcggtggcccaagggtctcaatacctttagggcgggaacacactggcaagacacaccggagaagcatcatctcacacgctcctggccaccacgaacgcgtcgaactgcgccgaaacttgggcgacgaccttgctcaacggccacgtcttcataccgtaccacaactacactgggctcggctggaataaagctccataagttagcactaccagagacttcggggctactggcatacacaccgacacggatctccctctcaggcattgtggacccacacgaaccttttgtgcaaacagctacaacagggtaccctgtgccaccatcttctcccggaggacttaccaccaacggagcacttcttccttcaccctgtgacacaatggaccgcgacctgcacattacacgccattggggccccaattaattggtgtcccccaagtggctggcggcatttcctccggctcacgcctggagcaccaatttgtctcatgaggagtaccccgccttatctcttcaacttcgtcgaattcaaccacgggtgttacaccagacacagaggatcttcgcgacaggccagataggggatcatcacaccaagccaacctcatcgcgccgcaggccatcaaaaccccggcgagcgtgccccttacccaacacaacacgtcgcgacaggtcagacaagacaaccaaacaaccaggggacgggcggaccctcaattctcgtacggctcacacacccccggggggcttcacaactcaccaccaatcaccccagcatcaaacacgggtctgtgtcaacaccccacccacctgggaggcaacaccc

SEQ ID NO: 516690 - DNA, 157 bp, Homo sapiens
  misc_feature (40)..(40): n is a, c, g, or t
  misc_feature (43)..(44): n is a, c, g, or t
gtctgacgcacgctgggaccggcggactctactgaccttnacnnttggggacggttcactgacacggcacgcgtggactgttggcacgaccctgactacggtctacacacccttgtcatgtcccggacactgccggcaacgggacgacgtaccaacg

SEQ ID NO: 516691 - DNA, 295 bp, Homo sapiens
agggaaaaactttcttgcttgctgagacaaactttgtttttttgggagagaacagaccataatgtgggcagagtcttaggtcctagctattggcagagcctggtttctagggggtctgctgtcccgggccaggtaatctgagggctgacctgtttcttcctaaccatcagaaccaaacccagtttgacctacccacaaccattttgacacgtcttgacaaggtatggtcttgggcttggcctgttgtgtgcaaagctcatcgatgtttacaagatgaagaactgattccactact

SEQ ID NO: 516692 - DNA, 102 bp, Homo sapiens
tagctcttcacaaccccgtgcctactggaggtgcagcggccttcgctgcgtcactgaccgcctggcatccagtatgggcaactacaaaagtagaggcagctg

SEQ ID NO: 516693 - DNA, 263 bp, Homo sapiens
gatctagaggatcccgtgcgggtctcttccggacaaggtatataataatcacatcaaatataccttcagcttggaaaaacacagggtgaaaaaataaaataagacaaagtaaaagtacaaagcaaggaaaaggtaaaactctagaaaattttggaaaaatgaatataggccagccacgggggcgcacaccggtaatctcagcacttggggaggcggaggtgggcagatggctggaggtcaggaagagaccgggggtaccgagc

SEQ ID NO: 516694 - DNA, 420 bp, Homo sapiens
ctagaggatccctacccaccgactgtatctgtgcccagatcttcctggggctgctccttcttgtcattcaaagctcagctcacctcagagaagaaatcttccttcactcaaattaaagtaaagccacttactttgagatggggtctgggcatcttaatttctttttaagctcctcagatgagtctgacatatagtgatgctttgaatcactagctaagtgaatcttcctttggcttatatagcttttctgccaatttacttcttgctacttcttactgacagcgggctgaaaaaatggaaaatcaacattgtgggaggtggtgagaaagaaatggcaatcactagggacttgtactaaatcactgccaaaggggccgggtgcggtggctcactcctgtaatcccagcacttggggaggcc

SEQ ID NO: 516695 - DNA, 547 bp, Homo sapiens
  misc_feature (73)..(73): n is a, c, g, or t
  misc_feature (82)..(82): n is a, c, g, or t
  misc_feature (121)..(121): n is a, c, g, or t
  misc_feature (157)..(157): n is a, c, g, or t
  misc_feature (198)..(198): n is a, c, g, or t
  misc_feature (202)..(202): n is a, c, g, or t
  misc_feature (206)..(206): n is a, c, g, or t
  misc_feature (208)..(208): n is a, c, g, or t
  misc_feature (210)..(210): n is a, c, g, or t
  misc_feature (542)..(542): n is a, c, g, or t
cccttggaaccccaaaccccggaaaaatggaaaggcctttaatccaggggccaaaattggggccccccttggnaatggcccncccatagcccgggaaaatccattccaaaaaagggtatgngcaatggaccccaaatttaagagcaggtacagtggnctcacccctggttaaaaaaaatcgaagagccaaaaaatccnctantttntntnaattggaatgtattccaggtcccttcaggattaattaaataaacatgcaatttatgaaaacatataaacaattattatcactttatgaccaaatcacaataaaattgtcatttaggataaactggggagaatagactgaacatatggttatattcacagttatttattaacttaaatgttattccaacattagagctaatgttaaaagattaaactgtaacgtctaatatttggaataatatattaaagtattagcactgtggttgattttcttgaattatgttgcatcttgtactactaagcttgtgaaaataaacatttggatgttttanaaggt

SEQ ID NO: 516696 - DNA, 107 bp, Homo sapiens
caggagtattactacaactcgatgatgagtatcagctatattggagagggggtgatctaaaacactctttacgccggtttcatattgggcccttatccggaggggac

SEQ ID NO: 516697 - DNA, 108 bp, Homo sapiens
aagagttagagtcgtataggctatgttccctgagcctaagcttacccacgatgaaagagtggaaaaatagaagtacctaggtgtatgcatcacacaacatggcaccaa

SEQ ID NO: 516698 - DNA, 321 bp, Homo sapiens
atcatgcagggattcatcagggctttcaggcccctgcccaggcacctatgggacttgctggacttgaaacaaatggaaaaaccgggccgtttttagctcacctccgcctccaggaagaccaaactcccacccttccccacctccagagcagtggggcttcctcctgccctttcaaaaaataaccccagctcaaaaaacgattacgtggtcatttgtgtcgccatccccttcctgctgcacacctgcaccccggccatggggaggctgctccctgggggcaaagtttttggcaaaggttattaataaacccttggagcatga

SEQ ID NO: 516699 - DNA, 153 bp, Homo sapiens
tatcactgaaggaggagcagtgcgcagtgaaattggcaggtagtgcaagtcctggctgggtcctgccatttactgcagtgtggctttatctaagtagcaacagtgtctgtgtagcccgagctgctgagggaggcatcaccattgcaatcactt

SEQ ID NO: 516700 - DNA, 276 bp, Homo sapiens
ctgcgagtcagccatggtcgccatgtgcaaagctgatgggagggagcccacagtagctggtccaactggaagacggccttgtgcatattcatcgtcgatggagtgctgctcctgcttagaggggcagtcagggccctggcccaaatgtggctacctccagcccaaatagggaacggtttccccggtgcagaggctcccaatcagggccatcatctagcttgacagtgtgtctagctgtgtgcaaggaggcgagcggggttgggcttggtctggctg

SEQ ID NO: 516701 - DNA, 961 bp, Homo sapiens
tgcccctcgtttacattaaatgttatactagcattgaccatctcacttctaggaatgctagtatatcgctcagacctcatatcctccctatatgcctagtaaggaataatactatcgctgtcacatgtatacgtgactctcattgaacccttagatacccatgccttcttagggccaaatatgtgggccttcttgacgatactaggtctgggcactgcctgggacaggcatgaggtggtggcctagcccgtcatatgtctcaagtctccaagtagcagtattggcctgaggatttagcgtgacattggggtcgtaagatcataggccgaatcgctagaactgacctcggtcgcatcattatatatggagctaccgactgagcatggaacttttccataaaaaatgagtataagtggggaatgcagagcaccaagcgagcggagagccgtagtttgttagacatcatccctcctgatctatgtaattgagcccctgtgcaccaagaaatctgatttgagatgttgcacggaacctgttttcctgagggacccctattaagaagcggcccctatgtaatactaaggtaaacgtgatatcctgacgccgtctaagatcattggtgtgcccctgtgcaagggttcatcctgttggaccactattgtcgaaaagagaatgagaggtggtttatattgagttgtccctaagagatctcgttgaagtgatatatttcagatgggtgggaactaatgttagttgtaatatttgttgtgggaggccaaaattgttaccggacttaggggagcaataacgcagggagggagcaggccatgaagaatgaaaggaagggaatggtgcgaagtacacaaaggggggccttgcggataatagaaggtatgattacagagggctggcataagattttactttgggggtaaagagaaaaagagggggggggttggag

SEQ ID NO: 516702 - DNA, 138 bp, Homo sapiens
aaagacaaagcaagttctttcatcagtttacttaaacaggaagggttagccacaagtcacaactttcatgcaggcttttcctgaatttatttgaccagtgtccaaacttgaggtgacatcctttctggaaatctattt

SEQ ID NO: 516703 - DNA, 758 bp, Homo sapiens
gctcctggacgcgactgggtcctggacaacccgcctctccctggctcgaatgccccctccactcccgaccgggtggattactccctggctggggcactcaatgctggctacaaggagacccgggccagtgagcgggacagagatgatggagactcaatgaccggattgacagctacatcgagaaggttacgcttcactggaacagcaaaacaatggcgctggctgcgtgagactgaaccagctgcgggccaaggagacccaccaagactggcagacgtcataccaggcatgagctgcgagagacagcggctgcaggctcgatcaacgtcaccgacaacagacgcccggaatggaggttgagagggacaaatctggcaacaggacactggacaactgatgaggcaagaacgcctcccacggatgaagaccaaaccatgagcgctggaaacgccagagaacaaaccaatggcatgccataatacgaccaggacacgccagactgaaagccacacctggacaccaggtcatggactctggacgaggacaggactaggcagaacgggcagagaagggaagggcaggaactcacaggatacgtaggacagggaaaggaatccaaaagaaagagacgggaccggaaacgagagaaacaacccaggcagacagcgcatggacaccggaccagacaaggtacccagcggtggcaagctaggacggtggaccaaggaccagaagcatacaaacgaaagacccggaaa

SEQ ID NO: 516704 - DNA, 172 bp, Homo sapiens
acggatcctgttggcgatcactgtactgttcggtcgatcattgtactgcagtgatgaagctgagatacaaattcaaataatgtatctccaaagtccatgctctttttttttcctttttttggagacagagtctcgctctgtcgcccaggcgggagtacagtgatcgaccaag

SEQ ID NO: 516705 - DNA, 1065 bp, Homo sapiens
  misc_feature (213)..(213): n is a, c, g, or t
tcccggctggaccctgtggggggtgtaaaaaaaaaaaaaaagggaggtccctggctggtgccaaaaacctttaaaaaaaagcagagggattttcgcagacgctgaaagatcaacgcgcctgaaaaaagaatgtttggcccaaaagatgcttcgaagggcaaggaggaagctttatctatggaaaaagcaaagcatctatcacagggatattanagggcagtattgtaacagacatctggaatattcgatatggggcgaggtatggcgcaaagaaacagcttggcgcaatcttcttattgtccctggcaaacaccccaatattggcgctgttgtggtctactcaaatatcgagagtgttactcatgggatgtgagagcggcccaaggtgttccagaacagggtgtgtgttggcagtctttctttcggctcttgcgtacaaatattcttccatagtggagaccctctttggtgaggaagtctcacaacaagggtctctcgtataaacctatggtctgagaggtattggtaagagcctattatttttggctatgggggtgtaccccacatattctgagaatgtcccagtaatatgagaactctatattctaccaaaggctgtggtgtttatggcgcaaatatccatataaagaacgcagatattgggcttgtagaccaggtataaccgcttttgagattggctccagatctcctggggtaaaatacgggaattcaatccgtgctgtggggaggaattggaatctcagtgagcactctattccgtgctgggaaaacagggctttcaaagagagagggcaaaataatctcccgtggttggccccttctcaaaatggttctttcctcccaccgaagcgttggaactgtgacacgaaaaaaagacccaccccatttttgtgttaaaactgtttggacgattgcgtgggacaaccgtggggagggcaccccggaatttcacgcgggctttattcacgacacactttgacctaaggggtgttctcccggtgaattattttcctaagagtgttggttaatcacacgccctggtct

SEQ ID NO: 516706 - DNA, 730 bp, Homo sapiens
gaaagaggaaaggtcgttcaagaaacccctgcctctctgcccggcacgttgtacagcgtagacgagggtttggctgcgaggtagtcagccgtccagtccccgaagcccttgggccttcagaatggcagagcaggcgtggacaggccccagggagcagagccccgccgtggaggccatgtcacacgcccagtcagaatgactctcggacttcgcaagcgagccagcctgtatttttgagcccagccctgccaggaccaaggctgagcccacctgtgggagttccggaagctgggcagtagccagggactactgcacccgcttttgccttgtttggcctcactgtattccacccacccctcctggccctggaagcagatagggtgcctcctgccatcggggccaggtttgggtctcactccccggcccttattttggagggtccaaaggggaaatggggtggggaacttcctttgggttaattcccagggccttcttggtggtggccctttttgcacccggaagggggctgttcaaatttttgcccctggccattccctgtcctgtttcctcagcctgcctcccagtggccatggggggtcggggtgaagggctgtcccagctacttgtcctttgcagggccctaagcccctggccccagcccccatgccctttgtgatgagtggggtttttcctgcctttgatgatgggctccataaacagccctgggcaa

SEQ ID NO: 516707 - DNA, 845 bp, Homo sapiens
  misc_feature (672)..(672): n is a, c, g, or t
  misc_feature (680)..(680): n is a, c, g, or t
agcggacaagctcatcttagacacagtaaacagcacatcaaatctagtacttcttcataacaaaaccgttcagcaaagcaggactagaaggtggtacctgtgacctgatgaagccccacagcaggaatcatacctgatggtaccggcctaaatgcttctacacgaagagaaggaacaagacaaggctgtctgctcgcaccgattttattcaacagtattggacgttctagctgggacaactaagcaagaaaattaaataaaacgcatccagactgaaaaaaaagaagtaaaactatagttgtagatgacacaatccttatagaaatcctaagaaatccaataaaaactattaaaataagcaagttcaacaaggttgcagtatacaagatcgatatgaaagaataattgtaggccaggcacagtggcttatgcctgtaatccttgcactttgggaggccaagatgggcagactgcctgagctcaggagtttgagaccagcctggccaacatggtgaaaccctgtctctactaaaatacaaaaacaaatcagctgggcatggtggcgcacgcctgtaatcccagctacgcgggaggctgaggcatgagaactgcttgaacctgggaggcggaggtcacagtgagccgagagggtgccatttgcaacttgccagncctggggncagacaaaggtgaaaacttcctgtctcccaaaaaaaatacaaaaaaaaaaagaaaggacaacaacaatcacgggggttcctcataaacggtgcgcaccatataaacgcggaacagttaaattggaaaacttccgaaaccggtggggggccaccccggtggcgcca

SEQ ID NO: 516708 - DNA, 610 bp, Homo sapiens
cgacattcaacgttgtaacgatgcatgtgacaggctctgattggtgatgggagcacccatgcttccttacagaatcctgatactatggcgaactgttacatgcagaattgatctaggctggtgcatgggtcacacctgtaatcccagcactttggggggcccaagcgggaggatcacttgaagccaggagttcgagaccagtcaaagcaacatagcaagaacttcgtctctagaaaataaaatacaataaattagccaggtatggtaatgtgcacctgtagtaccagtgctttgggaggccgaggtgggagaattgcttgagcccggaggttcagggctgcagcgagctgtgattgtgccactggtcagacagtgctgcttgtatttaggacagtgcttctgatcaagccagtgctgcttgtatttaggacagtgcttctcaaactttaatgtggacactaatctcctggggatcttggtaagttacaagattctgactctctaggtctaagctggggtggggtcccaggtgatacagatactggtggtccaagacacatgttgagtagctggatgtaggagaaaatggagaatctgatgttgacttggg

SEQ ID NO: 516709 - DNA, 181 bp, Homo sapiens
ctgttcttgcctaataagtttcttttaatccaatcccctaaccctttagttatattccctggttttacccagagaaatccaaaataaagatcccccatcaagcctatctccaaaaatttattatatatttccagaagaaaagcatgcatatcattaaacaaataaaatcctttttttccca

SEQ ID NO: 516710 - DNA, 493 bp, Homo sapiens
ccttttaagggggtgcccaagttgtcccattccccgaaaagtccccccttcttgtgtccccgccgagttcttcattccccaaattttcggccgaaccctgtacccccccgatattggggggaaaacctggggattgggttttcttaggctttttttgtttcattgagatggagtctagctctgtcgcccaggcttggaatgcagctggcgccatctcggctcacctgcaagcctccacctccccggttcacgccattctcctgcctcagactcctgaggagctggaactacaggtgcctgccacacacacccggctaattttttgtatttttaggtagagatggggtttcgctgtgttagccaggatggtctcgatctcctggacctctgtgatctaccttgcctcgggcctcccaaaagtgctgggattataaggcgtggagccaccaccctgccaagcacatggattttaatgagaagacttggtttgtag

SEQ ID NO: 516711 - DNA, 283 bp, Homo sapiens
gcagcgcctagaggtttgtcttcgtggatggcgcgtgtctgtcccgtctgtccctgctgtgtttccaagcacatctcagcccatgccaggcgccagcaccaacatgggaatcatgggtgaagctgatgcagcgttgccgagggggtgggttaggtcgggggtggggccgggcccccctacgggatgcccacggccgttcatcatcttgtccctcgtccccctaccacactcccacctcctagaccgccgccccttaacacagtaagacttggaatatatgcta

SEQ ID NO: 516712 - DNA, 769 bp, Homo sapiens
  misc_feature (16)..(16): n is a, c, g, or t
  misc_feature (66)..(66): n is a, c, g, or t
  misc_feature (87)..(87): n is a, c, g, or t
  misc_feature (92)..(92): n is a, c, g, or t
  misc_feature (109)..(109): n is a, c, g, or t
  misc_feature (121)..(121): n is a, c, g, or t
  misc_feature (137)..(137): n is a, c, g, or t
  misc_feature (143)..(143): n is a, c, g, or t
  misc_feature (153)..(153): n is a, c, g, or t
  misc_feature (178)..(178): n is a, c, g, or t
  misc_feature (227)..(227): n is a, c, g, or t
  misc_feature (250)..(250): n is a, c, g, or t
  misc_feature (259)..(260): n is a, c, g, or t
  misc_feature (286)..(287): n is a, c, g, or t
  misc_feature (301)..(301): n is a, c, g, or t
  misc_feature (320)..(320): n is a, c, g, or t
  misc_feature (334)..(334): n is a, c, g, or t
  misc_feature (344)..(344): n is a, c, g, or t
  misc_feature (346)..(346): n is a, c, g, or t
  misc_feature (350)..(350): n is a, c, g, or t
  misc_feature (353)..(353): n is a, c, g, or t
  misc_feature (366)..(367): n is a, c, g, or t
  misc_feature (374)..(374): n is a, c, g, or t
  misc_feature (384)..(384): n is a, c, g, or t
  misc_feature (390)..(390): n is a, c, g, or t
  misc_feature (518)..(518): n is a, c, g, or t
  misc_feature (533)..(533): n is a, c, g, or t
  misc_feature (578)..(578): n is a, c, g, or t
  misc_feature (653)..(653): n is a, c, g, or t
  misc_feature (670)..(670): n is a, c, g, or t
  misc_feature (768)..(768): n is a, c, g, or t
ctcagtaaggggacanagtctacagcagcctcggcctcataagcctaagggagcgatctgggagangtttcccctttcaagaaaatnttgtntccttcctgtaacccanccctggcctggnaatctgtgcaggaccncccgtnattatctctnccctccagggcctggcccgtcaaancaggcaccagcacaccctccctgggccgttgccactctgtgtctttggntcagcccagcctggttgtacggntatttcatnnatggaagccagaggagaagagggtgnntgctgaggtccccncaaatctgcccccagagcnttttcaattggacncgctaatccngntgangancctgatgacttgnnatagctnatatcaccangtctcnaagtccttgttagatacaagagcaaaataaattatttttgcctaatcctttttccttctaaaaatggttgccttcgtctgtaccgtcccctccttttctctacataaagttgtccttgttgttctccnaacaactgttcatgnaggaaaccccacctgggcagcggtcaggtgcggaggcagcctctnatcggtggggaacattcacagtaactgctggcaggctgctgggcgccctccaggagagggggtgctgggccgtgncgggctggcaggagttntgtcggccttcgggaaatgctgggctgctaagggtttggtccacccatcccgggagtgcccggtcctcgacgtccatctgttccctagcccatggcgnt

SEQ ID NO: 516713 - DNA, 908 bp, Homo sapiens
caatgtagaatctactatgaagcaacactatcgtgtcttagaaaaagttgtgcatatgtaattgatcatcaagattcgtagaaatgaggcccggtgtacagggggcttaacggcacagttcgcctttaatacgacagaagatgtgagcaccgggtgtcccgtagagtataacgtagaggtataaactcaggacgttaccaagtggttgacggtagtaaacccctgtctattggcacctggagaggggcaggtccaaatgaccaataagggctagaaaactttacaacattgttgttccttaagagacgtgagaattatacctgaaaataattttaaagccacaaaataatgcatggcctatattattgtcatatacatacacacaatatttttatcagaactatattattatagaaaagttttcttttaaaacgtcgtaccctatggggacactcaaatctgtcctataaaccatacgttggcgcactacgacaacaaaacgatatactacttatatttaaccaagtaatactttcgggtactcgtttggggcccactctaacgtccctaaaacattatgcgcgtcggggtataacacaacattttacctattatttcaatttgccttaggaccgtataattcttacactcattgttgaagtggaaaacattgggggacatgggtgctcaattgaaggacggaaaccatcttaggggacaacttcacgacacttaataacggtaacacagttgtggcgcattattctccctccttttctctaccaacagggttctcaacatggttcctggagggtattagtcggtcatccgaggtggtaactgttggtcctggtcactcagggttggatttggatcttggccttaccttcaattcgctttataacaag

SEQ ID NO: 516714 - DNA, 115 bp, Homo sapiens
cacccgatgtacctggtccaggccgatgatgcggtccacatccttccacagctccgagacaaacttgtcagaggactggtggagcagtgtggcgatgttgtcattcggacctagt

SEQ ID NO: 516715 - DNA, 418 bp, Homo sapiens
  misc_feature (415)..(415): n is a, c, g, or t
acagaatctcactctgttgctcaggctggagtgctatggcgcgatctcggctcactgcaacctccgtctcccaggtccaagcaattctcgtgcctcagcctcccaagtagctggaattacaggcatgtaccaccacacctggctaattttttgtatttccagtagagatggagtttcaccatgttggccaggctggtctcaaactcctgacctcaagtgatcctcccacctcagcctcccaaagtgctgggattacaggtgtgagccaccgcacccaacctcccatcatttcttttttgttgttgtcgctgttgtttttgagacagggtctcactccattgcccaggctggagcacaatgacatgattatggctcactacagcctctacctcctgggctctggcgactccgtcangcc

SEQ ID NO: 516716 - DNA, 419 bp, Homo sapiens
  misc_feature (3)..(3): n is a, c, g, or t
  misc_feature (81)..(81): n is a, c, g, or t
  misc_feature (96)..(96): n is a, c, g, or t
  misc_feature (117)..(117): n is a, c, g, or t
  misc_feature (137)..(137): n is a, c, g, or t
  misc_feature (183)..(183): n is a, c, g, or t
  misc_feature (193)..(193): n is a, c, g, or t
  misc_feature (207)..(207): n is a, c, g, or t
  misc_feature (224)..(224): n is a, c, g, or t
  misc_feature (239)..(239): n is a, c, g, or t
  misc_feature (257)..(257): n is a, c, g, or t
  misc_feature (402)..(402): n is a, c, g, or t
ggnaaagcatccacaatggctctggcagcatcaggatcacacttgcgggggctctgagacaaagttgttttcatgcaactnagtcctttcccattngttttcttagtgactaatgcnttccaatggtcatgagtccnttcaataatatcaatggcaaagtccttatctttaaattctgcattnaacgcaaacncatttcctggtttnccatcagggaccttatnccttctaaaccagtncacagttgcttctgagtngcgaggtgtcagcgcgtgtgacagcattaaaataattataattggctgcatcaggatcatccacattaatggcaattactttccagtgggtttccccttcgtcaattatagccaatatgcctagaactttcacgccaattatttnacctcttgcacatacct

SEQ ID NO: 516717 - DNA, 498 bp, Homo sapiens
ggtggagatttgagtgaataacattgctgaagggctgcggacctggggcagttcccctgggaactggtttagggatggaagctaggaaggcagtggggccaaaaggcaacatattatatacgcaggcaaggggcgtggctggcaagcaaaatgtccctgggcattgcagtttttccctataagcgcgacaatcattctagcaggctggcatggcgcaggggcctaaaggtctatccaactatatacgcacattgagatagcctagatcattacgaaacacaaccttgaagacaatacctacacagaagacctacgatagccagtcttgcatggatagcatacctacactaacatgatatgcccaatacacagtgaccacaagacgaaacttagttagtctacacagagaccgaatagtacaccttaccccttggaccagaaccaccctagagagggacttagagaagacctaaggaaccaagaggcgcacatgtatcc

SEQ ID NO: 516718 - DNA, 236 bp, Homo sapiens
  misc_feature (9)..(9): n is a, c, g, or t
  misc_feature (25)..(25): n is a, c, g, or t
  misc_feature (57)..(57): n is a, c, g, or t
  misc_feature (81)..(81): n is a, c, g, or t
  misc_feature (140)..(140): n is a, c, g, or t
aaagtaagnacttttaagccttggnggaatattaaatttttcctcaaataaatgggnttttttcttggacttggttcaagnaaccaaaattaaaaggttttccaccgggcaaaattttggttttcatgcccgaaattgcncaatttgctggcttcaccgttctgaatcctttaataggttctctgcgtgcagttgtaggttcttgcatccatcataataagccagtgacatgttct

SEQ ID NO: 516719 - DNA, 421 bp, Homo sapiens
ccgcagctgcggcttggcactggcactcaatgtacctgtctttgtggtagtcaccaagattgacatgtgtcctgccaacatcctgcaactaaaccctgtaagctgttacagcgcctgctataagtcaccagtgctgccggttagatcccctgtgctggtgcatagcaaagtatgactgtgcttgtcacagacctccaatcttcagcctctgataacggatgtgcccgaatattccagaatctccaactgttacaggtcgagaacctcagatctgctgcacagatgttcctcgaacctcctctccccccgcaccagctacagggaggaggagcctgctgagttccagattgatgacacctactccgtcccgggtgtggggacagtggtttcggggacaacactgagaggcctgatcaagctg

SEQ ID NO: 516720 - DNA, 535 bp, Homo sapiens
  misc_feature (76)..(76): n is a, c, g, or t
  misc_feature (151)..(151): n is a, c, g, or t
gacggaaagtttatggcatggctttccgtgtccccaacgccaaggtgtcatggtgcacctgacgtgccgtttaaanaaacttgccaaatatgatgacttcaagaaggtggtgaagcaggggtgggagggccccctcaagggcatcttgggntacattgagcaccaggtggtttcttttgattttaaaagggacacccattcctccccttttgaggttgggggtggcattgccctcaacgaccattttgtcaagttcattttttggtatgacaacgaatttggttacagcaacagggtggtggacctcatggcccacatggccttcaaggagtaaaacccctggccccccagcccccccaagaggcccaaaggaaaaaaaaagcccctccttgttggggggtccctgccacattcagtccccccccccattgattttcccctcctcccagtttccatgtagcccccttaaaaaggggaggggcctagggagccgcccctttttatgtcccatcaataaagtaccctgggttcaata

SEQ ID NO: 516721 - DNA, 349 bp, Homo sapiens
ggtggaacaggaaactggggaggtggactgggatgtatgtgtcactacgaaaatcaaagtctatgcttttctaacattcagtgtcatgaaacagaattcatatttacaaataggaatatgatcaaaaaacaatctaccatgagaaaaaaatacttctaagatactaaaaacactaagctaattattttcggtacaataaagaacagattcaataaagaaagagacaagctacagaaattagatgtcaagaaaaggtaatcttgggtgtcccattattactgtgcatttaacattttaattgcattgtaccatataagtttctatctcctgatttccaccttgccagggt

SEQ ID NO: 516722 - DNA, 253 bp, Homo sapiens
  misc_feature (39)..(39): n is a, c, g, or t
  misc_feature (67)..(67): n is a, c, g, or t
  misc_feature (111)..(111): n is a, c, g, or t
  misc_feature (116)..(116): n is a, c, g, or t
  misc_feature (126)..(126): n is a, c, g, or t
  misc_feature (239)..(239): n is a, c, g, or t
  misc_feature (245)..(245): n is a, c, g, or t
gctccgtttcttccaccggttgcccctttaagaaaaatncccccggagaggggcccgtgtggctgantaaagggtgcgtcgcccgcacaaaggcgccgcgttgttggcggnctccngacccttgtntcctgggcggggcggcgtgggaagaccggggcgcctgggcggggagaacgacgttggcgctagcggggcagggcagggggagggagtcactggcatttagcaacagcttctcngcgacnagagcgac

SEQ ID NO: 516723 - DNA, 1104 bp, Homo sapiens
agcggaggagtccagttggcttcacccagtgggatgccgcacggggttccgcatggtggagctgcactgccagtcccgacgccgtgcgcccgcacgttactcaggcccttgggcggtcgatgggactgggcgttagtggagacaagggagcggaagcatcgtctgaggaggcatcaggaccagcagcagaagctcacggcgggggcgggggctcaggcatggcgggctgtcacggtcccagagccctgcgcctgctggggaggcagcgtaaagagccgctgctggagaaatcgtagcacagcgagtcgtgcgtgacccctaggtgactaagactcaccatcaactggcgccgggcgcttgtccgggtcgcggaccaggctcagtgtcacataggtgtcgggggccagacgatgcaccgacgcgccacgcgccggggaacatcggacgacatgaggctctctgcacaaagccgcactggcgtgtgcccagtctcgctggttgtctcgcggcacctgacagcccatactacgcacatacacgatcaacgtctttctccccaaggatacatggcttgggacgagtgaatgtctcggaacgtacacgcgcacccttctgggacctcatgtggcacaacggaaaaggggagtgtcttcgcacaaactgaagaatcgacgatggcggggcgggtgcctggaacatgagggggcgtccccatcttaaaagtcgacagggaccccaccgtaggttgcgggacggtcaccaaagggggccccgaaggggtaaagtggcaggcggctggatccgagggcagcatgcccagggagggcggcaagttcgccaagaccaatgggcttgatacgagccggttttgttcaaggttaagtcctaagattttctcgagggggaaccttaagccagggtagggactagggttgaacgcggaagaacaggttctaggtcggggtgcagagcgataggttatctggataggagcgcagggacaccttggcgtttgaaaaagagttgagtgtttgaaacatccacgttcactttcttactatatgaacaactttaaatttcatttataacaaattgagtttaatc

SEQ ID NO: 516724 - DNA, 600 bp, Homo sapiens
gaagactccgcagaaggaagccaaaaagagtagcaagaagcggaaccggaagcacagtggtgacgacagctttgacgaggtgcagcgtgtcagagtctgatgtcggatgtcatgagagcgggccaggctgacggaggagaaaggatggaggccgacagaagcgctcaatggagacaggagaagcccaaggacgaagacatgggagaagcccaaggacgccgggggctggagtgaagccgcggcgtgctaagaactgtccctcttcatgcgcaacatcgcgcccaacatcacccgggccgagatcatctcccttgtggtaccaggcttatagcgggtggcgctctcagagccccaggacagagaggaggtgaaacgtcgtggagtgggtgagcttcgagctggattgttaacattttagagttctgtaggaagcatgtagaagaatatagagtacgggagtgtgagctgagcgctggtgtgaacatgggatatgaacaaggcgcgttcgaaacattaagagggatgtgccatgtgctgattgtgcgcattgataataagctggatgacaagctgtatcggacgagcatgtgttgggtcgtc

SEQ ID NO: 516725 - DNA, 160 bp, Homo sapiens
gggttatcccctcgggatgcaaggtcgctcctcttcatgtcgccgacgcttcctcaggtatccgagctaggtgacagccatccctcttcctgtcaccgacacgttccatcaggctatcataggcttcgaagcgcttgtccatccatcttccgtcacggcc

SEQ ID NO: 516726 - DNA, 115 bp, Homo sapiens
acctcactcgttacaggcctggtactgtggcgctccgtgaccacttcaccgttactccgacacgtccacctgaaccttctgacttcgcaaaacttcccttccacgcgtctggatg

SEQ ID NO: 516727 - DNA, 322 bp, Homo sapiens
tttggggggcccttaaaaaaggcaagggccgttcttctgctgggcggggccggagaggggcctggcccgtgttccccctttaattcccgggcgggcgcggggaagcaaccggccccccctttcggcctgaaagccccccctccaaaaaggtgtgcgggaaaaaaaaggccccggcctggggatttgggttttaaagggccttttatgcccgttaatgttccctgggtgggtagggggtggtttcccgtgttccagtgccgaaatttttggctttgctccccgttccctttttttagaaattaccgttcccttgggttttttt

SEQ ID NO: 516728 - DNA, 479 bp, Homo sapiens
  misc_feature (83)..(83): n is a, c, g, or t
tcgactctaaggacccgacgctctctctgtggggcgatcacgggtctgatgctctgcctgagtgctgctggggtggtgctccntgcgtggtgcggtgactgcccaattgacacaggccctttcaccacccaaccctgggatctgtggctgtggctagaactggagaaaagagcagagaaacttgtgcccaccaaggaccctcaacagcacctactgccactcagtgacctagggaactctggccacaatccctgcacccatccccactcccagcttggccactggccacggtcaccacaggagaatgtcagcggcacgcatggtcccccacagagagagctgtcgacgctcctctggggaaggcatcaatggactcagagagaataggccgggcatggtctagacacagtttcagggtgaggtgtgatcatatcacatacaaatcagtcaggacttgttgggtaatgaaagcctgggca

SEQ ID NO: 516729 - DNA, 127 bp, Homo sapiens
ctgggccctcacagaccgggactggctgctgctgacacccaggtacctggtcgcccacagtttgagctggacatcgagcccaaggtgtcaagccgccgagtagcacagaggccctgaatgacagcca

SEQ ID NO: 516730 - DNA, 195 bp, Homo sapiens
atgccaggaacacgtacttgactgaggccactagctgttctagacgcgcactactggtgacccaggtactggctgatcccactactggctgatccactactggctgacccactactggctgacccactactggctgacccactactggctgacccactactggctgacccactactggctgacccactactggca

SEQ ID NO: 516731 - DNA, 123 bp, Homo sapiens
ctagccatcggctctaccttgtctctcggctctaccttgtctctcggctctaccttgtctctcgtgctctaccttgtctgtggtttcgctggatagtaggtagggagacaaggtagagccgag

SEQ ID NO: 516732 - DNA, 468 bp, Homo sapiens
gcctgttgagggacggtgccacaaaaccccttcaggggaggaaaacctctctggttttccagaggccccagttccttcctgggatagtctggatctcactccttctgcctttggactacaagttcagatccagcctggtcttagccagagcctcctccctgcccttcatcaaatctgcaacctgtgtggccgggcgtggtcgtcacgcctgtaatcccagcactttggaaagccaaggcaggtggatcacctgaggtcaggagttcaagaccagcctggccaacatggtgaaaccctgtctctactaaaactacaaacattagccgggcgtggtggcgggcacctgtaattccagctacttgggaggctcaggcaggagaatcgcttgaacccgggaggcagaggttgcagtgagccaagattgcaccactgcactccagcctgggcaacaagagtgaaactccatct

SEQ ID NO: 516733 - DNA, 256 bp, Homo sapiens
agactccaagagctgccaccgctggggctgcactgcggccccccacgtgaagtcggttgcccgggccccgccacagccaccaaagtcacggtcacaaaactgggaagggggcgttggggcccaggttctggaaaagcaaggactcccctgcaaacaggcagtccttctcagctctggacttttggatcccggggtaaatatcctttggaactcgctcttgccttgaacacatccccatttgattaatccctggaaa

SEQ ID NO: 516734 - DNA, 104 bp, Homo sapiens
tggcccgttcccctaaaaatctgatatagtcatgtacttgtcaaacacctttctcaaatgagacacacttcgtgttccaaagatggtgataaacttttcttcat

SEQ ID NO: 516735 - DNA, 549 bp, Homo sapiens
  misc_feature (532)..(532): n is a, c, g, or t
ctgtgagcctagacaacagaaataaattcctagaaatgttgagttgagcaaatagttcaatgctatccctatcaatactaccaatgacattcttcacagaattagaaactactttataattcatatggaacctaataaagagcctagccaaggcaatcctaaacataaagaacaataggggaggcatcaagttaccaagacctcaaaccatactacagatctacagtaaccaaaacagcatggtattagtaaaaaaacagacacacagattaatggaacataacagagagtccagaaataatgctgtacacctacaatcatctgatcttggatcaaagctgacaaaaacaagcaatggggaaagaagtccccatttaataaatggtgctgggattactggctaaccatatgcagaagattgaaactgggcccccagcttactctgcatacaaaaatcaacttagaaagggattaaagacttaaatattaaacattaaactataaaaactctgaaaaataacctaagaaatancattctggacataagac

SEQ ID NO: 516736 - DNA, 608 bp, Homo sapiens
cacggtggcttatccccataatcctagcactttcggaggctgaggtgggcggattacccgaggttgggagttcaagaccagcctggccaacatggtaaaaccccctctgtactaaaaatacaaaaattagccaggtgcagtagcacacacctgtaatcccagctactctggaggctgaggcaggagaatcgcttgaacccgataggtggtggctgcggtgagccgagattgcgccactgcactccagcctgggctacagagcgagacttcgtctcaaaaaaaaaaaaaaaaatttaaagtattcggtaattttgaagagtagtgtaaatcacctttagttggtcgatattttcataaaaatataccttaattaaaatactcattaaactgacaatcataagtaaatttaacaatttcttcaatttgaaacaactgtgttttaaaaagtgggttgcgagaattaatccccgtggattgggaaagtagcgggggaattgggaacgaattctttagatcttgaagaccactaacagattttggtgagaccccacagtaagcagccattccgctccaccttctcagtctacatccttctccactctccgggc

SEQ ID NO: 516737 - DNA, 195 bp, Homo sapiens
ggatgtagtagttatgctaggatgaggatggatagtaatagggcaaggacgcatcctagtaggtaagggacggatcgtagaatgtgtagtcgaatataaaatatcattcgggcttgatgtggggagtggtgtgagtggggttggctatggtataatggtctggatcgccttggtatcgtatcgggtacctgagct

SEQ ID NO: 516738 - DNA, 419 bp, Homo sapiens
gtactgcttgcaagaacggtaacagtgagaaaattatgacagtgaaagaggtctgatctaaccaatccccatcttgcctttacctccaaaccgctcatgatcattcctgggcttgggtcaagctaactttcagagacatttagtttatactttaaaagatagcagtccttccccaaaactaaaccacctttgtaaagctaatgtaggtccattaggttacaaggattaaaaggagccttggccaggggcagtggctcacgcctgtaatcccaacactttgggagcctgagattggtggattgcctgagctcaagagttcaaaaccagcctgggcaacatgacgaaactcccgtctctactagaaatacaaaaaattagctaggcatggtggtgcgtgactgtaatcccagctactccag

SEQ ID NO: 516739 - DNA, 267 bp, Homo sapiens
atcccctagtgggtccctgcagtactgtttgcggttaggcgctacggccatcgtctattggttgaatagtagtgctgatgttatcgatataactagttatggggataaggggtgtagagttgccttgtggtaagaagtgcgctacggcatttttaatcttagagcgaaagcctattatcactgcgcccgctcataaggggatagccattgctaggtttatagatagtttggtcgttagtgtaaataagtgaggcagggacccactcg

SEQ ID NO: 516740 - DNA, 94 bp, Homo sapiens
  misc_feature (8)..(8): n is a, c, g, or t
  misc_feature (27)..(27): n is a, c, g, or t
aagcttcnactgtatatgatcttcatngttcagtttccgtcctaagctgttttataattttcttggctacctattatattattatgccactgca

SEQ ID NO: 516741 - DNA, 148 bp, Homo sapiens
cctgatcgacggttctcttctgatactcttctcatatgctatagtgtatttttttttttaaaacaccagaaatctttttaagtttaaaaaaaaggtgtagtgggcctggggcatactggggtccggcgctccttaaacccaaccaacc

SEQ ID NO: 516742 - DNA, 476 bp, Homo sapiens
tgttagacatcactgccacagaagcgacctaagaatcacctgcaagtatgtacacttcctaaatcccagctgtaccaattatatttcgcaagtaagttttacctagttcaaagatattgcctttcaacattgaagggatatcgatgcgtctacttcattaaaaattacgctgcacaggccaggcgcagtggctcacactctgtatcccagcactttgagaggccaaggcgggcagatcacctgaggtcaggagttcgagaccagcctggccaacatggcaaaaccccgtctctacaaaaagtacaaaaactaggtgggcgtggtggcacacgtctgtaatcccagctactcaggaggctgaggcatgagaatcacttgaacccgggaggcagaggttgcagtgagccaagattgcaacattgcactccagcctgggcaacaggagcaaaaccccgtctcaggaaaaaaaaaagggt

SEQ ID NO: 516743 - DNA, 174 bp, Homo sapiens
ataccgtcgacacgatcaaggttgtagctgccggcctatgtcacagccacagatacatcagatccaagctgagtcttcaacttacaccacagctcatggcaacaccggatccttaacccactgagcgagggcagggatcgagcctgcaacctcatggttcacggtaacaccaca

SEQ ID NO: 516744 - DNA, 418 bp, Homo sapiens
tgtgtcatgcacgcgtgtgtatgcacatcagcacaggcgccaggtctccatctgtcagtccacagtagcagtcaccatttaccactgcggggtttgcgccaactccagcctccatgaacctgcctccaacacgcagtcggcaacagaatagtttcccagcagcacaacagaactgtctttacgcaccatccttctcacgttcagccggcgtaataccaacccaccccaacatggcccacgtaaccttcattctcatagtaccgtccggacgtggttccttctcatccaactgccccatgcgcgcaatgaatgctaaattgacgaaacagtcacccggggagtccccaggcccgccctcgccttccacagttgcctacaaagcccattccagtctcggcgcaacagcgcattttcccct

SEQ ID NO: 516745 - DNA, 162 bp, Homo sapiens
tgacgcttcccttcctccgtcaccagaggagaccagactttctgttcagatctggctacagtgagcgtcaagttgtctgtgcaggcctttgattctgttctgagccttccaagtgtgtcatattgctagtattttccccatccacatagttcagcgtctgga

SEQ ID NO: 516746 - DNA, 480 bp, Homo sapiens
  misc_feature (210)..(211): n is a, c, g, or t
  misc_feature (224)..(224): n is a, c, g, or t
  misc_feature (242)..(242): n is a, c, g, or t
  misc_feature (270)..(270): n is a, c, g, or t
  misc_feature (449)..(450): n is a, c, g, or t
gctcaaactcaactgttatctagaaaaaaggactgtgtaaatatgtgtgagaggcaagtatactctgtttgccctcttgtaagagggataggggaggccactcagctgctagcactctgttctctcccctcatcctctccagaatgtattttagaacttgactcttctaatgactgaagaaaaggtggggtatgggaacgactggcctgnnggactagcagggntcacgttacagctacacncctggctaaacgagttgacgatctagangctggtagccctggcaagtggcaccgtgccagctcaacctaagtccgtaaacaatccagggtgtgggcccaggattgccctctgccttttgaaagcaccctacccctggttcctggctttctttaagaccgagacagggcagcgactaactttatgagatgggcaaagggcaagcctgnnacttcaccactccagattggaactggaaga

SEQ ID NO: 516747 - DNA, 265 bp, Homo sapiens
cacaattttacacacgtcttggtggtgcggctcagttacccctgtggctattggctgaggctgggccctgtgctgggggtgtggtagaaaggctgctgctgaggcgctcgcggcgtgggagtagctcagcgcggcgggctgttggctgtatggggagctggcagagcaggtggccgtcactgcgccacggagggacttgcctctcttctcattattgtgtccttatgctttagtgtcagtcctggacttgtagcaggcctgtgtg

SEQ ID NO: 516748 - DNA, 320 bp, Homo sapiens
ttcttatagatggtcctcagacattccatgccatgtctccccatgcgaggggttctactactttagtgtaaagatgcacaaggtgacccaagttggcatgaatctctgacaaaggaagagtcctaaacaggctcaggtggcgtctatagcctgtaagtcccagcaatttgggataggcgacgcggatagatcaccgtgtatgtcaagaatttgagaccagcctggccaacatggtgaaaccaagtatctactgaaaatgcaaaaatgtgctgggtgtggtggcgcacgcctgtaattccagctaccagggaggctgacgc

SEQ ID NO: 516749 - DNA, 137 bp, Homo sapiens
tatttctgaaggtgcccccacatgtactgattcatggacgggatcttgtcccattcgttcctcgtcgggttgtacacgtccacctcagcggagtcatccctgacaaagtacatgagtccgtttagagtcgcagcctt

SEQ ID NO: 516750 - DNA, 298 bp, Homo sapiens
ggtttttggagttttcccctttttttgggaaaccccaccattggtttggaatgattgtgggcatgaatttgggagattgtataaaccaaaactaccaaaatgtttttaaaactttttcccgtgtatgaggagggctaaaaaatgcaaagtccaatatttcccccacccttcaaatgtgggagcttggaccaatgttgaaaaataattttcctcaaagtgaaaatgttggttcaaaaaaatttcccccctccccctttgcatgtttgttgctttctaattaaaaaaactggttgtttta

SEQ ID NO: 516751 - DNA, 555 bp, Homo sapiens
ccccccaaaaacccccataaaaaaaaaccccccaggggggggaaggggggggggctaaagggaaaaaatttttggggggggggggtttaaagggggggggggggccctaaaaaaaaaatttttttttttttttggggggaaaaaaaaaaaaaaacccgggggggggggaaaaaaaaaaaaccccccggggggcgggggttggccctcgggggggggggaaggggggggaaaaaaaaaacccccccccctccgggggggggggggaaaaggggccaaaaaaaaaggggggggggggaaaaaaaaaaaacggggcgggggggaacccccaaagggggggggggggtttggccggaaaacaacccccccaaaaaaaaaatattcccccccccccccgggggggggggggggggcccggggggcccccacagggcattaaaaaaacccccccccccacccgggggggggggggcccccgtcccaggaagggcccgggaaaaataaaaccttggcctttgggggggggggaagaagccccggtttccgctcggggggggc

SEQ ID NO: 516752 - DNA, 667 bp, Homo sapiens
gacgacttcatttacctatgaggctgtcccgaagcattggacacacttcaggcctgtaaaaggatccccttggtgaagcccttgtccagtgaaccccacgagacccaggctgttacaggccctgacatcttttgccaaaactggtacccatggctgcccacgaggcctcgatcaactgtacagtgagagagaaggccagatgctgcgttccgggagatgatgtgccaacgattgaggacaagaatgaggtcctggaccagttcatggattctaatgcagttggatcccgagacggtggacaacttgatgcctacagtcacatcccaccccagcgtcatggagaagtgcgcggctctcgagcgttccaggcctggacactgtcaggaaccttgtacatgtccatgccaagttgcttgtcaggtgttgttcacggatgttgtgcatggcttccctgaacggacaatcagagatcttggtcggaagggacgcgcttgacgcttgactactacgcctcaaagctgtcacagaggctcgcggtcctccccgccgcgtgccatcatccatttatctacagacggtgatccggcaccaagtgatgcccgcactgtcgccccttactgccagagccatgagaaagaggccttcaccccactcacctcccctccct

SEQ ID NO: 516753 - DNA, 1178 bp, Homo sapiens
  misc_feature (9)..(9): n is a, c, g, or t
  misc_feature (511)..(511): n is a, c, g, or t
  misc_feature (527)..(527): n is a, c, g, or t
cgccccccnccaacgacaatagagcaaactaaaccagagaagcgaagaaacacattatactctatcttagatatatatcatccaacttgatcacttcacactatttgggtgtcacatcccattctggttgccgtaagtatttctctctcttggaaatttcgtttttttattaatatccgcccacacttgttgggtcaaaattaattgccctcctgaagagccttacaccaacacgtggtgactcttatggggtttcccaatctagaggcacacatattggggctatgggactttcgaacaaaattgccaaggttttatgaatattttatgggggggcacacacgagttcccacacagatatagtgtctttttcggaatataaaggattattgtctccccctaagggctcctgcattttgggacaagaaggaatctcagcccttgtgaagggactcctgacttctgaggaaaagccccgtttgaagaaagagtggcaagaaaacaactttgnggggatcccacaaagngagctcgccattttgaaagtcttctgaagtcaaatcacttcaccgttctaggctacaacagggattttaagtggagtttgtgcatagttgtgccctttttatctgatactcgtgatttaagccagtgaataattcttaagaatggactggggaaaaccatcacactcctgagagttagaaatatagagatggtttgtaaaaatccccacgctaaaatcctgaatgctggaatggtaattaatcttgggtagtcttcaagctggttatagcgtgaaaataagttttgccaccctttgagcgcaaccacctgccaaatgctgtaacgtactgcactttgccccctgaggccacggtggaatgtttatccctgtgttaatataaacttcctgggtccttcacctggaacaatgcctagtccacacacttgtttttcccacgtgaggtcaacaatcctgggagtccacgtgtataaaatcccatatcaatgttttgtgcataaatttttcccaaggagttttatttttgtgagaactataatcacgtagtgtacacattaccacatataatgttaaaagatttacataccaacaaagcaacccactatccaagtgttatacccacttaaacccccctattaaccttggacagtga

SEQ ID NO: 516754 - DNA, 191 bp, Homo sapiens
  misc_feature (22)..(22): n is a, c, g, or t
  misc_feature (27)..(27): n is a, c, g, or t
  misc_feature (127)..(127): n is a, c, g, or t
  misc_feature (175)..(175): n is a, c, g, or t
ccgctccggcaacgccaaccgntccgntgcgcgcaggctgggctgcaggctctcggctgcagcgctgggctggtgtgcagtggtgcgaccacggctcacggcagcctcagccacccagatgtaagcnaatctggttcccacctcagcctcccgagtagtggatctaggatccggnttccaacatgtggcag

SEQ ID NO: 516755 - DNA, 213 bp, Homo sapiens
cagagcagaattgcagaatgatgggcagaaagaagagaaggagcatttgaatgccaacagcgtttggtggcagtggttggagagatcagctttggatggcaaagccccaagggaagatctcttcccattccatcccctttccagctccccatccatcccattgactgccacctccaccactcaataaaacccccacattcacctcaaaaaaaa

SEQ ID NO: 516756 - DNA, 145 bp, Homo sapiens
  misc_feature (93)..(93): n is a, c, g, or t
gctcacatttaatttttattttgattttttttaatgctgcacaacacaatatttattccataagaaatttcctcctcccttttttccgccgcngctgctgctttatttatttttactgccagtgagagggaacttttgtggcctt

SEQ ID NO: 516757 - DNA, 383 bp, Homo sapiens
aaagtgggatggagactagaaaaggtctagcttggagaggacctactcacgagcagaacacgctttggaaactcatgggtgaaaagaggcaaaattctgtgcatttcacttttgtcagaaaggtgcaaggaaggtcaagaagaaagaaaaaaaatgctaacatctatctaaagaaaaagtttctcccacgagcatatagcatgtaaaattgtgtctttgcataggtggggttgaatacagaacactggactgaacatggggaaatgtggattctagtccaaactctgtagttaaacaagctgtgtgattcaaaccacatcccttactttctgggcttacactccttaatctgtaaatgaagcatttcaacttacaaaaaaaaa

SEQ ID NO: 516758 - DNA, 169 bp, Homo sapiens
acgcggcaccgcggttcaaagaaggattttggattcctatcttaaaactacgatcaccagtcactttcctgtctagatctggcgcaggacaccatacgaggtatccaatagaacctgggaatcgctacagactctcacagctacatcaagtgcacgtggtgctcatatg

SEQ ID NO: 516759 - DNA, 141 bp, Homo sapiens
caggtcctaagtagctatagtgagcacacgcattgatcactatacacgtagttgtatgtgaatgagactgattggctttaacatgaattttctgcttcaaggccaatatctctacaaacgttctgtagaagtattgctcag

SEQ ID NO: 516760 - DNA, 354 bp, Homo sapiens
acgttagggtttgtggttggcccatgaaagctggaccatagggaagtggaaacagctttggccttgttagcttggtcctgggattggtagatgccagatcatcaattgcaaactctgtgcaaattagaatacccaccgcccatgccaccatgcaccggaggaggtcagctgcgacacactggaagtcagatctagagtcaagaagcaggaaggtatcagtgaatgagaaaaagcaacgcctggtaccaaccctgagatgacagttagagaccctgcacctgggcctcaaacagccaccagcgcagagctccaaaagccacaacagagcagaacatgtgaaaaacagatctgggc

SEQ ID NO: 516761 - DNA, 743 bp, Homo sapiens
aggctaaccgctgtatcagtccctagctcggattccagccaattgctgcgagcttgcgtccactagcccgttttcaggacccaataatagatcgtaagcctggtgttccgcagtgatggtgatccagtgtatagtattggcagtcttcctgctggcttctagcaagcagatccaagaatgaaactaatagagatcgtagctatggtatcctatgaagccagagatccataggattctgaagaatcaagcattattgcacgccaatgaagagaatcggaagtggactgagagaaacatgtacctgacaactagtcgaccagccacaggttaccccctgccacctcagattttcaatgaaagccagtatcgcggggactatgatgccttctttgaagccagagaacaataatgcagtgtatgccttcttaggcttgacagccccacctggttcaaaggaagcagaagtgcaagcaaagcagcaagcatgaacctttaagcactgtgctttaacgcatcctgaaaaatgagtctccatggctttactaacatagccagaactaacctttgccttcaacaagcacataggcttactgtcgcacatacctagactagctaggagttacacatgccaacaccattccacactgacattaccaacattaacaattcgacacattactggtgaccctggtgacgaagaatgggcatactaaccttacaagtctattaatacagtacgacta

SEQ ID NO: 516762 - DNA, 253 bp, Homo sapiens
  misc_feature (16)..(16): n is a, c, g, or t
  misc_feature (68)..(68): n is a, c, g, or t
  misc_feature (95)..(95): n is a, c, g, or t
  misc_feature (108)..(109): n is a, c, g, or t
  misc_feature (111)..(114): n is a, c, g, or t
  misc_feature (116)..(116): n is a, c, g, or t
  misc_feature (121)..(121): n is a, c, g, or t
  misc_feature (124)..(124): n is a, c, g, or t
  misc_feature (130)..(130): n is a, c, g, or t
  misc_feature (145)..(145): n is a, c, g, or t
  misc_feature (246)..(246): n is a, c, g, or t
gagtcccattgcattncgggttgctggccagatcccgcaatacagtactgctttagaaacaaagtaanagaacaaaaataaaagggaatagagtnctcgcgacgtgtnngnnnngngtggnggngggtanggtgtaactactttngatctgtagagtaagagaggctccttcattgcatgtatagcggggtgtcagtgccccagagaaagcaatggtttccagatggaagctgatggacagatgcnggaagca

SEQ ID NO: 516763 - DNA, 1092 bp, Homo sapiens
agcggcgcgcgcgtcgcctgtcctccgagccagtcgctgacagcagcggcgcgcgagcttctcctctccacacaacatacgagcaccataatgggaacatgagcatgcaggacatgcaggataacacatatatgatggccacactggacgtgaaactgcggccctcctgccacaactctttccgaacgcacatggacagcatgggaagcacatgaacggcacgacgaactaccactggtgagcacactggcatatcccctgagaatgcacaacacgcatacccacaacacaccaacagacgacacgaacgagcatcaagagaaaaacaaaacacagacacggactgaacggaacacacgaccatacacaacaagacagacaatgaaagagacacagaacaccaccaaaagcaaagaacaagcaacaacacaaaacaacaaagcaacgaccacccagcacaaccacaagacactgacaacacaaacaaaaaaaaaaggaaacccaacgaccaaacaaacacacacacagaaaacaacaaaacgaaaacgaaacacacgcagcaaagaactgacagacgaaacgatgagaacacaaagaacagaagcgagaaacaagaaccagcaacaacagaggacatcgagaccagacgaacccaacagcagcacacgacacacaaggaaaacacaaacaacgacgccaaccgtgacaaagcatcaccagtaagatcgaaccacaattcacaagtcactcacctcgaacacctattgccgaacgcacgatcacaaaccaacataaaacacacaacatcgtaacaaaaacaagctgaacaaacataggaaccggaccgcaaccaagcgacacacacaacgacacaagaaaaaacgagggaagaagcacaaaaacaaggagcacccaacgccccgctcgcaacaaacaccgaaaacaaaagacaaccaccgcgcacaccaccacacacaccaaaccacaggagcgcaagaacaccacaacccgaagcaacgagcaaggctaagaacaagacaggacacaccgagacacgacgaaaaacaaagcaacagccacagaacaagaaaa

SEQ ID NO: 516764 - DNA, 547 bp, Homo sapiens
tagcacgtcagcccgtggtgaataggaagtcgtcactaatttcgtgtaaaagtacttggtgcagggtgtaatggcagtttgttaacatttggaaataaaagatctgggtttgattttggcactaccatttcctataagtgaagggacaaggtaccattactgaattattttcctcagcaataaatggatattaaaatctctgcctgtcttcttaaagagtagttatgaaaacaaagtaagtgaacttgcattatacagactataaaaatgccatatatgcttattattaacacctattgtatagtacatagttcttttaactgaattagagataatccatccttagggcttccaagattaacaacagtaatagttaatattgctttatatgtgatagatgttggacttcaggatctgtgcttttgatgttagatgtgttttagagctcctaaatccctaattttggtgtctgtttcactaattctgagctcactagtcatctctactcctgagtctaacttctgaaaaatctaacatctagaaagag

SEQ ID NO: 516765 - DNA, 137 bp, Homo sapiens
tgtctgtagtgatctacaggatcttattgcatttagactagctacttcataaactgccccaccaagtaaaagaaaaatcgcgatccctgatataaaccattctagtgtctaaatgcaatctgggtacctgagctcga

SEQ ID NO: 516766 - DNA, 718 bp, Homo sapiens
gagaaaatttaagttgaaaaaacagcctctcttcttattatttttatatttatttatttatttatttatttatttatttatttgaaacgaagtctggctgtgtcaccaggctggagtgcagtggcgtgaacttggctcactgcaacctctgcctcccaggttcaagcgattctcttgcctctgcctcccgagtaggtgggactacaggtgcaggccaccaggcccagctaatttcggtatatatgtatttttaatagagacagggtttagccaggtggcccaggctgatcttgaactcctgagctcaagtgatcagcccacctcagcctctccaagtgctgggattacaggtgtgaggcaccgtgccgagccatccggtcttctgaaaaaaaaaaaaaagaaaaaaaaaaggtcaaagaccgggtaataatattacactaaaatcatggcataaggctacttaactgattggcctactcttagaacatttcctaaggataactagaagaaaaaaaaatgcgaataacgataaagggggttctctaaaataacaaggctaacattaaagaaacatggcataaaactacacaaaacccctaaagcaaagggcaaaaggagggcaaaggaaaaccacccaaactggggggagacacgcccaaaacaggagggcaacaagccactaaccacacggggcaaagacacaatcaagtgcaagtgc

SEQ ID NO: 516767 - DNA, 587 bp, Homo sapiens
tgtaaagcaccatgtaaatagttatactgtatgttgagggaactaagtgacaagagagaaggtctgtatgtgtttaataaagacaaaattttctgccaaatacttgcagtctatagttggttgaatccacagatgcagaaccaaaagacatggagggccaatgatagtttcaatactttcaaatacaatgaagagcttgttatgtgggacagaataccatccatctcggtgaatatcccagatgaacttgataacatacacagcagggccaggcacagtggctcacgcatgtaatcccagcatattgggaggccgaggtgggcagatcagctgaggtccggaattcaagaccagcctagccaacatggtgaaaccctcatctctactaaaaatacaaaagttagctgagtgtggtggcatgcgcctgtaatcccagctacttggggggctgaggcaggagtatgtcttgatcccaagaggcggaggttgcagtgagccaagattgctccactgcactccagcctggttgacagagcaagactccatctcgaaagaaagataaacaataaacagtagttagacggtta

SEQ ID NO: 516768 - DNA, 456 bp, Homo sapiens
ggtcactagtattagaacgggagatctctacatggaaccggctgtcctctacactgctgacctccctaaacatagatgactagtactcgataatagagacagcaaccagacttagatgtgtgtatatttctaggggtaggggagtggggacagagaaggttcttgctctgtggcccaggatagagtacagtgtacatgtacatagctcaatgcaaccttgaactacctgggctcaagtaaatagctgggacttcaagtgcacaccaccccactcagctagttataaaaaatctttcgtacagacagtgtcccaccatagctgaccaggctggactcaaactcctggcctcaagtgatcctctcacctcagtctcccaggattagaaaggtaagcaatcttgcccagaccatgtgtagtctaaatgcactcatgattgcattaagacatctctacaa

SEQ ID NO: 516769 - DNA, 549 bp, Homo sapiens
tcgagtcggtaccagatgatgagagaacccaagaatctcccaaccgagagctttgctatacagcaaggagcctcctttcaaggggactggatagtcaaaaatcaaaagctcgtcctcccctaagagcagaccaaagaaattctgacatctcttcaccaatccttccatatcagtgtgcgcccccatacctactccttcaccctatttctcctccccccatctattcacctcactaagagacataacctcaaactgtcctatatgctctgttacttcctcccaaggggccctccactctccctccatccctacacatcccctcagaggaacactcccaggggaggactggcaaatagacttcacccacattcatcccgtcaagaggacaaaatttattcttactcttatagacaccttctctaggtgggtagaagcatttcctacctcttcagaaaaggccgcagaagtctcccaaattcttgtaacagaaatcatccctagatttggtctccctggctccatacaatcagacaatggcccctagcttca

SEQ ID NO: 516770 - DNA, 560 bp, Homo sapiens
gggtgacaagatctgagctcactatcacagctgctgcgcagactataccgctgagtgcaagccccaagtgactctcggggatgtgtgcactatgccggaggatgagtacacgggctatgacaaaggccaggagattcaggcccagaccaaagggaatcccgagcagacacctgtgctgaaacctgaggaagaggcccctgtgcctgagagtgggcgcctctaagcccgaggggagagactcaaaggctgagacaccttattcagggagacctcagagcccagagaggaggagcgtgtgcacagggaaggcctttgacacgcttaccgagcttaagaacgggtccctctttggctttcgagaggcagactcggatgaactggacgagaaggcaatgaggcctcgggaccccaagctcatacgagatagctggggcatataggggcccattgatgccgactttaaccgcattaactgtgaagggaagacctacctcttcgggtccgcagtactcgggctctgaggatggggccccgggccctgattacccccgagtctctgc

SEQ ID NO: 516771 - DNA, 612 bp, Homo sapiens
  misc_feature (13)..(14): n is a, c, g, or t
  misc_feature (84)..(84): n is a, c, g, or t
  misc_feature (89)..(89): n is a, c, g, or t
  misc_feature (119)..(119): n is a, c, g, or t
  misc_feature (152)..(153): n is a, c, g, or t
  misc_feature (245)..(246): n is a, c, g, or t
  misc_feature (321)..(321): n is a, c, g, or t
agcccccgattcnncctcatgcccgagataggcttgggcctagcctttggattagctcttagaaagatctcacatgcaagcatncccgntccagagagttcaccctctaactcaccacntccaacccggataagcataaagcaccccaccanngcacatccactcccgccccccttcacaccattgaccctaacttacccacaccccctccccccccctccctacaatctcctctcctctccccnngagttcttttatctctctctttcccccccccaactttcccctcctctacaacctctttttcccctttctttaccncccaccacccccgtttttttctctcctctccactcccgttcgcacccctctttctccatcctcctccctccccccccgtccctctctctcaatcctttcttctacccccccctacccctccccctccctcccccctcccctttttcctcccccccccccacgcccccactccccccccactacatacccccaaccctctcttcacgctccctctcccccccccctgccccccttatattttaacctccatacatctctcctttctctctttccccttttatcctcctccct

SEQ ID NO: 516772 - DNA, 170 bp, Homo sapiens
aaaatgtggagcgtatggttctttcaccagtaatatcatgccttatgtaacttcactatggttattttattgtaaatgagtacacaaattcttaatttaagagattgtcatgtaatcatttatttcatataatttctattccttggtttacgtcaaattttgcaaagatt

SEQ ID NO: 516773 - DNA, 123 bp, Homo sapiens
  misc_feature (16)..(16): n is a, c, g, or t
acaacagagacacttntgaggctggagcaaggtgtgggtggcctgtgtatgtgtttccgagtgtccccttggtggaatgtgcgcaatttgtgtgtaatgtgtatgtgcatgttggtgtgcaca

SEQ ID NO: 516774 - DNA, 507 bp, Homo sapiens
  misc_feature (14)..(14): n is a, c, g, or t
  misc_feature (54)..(54): n is a, c, g, or t
tttggtggattttnattatattttaaagagttttaaggatttataaatatatgnatatataatatatataaaatatatatattaaaataaaattattaggaatattgttttagttattgaatttttttttttaagaatattttttttttaagttgagaagtatagggatgaaaaagatgttatattgtgtttgattattttttaatttgtatttttatataatttatattttttaaaagttgaaaatttagaagtaagatgaaaaaaaggaaaagtaggtgttttttaaaaattagaattgaggtagtttagagatgtagtgatgtaagtgttgatgtttttttaaaaaaaaatgtaaaaaaatttttatggtggagttttttgtttgtttattttagtagttgatgttggtatattattttgttggagagttttttatatattgtagtttgattttatattgtattttaaattgtgtgaaattaaaaataatgaattttatttata

SEQ ID NO: 516775 - DNA, 137 bp, Homo sapiens
tctctggaggtttcttcctttatatccttttctatttgccttttctctttcaggcacttctcactaattcctggttctttacatagcacacctcttttgctactgctgtacattaccgggctttacagtggcaggct

SEQ ID NO: 516776 - DNA, 148 bp, Homo sapiens
ccagtcaaccaacgcttcaacgcgtatgcgctggcctgggaagaatcgctggccgacgggcgctcgttggaggactaccccgccgtgatctcgcggctgcagggtctgtgggagacgctggcgcgggcactggaggtgctgcaggctg

SEQ ID NO: 516777 - DNA, 378 bp, Homo sapiens
  misc_feature (174)..(174): n is a, c, g, or t
  misc_feature (252)..(252): n is a, c, g, or t
ttttttgtttttttgagacagggtctcactctgtcactcaggctggagtgcagtggggtgaacacagctcactacagcctagacctcctggactcaagcaatcctcccacctcagccatccaagtagctcagatatgtgcgcgtgtcacacatctggctaactttttatatttngtagagaaagggtcccactttgttgcccatgctggtctcaaactcctgtgctcaagtgatccttgagatccacttggnctttcaaagtgttgggattacagccatgagtcaccatgccagccaaagttctttctcttattcttcctgttatatttttttctttaaaattaatttatttgtttctcaggatggacagggggatct

SEQ ID NO: 516778 - DNA, 1052 bp, Homo sapiens
  misc_feature (568)..(568): n is a, c, g, or t
  misc_feature (642)..(642): n is a, c, g, or t
agcggaacgctctaccacagatgctgaatgatcgacatgaagtaataccttcctagtgaagatgacttttatttcacggactatattaagttgtgccccaaccttctgtcatgatatattgtccaaagagaacctgggaccatcgcctgacgtcgcaacaagtatacatgtaacgctgtacccaattctatcacgtgacgtatagtgctgacttggcacaaggaccatgatagaagatggctcggtatatctaaagacacgctctattgattacatccgtgtgtgacacttatgttgacactaatgtcgacaagaatagcatatgaacataattgtgccccagctaaaggaattatacgccgaggagcctcatccatccatacctgatttaagcattacgttgacgaatcgattgaagttggatagacgcacatgtgtcgtgttatctagagacacataaggcgccccctaagtttgaaatctaacacatagacgcgatcttgtttaggaaacaatacaacagccatgcattgggaccttgcccctcagcgttactcttcaatcatcntcatcatcgtagagcgcataaaatcgacacgactacaatgggtcaatgatatcctcgtgtcgaccctggacgtntccgtagtgatcgtgcgtaccatgttcgagtattagagtaccccttcagagagaatcttgtggagtttcgcatttgacacagcctataatgacgtaagcatcgaaatcgaattatcgcgacaaactcgagagattgacgttggcatctagccttttctggactctcgctgagtgtaggctaaatgcaaagagttgaccatgtctcctttagtgagggcataatggaatgggcagcttggtaatatcttctctcagcgggtggcgattttgcactttcctcaatgtaggaacctatggagggaataaccgaagaatgcacttgcttcaactctctaataaacccaatgttccagcatgtttgtcccagtggactctttagcctaaatttaagggtgcatcacccgggctga

SEQ ID NO: 516779 - DNA, 175 bp, Homo sapiens
gttgatgctgttggagataaagcaaatggtgaagtgactgaaccacagagaagatccgcgatgttgtctgctacacctgctcctccaaagccagagcccaagcctaaaaagtgcccctgcaaagaagtgtgagatgaagtgtacccaaatgtgtgaaaaatgtgtgaaaagcttg

SEQ ID NO: 516780 - DNA, 856 bp, Homo sapiens
acagaaatggactatgttgatgacacattatccagctgagattggtgttcaataagcccaaaacatcaacagggacttgcggctgtggagaaagcttcaatattggaaatctcaggactcttctggccgtagcttccaggaaagctcggtggaagcttagcggctcactgctgagatatcatgtgcactgtcacgatgctggtagaataaacgcttgaatacatcttgaacaatgaatccagtgtgttggattccagaagaaatgatatttatattctctataggggacagaaaatgagaagccatcactctttatggatcatttaggtctcttgtatcctttgttttagaaccagtttcattaaagttgccttcctgggcacctgttttatccatttcctgaactgtgtgcagctccttagatcgctattgatggcttgatcatccctcagcatttctcccaaaccagatcggtgactcctaaaatctgagacaggacatcgtgactgctggtagtaatatggtggtgcattgtattgccagccaaattaaagatagcctttttatacattgttatgaaaaagttgcattgtcagctgcctcactgaatactctttaatagctaccaggccaaggattttcgttcaactatagtacagaattaggttcttgagtgatgcgttcaacaggtgcgaagacgtccatacggcgtattaaatcaaatacttttggccacccatatgttctggtgcacagaaggggccccaacggcggatggatcttccaagggaaaggcccaaaggcttaggcgcacaccggaataccttttaggagacaaacccaggagggcaaggcc

SEQ ID NO: 516781 - DNA, 161 bp, Homo sapiens
ctggacttgctgctgctgctgtgcccgtggtctcttctggtgtgccacggagaggggaaggacctttgtctgggcgttaccaacgcctggaaactttacctggtacctcatggtttcatttggcatcagaccggagacccttgggttctcccgtctcacca

SEQ ID NO: 516782 - DNA, 337 bp, Homo sapiens
tcaatcgagctcgtaccgtgggtagcacaacctagggtcagttttgcaggtggtaaagccatttaccaagatagttgtaggtaaagaagggcagatttattagagaaattgtgaaaatatgttgcagtgggcagctcagcagagaaggggctacctgcaaagaggcaagggctggaggaaagttttatagggtcctgctgaagggtgctacgtgtggaatgaggtcattgtgcccgcaggttgtttgtgattagctgtctctaacaattgttcatacaataattgttcattattgttctcaacttggggctctccccaacctggggacccttcctta

SEQ ID NO: 516783 - DNA, 163 bp, Homo sapiens
aatgtgtgtggtgatctagaggatcccgaatgactaccacatcacaacctttcaggcagtcaggcagctgttcagtgtccgaggtagcctttcacagcggctttggtctcgatgtgtgctcagatctgcgtgacactccgtggtgtgtgcgcgatatcataga

SEQ ID NO: 516784 - DNA, 396 bp, Homo sapiens
ccctggttagctgtattcctaggtattttattttgagtgtgtggcaattttgaatgggatttcattccaatttggctctcagcttgactgtgtataggagggctagtaatttttgcacattgatttagtatcctgaaattttgctgaagttgtttgtcagcttaaggagcttttggaccaagactatggggttttctgaatataagatcatgtctgaaaacaggaatagtttgacttcctctcttcctatttggaaactatttatttctttcttttgcttgattgtcttgtgctggttttcaaggaaaatgcttctagcttttgcccattcagtatgatgttagctgtggcccctgtggatttttcgcaagaacattaataaactaaaaacttcca

SEQ ID NO: 516785 - DNA, 128 bp, Homo sapiens
ccctgtgtgtatctatgctttggttctcatacgtatcattaagagtgtgctgctaatatattcttccattcaatgtcatgctctacagtgatgctccaatgagtgaactgtccctcgcagctgcttct

SEQ ID NO: 516786 - DNA, 1040 bp, Homo sapiens
  misc_feature (802)..(802): n is a, c, g, or t
  misc_feature (1014)..(1014): n is a, c, g, or t
  misc_feature (1040)..(1040): n is a, c, g, or t
gatcctagctggggacgatcgatttcgtgaggtctctgtgcagtgttgcccggctcacctagacatgagattcctctatggcttgtgtcgaaaacggcgagacgatctcagttgatgaaggtgtcccgcttgcctcaccgatgaccagtgcaggccaggctccaacactaggagccattactcttgcccaatgactctcgtttggcgtggatcacagtgctctgcgccccttgtcagtactcgttagcgaacatcccggcatgtaagaaacaaaggggccatcgttgcctgggcgtgtagagctatcagtgatgagagtatccggtggagtcccgatggacgtacgatcccttggaatgaaaaaatgcacttcttagtccgtccgttaactaaacgaagggcatgaactgtgctgagttaatagcttatctctgcaaagctgagtaatgattagtaattgggccactgtctttatttgattgagcactattcacaagtgtttgcatgacttggctagtgtgtacgcattgcgctttaatagatctcatacacgcataaattcggctcgtgaatgtctggccggatattctcgtgtgggtctggtcctgatcttagattactaactactggcttgtggtcaaatgaatgtgcttcctgtttggggatccaagtggtcggctccattgcggtcgatgggtcttcctgtttaccccccttttaaggattatgatagcgttccgtgaacccggtctgcctgtcacgagggatggggtagtcgcccttgagcgtcccggcgactggntacaatgtgcaccacactagggacacagaattttccgaaatggacaatgtccggtttaacaaaggacgcacactgttggtaccacccttgcacacaagggagaagacaacaacggcagcgaaaagataagagagcacaattacggagagagaaagctcagtgttagagacaatacgacacacagataagtggagaaccacttatatgtttgngtatgcttatatagacaatcatatgn

SEQ ID NO: 516787 - DNA, 627 bp, Homo sapiens
aggagagagagagagagagagatagagagagtgagacagtgagagagagacatcgtgagagtgagacatatagagaccgggcgcctcatacccgtctcggcatccaccaccttggctttggatttctctcctgtgcctggcctgggtcactatgctggagctgctgtctaccgcggtgttcccgtcctggcacgggcggccatggttctggagcccgcgctccttcctatgctttttgcgccccctactatgacgcccacctgttggacctcggtccgctcaccaaggcctggtttcttcattcctgcgacagcctctggtttatgacccacaagctgtgccctacgcttgcttgtggtgacgaagtactctgttgaaatggtcttgacatactttgatgttgcgttcgcatgtattcacactttctcaggaagcctttccgtagtttatatcctgttccccttaattttctaccaaccctttgcccccctggtgatataattgggggtaaacccattgggggaattcattaaattgggttcccattttccctccctggggggggccgtttccccttttcgcctctgctgtgagttttacttcacttggcgttttttcctttcccct

SEQ ID NO: 516788 - DNA, 139 bp, Homo sapiens
  misc_feature (21)..(21): n is a, c, g, or t
aattccctctctcgttacccnaaacccccagcgtgcatactccctacctctcagtacttccacagaagtttgtcacacaaagcctatacccagtattacaccgaccattcctctccctcgtcacaaacctctcggggct

SEQ ID NO: 516789 - DNA, 827 bp, Homo sapiens
ttactgccacaactcgaatagtcccggagatcgtgatgtaacaaggattgagcgaatcggtgcccacatcccacattccggggactggaggctggacgatgccattggagcctcggcaggcttcgcaaggcatggtgggtcagcttggtcggtacggcggtggcggcatggcgtggtgctggagatgatccgcgaaggtatgattgcctggatcgggcagtccttaattgcatggccatggtccgcgagcacggcggtaataccggccatcttccatgggcatgtgcgcatggccctgggtgcctgacacagcctattcactatgccatcgccgtcagtgaaatcttctcccttggagatgagcatagaccagaggcactgacgcagtgccttcccggcggtccatcggccgtcgcatcataggaggagacggagatcatcgaaggggaggtggtgtagatcctgattgatcgaccagcaacaggaacgggctccaatggtgaagctaatacttgaagctcctcaagaccacacgtagatgggagaccatctacgattctggggcaccaagatgattgaagtccctgacctagggacaactgtccaggccggggaacgtgatcaccatcgtacaaggcgacttggtcaccgcatctcccaagctgggccgttccttgactacgcgcccgtcgatacgacgctattgggctccccagaccaagttcgtgctgtgcccagatgggggaaactcaaaaacgccagaggtggtgcacaccggtcctcggatatattcttattctcccccaggttctgggttctcgggaacc

SEQ ID NO: 516790 - DNA, 118 bp, Homo sapiens
ccgtccatcagtgaacggaagggaagggaatgcaggcagcaggagacagagacatcattaactacaggtctgaaaccctagttctttactcactcatcaggttgcttttaatcactgc

SEQ ID NO: 516791 - DNA, 1003 bp, Homo sapiens
ggttcaggcttcgggggccagccgccgccatgatcctgctggaggtgaaccaaccgactatcatcgaggagacgctcgcgctcaagttcgagaacgcgggcgacggaaacaacaccggaatgcacgtacgaagtaacatttgcagatttcgagtggggtcctcctatcattagtttcaacatcctaatggcagcacgaaaaacctagaaagttgcatggtccagatattctctttgacaattctaccacaggcaacttcagggccacatggtgctgcatgagttattgaaaggagggtgtacgggagttgctctgcgtaaatccagcaatcaggatacaatgtctctttgctatatgaccttgtatcactcttccggcaatcccaaggtatgccattgtagcatcaatgctggcgatgttgaagcgaaattggtttttagcctctgtctttgaaaaatacttccatattccaagacagagggcgaggaaggagagaacagggccagttatccattatagggatgatgagaccatgctatgtccgagtctcaaacacggacaggcagtcacagtaatctccggcacagagtccacggctgacgacgcatgttggtcattgtaaaaggtgttgcagtgcgacggaagttccaacgaaacgacgggaggagcccggccacccgacggcccacaggggtcctactttaaggccacaggggataccctcccagctgggaggcttgagacgaacacacgacgcccaggtggggggctgaacaaccatttggctcgacattcacctttggtggctggttgccctcgtcacacccaattggcagtggtccgcgaacaaccatccacctctgatccccagcgtcgggctacctggacttaccccatcaaagcgatgaagcgggtatctcccccgctgatcgacgaaagggcttctcaagggtgagcgcagccgtggaaaaaattcatataagcggagaagaacaccgaatgg

SEQ ID NO: 516792 - DNA, 143 bp, Homo sapiens
ggacggatacagaggtcaggcgatcgagaccatcctggctagcacggtgaagccctgtctctactagaaatacagagaattgtgcctgggtgtgagtggcgggtgccgtgtggtcccatgctgctcgggaggcttgaggatgg

SEQ ID NO: 516793 - DNA, 1460 bp, Homo sapiens
taggttggagggggaatggctgggagattggtgaatggggtatgggaagactattttcattataagtaatggctagggtttgggtgggaaattttttggtgtatagatagtctggtgtgggaaacgcggttggtgcagactattcaattggttattattatatgtgtcctaacaacgcacaaaaaacaaaccaaaaaaaaacaatccgcgagaggagcttcctatagtgcggcggcgtggcgcggagaacaacgagagggcctacgagagaatcggggcgcatgtgtggcgctacaagcgcgtggtaccctcggcccccacggtattcctgtgtgccaccaacaggagggacaacaccatccgcgcacgggctcctccccaaaaaaaggggaggcgcgcgcgatatattaaattctccgagaaaaacccccacagagagatacaccccgtgggcgatataaacgaaaaaacgcggcgcaaaaaaaccaccccccggaacgacaagagaacgaggcacggagcagattaggaacagcagggagagcaaaagacagtctagggatacgacagagagagcataacacgcaaaaaaaatagaggcaaaacaaagaatataaaagaggcaaggggcagaaagaaaaaagccaggtacaagagaacaatgagaacaacaaataaaaccaaacacacacgcagcagaacaccaaacacaagaaaaaattcgtcaatacgaccacgggaacagacagaagagcacaggaacagagtaaagtactacgagagagaaagcgcaacaaggggtaaccaaagatgacggaacgaaagactcacgcaaactcaaaagcgacaaacgaacaagaacggaaacaacgggaaaaaaaagacataccccaccaactcacaatcaataaacaatagaacaacacacgcaaaataccaataacaaaacacaacacactttatttaactgaaatacacaaagtcaaataacagcaacacgaagcaacaaaacaaacaacaaattccaacatgctacattaaaatcaaaacaacacactaaaacactcacaacctacctaaatcaggtgtttgtcgacagaccagcagagaactagcggcacaaccccaaccgaaacggcaagcaaggaacacgcaagacgaacgagaaaaaagaagagcagaaaggacagaaaaacaaaagtaagaatagacgaacacacaacatggagatgagagccaggccaatgatagcgaaacagataggaggcgaacgagcagaacacggtgcacaaacaggagaacaaagacaaatagcagggaagaaaacacagacgacaagaaacagaaaatccaaaagagagataagcaagagtaggaaaaggcaagagaggacgtaggacagacaggggcgagacagcgcaagaacaacgcagccggccgaccagctgactagcataaac

SEQ ID NO: 516794 - DNA, 439 bp, Homo sapiens
  misc_feature (3)..(3): n is a, c, g, or t
aantgtttaaagcattttaaaaaagatctgtccttaaaaaaaaataagtaatctttgctacccagcaccctagcttgctttaaaaagcatttgttaagattcccttctctggctttggcttggtttttttggaataataataataaaaaaaaaagttggcccaggtatggtggttcatgccctggaatcccagcactttgggaggccaaggtgagtggatcacctaaggtcagaagttcgagatcagcctggtcaacatggtgaaaccccgtctctactaaaaatataaaaattagccagacgtggtgcgcacgcctgtaatcccagctacttgggaggctgaggcaggagaatcgcttgaacctgggaggcggaggttacagtgagccgaaattgcaccactgcactccagcctgggcaacagaacgagactccatct

SEQ ID NO: 516795 - DNA, 423 bp, Homo sapiens
ctctagagtatctcctccccgtacgcccaaaggaaactgtaaatagaaaaggaaaataaatctgtatgtttaaaataccctatagccaaaggatggtagagaggcacgtgggggaaactggtccccttaagcaagacacccatgtctcaaagaaggcaaagggcagaatgtcctcctgtggaaggaactgcacaggtgcccaggaactagctgcatggagcaactgtcacagctaaggtgggtgtcagggtcccgcccgtcagaggcagcccagccacagtcaaaggccccggatgtcccactggtttggggaagtcatggtgattctcaggatgtcagacccactctccctgagtggtcgttcgttggtgagcctgcagaaagggtgagtctgcgttgggcgtacggggggtaccgagctcg

SEQ ID NO: 516796 - DNA, 499 bp, Homo sapiens
aaagaccatgctagcaggatcattcacaagctgatatgtgaaaatccagaagacagcagctatgactccaccagaggaggaattgaagagaataggctccccagaggaaagaaggcagaactccgtgtcaaacttcccaccccctgctggccgggaattcattttgcgcaccactgtgccacgccctgctccctactccaaagctctgcctcagcggatgtacagtgttctcaccaaagaggactttagacttgcagttaaaataatcgatgaggatgtatagcccccccgtgtgaggatgacatcaccacatatctagtttcatggagctcaagatgtcttatgtcagtgtggctagatggccacgggtttttaatcttatggtaagccagaattcccacttaaatccaaagtaaaaatggttatactgaagcataaaccttgcctgtataattttaaaaaattaatagagctgtgcaaaccctattatttttgtaaa

SEQ ID NO: 516797 - DNA, 351 bp, Homo sapiens
  misc_feature (224)..(224): n is a, c, g, or t
aggtcaataagggatatatctcttcattaaaatggatgagaagtttgtcattactttactgcttcttggctagatgtgtggcttatgcctgtaatcacagtgctttgggaggttgaagcaggagaatcgcctgaggccaggagtctgagaccagcttgggaaacatagtgaggccctgtttgtgcagaaacaaaaaattaaatttgccaggcttggtggtgtgnaccttcaatcctagctactctggaagctgagtcaggaggatcccttgagcccaggaatttgaggttacagagagctatgattgcatcactgcactctagcctgggtaacagaataagacctgtcttt

SEQ ID NO: 516798 - DNA, 721 bp, Homo sapiens
gagtataccctgcagtgcactgtagaacaggagataagaacttttctcctgaatttgggtcttctagacttaggtgcagcatatctctttgttattactaagcacaccgatcagggtcttcaggcctggaagacttgaagacacttccagctcaacacacaagtgtccagttgcgtggcagcctacccacaatatgcctctggttacagctgggtgagttcatgttctctgtcacaggtctttgagttttcttattctcaggctccctctagcatgtaaatctgtgctccaggcagcttggctattgacaattgcagttgggaatatcatcgtgcttgttgtggcacagttcacgtggcctggtacagtgggccgaattcattttgttttcctgcctcctgctggtgatctgcctgatctatctccatcatgggctactactatgttcctgtaaagacagaggatactgcggggttccagcagataagcacattcccgtcacatgccaggggcaacatgatcaaatctacgagaccaagaagacaaaactctgatgactccctagattctgtgcctgacccctaattcctggccctgtcttgaagcattttttttcttctactggattagatcagagagactagcagcatatcagagctgatctcgtccacctttctccaatgacagaagttccaggaactggttttccagtacatcttta

SEQ ID NO: 516799 - DNA, 308 bp, Homo sapiens
  misc_feature (146)..(147): n is a, c, g, or t
  misc_feature (154)..(154): n is a, c, g, or t
  misc_feature (173)..(173): n is a, c, g, or t
  misc_feature (181)..(181): n is a, c, g, or t
  misc_feature (295)..(295): n is a, c, g, or t
  misc_feature (297)..(297): n is a, c, g, or t
gccgtgggtgtgattcctgtcctgcgcggttgttctctggagcagcgtcttttatctccgtccgccttctctcctacctaagtgcgtgcctgcacccggatgggaagcatttcgaggtgggcacaattgtgaccatttgaatgccnncccttgnatgcgccccgagaaaactnaatctttntgcggttggtgaactaaaggccgacaaagattatcactttaaggtggataatgatgaaaatgagcaccaagttaatctttaacgaaacgggttcgaggctctgtaggcgggcgncntggggttgggg

SEQ ID NO: 516800 - DNA, 842 bp, Homo sapiens
ccaatggggggcaaaatttcccccccgaagagtgggcacgttccccaccctctcagtggctcaccccctgggcggtgggttcaaaaagtcgtcccagtgaggttcatacttcccgccaccagtggttggatctcataatcgttgttcacagcgagccactccctcggagatgcttcttagcaaactcgcggggggtaaaaaaaaggtggtgtaatagcgcggggacaattctagtagggaaagagtttctatatatattatagagatcacccaccctcttcgtgtgggtggccgctagctctgtctcacaaatggagatgcccacggctacatagggtgggacaccgcgctcggaaagagactaggggcacgcacggcctcgctataaaatcagccgcgcgtgggcgcacgcggggacgcacacaatggggtcgcacgcgcgcgggctacgtcacgcgaatgtatatgtaggtgggggtgaaaaacaaggaggggctgcttatagatgcattccgctcacacacacgttgcggggagcatgagaggccactcacatgaggagacgaaaacaaaacacatagaggcgcgcgcggagtgataatagaaagaaaaatacccgacatacattatggcgagcatggcaatgtggggcgaacatagagatcgttgcacatggattcactctctatgttctctgagagaaataagtagtgcgtttttttttctggtcgcccggctcggactccccgcagaactctccctcatcttgcggaataataactagtgattacattcgctagcataagcgcgtgcacccccgggcatttctgccaacaaagaaa

SEQ ID NO: 516801 - DNA, 106 bp, Homo sapiens
aatctcaaacacaagcgcactcacagtcgcagtcataatcctctctcaaggactactaactctactcccactaatagactattattgatgacttctagacacgtcc

SEQ ID NO: 516802 - DNA, 1160 bp, Homo sapiens
  misc_feature (251)..(251): n is a, c, g, or t
  misc_feature (278)..(278): n is a, c, g, or t
  misc_feature (328)..(328): n is a, c, g, or t
  misc_feature (341)..(341): n is a, c, g, or t
  misc_feature (357)..(357): n is a, c, g, or t
  misc_feature (363)..(363): n is a, c, g, or t
  misc_feature (389)..(389): n is a, c, g, or t
  misc_feature (392)..(392): n is a, c, g, or t
  misc_feature (460)..(461): n is a, c, g, or t
  misc_feature (465)..(466): n is a, c, g, or t
  misc_feature (480)..(480): n is a, c, g, or t
  misc_feature (483)..(483): n is a, c, g, or t
  misc_feature (491)..(491): n is a, c, g, or t
  misc_feature (526)..(526): n is a, c, g, or t
  misc_feature (530)..(530): n is a, c, g, or t
  misc_feature (532)..(532): n is a, c, g, or t
  misc_feature (560)..(560): n is a, c, g, or t
gagtctagctatgctgacaccgaagaaacagaatgctgacccgcaggctgtgacaatgcctgccactgagaccaaataaggtcatgccagtgtggtctgactacaaaggtcaatacaaaggctcaggagactgaggctgcaccctctcaggccccagcagatgaacctgagcctgatagtgcagctgcccagtctcaggagaatcaggatactcggcccaaggtcaaagccaagaaagcccgaaaggtgangcatctggatggggaagaggatggcancagtgatcagagtcaggcttctggaaccacaggtggccgaagggtctcanaggccctaatggnctcagtggcccgcagncttcanggggtcccatagccttttgggcccgnagntcaaaggactcggttggctgcttgggcccggagagccttgctctccctgagatcacctaaagcccgtnngggnnaaggctcgccgtanagntgccaagntccagtcatcccaagagcctgaagcacaccaactngggntntggcctttttgcaagggagggcaattantttggtgaagtactttttggttaaagaccagacggagattcccattcaagcgctcggacttgctgaagggacatcatcacgaattacctgattgtgtaccccgaaatcttgaagaggcagctattccttgcagaacgtactcgggcactcccatcgacgggcacatggactcgacatgccccattgtgcattctctcacaagactttaaaaaccccattattcagcctactgcgacacaccatgagatcaccacaacggtcctcccacaggacatataaaatactcttcgaagggtaactgcccaaagacctccagagcgacacacattgccgcccgaacacaccaaccatacggcgacacgcccctcacatctttacacccatattaatgcacaagcaacccaacaaaatctaggaacatatacacatgcaccttgcaaacaacgcagaagataaggagacagcacaatgtcgatgctctctgttcgttcctttctctctccgttgtacatagccggaaccaacccaaagaaccagaaaatgacgcacaagcacacatccgaaagcaacccacacgaacacacgaacccacaccccagt

SEQ ID NO: 516803 - DNA, 699 bp, Homo sapiens
gctccgaaattgtgtagcgagacagccctgtcccaccctgaagggccgcccgattcattgggggtagacccaccccactgcgcccttattcctcgggaccacgactgccgagaggatcccctccgggcacttctccgtcggaacacctcttaagaatttcctcgtagaattgcccccccgagaagatcccccgcgagcctgtatggaattgtgggtttcgattgcccgaatttgtcggtgaaagaacttgttcacacccccctcttcgctcttcgccctccaaagtggagaaagaggagcctcgggaaccccgcgcgagacacgccccgcgagcgcgaaagggaggaaccagcgggagagaagagcctcatctctctatgatttatgacaaatgaacccccggggagcacaccgagactcgttacctcgctctgtttgtgtccccccggtgccttctgggccctcccccgcacacgccatagggtgcttttcaacccgtgcccccgggtgtcctagtctctttcacctgcccctagtttctgtttcggctgctctccccttatggttttttttttatttggggcatgggcaattatgtgggaggggagggggtttttccaaccccaggtccccactgtttcaccttgtttttttttgcgtccccttttcccaaaaaccaacccattggggcgtgggcta

SEQ ID NO: 516804 - DNA, 957 bp, Homo sapiens
gggatgagtgacgctgtccggccaaacgaggtatactgtactgagactctcgccctcagtctcgtctccggcgcgattacctgccccgttttctcctgtgagttgacctgctcctgggacgcgggcctgcaatgggaggggcctgtccagaccatggccttcgggcaggcggtgatcggcctgcgggctcagggaagaccacggtactgcctgggcatgaagtgagttcccttgcagcgggctggggccgcacacttgcgagtgtggagacatgtggaccgcggaacaaacgaggggtctgcggaacgagtgtgccgtggacgtgggcgagcatgatggggctgtagcgagtgatggacgcgctgcgtcatggggcccaagcggcaggctgatctactgcattggatgtacctgtgaaggccactgcatgtgactggcatgctgtgccaagactcgaccccctccgaaggaccacataagtatccctcttcgacttgcccagggacagggttggatgctctgcacgacatcacggagcctttgcggcaggcaatttttctcccaagatgggtgctatgtgggacctccaggctgaattgcgtacagcctcgtggattactcactaatgaacagaccctgccaagttacatttcaaggtacttgtgtcccttcacttgccaacacattgctgaacggtggaactgcgccaaattaagctcctttccaagatgggccctcattgaggccatatggggaggctggcttcaaccctggataactaacacaagaggtcctggagacctctcctagcttgttgacaacctggtattctgaaccatttatacgggagtaaagtcacgataataggaagatgatgcaggtaatacgagaactaaagcatagtttctaagtcctctcaagtccacggacagggggcaccctaggagacacgaggat

SEQ ID NO: 516805 - DNA, 159 bp, Homo sapiens
cgtgcagtattccctaagaatgcagtcacaggatgacaccgaagacgttccctaggctaatttcacgggacctcactgaagacgttccctaagcatgcggccagtggacagccacctgtgtacatactgaacgacatacccaatatgcactgtggccac

SEQ ID NO: 516806 - DNA, 448 bp, Homo sapiens
atcgatctaatatcgatgggggctcttctcccactggccaagtacccagcatgaggaatgactcttcattggtctcttcatcagaagtggtaaccttggtctctatattcacgaagtccgacagtcttgtaagtagactgtggaagcagacagaaccagcttcctgtagccacagaccagtacatggtatctaagctaaagcaaagatgaacaattatccagattcacttgaactgtaactaaaagggcaaggttcaccattacaaacaggaagttgtctaaaagcaagaattcaataaaggctgggtaagaaaagtcacaccactaatgagttgtccatgaagccaactgctaagaacgcgctcaagtatacgcgacatgaagacactatgcacgaagccttacttggcgagtctgacattctattaacctagaggccgagtgaggg

SEQ ID NO: 516807 - DNA, 467 bp, Homo sapiens
  misc_feature (50)..(51): n is a, c, g, or t
  misc_feature (53)..(53): n is a, c, g, or t
  misc_feature (78)..(78): n is a, c, g, or t
  misc_feature (84)..(84): n is a, c, g, or t
  misc_feature (154)..(154): n is a, c, g, or t
  misc_feature (191)..(191): n is a, c, g, or t
  misc_feature (214)..(214): n is a, c, g, or t
  misc_feature (260)..(260): n is a, c, g, or t
  misc_feature (387)..(387): n is a, c, g, or t
  misc_feature (399)..(399): n is a, c, g, or t
  misc_feature (434)..(434): n is a, c, g, or t
  misc_feature (453)..(453): n is a, c, g, or t
  misc_feature (464)..(464): n is a, c, g, or t
tcagaagtcgcttagctcttcggtggttgtcacacgtccggagcctagcnncngcgtacctaggatgccgcgtggaanccgaanccgcacctcccgcatggcccctccggcagccggcccctcagatgagagctgcaccaggccagcacaagtngctcagcaccagcagcgggaccccatctgcagttggntcttctgctgctgcgcccggcancaggtctgatggccagatggcaaccactgcagctggcgtggctgtnggctctgctgtggggcaacattgggtcacgcattactgggggcttcagtggaggaagtaatgctgagcctgcaaggcctgacatcacttacaaggaagcctcagggaacccaagccagcacagcagnagaagccttttnctcttattaagatcaaacagttttttggagtgttnccagaacaagggtgacatnaactctgtganggg

SEQ ID NO: 516808 - DNA, 81 bp, Homo sapiens
agccccaaccagacctctctgtacttctgtgccagcagtaagactagcggggggctaggtatcctcaatgagcagttcttc

SEQ ID NO: 516809 - DNA, 1618 bp, Homo sapiens
ggatgatctggtagtttgtgaggcgtggtggaactctgatggagtagagcacgctggttgtagtggacccatcggtgttgtggctgctacggtagttcggcgctgtgttgcggacggcgatttagtggctcttgtgtgcgtgttgggggcgtgtgtggttgtgcgcttggtagggatgtggcgccgttgctttcagttggttggtggggacaaggtggggttgggcttcgtgctctctgcgggggcgccccacgagtgggctcccggggggagttcttcggctggtgggtgggagccccccgctcttggtggtgggccccaagggttgtggttggtgttccgcgaccaagggggggggttttccccccgggggggggttgatcccactagcaccatgcctcaccgcgtgtacccacagaaaaattgttgccggttgtcaaagggagtggttcagcggctccgtgtatgggaagatagtagtctcgtgtgggggaggaggagtacttgaggaggcgtgtggtgagacgagggtggtgaagaaggtgtgtgggctgggcagactgtgaatggacagctggtttcggcccccccacgtttttaagagtaatgggggttataaggaggccccttcgtggtgggggcccccccaagagggttgtgtggtgccccgcacgcctgtggtgatctccccccctgttcactgcacgacacgcggtcgtggtatgcccgcgacagatggggggtgcgcgctggtgtgccgcccccccgtaggggtggtttggtaggaggggtgggacgccccaccgctgtggggtggagtggcgttggtggtctggctctctgctccgctgccctctcggaggagacagaggaggagagataggagagagaaaagaggaagatctgcggtgggtgtgtgtgtgtcgccacaccctcggagagttttatagcccccacactgtggagagacactctctacggtcgggcacgtgtgaggccccctctgctctttctgctgcgggtgtgtggggagaaaaggtgccgccgtgttgtctctctcaaagagagagggcggccacatgtctgcacactgttggtgggcgcttgtggagatacacgcgcgcacgctcgttctgtgaggagaaaatatcttgtagagataggggcgctatatgggacacacacaaactctctttataaatgtttatgataattatatttgtgtgacaactcttgtctctctgggtgtttgtgggcacaccctcgagccaccacccacttcttgggcgcgtgggagcacgccctctctggcacgctgtccgctcggggctggcacactactttgttggagagttgttgtataagtgtttcctcttccctcatcgccccgctgtccccactctttttggttaagagtgtttttagagaggtgtctcttttagagtgggaccaacctcgccgctcttattggccttaaaagtgtactctccctcttttatatggtgtcttctttggggccccttggggagaaaaaagaaaatacccatatagggccacagttttgatactgaaaattgaccaggtgtttttttgtaaaaaaaggacccctcccccccca

SEQ ID NO: 516810 - DNA, 255 bp, Homo sapiens
acccccccttttttgggggggtttgaaaaaacggtttttggggggggggggccccgggccctttttttccctttttttttgggggggaatacccttttttgggggcccatttcccccttttttgaaaaaatttttttttttttccgggggggttttaaaaggggggtttttcccccccggccggggggggggttttttgggcccccccccccctttttcccccagggggtttttttttttttttgggccccccga

SEQ ID NO: 516811 - DNA, 292 bp, Homo sapiens
  misc_feature (27)..(27): n is a, c, g, or t
  misc_feature (140)..(140): n is a, c, g, or t
  misc_feature (225)..(225): n is a, c, g, or t
  misc_feature (232)..(232): n is a, c, g, or t
  misc_feature (242)..(242): n is a, c, g, or t
  misc_feature (250)..(250): n is a, c, g, or t
  misc_feature (258)..(258): n is a, c, g, or t
tttttttgagatggcgtgtagctttgntcacctaggttgggagtgcaatggcgcgatctcggctcactgcaacctccacctccacctccagggttcaagcgatttacaggcgcccaccaccacgcccagctaattttttnatttttagtagagacagggtttcaccatgttggccaggctgatctcgaactcctaacctcaggtgatccacccgctcggcctccnaaaggtnctgggattanaggtttgngccaccanacctggcccagaacccatttctttataagcctct

SEQ ID NO: 516812 - DNA, 152 bp, Homo sapiens
caggtggatcggttacataacagcactagcgcatcccacactctctgccccaagctttatcttctagccacagcagagcgtgtgtttggttgtgtctggaaaaaccaggctgtttctcacccgtctgtacctttgctcaaggtatgccttct

SEQ ID NO: 516813 - DNA, 680 bp, Homo sapiens
  misc_feature (27)..(27): n is a, c, g, or t
  misc_feature (46)..(46): n is a, c, g, or t
  misc_feature (77)..(77): n is a, c, g, or t
  misc_feature (112)..(112): n is a, c, g, or t
  misc_feature (155)..(155): n is a, c, g, or t
  misc_feature (157)..(157): n is a, c, g, or t
ggcacgaggtggtgtagaactcatggntggcggttccgggcctctnaggaagctttgccactgggcttggggttaantgggtgtggggctccgaaccctaaatgggtgaganttgaaatgaaagcggcacctgtagtccgtttggggtgcaggtntntgccaggggtcttcagccccggctgatggccacatgaaccacatgaggagaggcagggcgtgtcagcagcaaacctaagtgtgtgctcatttctgtgggcccttactctgtgacactgcagctctccagagagacgctttgaaaacaaaacaggaaagaacacacggccccgcgtctgttgcctgagtcactgtattccttaaaaggtgaaggaccctggtccttggcttttcgtgcacatgagaaaatgttggccaaggttagcgattatgcttctgtaatctgtaaccagaagtgctcttatgcccaaaccttgatgtgattctgctgtaatgtaacttcggagccagctggatggatgtgactgtgcaggtcctgagccccggcccccgtaaccaagcagtgggccgagacactgagccgggcagtcaaacaggagctctctaaggctgctcccgggctgggacctgggtctaggattctcagtaagacctttgaataaaactaacttgaattcttcaat

SEQ ID NO: 516814 - DNA, 784 bp, Homo sapiens
gagcggacgctgaacgagggcgagggccgaggggcagctaggaagcgcggtttgagagagggcggtgcggcgccgcaggcctctggcagtgtcctcgagctgcctccgcgcgccagtgtctacagccgcctgataccgcgcctggcggtgcctgggtagtagcgtcactagctgtagcctggcagtgtcgggatcttggctgtaggtggtgcgcgggagctcctagtgctgcgcaccctgtgagtctggcttctccattccgctcttatgccgggacgagctctggaccgcacaagactaaggaatggccaccccgcccaagagaagctgcccgtctttctcagccagctctgaggggacccgcatcaagaaaatctccatcgaaggggacatcgctgcagggaagtcaaccatttgtgaatatccttaaacaattgtgtgaagattgggaagtggttcctgaacctgttgccagatggtgcaatgttcaaagtactcaagatgaatttgaggaacttacaatgtctcagaaaaatggtgggaatgttcttcagcatgatgtatgagaaacctgaacgatggtcttttacctttccaaacatatgcttgtctcagtcgaataagagctcagcttgcctctcttgaatggcaagctcaaatgatgcagagaaacctgtattattttttgaacgatctgtgtatagtgacaggtattattttggcatctaatttgtatgaatctgaatgcatgaatgagacagagtggacaatttatcaagacttg

SEQ ID NO: 516815 - DNA, 154 bp, Homo sapiens
agtgaaggtcttccgtccccactatcctggctagaagtcttcaggggaaataaactccattttccatgagttcacttactatttgcaataatgtaatactacttctactataaacatttagaaagtggtggatttagtgggccggggtgctgtt

SEQ ID NO: 516816 - DNA, 275 bp, Homo sapiens
tagcggcccagcaggctgggcccgataagacgtaagtgatgcaactaaaatacatgacattttaaaagatatagtggtggtgcttaataatggttaagattattcctccttatagccatctattgcagcttctaatatatttttcaatattcctcaaattattacaatgcctgatataaaactattttttaaaaaaatcacattttctgtcattatcctttgctacttgagcatccactaacatgacctttggatatcctgtcctttcagttttt

SEQ ID NO: 516817 - DNA, 934 bp, Homo sapiens
agagcaaagggcaatgaagagtgactcgaagagtgaagggctgcgagggctccaagggcagcgactgagaacgaaagagaaaagtgaaggcgggtgcctgactcatggtcctggcgtgcagctgggtgagtgacgtggcctatgctggcctgcatgaactactggcaggcttgaccgatcactcgactgcttgtcagctcttgttcgtgcccatgcaggaaggctcagtcgtgcgacagatgtagcgagactgagtgactcaaagtagtcgggttataccagtgcccgttgctttgcccaggtccatgtccaccctctagttccccgatcgtatgtgcatccttcttcaactagcttggcttggcacacgtcaggtcgccacgtatcactagcaagagcaacattggccattgaagctgacgttggccacgttgaaccaattgtgtgcacctgccgatgggacccttgctccagttggctttgcgttgtcaggaggtgaacttgcttgctagtgacttgaaggaagacgggcttgcttcagtcttcatgctggtggaccccgactcgcttgcggacccttgtgttaccccttgactaagtgaaggggcccctgagtgcccttgcacccctggctggcccttgcacaaaggaacagaataaaccaagccggccatgccaaccaacggtccaggaactgggtgccctgggattccagcgtggacgtaacttccaaggaactataagtgccccccctatatggaaagtaaccctggcgtggcctgagtgtaattgccggtgcctagtgtggcccatggtgggtgtgtggttaatggtggccaacctaaaccaagggaaagcctacgcgacgtatcggagcatttttcttcactttggcgggttcagtgccctgtgcagccggggaacctggtccatt

SEQ ID NO: 516818 - DNA, 327 bp, Homo sapiens
  misc_feature (8)..(8): n is a, c, g, or t
cgcagtancagtgaagatgcagactgataccacctcaccgctgagcagtgacttcctcactttctcttgtccagcttctcccctgggggcctgagagacctcaccttcttctggccatcttccatgttgtaaaggaacagccccagtgcactgaggggaggggagggagtgaggggcagtggtgtccttcctgcagaagagacatgcagcagtagcgctggcgccctctgtatgagctggcgggctggcattctggaccctggattatccccactgtaacgcctgttacacacaaaatgttgtgggttcctgtcgggctagtcggga

SEQ ID NO: 516819 - DNA, 480 bp, Homo sapiens
  misc_feature (14)..(14): n is a, c, g, or t
  misc_feature (30)..(30): n is a, c, g, or t
  misc_feature (66)..(66): n is a, c, g, or t
  misc_feature (234)..(234): n is a, c, g, or t
  misc_feature (284)..(284): n is a, c, g, or t
gtcgtatgacctanacaaggccttggccgnctgatcggggaacaggatacctgcagaggctccggncctgtacaatgccttcagatccatctcccaccaaagacctgtgtggtgtcagcagcagccccatttgcagaacttcccagagcaggttatctgcaatggaagcattgatgcagcacccacatgtcccagaggaagggttgtgagctgacagaccacagcccctcgccncaagggggttgaaaaacaccccccgggagaaaaggcaaccaaggaccccnccacaggaccaacagaaccccgttcttttgctcacctgggcagccgacccaacaaaacgcaccccctgagacctgctctccgggccccccacacccggctccgcacgaccaccctgcctgacgaccccacactgggctcctccctccctctcgccggatcgacacacacaagcaccacccttcccacccactgccc

SEQ ID NO: 516820 - DNA, 700 bp, Homo sapiens
tcaagccgtaataaccatacacacacacacacacacacacacacacacaggcatatcataatcagattagtgtaaactagaaataaaaaagaaaaatctttacagcagctgaggggttggggtaggatgcgtggacagagacactatatacaaggaaacatttttttaacccactcgaatactcacaaagttatgcaagccaataagacaatggatcaaaatctttaaagtaaaaaatctatctaccatagaacttctactatccacacaaaagatgtcccttcaaaagtgaagggccactagtggacgaacgtggcgacgcatgacacacgtgcgtggatgagatataaaaaagtggtgcacgccactcacgtgtggaagggcattcgtggcagctccctcagaagggtcaaaatatagatattcctactatgacccagaaagtctgctcccaagaaaccgttgagaacatatatccacataaaaagttgtatatgagtgttcatagcagcagatgacttattcacaggagccaaagtgtgaaaacaatccaaatgctattaaatgatatgtgggtaaataaaatatgatacaaccatacaatggaatattacttggcaataaaaagacatgaagtagagatatatgtggcaatatgaatacactttcaacatgttcactggtatggacgctcggcgtg

SEQ ID NO: 516821 - DNA, 301 bp, Homo sapiens
gcagctgaacaagatccaattagaaatctggcacaaacttagctggcattggtggtaaagcttttaatacttcttacaatataccacagcgggatccaagtcccagtctgctgcccagattgcttggtgtaggagcaggctttagatacaactctatcctcagtgagcattatcccagggcaggcaaaggaccacatccaaaaagacgttatggcaaggcagcacctttcatttatagaatgggcagacatcgggggtatggtaatactcatcccaataaataagcaataagttaagcaac

SEQ ID NO: 516822 - DNA, 502 bp, Homo sapiens
gatgagcatagatgagaagaatatattcagtcacacactaatggatattcttactttctttgaaccttattatttccattctgggcaataagtggatggttataatctggccttataccttagctgttctcacagacatcaagtatttttccttcaggctttcaggctaattgaaaaactatctaacagtccttaaagaggccttcacttccataattctcagttggtgagcatctccctcttgttctgttgaagcagatactttcctgttgttaagcaaaatagtttattatttttctgaaatttcctggacttgccaataattacctgcttggagaatgtttttgtctggaatgtggcttttactctttttttatttttaactattgactgtttgttttttaatttttttttctttttttgagactaagtctctctctgttgcccaggctggagttgcagtggtgtgatcttggctcactgcagcttccacctcctgggt

SEQ ID NO: 516823 - DNA, 556 bp, Homo sapiens
  misc_feature (7)..(7): n is a, c, g, or t
  misc_feature (29)..(29): n is a, c, g, or t
  misc_feature (42)..(42): n is a, c, g, or t
  misc_feature (56)..(56): n is a, c, g, or t
  misc_feature (86)..(86): n is a, c, g, or t
  misc_feature (102)..(102): n is a, c, g, or t
  misc_feature (484)..(484): n is a, c, g, or t
ttgtacnagtgatatgacccccccctatnctttaaaagcccnccctctgagcaacngctcctccccctgtgtaagatgagaaagtnccctgtccctgttccntctcggctggtcacaggcagaagtgaatgaccatgagtgtgacaatgttttatgaacctatagtcttatacagtgatgagaactgttttcccaaatgatcctcattttaaaacactagctttcccagatgctaataaaatcttacttcattctcagtaaactatcgcaagaacaaaaaaccaaacaccgcatattctcactcacaggtgggaattgaacaatgagaacacgtggacacaggaagggggacatcacactctggggactgttgtggggtggggggaggggggagggatagctttaggagatatacctaatgctaaatgacgagttaaatgggcagcgcaccagcatggcacatgtatacatatgtaactaaacnctgcattgtgcacatgtaccctaaaacttaaaagtataataataataaaataaaattaaaggaaaaaataaa

SEQ ID NO: 516824 - DNA, 852 bp, Homo sapiens
cgtggtctggcccggagattttaggatgacgggctgcggaggaggaggttcccggatagccacgcgcagctggaacagctggcgacctgctgctggaggcccggagctgcctgcgtggtgctggcagagtgcgatgggaggttgcgggtaggaagggcggactgctgcgcgccccctgcgtcccgcgcacctcggggccggtccatgtctcccgacggctgctgggcttcagcatctggggccatggttggggcggcggtggtccagggcgcaagtgtggtgcgtgccgatgcgccgggccggaggctgatgccgcgctgcggggcttgggacagcacttggcatctccagagcaggcccggggcagcaagggaggcgcctgggatgccagacgaaaatatcttcctgttcgttgcccaagctcatcggtgagttgcttgcccacggccccgggccgaacgagagggcgagggggccttggcggggctcccttgatcctggccttgttctccccggcggtgccgttccaagggttattgcccgggattggtcttcgcatcatttcttttctacttcattgcccttgtggcccctcacgggctcctcctatctaccttgctcagcggcctggcttgtaccgctttcgaatggagcacgcctgctcggggctctttaatcaaggaacccggggtttggggccatgcttggacattgcttgacgggaccgcttgtccaacaatgtgcctgttgggtcaaccttggccctgcttgtaccctggagccaacgctggtcttccaaaatcagcattgagtttgggattgtggccaaggtcacttggcctgtaccttcca

SEQ ID NO: 516825 - DNA, 247 bp, Homo sapiens
tgccgctcagcctcccaagtatctgggattacaggagcctgcactacacacagctaattttttgtatttttagtagagatggggtttcaccatgtggccaggctggtttcaaactcctgacctcaagtgatccacccacactggcctcccaaagtgctaggatcacaggcatgagccactgtacccggcctcaaacaggtttttttaatgcagacataagtgccctattgaggtgggaggagaggaa

SEQ ID NO: 516826 - DNA, 124 bp, Homo sapiens
accagccggccctggagtggtgcgtggcggtgtacgccatctgcttcatcctagcggccatcgccatcctgctgaaccctggtgctgtctctgctgggaagagaatacactctttgcaccacca

SEQ ID NO: 516827 - DNA, 81 bp, Homo sapiens
  misc_feature (65)..(65): n is a, c, g, or t
  misc_feature (75)..(75): n is a, c, g, or t
caaccccttaccccaggccttgccactaggtaaccatgtgcgaccgaaagccgtgatcaaaaatncggacatgtnggaaga

SEQ ID NO: 516828 - DNA, 355 bp, Homo sapiens
tcaggtctgcacgggggggagaagatagcgtaggtatcatgaagagtagacagaaaagatcttgttaacagctaacatgttggacgacggctgtggactagtagctgattttagacgcatggtcgatcttcatggacgttaaggggcagtgagtgcgtatacgtcagcgtagtcataactgtctacagtctgtactaaccagtagcatattggcgaattctaagtacgatacaagggccctgacgaggtatggcaccaaacgatggtgtcagaataagatctcagcacagaggtatgagccaaaagaaacaggatatggtctgttcctttcaagcttcccacagggtgccaggag

SEQ ID NO: 516829 - DNA, 902 bp, Homo sapiens
gacctggcagtggtcctgtgcagatccctgagcgtgtggcagcagtgcggtcgtggtccctccctatgcatgctggtttctagcgtgacacgcccttgagttgaggaccatgaactcgcagacctgcaggtgacgtgcgtggactgggttccggcctgctggcgtgggcgcaatgagacatccttagcagaaaggtatgaggctgagtaatagcaagtaagtaagaaacgccctcatctggctgagggcgaagaggacgaaatgtgtcacgaacgcaaaggtgggtggctgtgagtggcgaggacacagtgagtccttcggaatgatggcatgctagagtgcagcgtggccctaggggacgcggcaatagagcccctggaggatggtgatcccgaggatgacaggactgcttgatgcatgatgagctgggtgagtacggactttatatgtcatctgatgaggaaggtgcatgccagattgctgagacttcttggtgaatctctctgggggatttgaacggtctaggggagtaatgatcaggatccttatgtgactctgacagcatacagaacactatgaacgtgaagattgttgatagacgccaagtgattatcgtatacgtctgtgcgagctgaacaaggacgagtgcattacgaggtgcatgttgtcatcgagaagaagactcttttatgtccgcatgattatcgtggttgtctccccgagtgtggagggttgagtgtctaagccagtagttggtggattcgtggtggggaaattgcccgcatggaggggcggaataacactgggaaggttgtcggaaatagagaaaaggaaacgtaggtcggggacaacggattgggaacaactaagaaacggacaacaaaaaaaggaaaacaaatggc

SEQ ID NO: 516830 - DNA, 651 bp, Homo sapiens
  misc_feature (372)..(372): n is a, c, g, or t
  misc_feature (421)..(421): n is a, c, g, or t
  misc_feature (428)..(428): n is a, c, g, or t
  misc_feature (442)..(442): n is a, c, g, or t
  misc_feature (448)..(449): n is a, c, g, or t
  misc_feature (457)..(457): n is a, c, g, or t
  misc_feature (467)..(467): n is a, c, g, or t
  misc_feature (482)..(482): n is a, c, g, or t
  misc_feature (494)..(494): n is a, c, g, or t
  misc_feature (516)..(516): n is a, c, g, or t
  misc_feature (527)..(527): n is a, c, g, or t
  misc_feature (531)..(531): n is a, c, g, or t
  misc_feature (543)..(543): n is a, c, g, or t
  misc_feature (573)..(573): n is a, c, g, or t
  misc_feature (586)..(586): n is a, c, g, or t
  misc_feature (600)..(600): n is a, c, g, or t
  misc_feature (615)..(615): n is a, c, g, or t
  misc_feature (640)..(640): n is a, c, g, or t
gaattcggcagaggttttttagtttttccttaaaaaaaaacaacacatcgatggactttgcttccctgttcttgaagaatacttgaatgtcggggggcctgggggtgggggcctcggagaccgtctgcctggccctgctgcccctcctgaatctcgtatgatggtcacagtccggtggccgtgggggtgctctgccttccctggtccccactgcccatatctgtggactgccccttccaaagacccctggggggggtggggcattccgcccacccctttcccccatcacttctcgcctgtcagtgattccatgtttcgtaaagggggattctctgcctttttgtatcaaagaacaagcaaatggacccccgnccgctgcaagggcccatagccatcgggtctctaaagctgagtgggcaancagcgtntgtttgttggttgntttttnnttccgaangtgggaaagnaattcctcctccctncccaaccctgtngaatcaagtgcgactggaggantgggcaaaaancgtnatggaatgagtnaagatctggaggacctgggccaaggcaagncccatgctggggnaggtaaaggcaagngtaaagtaacgaggnttaaaggcaaaaaaaaaaaaaaccncaaaagttttt

SEQ ID NO: 516831 - DNA, 261 bp, Homo sapiens
tcccagcgctttgggaggccgaggcgggtggattccctaaggtcaggagttcaagtccagcctggccggcatagtgtagccccatctctgctaaaaatccattaattagccaggcgcagtggcgcacccctgtaatcccagctgctcgggaggctgagggaggagaattgcttgagcccgggagacagaggttgcagtgaagtcaagatcagaaacaaatgcaatacagaatgaacaacaaaagaaaaactgtccccaaca

SEQ ID NO: 516832 - DNA, 235 bp, Homo sapiens
ctaagtaccttctacatcccctgatatgtggttacttttgaatgtcctagacttgcaatatctgtcgtctgaaagctggaacagagaacaatgacgaagaacataatacagcaaaccacataacagacaacaaatgcgacatactctaagttccccttaaactacgtgtgtgttgattaggatcccgtgggtcgggttttgtagggatctgtgcagggttcaatgccttttctgt

SEQ ID NO: 516833 - DNA, 156 bp, Homo sapiens
cgtacaaggcccgccgtggaggtggcgcctgccggagtttcctacaatccatcctttgaagaccaccagaccctgctctcagctggcccacgaggtggagttgcagctggcagaagtgaggcggagaatgctggagcggcagtctggcccttgccc

SEQ ID NO: 516834 - DNA, 444 bp, Homo sapiens
ttttcgacctgtcgctgtatcggtgggcacagtgtggggcgaggtaaacctcccagaagtgcgagtcctgccgcagccctaggcgccgcggtggtggctgctatgtgcatcaccagacctcgtgtgctccggggcccaagcaacctggtcgatgggcagagctggcagctctcctgctctgtgggctctgacccgtctgatctccctagtccccgtgtctcaacctcaccttgtcctcccaagaaggttccacagagacttcggacctcctggagacaaggcaggtgtgctgaggggctgtgcaacgattgtcacccgagggcagcggggagggttcctcaagttttggcgggaaggcgtgcagcctgccccagcctgattgaaccctctgtttacacaaccttgctatggcccctttccctcttccgtgccagtcctccaggc

SEQ ID NO: 516835 - DNA, 990 bp, Homo sapiens
cgttactttgaaatcatgtgacatgtgagctgccggtgaagtaggcgggcatgaagcaagcacgacgagaatagcctatgggaacaacaagatgattaactgccaggaggtaactaagcaaagtcacgacaggtcccgacactacctcatcagcatttaaaaatttgcggttggggactggacgtcggagggctagatacgtacgatagtccgagctagtgcttgggacagatagttagcaagttcaattgcagagctgactatagtttcagatgagtatacgcggaataaactagtgaactcggaaaggagaagaagtttaacagtatgaagggataatatcgagtcgtcagatggctatttcataaatgtgccatattaaaaaaatagggtataacgaagcatcgatgatggatcaggacgatcgccgaataggaggcgaggccggctattaagaagggctcggttagtggcgcgatcacgaattaagagtcggatacggtgatcgtgaggttcatgacccgggaggtaaagtcaaaggtcgggggatcctaatcgtagttcaaaattccttccctgtacgacaatggacgtagatgaacatagacgggcaaacttccactagagcaggctttcctcgccgtggagatggatatcagtcctccaagattagtattataccgcgagaacccacaccaagaacaggggtttgtgtataacagagtgggcgagatgacacgggggaattcggcgtagggaaattaagagagattaacagggtcgagaggttcgaaggttcggttgttcatgtaacaagtatatccaatgggcaatactacctagatcctcatttgtacgccattcttagttagcaagtggaattcgtaaatgcaaacggaaggaagaatgtaggctaaattcaagtaggaaaggcgcaatgtggtaggccatagggtactaacagttagagaagaaaaagtataaaagagc

SEQ ID NO: 516836 - DNA, 411 bp, Homo sapiens
  misc_feature (161)..(161): n is a, c, g, or t
atctcagtcatgagctctgcttcgggtcatctattctcctgttcagcctctgagtagctggactacagcgccgcacacaccggtatttttgtatttttacgtacaggatgcggttcaccgtgttagccacgatggtctcgacctcctgacctcgtgatctngctacctcagccttccaaagtgctgggattacacagcatgtttcttataattaaaaatgtgatgccagaatttgagcttatgagatgaaggagatgtacttttccctattcctcctggtaagtacaactaaaaaccctggacattatatgtaaaatcaataactaggtaagaagattctgagaggtggagagaaggcagacaggaggctaggaacctcaacacacaagtaacaaaatgataaggagttcc

SEQ ID NO: 516837 - DNA, 657 bp, Homo sapiens
tgtacggtcgcgagtttgggatcgagatgctggtcatggcgctcgaacgtcctcctgctgctctcagcggcctggcccgtgaccgagaactgggcggctcccactccatgaggtatttctacacctccgtgtccggcccggcgcggggagccccgcttcatctcagtgggctacgtggacgacacgcagttcgtgaggttcgacagcgacgccgcgagtccgagagaggaggccgcgggcgccgtggatagagcaggaggggccggaatattgggaccggaacacacagatctgcaagaccaacacacagactgaccgagagagcctgcggaacctgcgcggtactacaaccagagcgaggccgggtctcacaccctccagaggatgtacggctgcgacgtggggccggacgggcgcctcctccgcgggcataccagttcgccctacgacgggcaaggattacatctgccctgaaccgaggacctgagctcctggaccgcggcggacaccgcggactcaagaatcacccagcgcaagtgggaggcgggcccgttgtggcaggaagcagctggagaacctacctggagggcacgtgcgttggagtggctccgagatacctggagaacgggaaggagacgctgcagcgccgcggacccc

SEQ ID NO: 516838 - DNA, 501 bp, Homo sapiens
agcatgcactttttggtagcagaatggaatgaaccctccctccacttttataaaaaaaaaggtgcttttgatttgtccagtgaaaagggttggagactgttcaagatcgccaaggagtacttgttaaaaatggccccaaaggagtgaggagtgctgctgtaaatcacacccccccttttattttagaataaattccccactttttttgctttttatgctgtttgtagtgaaataatagaatgagccccccttccaaagctttattaccagtggcgttgttgcatgttttaaataaggtttgtttaaagtggcaatttcaaatgcagtttggaaagtcagatttttttccttgaatatctttcgataaacaacaagggggggtgattttaaaaaatttgaaaaaaacttcattttcgtgagtcctttaaatgtgtccaaggtacccccggggacttaaagtttctgtttgattcttttttaaaaaaccactctttggtttta

SEQ ID NO: 516839 - DNA, 1199 bp, Homo sapiens
acaggtgtcgggaagactacccctaaagagccaagaatgggaaaggaaaagactcagtatcaacgattgtcagtcacttgagactacgctagtattcggggcacagtccacacacatactgcgccatcatgagtctataaggtgcgtgctggcagtcgacataaagaaccagttgaagagaacttatgacgacaggaggcgtgtctggaggaatgggtcaatcagtggcttccattctagagttcattgccatgaggctcattaggatcaagactgtaaagacatgcacgcgtgcaacggtgggtgagtcagacacatgtgtatatcatccgtgtgatggaaagattatgagacccagtgcaaggtacctagtggtggagcataatcactctcgagtgaccacacaagggagcacaatgaagcacattatagtcaacagagacactgaatatacacgtggaagcgatgctcgagagcatgagcctagtgcgatgatccgtggatgtctgttgcttgactgagctgtgttggttcgataccttgtgatacgagctggctactcgtccagaagaaatatggggcaagaaccactgcaagaagtctattgactcacattacatggggcctgtaaactagctaacgtaggagatggtggtaacaccaaacgttaaatttgtacacgaagatggttcaaacgatagagcatggggatttgcaccaacgtaggaggccctcaaccccctttgagcttagggctcccaagccagagaggcaaggattctatcgggagggggcaacataatttcgggtctccacctcgggcacaacggtcccgcatggcgcacttcttcacccattttccacaggcaacatacatgttcggggcctgcaccaaaacacacaccggaaaactaatgaagactccatggccccaattaagaggttagccgccaaaaaataatatacagatggcgacatccgggcggcaccgacatgggggcctggaagcaagaaagccagattctgccccgcgggcgtaaatgtgccccccaaaaactgacatggactttataaagccacagttggcacaccctatttttgtgcgcgctctccccacacacatggggtgccaagattgtcggcaaaacacacaggatttccaaaaccctccaccgagtgtacaaagggagggcaaccag

SEQ ID NO: 516840 - DNA, 216 bp, Homo sapiens
cttcagagggtatggcgcagcatcatgttgatgccatttcaaagagtgactctatttcagtctacgtactttccacgaatgtcaccatctctaacatggaaataatccttgtcatctcagaactactttggtgcctccatattctgggagaagaactttatctccaacttacacgctaactcctttaacctctccacccttatcacaacacaagaa

SEQ ID NO: 516841 - DNA, 177 bp, Homo sapiens
aggtgatgagaacaaagtggggaaacattgtaaactattgcccagcattgtaggacatagggtatttgccacaattgttggtcttaccttatgcttgagcttatagtgatgttcttgtgtcccctgtgtttttctagagtgattttttctatatgttgggattttcattggtgtcgc

SEQ ID NO: 516842 - DNA, 605 bp, Homo sapiens
  misc_feature (32)..(32): n is a, c, g, or t
  misc_feature (124)..(124): n is a, c, g, or t
  misc_feature (173)..(173): n is a, c, g, or t
  misc_feature (176)..(176): n is a, c, g, or t
  misc_feature (185)..(185): n is a, c, g, or t
  misc_feature (192)..(192): n is a, c, g, or t
  misc_feature (195)..(195): n is a, c, g, or t
  misc_feature (296)..(296): n is a, c, g, or t
  misc_feature (406)..(406): n is a, c, g, or t
  misc_feature (493)..(493): n is a, c, g, or t
cgaggagtcctagcgactctgcggaaatacantaaatacagcaaaaatatcctggaccggcaagatcctccctctgtggtggtcaccagccaccagccccaggagaaaagaagaaactgaagtncctggcctacgacttctacccagggaaaattgatgtgcactggactcgngcnggcgaggtncaggaanctnagttacggggagatgttcttcacaatggaaatggcacttaccagtcctgggtggtggtggcagtgccccgcaagacacaagccccctactcctgccacgtncagcacagcagccctggcccagccctccgtggtgccctgggaggccagctaggaagcaagggttggaggcaatgtgggatctcagacccagtagctgcccttcctgcctnatgtgggagctgaaccacagaaatcacagtcaatggattcacaaggcctgaggagcagtgtggggggacagacaggaggtggatttngagaccgaagactgggatgctgtcttgagtagactttgacccaaaaatcatctcacttgagccaccccacccattgtctaatctgtagaagtaataaataatcatcctcctt

SEQ ID NO: 516843 - DNA, 308 bp, Homo sapiens
gacagccggagatactacactggattagaacgatgagttaccagtcgaggtgtgggaaacacacggtagcaagtaattacaccaggcagagacatctacttttacatgagaataataataataaatacggtaaaggcaacaacatacaccagtagtataactacaacaataatgatggtaataatgacagcagcataacattaaactgagcatctacaaggtgccaggaactgtgataaatgctaagtacacctgatctaatataagcctcacattaacactgccatgcaaatactgcagctatctca

SEQ ID NO: 516844 - DNA, 400 bp, Homo sapiens
aggaaactcactctagattactagctcacaaccttagacacgaccattaccctaagtacgtgtaggcgatatggagaggaacctcgggcagtagacatagagaccggaggcatagatgcacaattataaccacgcctaatagatcgaggactaacccctgtaccttctgcgtatatggattaaccagaaataagcttgcaaggagagccaaagcttagacccccgccagacgagctacctaagaacagctcaaggaggctacaccctatatgtttccgaactatgggaagaatcattggtagagagtacgaacctaccgagcctggtgagagctggatgtgcaagattgagacctattttaactttgaatttgcccacagaaccctgtagtgcccttgtg

SEQ ID NO: 516845 - DNA, 237 bp, Homo sapiens
tagtcgtcgctaagcccatctgacttaaggactttgctattttaaatagaaatgtccacttaagagatttcatagttagaaatttcttagttagattcattgacttcctagcaatagtggtccctcttagagagcagcatcccatatatattaggacaagttataacaaagagaaatgaatttgagcaaaactgcatccattttgagaaactattttttattatgcatcactaaccc

SEQ ID NO: 516846 - DNA, 109 bp, Homo sapiens
gactgcactccagtctgtgtgacagagtgagactcgcctcaaaaagatttaggttgcaactgtttcaaagcatgttgcaggtatgtgtggtgtggaatacctattatta

SEQ ID NO: 516847 - DNA, 84 bp, Homo sapiens
agcagcatatatctctgcagcgttggggagtacgaccttgcctacgagcagtacttcgggccgggcaccaggctcacggtcaca

SEQ ID NO: 516848 - DNA, 216 bp, Homo sapiens
aaccgagctgtgtacctgaacattcgtgtcagacagcggagagatctagttatctgtgagactgaagagcctccttgtgaacgaactaatcctgaaagaagaactgacttgtgaagggcaaacagtttagttcaaggaaagcagaggttatgcaataccacagcaaacttcattcattgaagactgagctccaaccacgtcttaagagcgggaaga

SEQ ID NO: 516849 - DNA, 195 bp, Homo sapiens
ctgactataaagcaatctaacatgttcagtgttttcacctactaaaaaataacaccttacacagaaggggaggttggggcaacacaaagtacaacaaaaacaaattaaactaattgtactttttccacacacatcaagcacactaaggtgaggacacgggcctcaacacacagcaacttgtgcagcatagtcatg

SEQ ID NO: 516850 - DNA, 682 bp, Homo sapiens
ggacttgtgcgcccgggaaaccccgtcgttccctttcccctggctggcagcgcggaggccgcacgatgcctggagttactgtaaaagacgtgaaccagcaggagttcgtcagagctctggcagccttcctcaaaaagtccgggaagctgaaagtccccgaatgggtggataccgtcaagctggccaagcacaaagagcttgctccctacgatgagaactggttctacacgcgagctgcttccacagcgcggcacctgtacctccggggtggcgctggggttggctccatgaccaagatctatgggggacgtcagagaaacggcgtcatgcccagccactttcagccgagggctccaagagtgtggcccgccgggtcctccaaagccctggaggggctgaaaatggtggaaaaggaccaagatggcggccgcaaactgacacctcagggacaaagagatctggacagaatcgccggacaggtggcagctgccaacaagaagcattagaacaaagccatgctgggttaataaaattgcctcattcgtaaaaaaacaagaaaaaaaaagagaaatcggagagataattgtggaggatggagaaaaagggtggtaatagaagtggagttgtgcataaggtatactgaccatatttgtgagaagtgaaaaatggggaatcaaaaagg

SEQ ID NO: 516851 - DNA, 882 bp, Homo sapiens
ggcttctctcgccaggcgtcctcgtgcaagtgacatcgtcttaaaccctggtggaatccctgacgcaccgcggtgatgcccaggaagacagggcgacctggaggtccaactattccttaagatcatccacctatgtggatgataatccgaaatgttccatgtgtgggacgcagacaattgtgggctccaagcagattgcagcagatccgaatgtcccttcgcgggaaggctgtggtgctgattgggcaacaacaccatgatgcgcagggccatcgggggggcacctgaaaaacaaccagttctgacaaaaatgttggctcaatatcggggggaaactggtgggctgggttgtccacccagggagggacctctcaagtggaggattcaggggaacattgtcttggtggccacatagggtgcacacctttgttggcctgttgtttggttgcatttttggcccccattgtttgagaggttcacttggtggcaagcacaagaaaacgtgtctcgggcccagaggaagacctcctttcttcccagggctttgagtggtatcaccactaagattcctccggggcaccatttgaacatcctggagtgttgtgcagttgatcaggactggcacgacacatgtgacgagcaggacgccacgtgtggggcttgttcaaatctccctttttcttgtggctggccctcaggagggttcggccatggcggctttaaaccctgaagtgttgttccggggaactctgttcccgtctggggtgcccatgtccgtgctgttgcgattgtaccattgtgtcggcctctcatcgcgcaccggcggctttgggcggacctcctggaggggcctggcccattggggccctgtcacctcgtgca

SEQ ID NO: 516852 - DNA, 378 bp, Homo sapiens
  misc_feature (332)..(332): n is a, c, g, or t
cctgtccaacatggtgaaaccctgtctgtactaaaaatacaaaaattagccaggtatgatggcaggtgctgtaattcgagctactcggctgctgaggcaggagaattgcttgaacctgggaagcagaggttgcattgagccaagatcgtgtcactgcactctagcctggacagactcttggtctgtctcaaaaaaataaaaaataaataaaaattatccaggtgtggtcgtgcgcatctgtagtcccagctacttaggaggctgaggtggggacaatcactttgaacccggggaggcgggaggtttgcagttgagctgagattcgtggccantgcgcttcccagctttagggcaaccagagtgaggattctgttttca

SEQ ID NO: 516853 - DNA, 100 bp, Homo sapiens
  misc_feature (1)..(1): n is a, c, g, or t
nagctgaggtttatatatggaccaaaaaaaaaaagcaattgattggtttggtagctggaggcttgggcaaggggggtcccaggtagtaaactccccaggt

SEQ ID NO: 516854 - DNA, 844 bp, Homo sapiens
cccaactggatactaggatgacagcagatgcgagattacagtctatggacaatactttgctcgggtattctcttcacctcctctcagtgcttggcatggtcacacctatcagtgaccttcctggtgcatgatacaatcctcatatgtgagaagggagaatagaacttacctcggtgtgaaaagcttggccagaccgtgtacagacttgtatgacttgtcttgagagtgggcagcaccgtggacagagatacctatattctcagataagaataatgtaaggagtcaagaccatcattatgatagtaatttcccagaggcctatctttgtctgaagctacatgcctccaatttggtgaaagtcaatataataggagaagtggttgaccagggaagtaccaactttgaagattgaccatacaggattcaggccccatgctgctaatctattcaacgacgtcctgatgttgaaggtgtgtgatacactatccatacgccttgccaaacagcgagtctgtatcctccatgaaatgtgggatccttccagattgtctcaacgagtctcttcttctggggagatgtggcctattatgactaccaagggtcacttgaagaacaggaggagagtaattcaacggcataaggtgctgggaccaagttgtaaggtgctggtactccaggaatcgtggtgtggttgccttggagaagcctttaaggaggcgttcaggtatatatgaatgtgctatagcctgtgagattccgtgcatgccctatggtgccgggggggaaaagttcctgtactggattccggagtttgaggttccctaactggcccctgggaggggtg

SEQ ID NO: 516855 - DNA, 264 bp, Homo sapiens
ccaactgtggtggcttgtgcctgtaatcccagcattttgggaggccaaggcaggaggatccattgagtccaggagcttgagactggcctgggcaacagggaagaccctgtctctacaaaaaaattaaccaggtatgatggtgtgcgcctgtggtcccagctacttgcgaggctgaggggcgagcaccacacagaagtttggttgagcacagaagttcgaggctgcagtgagctgcaatcacgccactgcactccagcttgagca

SEQ ID NO: 516856 - DNA, 231 bp, Homo sapiens
ccttttggggggggcttttttaaacggggttttttggtttttccccccccggttcccccccaaagtttccagggggggttgggggggggtttttccccccccggggggggggccccttttcccctttttttggggcccccccccttttcccaaaaagggattttttgggggtttcccccccccctttttttttggggtttcttttaaaaaatccctttttttaaggggcca

SEQ ID NO: 516857 - DNA, 690 bp, Homo sapiens
  misc_feature (666)..(666): n is a, c, g, or t
  misc_feature (677)..(677): n is a, c, g, or t
gtcttgagactgtaggctgcaaaatgtttcgttgttacagctactgggctctatgaaggatgtggttcgccagagccagcagcatccagcattccgttggaacttcctgttgtaatgcaaatttctcaaggccccgctgacccagacttactgaacttcgaaaactatgtgggacggagcccagcaatctcgtgtttcgcgaaaccctccacgaatgtcagtaaaacttggaatcagacgtatgtaccttgtcaggttgactccgtactccatggattacccgtttctacaatggacagtttaagaaactaattttagaactgatatctaaagctacaatagtaggcattgtcctatatactatactaatcacccagtgatgacgaagttttctttgcaatgtacatgcgtagcatacgtggtagaacggatctgactccagtgctacaacatttcacttgtagatgtcatgtctctccatccgatgtctgtgatacgtttctgtcttttcggtgttttttgtacgaccttgacagtccagaggagtattgctgtagaatgatccccattcagggtttgatgtttttctgcatgattaccctgtagtaactggattttggggaaacagaccatgcagatgaagtgcctttctcaatacatctgtantactccaggtncactgctactaca

SEQ ID NO: 516858 - DNA, 134 bp, Homo sapiens
tgctgagataacagacgtgagacactgcacccagcctatttctgaagctggccgtgcacagtggctcacgcttgtaatcacagccctttgtgaggccgaggtgctgagataacactggcaggagatcgagatca

SEQ ID NO: 516859 - DNA, 148 bp, Homo sapiens
gggggggtttttttttttccccccccctttttccccgcgccccccgggggggggcccttttggggggggggggggggcccccatggggccccccccggggggggggggccccccccccaatttttttttaattaaatttggggggccc

SEQ ID NO: 516860 - DNA, 1707 bp, Homo sapiens
  misc_feature (547)..(547): n is a, c, g, or t
  misc_feature (661)..(661): n is a, c, g, or t
  misc_feature (722)..(722): n is a, c, g, or t
taaaaaggtccaaaatcttaattaattctcccgggtcccgcccccgccccaggggatgctggcaagggtcaccagggcctcagggtccaggggggtccagaagccgccgaagagagctggctccgggtcttccagggtccttccggaaccttctggcggctttgtagaaagatggggcgcagtcccgggctgggtggcaagataagacggtcctccgtggacaggctggccctgggacaagggctggagcatctgggtgtcccaagagggcggcagaagaagcggctctctccacagggggctattccagagatggggagataactctcctctttctgagataacaggtctccaagacactctcccgccggggtctggggacaaagaatctcacacacacacacgcggtgctcccctccgggtggggtctgagacagccactctgtgtggcgcgagaaaggcacaaatggggcaaagacaagtttggcgaggagctgttggggaggcagaaactgcggcacaagagaaggaggcccaggcgcacatncctgtgtgtgcccgcgtgttgtaaagaacacctgcggagtacttgtgagcaagtgtgcgcgtgttgtggtgtgggtcccccccccgcgagaaaagtgtaagcacaacacaaggncctctgcgacggacacaggggagccccccctgcggcccccaccaaagaggatgttgggggnctctccagaaaaaaatgtggcggaccagagaacgggggggtctgtgggccccgaagccgtgctcgtggacactcccgaggggataagacacacacgggggcgcgtggttcaacacgtgggggcacacgggacgtgtggtggctctcccacaagaacaagcgaacaaacacaaggggggggaatcccttaccagaaaacacttctcaagtgtataagggggcggggaccacaacaaacccctcattgttgggcggggaaccactctgagagtataatcaccaccgggtttgcaggggcgacccacgcaggaggttgcggcacccacaggatgtgggggggagacaacctcacccccgaggggggatcccccagcatgttcacccacaaattacctttctaccgggggccacacggctcccccacaaggaggagacgactatcgatataggcccgggacgataaatacacggggaaggcgcgagggccggggtgacaaaagctctcgtctgggcggtgatgttcgccccaccgtctggggaacaacaacatcatcagcacgcggggggtcgcacaccaaggcagtgggtgctccgaacaaaaataagaggctcccgtgtgctgtgtgatgacccaccggcgcagcccaccagaggtggcccgggggcacaaagaaacaacgagcgtggccccagagggagcgctcgggacaccctcgttggcggcccccagtgggggggcactaggactcccaggacgcgcgggccacgggcactccacgaaccacacgggggcgagaggcggcggccgcgaagaaaagacaagcgccgtagtttctcgcagaatgacaggaggagagagcatcccacaacactcgacgggagaggacggaacacgaaacgaaggacgccgcagagcgcagcagcgacacagccagtggagagccaccaagtgaggccgagagatgaactaggaaggggcatactgc

SEQ ID NO: 516861 - DNA, 882 bp, Homo sapiens
  misc_feature (13)..(13): n is a, c, g, or t
  misc_feature (64)..(64): n is a, c, g, or t
  misc_feature (116)..(116): n is a, c, g, or t
  misc_feature (130)..(130): n is a, c, g, or t
  misc_feature (167)..(167): n is a, c, g, or t
  misc_feature (174)..(174): n is a, c, g, or t
  misc_feature (176)..(176): n is a, c, g, or t
  misc_feature (181)..(181): n is a, c, g, or t
  misc_feature (235)..(236): n is a, c, g, or t
  misc_feature (240)..(240): n is a, c, g, or t
  misc_feature (276)..(276): n is a, c, g, or t
  misc_feature (279)..(279): n is a, c, g, or t
  misc_feature (284)..(286): n is a, c, g, or t
  misc_feature (290)..(290): n is a, c, g, or t
  misc_feature (304)..(304): n is a, c, g, or t
  misc_feature (310)..(310): n is a, c, g, or t
  misc_feature (314)..(314): n is a, c, g, or t
  misc_feature (316)..(316): n is a, c, g, or t
  misc_feature (318)..(318): n is a, c, g, or t
  misc_feature (335)..(335): n is a, c, g, or t
  misc_feature (339)..(339): n is a, c, g, or t
  misc_feature (347)..(347): n is a, c, g, or t
  misc_feature (353)..(353): n is a, c, g, or t
  misc_feature (364)..(364): n is a, c, g, or t
  misc_feature (381)..(381): n is a, c, g, or t
  misc_feature (438)..(438): n is a, c, g, or t
  misc_feature (455)..(455): n is a, c, g, or t
  misc_feature (465)..(465): n is a, c, g, or t
  misc_feature (478)..(478): n is a, c, g, or t
  misc_feature (507)..(507): n is a, c, g, or t
  misc_feature (537)..(537): n is a, c, g, or t
  misc_feature (542)..(542): n is a, c, g, or t
  misc_feature (546)..(546): n is a, c, g, or t
  misc_feature (578)..(578): n is a, c, g, or t
  misc_feature (808)..(808): n is a, c, g, or t
  misc_feature (855)..(855): n is a, c, g, or t
tactcttagtacntccacaactatttccacctaaatagatctttaaaataagcatacacaagtnttgactattatctacaaatatttattgtaacacttgaatagaactacaggangcccttggcactgntggggagaatattgattgcactgttaggttacacaantttatananagcgnaatttaatgctctttacataaaagatattagactacttaaacaaaactttcaannattnctggtaatagctaccagaattagaaaagtaaaattnggnttttnnntctncctcttctagttcnctggtntctntntnctcctccactgctgganagantagttaantctgtnatgcaacaggntaacaaaacactaagcnattattgggacaactgttctacacagaagagagctatctcttaatttaggggggagngaaaatcccgggtgggngtttttgggngttagccaaaagngggggtccgggtggggtgttgtgcttggngttcggttttggtggcttcttggtaagggnttgcntccnttcgtttgggtacatttctgcgcatgtgtgtnatggggtccaggaaacagccaaaccacaagttaactcttaacaatgaatatacatagttaaccctatagtaagcagcccctttgaaaagcactgatgcacccaacagttatatggatcatttcataaagagcaacacaaagtttaccatcactaatacccagtacctacagtcacttaatgttctggaacacaataatgtaaaaggcaagtttcttttgaaaatggcttnaactcaagcagttctcttgctgaacatcaaactttattattccaggnaactaagatttagataagaaaaaaatg

SEQ ID NO: 516862 - DNA, 123 bp, Homo sapiens
gtgcatgtattatcggaatagctcttctggatgtagctgagagtgtaacctgctcatgtacccacaaggacaggtgtgagtgcccatgtttcgggccggtgtgataaagagctacctgagtgg

SEQ ID NO: 516863 - DNA, 306 bp, Homo sapiens
atccaccctatcacctgtgtcgtataactcacacctgtgttcaacaagccttctccccacctggagctgctgtcaggaagccagggcgctggctgttcctggaggtccgtcctttccatcctggtcccttctccaggacgagagcacccatacagcatctccactggtagaggggttggttcctaggctccctatccagcgcgcagatgcagccaaaaggcacccatcttctacactagagagctagacccataccactcaagggccccctagaatccttcaatcccatactactagctctagact

SEQ ID NO: 516864 - DNA, 267 bp, Homo sapiens
ctactgctgcgcagcatataagctatgggtctcactgaatctaagacatttgtcttcaagccagcgaaacgaaagcctgtggtgaagggatttgcgtgctggcactgcagactgcaggcaggaagggctagggccaggcgctgggacatgcatgaggtgctcggaggagcctggctaaatccaagcaccagcacctgtgagtctgctctcttctcagctggctcccaagtaaacctgtagctttgcctcttctcccagctctcgtgc

SEQ ID NO: 516865 - DNA, 208 bp, Homo sapiens
gagaatcgcttgaacccacaaggcagaagttgcagtgagccaagatcctgccactgcactccagcctggatgacagtggagactccgcctcaaacaaacaaaaaaagactctgagaattcttgactcactaattacacacttatgtgtctaaaggactaggacagagctattcattactgtggtacacgtaaatgacttttctcatga

SEQ ID NO: 516866 - DNA, 478 bp, Homo sapiens
  misc_feature (30)..(30): n is a, c, g, or t
  misc_feature (37)..(37): n is a, c, g, or t
  misc_feature (128)..(128): n is a, c, g, or t
  misc_feature (176)..(176): n is a, c, g, or t
  misc_feature (233)..(233): n is a, c, g, or t
  misc_feature (239)..(239): n is a, c, g, or t
  misc_feature (277)..(277): n is a, c, g, or t
  misc_feature (344)..(344): n is a, c, g, or t
  misc_feature (376)..(376): n is a, c, g, or t
  misc_feature (406)..(406): n is a, c, g, or t
gtcgccttgaagtaccctgagctctgtganagtctgnccccagaggctgtccgtgtgcaccattggaagttggctaccctggtgtcctctctagtcggataaaagtatgggcgagtggtcatgttctncaacattgagaactggaaaagtcaagaaatcaccttggatgagatctngaaggcatattgcttcatcctggagaagctgctggagaatgaggaaactcaaatcantggctnctgcatcattgagaactccaagggctttaccatgcagnaggctgttagtctccggactccagttctcaggaagatggtggacatgctccaggattccttcccagnccggttcaaagccatccacttcatccaccagncatggtcttcaccacgacctacaatgtggncaaggccttcttggaggaggaaagttgtttgagagggttttgggccacggggatgacctccttggttcttcc

SEQ ID NO: 516867 - DNA, 346 bp, Homo sapiens
  misc_feature (332)..(332): n is a, c, g, or t
gtgttaaaatctgtgccttcattaattttcagtgcaaaacaaatccgcttgcggaaacatctgctgttgcctgatagttgctttccttcacctcccttgctttcagaggcagctaagttccacgttgccactgaaggataatccccctgcatactccatgatcgcagtgaataaaaaatgttttctgatagtgtcacggcatgaggccacaaaatgtatgaataactgggcagtctccagttacaaaaaataaaatgatgctaattcttaaatgaagttatgaccagcatgaataaagcccacaagatccaaaaatgtcaatttggtcaggnctactctcacattt

SEQ ID NO: 516868 - DNA, 295 bp, Homo sapiens
  misc_feature (52)..(52): n is a, c, g, or t
ctctagagatcccgtatgtatcccaaactatttaatatactacctacgaatngcttctacatcatcatgccactttagtgtgctttggtttagtctctctttggatgccaaaaaacaatcagatgcctcccctgttctgagccattaaaagccaggaatcaaccccattgggaggagaaaccaccccagcatcattccccttcactgacagctatttccattggctcaataaaaattaattctcccacctctcctcacttctttattggcggtgtgttggcgcgataacatacgc

SEQ ID NO: 516869 - DNA, 790 bp, Homo sapiens
  misc_feature (164)..(164): n is a, c, g, or t
  misc_feature (175)..(175): n is a, c, g, or t
  misc_feature (184)..(184): n is a, c, g, or t
  misc_feature (214)..(214): n is a, c, g, or t
  misc_feature (276)..(276): n is a, c, g, or t
  misc_feature (278)..(278): n is a, c, g, or t
  misc_feature (286)..(286): n is a, c, g, or t
  misc_feature (290)..(290): n is a, c, g, or t
cagattctcggtggcggcggcagcggcggcggccctggactgcggggaatgggaatcctaggtccctgactgagcacctcccccgcctccctgcccccgacatggctcaggagaagatggagctagacctggagctgcctccgggtacgggcgggagccggcgnagggcggtggnagcggcggnggcgggggcctcaggaggtctaacagcgcncccctgatccacggcctcaatgacacttcgccggtgttccaggccgaggcgccgagcgccangnggaacagnacancgttcccgagccgccacgtgcactgtctggctgaccgagtcgctccgcctgttcctgcatgtcacagtgaggtcgacttgacaccagcatcaacacagagaatgagggcatggtgcttgatcaaccgagagacggtccacgcaacggtgaggtgctatgacctgcagagtgctacgattaagcctacgtcctgaggaggcacaacgtttcatagcctgggatgacaacagacgtggtagaaatcctgccttcccccataggcgcatctgattacatatccgttgtgtcacctagctacctgtcatcccagctcggggcaattggagaagccagtgtttggcagcacatccgttgctacaagaatcgtaaggtagcaacggattgccttctcaagctcctattccacatgcccgaacgacgcgcgatttaccacgccggatgaatgccagaggccccatcaagttgcattagaccaagtgttcttggaccattgacaagaa

SEQ ID NO: 516870 - DNA, 476 bp, Homo sapiens
  misc_feature (164)..(164): n is a, c, g, or t
  misc_feature (175)..(175): n is a, c, g, or t
  misc_feature (184)..(184): n is a, c, g, or t
  misc_feature (214)..(214): n is a, c, g, or t
  misc_feature (276)..(276): n is a, c, g, or t
  misc_feature (278)..(278): n is a, c, g, or t
  misc_feature (286)..(286): n is a, c, g, or t
  misc_feature (290)..(290): n is a, c, g, or t
  misc_feature (333)..(334): n is a, c, g, or t
  misc_feature (345)..(345): n is a, c, g, or t
  misc_feature (348)..(348): n is a, c, g, or t
  misc_feature (398)..(398): n is a, c, g, or t
  misc_feature (408)..(408): n is a, c, g, or t
  misc_feature (460)..(460): n is a, c, g, or t
cagattctcggtggcggcggcagcggcggcggccctggactgcggggaatgggaatcctaggtccctgactgagcacctcccccgcctccctgcccccgacatggctcaggagaagatggagctagacctggagctgcctccgggtacgggcgggagccggcgnagggcggtggnagcggcggnggcgggggcctcaggaggtctaacagcgcncccctgatccacggcctcaatgacacttcgccggtgttccaggccgaggcgccgagcgccangnggaacagnacancgttcccgagccgccacggcctgctgctgccggcctcccctgnncgcagcacagnagncgcttgcaccaaaacaaacaagaaaagggcaagagaacttgaatacaacngaagaagaanggtccacgaacggagagggtgcagacccgcaaatgcagaaaaagccactccntgggaaggaaaagatt

SEQ ID NO: 516871 - DNA, 289 bp, Homo sapiens
  misc_feature (14)..(14): n is a, c, g, or t
aagtcttgctctgncttgccccaggctgaaagaagcagtggcatgatctcagctcactgcagcccttcacccccccgggttcctagtgatcctcctgtctctgccctcctgagtagctgggactacaagtgtgtgccatcacacctagctaattttgtgtttttagtagagacggagtttcaccgtattggccaggctggtcttgaactcctgacttcaggtgagccacccaccttggcctcacaaagtgctgggattacaggcgtgaatcaccgtgcccaacctctag

SEQ ID NO: 516872 - DNA, 201 bp, Homo sapiens
tccttacctactcacattcacgacggtcatcttgtgtgtggtggctgtagtttctccctttgtgaatgatagcgacgtggcgtggttttttggaccttattaggagaattcacttgctttgctttgattcattaattttggacttgctcattcattattgaagccttttgactcgttgattcattaggccctgtgaccttg

SEQ ID NO: 516873 - DNA, 535 bp, Homo sapiens
tatcttgttttgccttcctggtttactaggtaagaagtgtttcttatgctgcagggtacaaatctcccagttatttataagtcgatactcactgtactctctgacctcacactgagttctgaccatgagctttgaaagaccacctctgggagtacatggcctcatgctgtctgcacattcatgtggctatcctccaaggcagaaaagctgtgacccagtagctcctaaaccacttctttcttacttactggtggaaaagttttaattgtatgccatttttcattgcaaagaagtggggtttcagccaaatttaaggaaaatatgattttttggggccaaactgatttatttgtgctatagctataaattttactttaggccttcagccctgaaaagaatggctttaatttgcctttttagtatctaaatcacttaagagtttcatttgccataatctttagatctacattatatttaccatagatgggactgtagaggaaagggcggccgctgttctagatcgcgagcggccgct

SEQ ID NO: 516874 - DNA, 565 bp, Homo sapiens
gaaaattgcaccatgatttgaacaagcacttccaattacattacccatcttgtatgccataggtgggagtataattgtcacagcctttaggaatgtagttttctgggatttattgaaactttgaaccttttggcctactaagttcattcctaggaaactgcctaatgggaatgatctgacaagtgtacacaagcaaagtcattgcacctttgttctttaatacttaaaactagcccaaatgccctgtcagtaagggactggtttaatagatggtacctttatgcaatttgtttctaagtattcgttaagagagtgaggaatgtctggattattagggcaagatttctaaacttgggtaaaaaaaaaagttgtgcaagcatttttgtggacaacttgatgctctaaaatataagtaacaccacattactaacagtggctttgttaggaagcagaattatggaagaactttcatgggtggctttacatatttctataatgttttaattttctataagcatgtatttcgtaaacttaaataaagaaaaaagaacactaaaaaaaaaaa

SEQ ID NO: 516875 - DNA, 193 bp, Homo sapiens
cccagacatcttttgctttgtactgtgtatggaacagttaggtatgaaaattaactgtagaacagcagtagttagactttaatagcatatctggtcatctctttctctcatcacatcacagtctgagtacaggtagcaaatcctctttggctctgccccgtcaggaacaggggttagcgaattatggccccca

SEQ ID NO: 516876 - DNA, 315 bp, Homo sapiens
  misc_feature (16)..(16): n is a, c, g, or t
  misc_feature (55)..(55): n is a, c, g, or t
  misc_feature (76)..(76): n is a, c, g, or t
  misc_feature (88)..(88): n is a, c, g, or t
  misc_feature (310)..(310): n is a, c, g, or t
  misc_feature (312)..(313): n is a, c, g, or t
taggaagattaagtgnaaaccctggggatcacatggtccagggtgagatacagtnggaatatgaaacccaatgtantgacccttcccncctttaaactttatccctatttgctggtctttatcaatactttcagtttgaatgtggttaaactggaatctacactaaagaatctggtggatggtgagacggctcagaatacaccagcatttggatgttctgcaagtaaaatgagatatgttttatgtcatcattgatgtttttctactagtggtgatttattttgctctcattctgatgataattaatatnannca

SEQ ID NO: 516877 - DNA, 979 bp, Homo sapiens
ctaaatattcttcagaccataatagtatgtccatataaatgccagtagcaagagtagaatcaaccacaactgccttagtaattatttaaagcatgtctgcctataagtaattggcattttatataatcaagaatctttgatataataatctctcaactatttgaaacacggctcacatgtattaattttttaagcaaatatatatataatatcagtgtatatgaaactgaattttggactttagaacagcttcttagaatcctgacttaaatgtctacagtaatagttggcttaaaaaaatttagcacactgtcactatgatgaaaaaaattactataaaatatttaaaaattttttccaccctaacatttagaatattctcacatttgtggttaaaacctattgtgattgttcttagaatttagataaaaaatgtcccagaaagattgaagagaagcactttagtcaatttttagttgttgaagcatgaagaaatggcatttcattgacattttaaaaattattcagattccctctttgaattcaagaatttcaaagatatcttattttaaaataccaaaataggaatagaatatgaaggggtggttatgagtaatatgatacaattttatgagatgatgagattcataacatactctctattgaatagaccggcagtctccctaaataacaggcctgcaatttatagcaaggttccacccagggcactgagctacggtgcaacccctggtgtgacccgggcttttacgaactttctaaacttcacgcttgaaaagttgacactgccgtccccagttagggcggaccacaaaccgctgcaaatgctcaaccgtctccacaccacacggcacaatatcggatcacaagagacaccctcgcacccgctgccacgaacaacgcgacacacaccagccgacagatcgtgcacctgcaagatctattttattcttctctctgt

SEQ ID NO: 516878 - DNA, 326 bp, Homo sapiens
atcaggtctgtaatcccacgcacttttagaggcgaggcgggcggatcacgaggtcaggagttcaaggccagcctggcaacacggggaaaccccgtctctactaaaaagacaaaaattagctgggtgtggtggcaggtgcctgtaatcccagttactcgggaggccgaggcctgcgaatggcttgaacccgggaggcagaggttgcagcgaaccaagatcatgccattgcactccagcctggggaacagagcgagactctgtctccaaaactaaaactaaaactaaaataaaataaaaaaagcttctttagacctgagcaagccagg

SEQ ID NO: 516879 - DNA, 1254 bp, Homo sapiens
  misc_feature (73)..(73): n is a, c, g, or t
  misc_feature (724)..(724): n is a, c, g, or t
  misc_feature (862)..(862): n is a, c, g, or t
  misc_feature (1106)..(1106): n is a, c, g, or t
tgggacagattcagttctccaggacatgagtctaacttcagcagctgttgaacaaattacgccccgccctgantttcagcgggcagcaggctgcagacacacgaattgccgtgacatcaccgcacagatctgcacgaccgcagccgacctgccagctaggcgatgagcagtcaaaaagcagacaaaaacaacaacgactagcaagacaccctaccagctacagacacctaacgctacgtgccgctgcgcctgacgggtacactcgacggcatgatcactgtagatcacacgctcgcccgtctgacaccgcgcgcaccgtcgaagctgactacaccgcgtgaacaagtctgagcagcacgctcggagcgtcggcggtcgtgtgtcggcgtgtttcgcggacgtggtcgtctccgcggtgcgcggcgcgtgcgcgcggccgtcgcggcgctgcgtctcgcgcccgggtgcgcgggcttgctgggcgtggtggggcgtggccagcgccagggacgccgcggcgggtggcgtcgtgctcgtctgtgtccgtcgtgcggctttcatactactcgtcgctccgcgtcgtcgagtctgctctcgtccgttgtggtcggcgcggcggagagtgtcgcgtgcgggcgcggcagctcgctgtcgtcgctcgcggtcgtctctctctctgttcgcgtcgtgagcgctgcgcggacgcacgcgcgtgcgcgtcgantcggtcctgcggccctgccttgtctgtactactgtgccgatggagtgctgatgtcgccgctatccgcttgctcgccgtcggtgtctcggcgtccgccggcacacaggagctacggcactggcgcacgcgactcagtcncgagaggctcagcgctggcactcgacagctgtccgacgacactcgggactctgtctcgcgagcctcgctgctcggagtgtcgcgagtcgatgatgggtggagcacgtagagttcacgctcaagacggtgagcctcggtgttcgagcgtcgacgcgatctgatgcgcgttgcctgttacgcgagtcgtccacaggcgctgttctgtcggtagcgagtgtgggcgcggtcaggcggtctgtccgtncgcagtgtgcgtcgtgactgtgtcgcctgcggcgcgcgtcgtcgatcgctctcggacttgatcgagctcgtcacctcctgctgatcacatgcgatgagcgcttcgctcggtggctcgctgcagtcgcggcctgtctgtcgtcgtctct

SEQ ID NO: 516880 - DNA, 356 bp, Homo sapiens
gaggctgctcttgaggatcccctgttggcgacgtagtcggagtactgcgctggaagcaggagagggagaatgatcgaccaggagcggctgcagaggaagcgcaaggcccactggccagtgtaggcgcgagtgggatgccgagaagaccgatgggatgttcacggatggcccagtccctgcccatgaaccatcccaccgctatgatgaccaggcctgggcccgcgcccccgaagccccccaactttttggggagttcctgtcccagcacaaagctgaggccagcagccggagaaggagaaagagcagtcggccccaggccaaaggcagcgccccggggcctacaggtgaccattgag

SEQ ID NO: 516881 - DNA, 200 bp, Homo sapiens
cagacatgaagtggatctgatagggaggctgcattgctatacagatgcaattgaagaatatttactcatgttccaccgagtggtgtgcgggggaggaagcactcttacttgtggcttataaagaatgtcacaaagctgtgatgaggtgcagaaccagttacatatctagtagcaagacagtagtacaacctgccggtggg

SEQ ID NO: 516882 - DNA, 140 bp, Homo sapiens
gggcagtgaatcaactcggtacccgtcttcatttccatgcggtgcactttatgcggacacttcctacaggtagcgttgaccctaattttggtcgtcgggtacgcaatcgccgccagttaaatagcttgcaaaatacgtgg

SEQ ID NO: 516883 - DNA, 317 bp, Homo sapiens
ccccccccccttgttgggggccccaataaacccccaggggggttttcaagggggggggcccaaatttaaaggaaaaacccccttccgggggaatttccccggggtaaaaaagggggggtttttttggggttgtcccgggattcttttaccccctttccctttcccccccaggtttttggggggggaaacccaattttttgaaaacccttttttgggggttttaaagtttcctttgtttcccccctttaatttggggggccaaattttaaccctttttttaagggtttgttccccttttttttttttttcccccccca

SEQ ID NO: 516884 - DNA, 100 bp, Homo sapiens
ggtagacgagaactggagaggcggagactgtggggcagatggggcggctgcctccctgcctcctgaggtgtgcggccgcgggtagctgtagtcctcgagc

SEQ ID NO: 516885 - DNA, 181 bp, Homo sapiens
ttacaggtctcaggagtgtgaggggagcacagtgggagaaacccaccagcatcaccacccgatgcttatctttagagtcaggatgctgggtccagatcctgattccatcttcattacaagattagaggagctagggtccaggccatggatccatgcttaattctgaactcacggaacgtct

SEQ ID NO: 516886 - DNA, 485 bp, Homo sapiens
agatacgtcagaatggctttatcagacacacacaagctctctgatagacccggattggaagagcagacacagtgtgcacactggtgctgtgtacctctcagcaccatgatgatcccaaagcaacaagtgtgtttagtacgcgtgttagaaagaaaaggctggacctggctgatgatgttgaattgactgctagttctgggtggtgtaaacaattcaagaatcgttattcatcacataatgggaaagtggtgagttggtgagtgctgatgtaaaggcagcggatgaatattgggaagctctagattagctgaatctggaggaaaagtcagttgccatgaacacaatatcgatatggatcaaacctttctattctggaaacagatgcctgataggactttgatccatgaggtagaccagagcaatgccaggcttcaagtcttttacggcctggatgaccgtcttgcttgggggcaagggtgcaggcc

SEQ ID NO: 516887 - DNA, 147 bp, Homo sapiens
acacgctttgcattacctccctaaaggaggaaacacccataaaatttaccttatggaatccaatatggagtgcaaatattaaatgaggagatgttttagaaagcaggaaaaatctacctacctatttcacaatcggggtaccgagct

SEQ ID NO: 516888 - DNA, 815 bp, Homo sapiens
  misc_feature (221)..(221): n is a, c, g, or t
  misc_feature (573)..(573): n is a, c, g, or t
ttgcacgaagcctataattcgcgttgtcattatgggttgccccccgtcgttgttccggaattaccagcgcggtagttgtttggtctgggccacgctctttgttagtctattagtcattagggagagagatattcggacgatgctctgtttcaaagaaaggaccccttctatgtttaggcgagcgacaccagccatcaattcactgaggcacagcctcattntgtggagtggcgtcgccgcaccaaaatttggggagacagagaagagcttgcccaacgcacacacgcacggtgggaatatctcacgtaggtgagaaaagaaggagcaatgtttttctgcggacaccacatgtgaactaagctcgcaggtactggcagttttctaccgcgcgcacaccgtggcaccgcttatgtgtggcgtcgtgcaacacaaatccacgcacgcggggagttatatcttccacggaggtacgcacgtgtgcacagcatctttcgtgtaccggtagatagaacacgttgggcgcgtgcaacacgcgcgtttcccttcgtgagaaaataaacaacacggtgctgntctaagtgccccactgttctagggagcaattaaaacaacttgtttcggggacaccgctcgactagaagatgtgtacgcgcccgggagctatgggcggccacaggaggtcccgctttatgacaagaatagatagaatcttttttaaaactaggggatggggatagcacaagcagataacgcaaaagtagtcaaataatgaccttgcaacaagcgacacccggcagtgtgagacaaatgaaaca

SEQ ID NO: 516889 - DNA, 317 bp, Homo sapiens
  misc_feature (162)..(162): n is a, c, g, or t
  misc_feature (247)..(247): n is a, c, g, or t
ttggcgccagtactcaggccagaagccccttgtgccctgctctcaggtaggcctggaaaagggcaacagtgcctctctgcagcatgaagcccccctgagcaaacagggcctagcaactcctgcccaggtagcggaatgtggcccaagcagaagggggaattngggaggtagcggggatcagcccctgtgctggggacccctagctctttgacacttcgggagcctgcatccccctaagccaagactntgcgcaggcagcacgtgcttaagccagacgagggacagcatgagagttcccctactttttcccccaggga

SEQ ID NO: 516890 - DNA, 163 bp, Homo sapiens
agtacgcaatgctttcttacagtaagcaagagctcctctgtaatccttctcgttgaaggaaatgcaagctttaccaagaagggctggaatattattcggagactgattgagtacaaaatgaaactgtgcgtcagcttgatccattttgtcaccctcaagtagg

SEQ ID NO: 516891 - DNA, 157 bp, Homo sapiens
tgatgttatccccaacacccaccggcacacagagtacaaccctgacacccatcaccaccaccactacggtgaccccaaccccaacacccaccgtgcacacagaccccaacaacgacacccatcagcaccaccaccaccgtgttgggcgataacatca

SEQ ID NO: 516892 - DNA, 886 bp, Homo sapiens
  misc_feature (1)..(1): n is a, c, g, or t
  misc_feature (332)..(332): n is a, c, g, or t
ncaagaacaaagaagaaagaaactagtaatacaagtacttttgtactaactcctttgtcgacgatggttaaggccggttggttctcgcccatacgtgttcatcggtgctcatcagacacttgcttgtgatatttgcgtcacgaggtttgtgaatccggataaactccgaaatgatgttgggataacaccgccggtttcacccggggacattcacttttcgcctagaccccgggaattccgcctggggccaaatttacttggaatgggcaggcataggcactgatgtttggggtttccgctcactaccacgctgatttttgaggcctcccccnaagtttcctcactagcattctcaggctagccctggaaaaactaactgggatatgaaacctcagccaagataaccccttgaggggttcaattcagcatataaatagttacttcagccagtgaacagtcccacgaggttgctctgtaatcctcatcgtagttctattacgaacatcatagacctaggagccgcccctaaagaaccctataaatttggggtctcgaagggaaggacagactgtatgaagccagctaacaatgataatatgagctttcaagtcagaagattttggcatgcccgtagctattttataccgggtggcaaaacctgggcatcccattagatgaatgggaaaatgtgtatagaccatcaaggcaacgaacccagtagaaaggggattatctacaggctaaagtgactccttagctttcctttgtctctgtcgtgtctctcttttatctatacctttaaacttctgggatccatgtacagcacgtgcagctttgttgcatgggtatacatgtatcccagcacttaaagtataatacaaaaaaa

SEQ ID NO: 516893 - DNA, 514 bp, Homo sapiens
  misc_feature (22)..(22): n is a, c, g, or t
  misc_feature (445)..(445): n is a, c, g, or t
  misc_feature (480)..(480): n is a, c, g, or t
  misc_feature (484)..(484): n is a, c, g, or t
  misc_feature (493)..(493): n is a, c, g, or t
tgcgtgcgggtgatcagaggancccctcaacgcttatacttcctcaacgcttatacttctcaacgctttatacttctcaacgctttatacttctcaacgctttatacttctcaacgctttatacttctcaacgctttatacttctcaacgctttatacttctcaacgctttatacttctcaacgctttatacttctcaacgctttatacttctcaacgctttatacttctcaacgctttatacttcctcaacgctttatacttcctcaacgctttatacttctcatttcatttcccggtatgaagtataaagcgttgaggaagtataaagcgttgaggaagtataaagcgttgaggaagtataaagcgttgaggaagtataaagcgttgagaagtataaagcgttgaggaagtataaagcgttgaggaagtataaagcgttgagnaagtataaagcgttgagaagtataaagcgtgagtngtcnagtagccgntgtctccccacagagagtaac

SEQ ID NO: 516894 - DNA, 295 bp, Homo sapiens
  misc_feature (11)..(11): n is a, c, g, or t
  misc_feature (21)..(21): n is a, c, g, or t
  misc_feature (71)..(71): n is a, c, g, or t
  misc_feature (114)..(114): n is a, c, g, or t
  misc_feature (117)..(117): n is a, c, g, or t
  misc_feature (185)..(185): n is a, c, g, or t
  misc_feature (255)..(256): n is a, c, g, or t
attgtgggagnatgtgtatcnaactgctatacctcctttttaatttcgccttgcctgctcattctactcancctccaatacagaaagccctcccttatttagttctgtttacgncanaaaggaactgggcgggtacggtggctcaccctgtaatcccagcacttagagaggctaaggtgggtggntcacctgaggtcgggagttcgagaccaaactcaggcctggcaacatggagaaccccatctctactaaaanncaaaattagctgggcgtggtggacacacctttaatccca

SEQ ID NO: 516895 - DNA, 285 bp, Homo sapiens
  misc_feature (88)..(88): n is a, c, g, or t
ccccccagggggtgtttccccccccccccccttttaggggggggggccccccccagggggggggggcccccccctttttggttttttnttttttgggggggggaaccccccccccccccccccccggggggggggggggggggggggggcccttttttaccccccccccccccccccccgggggggggcaccgggggggggggggtttttttccccccccccttttttttggggggggggggggtttcccccccccttttttaacctggttttttttttttttta

SEQ ID NO: 516896 - DNA, 565 bp, Homo sapiens
  misc_feature (28)..(29): n is a, c, g, or t
tcacgcttcaaccctcaacgctttatannctcaacgcttaactttctcaacgctttatacttctcaacgctttatacttctcaacgctttatacttctcaacgctttatacttctcaacgctttatacttctcaacgctttatacttctcaacgctttatacttctcaacgctttatacttctcaacgctttatacttctcaacgctttatacttctcaacgctttatacttctcaacgctttatacttcctcaacgctttatacttcctcaacgctttatacttctcaacgctttatacttcctcaacgctttatacttctcaacgctttatacttcctcaacgctttatacttctcaacgctttatacttcctcaacgctttatacttcctcaacgctttatacttcctcaacgctttatacttcctcaacgctttatactttctcaacgctttatactttctcaacgctttatacttcctcaacgctttatacttcataccggaaatgaaatgactcaacgcttctcatttcatttcccggtatgaagtataaagcgttgag

SEQ ID NO: 516897 - DNA, 177 bp, Homo sapiens
cgatctcatagacggatccccggtgttcatcggactactctgtttactaggacgttccccgtatgatctcataccaaacgttagccgggtctaactgtcactcagatgataatctgacgacaacctggtatcaacaaatgggtgacgttgtcacagtgatgaataactaccagtatg

SEQ ID NO: 516898 - DNA, 1582 bp, Homo sapiens
  misc_feature (398)..(398): n is a, c, g, or t
  misc_feature (1360)..(1360): n is a, c, g, or t
  misc_feature (1457)..(1457): n is a, c, g, or t
aatggatcgagtgtggcggattctgtgatgtatgctatgcagttttggggggccctatcgatgaccaggaggctcttggtcgcgtctcgagactccagtaggctcgaagatcggcctcagtaatctcagcatgtctatgtctgtgactcgacacgtatctcacagcaagtggatgtgagaagtcgctcgtacactacagatagttgaccgtagacgcatactattcctggacgtcaaggggactgcgatcttctcacatggtatctaagtgagcagagtgcttgctcacgatgcatattagtacttcctggcggtctgactgtacggcatgactcaattagcaatcacttgcacatcatgtccgaatcgagtacataatatactccatgagatgtggnctgactcacgtcaacttacataccatagggtacatctggcgcccctttgcaactatcgtgtagatcaccagaggtaatgtcacaatggggagaatgctctgggaaaagtacacgggcttgggcataggcgtcactgcactattgaggacaacatattaggccttataaatcctctatatgtctagtgagtactcaagacttacttctccacttctaacttaacggcgttgtatggggcctatttttggctacaagcgtcgtggttcgacctactgtatagcgcggtcagtcgtcctggacccgtttgtagcgacgtgtctttaaccttcatgaaacgcgacaagttggaacggtaatttagccttcttaggggcataatctcgccttcagggttcactggccccattagggccttgcaactaaaatacaggcggaaatgactaactcagggaagaattacccgttacccaattggaggcgagtaccgggccatttcttatcctactttaattacctcatatgccattaagtttaccaacgcaggattttcgcctatttagggtcgcacatatggaatgttttggcaagaaggggccatttgagtctcccttaatcagtatatgattattcagcatagcagtgtgtacaacaaatatggctaggagagggaggaaaaaaggcggcggtagtgaatgtcaccacacaggagcacttactatatattgacagaatggaaggaggagtatagccccaacggttatgagaggttatagtagtgaccgcagcggtgtggcacattttgacgggctgttatcagcaaacgaaccgcgttttatcaccacgcggtgatgttagtacccacagcccaccatgttgagcgaggtaaaatacgagggcgaagagtacatccatttaaagataagtaacccatttcgagacagcatgaggtgagtgggttgtanaaaccacactagtatgcaagcacgataggagatatactagtacgtagattagtagtagaaaaaaaaaatacggtgcgagaggtagggaagtagtagngagatgtaagtagtattgattttgttttatatattagtattattagtagtttaatagagagaagaggtaggaagtagagtggaagaagctgagaaaggtaaagagcaagaagaggagaaaaggag

SEQ ID NO: 516899 - DNA, 305 bp, Homo sapiens
  misc_feature (22)..(22): n is a, c, g, or t
  misc_feature (73)..(73): n is a, c, g, or t
tgcgtgcgggtgatcagaggancccctcaacgcttatacttcctcaacgcttatctatacttctcaacgcttnatacttctcaacgctttatacttctcaacgctttatacttctcaacgctttatacttctcaacgctttatacttcctcaacgctttatacttcctcaacgctttatacttcctcaacgctttatacttcctcaacgctttatactttctcaacgctttatactttctcaacgctttatacttccctcaacgcttctcatttcatttcccggtatgaagtataaagcgttgag

SEQ ID NO: 516900 - DNA, 778 bp, Homo sapiens
gcgcgcatgcggtgacttaggcctgtattccacagctctcagggacactagaaggcgggaggatagctggagccctggattccgacgatctggctgggataatatagcgtgaccccgtgctctcgcaaagaggccgagaggcaaaatgtcatcatatgcatttttttgtggcaaactggtcgggaggagcatatgaagaagcacccagagtgctgcaggcaccttctcagagtttctaagacgtgctcagagaggtggaagaccatgtctgctacagagacgggaaatttgacgatatggacaaagcgcggggaaggcccgtggatgttctgagaaatgcaccgaggctaatatccctgcgcaaaggggcgggacaaaaaagaagtgcaagggatcccaagtgcagccaagaggtctccctctcgggctgtgggtggctcttctgctctgagtatcgaccaaaaaatcaaaggagaacatcctggctgtccattgtgatgtgcgaagaaactgggcagagatgtggaataacactgtgcagattgacaagcagcccttatgaaaagaagggtggaagctgaagggaaaactacgaaaaggatatgccgtgcatatcgaggctaaggggaaaagcctgatgcagcaaaaaagggggtggtcagggtgaaaaagcagaaaagaggcaagcgggggagcattggacataacaggttaggggagaggcctgaagattatttaaaagatatgtgtggaaatggttacgcggtttttggttaac

SEQ ID NO: 516901 - DNA, 395 bp, Homo sapiens
  misc_feature (28)..(29): n is a, c, g, or t
  misc_feature (77)..(77): n is a, c, g, or t
  misc_feature (326)..(326): n is a, c, g, or t
  misc_feature (361)..(361): n is a, c, g, or t
  misc_feature (365)..(365): n is a, c, g, or t
  misc_feature (374)..(374): n is a, c, g, or t
tcacgcttcaaccctcaacgctttatannctcaacgcttaactttctcaacgctttatctatacttctcaacgcttnatacttctcaacgctttatacttctcaacgctttatacttacgctttatacttcctcaacgctttatacttctcaacgctttatacttctttcatttcccggtatgaagtataaagcgttgaggaagtataaagcgttgaggaagtataaagcgttgaggaagtataaagcgttgaggaagtataaagcgttgagaagtataaagcgttgaggaagtataaagcgttgaggaagtataaagcgttgagnaagtataaagcgttgagaagtataaagcgtgagtngtcnagtagccgntgtctccccacagagagtaac

SEQ ID NO: 516902 - DNA, 1202 bp, Homo sapiens
gctcttcaagatctctgagactgcgggtacccggaaagggagcatgagcaatgggcatggcagcccaggggaaaaggcaggcagtgcccgcagttttagccccaagagcccccattgaacttgtgagatgaagcatatcaccacctgcactgtgtggtgacctgtgtggcacggggatccccacggatcttggccaaggtcctggagcactccagaagatcggactgtttggggcacggagggagcaaggagcgacggctaggtctctgactctcgcctcttttcgtcacacccacacgcgttgtcaatgtgggaggggaatgcggaatgattcgcacgttgcaatgtgcgggggaaccttggcgtgggccttaggagccgagggtgccattgggcccacatgcacgaaagcggcttgggagaacctttgggagcggagaagaggcttgaggtaccaccaaggatagacgctcgggtaggcgtatgggcggacgaatggacacgaatggaaagggaaacttaggtgtgacttaaagcaggcccaagtttgggggatataggcagattcaggactgccaacatataaggtttaggattggtgcacaggcaaaggatggtcacacttctcgtttagtaaacaaccgaggcgcgacacagggtcccagctaaataggcccgccgcaccgtacagacagagccgcgcgaccaagcgggaggcacacacttttccgaaccacgcgactggccacaatcgagtgcaacattgcacggagaaacacacgaatagccgacaaacgcagttcaccacctggccaaagtgtggacagccatttccaaacgaccaccgagtaaccaggtattagcgcgcacacaccggctcctacacacccgcgggacaaacaagcgacccacactagcagagaggccgcgagaacaccagcgcgcggccacaacggccagcccgcggctcccccaagcgccgccagaagcagctacaaagcaccagcatagcttccgcaacataaggcgacggcagcacacagagacaaagagccagagtagagcgacacactgttagcaaaccatccaccaacgacaccgctcgcgccacacagccccatacaaggcagactcaccgagcaaggcgcagcaacagcacccacggtggccccacaacaccacgacgcatacacaggggcgcg

SEQ ID NO: 516903 - DNA, 518 bp, Homo sapiens
  misc_feature (28)..(29): n is a, c, g, or t
  misc_feature (449)..(449): n is a, c, g, or t
  misc_feature (484)..(484): n is a, c, g, or t
  misc_feature (488)..(488): n is a, c, g, or t
  misc_feature (497)..(497): n is a, c, g, or t
tcacgcttcaaccctcaacgctttatannctcaacgcttaactttctcaacgctttatacttctcaacgctttatacttctcaacgctttatacttctcaacgctttatacttctcaacgctttatacttctcaacgctttatacttctcaacgctttatacttctcaacgctttatacttctcaacgctttatacttctcaacgctttatacttctcaacgctttatacttctcaacgctttatacttcctcaacgctttatacttcctcaacgctttatacttctcatttcatttcccggtatgaagtataaagcgttgaggaagtataaagcgttgaggaagtataaagcgttgaggaagtataaagcgttgaggaagtataaagcgttgagaagtataaagcgttgaggaagtataaagcgttgaggaagtataaagcgttgagnaagtataaagcgttgagaagtataaagcgtgagtngtcnagtagccgntgtctccccacagagagtaac

SEQ ID NO: 516904 - DNA, 746 bp, Homo sapiens
  misc_feature (28)..(29): n is a, c, g, or t
  misc_feature (677)..(677): n is a, c, g, or t
  misc_feature (712)..(712): n is a, c, g, or t
  misc_feature (716)..(716): n is a, c, g, or t
  misc_feature (725)..(725): n is a, c, g, or t
tcacgcttcaaccctcaacgctttatannctcaacgcttaactttctcaacgctttatacttctcaacgctttatacttctcaacgctttatacttctcaacgctttatacttctcaacgctttatacttctcaacgctttatacttctcaacgctttatacttctcaacgctttatacttctcaacgctttatacttctcaacgctttatacttctcaacgctttatacttctcaacgctttatacttcctcaacgctttatacttcctcaacgctttatacttctcaacgctttatacttcctcaacgctttatacttctcaacgctttatacttcctcaacgctttatacttctcaacgctttatacttcctcaacgctttatacttcctcaacgctttatacttcctcaacgctttatacttcctcaacgctttatactttctcaacgctttatactttctcaacgctttatacttcctcaacgctttatacttcataccggaaatgaaatgatttcatttcccggtatgaagtataaagcgttgaggaagtataaagcgttgaggaagtataaagcgttgaggaagtataaagcgttgaggaagtataaagcgttgagaagtataaagcgttgaggaagtataaagcgttgaggaagtataaagcgttgagnaagtataaagcgttgagaagtataaagcgtgagtngtcnagtagccgntgtctccccacagagagtaac

SEQ ID NO: 516905 - DNA, 218 bp, Homo sapiens
  misc_feature (1)..(1): n is a, c, g, or t
ngctaggctggagtgcagtggcaagaacaaggctcactgcagaaaaaagaaaaaaaaaagggctcactggagccaacttccggggctcactccatcctctcacctcagcctcctgagtagccagaactacaggcctgcaacaccacgttggctaactttttttttttttttttttttttttttttttttttttttttttttttttttttttttttttt

SEQ ID NO: 516906 - DNA, 745 bp, Homo sapiens
  misc_feature (28)..(29): n is a, c, g, or t
  misc_feature (676)..(676): n is a, c, g, or t
  misc_feature (711)..(711): n is a, c, g, or t
  misc_feature (715)..(715): n is a, c, g, or t
  misc_feature (724)..(724): n is a, c, g, or t
tcacgcttcaaccctcaacgctttatannctcaacgcttaactttctcaacgctttatacttctcaacgctttatacttctcaacgctttatacttctcaacgctttatacttctcaacgctttatacttctcaacgctttatacttctcaacgctttatacttctcaacgctttatacttctcaacgctttatacttctcaacgctttatacttctcaacgctttatacttctcaacgctttatacttcctcaacgctttatacttcctcaacgctttatacttctcaacgctttatacttcctcaacgctttatacttctcaacgctttatacttcctcaacgctttatacttctcaacgctttatacttcctcaacgctttatacttcctcaacgctttatacttcctcaacgctttatacttcctcaacgctttatactttctcaacgctttatactttctcaacgctttatacttccgtattgaattcaagtataatattaagtatgcatgtttcatttcccggtatgaagtataaagcgttgaggaagtataaagcgttgaggaagtataaagcgttgaggaagtataaagcgttgaggaagtataaagcgttgagaagtataaagcgttgaggaagtataaagcgttgaggaagtataaagcgttgagnaagtataaagcgttgagaagtataaagcgtgagtngtcnagtagccgntgtctccccacagagagtaac

SEQ ID NO: 516907 - DNA, 530 bp, Homo sapiens
  misc_feature (28)..(29): n is a, c, g, or t
tcacgcttcaaccctcaacgctttatannctcaacgcttaactttctcaacgctttatacttctcaacgctttatacttctcaacgctttatacttctcaacgctttatacttctcaacgctttatacttctcaacgctttatacttctcaacgctttatacttctcaacgctttatacttctcaacgctttatacttctcaacgctttatacttctcaacgctttatacttctcaacgctttatacttcctcaacgctttatacttcctcaacgctttatacttctcaacgctttatacttcctcaacgctttatacttctcaacgctttatacttcctcaacgctttatacttctcaacgctttatacttcctcaacgctttatacttcctcaacgctttatacttcctcaacgctttatacttcctcaacgctttatactttctcaacgctttatactttctcaacgctttatacttccctcaacgcttctcatttcatttcccggtatgaagtataaagcgttgag

SEQ ID NO: 516908 - DNA, 427 bp, Homo sapiens
  misc_feature (28)..(29): n is a, c, g, or t
  misc_feature (347)..(347): n is a, c, g, or t
  misc_feature (396)..(396): n is a, c, g, or t
tcacgcttcaaccctcaacgctttatannctcaacgcttaactttctcaacgctttatacttctcaacgctttatacttctcaacgctttatacttctcaacgctttatacttctcaacgctttatacttctcaacgctttatacttctcaacgctttatacttctcaacgctttatacttctcaacgctttatacttctcaacgctttatacttctcaacgctttatacttctcaacgctttatacttcctcaacgctttatacttcctcaacgctttatacttctcaacgctttatacttcctcaacgctttatacttctcaacgctttatacttcattagctcnagaggtccatgcatacttaatattatactgatcaatacggaagtataangcgtgagggatcctctaatcacccagctcat

SEQ ID NO: 516909 - DNA, 1109 bp, Homo sapiens
gcgttgtcccctcagggttacctttggaatgatataacccctctttaagagattatgaaacgacttgtgaagtttcaagcctcaacatttcctgtcgtctcgttagcgattacactttccgggcagtcatgcaacgcaaattgttgggagcaggccccataggacttcaggaagcacattcgagaacgaactggcgggagacccgttgtgtaggaattctgaaagaaattcggggactacaaaggtacaagcgttggtggaaaggtaaaagaaacatcttgcatacctgacatatgttaaaaacgcggctcggcaatggacaacaaactgctcaccaaccaggataagaccttcacggaagattaccatcccatcgaaacacagatagcaagaaggaagtacaagccatgtattgtgtccagcaaatagaaacaaagacagctcgaagccccccacgacgtaaagcctctaagaaagggacacctcctcggtcaccttgtaatctcgttcaagaaacactttttcacgatccatggaagcttctcatcgctactatagttctcaatcggacctcaggcaaaatggcaagtacctgtgcatttggaagtttcaatggagaagtatccattcagctgaggctagcaagtaactcgactagtactgcgcagaagactgttgtcacgaactgtctctaaacctccattaggtcatatacgatcttcgggcaaaaaccagttgtcaagtttctcagagtgaatacctgacagaagcagtggaagtatccaattgagcttcactgggaattaggtataatactggcaacgactcgtaccgaattttttgtcggctcgaatgagtggaagcacggtgcgaccctgaagaccacagaattaaatacaatatcaatgactggctttgggaaaatctactgatgaaacttaagtactatcggtaaatctccggcagctttcaagctcatctgattatgcatagctttgcacttcagaataaagcttaattaagtacaaccaaccacctttccagccatagagattttaattagcccaactagaagcctagagtgtgtgcattcttaatgtgctgtgcca

SEQ ID NO: 516910 - DNA, 153 bp, Homo sapiens
acactgtctttggacgtgggggtttggacgacagtgtgcacacgccgtaacgaccagtactacatcatatgggaggtcgtaatggacgaagttgttgcgcaacaacttcgtccatcatgacttcaagaagtgtgtggagcttcggcgtgtgca

SEQ ID NO: 516911 - DNA, 567 bp, Homo sapiens
  misc_feature (28)..(29): n is a, c, g, or t
  misc_feature (498)..(498): n is a, c, g, or t
  misc_feature (533)..(533): n is a, c, g, or t
  misc_feature (537)..(537): n is a, c, g, or t
  misc_feature (546)..(546): n is a, c, g, or t
tcacgcttcaaccctcaacgctttatannctcaacgcttaactttctcaacgctttatacttctcaacgctttatacttctcaacgctttatacttctcaacgctttatacttctcaacgctttatacttctcaacgctttatacttctcaacgctttatacttctcaacgctttatacttctcaacgctttatacttctcaacgctttatacttctcaacgctttatacttctcaacgctttatacttcctcaacgctttatacttcctcaacgctttatacttctcaacgctttatacttcctcaacgctttatacttctcaacgctttatacttctttcatttcccggtatgaagtataaagcgttgaggaagtataaagcgttgaggaagtataaagcgttgaggaagtataaagcgttgaggaagtataaagcgttgagaagtataaagcgttgaggaagtataaagcgttgaggaagtataaagcgttgagnaagtataaagcgttgagaagtataaagcgtgagtngtcnagtagccgntgtctccccacagagagtaac

SEQ ID NO: 516912 - DNA, 437 bp, Homo sapiens
ctccattgcagtctgaaattaacacacaggcctattcctataactgtcttattttagtaaaacagaagtgggtggcagacacgatatgtcactgaaacacattaaactgagagacttgaggctactgtaagaacagccaaggcggttgatgctcaagtttccttcactaaaataatggtaacaattcacagagactgagcagtccaactcagctggagtgaatgaaaactacaagaaagtcaactgaactaattctccattaaatttagattaggcagccaggcgaggtggctcacgcctataatcccagcactttgggaggcagagacagtcggatcacgtggtacagaagttcaagaccagcctggccaacatggtgaaaccccatctctgctgaaactataaaaattagccaggcatggtggcacatgcccgta

SEQ ID NO: 516913 - DNA, 1503 bp, Homo sapiens
ttagttcgagacatcatcaatgcgatatgtcccgtcgatcaagcattatatctgcttcaactttgatattgcagattactctgatatactaaggtctaacacatcattggatcttgatcggttaacttgtacagaaaagtattgcgcacgtagtaagctcaactgtgcattttgagaccttttcaggagtgccgtactatttcttctgcgtcaatgcctgtgtataggaattcttttgacgacccttgattcacaagatcttgcttcacctatttcgccagaaataaataaagtcgaaggggagaactcccttattaatacatgcctagtttgccccccactcagtgtatacaatttggtctttggcgaggttatacgtttacgacttaaagaagtcgcctttggacaattacgctatacccaagggatcccttaaagtaggttaaggaaccagttacactaggttacaccccctagtgggagttttggagcccagaaatccatagtacttcgaaaggacgaatcggcgttattggaccctaaaatcgcaccactatagacaaattactttccaattgttgtgccatatgcccaaacgacctatatggtcgcaaacaacgaacaatggggcgaggttcagataggaacacatcgggaggatgcgagaccatgccagtcgaaccagtatgttccgctgcataaacagaagcaacaagcgcaattttcgcactcttgcccttcatacgagaaagggtgcacagtattccaaagagatagacaaagcctaccgcaaagatttcggatactatgtgcacattcagagaaacggacccctatgtaagtcagtgccccctctaacagttacattaaaatacaggggaatcgaagaaacaaccagttagaaaaaagactaatgaacttgttggaaaacgcccaatctattagcccccaagattaaagtaatacattaaggaccacaaaataataaagcgacgcacccaatagtcggcacccaaaacaattggcacaaatgaagaacagcgagcctagcgtttacatgtcacagctagttcacaaaataaaggagttatcgcggtcgcacacaaccattatgtaccagaggagtgggcattcagcgcacacaacattcgagcagaccagcgtgatccccaaagagacagacggtggctatacacagcctaagcgaggacacgaattacatagcacaagacaagtagacgggagtgtataccgacaactattataggaggcagctcacagttatgtgccgttcagaaaagactacaaacacttgtgcacatagagtctacgagcgtctaccataaaacatggagctcttggcacacaatcgtcagagagcaaaatgacaaatagatagtttatcgcgaaaaacgcagctcaacaaatactagggcccgcacataatacaagctaaacacttgtcgcgtagcgaaatcaagtttagtgaagcatactaacaca

SEQ ID NO: 516914 - DNA, 172 bp, Homo sapiens
gggccccccccccatccgggcccttttttgggaaattttttcccccacctttttgtattttcccccccttggggttttgggcctaaaggtggtgggggtaaggggggttttgccctttagctttttttttttttccccaaatgaaaatcccctgcaaggggcggttccccca

SEQ ID NO: 516915 - DNA, 102 bp, Homo sapiens
ctggcgtgtgctgtgctgtgcgtttgtgtgtgtgctgtatgctcgctgtgtgtgctgtgcacgtttgtgtagctcgtgttcatgcgtttgctgtgcggtacc

SEQ ID NO: 516916 - DNA, 348 bp, Homo sapiens
ggattttttttggggttaccggggaaaaaaagaccctttccaaggggttggggttggcccggggcccccctttgggttttaatccccttccccaaaccccgggtttccccccccgggacccccccgttcaaattggaaaatttttggggggggcccctggggttcctggttttaagggtttttttaaagggcccggtttatccccggttttgggttttttgcggtttttttttaaacccgaaggggtgggtcggggttgtttttttttttttatttgggtgggttttgtggttcccaaccccattttttttggggaatgaaaaaaaaaaagggtttattttctgggga

SEQ ID NO: 516917 - DNA, 358 bp, Homo sapiens
gtaggaggaattaatactaggacgataggcatgaaactgtgataatgctccacagatttcagagctattgaccagtagtatacccccggtcgtgtacccgcgatcaaatgtgcttatggtttaaacgtccgagactcgcgatctgtgtataagcctaaggtgttgggacagctcactgactgcaagacgtctctgtgatgtaattcttatacgaatgggggcctacaatcgcggagatcactactctgattgtcaacgtcaagcgagtcgcaaggtcgcccttgcgtactatgaatatactgggggaaagtattgtaagagttcgacacaattcagtcctgcctgttaaatcagagtc

SEQ ID NO: 516918 - DNA, 237 bp, Homo sapiens
caacccattggttgattttgctgctataatttggctcatactttgtctctcctcccatccgcggccgcgcagcagcgacaccaccaccaccaccaccacctcctcttcctccaagtagaagagattgaagcctccaatatcgataatgttgtcctggatgaagatcgttctggggctcgcgcctgcaaaacctctggagggaccagcgagaagaagaactgggcgagtattacatga

SEQ ID NO: 516919 - DNA, 572 bp, Homo sapiens
gtttatcgatgccaccagccaacgggagtagtggagtgtatcgaatgccacgtcacgtctctcttcataaaatgctatgacaatttgtggagatttcacattagcttctttgcaagaaccaggtcaggttcatctgtgtcttgccatttcattaggaacataaaatcaccacaggaatctgttgcgccaatgatctgatctggttcgagttcctgctctcaaagccccgagcgatatcatagctacgctctgctcttctctttagattagatgtgatcggcacggtatggagaagatggattgcctctcgtcacgttctgacttgtacccgggttgattatattcaccctccttcatcttcttatactatatcataaattcagaacttagctcagggcaagccaagttatgctcaggtcccgaagtatagtgctgctcagaaaagccttgccacttcagtagatattccatttgtcccgtaaccaagcgcctgtctagcatcttctccacaacataatcttcctcatcctctgaagaagaactgtcaggtgtccggtcggtttgctttccca

SEQ ID NO: 516920 - DNA, 198 bp, Homo sapiens
aatgcctactgccatcaaggccttgttttgcttttctttttggattgttcagaaaaatgtgtgtggcatgtgtaagaaaagtgtatatactattttatactacctttccaggttgccaaaaagttgcaagaaaaccaaggggcccaccgttttcccttaaaagtttacctttttaaaaaaaaggttggtttaggttca

SEQ ID NO: 516921 - DNA, 902 bp, Homo sapiens
ccaggctggtactggcccggagttaggcatggagcgcgtgcttcgcgtggcggtaggtctacggtggcctccatcctaacgggctgcgggcgtccggacggtggtcccaagcgctgttcacgctgctcttaagtgagccctggacgaggcgcggtgggccctcatagtccgcgccggcgccctcgctccacacacgcggcgtccggccctggtgctcccgaccgatagtccgcgtgggacttttaggggatttagttattaattagtacgttaaccacactagaaacggccccagaatgggctgaaacgtgtgctgctgaagctgccacctaaagctcccgagagaagcgccgttactcctccatggcttctcgccgaacgccctcgctgctggccttccagggcccctcggttgataaaaaggactaaatagtagacggccatttattaaggctaccttaagaaatggctaaatacatttacgaggtgtgaaacccgatgtatcactgcgcgctttaagccccgtcgatgagccggggactgcgcgcgttctggtgcgccccggtagcgtcctttctcgggtccgggatacgcacggtgccggggtacatgaacccttctgctcttctaaagttcatgacccttgtagagtgaacttccctgtgatcttgcactggtatagagcagaaggacgggaagaccgtgagtgtcgtacgcatatcccttgaagcaggggaatgcccgtatgtccaatagaaacgccgaagactggggacccaacgtgttaggaaggacgtcggagggatcctgcgataaagacctgacacaccgtgccttaaccgaggagaagcctataacgacaacccgagattctgagggacggactcaattcacatctgaag

SEQ ID NO: 516922 - DNA, 514 bp, Homo sapiens
ttatctctcctgtttcatcccgactatcctactagagtggaagctccttgagggcaatgagcaggattggagtcctcatctggcacagacgttggcagaataggtatctgaaactgttgactaaaggaaggcaggtatgatcaggccggtgagaggaagacatcagccagacccccacaacacacatcttctgaccctactactggcctgtgcaccaacgggctgagccatctgcttagagacaaagcaagagggtggagggatgccaggcagacgggagcctgctggacagggctctggcccggatatcctagttccagtttagctactacctcactgtgcagccttaggcaattccctctctgggcctcagcttctccatctgtaaaatggacctgagctgtcccttccagttctgaaaaactacaactgaccagccgagagaggtggggatagtctgaggctctaagggctgaccagaggacccactagagagaccatctatactctgact

SEQ ID NO: 516923 - DNA, 97 bp, Homo sapiens
  misc_feature (35)..(35): n is a, c, g, or t
  misc_feature (53)..(53): n is a, c, g, or t
gatcggattgattaaaaaacaaattctctggaatntgtgcgttcatgcttttncgtattctttatggcttttaaataaatatacaatggttaatagt

SEQ ID NO: 516924 - DNA, 1053 bp, Homo sapiens
gcccaacgtgaggaggaattgaattcgctgaagcagaagctggcgtcgtgctcttttggctgagcaggaaccgcagccaagaacggcatggttccggtggtcgccgctagcgccgaagtgctggatcgtgtcccgagatgagattctgcgctatagccggcagctaggtgctggcaccgagctgggtcgctgctcgagacagacagcgcactggggaccgcgtggcgttgctaatcgtggcgctagcggttgagagctcgtgctagtcccactatgcgcagtactttggcatgcggccgggcgtgggcccgccttggggccttttgttgggccctactgccgtgggtaggagatgagcaacctggcccgccaaggtgctgctttggcgagggcactgggcctggggccagggcccaaagggcccgtagtatcggtgcccggccggccattcgcttgtggccagaacttcacacgtccgggcactggggaaattcgcggtgcccagataagcactcaagcgcccgtttacggcctaggcacaattgcccattaagaagctgggttcccggccaggatagtgactcgtgggtcgggcttgaacttaggatccggaacgcaaacggtgccccagatgtcaggattaacactggggttaaactggacggccattggtgttcgccctggccggggctcagggccccttgggtggtcatggcccagctgccattggcggcatatcgaaggggcccaaattccacctgttctaaccaatccctgaacgggtgggccccttgtcgtaaattcggcatggcatttattgccccgtaatgcaaagcccaaagggggaagaccagcgggaaacaaaaactgggggcggaaacggggacgcagcttgctaccgggatgatcggagacaaccgggggcacctagtgggatgtcctgtgagcgccctgggcaaaggtgcgcgaaaaaccggccgggcagacgcaacgatcggcccctcgtatacagggggacacgaccaggaagcgcaacagggagtggcccgtaac

SEQ ID NO: 516925 - DNA, 1581 bp, Homo sapiens
  misc_feature (686)..(686): n is a, c, g, or t
ggggcctgcggcgctgctagcgctgctgtgcgtggcctgcagcgctgtgcgcctgtggcgcgcccaatacgaactgctacagcttcctgcagcttcccactgggactgagctgatgccgctctgatgtctggcctacctggcatcgctgctggacaagtacatgcgagcgagcactggtgccgagagctgtgggctacctggcagatcacgcctgcggctgcaccgcttgctgctgcgacatgcgaggccttctgccacctgcaactgcatgcgcctctgcctgaagccccgagcccggcctgccgggcctcgccaggcatatccacgatgcttgcgccctctttcggcgggcctgcttgctgccctgcgcgcaacttgccttcgatgctgcttgcaatgctagtggcctttgccatggccgtatccggcccaggtcccccaagacccaaagcctgacgaatggtttgccttgagcagaggacatattcacaaggctgacccgctgaagcccccttagcaaaggttcccattggcaagatataccggcattaaacgtgtccaatgtggccgcacattagattctccgcccaagatggaggccccatattccggtctcagtgtttgggcgtaccaagcgagccctaatttcacgtcagctttgggaagcagccattccgcttggatntgacctctgacacagttggactcagcaacacggagtcgcgaagagccatcttgggcccaattacatataattaaagagcgacgcggcctctttgtgcactttcgtgattaggcacgggacggggcaactaacgcacttttcaacaacggacagccccatgtggtgacaacacgccaacatggattccattacgtcttgcaaaaacagggcccctgtgctatcacatatcccggatgtgccacttgtagtgtccggcgctgacccaatttgcaaaaatgtggtgttgtactatgcaaacccgtggggcaaggcaatcacacgttccgatactccaagcaaggaaacaccattgtgcacagaccacatgcgcgcaaccaatatcacgacccggtagaatattctcttccaaaacaaggtcacacaactttatcaacaccagacagggtttagaacactacagtacaagagcccacataggagcacggaagggtagagttaccccccacgcgccgaaagacgacaccacaggggtaacccactctcacaccgagcagcatattgtgtcacacaccacttatccacacaattgcaagcaggcagtccagagtatattgttacacgaaacagttctacttgcgacagtgcgtcaacagtaccacgagctgtagcagaagagaaaccacacccaccaagggtattatcacgaagcagaaaaacccgaagtagaaacgtactatttcgcgcgaccagacgtaagaagcaagaaagctcaaaagacgacgcagtacgataaatcgctcccgacagcaaagcaaagataagaagccactagacttacgaagacagacacattagctcaacagaaaagaagaagagggaactctagtcgtacacc

SEQ ID NO: 516926 - DNA, 814 bp, Homo sapiens
  misc_feature (112)..(112): n is a, c, g, or t
  misc_feature (114)..(114): n is a, c, g, or t
  misc_feature (117)..(117): n is a, c, g, or t
  misc_feature (141)..(141): n is a, c, g, or t
  misc_feature (152)..(152): n is a, c, g, or t
  misc_feature (165)..(165): n is a, c, g, or t
  misc_feature (178)..(178): n is a, c, g, or t
  misc_feature (180)..(180): n is a, c, g, or t
  misc_feature (191)..(191): n is a, c, g, or t
  misc_feature (198)..(198): n is a, c, g, or t
  misc_feature (216)..(216): n is a, c, g, or t
  misc_feature (236)..(236): n is a, c, g, or t
  misc_feature (243)..(243): n is a, c, g, or t
  misc_feature (250)..(250): n is a, c, g, or t
  misc_feature (254)..(254): n is a, c, g, or t
  misc_feature (260)..(260): n is a, c, g, or t
  misc_feature (291)..(291): n is a, c, g, or t
  misc_feature (310)..(310): n is a, c, g, or t
  misc_feature (315)..(316): n is a, c, g, or t
  misc_feature (328)..(329): n is a, c, g, or t
  misc_feature (334)..(334): n is a, c, g, or t
  misc_feature (370)..(370): n is a, c, g, or t
  misc_feature (372)..(372): n is a, c, g, or t
  misc_feature (394)..(394): n is a, c, g, or t
  misc_feature (434)..(434): n is a, c, g, or t
  misc_feature (436)..(436): n is a, c, g, or t
  misc_feature (461)..(461): n is a, c, g, or t
  misc_feature (482)..(482): n is a, c, g, or t
  misc_feature (485)..(485): n is a, c, g, or t
  misc_feature (513)..(513): n is a, c, g, or t
  misc_feature (531)..(531): n is a, c, g, or t
  misc_feature (593)..(594): n is a, c, g, or t
  misc_feature (596)..(596): n is a, c, g, or t
  misc_feature (616)..(616): n is a, c, g, or t
  misc_feature (623)..(623): n is a, c, g, or t
  misc_feature (637)..(637): n is a, c, g, or t
  misc_feature (644)..(644): n is a, c, g, or t
  misc_feature (647)..(647): n is a, c, g, or t
  misc_feature (651)..(654): n is a, c, g, or t
  misc_feature (693)..(693): n is a, c, g, or t
  misc_feature (704)..(704): n is a, c, g, or t
  misc_feature (718)..(718): n is a, c, g, or t
  misc_feature (721)..(722): n is a, c, g, or t
  misc_feature (792)..(792): n is a, c, g, or t
tgagtaaaattcaccaaaattggcaaacattggtaacttttacttcaaagactgtaaataaacagatacatctttcaatgggctttcaagcaattttacaacaaagcatgtncntcntagccacatcactataagtcagcnatgtattcccnttaacgtttaccngttgtaatccccnanaggttttccanaacttcngcacattgtgcttttcanatcaaatttttattaaagancttagcnattttcnaaangaaaancctttttattggattttttccaattacaaangaaatttcattttacatcnaaaannagaaacaacacnnacaangggactgtacaaatttaggtcaaaaaaaaaaaaaangnatcttgtgactccaaaaaacancccttaccaaatttttaaagaaagcagaagtaacagcaananatgtaaaagaaaagaataaatgacnaaaagcaagacaaagcaaaanaantgtgcttcttttgcagactggggacaangaaatgtttagctacaantttcccaaacaaacaagaaacaaaaaccaaaaagaaaaaacacccccacaaaaaactgatgnntnattaacacacaccaagttcnaccaaancaaaaaataaactnaaaattnttnggtnnnnttattcatattttaaattcaacatgcttgctctatttanaaatacctgtngaagctcataatanatnncttctattttcagacatagcagagaaggcatattccattgttaactgtaaaagcaactcttaaatttaanattactgctataccacctatta

SEQ ID NO: 516927 - DNA, 666 bp, Homo sapiens
  misc_feature (46)..(46): n is a, c, g, or t
  misc_feature (51)..(51): n is a, c, g, or t
tgatagtgtctagagtgatccctcaaacgtatagaacatccctgtncagcntccccaggcagggcctgacgtgtcacgctgttcatggttctcccctgtgtgccttgaggctcactcatcttgatgactcagagacttgccagagaccctggactccccgtcccaaattccccgagcctggccccgatgattcttgcaatgttactctgttcatggtgcctctgccccatttccatctgtgccatatcaccaatagttgggggggggtcccccaaacaacagggactaacttgaactttgcaagactcttgaatttcctggctatatttattatctgtatggcactgatttgtactagagctgagcctgcagaagtcagttgaacccatcctctctatattcaggaggactacaggatgtaggaactcaaacgggatgtcgatctgtgggagtttgcaactttgcctagcagcacagacctgcctccttgggagaggcctctggggagggatgctaagccgatggatgtctgtgcagagacaagggactgtccttctcacctgagaggccattctcatcctgcctagtcctgtctgattcacatctgaccccagcttagcccagacagaaacatgtaaagcatgttctatacgttctgaggatcct

SEQ ID NO: 516928 - DNA, 157 bp, Homo sapiens
ccccggagttcacgtcacaggatctactaccgtactccccacaggcagttcgacaacggttcaaggacacggagcatctcaaacagtcttctgaaccctcccctgctgcctgtcttcatactctgttcaaaatcatcgacgaaccgctcaaccgagg

SEQ ID NO: 516929 - DNA, 236 bp, Homo sapiens
caagttcagatagtttgtcatttttttcttctgttttgtgcctactgaatatgacctggttttaagcagactagctgttttttctcgcttctcaactgagtgcgtttgttttgcattgcgtggtgagtttgcacattttagaccattccaatggtccagaagtgaaacctccacccacctggggcaccctagacccactccaatttgcttttaacaccatagtgccctgtcgacgc

SEQ ID NO: 516930 - DNA, 320 bp, Homo sapiens
accgtgggacatatgatcagcatattcttcctcttagtgaacccacagatccaacacaggagggacagggagagggcaggctctcaatacttatgtgtgaagtaatgtcctggacaggtcaccgtgatcaaggtggagtaggaaggcctgaacttaggcacaaaaagaaagaagtttcacagtgcagacttcggggaagcatgggcagtgtaatggaagataggggagtgagcgcagcagctacatagagtggcagggaaccccgagagacaccacatgaggtgaaggcctctcagatccatgcctgggatcccatggga

SEQ ID NO: 516931 - DNA, 828 bp, Homo sapiens
cgtagtcaagcctgtaatcccagtattggggaggccgaggttgcgggatcacaaggtcaagagacaagaccatcgtgccaaatggtgaaccctgtctctataaaatataaaaaattagtgcggcgcatagcgcgttgtatcccacagctcacttggggaggctgagcaggcaaactcgcttgacccttgggaaggcagaggtgtcgcaaataatgccaagggatcacggcatttgacctccaaggtgaaacaagagcaagactcgggcacaaaaaaatttattcatttactacactaaaatcgtggtcgcgccgggtggagagtgacccaccgcctggtaatccaaaggggcagggtaagatcacgacggtcaggaagatcgagacctatcgttgattaagcagggtgaaacccttattttttattaaaaataaaaaaaatatagcggggggtgagtgtggggcacctgtagtccaagctactgggaaggttgcggaggaagattgctatggacccggggagacgaccctggaagtgaagcggacattggcgccattgaattgggtaccttgggccgacccaaagcgaacgcctccgtccccaaacaacaccacacctaccaacaaacaacacctcttctgcgcgccgcccccccccgcaaaaagcctctaccacccaccgcgtggggcgcccgccccccactagacagcccccaccgccacaccccgtcccacagacaccggccgcacacagtgtgggctcccccaaaaaacgcccggcccgcggccgcaacacccgcgtcgtccgccacgcgccccgggccagcga

SEQ ID NO: 516932 - DNA, 281 bp, Homo sapiens
tgctccttcataccccaactctttctcttcaagattcttgcttcctcgaaatattgcgaattcaatccctctcgacttcgcattagagataaaccgctcaaatcctgggatctgaacacaaagcgctttgatggcttcggcaggcgttcgcacggccagtcgaaaagatcgtccgaattgccgaagttgcccatacagtaagatcgtagtcattaggttgatattcgatagcgagtgcggccattgcttttctccagatgtaaaaaagccgcctcttgggc

SEQ ID NO: 516933 - DNA, 116 bp, Homo sapiens
tgagtgaagtattgcttttcgtgtgttctagagtatggtttatttagatgttgacaaaactcctaattaaactaaatcaaattaacttagtttaaaattagtttaactcattgaat

SEQ ID NO: 516934 - DNA, 735 bp, Homo sapiens
caaccggccacaagccacagcctgtgaagcaggacactcccgcaggctcctagagaggggctacaagcacccggtcctcctactacaccctctggcggctggacccaggatgacgaaggcctctagactggccggatgaaccagcacccggctgtgctcgaggaaggggtcctggatccccagtccacccaatggtgccccacgttccgtctccccacggtatatgctggcccccacagaggtcccatggccactgcaggtcccggatgattgcgggggcccaattcggaccattgtggggagggaccccgccaggatgccccctcctgaacccagaaggatctgtatgaaccccactcatgggggccaggtcttgagcatggcccctggcctcacctctgtggaaatccattcccattccgaatggctgcctaccaaccaagccccaaaaagccctggacattctatgatcccagccaggccaccatgagtttgacattcatctccaggaactcgaatgaggaagctccgccccgggaaggagagaatccccccagatggcttcatggccccccaagcctggaaggtcctgaccagattattaccggtcccttcggagaagaactaagacccttggctcccgagtttcttttctgaagatgctctttgattaccctttctattttttatgattagatgctttgtattaaattgcttctccatgaagccttttta

SEQ ID NO: 516935 - DNA, 163 bp, Homo sapiens
gggggatcccccccccggggtttgggtttttttcccccggaaggggttcaagacccctccccaaaaccccccccggcccggggggccaaggcccccggttggattttttaattttggggccggttttccggggggggaaaaaaaaaaaaaccccccgggtcca

SEQ ID NO: 516936 - DNA, 315 bp, Homo sapiens
  misc_feature (155)..(155): n is a, c, g, or t
  misc_feature (167)..(167): n is a, c, g, or t
  misc_feature (310)..(310): n is a, c, g, or t
aggccggattgacgataccggccctggtcatggcgacgaagctggatggcggcaccggctgccattcggcgttctcgcggtcaaagggctcggagacgatgcagcggcccgtgccttcgcgaaacgacgaggtgtagagcgtcggcgccgtcgcntcggtggcgtangcaccgcaaacagcgtctcgccgtcggaaaaagcggcggtgagtttcagcgccgggtcgatgccggcatgccgcgccgccgagaccacccggggcggttcgcgcgtttcgagccccctttgcgggtgcgttcgtccagccctncgttc

SEQ ID NO: 516937 - DNA, 130 bp, Homo sapiens
aattctgcaccacagctgcacacaccacagctaaaccatacacatcacatacctgtacacacaataccatacaccacacatgtgagttcacctcacttttccttagtccacaacagcttctaaaccaaca

SEQ ID NO: 516938 - DNA, 371 bp, Homo sapiens
aggtccgtgggtcctgctgtactttgggaaagaccactctaggtaaaggaaatcactgaagatttgaatgcatgagacaaacatcatctgagccaggcatagtggctcacacccgtaacccagcactttgagaggccgaggcaggtggattgcttgaggccaggagttcaagaccagcctagccaacatggcaaaactccatctctactaaaaatacaaaaattagctgggcgtggtggcatgcgcctgtagtcccaggtactcgggaggctgaggcacaagaatcgattgaaccagagaggcagaggttgcagtgagctgagatggtgccactgtactccagcctgggcaacaaagcaagactctgtctc

SEQ ID NO: 516939 - DNA, 386 bp, Homo sapiens
ccaattgggattggggggcccccctccccggggtgaaaaaaggttttaacccccccccctttgggggggggttccttggcggggataaaaattattggttttgggcccccttggaaaggcccatggtttaactggctccctaaaaaggggcagggcccccccattttcccgggaagggccttttggaaatttccttcccccaaaaagcccttaaagggaccaaacccactttcctaaaagggggggggggggggggggggggttgttttttttttttttttccagaacccaaaaaaacccccccaaaaattcaaagcccctgcaaaattttttaaaaagcccgggtttgggaaattaaatcccaaaaaaccctttttaagggggta

SEQ ID NO: 516940 - DNA, 2073 bp, Homo sapiens
cggtcggcagagcggccgacagtggtgacgtgaaccccgcttggcatcatcctgctaagcaccaacatacaggaaccagctcatgatctcaggatgtatggaaaaataatctttgtattactattgtcagcaattgtgagcatatcagcattaagtaccactgaggtggcaatgcacacttcaacctcttcttcagtcacaaagagttacatctcatcacagacaaatgatacgcacaaacgggacacatatgcagccactcctagagctcatgaagtttcagaaatttctgttagaactgtttaccctccagaagaggaaaccggagaaagggtacaacttgcccatcatttctctgaaccagagataacactcattatttttggggtgatggctggtgttattggaacgatcctcttaatttcttacggtattcgccgactgataaagaaaagcccatctgatgtaaaacctctcccctcacctgacacagacgtgcctttaagttctgttgaaatagaaaatccagagacaagtgatcaatgagaatctgttcaccaaaccaaatgtggaaagaacacaaagaagacataagacttcagtcaagtgaaaaattaacatgtggactggacactccaataaattatatacctgcctaagttgtacaatttcagaatgcaattttcattataatgagttccagtgactcaatgatggggaaaaaaatctctgctcattaatatttcaagataaagaacaaatgtttccttgaatgcttgcttttgtgtgttagcataatttttagaattgtttgagaattctgatccaaaactttagttgaattcatctacgtttgtttaatattaacttaacctattctattgtattataatgatgattctgtcaaatgaaaggcttgaaatacctagatgaagtttagattttcttcctattgtaaacttttgagtctggtttcattgttttaaataaattaaggggacactaaagtcctatcattcatttccttcattgctgaacaggcaagatataatattacatgaatgattactatattttgttcacactaataaagcttatgctcagaaatgccatacacacacacaaacacacacatttatcatttaatgcataaatcaacacaaaaggttttcccattaatatgaaatattacatatatataagtgccatatttaaaataatttgtctaacagtagaactatgtcggagcactcactgaagcttgcattccactgaaagagttatttgtgtaagtagagtatccggagaaggaaaagaacttacgacctttctttataacagaaactcaactctaaattcaacaagatgtgcaaaccggacatgcaggtgaatattttaataggttactataaggttctcaattaaattctttaatctgtccagtcccagtttctcttattaataaaactttggaaattgctttaaaccatttaaaggaaatttctagatatagaaactaaggactgtgactatacagctgtcactcatttgtagtaaaacttaaaaagcaaaaacaaaaaacaaaaaagaccttcctgtgatactttatttccgaactaataaaaatctatatgactttttattattgtgtgataaccaagtaaatgttttctattttgcatattttcaggcatggtaacagaaatttaccttttaataaattaaaacaactcccaaacaaacacaacaacaaacaaacaaacgaacaaaacaccaatcatggaagcaacatcagcccatgaaaaacacactcaagacacagctacatggcagacgcgggcccagcaggagaaaagcaacacgagacaaaaccaacgacatcacccaagcgaaaaaaccggagcaaacaagaaacacatgcacgcgagacaacaccacaacacaaacacactccccggcgcgcaaccacgcaaggcgagagaaagaaacacagaaaggaagatcacagagcccacacgcgagacagctcacaagcagggaacacgacgcgccgcgaaatgaaattctcaccgg

SEQ ID NO: 516941 - DNA, 787 bp, Homo sapiens
ggccgtgatcgtatagtggttagtactctgcgttgtttgcactaacttcaggaaccagctcatgatctcaggatgtatggaaaaataatctttgtattactattgtcagcaattgtgagcatatcagcattaagtaccactgaggtggcaatgcacacttcaacctcttcttcagtcacaaagagttacatctcatcacagacaaatgatacgcacaaacgggacacatatgcagccactcctagagctcatgaagtttcagaaatttctgttagaactgtttaccctccagaagaggaaaccggagaaagggtacaacttgcccatcatttctctgaaccagagataacactcattatttttggggtgatggctggtgttattggaacgatcctcttaatttcttacggtattcgccgactgataaagaaaagcccatctgatgtaaaacctctcccctcacctgacacagacgtgcctttaagttctgttgaaatagaaaatccagagacaagtgatcaatgagaatctgttcaccaaaccaaatgtggaaagaacacaaagaagacataagacttcagtcaagtgaaaaattaacatgtggactggacactccaataaattatatacctgcctaagttgtacaatttcagaatgcaattttcattataatgagttccagtgactcaatgatggggaaaaaaatctctgctcattaatatttcaagataagcaaccaatgttcttgaatgtgctgggtgtacgcaatttcgaatgggggccatcg

SEQ ID NO: 516942 - DNA, 1761 bp, Homo sapiens
caaaatctctgcaaaggggatttcaaccaaaagaaaaaaaattttagaaaaaaatatttttaagctgaagcattttactttttactgtcttaagactagaaaattgtgttattaatattttatggtatttcttcatagaaaagcccatctgatgtaaaacctctcccctcacctgacacagacgtgcctttaagttctgttgaaatagaaaatccagagacaagtgatcaatgagaatctgttcaccaaaccaaatgtggaaagaacacaaagaagacataagacttcagtcaagtgaaaaattaacatgtggactggacactccaataaattatatacctgcctaagttgtacaatttcagaatgcaattttcattataatgagttccagtgactcaatgatggggaaaaaaatctctgctcattaatatttcaagataaagaacaaatgtttccttgaatgcttgcttttgtgtgttagcataatttttagaattgtttgagaattctgatccaaaactttagttgaattcatctacgtttgtttaatattaacttaacctattctattgtattataatgatgattctgtcaaatgaaaggcttgaaatacctagatgaagtttagattttcttcctattgtaaacttttgagtctggtttcattgttttaaataaattaaggggacactaaagtcctatcattcatttccttcattgctgaacaggcaagatataatattacatgaatgattactatattttgttcacactaataaagcttatgctcagaaatgccatacacacacacaaacacacacatttatcatttaatgcataaatcaacacaaaaggttttcccattaatatgaaatattacatatatataagtgccatatttaaaataatttgtctaacagtagaactatgtcggagcactcactgaagcttgcattccactgaaagagttatttgtgtaagtagagtatccggagaaggaaaagaacttacgacctttctttataacagaaactcaactctaaattcaacaagatgtgcaaaccggacatgcaggtgaatattttaataggttactataaggttctcaattaaattctttaatctgtccagtcccagtttctcttattaataaaactttggaaattgctttaaaccatttaaaggaaatttctagatatagaaactaaggactgtgactatacagctgtcactcatttgtagtaaaacttaaaaagcaaaaacaaaaaacaaaaaagaccttcctgtgatactttatttccgaactaataaaaatctatatgactttttattattgtgtgataaccaagtaaatgttttctattttgcatattttcaggcatggtaacagaaatttaccttttaataaattaaaacaactcccaaacaaacacaacaacaaacaaacaaacgaacaaaacaccaatcatggaagcaacatcagcccatgaaaaacacactcaagacacagctacatggcagacgcgggcccagcaggagaaaagcaacacgagacaaaaccaacgacatcacccaagcgaaaaaaccggagcaaacaagaaacacatgcacgcgagacaacaccacaacacaaacacactccccggcgcgcaaccacgcaaggcgagagaaagaaacacagaaaggaagatcacagagcccacacgcgagacagctcacaagcagggaacacgacgcgccgcgaaatgaaattctcaccgg

SEQ ID NO: 516943 - DNA, 550 bp, Homo sapiens
agccaccaagcccaggaatttcttttttgatcgttgttttatgagatggaatttcgctcttgtcgctcaggccggagtgcaatagcacgatctcggctcacgtgcaacctccgcctcccaggttcaagtaattctcctgcctcagccttccaagtagctgggacagccagtgtgtgccaccatgccttggctattttccttgtatttttagtagagatggggtttcgccatctcgtccacggctggtcttgaagtcctgacgctcaccgtgatccatctgtctcagcctcccaaagtgctgggattacaggtgtgagtcactgtgcccagcctattatttctccaactatcttttcttacacttgacgtcacgtgctctcaaatccaacataaatccactggacactttatcatggaaacatcagctattactctgtgatcgataagcaagtccctgacccgataaccgtgacaaaaacgtagagcaaacctgaagatgcacgacggctagacatctgacagacaccaggagggacaccgcagcacacaa

SEQ ID NO: 516944 - DNA, 291 bp, Homo sapiens
accatctacccaaattagtataggcgatagaacattgaaacctggcgcatacatatgtaccgcaggggaaatgatacaaattataaccatagctagtgatatagcatggactaacccctataccttctgcttcatgaatttactagaacttactttgcataggagagccaatgtctaatagcccccgaaatccagattagctatcctcagatacagcttaaagagcacatctttcgtatttagcataatagtgcgcatatttatcggttgaggctacaaacctaccgtgcc

SEQ ID NO: 516945 - DNA, 162 bp, Homo sapiens
tgtccgtccctaatcccactcgaagcagccctgagaaacatcgcccattatctctccatatcacccgatggcttagcttggactcagaggcctgacattcctgtcttcttatgttaataagaaaaataaaacaaaatagtggtaaagtgttggggtggcgaa

SEQ ID NO: 516946 - DNA, 2052 bp, Homo sapiens
ggccgtgatcgtatagtggttagtactctgcgttgtttgcactaacttcaggaaccagctcatgatctcaggatgtatggaaaaataatctttgtattactattgtcagcaattgtgagcatatcagcattaagtaccactgaggtggcaatgcacacttcaacctcttcttcagtcacaaagagttacatctcatcacagacaaatgatacgcacaaacgggacacatatgcagccactcctagagctcatgaagtttcagaaatttctgttagaactgtttaccctccagaagaggaaaccggagaaagggtacaacttgcccatcatttctctgaaccagagataacactcattatttttggggtgatggctggtgttattggaacgatcctcttaatttcttacggtattcgccgactgataaagaaaagcccatctgatgtaaaacctctcccctcacctgacacagacgtgcctttaagttctgttgaaatagaaaatccagagacaagtgatcaatgagaatctgttcaccaaaccaaatgtggaaagaacacaaagaagacataagacttcagtcaagtgaaaaattaacatgtggactggacactccaataaattatatacctgcctaagttgtacaatttcagaatgcaattttcattataatgagttccagtgactcaatgatggggaaaaaaatctctgctcattaatatttcaagataaagaacaaatgtttccttgaatgcttgcttttgtgtgttagcataatttttagaattgtttgagaattctgatccaaaactttagttgaattcatctacgtttgtttaatattaacttaacctattctattgtattataatgatgattctgtcaaatgaaaggcttgaaatacctagatgaagtttagattttcttcctattgtaaacttttgagtctggtttcattgttttaaataaattaaggggacactaaagtcctatcattcatttccttcattgctgaacaggcaagatataatattacatgaatgattactatattttgttcacactaataaagcttatgctcagaaatgccatacacacacacaaacacacacatttatcatttaatgcataaatcaacacaaaaggttttcccattaatatgaaatattacatatatataagtgccatatttaaaataatttgtctaacagtagaactatgtcggagcactcactgaagcttgcattccactgaaagagttatttgtgtaagtagagtatccggagaaggaaaagaacttacgacctttctttataacagaaactcaactctaaattcaacaagatgtgcaaaccggacatgcaggtgaatattttaataggttactataaggttctcaattaaattctttaatctgtccagtcccagtttctcttattaataaaactttggaaattgctttaaaccatttaaaggaaatttctagatatagaaactaaggactgtgactatacagctgtcactcatttgtagtaaaacttaaaaagcaaaaacaaaaaacaaaaaagaccttcctgtgatactttatttccgaactaataaaaatctatatgactttttattattgtgtgataaccaagtaaatgttttctattttgcatattttcaggcatggtaacagaaatttaccttttaataaattaaaacaactcccaaacaaacacaacaacaaacaaacaaacgaacaaaacaccaatcatggaagcaacatcagcccatgaaaaacacactcaagacacagctacatggcagacgcgggcccagcaggagaaaagcaacacgagacaaaaccaacgacatcacccaagcgaaaaaaccggagcaaacaagaaacacatgcacgcgagacaacaccacaacacaaacacactccccggcgcgcaaccacgcaaggcgagagaaagaaacacagaaaggaagatcacagagcccacacgcgagacagctcacaagcagggaacacgacgcgccgcgaaatgaaattctcaccgg

SEQ ID NO: 516947 - DNA, 2031 bp, Homo sapiens
tagtgttgcgcactaccttcggagagcccagatcatgatctcagggagttgtctggacagagaactaatctgtgtattactatgtcagcaattgtgagcatatcagcattaagtaccactgaggtggcaatgcacacttcaacctcttcttcagtcacaaagagttacatctcatcacagacaaatgatacgcacaaacgggacacatatgcagccactcctagagctcatgaagtttcagaaatttctgttagaactgtttaccctccagaagaggaaaccggagaaagggtacaacttgcccatcatttctctgaaccagagataacactcattatttttggggtgatggctggtgttattggaacgatcctcttaatttcttacggtattcgccgactgataaagaaaagcccatctgatgtaaaacctctcccctcacctgacacagacgtgcctttaagttctgttgaaatagaaaatccagagacaagtgatcaatgagaatctgttcaccaaaccaaatgtggaaagaacacaaagaagacataagacttcagtcaagtgaaaaattaacatgtggactggacactccaataaattatatacctgcctaagttgtacaatttcagaatgcaattttcattataatgagttccagtgactcaatgatggggaaaaaaatctctgctcattaatatttcaagataaagaacaaatgtttccttgaatgcttgcttttgtgtgttagcataatttttagaattgtttgagaattctgatccaaaactttagttgaattcatctacgtttgtttaatattaacttaacctattctattgtattataatgatgattctgtcaaatgaaaggcttgaaatacctagatgaagtttagattttcttcctattgtaaacttttgagtctggtttcattgttttaaataaattaaggggacactaaagtcctatcattcatttccttcattgctgaacaggcaagatataatattacatgaatgattactatattttgttcacactaataaagcttatgctcagaaatgccatacacacacacaaacacacacatttatcatttaatgcataaatcaacacaaaaggttttcccattaatatgaaatattacatatatataagtgccatatttaaaataatttgtctaacagtagaactatgtcggagcactcactgaagcttgcattccactgaaagagttatttgtgtaagtagagtatccggagaaggaaaagaacttacgacctttctttataacagaaactcaactctaaattcaacaagatgtgcaaaccggacatgcaggtgaatattttaataggttactataaggttctcaattaaattctttaatctgtccagtcccagtttctcttattaataaaactttggaaattgctttaaaccatttaaaggaaatttctagatatagaaactaaggactgtgactatacagctgtcactcatttgtagtaaaacttaaaaagcaaaaacaaaaaacaaaaaagaccttcctgtgatactttatttccgaactaataaaaatctatatgactttttattattgtgtgataaccaagtaaatgttttctattttgcatattttcaggcatggtaacagaaatttaccttttaataaattaaaacaactcccaaacaaacacaacaacaaacaaacaaacgaacaaaacaccaatcatggaagcaacatcagcccatgaaaaacacactcaagacacagctacatggcagacgcgggcccagcaggagaaaagcaacacgagacaaaaccaacgacatcacccaagcgaaaaaaccggagcaaacaagaaacacatgcacgcgagacaacaccacaacacaaacacactccccggcgcgcaaccacgcaaggcgagagaaagaaacacagaaaggaagatcacagagcccacacgcgagacagctcacaagcagggaacacgacgcgccgcgaaatgaaattctcaccgg

SEQ ID NO: 516948 - DNA, 1857 bp, Homo sapiens
ggccgtgatcgtatagtggttagtactctgcgttgtttgcactaacttcaggaaccagctcatgatctcaggatgtatggaaaaataatctttgtattactattgtcaggagaaagggtacaacttgcccatcatttctctgaaccagagataacactcattatttttggggtgatggctggtgttattggaacgatcctcttaatttcttacggtattcgccgactgataaagaaaagcccatctgatgtaaaacctctcccctcacctgacacagacgtgcctttaagttctgttgaaatagaaaatccagagacaagtgatcaatgagaatctgttcaccaaaccaaatgtggaaagaacacaaagaagacataagacttcagtcaagtgaaaaattaacatgtggactggacactccaataaattatatacctgcctaagttgtacaatttcagaatgcaattttcattataatgagttccagtgactcaatgatggggaaaaaaatctctgctcattaatatttcaagataaagaacaaatgtttccttgaatgcttgcttttgtgtgttagcataatttttagaattgtttgagaattctgatccaaaactttagttgaattcatctacgtttgtttaatattaacttaacctattctattgtattataatgatgattctgtcaaatgaaaggcttgaaatacctagatgaagtttagattttcttcctattgtaaacttttgagtctggtttcattgttttaaataaattaaggggacactaaagtcctatcattcatttccttcattgctgaacaggcaagatataatattacatgaatgattactatattttgttcacactaataaagcttatgctcagaaatgccatacacacacacaaacacacacatttatcatttaatgcataaatcaacacaaaaggttttcccattaatatgaaatattacatatatataagtgccatatttaaaataatttgtctaacagtagaactatgtcggagcactcactgaagcttgcattccactgaaagagttatttgtgtaagtagagtatccggagaaggaaaagaacttacgacctttctttataacagaaactcaactctaaattcaacaagatgtgcaaaccggacatgcaggtgaatattttaataggttactataaggttctcaattaaattctttaatctgtccagtcccagtttctcttattaataaaactttggaaattgctttaaaccatttaaaggaaatttctagatatagaaactaaggactgtgactatacagctgtcactcatttgtagtaaaacttaaaaagcaaaaacaaaaaacaaaaaagaccttcctgtgatactttatttccgaactaataaaaatctatatgactttttattattgtgtgataaccaagtaaatgttttctattttgcatattttcaggcatggtaacagaaatttaccttttaataaattaaaacaactcccaaacaaacacaacaacaaacaaacaaacgaacaaaacaccaatcatggaagcaacatcagcccatgaaaaacacactcaagacacagctacatggcagacgcgggcccagcaggagaaaagcaacacgagacaaaaccaacgacatcacccaagcgaaaaaaccggagcaaacaagaaacacatgcacgcgagacaacaccacaacacaaacacactccccggcgcgcaaccacgcaaggcgagagaaagaaacacagaaaggaagatcacagagcccacacgcgagacagctcacaagcagggaacacgacgcgccgcgaaatgaaattctcaccgg

SEQ ID NO: 516949 - DNA, 127 bp, Homo sapiens
tatactgaggaaagatgtataacggggagtcgtgtaatagtggggatagtgttataagggggagccgtctataactggggaacgtgttataacggggagatcgtctataactggggatggtgttata

SEQ ID NO: 516950 - DNA, 1046 bp, Homo sapiens
gtgaagatcctggtgtcgccatgggccgccgccccgtgcgttgttaccggtattgtaagaacaagccgtatccaaagtctcgcttctgccgaggtgtgcctgtatgccaagattcgtatttttagacctggggcggcacaaacaggcaaaagtggatgagtttccggcatttgtggccacgatggtgtcagatgaattatggagctagctgtcctctgaagcctctgtgagagctggcccgaattgtgtgccaataagtacatggtaacaaagtcgtggcgaacagcatgtgcttctcgagtactcctggtgtgtcggcatccatctcccttccacagtcatctctgcatctacagcacatgatgttgtcctgtgctggcggcatgacagggtccagagtcgatggcatgcgaggtgccttttgtggaagcctccatggtggcactgtggtcctaggggattccgacgatgtgtggcccaagttgatcactagtctccactctcgtcgaccaagtcgttgcagataacaaggtagcatgtgattgacggccctgcgcagggctcgaagttccaagtttcctgggtgcagccgaggaagatccgaacaagtctcaagagaacgtggcgtgcttcaccaatgttcaatgctgatgaatttgaagacatggttggctgaaatagcgggtcatccgcagatgggctgtggggtcaagtagcatccccagatctgtggcctctggacaagtggcgggcctggactcattgatgggcttccaaatgttgcttgtccccccttcttaatgactcgaccaataaattctgacttccgtgtccagaaggagttgactttcctaattccatttgacaactgttcagacgaccggcatatgaatgccgtcccgcgacgcaaaaggaggtggcgatcaaggtagcgcaggaagcttgcactgcctaggggaatgattgctcacgcgaccgacggggcaaaacttgtcacaagctggagtggcccaatgtggacgaggatggtggcagacaggggagat

SEQ ID NO: 516951 - DNA, 1953 bp, Homo sapiens
ggccgtgatcgtatagtggttagtactctgcgttgtttgcactaacttcaggaaccagctcatgatctcaggatgtatggaaaaataatctttgtattactattgtcagatacgcacaaacgggacacatatgcagccactcctagagctcatgaagtttcagaaatttctgttagaactgtttaccctccagaagaggaaaccggagaaagggtacaacttgcccatcatttctctgaaccagagataacactcattatttttggggtgatggctggtgttattggaacgatcctcttaatttcttacggtattcgccgactgataaagaaaagcccatctgatgtaaaacctctcccctcacctgacacagacgtgcctttaagttctgttgaaatagaaaatccagagacaagtgatcaatgagaatctgttcaccaaaccaaatgtggaaagaacacaaagaagacataagacttcagtcaagtgaaaaattaacatgtggactggacactccaataaattatatacctgcctaagttgtacaatttcagaatgcaattttcattataatgagttccagtgactcaatgatggggaaaaaaatctctgctcattaatatttcaagataaagaacaaatgtttccttgaatgcttgcttttgtgtgttagcataatttttagaattgtttgagaattctgatccaaaactttagttgaattcatctacgtttgtttaatattaacttaacctattctattgtattataatgatgattctgtcaaatgaaaggcttgaaatacctagatgaagtttagattttcttcctattgtaaacttttgagtctggtttcattgttttaaataaattaaggggacactaaagtcctatcattcatttccttcattgctgaacaggcaagatataatattacatgaatgattactatattttgttcacactaataaagcttatgctcagaaatgccatacacacacacaaacacacacatttatcatttaatgcataaatcaacacaaaaggttttcccattaatatgaaatattacatatatataagtgccatatttaaaataatttgtctaacagtagaactatgtcggagcactcactgaagcttgcattccactgaaagagttatttgtgtaagtagagtatccggagaaggaaaagaacttacgacctttctttataacagaaactcaactctaaattcaacaagatgtgcaaaccggacatgcaggtgaatattttaataggttactataaggttctcaattaaattctttaatctgtccagtcccagtttctcttattaataaaactttggaaattgctttaaaccatttaaaggaaatttctagatatagaaactaaggactgtgactatacagctgtcactcatttgtagtaaaacttaaaaagcaaaaacaaaaaacaaaaaagaccttcctgtgatactttatttccgaactaataaaaatctatatgactttttattattgtgtgataaccaagtaaatgttttctattttgcatattttcaggcatggtaacagaaatttaccttttaataaattaaaacaactcccaaacaaacacaacaacaaacaaacaaacgaacaaaacaccaatcatggaagcaacatcagcccatgaaaaacacactcaagacacagctacatggcagacgcgggcccagcaggagaaaagcaacacgagacaaaaccaacgacatcacccaagcgaaaaaaccggagcaaacaagaaacacatgcacgcgagacaacaccacaacacaaacacactccccggcgcgcaaccacgcaaggcgagagaaagaaacacagaaaggaagatcacagagcccacacgcgagacagctcacaagcagggaacacgacgcgccgcgaaatgaaattctcaccgg

SEQ ID NO: 516952 - DNA, 470 bp, Homo sapiens
ggccgtgatcgtatagtggttagtactctgcgttgtttgcactaacttcaggaaccagctcatgatctcaggatgtatggaaaaataatctttgtattactattgtcagcaattgtgagcatatcagcattaagtaccactgaggtggcaatgcacacttcaacctcttcttcagtcacaaagagttacatctcatcacagacaaatgatacgcacaaacgggacacatatgcagccactcctagagctcatgaagtttcagaaatttctgttagaactgtttaccctccagaagaggaaaccggagaaagggtacaacttgcccatcatttctctgaaccagagataacactcattatttttggggtgatggctggtgttattggaacgatcctcttaatttcttacggtattcgccgactgataaaggcatgaggatgtggcctgcatgctgcctgatcttgcctaga

SEQ ID NO: 516953 - DNA, 604 bp, Homo sapiens
  misc_feature (178)..(178): n is a, c, g, or t
acacaaacatctgaagttacaattattactgtagtgatttctgtgcttcaaatgcattggtttttggacttctgtggaacataccactcccctctggtattcgtgggctcagccctgggtaagtcagctgcttagacagtcaaaacttatgcgtacttggctcctcaaagtcacattngggatgatggccatttgtcaagtgcctcactggcagctcagtttggagaagagcactatgtttaggcaagatgtgcctgtgtcaaatgcagttcatgttaatgtagcaaaagtcagtctagtagatttggcaaacttctaagagaataaacatcataacgtcatcaccactgaagttgtgggtcaatcatggaatgacttaaaccatataaattccttatcagcaaaatactttgaaatagtccgtgcttagaaatgagaggtgaggaggatgggaggagggaaaggagcagaaaaggtaactattgggtacttggcctaatacctggatgataaaataatacgtacaacaaacccctgtgacacatgtttacctacataataaacattcacatgtacccccaaacctaaaagtttttttttaaaa

SEQ ID NO: 516954 - DNA, 891 bp, Homo sapiens
  misc_feature (28)..(28): n is a, c, g, or t
  misc_feature (127)..(127): n is a, c, g, or t
  misc_feature (133)..(133): n is a, c, g, or t
  misc_feature (142)..(142): n is a, c, g, or t
  misc_feature (149)..(149): n is a, c, g, or t
  misc_feature (163)..(163): n is a, c, g, or t
  misc_feature (222)..(222): n is a, c, g, or t
  misc_feature (227)..(228): n is a, c, g, or t
  misc_feature (257)..(257): n is a, c, g, or t
  misc_feature (264)..(264): n is a, c, g, or t
  misc_feature (268)..(268): n is a, c, g, or t
  misc_feature (275)..(275): n is a, c, g, or t
  misc_feature (285)..(285): n is a, c, g, or t
  misc_feature (292)..(292): n is a, c, g, or t
  misc_feature (297)..(297): n is a, c, g, or t
  misc_feature (304)..(304): n is a, c, g, or t
  misc_feature (311)..(311): n is a, c, g, or t
  misc_feature (313)..(315): n is a, c, g, or t
  misc_feature (322)..(322): n is a, c, g, or t
  misc_feature (331)..(331): n is a, c, g, or t
  misc_feature (338)..(338): n is a, c, g, or t
  misc_feature (346)..(348): n is a, c, g, or t
  misc_feature (351)..(351): n is a, c, g, or t
  misc_feature (353)..(353): n is a, c, g, or t
  misc_feature (355)..(355): n is a, c, g, or t
  misc_feature (361)..(362): n is a, c, g, or t
  misc_feature (384)..(384): n is a, c, g, or t
  misc_feature (392)..(392): n is a, c, g, or t
  misc_feature (395)..(395): n is a, c, g, or t
  misc_feature (409)..(409): n is a, c, g, or t
  misc_feature (413)..(413): n is a, c, g, or t
  misc_feature (415)..(415): n is a, c, g, or t
  misc_feature (436)..(436): n is a, c, g, or t
  misc_feature (451)..(451): n is a, c, g, or t
  misc_feature (455)..(458): n is a, c, g, or t
  misc_feature (463)..(463): n is a, c, g, or t
  misc_feature (472)..(473): n is a, c, g, or t
  misc_feature (486)..(486): n is a, c, g, or t
  misc_feature (497)..(497): n is a, c, g, or t
  misc_feature (507)..(507): n is a, c, g, or t
  misc_feature (509)..(509): n is a, c, g, or t
  misc_feature (528)..(528): n is a, c, g, or t
  misc_feature (534)..(534): n is a, c, g, or t
  misc_feature (538)..(539): n is a, c, g, or t
  misc_feature (543)..(543): n is a, c, g, or t
  misc_feature (556)..(557): n is a, c, g, or t
  misc_feature (565)..(565): n is a, c, g, or t
  misc_feature (567)..(568): n is a, c, g, or t
  misc_feature (574)..(575): n is a, c, g, or t
  misc_feature (583)..(584): n is a, c, g, or t
  misc_feature (589)..(589): n is a, c, g, or t
  misc_feature (593)..(593): n is a, c, g, or t
  misc_feature (596)..(596): n is a, c, g, or t
  misc_feature (604)..(605): n is a, c, g, or t
  misc_feature (609)..(609): n is a, c, g, or t
  misc_feature (615)..(615): n is a, c, g, or t
  misc_feature (633)..(633): n is a, c, g, or t
  misc_feature (635)..(635): n is a, c, g, or t
  misc_feature (646)..(646): n is a, c, g, or t
  misc_feature (693)..(693): n is a, c, g, or t
  misc_feature (705)..(705): n is a, c, g, or t
  misc_feature (725)..(725): n is a, c, g, or t
  misc_feature (802)..(802): n is a, c, g, or t
  misc_feature (813)..(813): n is a, c, g, or t
  misc_feature (816)..(816): n is a, c, g, or t
  misc_feature (829)..(829): n is a, c, g, or t
  misc_feature (882)..(882): n is a, c, g, or t
tgtaaatatttcttctaaaaatagagcnctctgcttgtctgaaacttcttagcgttcactgggaggatgaaaggggaaataaaggctgaccgaaaaattctggggtgacgttgacagtttcatagtnataganaaacttctnaagggcnccatggatgctcanagcaaggatgagttcaatttcaaaatccatggtactgaagaagcatgaaaaagcgtttnaaggnnccatctgtgcctggtgtggactcctgaangcattantgancaaaggnaatcaatcanagctcanagggnaccaganagcagcngnnnccttccnaggaggtanaggaganaggatgannntgnananatttannagaagaaaaaagggtgctctcntgaaaagntgnttaagaaagtgtanagananaagatgtaggaatgcagggcngaagatgttaaactnttgnnnngggcnaatgcaganntggatttaatatnatggaaattgntgggattttntnaaaataaagattaagagtnagaatntccnncgcncccgaggaagagnntggttagntnntgaatnnaaagatgnnattgntgtntanagtggggnnaatnttggtnttatgttaaaaattgtantnaaggggtgggnaagaaaaatggttgagggaaaggtaaaagaaaaaaggattgaagggnatgggatggaanatgtgtggggagtgaaaaangttggattgattggtgaaaagggaagggtaaaggaagaatgtataaaaaagttaaaaaagaggatttttgtaattgnattgggggggnggnggtatatgtttgntgagagtagtttgaataaaggatggatgaggaatgaagggggaaattatatgnaagaaattg

SEQ ID NO: 516955 - DNA, 415 bp, Homo sapiens
  misc_feature (194)..(194): n is a, c, g, or t
aggaaggaggggggccccccgccccctccacccgtgggggggggggcaaagcaaaagagggggggcccccccccccctgtggaaagggaaaaacccggtttttgggggtttttggggtttttccccccctcgccccccggttttttggttggccccctcatttaaaacggggtcccatttttccgggggttccngccctttttttggggccaaagggcccgccgcccccccttttggggcccccctcccttccccccccctggccccggggggggagggggggccaccccccccccaggggcccccccccttttttcccctttggggaattaggggccaaaaacccccccccttgggggcctttttttttttttttgggggggggggaaccgggcccctcccccttttttttcca

SEQ ID NO: 516956 - DNA, 1261 bp, Homo sapiens
  misc_feature (221)..(221): n is a, c, g, or t
  misc_feature (277)..(277): n is a, c, g, or t
  misc_feature (337)..(337): n is a, c, g, or t
  misc_feature (371)..(371): n is a, c, g, or t
  misc_feature (594)..(594): n is a, c, g, or t
  misc_feature (663)..(663): n is a, c, g, or t
  misc_feature (947)..(947): n is a, c, g, or t
ctattatcatcctcattctatttacattatacccctatccgtttagccgtggagtagcctggtgaattgtaagccacggagtcaaatggtggactgggattttcaggagaccatttatagagcaagatcttaccaacatccatttagatcatgggcactcatattaccgttcgacacatacatcatatgagttagactcacgtcgctgtacagagtcgcanagcacacctatatagcacctcgcgtaacgatgagatatataagcaattatgcgatngactgctccactagcaactttatcgcgcccgcatagctttaatcacctgcactcacgttncatagcgcgatagtatatattgtcgtttattatnatcacactaaagcttatgttgtcatatgctcgacatatcgtacatctacgtatcgtagctcgtggcttgtatattactattcgactacctgtacatcccagcgacactgcacgtatacattgttgcttcagtccaatatatagaaaatatataccactaatattatctatgtatgaacggatcatacatattgatctaactcattctgcgcgttgatacaganttacatacaattgatgtattattcacacttccatattaatccgaaatacactatatatgttaactatgnaataggctgtgctcactatctgtgtctagtgcgactcgagacctatcaacttcatattcacaccctccattctcattcattataagcgcgccgctgattactacttcatattaccttaacctattcatctccacactatatacactctcactattatattacatgactatctcatctagattcctgagacagtactatctctcgcataattagaacacatagtaggacatacactattatcgtatatcaccctcaccgtctacgtctccgcataatttctagtntttcatcgctatgagactactccatcttaatatatcatctcctctttattatctctacccaattacctattatgaactggatctcaagcatataccatctatacgacctacatacattctatcatgatctcatgttcaccgaagctagtcacaacatatctagatactttacatagttttatatgcacgtatatatatgtaccacacaacgctctatcctattatgattcatacttatctgctccccggctaccctcacacttttacattatttcgcatatcatattaattagtcgctcatctcccatgttgcg

SEQ ID NO: 516957 - DNA, 233 bp, Homo sapiens
ccatctcagcctcctgagtagctgggactgcgggcatgcaccaccacacctggctaatttttaaattttttatacagacagggtttcgccatgttgcccaggctggtctcgaactcctggactcaaactgatcctcctttctcggcctcccaaagtgctgggattacaggcatgagccactgcacccagcccagttctttcttaaaacagctgagagttttgtttttcttagc

SEQ ID NO: 516958 - DNA, 756 bp, Homo sapiens
tgggctagagactgggtaattagataaagaaaaaggtttgtttggctcacaattttagctggctagaagagttgaggcactccggatgaacagcctacaggcatgcttaccattccactagccacacagggccagcccagtgtgtcgcagaacatccaacatgcacagcagcaggaagtgcagagcagcagcaggtgtccggggaggtgccaggctctttattaacaagcagttcttcaggaactaagagtgagtcactcccatgagaacagcaccaagccattcatgggggaatctgacccacatgagccagacccctcccgtaaaggcttcacctccaacactgaggatcaacatttccacatgcagatcaaggacggcaggtccacaccaaacctaaacatgatacacagctgttacataaaacacgattatgcctgaaatcagagttgctaataagccaccacacgcgatctcagcctcctaaatctcctgcacaaaggacccaacctcaagaaaacccaccataggcaatccatacctaccaacatagccacacacagaactaacttcctacacactcgcatcctccccttaacaccacaactccttcactaactaggccccaggacacctccaacgcacaaaaatcaagacagcaaatagaactcctggccacaagagataccccaaaccgagcacacaacacataatcagtctataacctggcaccgagccgatgcaatctgtcaaaaa

SEQ ID NO: 516959 - DNA, 124 bp, Homo sapiens
taacagtccattccaagcatgtcgtgagcacaggcagcagatgcagcagtgtgaacagcatgcatggaagtcatggcacgagagcagttcgaacttgtcatgatgcacgatgacgaaagcacaa

SEQ ID NO: 516960 - DNA, 338 bp, Homo sapiens
tttcgggaggcggccagaggccagccccacccggcgcaacgacctgtgtcctattcgtctactgctgtcacgcggtgtcgactgttcagcggcagaccatcacacaacggcggtcacgggaggggagccgtgagccgcacgcggcgtggggtgccaccggcagcctgacgtgcgcgggcgctttgcctgactcagtccgcctgcttgcgcaggaatgccggaatgtcgtacgtgtcgacgcccttttcctgcagtgctgccacgtgagccgacgccgactcacgcgagctgcgccacacggcgggggtgtagaagttgctgtagtccggcgcggccgc

SEQ ID NO: 516961 - DNA, 565 bp, Homo sapiens
aaatccgaatccaaggttcccaaatcgcccgcacatccactctcgtacgttgggggttacgcgacttccggaacgaccgccgttttgcctatcgatagtggaaagcccatagtggtgttaactgtaaattttatttttctgggaagtccttttaaagggaccgtcctctccgatattaaagtagtggggaagtaaaggatcaagatcgacttaggcttgccggtcgagaggcgtatgaaaattagataagaaaaggagtcctctccggaaggttaagagaggctttctgctcgcgttgcatctggctgaccgagaagtaaacgctaaagctatgtgcttatggaattccttcgggacctaggttatatagatcgatagtacgactgctttctgagtagactgccgatttggtggtgaagcttgaccccgagttcctctccctttttaacccttagcgtaaagcgcgagtcccttgatgagtattcgtacctaacccgtataaacgaccaaatggatctttccgatacgactaatcgattaatctcgcccggagattacgtcgctt

SEQ ID NO: 516962 - DNA, 1174 bp, Homo sapiens
gcaacaacccgtttgccaagggcttccgggacaccgtggaacggcctggcgggagaaaaggaagcatgcatgacgctgcctgtctcatacgcttgtactgagtgatgcacgtgctaaaccctgatgcgcgatggcgcggagtcagactgcctcgtcgtgcgaccctccccccgacgcgggaaccacccacctccccgggcgcagcgcccatgtccgcatgcgcctgcaccgggcccgagctgaggacgaagtcgtgcgcctgcggacagctgacccggagcctgagcggttgagcgaggagcgtgcggggtgcgccgcataggcacgagaccaggctccatgacagcgcacagacaccacatcgcttgaccagaacccgatgcagcgcccgggagcggcagatagtcccgagaggggcaaggagccggccgagagctggcggggacggaccgattcggcctgaggagcctggacgacaggagcgcgccagaagctcggaggaaggacgaggggcgcaaggaggcggccgagggcacaggcagcagggacatgagaagccactagagtgaggatgcagacaacaacaagagcagatacacacatggagacagaccagaaacactgaaccaaaaaaaggccaatcaccagacacatcgcaacggagaaagaagaaacatagcagccacgaatagaacaagcaccaggacacacgaacagatcataaccagtagaaacccatgaggacagattaacgcaaatggagccacaagaagcccttatacacgagccaatgacacaatgagacaccagaacgtgggacgctcagtaagaaagcagaagaaaaccaagaacaaagaaggcaacgacatcagaaccgcagagacgctgaaccagacagcagacgatagaaagaccagaagcaaggcgagaaaagaacacgccgaccctaaccggacgagccacacaaaagatgcggaataaagaggacacaaagcaccagtcagaaggaaatacccaccaaacaatacagagaaacgagagacaaaggtagaccaaaagaaaaagaaagggagagaagcacaacgacggcactgaaagacgccacgagaccacgaccggaacacgaaaacaccaccggagacgcagcaagaaagccaaccggacaaacagagaa

SEQ ID NO: 516963 - DNA, 343 bp, Homo sapiens
cttttttttttagatggagtcttgctctgtcacccaggctggagggcagaggcacgatctcagctcactgcaacctccgcctcccgggttcaagcgattctcctgcctcggcctcccgagtagctgggatcacaggcgcatgttgccacacctggctaattttttgtatttaagtagagatggggtttcaccgtgttgcccaggctggtctagaactcccgagctcaagcaatccacctgcctcggcctcccaaagtgcactagtagaatttttataaggcttttgcctgagggtacttaccagcccatctcctcgacgcgcccgcgaatttagtagtagtag

SEQ ID NO: 516964 - DNA, 146 bp, Homo sapiens
aagaaagtcaggataaaaattttaaaaagcaggccactgtcagcaaagcctggagaagtggggccggacgtccgccccatcatgtgcctgccaccaattccaagtcatccattactctacagtagcaaataagaccatgtctatgg

SEQ ID NO: 516965 - DNA, 270 bp, Homo sapiens
  misc_feature (165)..(165): n is a, c, g, or t
  misc_feature (178)..(178): n is a, c, g, or t
  misc_feature (195)..(195): n is a, c, g, or t
attcctccgtctgctggaaggacctgcgctttgggaagatcttaagacccaggaaggtctctgggtgggataatgccaagatggaactccccctacgtctggctcttctatttggggcagtttctgctcttcatctaaggtctgagacttccacctttgagaccntttgggtgctaancgctgcctgaggatgangagacaccagagcagagatggagagacctcaggtacgcagaagagagagagattcataactcagtaatcacactc

SEQ ID NO: 516966 - DNA, 536 bp, Homo sapiens
gagaggaaggcgactcgagggcctgaagttgacatcaagggccccaaagtggacattgatgtcgcagctgtggacgttcaaggcccagactggcacttaaaaatgcccaaagtgaacatgcccaagttcagcatgcctggcttcaaaggagagggcccagatgtggatgtgaacctgcccaaggctgaccttgacgtctcaggacccaaggtggacattgatgttcctgatgtgaatatcgaaggtccagatgcgaaactaaagggccctaaattcaagatgcctgagatgaacatcaaagcccccaagatctccatgcctgactttgatttgcatctgaaaggtcccaaggtgaagggtgatgtggatgtttcccttcctaaagtggaaggtgacctcaagggcccagaagttgacttcaagggccccaaagtggacatcgatgcccctgatgtagatgttcatggcccagactgtgaacctgctggccgagtggctcattcagacaggtgttgagccagtgcaggttcaggaaa

SEQ ID NO: 516967 - DNA, 226 bp, Homo sapiens
agccccaaaaaaggtttgtgggatggctattaaggattccaatgcaaaactgtttgattgtaaggccagtgggattgtaagcccccttcaaataacccctgcaataccccacccagggtttcctgcccaaggacagtggccagctccagtggccaaacagcccgattttaaaaacccccgccccccgtccttgggtaaggaaaaataaaagggctcccggacccca

SEQ ID NO: 516968 - DNA, 543 bp, Homo sapiens
gtgcggtcatctagaggatccctaaaggcgagtcgggttaggggccaggctgctgtggcaccaccgaagagcacattcaggttggaagcgagggtcggacccacggacgggaccccagaatcccaagctggagctcaggccccgtgatacgaggcgcatcagtctacgttacagaagaaggaaggagggcccagcgcggaacggagcggcagccatcgaagctgaggacagggcggaagaaaagggggaggaagagaaagaggccccgaggggagagagaagaggccaagccgctctggaggaagagtaagggcgggcgggcggcggctgcagggcttctgtctgtccctgtgcctagggcacatatcggccggtacggtgcttcttccatgacatcctgtacagcaagtaccgtgcagccaccgacgtctatgccctcatgttcctggctgatgtggtcgagttcatcatcatcatttcgggcttgtgggcctttgggaagcactcggcgggcagagacatcacgtcctccctatcagatga

SEQ ID NO: 516969 - DNA, 518 bp, Homo sapiens
aaagtatatacttgtgagttcaaatttatgaatttctagcattttgcttcaaaataactccagaagggtagggaaaaatgtaataaaagagatgaaggtcagcctccctagttagctgggaccacaggcgcaggccatgatgcctggctaatttttggtattgtttagtagagataggggttttcaccatgtttgcccaggctgatctcgaactccgtgaccttcacgttgacccaccttgcctcagcctcccaaagtgttgggattacaggcctgttataagtttgtgatgtttgaaagcacaaattaagttcttggtgcttagagagaactggttctctacaaaaacaagaaaaaaaaattcagccaggcacagcagcattgtgccccttagttgccagctactgaggaggctgaggcaggaagatcaccggagcccaggagttttgaggttacagtgagctgtgatcactgcactccagccgtgggttaacagagcaagacccttttctcaaaaa

SEQ ID NO: 516970 - DNA, 258 bp, Homo sapiens
tgaccgatagcggactagtaccgtgagggaaaggtgaaaagcaccccgggaggggagtgaaatagtacctgaaaccgtgtgcctacaagccgtgggagctcctacgtgagtgaccgcgtgccttttgaagaatgagcctgcgagtttgcggtgtgtggcgaggttaacccgtgtggggaagccgtagcgaaagcgagtccgaacagggcgatctctagtcgcacgcccaagacccgaagccgagtgatctacccatgg

SEQ ID NO: 516971 - DNA, 179 bp, Homo sapiens
  misc_feature (17)..(18): n is a, c, g, or t
  misc_feature (62)..(62): n is a, c, g, or t
agtacctgggccgtatnncggctgagcggtctgattatcattcttaaaatgcttaccctgcnctgccttgccttccccacggaaaactcaagaaagcctctggactgtgctctctcctcactccttaggcctcccaaccaaacctggggctgccccatgtagcccagcatgatatggtt

SEQ ID NO: 516972 - DNA, 123 bp, Homo sapiens
tgagctgcatactggtgtcacccatgccgcaggtgctgacagaggccttccgggagaaggacacagctgtacaaggcaacatccggctcagcttcgaggacttcgtcaccatgatcagctcag

SEQ ID NO: 516973 - DNA, 153 bp, Homo sapiens
  misc_feature (46)..(46): n is a, c, g, or t
ccccggcgcacatttacagatggcaatcagctaaccaaggcatctnactaccactaagactagggggcacttcactccagaagctttccaaccatgctggatttctgtcactcactggatacaaaccccccaggttggagggaaccacaaaaa

SEQ ID NO: 516974 - DNA, 979 bp, Homo sapiens
  misc_feature (30)..(30): n is a, c, g, or t
  misc_feature (105)..(105): n is a, c, g, or t
  misc_feature (139)..(139): n is a, c, g, or t
  misc_feature (144)..(145): n is a, c, g, or t
  misc_feature (157)..(157): n is a, c, g, or t
  misc_feature (177)..(177): n is a, c, g, or t
  misc_feature (204)..(204): n is a, c, g, or t
  misc_feature (217)..(217): n is a, c, g, or t
  misc_feature (229)..(229): n is a, c, g, or t
  misc_feature (239)..(239): n is a, c, g, or t
  misc_feature (242)..(242): n is a, c, g, or t
  misc_feature (248)..(248): n is a, c, g, or t
  misc_feature (258)..(258): n is a, c, g, or t
  misc_feature (269)..(269): n is a, c, g, or t
  misc_feature (276)..(277): n is a, c, g, or t
  misc_feature (324)..(324): n is a, c, g, or t
  misc_feature (352)..(352): n is a, c, g, or t
  misc_feature (356)..(356): n is a, c, g, or t
  misc_feature (371)..(372): n is a, c, g, or t
  misc_feature (378)..(380): n is a, c, g, or t
  misc_feature (383)..(384): n is a, c, g, or t
  misc_feature (388)..(388): n is a, c, g, or t
  misc_feature (390)..(390): n is a, c, g, or t
  misc_feature (423)..(424): n is a, c, g, or t
  misc_feature (436)..(436): n is a, c, g, or t
  misc_feature (443)..(443): n is a, c, g, or t
  misc_feature (469)..(469): n is a, c, g, or t
  misc_feature (493)..(493): n is a, c, g, or t
  misc_feature (495)..(495): n is a, c, g, or t
  misc_feature (624)..(624): n is a, c, g, or t
  misc_feature (689)..(689): n is a, c, g, or t
  misc_feature (880)..(880): n is a, c, g, or t
  misc_feature (904)..(905): n is a, c, g, or t
  misc_feature (911)..(911): n is a, c, g, or t
  misc_feature (937)..(937): n is a, c, g, or t
taaagttgtgtttagggtatgaatatttangttggggagtagttgatgttgatttatttggagaaatagaggttagggatgtggttaggtggttagggatcaagnggtgggaaattagaaaataggggattaagaatgnaaatnnttaaggtgaggnagatagttggtagtggtttngcttatgtttaagcatttaaagttggnaaaagatgttatnaatgtattatgnaagagtttanatnttttgnataagtggtngattgggttgnacctacnncttgaggaaagaaaaagaaaagatgagtgggaggatagtggagagtnggtgtatggtaggttataagattgtganaggnaagaatgtataaggnngggggnnntgnngttnangtttggggttagaggaggaaaaaaagatagtgnnatagtgcatttnacatgtnttaaaaatagttttaggaggttaaanctttttagttataaaagttattanantagggtttactttgaaatatagtttacaaggaaatgaagtataagatacatacactgggactttaggagaaggggaaagtttaaaaacaagttattttggacgtttaaaattagggcatattataaaanacagtccacggtcttacattcagcaaattcatactaaaatactccatttttgtaagataaaggcnaagaaaactttacatatgctacaagtttattacagatatttacatggctctttctcccctaggtacttaaaattttcacattatccaactccccaaagcaagctttgcaggaatgatgaggccagagcactattagaatagcttgtgcagtgctgtaatacaaaaatgtattttgaaagctattgagtgancattaaatactgtttctataaaanntggttntggtgtatttgttggcagacacttantccactacatttaataaacaagggccattggggtgtctatgt

SEQ ID NO: 516975 - DNA, 181 bp, Homo sapiens
tagtgctacttgaggatcccctcacatgactgcgcaggatggctggtggggtcttgtgggacacgggtctcccttctccgggctcgcgggggactggtccaggagggggatgccgtgccggatgggcaggcgcgacgggcgcggccctcatagcaccttgcagcagtttgatgcagccgtt

SEQ ID NO: 516976 - DNA, 117 bp, Homo sapiens
cgtgccaggcttgtatctatcccattcagtgatagtaatgtcaccgcttgttccctgggctgttctagaggtgccgtcaggtagctagcgattagagtcgagagacttagagcacca

SEQ ID NO: 516977 - DNA, 511 bp, Homo sapiens
  misc_feature (62)..(62): n is a, c, g, or t
  misc_feature (104)..(104): n is a, c, g, or t
  misc_feature (464)..(464): n is a, c, g, or t
  misc_feature (509)..(509): n is a, c, g, or t
cacctcttggaggagctaggaagtgggagttcccttagcacgtgatcccatatcttcccctncccagcctaccgtgccctgtcttgtagcatgacgatgtatantctcacccttagtagtcccccttagcctgtaaagctctttagggcaggatcctacatcctgccgtaacctttcagggccccccagtgctgagaactgtgcctcacaggtccctaaatgtttactgaaaggaagaacacacaggggtgggaggatcacttgaaccccaggagtttgagaccaacctgggcaaccaagcaagatgcagtcaccacacacacacacacacacacacacactagctggttgttgtggtgcgcacccacctgtagtcccagctactcaggaggctgaggtgggaggatgacttgagtctgggaggttgaggctgcagtgagcttgatggcaccactgcagtccancctgggctacaaagtaagaccctgtaacaacaaaacaacaaaaanaa

SEQ ID NO: 516978 - DNA, 209 bp, Homo sapiens
ttttgtttttttcaaaagccccccccccccttgccctgggaatcccctgtttttccttaaaaaacaaaggggtaattattattttgggggggggtttttaaccccttttgggggccccccaattttgggctttgggaaccccggccttgttttttggaccaacccttttttaattttaatttgggggaaaaaaagtttttaatttttta

SEQ ID NO: 516979 - DNA, 230 bp, Homo sapiens
tattgatcttttatggcgttcgtggagggcgtcaagaactctgggggcaggtctgtgcaacgcacattgaaggagctggggctcgacgggtctggattcgcacttgaccactcatgatacagaaaaccccagtttcctcacctataaaatatggaaacaaacaaggctgtcggatgaatggggtgaaggtaacacacaactacggagcctgctgcaaagagacgctcagt

SEQ ID NO: 516980 - DNA, 418 bp, Homo sapiens
  misc_feature (132)..(132): n is a, c, g, or t
gcggcctccttgcagagcgcagaactcgatcttgttgttgatgtcaaactttaatacaagaacatccgattaagaggctgggcgcagatagtcaccaagtttcatctctgtacaggtcttgaccaaagcagncacacagattgtaacatttttcccatgttcatctagaactacttctgcaggtttgctgacagagctgagaagggaggtaggtgacatagcagcttatgacccctgattgtaagagccccgagtgtggctgtcgattttggacccagggtgagatggctaccaatgatataagcaggcacaggcctccatttactcccagcagaattttgttttccatgcagctgtctttctgtgtataaaacactgccatcaaaaccaagcctccagtggcaatggaatacatgat

SEQ ID NO: 516981 - DNA, 523 bp, Homo sapiens
  misc_feature (509)..(509): n is a, c, g, or t
gcagctcgggccaccgcccgcgtacccctgcgcgccggcattcggggacaagttctcgctggaagaggcgtacccgcgcaacagcagcatcgccgctctgcgcctgaaggccaaagagcacatccaggccatcggaaagccctggcaagccctctagaggcgctgcggagttgctgcgagccctgtgtgcacccagcccagcctggtggccgaacttttctttgctagccctgctgcaagccgccagccagccttgggcgggacactcgcgcctactcttcgaaagaggccaaacggaaattcagcctcgctgtcagagggacaaactgcgggtcccgctgtccacaccgctcctagctgctcccataagcatcagcgcctatcatcgggaaggaccaaggatcttgacctgggatgttccggacggcaggaatggggagtgagaaaaataggttgaagaaactttgtaaagttagtttaaagtatttcggaggaacaattaaagattngtttgttgcccggc

SEQ ID NO: 516982 - DNA, 227 bp, Homo sapiens
ggccccggatagttgaatggcaacacaatctcagcttactgcaacctctgcctctcaggcactagctgtcttcccacctcagcctctcgagtagctgggactacaggcgctcagtaccacgcctggctaatttttgtagtttttgtagagatggggttttgccatgttgcctaggctgatctcaaactcctgtgctaaagcaatcctcccgcctccgggccattcaa

SEQ ID NO: 516983 - DNA, 104 bp, Homo sapiens
agggtcatggcctcctcctggtcgtgggtcaccacgatgaaggtgactcccagatgctcctggatgttgatcagctcgaactgggtatgctcgcgcagcttgcg

SEQ ID NO: 516984 - DNA, 103 bp, Homo sapiens
cgacttctagagtatcccctggggacccctatcaacgagattcagaataaacaacatatagcctggaatatcacaggagagtagaacatctagcgacttgatc

SEQ ID NO: 516985 - DNA, 356 bp, Homo sapiens
tgggcgtatagtgataggaggcgcgcctggagcatcgaagactattgtcgtgcgcaaggaattgcaatgatgggcgtgggccttacggtgctgccaatgatgtactgcgaagaagaactggctcagcggccggctggtgcaattgctaccgcagtggtcattgccaggcggctggctgcaggcggtctaacccgcaccggcgcgaagtgctgccggccaatccgggcctggatcgttttatctggaatgaaggcttcaaaaggctgtggagatcggctgttatgagcatagacggaagaccaagtcggcacgattctgacctgaagacctgccaggcgcaccgggaagactataaa

SEQ ID NO: 516986 - DNA, 157 bp, Homo sapiens
ccaacagcgtgctacgggggggtacaggaaacaaccaggggtgccgagaccatcgcaagaggagtacgcccaccacagaggcgagtctgaagacgggccaaaccgaacccgagccacgaacaccggggaggcacccgggtaagcaagaagacaccag

SEQ ID NO: 516987 - DNA, 356 bp, Homo sapiens
gaggcatcacaaactgagcagcatgtaatcttggatggaatggtcttgagaagcatggaaggcactgcttccatgagatagagaagccatgaccgagacagccacagttccactattaagctgtccatgtgctagtcagtagtagtcccgactcataccccttactctggacaactcatactctattcacccgaccgtggccaccgaggaccatatcgacgggtcacaatgactttgccacctcttgcccacagttgggctggccacagcaggtgggccaatccaagctccaagctaaggactggttagggagtagcaaattccactattggtctaccagcaaccttccatttttt

SEQ ID NO: 516988 - DNA, 337 bp, Homo sapiens
tgagtttcaaattccatggtttcatgaccgcttctggcaacaatataataaaggttttggtggcatggatggaacacaacagcacatttttaaaatgttaccagaggtactaggaggaatcaatagtgttaaagccttggttcttacgccttattaccacaacgttcattatgagtgtatgttggataaaagaaaaaaacctcttcgcggtggaagccataatataacggtgggggccactaccaaaaattgccttgggattcaaaactggaattggttggatcagggctgccaccaggggctgaaaggattgctttggaatctttggattcaaacg

SEQ ID NO: 516989 - DNA, 162 bp, Homo sapiens
  misc_feature (82)..(82): n is a, c, g, or t
gctagtttagaagttcaatagcagctgtcatcggaaggccgaaattcttcagcagaagagctgaggagaagattaagagtgntgggggggcctgtgtccctggtggcttgaagccacatggagggagtttcattaaatgctattgaaacttctaaaactagg

SEQ ID NO: 516990 - DNA, 381 bp, Homo sapiens
  misc_feature (167)..(167): n is a, c, g, or t
aaccggcgcagtgtactaggactacggctaacggaagcacactgaacaggactagctaacggctagggcaggcgcgcccaaccctactataaacacaatactaggaacaaagtacatacccctacgcatagagaaaggctactaagaacactatgtacagcagctanagatactaagacataactatagcacaaaatactaccacacagaccataaaataataaagacaaaaacatacactactaggctagcatactaaacatacatttaagacataaaaaaagcactttactagctataaatctaaaactaccataaaagtagatacgataggcagaacattcctactaatacataactatgggtatgcacaaagtgccc

SEQ ID NO: 516991 - DNA, 153 bp, Homo sapiens
taccgggtgatgcgctgtagcctcctaacgcggggtactcaagcgctaggtgcacccaaagacatttttacagagcttctgttcacccagaatgaatggtgacatttcccagcctctgctgctgcaggtgtggccagtatgctccagattcag

SEQ ID NO: 516992 - DNA, 754 bp, Homo sapiens
ggctcgcgcgtgcgaccagaagccagcagtggggttgcacacgcgcctcttcacgaggtggaaacaagatggaggattcggcctcggcctcgctgtcttctgcagccgctactggaacctccacctcgactccagcggccccgacagcacggaagcagctggataaagaacaggttagaaaggcagtggacgctctcttgacgcattgcaagtccaggaaaaacaattatgggtgtgcttttgaatgagaatgaaagtttatttcaactggtggtattatggaaaattccaagtaaaagaactgagggtcagattgaccttggctcatagtattcgatcagattcagaagatatctgttatttacgaaggatgaacccaattcaactcctgaaaagacagaacagttttatagaaagcttttaaacaagcatggaaattaaaaccgtttctcagattatctccctccaaattctaaagaaggaatataaatcctatgaagcaaagctccgccttctgagcagtttggattcttccttactgatgccagaataggcggtcttaccctcactcatgtgggagacatttcttatcaaagacagaagttccagtatcttgtaaacctctgtccaagaattattcaagagagatcatgactgtataggtggaacgggccttaaacatttctaaacgtggttacttggcagtgtatacggttattggtccgtgggaattggaaatatgagcccactaatg

SEQ ID NO: 516993 - DNA, 770 bp, Homo sapiens
gcctaggtaagggtgactcaagatgatacaccgagagaaaaatgcaaccatatatttggttctcatttctgtagctgtcgtttcctttttaaagacgatttatcagctgctgtcgcattgtggaactgttcctataagaaactaaaaatgatctattgtcagtgttcctttgccgcctttcctctgtctttcgtgaataaagtggtttcagtaacccatgctgttctctccctattctacggtctttgcctccctatgttgaaaaaagattcccacagtttctgatgtgtgtgttatatagtcttcaatgtatgttaaccatgttaggaactgagtatcttaagagatgtcttagaatgctttagttggtacataagttatgtacctttatgtatttttcattgtattcgctgttttgacatggaagtaatttagaacgttggtgcaggaaaggactctttactgttgcacatattggttggtctgatatgtaataaattcatggcttggcagctgacatgattgtctcccagagagaaggagatgtacttcctcgcagggtcctaggaccaagacagaagccatttacatgcatgttctccccagtgttccatctatccgccttgatgaacgctgccctgccaaggcctaacactgtgtactaagccgtactccatattatagtgcacataaaatactgtgctctgaatttcgaaccaaccacagcacaccggcaccacgcccacaccgcccgcacagccacccaccaa

SEQ ID NO: 516994 - DNA, 1796 bp, Homo sapiens
taaaaaaggagtccccccttgtggcccccaggggggaggggggggggggggcccccccccactgtgacaacacctctcgcgctcctccccgagtgttataagagtgagaatctctctcgctgtggaatactcctcaagctccacatgtgaaaacctctccgctctctccggggactctcaaaggagatatctctctcgctgtgccttcaaccctctccaaagattatggtgggaatatacggggcgccacacaccacacacacccgcggctctctctctctccctataatatattctgtgtggttctctctcacaagagttaacggtgtcgcccacaatatatatatttaagagggtgtgctcacacaaaacacaacagaaagagagagaaattttctatctatactacacacacatatgtgtgcgtcacagcgtgtgctgtcacatctctccgtgtgtgcgacccaccatatattgtgagagaggaggtataaaggagagtgagatgaacaaccccccctctctgtgtgtggctagtatccccgcctgtgagaaatatcaacaacaatacaaacacagagtggtaaaacacacctctcgcgggaggcccccctaccaaatatcacacctctctctatgtcgatacacacgagtgagagagggccaaaatagagtgtatcacacgagggggcgtatgtatatacaagaagagagagacgaggggcgctggatatcctgctgatgctgcgtatcacgagagataagaggccacagttgcctccccctttgttgtcccacaaagaggggatgttctcctacaacgaggactacagtagggatcaaacacgcaggatgatgagagaccgccatttaataaaccagcgagtggtgggtgtgatattgttactacacacccataatatgtatatccgccggcacccaaaagtatggtgaggaataccaatataactatgagacgtagacttttgaacctacctttgttcttacctatatatatcaggcctagctatcacctccactcgataggagggagccccatctgtgtgtgaccctcatccaatatcgttagccacccaactgctaagataaggaggcgatgtagtaggtggaggaataagtaagaagaaatgattgggagggacaagccgccacacaaaacactccccgtgttaggtgtggaagcgcgtgccacactaacttttctccttgaatgatgacacacaaccaacgcaccgcacaacagaaagtgtgcttgattcataacgtgcttctctacaagacacagactcatctatgtatgaaacagactacgctagcgtgacgtacctaatcctagtaggttaggacaaaagcgaaggggccgactctcactataactactacctctccagcaccatgaattctattactatcaaggagcgaggaaagcagacgaacccacatcaccagaggagcagttgttatgatggaaaccatgatagagttaaggtcagacgatcgttgatcatcagaacaactcaagtacagagtcaaacatatattgtgatctgtcccaagtacagacagcctagctgtagctgagtgtggataaatcacacaacacagatatctcggtgtcagattacacatcatccatgctgcctctcagtatggtcactccccaacaacaagacaatgagtgtccttactgatgcactaaccccatacgtccaacctagatacagagaataagtaccaacgccgaggctgatagtatgagcacgatctcatataca

SEQ ID NO: 516995 - DNA, 428 bp, Homo sapiens
gagctcggccctgggttcgaaattagtataaaaagtccaggtgatgaaactatattaccaactggcatgaagtacaataaactactaacaaacatactaacttgctacatctactaactaaaatcacttagaatgtcaagttaataccactacccaaaataccagagatccaatatgtgcccatccataatgaagagttcttcaatcgtacagctccataccttcccactaggcacaaatatccaaaggtcattccggcaaagccgcccagcatcagtatcacattagtgcaaacaggcagatttatccagcatcacattcttagcaactcctgagggcttcaattaagtaacttaaaaatatgaacttacccaactatgtagtactccaatcaaagaaatgtatcaaagccaatccagtagcttctc

SEQ ID NO: 516996 - DNA, 735 bp, Homo sapiens
  misc_feature (276)..(277): n is a, c, g, or t
  misc_feature (301)..(301): n is a, c, g, or t
tataaaaataaaaagaaaaaaaaaaaaaaaaaaacccccccccccccccccccccccggggggggttgtaaaaaaaaaaaaaaaaaattttttggggtttttttttacaccccccccccccctgggcgcgttggggtttgtttttttttaaaataaaataaaaaaacaccccacacccgccccccccccaaatatattttgttatttttcttccccccccccccccccccaaaaatgtttcttcctcttccctccacaccaaaaaaaggaaatttnnggtccccccctttttccccccccncccccccaaaaaaaaaaggggggggggggcggccccttttttttttttttttttttttttgggagaaaaaaaaaacaacttctttcttggtggggggagggagaaaagaaaaaaactccccctcttttccttttgttggtgggaacaaaacaaaaaaaaaaaaaaaagaaccccccccccccggtggggggagaaaaaaaaaaaaaaaaaaacaccccccccggttctttttttataacaaaaattttttttttttttttttttttttggggcgggggggggcgcccaataaatttataaacaaggggggggggcggccccccacaaaaaaaaaattccctttttttaaggacgccttttttttaaaaaaccccggaaatttcccccccggggggtttttataaaccccaataaaaagcgccttttttttatta

SEQ ID NO: 516997 - DNA, 183 bp, Homo sapiens
gatctagaggatctccggctcctgggtaggaagatgctgataatgatggtgtgggggccagtgtgatgatgatgctgatggggatgggatcaagaatgttgaggcatccccaatggattggacaattgccctaaagtccccaaaccaattaacaagacagacagggatgaggacggggtggga

SEQ ID NO: 516998 - DNA, 181 bp, Homo sapiens
  misc_feature (8)..(8): n is a, c, g, or t
atgcccangacgaagacctgatcgatctggaggaaacagatgacaactaaccgcgccttcagctacaagcccctctggaaactcctcatcgaccgcgacatgaacaaaatccaacttcaagaacgtgcaggcatcagtccagccaccctgtccaaactcggacgcggcggcaacgtcacca

SEQ ID NO: 516999 - DNA, 250 bp, Homo sapiens
tttccaaaacccctccaaacccaagaaccgcagcccctcccccttacccccaccaatcttattctaccctctccccccctctccccccccccatctttttcgaaacccaaaacatcctctttacacaggttttgcaaccaatctaccccctaactacaacaccatctctcctaaatccaaacccgaaacaaacacttcaaaccacaccccacctggaccccgcgaccactcttttcatcactccgtggtc

SEQ ID NO: 517000 - DNA, 597 bp, Homo sapiens
agatggagtcctgctcttgttgcccaggctggagtgcagtggtgtgatctcagctcactgcaacctccccctcccagattcaagcacctctcttgcctcagcctcctgagcagccgggactacaggcacccgccaccatgcctggccaatttttatatttttagtagagacagggcttcgcatgttggccaggctggttttgaactcctgacctcaagtgatctgcccgccttggcctcccgaaatatagggattacaggtgtgagtcactgcgcctggcctaagtttcagatccttatagctaagagactatttggatatctcacaggtattccaaactcaacacatccaaaacaaaacccaccatctctcccaaacctgctcttcttcccatgtttcctatcacagtgaatgtaaccaccatccaatcagatgtccaggctagaaaacttgaagttcactgatttctgacattatactttccattacctctaaaatccattcaattaccttgccctgctgaatttaccttaaaaacaacaacaacaacaacaacaacaacaacacccatctgtccacttctctttctaagagaca

SEQ ID NO: 517001 - DNA, 625 bp, Homo sapiens
  misc_feature (208)..(208): n is a, c, g, or t
  misc_feature (211)..(211): n is a, c, g, or t
  misc_feature (229)..(229): n is a, c, g, or t
  misc_feature (236)..(236): n is a, c, g, or t
  misc_feature (238)..(238): n is a, c, g, or t
  misc_feature (242)..(242): n is a, c, g, or t
  misc_feature (252)..(252): n is a, c, g, or t
  misc_feature (267)..(267): n is a, c, g, or t
  misc_feature (313)..(313): n is a, c, g, or t
  misc_feature (316)..(316): n is a, c, g, or t
  misc_feature (319)..(320): n is a, c, g, or t
  misc_feature (335)..(335): n is a, c, g, or t
  misc_feature (341)..(341): n is a, c, g, or t
  misc_feature (348)..(348): n is a, c, g, or t
  misc_feature (360)..(360): n is a, c, g, or t
  misc_feature (535)..(535): n is a, c, g, or t
  misc_feature (568)..(568): n is a, c, g, or t
  misc_feature (570)..(570): n is a, c, g, or t
tgcggactcgatcaccttcaggctctttttggtgtcttggcctagaattttatagagctgcttcttgagcttcatgatcccctctgcctggctggcaaatttctgtggctttggccccgggcgcctcctgagggctggtgaatcatgatacgggatttgggaaccaaatggccattcctggggtcccgccgccaaaaccagggaaccnatnttggcggcttggcccacncaccagntncaanacggttgagnatgtactgcatcgtntcgtaaatgccaggcccgcggtcaccacaccaccagggctttgatntanatnnggatgggcttcttgntgctcncggattncaggaagagganctgtgcgataacaaggctggcaacgctgtcatcgatcgggcccatgacgcacacgatgccgtcccgcagcagccgcgagtagatgtcataggcggctcgccgcgacccgtctgctccaccacgatgggaatgagcgggagagcccgggtgccgtcgcgtgcaggcaccgctgcanggccaggccgttctggagtgtcgctgcggctgngnctgcgctggaaagtgagcggcgagcgaggccccagcgcggggtacctgcatgacg

SEQ ID NO: 517002 - DNA, 432 bp, Homo sapiens
  misc_feature (303)..(303): n is a, c, g, or t
taacttgccccaaggtcacccaattgtaaatggtgaaacacagaacaggtaaacctcaaagagctatgcctccttgacccactgccttgccacagtgtggtagacagaaaaaatggcttctcaaaaacatccctaggctggacacagtggctcatgcctgtaatccccaggactttgggaggccgaggtgggcagatcacttgagtttaggagttcaagaccagcctgggcaatatggcaaaaccctgtctctactaaaaatataaaaattagccaggtgtggtagcacatgcctgtagtcancactacgcaggaggctgaggtgggaggatcacctgaacccaggaggcaaaggctgcattgagccatgatcatgccactatactccagcctgggcgacagaatgaaaccctgtctcaaaaagaaaaaaaa

SEQ ID NO: 517003 - DNA, 192 bp, Homo sapiens
ccagaccgggacctcctttgcatgctaaataaatgcagtctataccttaggaagcagaatactagtgttctaagggataaaagagagaagtaataaattggtactaacagggagtaagcgatttctatgctatagacatgctatactaaaatgtagcagtcagtgcaatcgtatggccaactttcaggagag

SEQ ID NO: 517004 - DNA, 394 bp, Homo sapiens
  misc_feature (4)..(4): n is a, c, g, or t
  misc_feature (163)..(163): n is a, c, g, or t
  misc_feature (222)..(222): n is a, c, g, or t
  misc_feature (230)..(230): n is a, c, g, or t
  misc_feature (235)..(235): n is a, c, g, or t
  misc_feature (281)..(281): n is a, c, g, or t
  misc_feature (289)..(289): n is a, c, g, or t
  misc_feature (302)..(302): n is a, c, g, or t
  misc_feature (312)..(312): n is a, c, g, or t
  misc_feature (320)..(320): n is a, c, g, or t
  misc_feature (333)..(333): n is a, c, g, or t
  misc_feature (387)..(387): n is a, c, g, or t
attnattattgcgtccatcttattatatttttccaaaaggagacagttttggaggttctgcttacttttgaacttccttttggaatgtattgaagaaggcaggtaaaggaatctttaggcagactgccatccagggacttctattcttttcacttacattcanctgttaacatcttttctttcttcctcttctgtcttctgcatgcaggcccggaagctgancgttagtnaatangtacaggaagggaaaagagaagagggcaaggcccatcccccaaganaggaaggnctcttattcaganggagcagganccgatgtngagacggccactncctctctcaccctcttttccatccctcttctcaagaaaaccaggcttaacaganttggaca

SEQ ID NO: 517005 - DNA, 768 bp, Homo sapiens
  misc_feature (14)..(14): n is a, c, g, or t
  misc_feature (20)..(20): n is a, c, g, or t
  misc_feature (23)..(23): n is a, c, g, or t
  misc_feature (25)..(25): n is a, c, g, or t
  misc_feature (27)..(27): n is a, c, g, or t
  misc_feature (30)..(30): n is a, c, g, or t
  misc_feature (52)..(52): n is a, c, g, or t
  misc_feature (67)..(68): n is a, c, g, or t
  misc_feature (72)..(72): n is a, c, g, or t
  misc_feature (74)..(74): n is a, c, g, or t
  misc_feature (91)..(91): n is a, c, g, or t
  misc_feature (93)..(93): n is a, c, g, or t
  misc_feature (103)..(104): n is a, c, g, or t
  misc_feature (109)..(109): n is a, c, g, or t
  misc_feature (123)..(124): n is a, c, g, or t
  misc_feature (134)..(135): n is a, c, g, or t
  misc_feature (138)..(138): n is a, c, g, or t
  misc_feature (144)..(144): n is a, c, g, or t
  misc_feature (150)..(150): n is a, c, g, or t
  misc_feature (160)..(160): n is a, c, g, or t
  misc_feature (193)..(193): n is a, c, g, or t
  misc_feature (198)..(198): n is a, c, g, or t
  misc_feature (206)..(206): n is a, c, g, or t
  misc_feature (213)..(213): n is a, c, g, or t
  misc_feature (216)..(217): n is a, c, g, or t
  misc_feature (228)..(229): n is a, c, g, or t
  misc_feature (234)..(234): n is a, c, g, or t
  misc_feature (241)..(241): n is a, c, g, or t
  misc_feature (243)..(243): n is a, c, g, or t
  misc_feature (251)..(251): n is a, c, g, or t
  misc_feature (254)..(254): n is a, c, g, or t
  misc_feature (258)..(258): n is a, c, g, or t
  misc_feature (263)..(263): n is a, c, g, or t
  misc_feature (277)..(277): n is a, c, g, or t
  misc_feature (279)..(279): n is a, c, g, or t
  misc_feature (284)..(284): n is a, c, g, or t
  misc_feature (286)..(286): n is a, c, g, or t
  misc_feature (298)..(298): n is a, c, g, or t
  misc_feature (323)..(325): n is a, c, g, or t
  misc_feature (333)..(333): n is a, c, g, or t
  misc_feature (339)..(339): n is a, c, g, or t
  misc_feature (342)..(342): n is a, c, g, or t
  misc_feature (345)..(345): n is a, c, g, or t
  misc_feature (350)..(350): n is a, c, g, or t
  misc_feature (366)..(366): n is a, c, g, or t
  misc_feature (369)..(369): n is a, c, g, or t
  misc_feature (374)..(374): n is a, c, g, or t
  misc_feature (378)..(378): n is a, c, g, or t
  misc_feature (406)..(406): n is a, c, g, or t
  misc_feature (416)..(416): n is a, c, g, or t
  misc_feature (429)..(429): n is a, c, g, or t
  misc_feature (432)..(432): n is a, c, g, or t
  misc_feature (438)..(438): n is a, c, g, or t
  misc_feature (448)..(448): n is a, c, g, or t
  misc_feature (477)..(477): n is a, c, g, or t
  misc_feature (480)..(480): n is a, c, g, or t
  misc_feature (484)..(484): n is a, c, g, or t
  misc_feature (488)..(488): n is a, c, g, or t
  misc_feature (504)..(504): n is a, c, g, or t
  misc_feature (508)..(509): n is a, c, g, or t
  misc_feature (528)..(528): n is a, c, g, or t
  misc_feature (531)..(531): n is a, c, g, or t
  misc_feature (566)..(566): n is a, c, g, or t
  misc_feature (605)..(605): n is a, c, g, or t
  misc_feature (612)..(612): n is a, c, g, or t
  misc_feature (623)..(623): n is a, c, g, or t
  misc_feature (626)..(628): n is a, c, g, or t
  misc_feature (687)..(687): n is a, c, g, or t
  misc_feature (701)..(701): n is a, c, g, or t
  misc_feature (703)..(703): n is a, c, g, or t
  misc_feature (707)..(707): n is a, c, g, or t
  misc_feature (710)..(710): n is a, c, g, or t
  misc_feature (715)..(715): n is a, c, g, or t
catctcgccccttncctttnatntnanagnagatacctccctcccagttcanctcatttagtaaaannaaantntgggtagaaaccccaantntccaaaatcnnttttntggtgggtgacccnntttatccaannganacagcngttgcncgaacctttnttttaagctttacgcgcacacggacaaaattcncaaantggagctnttttttnaanncggtttttggnntttgnttatttncncttacagntgnattnttttntttacatattttantnagaantnatttataacaantttttgaaatggtgctttggatttnnnatttcttnttattnttnttnatttntacaatttattggaanttnatttnacanttttacaacataagatagtatggagatntgaataattntttgttatataantgntttatnactgcttttnttcctagctaggctgctattattactatnatntgtnattnataaagccttcatcantccnncatttttcttacggtcggngcntcagaacaagcgtttagactccttgggtccgtganttcctagagcttggctgggtctaggctgttctgtgcctncaaggantgtatggcaangannngtattggccaccaactgtagatgtatatatggtgcccttctgatgctaagactccagancttttgtttttgcntngcanttnctgantttataccaactgtgtggactaagattcattaaaataaacatcagagtaactc

SEQ ID NO: 517006 - DNA, 284 bp, Homo sapiens
tgtcccggaggctagtggtaccagatggccaggacataccaggttattgagaagttctgcatagtttgaatcgatttgcataatcgagaaagccagacaatgttaacagagagatagctatctgtaacacattagaaaacaaaagagaacaaagcagagcacaaactctccagttcaccttgctcattagagagatggaatagggggtgaaagtgaaaaaaacacataagcacaatttatatcgaagggaagaaattgaagtggagttaagaaccatactcctt

SEQ ID NO: 517007 - DNA, 266 bp, Homo sapiens
  misc_feature (89)..(89): n is a, c, g, or t
  misc_feature (113)..(113): n is a, c, g, or t
  misc_feature (199)..(199): n is a, c, g, or t
  misc_feature (208)..(208): n is a, c, g, or t
  misc_feature (215)..(215): n is a, c, g, or t
  misc_feature (229)..(229): n is a, c, g, or t
  misc_feature (242)..(242): n is a, c, g, or t
  misc_feature (256)..(256): n is a, c, g, or t
attcggcacaggcaccagcagaccctgctctgcccggggcttctgagccatggcagtgtcccttcactgcatccctctccattgggggngtgtctaaggaccctttccccttnggcatggccagtccaggggtctctttcaagtccctggtgtcgtcttatgagacccgagtggttgggatggctccggggctgccccnaaaaagggntgtgctnttccccttgctctncccgggtagcatnccccatccgagggncatctggggc

SEQ ID NO: 517008 - DNA, 937 bp, Homo sapiens
  misc_feature (663)..(663): n is a, c, g, or t
  misc_feature (925)..(925): n is a, c, g, or t
ggtcgaaaacgcgctcttgtcgatttcctgtagtgaatcaggcaccggagtgcaggttcgggggtggaatccttgggccgctgggcaagcggcgagacctggccagggccagcgagccgaggacagagggcgcgcggagggccgggccgcagccccggccgcttgcagaccccgccatggacccgttcctggtgctgctgcactcggtgtcgtccagcctgtcgagcagcgagctgaccgagctcaagttcctatgcctcgggcgcgtgggcaagcgcaagctggagcgcgtgcagagcggcctagacctcttctccatgctgctggagcagaacgacctggagcccgggcacaccgagctcctgcgcgagctgctcgcctccctgcggcgccacgacctgctgcggcgcgtcgacgacttcgaggcgggggcggcggccggggccgcgcctggggaagaagacctgtgtgcagcatttaacgtcatatgtgataactgtggggaaagattggagaaggctggctcgtcagctcaaagtctcagacaccaagatcgacaggcatcgaggacagaataccccccgcaaacctgacagagcgtgttgcggggagtccactgagaaatctggaagaaacacagagaacggagaacgcaaacagtgngcccaccctggtggggggctctcagggtccttgccagaatagaacctggtggctgacctggttacaagacggttcagaaggcccgtgacctccagaacaggagtggggccatgtccccgatgtcatggaactcagacgcatctacctccgaagcgtcctgatgggccactgctttgcgctggtggaacacaggcatctacacagcctggactttggttctctccaggaaggtagcccagcactgtgaagacccagcaggaanccaggctgagtg

SEQ ID NO: 517009 - DNA, 336 bp, Homo sapiens
  misc_feature (4)..(4): n is a, c, g, or t
  misc_feature (136)..(136): n is a, c, g, or t
  misc_feature (298)..(298): n is a, c, g, or t
gaanatggagtttcccctccttgttgcccccggctggagtgccaatggtctgatccgcagcctcagtgcaaccctcctgcctgccccaggttcaggtgattctccctgcctcggcctcccaagtagttgggattanaagcatgcgcccaccatgccctggctaattttgtatttttagtagagaatgttggtccatgttggtcgggctggtctcgaactcctgacctcaggtgatctgcccgccccagcactttgtgaggctgaggcacgtggatcacttgaggtcaggagtttgagnccagtcagggcagcatagagagaccccatctctacaaa

SEQ ID NO: 517010 - DNA, 1014 bp, Homo sapiens
  misc_feature (482)..(482): n is a, c, g, or t
  misc_feature (487)..(487): n is a, c, g, or t
  misc_feature (496)..(496): n is a, c, g, or t
  misc_feature (507)..(507): n is a, c, g, or t
  misc_feature (513)..(513): n is a, c, g, or t
  misc_feature (530)..(530): n is a, c, g, or t
  misc_feature (540)..(540): n is a, c, g, or t
  misc_feature (546)..(546): n is a, c, g, or t
  misc_feature (549)..(549): n is a, c, g, or t
  misc_feature (552)..(553): n is a, c, g, or t
  misc_feature (557)..(557): n is a, c, g, or t
  misc_feature (573)..(573): n is a, c, g, or t
  misc_feature (582)..(582): n is a, c, g, or t
  misc_feature (585)..(585): n is a, c, g, or t
  misc_feature (594)..(594): n is a, c, g, or t
  misc_feature (606)..(606): n is a, c, g, or t
  misc_feature (615)..(616): n is a, c, g, or t
  misc_feature (619)..(619): n is a, c, g, or t
  misc_feature (621)..(621): n is a, c, g, or t
  misc_feature (624)..(624): n is a, c, g, or t
  misc_feature (636)..(636): n is a, c, g, or t
  misc_feature (641)..(641): n is a, c, g, or t
  misc_feature (649)..(649): n is a, c, g, or t
  misc_feature (654)..(654): n is a, c, g, or t
  misc_feature (683)..(683): n is a, c, g, or t
  misc_feature (694)..(694): n is a, c, g, or t
  misc_feature (705)..(705): n is a, c, g, or t
  misc_feature (710)..(710): n is a, c, g, or t
  misc_feature (713)..(713): n is a, c, g, or t
  misc_feature (716)..(718): n is a, c, g, or t
  misc_feature (721)..(722): n is a, c, g, or t
  misc_feature (729)..(729): n is a, c, g, or t
  misc_feature (736)..(736): n is a, c, g, or t
  misc_feature (741)..(741): n is a, c, g, or t
  misc_feature (748)..(748): n is a, c, g, or t
  misc_feature (752)..(752): n is a, c, g, or t
  misc_feature (757)..(757): n is a, c, g, or t
  misc_feature (764)..(764): n is a, c, g, or t
  misc_feature (769)..(769): n is a, c, g, or t
  misc_feature (771)..(771): n is a, c, g, or t
  misc_feature (774)..(774): n is a, c, g, or t
  misc_feature (776)..(776): n is a, c, g, or t
  misc_feature (779)..(779): n is a, c, g, or t
  misc_feature (787)..(787): n is a, c, g, or t
  misc_feature (793)..(793): n is a, c, g, or t
  misc_feature (816)..(817): n is a, c, g, or t
  misc_feature (820)..(820): n is a, c, g, or t
  misc_feature (827)..(828): n is a, c, g, or t
  misc_feature (834)..(834): n is a, c, g, or t
  misc_feature (836)..(837): n is a, c, g, or t
  misc_feature (841)..(841): n is a, c, g, or t
  misc_feature (849)..(849): n is a, c, g, or t
  misc_feature (851)..(851): n is a, c, g, or t
  misc_feature (858)..(858): n is a, c, g, or t
  misc_feature (868)..(868): n is a, c, g, or t
  misc_feature (872)..(874): n is a, c, g, or t
  misc_feature (892)..(892): n is a, c, g, or t
  misc_feature (897)..(897): n is a, c, g, or t
  misc_feature (905)..(905): n is a, c, g, or t
  misc_feature (909)..(909): n is a, c, g, or t
  misc_feature (917)..(917): n is a, c, g, or t
  misc_feature (922)..(922): n is a, c, g, or t
  misc_feature (926)..(926): n is a, c, g, or t
  misc_feature (938)..(938): n is a, c, g, or t
  misc_feature (941)..(941): n is a, c, g, or t
  misc_feature (943)..(943): n is a, c, g, or t
  misc_feature (949)..(949): n is a, c, g, or t
  misc_feature (1007)..(1007): n is a, c, g, or t
ggtcgaaaacgcgctcttgtcgatttcctgtagtgaatcaggcaccggagtgcaggttcgggggtggaatccttgggccgctgggcaagcggcgagacctggccagggccagcgagccgaggacagagggcgcgcggagggccgggccgcagccccggccgcttgcagaccccgccatggacccgttcctggtgctgctgcactcggtgtcgtccagcctgtcgagcagcgagctgaccgagctcaagttcctatgcctcgggcgcgtgggcaagcgcaagctggagcgcgtgcagagcggcctagacctcttctccatgctgctggagcagaacgacctggagcccgggcacaccgagctcctgcgcgagctgctcgcctccctgcggcgccacgacctgctgcggcgcgtcgacgacttcgaggcgggggcggcggccggggccgcgcctggggaagaagacctatgataccgcctttcncatcntcttatctncttttgagccntctttncgccaagtttataatgntgtcccttgngctcgnagnctnngacncagctacagcgctctnggggatgcnggntcgctctgntttgggggcgtncgtgcaccnntgncngcngcgcgcgccggngccgngccgcatnggggnggtggtggggggtgagcggtggtgggcgnagccggtggtnggtgcggtagncaccnccngtnnngcnnggggtgnggtggcnccgcngctattnaggnatatngggctgntcttngngtncncgngcatgtcngttgancagagtgatgctgggggagtggnntgngtggatnncgcgcngnntgangcgcaggntncgttttnatgtgtggcngacnnncagggcaacgtagttccncgggnagctggcnggcnggtgcgtnaagancccngcggttgttatncgntncagatnggttcttcatggtgtgggagcgccgggaggggtttgggggtgcgcccacattggtttnttgttca

SEQ ID NO: 517011 - DNA, 1331 bp, Homo sapiens
ctccgtccgtttcgtctttctcgttgctttgtctttttttcgtgcgtccgtcaccgcgctcctggagtgtctcgctctcgtcccgtctttgcgcctgctgcccgctgtttctgctccctggtcgtgttgcggtcggcgtgctctggtcgtctgtgtctgcttcgctgctgtttggctgtgtttgcttcgcgcccccccgcggcttgtggtggcgtgctgtggtttgttctcggcggtgccgttcgcgtcatgtttgtcgtgcgcttctcgttgtctgtcgggcttgtgtgtcgtctctcctcccgcccggttcggctcggccgctgctgtcgactgcccccgcgcggctgtcctgccttggcctgtcgtctgtctgctttctcgctgtcgccggcgtcgtgctcgctcttttctgctggtcttgctttgcctttcttttccagggttccctttctctgcttcggttctccgtgtctttgcttgtcgtgtctcttcgcgctggtcgcgtgtgctgtggtctctccgtgggggggggctataatatttaacgcacagaggcttctctttatggtgggaaccgccgtccaagcgtctccccctctggggggacttcccaattccccaccgccgtggtgtgttggagccccctccccacctattgtgaagacacccccggggcgccgagttccccaggccttccctcggggctttttttgcgctatgggccccccggggacccggattttccccaattttctcaccacccaaggagtaccagccctattggccccctttatggccctatattttatggtgaccccacgtagtatggcaccaagtgttgtacacacaaaaaccccaaggcctggtacaccggtctcccggagatttctccccgcggaatattctcgtctgacacccacagcggtctccgcgcccccgccggaggaccccaaagattggccttgccgaagaattctcggccccctttctcctccagggatgccctggggacacaggaggccccgtgctggtccgtgtcccttctgtctgtcgggggccctccgcctgtaattcttgccccccattgaggcgcccctacttctcagtatctcccgtccttgagtccacccaggcccaccgccctatcaactatcccacgtgcccgctccgctgatgatgggaaacactgcccgaacgtgcccacgccaccccccacggagccctcacgggccccacgcctggaagtggctgaaagaaaactgtgaagcaccctccacctgaacagaggcggcccctcccccggctccccattaaaatgtggaaaccca

SEQ ID NO: 517012 - DNA, 853 bp, Homo sapiens
gtatccttaatcatttgtatgccacaactaacctcctcggactcctgcctcactcatgtacaccaaccagccaactatctataaacctagccatgggcatccccttatgagcgggctccacgtgattatagtggcttgctgctctaagattaaaaatgccctaagcccatttcttagccacaagggcacacctagcaccccttatcccgcagtactaagttattatgcgaaacgcagtcaggcctactcagttcaatcggcaatagccctgggcgtaggcctaacgcggtaacattactggaggccacctactcatgcacctaattggaagcgccagcctagcaatatcaaccattaagccttccctctacagcttatcatcttcacaattctaagttctactgactatcctagaaagtcgctgtcgccgttaatccaagcctacgtggttgcacacttctagtaagcctctacctggagcgagcaacgcatcaaataaaagaggcatctggaaacaaaaagatggttggggggcagctcggggaatccaagaagcctcaaaagcaagatcttgcgtcgcggaggaccctcctgctgggaatccgaagaatgaggggtactttcgagaatcggctcgagacatgaggccggatgtcgccactacgaaaccggcgggaccccgcgggtctgaaccacccaaggggcacgagggctaccgggtccacacaggggccggagtgaatgtacccgcgcaggggtcacaggacaccgcggtaccgcgcggcatggcgtctcgagcacgctaacggcccattcgcgcccagacaccatcacccaggaaagcccgcggacc

SEQ ID NO: 517013 - DNA, 1523 bp, Homo sapiens
  misc_feature (835)..(835): n is a, c, g, or t
ggagagggtgtttgtgtctttggtccctgctccttttgtggttctttgtttctcttccccgggggtgttcttctggttcgttcgcacttgctgtctggtggtggagggactctctggacgttttgtccactggccattggactcctggttgtgaactgcggcccctctgcgtgctattgatgatgggtttgatgttgtttcgtcccacgcgtgtttgcaggatgcagcccctgttcccccggggtcttcccaagtggtcgaccatggggttcccagttcctcctgggtagtgtgttgccggtgtgcacgcgcaccttgtgtcgtgtgtagcgctcatgtcccagtgcgcctgtatgtctccctctcccctaaagggaaggggggttttcgttctcccggattgttttagacccgagtttttttgtgatgcttgcctaggcctttggtgtgtgtacacaatgacgccgcggaggggtaaaatttggggaaaaaggaatgtgtagaccccagcctgttgtttatgaaatacaatagggtgttgaagagtaaatgttggtttgtccttttttgcctgtacaaattgtttggccgttggtagtactccccggccccccgtgtgtatcgtgctatgtatctgttgtgcgcccactatatgagttgtatgtcgggcgttcccccatgtcgcggccattgtggccaccccacagacctttgggggggccctcttctcggatagaggtggtttttcccccggcccgctcttgttggtggcccacgtcttgtgccccccttgtggaggcgttttttccagcgccacgcccacttgggtgttgtnatgtcttctcggaggccgcacacgggtggttgtctcgggtggtgtgcccccacaggtggatttgtctgtagggcccccccggtgtaggccctcactcccgcgggggcccccgcgagccgcgcgtgttgtctgggggaagaccccccagaacggggatcaccgcagttgttggggggccccgcgtatagagttgtgtatagcctcgtttttgtccctggtgggaacctcgtgtgtgggagatgtggccactctctggttctgtcctggtgcgccccctcttctggcttcaaccaaggtgtccaccagcggccaagacgtccctggccagaacatttgggtgtttgcttctttttgggtggggtttcttataaggtcgccctgtattgttgcccacaccgacagttctttgtgttgtccctgtccgagacaccttgtgtaatggcctagaagaagagagcctccaggttaactagaagatcccgggttgcgttggtgttactgggtttataagaaaagttggtgaagccaccgtcgtgaccagtgtccctgtgatgtgacgtccacctgctccaggtttaaagaatgttctttttttgtaaaggtccagaccctgtgacctgtcaaaaaatgttgcgcccttttgcgggacccgatttttaagataaaataaatagtttttaccgtctgt

SEQ ID NO: 517014 - DNA, 348 bp, Homo sapiens
aactctcctatagatcagtaaaaaaaaaatggtattattaaaaattaaaaaagtgttggccgctgccgggcgtggtggctcacacccataatcccagcactttgtggaggccgatggccggcggatcacctgagtgttgggagttcgagacaagcctggccaacatggtgaaactccatctctactaaaaatacaaaaattagctaggcatggtggtgcatgcctgtagtcccagctacttgggaggctgaggcaggagaatcacttgaccccagggggcggaggttgcagtgagccaagatcgcgctactgcactccagcatgggtggcaaagcaagaccccatctc

SEQ ID NO: 517015 - DNA, 318 bp, Homo sapiens
  misc_feature (24)..(24): n is a, c, g, or t
  misc_feature (84)..(84): n is a, c, g, or t
  misc_feature (92)..(92): n is a, c, g, or t
  misc_feature (121)..(121): n is a, c, g, or t
  misc_feature (151)..(151): n is a, c, g, or t
  misc_feature (167)..(167): n is a, c, g, or t
  misc_feature (188)..(188): n is a, c, g, or t
  misc_feature (202)..(202): n is a, c, g, or t
  misc_feature (227)..(227): n is a, c, g, or t
  misc_feature (234)..(234): n is a, c, g, or t
  misc_feature (296)..(296): n is a, c, g, or t
ggccagggggcaaggcggcccacnaaactatggaggaaaaacgcaggctgcttcagaacaagcggaaggagcccccggaaaatntggcccancgggctgcccggctcaaaacatttccttncaaaaggtttaaggagggcccctgtcaacncgggggccagtgttgntactcccccagccccccgacncccagggtttttgntgatgctgcccctgactgtccaaanacctccnaccagaccccccctgggcctggggctgccgctgggccaggcatagactgaaccaataaaaanatgtcccgtccccttttcccga

SEQ ID NO: 517016 - DNA, 221 bp, Homo sapiens
  misc_feature (16)..(16): n is a, c, g, or t
  misc_feature (39)..(39): n is a, c, g, or t
  misc_feature (91)..(91): n is a, c, g, or t
  misc_feature (112)..(112): n is a, c, g, or t
tcactggccaagaganttctccctacattaaggagcaantttttgttgtttacttttaccctttcctagtgttgacttaaacaatgaatgntcaatgtaggtgagttcaaantctagtttgtttatattgatcacttttagttactcaataactttaaaggttggttgcaaaactattttgttttttgcagtctctgaaaagaggattctgagatgttaaa

SEQ ID NO: 517017 - DNA, 865 bp, Homo sapiens
  misc_feature (44)..(44): n is a, c, g, or t
  misc_feature (68)..(68): n is a, c, g, or t
  misc_feature (77)..(78): n is a, c, g, or t
  misc_feature (92)..(92): n is a, c, g, or t
  misc_feature (96)..(96): n is a, c, g, or t
  misc_feature (114)..(114): n is a, c, g, or t
  misc_feature (116)..(116): n is a, c, g, or t
  misc_feature (150)..(150): n is a, c, g, or t
  misc_feature (197)..(197): n is a, c, g, or t
  misc_feature (224)..(224): n is a, c, g, or t
  misc_feature (227)..(227): n is a, c, g, or t
  misc_feature (232)..(232): n is a, c, g, or t
  misc_feature (239)..(239): n is a, c, g, or t
  misc_feature (246)..(246): n is a, c, g, or t
  misc_feature (250)..(250): n is a, c, g, or t
  misc_feature (312)..(312): n is a, c, g, or t
  misc_feature (317)..(317): n is a, c, g, or t
  misc_feature (341)..(341): n is a, c, g, or t
  misc_feature (354)..(354): n is a, c, g, or t
  misc_feature (358)..(358): n is a, c, g, or t
  misc_feature (360)..(360): n is a, c, g, or t
  misc_feature (369)..(369): n is a, c, g, or t
  misc_feature (376)..(377): n is a, c, g, or t
  misc_feature (379)..(379): n is a, c, g, or t
  misc_feature (387)..(387): n is a, c, g, or t
  misc_feature (393)..(393): n is a, c, g, or t
  misc_feature (397)..(397): n is a, c, g, or t
  misc_feature (400)..(400): n is a, c, g, or t
  misc_feature (405)..(405): n is a, c, g, or t
  misc_feature (409)..(409): n is a, c, g, or t
  misc_feature (435)..(435): n is a, c, g, or t
  misc_feature (470)..(470): n is a, c, g, or t
  misc_feature (490)..(490): n is a, c, g, or t
  misc_feature (541)..(541): n is a, c, g, or t
  misc_feature (543)..(543): n is a, c, g, or t
  misc_feature (549)..(550): n is a, c, g, or t
  misc_feature (552)..(552): n is a, c, g, or t
  misc_feature (554)..(554): n is a, c, g, or t
  misc_feature (560)..(562): n is a, c, g, or t
  misc_feature (567)..(567): n is a, c, g, or t
  misc_feature (569)..(569): n is a, c, g, or t
  misc_feature (574)..(575): n is a, c, g, or t
  misc_feature (580)..(580): n is a, c, g, or t
  misc_feature (586)..(588): n is a, c, g, or t
  misc_feature (592)..(592): n is a, c, g, or t
  misc_feature (597)..(597): n is a, c, g, or t
  misc_feature (602)..(602): n is a, c, g, or t
  misc_feature (605)..(605): n is a, c, g, or t
  misc_feature (618)..(618): n is a, c, g, or t
  misc_feature (620)..(621): n is a, c, g, or t
  misc_feature (624)..(624): n is a, c, g, or t
  misc_feature (636)..(636): n is a, c, g, or t
  misc_feature (638)..(638): n is a, c, g, or t
  misc_feature (640)..(641): n is a, c, g, or t
  misc_feature (644)..(646): n is a, c, g, or t
  misc_feature (665)..(665): n is a, c, g, or t
  misc_feature (671)..(671): n is a, c, g, or t
  misc_feature (681)..(682): n is a, c, g, or t
  misc_feature (686)..(686): n is a, c, g, or t
  misc_feature (689)..(689): n is a, c, g, or t
  misc_feature (697)..(697): n is a, c, g, or t
  misc_feature (699)..(699): n is a, c, g, or t
  misc_feature (701)..(701): n is a, c, g, or t
  misc_feature (704)..(704): n is a, c, g, or t
  misc_feature (706)..(707): n is a, c, g, or t
  misc_feature (711)..(711): n is a, c, g, or t
  misc_feature (713)..(713): n is a, c, g, or t
  misc_feature (720)..(720): n is a, c, g, or t
  misc_feature (724)..(726): n is a, c, g, or t
  misc_feature (731)..(731): n is a, c, g, or t
  misc_feature (734)..(734): n is a, c, g, or t
  misc_feature (740)..(740): n is a, c, g, or t
  misc_feature (742)..(742): n is a, c, g, or t
  misc_feature (762)..(763): n is a, c, g, or t
  misc_feature (766)..(766): n is a, c, g, or t
  misc_feature (783)..(785): n is a, c, g, or t
  misc_feature (787)..(787): n is a, c, g, or t
  misc_feature (789)..(789): n is a, c, g, or t
  misc_feature (794)..(794): n is a, c, g, or t
  misc_feature (798)..(798): n is a, c, g, or t
  misc_feature (802)..(802): n is a, c, g, or t
  misc_feature (859)..(859): n is a, c, g, or t
ccacatctatttacacagaatcattgtacaggatttacagcaanatgctacacatagcatctattctngataagcgnnaaaggtgtaagaanagantggggaataaagctctgnantcaaagtgtaagcagaaatctgaaggtaggtgtncaaggaaggataagggccaaatgatgagcgaggttggtgaggtaganataagggaggttgaggaaacatccaanaanttgtngtgcagngatatangggnagagtccactggcacatagtcttaaaaattatgtttggagtttgaaggaggtaaaatcttcnataanccacctctgtgagaaaaaagaagncagttatgaaccntacngncctaaaccntagtccnncnctatcaanaagtanttcntcngattnattncctggataggagaatgagaatgtttnaaaaagaaagagagagatgcatagacacagaaccntaaacagagttaagagacanaaagtaaatatattcaagagagacacatagaaagaggaaaagaacatgaancncatgcnnancnagaaannngagananccgannaactncacgannnatcnttccntaccncancttccccaaagcncnnccnccaccccgaaancncnnaannncgaactttaaccaaagagnagaatncgaatgaggnnggcncangggggacnancnaanannccancncaccaantcannnccccnccntatccngnaccggaaggcagggcttganntgnagccagggatatattannntnanaatanacangatngaggacacgagggcacaaagccccacaatcccagggccacagcgccatacgcctatntttgtc

SEQ ID NO: 517018 - DNA, 110 bp, Homo sapiens
cggattcttgcgggagcagggattggggcacagtttaggcactgtgttgactcacacagtggaggggaacagcttccattgaccctcgctggcttttgtgtgttattaca

SEQ ID NO: 517019 - DNA, 1478 bp, Homo sapiens
agcgggctcacagcctgctctcagaagctccgatccagacaacatacaagcactgtcctttcagcacacacaagctcgggctgaggagggaggactcctggaccgtacatccatctacaaactcaggctctgaactcatgcatcgtgaccaccccacgagatgcgagccacaagactgggcaagacacaggcgtacaggatggtcgacacgactgcaacagctaaccaccagacagcgaacgaggaaccaacaccagcacattcagacctgagcgcatgggcctataccacgacacgaacaccgtctcactcaccatcacccttgcgcaagcgcataacacgtcacaatgacccacgcctgcccctgacatccccagcacacaacggatgactatgctggacaagcaccaaatgataacaggcaagtacatcacagcacacggagaaaaccagaccagcaccacaacacagggcgaaaacgaattccacaggcgcaactgcacccagaaacaaacacgtcaggacaatgcaacaagtgtagcaacagcagaatacacagcaccaatccccatactgcatcgctcaagcaccattgagacacgacacagtcacgaccattataacaccacacaattgaaccagactagaccaccttaccgaaaagaataagcaacctaggcagacatcggcggaacacagataccaaaacaacacggcaccgcatacatcgaggccacactctaatatagcaaagctccaacaccacacggacatcattgcgcacaccacaaaggccacgcagcaggaaacatcaacagcaatccagctaacctaacagagcacaacaacccacaacagccaggccaccagtactaacttaccaacgacagaccccacattacaccacactgcaaggaaactgcaccatgcagtacccataacacaaatcacacataccacaccaacgtaggaacaaccacacagaccacaacgaaccaccacgacaaacaccgacgcccggccacataccaccaacacgacacccaacgaccccaaatcacgacaaacacaccagcatacacaaacgcaccacattggcgcaccaccacaaacgacaacaaaacaaaaaacaatacactggaaacaaaagcagaaaaaccccacaatcacagcgactgacaacccagaacagcgacaaccagtcgacatccctagcaagcacatagaacacagagcatcatggacaatcaacactgtggcaacctgcatcaagatcgacacaccaacacacatacaggaaccccacaccaaaacaaaaacaccaccacgccaccagaggcacacacgcaacaccatgaaaacacacagagacccacccctgagcccacacacacgaaagaccactaacagacacacacactagagcggccggaccgaacagcataagaacacacagatcgaccaaggacacgcacacc

SEQ ID NO: 517020 - DNA, 101 bp, Homo sapiens
agttgaactgggcagtcggtgacaccattcccactgtgggtactacgtggagacggtgacttacacaaaatgtcaagttcaacgtattgggatgtgggcgg

SEQ ID NO: 517021 - DNA, 169 bp, Homo sapiens
tgtaagaagtgtgtcctagttgttacacaacagcatatgagtcatgtcaccatcattattgccatcacccatctttatagtaacaagaaggtagttccttcacactctaacctaagagctttttcttcatcttcacctggcttatggttcttttgctacagaccccatg

SEQ ID NO: 517022 - DNA, 390 bp, Homo sapiens
catcgctttatcgcgtcagcactgtgcgaggattcgaagctgggtgtgaagtgctgggcgtctcggtaggactctcagttacaccacctggcttggatcaacaccccccggaaagagggaggcttgggaccgctgaacatccccctgcttgctgaacgtgaccagacgcttgtctgaggattacggcgtgctagaaaacagatgagggcattgcctacaggggcctctttatcatcgatggcacgggtgtccttcgctagatcactgttaatgattagcctgtgagacgctccgtgaatgaggctctgagactgttccagtgcttccagtacacagacgagcatggggaacgtttgtcccgctggctatcatcgtgtcactgccaggctt

SEQ ID NO: 517023 - DNA, 311 bp, Homo sapiens
  misc_feature (25)..(25): n is a, c, g, or t
  misc_feature (46)..(46): n is a, c, g, or t
  misc_feature (226)..(226): n is a, c, g, or t
  misc_feature (229)..(229): n is a, c, g, or t
  misc_feature (248)..(248): n is a, c, g, or t
  misc_feature (260)..(260): n is a, c, g, or t
ctggcacatagtaagtgctatacantcttcatttgtttgtttgaanacagggtatcagcactttgggaggccaaggtgggcagatcacctaaagccaggagaccgagaccagcctggccaacatggcaaaaccaactctactaaaaatacaaaaattagctgggcatggtggtgcatgcctgtaatcccagccacttgggtggttgagacacaagaatcatttganccntggaaggaagaggttgcangtgagccgaganctgtatcactgtactccagccttcagcaaagagagcgagacttctatctca

SEQ ID NO: 517024 - DNA, 284 bp, Homo sapiens
  misc_feature (1)..(1): n is a, c, g, or t
naggcaagctatccggttcactggtatgtatcattcctttaatgggatctgaaatggccctgcctcatgcccaaattccagtcaataattaattacacttattaaagtgtcagagtatatccccctcttaaaaatgcaaaaataagttttttagaggacaacattagctattagcatatgcgctattttctgatttcttatggatcacatttttttctgtaccatatacataaaaaatgtacataaatttgaaatccatctgatacattgaaccggatagcttg

SEQ ID NO: 517025 - DNA, 136 bp, Homo sapiens
tcatcagctggtccggtgttcctttgtctcctaagtcttttattcttcttcttgagacagagtctcgctctgttgcccagtgctggagtgcaatggctcaatctcagctcactgcatactccacctcccaggttca

SEQ ID NO: 517026 - DNA, 202 bp, Homo sapiens
tatttgcagcagctcacctcaggaagggctctggcatgtaaagctgcacagaagtcaaatcagataaagcctgagagggatccatgggatttcttggcaaaggggattgtatggtgataccacggaagcgcagcttcatgtggctcatggggcagagaagccagattacaggagatcagcaaccgagagagtgagtggcgag

SEQ ID NO: 517027 - DNA, 281 bp, Homo sapiens
  misc_feature (61)..(61): n is a, c, g, or t
ggctgaggcaggagaatggcgtgaacccggaaggcggagcttgcagttagccgagatcatngccactgcactccagcctacatgacaatgtgacactccattctcaaaaaataataataataacaatataagaactagctgggcatggtggcgcatgcatgtagtcccagctactcctgaggctcagtcaggagaatcgcttgaacttgggaggcggaggttgcagtgagctgagctcataccactgcactccagcctgaacagaatgagatcctgtcaaa

SEQ ID NO: 517028 - DNA, 200 bp, Homo sapiens
ggaatattaaacacatggcggggaggtcaattcccgtttctgctcttaaaaggattactccctatggaaaaaaagattactcctaagcacacatgactacatgtggtaggtacatactctaaagtagtgtatctacatactatggtatttaacctttaacgtttcccctattaaagagattggtcatcctgcaaatgtgg

SEQ ID NO: 517029 - DNA, 387 bp, Homo sapiens
tagaggatacagcgggtactctcagtcacttatcagcagggtaaatacgagctcaaattaaggcatttttgtggcttgttcctctggaatggcattctaccatatgaaactgccacttgagaatgtgaagtgagaaagccaggcgctttggaaaccaatgctctaccataaacaccctttccccacacatagaaggacagatggtgagggaaggacaagaggaaaaaaccgggaactctcaagttacttatcagcaggggtcaatacgagctcaaattaaggcatttttgtggcttgtcctctggaatggcattctaccctcccagcccgagcagccctaaccttaaagcatgatgctctgactgccatgtgagttccctagtttcc

SEQ ID NO: 517030 - DNA, 425 bp, Homo sapiens
  misc_feature (289)..(289): n is a, c, g, or t
  misc_feature (323)..(323): n is a, c, g, or t
  misc_feature (339)..(339): n is a, c, g, or t
  misc_feature (367)..(367): n is a, c, g, or t
  misc_feature (405)..(405): n is a, c, g, or t
agagatctgtattcaaatcatactgcgttccctggagaactagggtccagctgcggcccattctgtcccctgcaagtcccccatccccaacaatctctacactccctagtctccacagtggaaagctgttcaaggtgtaagccatgaacggtgacagtcgtttcgcttattatgtctggttcctttccagcgtatgaacttcttgacacaggggccctggcttcgcacttctatcccccagcactccagcacctagcccctgtcagggcactgtccgtcttcccaccgnccaagtcctcactaaccaacctgcttcactcagnctaaacgcactgctgngcaaaatcttcaattcccttttcccctnttgttattttgaggggatacagcattcttcacaggggntaaggcattaaccctgggcg

SEQ ID NO: 517031 - DNA, 1363 bp, Homo sapiens
  misc_feature (321)..(321): n is a, c, g, or t
cgctgcaggtggtgcgcgcccgtaagcagatcgtaattggggtgaactatttcttggaacgtgtgagcttgtggtcgataccacggatgtaccaacgtacaccagcccaatctttgtgcagcaaacctgcccgctatccagtgagcacagccatcactcatgaacaaggaacatgacatttcgtgtctctttgccacgatctagcgctggttgctctttgcgttagggctacaaacataggaccttgtgccgtaaatcctacctagtatcagtgacgcctaatgggtgtctggtaaccagggctaggcctgttgccaaatnctacctgctttgattgctacgagcttcatcgatcactccaatgttggttctctcaatcaccgtgtgtaccatcggtggtgcacgctgcacctagtgagtgatatggctagttcacgcgaatgttgcactggtcagcaccagcgcaggacgcgaataatgtatcacacggtccacgcatgagccggtaacattcgagttctggcttactagccacaagcgcgggctgcttcgagacacgtcaattcttcacgtcgtcgcatctttcctgtgctctttactttcataaagcgccacacggcgatagttatgcggaggatagtcgattacttagcctcgccaagtcgtctcctgggcaagccccataaagtgaatttaagatcttctggtgctttattcaacaccggtacaggaggttgcgccccattggaacctgggcacattcaggtattatacggcgagagacagccttcaattccaacataaagaaagcaattcccggtaacgtagagagaccggaacaaccggtaacattaacggtataggcaaagaccgtccaacttttcccgaactaatagtccgtactcaacattaagggaaagcgctagttgatttattaggaccaaagttccactaaggagaagggggttgacaattttcctctgttatgaaataatcgccgcgttaatgaacttcgaggaggctaaacgagcccgcttaaaggaagcgaaagaaccttataggggccgagaaagaatccccactttttcacacctaattcgaggttaagttcaaatacgtgagctgttacagaagttacataaccattttctctttaccccgaagaaataaacagtgttgtcctacgggaggagtaaatcacgggaacaaattgtccgccgagcaagggatatcattacggcgagttaacaccacagaacatggagaaaataccctcacagtgggaacaatgtccacaacttcatctcgtgaaaaggcgccagacattcaatattctccgaaaacacgctcatgtcactagggg

SEQ ID NO: 517032 - DNA, 664 bp, Homo sapiens
cggaagagagtggtggttaaaaacagttaattctttctgcgtggttgttaaaagaagaggcctcggggaaataaaccaaattgctcgaggtggtggtgtttaacatggagtcttaaatgtagagacttataagattaagcgaaggactgtcaatctgagcgttgatcaaatattctatgtgttaaggcttaaaacttctgtgtaataggataagaacaaatagcactggaactctagcgcgcgattcctctaaatactagtcttagccttgggttaatgagaagtgaacttctagtctagacactgatgcttagtctagggtctgaagcttactctttatatcaggctctaaactgtgttctgagtctggacagtatgtgtaaagttacagttaagaagttattatggaacctgtgctctaaaagttgcgtctagtgctgccccttggttctgatttctgcctgtcatatccagactaatatgtactttctccataaagatgtgagaacatggcttgggtattgtcctcagtttggggctattctttaggattaagattgtctatctctggttggctggtcttggatgtatttccaaggtttaccaagtctctatgctgtggctggagatctctcctcctgggctcccgtgaggggctcttgtc

SEQ ID NO: 517033 - DNA, 321 bp, Homo sapiens
  misc_feature (92)..(92): n is a, c, g, or t
tagataaattgcccctatatacaaattaaagaccttcagtgcatcaaaggatacagtcaacagagtgaaaagcaatcctatggaataggagnaaatatttgcaaataacgggttaatcttcacaatatataaagaactcctgcaactcaacaacaaaaaaaaaccccagtttcaaactgatcaaagaacttgaataaacatttcttcaaaaaagatgatataaatgtccaataggcaaatgaaaagatgcttaacattactaatcattaggaagatgcaaatcaaaaccacaatgagatagcacctcagcacctcacacca

SEQ ID NO: 517034 - DNA, 451 bp, Homo sapiens
aacccttatcaacatctcatttcttagctttattgtctttgaatgaaagttaagtttagtctttttttattatttataaaatggagtctcgccctgtcacccaggttgaagtgcagtggaataaatctcggttacactgcaaggctccgcctcctgggtacatgccatactcctgcctcagcctcccaagtagctggaactacaggcgccaccacgcccggctaaattttggtattttaagtaagagtatggtttccactgtttgttagccaggtatggtctcgatctcctgaccctgtgatccgcccacctcaagcctcccaaatgtgctgggtttccaggctgtgacccaccatgcccgggccaccttcttccttttaaattctctccctttactttctctaactctaacttaatctagataagtgtagagaaatgagatttaggacgg

SEQ ID NO: 517035 - DNA, 920 bp, Homo sapiens
tatcctataaatcatattttgattcgccacaactaacctccttcggactcctgcctcactcatttacaccaacccatccaactatctataaacctagccatggccatcccctttatgagcgggcgcagtgattataggctttcgtttctaagattacaagtgcgccttagcgccagctatcgtatacgcatcaaaggccacagcgctatcaccccgttagtccgccgaatactaggtatacttagtcgacatagccagtcagacgctatcgtcattcaaccaagtagcccctggtcgctacgcctaatccgtctatacattatctgcaggccatccgtaacttcaatgactaacctaatttaggaaacgtcgacctatcccctttaggctaaatcaatcaatcccaatctaacatccattctcgcgtccttatcagctataatcactacgtttccgacaagtttcgtaaatctcgtaacctggagcgtcatccgtagaacacatcgccgtgctcagcgctatgacactctaaaacgacgcctacggtattatccaacgacttttcatacgtaaacggccctcgtagccatgacaaccggagcaaaagccgatcataacaatacagacaagaaagaaaacaagagagatactgcctgagcgcccacttcttccatgttccgattgcttggcgcagagaaatgccgtgatgcctgatgagtgcgcgcacgcgtggggctcgacgaacgcacgttatgcctttgaaccccaacacatctacttgcggtgactccagacggcacgatcccccgaccgatggccccctgattgaatgaggacaagtcttacccccaataaggggccgttgttacccgcataggccacacacggcacacccccccaaaaaccactcaccacccaac

SEQ ID NO: 517036 - DNA, 1226 bp, Homo sapiens
gatcaggaagagcccaatggagccttctgaagtacctagtcagattagcacaagataatgttcttacgaagttcctaactttatctgactctcttggtgaagatgaggaagttacctttccaaccctggtgtctcccctcaagccaagtagagcgaggttctgattctatctgaaagacatatagcctggactacgcccatcgttcaggctactgagaacgacgttgtcatttggctgacttccttgtggattcaagtcttgtggtctgttaacagaattggattgctgggaattgaccgagtgctgtcaaccactatttgagcttagggacggagcatttctccatcacagagagaatatgtgtctagctcccagctgttggagcttgccttcttgcagaaagcaagatcttatgcaacgaagtccaaatacagaacagcaatgactggagtcaactgagtctcttctagggtctacaagtatcaagggtatcattcgagtgtcgaagtgttcctaggagaagtcagtaatactgctagagaatgtcttgtagatgactggcagacacagttactgacatgttagccagaactatgttgcctagttcgtggtgcatggtgaacactgaccaattctccttcaaagatcggcttggctgcgtcccctttattcacacgcacgatggcagctaaaaggtagacgcttcgggtactacgttactgaagcactcaggtggatacgatacaggaccacataactatggcgacaagattgtatccttccataggcacacacgcaaggacaataggccgagccgtgtgacaaccatgtcactaaggtccctaccacggcacacgaacacacaggcggcctcacggggaacacccgggtgccgcaaacagtcacccccatgcctccgcaagaacacaaacctggaggcaaccccagatagaacgcgatacccatgatcccacaacaaagggtgtccaggagcggacgaccaaagacacggagtggaccgccccgaacgccaagccaacacgccgcacagaccccaagctcaacactcatcgagcagccgccaatgtgcaccacacgacctgcctcagcctaggagagcacaaacgaacaccccaattcgcgagcagacccgccgcagtacgacatgccgacggtcaacacagactgagaagaaaaggataatagagcagactgaatcacaccg

SEQ ID NO: 517037 - DNA, 127 bp, Homo sapiens
cttttgaatcgtaaagacaaaaccacttttgagaaactcgactacctgatgtccaaagaagacaactacaagcggactcgggactacatccgaagtctgaagatggtacccagtattccctatctag

SEQ ID NO: 517038 - DNA, 231 bp, Homo sapiens
gacatgtggtttgcgggaagccaggaatggaattatataatttgatatttgtctcctcccaaatttcatgttgaaatgtaatccccaatgtcggagatggggcctggtggaaggttactggatcacgtgggtggatttctcatgaatggtttaagcaccatcctctgggtgctgtgcttgcagtagtgagtgagttcttgcaagatctggttgtttaaaagtgtgtatcag

SEQ ID NO: 517039 - DNA, 559 bp, Homo sapiens
  misc_feature (92)..(92): n is a, c, g, or t
  misc_feature (152)..(152): n is a, c, g, or t
  misc_feature (167)..(167): n is a, c, g, or t
  misc_feature (171)..(171): n is a, c, g, or t
  misc_feature (444)..(444): n is a, c, g, or t
aggaaaagcttttggttttgacaatgaaggcgattctaaccccggcaggcaaacaccaaaaacaacaagcaacgaaccgaagaagacatctnttgatcaggattcagatgtggacatcttcccctcagacttccctactgagccaccttttntgccacgacccggtngggntacgaaagaagcccaatatcttccagagtctgatgaagaagaagatgatgttgattttgcaatgtttaattaagtgcccaaagagcacaaacatttttcaacaaatatcttgtgttgtccttttgtcttctctgtctcagactttcgtacatctcgcttattttaatgcgatgatgtaattgacggttttttattattgtggtaggccttttaacattttgttcttacacatacagttttatgctctcttttcccccttcacacgccacgcantgtttgctcgcgttctagaattgttatccactgccgcgcattagcacagattttaattgtcatggttacaaactacagacctgctttttgaaatgaaatttaaacattaaaaatg

SEQ ID NO: 517040 - DNA, 151 bp, Homo sapiens
aagatcatcgttgggctttgcgaatcagtgttattagacatatgcagtagagctggcctgtgtgaatgtgtacttcataacaagttgggatgtgatctgcagtgggtttgagtatcactgtattttccaaaatttgccgaggagtgtttta

SEQ ID NO: 517041 - DNA, 206 bp, Homo sapiens
  misc_feature (15)..(15): n is a, c, g, or t
  misc_feature (51)..(51): n is a, c, g, or t
  misc_feature (53)..(53): n is a, c, g, or t
  misc_feature (56)..(56): n is a, c, g, or t
gttcggcacagcagnttgtgatcggtgcgctgactccgcgactccgagccntntcncgtccccttcccgccgccgccatgaagtggatgttcaaggaggaccactcgctggaacacagatgcgtggagtccgcgaagattcgagcgaaatatcccgacagttccggtgattgtggaaaaggtctcaggctctcagattgttgacat

SEQ ID NO: 517042 - DNA, 472 bp, Homo sapiens
ctcaggattaggggacgctttcagctctcggcgcacggcccagcttccttcaaaactgtctactggttcacggggatcctgtgcaagctaagcttggagggtgatcactttacaccctccagagcatatgggtttgtcaaagcctatactaactttgatgctgaccgggatgctttgaacattgaaacagccatcaagaccaaaggtgtggatgaggtcaccattgtaaacattttgaccaaccgcaccaatgcacagagacaggattttgtcttcgcctaccaaagaaggaccaaggaacttgcatcaccactgtagtgagtcttatctggccacctggagacggtgattttcggcctattgaagacacctgctcagtatgacccttctgacctcctttcatgaacggtctgggtaccgacaaggactcttttattgggatcatgtgctccagaaccccgcgcctttcctt

SEQ ID NO: 517043 - DNA, 1021 bp, Homo sapiens
  misc_feature (369)..(369): n is a, c, g, or t
  misc_feature (440)..(440): n is a, c, g, or t
  misc_feature (534)..(534): n is a, c, g, or t
  misc_feature (620)..(620): n is a, c, g, or t
  misc_feature (626)..(626): n is a, c, g, or t
ccccacgtttcagcacagcgctggccgcagtctgacaggaaagggacggagccaagatggcggcggccgacgggcgacgactcgctgtaccccatcgcggtgctcatagacgaactccgcaatgaggacgttcagcttcgcctcaacagcatcaagaagctgtccaccatcgccttggcccttggggtttgaaatggacccgaagtgagcttctgcctttccttacagataccatctatgatgaagatgaggtcctcctggccctggcatgaacagctgggaaccttcactaccctggtgggacggcccatgagtacgtgcactgcctgctgccaccgctggagtcgctggccacagtggaggagacangtggtgcgggacaaggcagtggagtccttacgggccatctcacactgagcactcgccctctgagctggagngcgcactttgtgccgctagtgacacgcggctgtggcgcgcggactacgtggttcacctgccgctacctcgggctgcggcctcttctccgtctgntaacccccgagtgtccagtgctgtgaaggcggaacttcgacagtacttccggaacctgtgctcagatgacacccccatggtgcggngggcgnagctccaagctgggggagtttgccaaggtgctggagctggacaacgtcaagagtgagatcatccccaattttctaccaaccttgggctctgacggagcaggactcggttgcggctgctgccggttggaaggcgtgcgtgaaacatctgccagcttctgccccaggaggatctggcagccctggtgatgccacctctgcgccaggccgctgagacaagtctggcagcgtcggtacatgtggctgaagttcggacccagaaggtgggccggatccagagactgtcctgctcgaccttgaaatcgacgcctgtagcggcccccacgcaaggtgaaacccggacgggaaggcaaccatgcgcacaggagcaggccagagctgcgcaacagggtcccgga

SEQ ID NO: 517044 - DNA, 302 bp, Homo sapiens
ggcagcagttgtatgtttggggatccactcgtccatggtgtaagtgattattgacgacaggttggagtgcacgggtgctatctcggctcactgtaacctccgcttcccagtgttcaagctgattctcctgcctcagtctcctgagtagccgggattacaggcgcccgccacgacacccagggatttccgagatgagccaggcatgatgtgggacacagagcacgtgggcagagtcctcgttcagcacatagaaatgactggcatcactctgagtttccatcgatacgcgcaggtaggcagga

SEQ ID NO: 517045 - DNA, 226 bp, Homo sapiens
cggactcacttctataggggcacgacacgaaaataaacagtctaattctcgaagctgctggtaccgtgtgatgaccagatagctatagatttacagaatacaggacctgcgagatcaggcgatgcctctctgaagatgtggccatctgcgttgggacctgaatgatgaagtagcgacgtacgttgggatctacagtgctcggtttgttggcccgggcagatcttcc

SEQ ID NO: 517046 - DNA, 137 bp, Homo sapiens
acaggaaacggctttgagcatcagtcctgctgcctctaatacatctgatccgaagcacatgctcagctcccaaactggctatcatgagtcgtgtgacaggtccaggtggggcatccagccccttagtgaggtctggc

SEQ ID NO: 517047 - DNA, 433 bp, Homo sapiens
gaatagcatgggaaagaccagcccccatgattcaattacctccccctggtccctcccacaatgcatgggaattctgggagatacaattgaagttgagatttgaatggagacacagccaaaccatatcatcctgtaatctcatgtgtctaccataagccccaacccagaatcacctttacttattttcttggcagcctggggaggtcctcaggctcatcaaggttccctgatgtctcagagtcccccaaattggtatgtagacctttagttattgtctaggctcccctctccttctcatttggctattttgaaagaactacatttttggttgaaagcaaagtgggcagatacttaggcacatgttttagaaaatatggtagtctttcatgcttacccaagtaatctacaaaaatgttcattgcattactgtttt

SEQ ID NO: 517048 - DNA, 343 bp, Homo sapiens
tgactagaggatccagaggtgggtagccattcctcggttaggaggtacacctagtacagttcctattcaaactagagtcattagtatgttcgggggatgatggagaacctcagttaaaggaatccaaacctaacagaggaagttaacacggaggactcgcaatccaaagggtattagcaacagcgtgcacattatccagaagcaaaaggaaatcaaccctttagcgtcaacagtactactgacgtcctatcactagccctgtcacagcacactgtatgtctgacaccaaatgagcgaccaattgaatcaccccacagaaccccctcctaaacccgtttaccta

SEQ ID NO: 517049 - DNA, 413 bp, Homo sapiens
  misc_feature (47)..(47): n is a, c, g, or t
gcggagtcgggcgctctataagttgtcgataggcgggcactccgccntagtttctaaggatcatgtctgcgagccaggattcccggtaagaaaggcatttgcaagagattgtggctgcttattttgccgcccccttccgacgggcccgccgggggtagctgagaggcccaccagggttgcgggagaaaccgaaccgggtggggggagggtccgacttggaggggcgagggggaagacccacggccgacgcggccaccaggtcgaggcggagggtagggacagcccggctagggtcaggcgtgcgaggtctgttacgaggcctcgacccgaggcggtgccatgcgcgaagccccggcgctgagtggcgagacggggtcgcgacctggcgtgggaaagaaaggtggaggcggccg

SEQ ID NO: 517050 - DNA, 169 bp, Homo sapiens
aggcccatggtacacccctactttgccctatattcctttgagatttcagttcagtgtcaagtgaaaaaattatgtttgaatgcttgctgggcttcatcccatgttatgttctattctttgcatggatggcatgacgttgaatctagactccccattattagctactgaa

SEQ ID NO: 517051 - DNA, 315 bp, Homo sapiens
ggatccctgggtctgctaggagtatgactgaatatgcaagtctgtttccacactcccggcgaccttcctcatcagtcataggtttcttttccaaatgagctgaggactaggacctattggttagaagttcgcaccattttcttccccttgagattaaggattgtggttttcaccatgcacaaaataagcctctctaataagtatcaaccaacccagctggaagcacaatgttagaataataatgtcttacattagcaagatatttcttcctattttctaaatgtccctctccatcagtagcacctggacccacac

SEQ ID NO: 517052 - DNA, 82 bp, Homo sapiens
  misc_feature (54)..(54): n is a, c, g, or t
agtctcagcgtgggagccgaccagtatcttctccctaaggactaccacaataanatcagtcatcattatcggggctggtcca

SEQ ID NO: 517053 - DNA, 349 bp, Homo sapiens
gatttgtttttggttttggttttgagaaggagtcttgctcagtcatccaggctggagtgcagtggcacgatatctgttccctgcaacctctgcctcctgggttcaagtgattctcagactgctccactgtactccagcctgggcgacagagtgagactggtctcaagtatttctttataacagtgtgagaatggccgaaaacgacacccagatgcaaacattacccatgccaccgggtggtgactctcttaccaagcaagagcgggcccctggcttacgcggagccaatggatcggacattcccccgaagggcaagctgaacatccttttctctatgcacccaccgagg

SEQ ID NO: 517054 - DNA, 342 bp, Homo sapiens
gaagtcgagctcggattcctgaatgctgcctgctgaggtgggaggactgcttgagcccaggagttcgagaccagtctgggcaacatggtgaaaccttgtctctactaaaaatacaaaaattagccaggcgtggtggtgcgggtctgtaatcctagctactcaggaggccgaggcaggagaatcgcttaaacccaagaggcagaggttgcagtgagccgagatcgcgccattgcaccccagcctaggcaacagagacagactccgtctcagaaaaaaaaaaggaagaaggaaggaaagaatttgaatgatcccacattcagcctcatagacctcacctaattc

SEQ ID NO: 517055 - DNA, 1837 bp, Homo sapiens
ggtgttccacaatcacgtagatatagacattgttgtaggttagcatcccaccgagtagttgtgtccagcgggtggtctgtcttctcctcatcaatgatgggtgtctaaccaaccagggagggttcgttggtgatatgcacagtactctgttttgtttgcgctatgtgatgtgtatatattacgtaagtgggggattattgtgtgctcgcctccgcttgtgtggtccgtggcatcgatcagtaatatgattcatagtgtgggggcaattatgttcctccacaccaatgatgacaatagtggtgggtgggacagaaaagatatgttgtataggggatcgtttgcttgtttcgtttgttgattgatttgctgttgtgtcgcggtcgtgtcaacctattgattctctagtgtatgtggtgttggcacgacgccttggtggtaggggtgtaccctccccggttttgttgtttttctattctagatcaatgaccttgttgtgtgtctcgtggggttcagcctctgtgtgtgttgtgggccgtccctcggttgtgcctcacacttctctcggtgattgtaagtcttgttatgatgtggtaggctctccctctgttagtattcatcatcttgcctccgtgggtggtgggccacgcctgtgcacaacatatctgggcgcccaacaaaagaaggggggtgtgaggaccaccacaaaaatagggagtagaggagtaagatacacagcatttgctggtggtctgacccttcgaagtggtggagtggatgatagtagaggggtgtgttgtataatacagatggcttgtcttgtgttgttgtataacaccccacacacacccacaatagtagttctccaacactattactgcctccgttgataagagggggggagtatcatagtggtggtctcctcaccaaaggcatatggaggattacactacacgcgactagtagtatagtggaaaaggaggggttgtcgtgtggatggagaagtacccacaacataggatggggcacactccaacatcacaggttgtgaaggagttcttgttgttctcatagcattatataataggggagtatgccgttgaatgattagtatacccgtccctacgctctctgcgttcacatagtgggggttagtaacaaccgcgggggtggcacaacagtgtgtgtaccgcggtgtccacacactgtgtgtatatagagagatcctcgtcccgcgcgggctcgtgacgcgggcgcgtttatagatagaggtgtggtcgcgtgtatatatatatccacagcgagagatcgtctgatcgtgtagatacacccgtctcatcccatcagacactcgtgtgtcccacgagaggatcttagttctttcacactctaggaaggtcccgccgcctagtctcagtagtgccacgcgtgccgccaacgacgggtgtgtcacaccaactgtgttccatggccactgtgtcccgctcagcccacgcggtgtgaaagagggggtgtgtgtccatgagagcgtagggaaagagagttgtatcccgcgaacacgtataagtcgagagggaactgtgtatatgtgtgttgtgaaacttgtttgtgtggtccaccgtcgggtgagtgggtgtataccacctcccacacctgtgtgcgtggtgtccactattcactgtttcgtctccctgtaaatattagagtcccctaatagtgtgtgtgatcacgtatatatataaataatagtaataaaattaaattaatacgatcgtaaggcctaagtcgatcagtcgttcgagggctacccgagtagtatagtagggttagtaaggcagcc

SEQ ID NO: 517056 - DNA, 215 bp, Homo sapiens
aataggcgacatataacctgggcacagagcatacctgatgaacctgtatcaaaaaaaaaaagaaaaaataatcagttaatatatattgaacacgggccggggcacggtggttcaacgcctataatagccagcacttggggaggccaaggcgggtggatcacccgaaggtacgcagtaaagacgaccagcctagggcaacataggcacaaactctg

SEQ ID NO: 517057 - DNA, 103 bp, Homo sapiens
ggatttgctggtgcagtacaactaggcttaatagggacatgagtgctttctcaatcaccagcaactatgcagtaaatggtgctagaccaaatgattaccaaaa

SEQ ID NO: 517058 - DNA, 108 bp, Homo sapiens
tttgagatcagcctgtgcaacacagtgagaccctgtctctacaaaaaataaattacttggatgtggtggcgtgtgcctgtagtcctcctaatcaggcaggtgaggtgg

SEQ ID NO: 517059 - DNA, 1619 bp, Homo sapiens
cacgcgtcgggaaaaagtctggcttgatcacacggaagatgatacaaaatacatgaagagtctgcagaaaacagcaaaaatcatggtacactctcctacaaaaccagcccagttcctccagtcaaagtggacgcatcagcacagcaacacaagcagctgttagcaacacagggctggctcaacatttggccgacagcatggcaccaacacatttcaacagctaattggcaagccgccactggttttacaagtgcacagcagttcatgcaagcacagatcattttcacaacacatacaggtccaacatgcaggtctggcatcacacagcaaacaccaaatccagcaagaccggcccatcaatcttccacagttcacccacatgcacagcataaagggcaccaaaaggccatggaacaccatccacagtttcacaggggcacgtgctgcatcccgaacttgcaatgctgtaaaacacttgcaacacgttcatctcgcatgcatgcaagcacagtcagcacatccacaagcatgcaggtggcacgcagtcggtctctcctcaaaaaccaccgccccaggcacagcaatacctcagccagtcgcatctcttatgtaacagcaatattaccgcaaatcagtacacaatgccattgaaacacccacatccaaacggcagcacatctcccatctggctctcctcgcaccagcccgagcaccacgctaacataccatacaacctcacaacgctcttccccccacgggaggacagcgtccttgcagaaccacatggacaccaaacgcgccacgcactcgacaacaccacactactacaacagactccccagccacccaatctcacccacatcgatgacacactgcagcgaacaacccacaaacgaccacaaggagcagcacaccaacaacacactccacccgtgccacacccacacacacgaaccccaacgcacaacccttcaaacacggccaccatcggacacgctccaaccaccactcagcccacaaacaaacccactcgaacggcaacacggcgcaaacgacccacacctaacaagcccccgcgcgaataggctacacacccaagacgcccagcgtgccaaacatcgagaacaaccacccatcgcacacgcaccacacgaacacaggacgcagaacacaagcaagaccacacgcagccagcacacaacccacagtgaagccaaccacgacctccagaccgctccgcaactcgacaacacgaccgcacggaagacatagatccagaccacaagaaagaaagaccagaagcaacaatgaagagaacaacaaataacacaagcaagcgtcgcagcgaaacaccactctacatggctacaggaactcaccaagactacaaaaacaacaaaaaggcaaaaccaagaacgacaccaagcaccaccaccaacagaaacaccagacgcacacccaccaacccacaccacagacaacaccacgaagcagagcaataacgccaataacagacggacacatgtaaaaagacgagaagaaccaaccagcagaagcacaacggaacgaagcatgccaggaccgcacacacacacccacatccggaacaacgaccgacg

SEQ ID NO: 517060 - DNA, 1602 bp, Homo sapiens
  misc_feature (1403)..(1403): n is a, c, g, or t
gagcgcgttcagatgctccgaggaggaagagtggagaatcttgcgcgaatccgcagaccacgtggccatggcagaaactgcagtccgagctggtcgatgacatgacagtctcgtcggtactgcgctatgaaagaaagagcggtactgcgtcaatctagcagagatggtctggcactgtaacgcggctggaggtgcaccgcacaatggtgcacgggctctgagtgttgcgatccggagaatcagtgtgcgatgaggcagacagagagacagacaaggattatccgccagtgacagacgcaggtactggtctctgacccaccactgggggcgctcgattgccgacaccatggctttaatcatcgaacgttactagggggcgtgtccacatagcccatggttttaaccaccggagctcgaaagggggacgtagacttgggagatgcagagacgtaaaatggacagaaaacataccttcgcaggataataccggatcgcgggttgtagccaaattctgcgtgggggcacattgacttattgagtcctttgcagggcgggttgcatctaaaccctgtaggttgatatgacttacaggtttagagattacaagagcagagtagcacgtaaaacgcggatgaattgttgcacatgtgtgggggcattaggcatttaagcaatttactttgaacgaagtcgtccttccggctccggcggcatggaagtgcacccgcgcgaaataagagcgcagacggtgaagccttagtacaaatccttggcacaaatactcgtacctcttccaaaattcgtgcctacctttacagaggcacaagagagggcgattgtcaccccgcccaaaagggttaagtgcctatggatatggggaacatacgccgtggttgtacatagataaccagcaggaacgagttcaaaggcacaaaagacattaaaggaaacccattaaagaatatccgtcgtatggaacttacaccgaccgatcggtagtggttggccctcctcgaaagtgttggtacgcattgtgaaagagtatcaaggaatgtggacgtattgggtaggctatgctatcctggatttggaccacaatgagccccggttgcccataagataaaacccattaataggacaaccagggtgtaggatgcaaagtgactggcaataataacctatattcggctggggtcagtgaccatggacaccgggcagcggtttaacaggcgtacagaaaaggtcaagtccgagcggtacattcaatatcctttggtagaaaaggaaatgcacgggcaggcaatttatgttttcccctccaacggtgatgtcatggctaagaggtacggtgtcggaaaaagatcagtggaacatttcgagagcccatggacaacacatttatngaacattagtatggacgggagtatatacaagacacaaccgattttatgcaattcatgtcaccattactgcgcgaacaacacaacaatgaacaaaaaacgaaaaaaagatatcgaaaaggagtatataacagagaccacatgtatagggtcggggaggtatacaagcgagtataacaaggaggagaagtgtgcacacacg

SEQ ID NO: 517061 - DNA, 331 bp, Homo sapiens
cccctagctactacaggtgttctggacttgagcaatccacccgcctcggcctcccaaagtgctgggattacaggtgtgagccaccgcgcccagcctgctctatattattttgtatattagaacacttaaacatttgctgatgagatattagacatactcagaagaggttatttcacttacgcttgtgaaagaagccaggagtcctttcctggggatttgtgaccagtgtctctgagcatctccccagtaagcggttcgtccttgttttataggtacagagtcatgccactgatggggctcccctccttgctctggctgcatgacccccttt

SEQ ID NO: 517062 - DNA, 315 bp, Homo sapiens
  misc_feature (54)..(54): n is a, c, g, or t
  misc_feature (68)..(68): n is a, c, g, or t
  misc_feature (238)..(238): n is a, c, g, or t
cccatctcaaaaaaaattttaatttaatttaatttttaaaaacccataatccgnccaggcgcggtggntcacgcttgtaatcccagcactttgggaggccgaggcaggcggatcacgagatcgggagatcgagaccacggtgaaaccccgtctctactgaaaatacaaaaaattagccgggcatggtggagggtgcctgtagtcccagctactcggagaggctgaggcaggagaatgncgtgaacgcgggaggcggagcttgcagtgagccaagatcgcgccactgcactccagcctggagcgagactctgtctc

SEQ ID NO: 517063 - DNA, 159 bp, Homo sapiens
  misc_feature (2)..(2): n is a, c, g, or t
  misc_feature (117)..(117): n is a, c, g, or t
  misc_feature (129)..(129): n is a, c, g, or t
  misc_feature (153)..(153): n is a, c, g, or t
tnccagagggacaaggaggaagttctctttgtgacttggttgaggaggcggcggaaggtggctaatgaattcagtgcagagaaaagcctggggatgagagtggagggctgcacaggngttatgcatggnaggcgggtgcttggaggccgagcnctggga

SEQ ID NO: 517064 - DNA, 882 bp, Homo sapiens
  misc_feature (181)..(181): n is a, c, g, or t
  misc_feature (196)..(197): n is a, c, g, or t
  misc_feature (223)..(223): n is a, c, g, or t
  misc_feature (245)..(245): n is a, c, g, or t
  misc_feature (255)..(256): n is a, c, g, or t
  misc_feature (363)..(363): n is a, c, g, or t
acgagaagcatgagtgtgagcttggtcgtctgtggcacacagcagaggtaggaagactatgatcgagtgcggtctctctcctacccggtagcactgagttgtgccatcctcatgtgtcttctccatcgacagccctgacaggcctggagaaagattcctgagaagtggaccccaggtgaancacttctgccccaanntgcccatcatcctggtggggaataanaaggacctgagggcaagacgangcacaccagnnagagagctggccaagatgaagcaggagcccgttcggtctgaggaaggccgggacatggcgaaccggatcagtgcctttggctaccttgagtgctcagccaagaccanggagggagtgcgggaggtgtttgagatggccactcgggctggcctccagggtccgcatagaacaagcgtcggagtgggctgtcccgattctctgagtatccccaaggagcgttaacctacatgccctcgcatcccgttcacaaggggtacagaaattatccgccgtacaaacccaggctcctgtagggctccatgctgaaggctcccattttcagttccctcctgcccaggactgcgttgttgtctagccccgacgtggtgggcacggggccatccactcccagtagctcgtgtgagccacgcctatgccctgtccttcctcaaggcccctggggatcttggcccccattttgacattcccaaaggatggtcacacgaccagcactttatacacttctggtcacaggaaagtgtctgcagtaggggaccagagtccaggcctgggagttgtttcggcaggggctgtctctcatgcattggtcgggggctgataaaggtaagggtccaaaaaaaaaaaca

SEQ ID NO: 517065 - DNA, 145 bp, Homo sapiens
  misc_feature (20)..(20): n is a, c, g, or t
  misc_feature (32)..(32): n is a, c, g, or t
  misc_feature (43)..(43): n is a, c, g, or t
  misc_feature (142)..(142): n is a, c, g, or t
tggacagcagctcattctcngaatcaatcaanttttctagttnttcttcaaagggaaagcctcctgaagctgatggtgtggatagatccattggcgagaaacgctatgaacccatccaggccactccccctcctcctccatngcc

SEQ ID NO: 517066 - DNA, 258 bp, Homo sapiens
gaaaggagggtaggtccatgcatagtttcactagtctgtcttctctacagcagcttcttcttggcacaatcctagaactgggcagaacgtccttcccaaactcgaggaagacaaatggctcctagtgacaccctgaagcttacgtaactatacaaaccgatgcttctctggacaactctattctgtaagaatttactctaccaataatagactgctatctaggcgcattgattgaacgtgtatagcagtgtacatcca

SEQ ID NO: 517067 - DNA, 964 bp, Homo sapiens
  misc_feature (263)..(263): n is a, c, g, or t
  misc_feature (278)..(279): n is a, c, g, or t
  misc_feature (305)..(305): n is a, c, g, or t
  misc_feature (327)..(327): n is a, c, g, or t
  misc_feature (337)..(338): n is a, c, g, or t
  misc_feature (445)..(445): n is a, c, g, or t
tcgaaagagctggtgatcgttggggatggtgcctgtgggaagactgcctcctcatcgtcttcacaaggatcagtttccggaggtctacgtcctacgtcttgaaactattgcggacatgaggtggacggcaagcaggtggagctggctctgtgggacacagcaggcaggaatatgatcgtggctcttctaccacactgatgtttcatgtgcttccatcgacagcctgacagcgaacattcctgagaagtggaccccaggtgaancacttctgccccaanntgcccatcatcctggtggggaataanaaggacctgagggcaagacgangcacaccagnnagagagctggccaagatgaagcaggagcccgttcggtctgaggaaggccgggacatggcgaaccggatcagtgcctttggctaccttgagtgctcagccaagaccanggagggagtgcgggaggtgtttgagatggccactcgggctggcctccagggtccgcatagaacaagcgtcggagtgggctgtcccgattctctgagtatccccaaggagcgttaacctacatgccctcgcatcccgttcacaaggggtacagaaattatccgccgtacaaacccaggctcctgtagggctccatgctgaaggctcccattttcagttccctcctgcccaggactgcgttgttgtctagccccgacgtggtgggcacggggccatccactcccagtagctcgtgtgagccacgcctatgccctgtccttcctcaaggcccctggggatcttggcccccattttgacattcccaaaggatggtcacacgaccagcactttatacacttctggtcacaggaaagtgtctgcagtaggggaccagagtccaggcctgggagttgtttcggcaggggctgtctctcatgcattggtcgggggctgataaaggtaagggtccaaaaaaaaaaaca

SEQ ID NO: 517068 - DNA, 115 bp, Homo sapiens
tacgtgaggtacagctacgggcgaggtacacctttttattaggatattggcagcatgagggtctaagccttatccaattgacctgatttattatatttctcttttgcaaagacca

SEQ ID NO: 517069 - DNA, 133 bp, Homo sapiens
ttggaccccaaaacaaaacaacaacaaaaaacacccatttgtaggtttttatatgtacataagttttcaactcctttgggtaaatgccaaggagtgctattgctaattcatatgtgtattgtgtaaactgatt

SEQ ID NO: 517070 - DNA, 132 bp, Homo sapiens
cccggtgggggtgtggctaggctaagcgtgtggagctgcatggctgcgtgcttgatgctggtccctttggatcggtggtgattaagcagggtgaactcactgggacgggggatgctggccaatcaacatagg

SEQ ID NO: 517071 - DNA, 589 bp, Homo sapiens
ggagatactggcacatatttgcatactgataggaataatccagtagtgagggagaaattcgtgatgcagaagagcagagtataaatcacaggagtgggtaagcaggaatatattctagagcacaaagggagagtagcgtacaagggacagaaggccaagagttttggggcagtgtcaattgccctgtacttttttttttaacatagctgtaatttctggcttttctcctaaagcatactagctgacaaagctacacatttatttcagaaagaagcccagattttatatccctttttagcctcagtgatctgtgttctatgaaacccctagctacatagatccccactataagtgccatctcaaaacagcatcatatcatgtaatcctcacagtaaatcatggatgcaggtgctattaaagacattttataaaccaggaaattgaaaatgtggtaatattaatgaaatacaaccagttctatcgaggaacccttaatagagggaggagatacatatttgaattaaattgctatgtaagaatacaacattttgactcaagcagaactcatgtttttctttatatttttcca

SEQ ID NO: 517072 - DNA, 214 bp, Homo sapiens
ggggtcccagaaaaattaaaaatcccagggctctctagatttgttgataaaccttttatgctggcctttaaccctgaaagggatgggccgaatgggcccatccgtttaatccgaaatgggagggtttataatggaaaggccctgttttgctggagcaataaaatggcccagggcaatggcttggtttaataaaatcatttttttaaagttgcca

SEQ ID NO: 517073 - DNA, 202 bp, Homo sapiens
gaattggtgcggcctgggagcgactctccctcctttacattttctcttctccctcgctcctccttcttctatcactgtgcctccacccgaggggcaggggctcttgtagagagatccctggcccaggacaggagatgccaaatcttatttatctcactgagggcctttgaggaaacacgcttactgggccatcgtgacgggt

SEQ ID NO: 517074 - DNA, 549 bp, Homo sapiens
tatccagcagagaaggcgcgggtgtgttgctcatcacgcagcctacaggcagtcaggtactgtccactccagtgtcaacaggtaggacccaagctctggtcaaggttgtgctgctgctggccctgtgctgagtcttaaccctgctgctgtggactgctgtggctggagggcagggcttcttgggtggggggcaaggttgccctcagcccagcccagagctgggccaggacgacgtgacgctggacaacctgttcagggtccacgagcacacaggagaagttggtgttgtgcagggcaggagtcagctgctccagcaccaaggccttgcaaagctgcgtacctgtgctccccacgttcccggctggtgctcccctcccacagtcggcctgggaggtgctcaatgaaggaaccattgcccagccagtagaggatgctgaagtaggggaaagcggatgcaggccacacaggataagctcagcgttccattcagtggaacttccacctctggccaggtcacttctctgatggataacttgggttccgagctcg

SEQ ID NO: 517075 - DNA, 261 bp, Homo sapiens
  misc_feature (136)..(136): n is a, c, g, or t
atcaaatgccctttgattatgaaaaaatcagaataaaaatttttagggacataagccttccaatggtatacaacattcccatggcaatattagacagttaagcccccaatacccatagttggcaaaatgtcccccnggcccagcattcttttaaatacatcctttgtataagggggggaaaaaaagccagggtcagctttccaagggttgtcaaaaaaggattttcatggtctggggttttaaaaaccaccccccactcca

SEQ ID NO: 517076 - DNA, 306 bp, Homo sapiens
  misc_feature (150)..(150): n is a, c, g, or t
ctggtcttgaactcctgggctcaagcaatcctctggtctcagcttcccaaagtgctgggattacaggcatgagtcaccacgtttggcctcactttcaagtaggaaccttttcctgaggaaagcagtgaaaaggtggagaaagtgattgtnccattgtggaggaagttgggctggtattgagtctgaagtatctaatattggtctccaccttgatcatcttcacttctcttgtccagggcacttgtccctgccactgtcctctgtgtaagatgctgccttgctgggttttgggggacaaacttctac

SEQ ID NO: 517077 - DNA, 300 bp, Homo sapiens
agttatagctcagatcctttcctcaatggcagggcatatatacgagggggcagagacaatgacagtggcctggggaaagaggtgctacagtgtcaccagaactccaggaggatatcctacagcaatgagaatgagatggatacaggacaaaaacgcaggacaaacaaccatgaacatcaatccccaacagacaccgtttcccagaatttccttagaatgtactatccagagaacaaacgtatgactataaggaacatattggcaatcatgaaagaaacatgatcccacctctacaactag

SEQ ID NO: 517078 - DNA, 157 bp, Homo sapiens
ttgagtatcccagtgttctgatactgaccagaacaggaactgtcagaagagggcactctcaaactaggaaccctattcgcaaaatgaacaggaatagaaaaaagcagatcacatctatataaagaactactgctaaaagaacgctgaaagatgcaat

SEQ ID NO: 517079 - DNA, 951 bp, Homo sapiens
taaagaagaagagaaacttggtcgaaagaacgctaataggactaaaagaattcttagaggactatgatgatgatagagatgacccccgaagatattactgaggaatgtgcatcctttcacaaacacggttgcgtgatagaggaaaagggatctgtgaatgcatattgatacgagagtaggaacgacgagagaacgggaggagcttgagggaattcaggcagcgccttctggcctagatcgggcatccaggatccattgatgcagagcgtcctgagggaattgtgagactatcccagcgactcgagagagttgcaggtgtagtctgcaataataaaagcaggtagccataaatcacgaatgaggtaagggaaagaacctgaaataggactctgatgaaatggaaagaaataaagcctggatgatagaaacctctatggggaatcgcagcgcactgatgggaggccaggagtacaacaatgacctgtcgtggaaaaagacgtaacgtctgagagcccattcagcttctagttactcatgcgtgatagcttttctgtacaggtgccatttgaaacatcgtaatgatgtccctgggggagtagagctcgcccctggtggtaatttaattgatctccctccgatgaaaatctcacccagaattcaatcaggcacatctgggatggcagccttggtcgactgaaattaggaatctcattggtcttaaaattttgtgtagccttccaaaaacaattcgcgagtcgtcctaattcttgtgacggggaaagaggctacctggaaggagtaggtgccttaagcaagcgtcgacgtttgatgcctgtgttgacgtaccccgaataagggaaatgttccgatggctatggtgaccattgcaaatgtgccccaggcactgatcccctgtttcagcatcaccctcgaagtgatgcaaacatagca

SEQ ID NO: 517080 - DNA, 392 bp, Homo sapiens
  misc_feature (102)..(102): n is a, c, g, or t
  misc_feature (120)..(121): n is a, c, g, or t
  misc_feature (138)..(138): n is a, c, g, or t
  misc_feature (157)..(157): n is a, c, g, or t
  misc_feature (183)..(183): n is a, c, g, or t
  misc_feature (194)..(194): n is a, c, g, or t
  misc_feature (330)..(330): n is a, c, g, or t
  misc_feature (359)..(359): n is a, c, g, or t
  misc_feature (369)..(369): n is a, c, g, or t
cgagccctgatattgtttaaaccaccggtatcagagccaattcccatacacaggaagtctccccttccaagatctaggaagccggctacaaatgatgaagcnagccccctgagtgtgtcnngcccagaggtactggtncctggctgcattataccantggtgtgtactgggcgtcgaagacgnattcaggggancaaatcacttcttcccctgtctcccccaaatcattggctttcacatccagtatttttggctcatgggcaacaggttgtatctggaaaatggctaattacctggaggaacaccaaggaactcttggtgggaacaggnaggcaggaatccttacttgttaggggttnttcacttgtntcggggcctgttttaggcaactt

SEQ ID NO: 517081 - DNA, 104 bp, Homo sapiens
gtggagagcactccatagctgtggaggaagatgcagagtcagaagatgcagaggaggaggatagtgaaactcttcaagtattatctggaacagcggtcttgccc

SEQ ID NO: 517082 - DNA, 324 bp, Homo sapiens
ggagatgaccgtgggagtggaattgtgaatcaaatcgaaggtgaagccaccccagttaatctcacagagcctgccaagctggactttaagttgtcctggtttatgccatcggtcccgtactggatcctgtgacaccgattatgagaagtatgccctcgtgtattcctgtacctgcatcatccagctttttgacgtggatttggcttggatctgggcaagaaaccctaatctccctccagaaccagtggactctctaaaaaatatcctgatttctaataacattgagtgtcagacaatgacggtcacagacaaggtaaagccgag

SEQ ID NO: 517083 - DNA, 403 bp, Homo sapiens
gggctccccggataaccacgggtgtgctagcttaatccgagctcaatcaacaaatagtatggaggatgatgacttaaaacagcagttcggaactgatgttttcgtgggggcttgaatctcatcgtagtgtattaggattggaaagtagaaagacacaaacccgtgaagggcagggtaccggtatatactcacctttttatccttccgtaccttaacgtgtacctaccatgaaagacaagagacacactccaatgttcaccaggtgaattagctttagggtattaggttaatacggtggatacagtgtcattaacagaatagaagaccaggtgaaatctacaccgtaactatccttgaaaatgtctgaaaatgccaatctctaataactacactagccaaactt

SEQ ID NO: 517084 - DNA, 436 bp, Homo sapiens
  misc_feature (257)..(257): n is a, c, g, or t
  misc_feature (292)..(292): n is a, c, g, or t
  misc_feature (305)..(305): n is a, c, g, or t
  misc_feature (307)..(307): n is a, c, g, or t
  misc_feature (311)..(311): n is a, c, g, or t
  misc_feature (321)..(321): n is a, c, g, or t
  misc_feature (335)..(335): n is a, c, g, or t
  misc_feature (337)..(338): n is a, c, g, or t
  misc_feature (342)..(342): n is a, c, g, or t
  misc_feature (346)..(346): n is a, c, g, or t
  misc_feature (348)..(348): n is a, c, g, or t
  misc_feature (361)..(361): n is a, c, g, or t
  misc_feature (366)..(366): n is a, c, g, or t
  misc_feature (368)..(368): n is a, c, g, or t
  misc_feature (393)..(393): n is a, c, g, or t
  misc_feature (409)..(409): n is a, c, g, or t
  misc_feature (413)..(413): n is a, c, g, or t
  misc_feature (420)..(420): n is a, c, g, or t
  misc_feature (430)..(430): n is a, c, g, or t
agctttgggtttcggggggggcaggcacatcagtaacattctggttggggcagctccagtggagcatcagggaaaggtggccttaagccggccaccagtggagaacggcagtccagttcttctcccctttgacccgtagaaggggagttgtagccccatgaactagtttcttgtttgggtcaggaacaagggccggctggggcctggggagcagctggtgtcagggtattctgtttgctgatgggcagggacacccntgcagggtctcgggctttgagcccaggacattccntgccccttgctcncnttgnctgtgggctntgaacattccgggncnntggncatntnatctaggtccgtncagcncnagggtcagccctcttgactgtcacntgctgcccccacccancctnaaataangagctccctnctgtga

SEQ ID NO: 517085 - DNA, 882 bp, Homo sapiens
tccacccttggcgactcagtgctacggtctgccattgtttggaaagacgaccttgttacttgcctgcctgttgaaatgacttctgtacttggaccacggaactacatgtctcgtgaggtagggagaagacgctgactgtacggaagcctctaccgacttccgcattgacgcgacctgtattaggtgcttctgttttccgcacacatgccttattttctcgaagaggcttctgtgcttcataatggaagggccagcccacaccaagctgactgtaacaccaggtttatggacaatgtcaggccgttcaccgcacaaactcacggtctaacagctgtcgcgccccactagcgttagctgcgcttactcaacgaggcctagcgcggcagtctcacttgctgcgtccatcgaattctttgccgccaatagacagatccagcatttaaccaacctaagggcccaaaggccttaggatcaactagcatgcgatgctgcactcttaggagaagcgaggggaaccacgatgttagatcagagggagcgggagacaggagtgtccctcaccgtcagtgcactacccacctgtgaggcagccttctgatggcctggcccaccttgccccagaaccaggggaggccatgaggcttcagttattactctgctgcaaaattgaatggctgggcactagcaagccagactacacctacggaggctgttgaggacaatttcattccattaaattaaaaaatactgactgcgctggcaggacaggtgccatgtctgggaacagggaacgggggagcttcacctttagtgtcttggctattcctttgggctgtggggggcatccatttccagggtcggttacacctaccgaatgcattg

SEQ ID NO: 517086 - DNA, 232 bp, Homo sapiens
gcacagtctccaaatgcatgcagaattcatggtcatctatatgtcaataaagtagcagggaatttcacataacagtgggcaaagggatttccaccatcctcgtagtcatgcacattttggagcacttgtcaaaccgtgacatcttacaattttactcatcgaatagatcatttgactaatggagagtttgtaccagcaaattattaatcctatagatggaactgaaaaaaat

SEQ ID NO: 517087 - DNA, 276 bp, Homo sapiens
  misc_feature (255)..(255): n is a, c, g, or t
acggagtataccagctgcccaacacatattgcgtagtattgttagtggagaccttgaataggttacattaacttcctaatccctgtgtggaatattgtccctcttttacctcaagaggcctgttaaaggaatagctagtcttagaggagttggttggaatagtgattatcaatgggaggtgttggccccgactgtaaaagcccttgctgcccgtttctggttgtggtggatctctctagtagctcgaccttgcanggctatgcaacgtcttggcac

SEQ ID NO: 517088 - DNA, 615 bp, Homo sapiens
cttgtttccgaagctggaaattccgtaatccgggatgcgtttcctgtaagttacattccggttcttggggttaaggaccgttgcccagtccgaaccgttgcaattaagggactgagtttctgtgattggggttataagggaagggaatgttagccaatgcccaaccaaaccgtgccagttgagcaagggacggacttacagtgccaatgtaacgttaaccggcattattaagtttaaaagcagaaagtccgtgttgcatggaatcctgatggccgtccaagtgcctttaccgattcctgaccctgttggttgtaagagtggaattaacggcctaatccaaaaggccaggacctatacctacctggttaaactaccagggaaaagggaatatccttctttaaaactggaggtggcggggaaacttcgggatgactaaaaccaagggcttttttgctgggaaatcccggtccggatgggctctaacctttaagggcctaatggaagtccgtgcatatggccggagactgtggagattcttggcaccttcagtttggtggtttcaccaccagtgactggttctccatgttatccgggattcgtgggagtcgctctggc

SEQ ID NO: 517089 - DNA, 146 bp, Homo sapiens
tgaggtgatctagaggatccctgctgcttctcctcctcggcgcatgcataacgaatgaagcctcttgtggcagcacgatgtgcagattgcacagcattaataccggttatgataaatttctgcctggcgtctgcgtcaactgtatt

SEQ ID NO: 517090 - DNA, 154 bp, Homo sapiens
tgcctgttagtctttagtcgtaggttcttgctcggttagaggtttgtttgtactatggccttgtgtcggtggccactttagtcgttattacctttttcgttgtcgttggtatgtgatatggtttggggtgtttgcgagcgtttctctcggtgct

SEQ ID NO: 517091 - DNA, 342 bp, Homo sapiens
  misc_feature (74)..(74): n is a, c, g, or t
  misc_feature (137)..(137): n is a, c, g, or t
atatgagagttgaatacctgcccctagttcccacctcctcctccctgtcaaaggggatacatttcggccaagtnagtcaacggcacctcctgaaggactgtcatatgcgctgtatgctctggccgtcacctgaaganacagttcccccctttctaggaccacctgaatgtgggactactctttcccctgaggtgatatctagaatctgatagtctagatactatagtactcaatttgtcagatgttgagtatgaccataggtattgtgacctctctgagggaaatccagattttgtcatgtcaaaaaaagacccatggatgctgggtatgtgaaaaaaaaaa

SEQ ID NO: 517092 - DNA, 701 bp, Homo sapiens
cgaacacatgggcctcggatccccggcgtccttcacgctgtcaccgaatctgggctggtcgctgtatctacgtctgatccagagataaggccatcccacatggccctagagagggaaggacctcctggctcgggcccagcacggcgctccgtggaagacgcgccgctttattgctacttcctggatgcttgccacgtctcgtgtgcatccatacgagataggacgacaaggtcctggtgtgctagcaacacgagcatgatgtacgagcgccttgttcttgttcctaccataggagactggcacaggcaatagcacaagtaccaatagatatcagacagcttgggctacctatctgatgacatcgaggtatgtccgagttggggcaaatggtctcagcgtgcgtgtaagcactcagtcttctcaaggagaaggcatgctgactgaactggtagtaagaccatgtactgttgtggtagatagaggaacccctatctcgcttattatgccacttgcagtgaagacagactgaaacttcgtgactccctggagctcttgggtggtggacgaagcttgaccttcttgtttcctctaggctattgagagaagagcgtcacgagtctcctctgtcgacttggccccggatttaccaggcttatctcatgtcagctacttttaacgaggacgtacaatgcactcaatga

SEQ ID NO: 517093 - DNA, 342 bp, Homo sapiens
tgtcgcccaggctagagtgcagtctgcgcaatctcggctcaccgtaactccacctcccaggttcaagcgattctcctggctcggtctcccgagtagctgggactataggcgcccgccattgtgccggctaatattagtatttttagtagagacgggtttccccatgttggccaggctggtctcgaattcctaacctcaggtgatccgtttttgctcagcctcccaacatgctgggattacaggtgtgagccaccatgcccggctgtgttacactttttgtggtgtctcacaggtctctagagggtctgctccatttgagtatagagtatttagggtaccgag

SEQ ID NO: 517094 - DNA, 302 bp, Homo sapiens
gatcgactggccagctgcacatgtcctgttcctataaataaagttttactggctgggcgcagtggctaatgcctgtaattgcagcactttgggaggccaaagcaggtggatcacaaggtcaggaaatcgagaccatcctggctaacacagtgaaaccccatctctactaaaaatacacaaaatcagctgggtgtggtccctgtgcctgtggtcccagctacttgggatagctgaggtgggaggatggcttgagcatgggaagttgaggctcaagtgagctgagatcgtccaactggtcgacg

SEQ ID NO: 517095 - DNA, 366 bp, Homo sapiens
aatatccttcccttacatgttatacattctctgtctttagagctcttacacctctgaagcgacagatgcgtgtattaggaacatctttatagattaaggagggctgcctttgaagtgaggcacgtgggctggatggtatcatcactccacttcaggagatgtgaacagttgccatcagatgtaatctatgaacttactcatcggattaatggttctgggcttcagaaaagtaaagcgtaataggagcagcaatcatttgctggctttcatagggttcttgtatcgcaaacggtctgtagtagacctgcgctccttccagttgcatttcctccgtcccgacttcccttgcggacccgatttaacttg

SEQ ID NO: 517096 - DNA, 384 bp, Homo sapiens
  misc_feature (41)..(41): n is a, c, g, or t
  misc_feature (45)..(45): n is a, c, g, or t
  misc_feature (328)..(329): n is a, c, g, or t
tgcccctaagatcatcaaaggcatggttaaaatggctaaantccngggggtggggagctggggtgagggctccttagaaccctggagtcccaggtcagggttggtggctcacacctgtaatcccagcactttgggaggcccaggctggaggattgcttgagcccaggagttcaagatcagtgtggccgtcatggaaaaacccatctctacaaaaaaatttcaaaattagccagacacggtgactcgggcctgtaatcccagctacttgggaggctgaggcatgagaatcacttgagcctgggagtttgaggttgcagtgagccgatanngtgccattgcactccaccctgggtggcagagtgagagcctgtcaaacaatcaaac

SEQ ID NO: 517097 - DNA, 261 bp, Homo sapiens
  misc_feature (227)..(227): n is a, c, g, or t
tttgtgggcgagggagggggtaaaaggttttaataaaaaaagtttaaaaaggtaacttcggggcaaaattcttttaccccggctcttgtttttaaccaaaaaaataaccaatcttctttaggctatcccaaccgagttctttttagtagggcaaaccgtcttggctcccaatttggaaaaatttattttttaaagggcccggcgggtaaaaccctctaacccgttgngcttaaaggttaggcttccatgcttttttgtttt

SEQ ID NO: 517098 - DNA, 390 bp, Homo sapiens
  misc_feature (148)..(148): n is a, c, g, or t
  misc_feature (294)..(294): n is a, c, g, or t
  misc_feature (369)..(369): n is a, c, g, or t
  misc_feature (384)..(385): n is a, c, g, or t
ctggaaagggtagaacctatggaggcagtaaaaacaggagtggttgcccagagggtgagggaaggttgtgcctgaatagacaggcatagaggaatttcaggacagtgaaactactctgtgtgatagtataatggtggctgtatgtcantatatgtttgtctaaatccatggaatgtacagcatcaggagtaacactagtttaaactgtggacttcgacagtattgaggtgtcagtgtaggttcgattgtaacaaatgttctgctatgtgtagcttgttgatagtggggagatgnggggtggggaggccaggagtatgtgggaactctactttctgttcagttttgttctgaacctaaaactgctctaanaataaagtcttcttnntatct

SEQ ID NO: 517099 - DNA, 285 bp, Homo sapiens
tacctcacgaagaccctgaccgagcgcgactgcagtgacaccagcacgacagagcgcaaaagagggcgagacattgtgacaaagctgagctcagaagcagtggacttagagcataagaagtgcactactgtttccagctgatgcatgaatatgagttaccagctgtctgacggcaacttcatatccattggaaaggaacggctacgctgccgtgaggcgatctgccagccttacttgctggcctagaacgcctgtagcatgcactagactaccttcaactcgatc

SEQ ID NO: 517100 - DNA, 832 bp, Homo sapiens
agcggggggtgggaagtatcccgggctgtgggtggggtgtacgccgcacagctccagtcgccgtcgcggcttccggtgctaggtggaggcgaacggaaggagggcagtcggggagtgggccaggccagcagccgggctgaagtcggcttggggagccagagggagcggagcggaacctgcggggcagaggctggcggccgcagctggcgccgctgatagcaggaacaggatgcaagtcttccataccaagggaccacgtgccaaaaccagactgaccactggccctaacttgggccccactgtccccagaaagcagtcttgctgtgatcagtgggcaagtatctttgggaaaccttctcaagagcctgattgggaagacggagatgcgcatcctgatggtgggcctggatgccgctcggaaagaccgccatcctatacagagctgaatactgggggacgatcttcacctaccatccctatccattgggttcaatgtggagacagtggcagtataacgaacatcgagctttacagtgtgggatgtgggtggccaggacgaagattcgatccctctggagacacgtacttccagaacacccaagggttgatatatgtggtcgacggtcaatgatcgggagcgagtaaatgaggccgggtgcacagctgatgagaatactggcggaggacgagctccgggattgctgtactccttgtctttgcaaacaaagcaggatctgcctaatgctatgaacgctggtgagatcacagacaaagctgtgcctgcattccattcgtcaccgtacctggtacattcaggccccctgtgccaccg

SEQ ID NO: 517101 - DNA, 116 bp, Homo sapiens
gccgccagcatggatgacatctacaaaggctgcggctagagcagtgacaagaagagcagaaaaaatgagcttcaaaggcaagccttcgacaatcttcgtgctggcgctgaggatgg

SEQ ID NO: 517102 - DNA, 2168 bp, Homo sapiens
tcaaaacaaaacgaattgtggggtggttttaaatttattaatatcactactaggattctaaacttcaaactaacaccaatcaataattcagatagtatactactcacacatacaaagtgtatagaagatcagaatatataatacaaagtaacaatgtaataagagatgctgtaactcactacactagtcaatagttactaatcctacttaatacatatctctcacaacgctatcactacatgacaactacacagtccatcaaatacgatacaccactccataatctacgataaaatcataacatagtcacatgacaaacaatgtaatatagtaagaaggtagaggtgttcgaaagaaagtgcagtcgagtgaggaaagcagagagggagaggggacggaatgaatgggtagggaaaatgtggaggagagcggatgaggcgcgagaagtgacagagagacgctagaggaagggaggagaatgcggcagaaagggagttcggctggctcgtgcgtgaagtgcatggagggaaagaggtaacggggcgtaagaacgttgaagaatgcagcaggaaggttggtaattattaatataatgaagggaggacgaggaggcgctgtcgtagcggtgcaaggttgttagtggtgggaggtgttggcttgcaatgtgtgagggtgtagaagagaaagagtagaaggtagagagagataagcgctgagtgatgattgaggagattgtaggtatatatagagcgtttggtaaacgatatacgcacgttccggagagcgagagaagatggaggatggttaagagattgtttgtggttgggtgagtagtacaggaggtagagtatgtaatagatacgcgtaggggaagggtgggctgtgaggggtatatggagggaatgagagatgatttgggagtataggggataagtgtggtaggagcttgagatgatggtcagggagtagacacgtagggagtgtggggggagagagaggaagttgtgttgaggaggagagagaggggagacgtaagaaaaggagatgaggttgaagagaaggatggaagttaagtgaggtaataagttgatgagtaggtgagaggatagggtggtcgattggtaggtgatgggagggattaggttgaggtggttgtgtatggtggtgaggaagagtgaaggtaagagtctatgcaggggactggggtggatgaacggaggagtactgaggtgctggtgatggtgagtgagccttatagactggtgatcataggtgaggtgaggtagaggttgagatgctgacagatcatagcagataaggagagtgatgagtaagagacgtgagaaggggtatgtatggtgtgcatataggaggatatagagggtgtgggggtcgtgatgagctggttaggggtagattctggttgcttgaggcatgaaatggggagatgttgaatggggagtgtggggtgtgagggagagattatggtaggtgtgatggaggagagcgcgggatgcgaaggagagagaaatccagatgatgagaattgaggtgagttattaagttgggagtatttagatgtgagggtggcggggagttgaggtatgagatgggtataagaatagtatagagtgtgagtgttctgggagtcaaggaaatagaggagaagtagtgtggggtaagagggggagacaaataaaggaggaatgggacgtagggctaggagaagcagtagataggcactgtgttggtgttgtgagagaggagacacgatggagtagcggggtatggtaggagtgactgataggtcggggtagaggcgattggtgtcgagtcagtggcgtaactagtagctgctagaggggaaagtgaagggggcaggagagggggattcgtgaggaagagggtagttagcgaggaggtgtgggcagggttcggttgtgggggagtggtgatcacgcgaggtgtggtgagagttaggtgggatgataggtgcgtgtgcagagggtgagaggatgaggcgagggaggagagtaggcggggggggtaggttggagatgggtagtgagtatagagagagttgccgaagcgagaagataggaaggagtgtggagatcgtatgtagaagattggtggataaggagtgcgggcgtaggtaggggatgcgt

SEQ ID NO: 517103 - DNA, 232 bp, Homo sapiens
  misc_feature (182)..(182): n is a, c, g, or t
  misc_feature (221)..(221): n is a, c, g, or t
caggttggaatacagagaggtggaatgactcttctgcccttgggagcactggcaatccaggtcaactgcaggaagaagaaagggctactcaaaaaaacaaaaactgattcggtgcctgtaatcccagcactttgggaggctgagttgggaggatcacttgaaaccaggggtttgagaccagnccctgggcaacccctaagtgagacaccggtctcttacanaaaaaaaacat

SEQ ID NO: 517104 - DNA, 480 bp, Homo sapiens
  misc_feature (11)..(11): n is a, c, g, or t
  misc_feature (343)..(343): n is a, c, g, or t
  misc_feature (385)..(385): n is a, c, g, or t
  misc_feature (401)..(401): n is a, c, g, or t
  misc_feature (404)..(404): n is a, c, g, or t
  misc_feature (410)..(410): n is a, c, g, or t
  misc_feature (436)..(437): n is a, c, g, or t
  misc_feature (448)..(448): n is a, c, g, or t
aatgcccttgntggttccatttttatgtaaatggtgttgtttatattttatagggatgctgtgcatatcttgctgtgtgtccctggcatgtgtttgatgtgctatgtatctctgtttttattcttggaaggttaacataacttgaaaatgtgtctttatgtggcccatggtctgctgtgatgacatttagacatcatttgtgctatgacatttggctcatgaaaacataaatttaacattgacaggttctagtgatttaaaaccacaactgcccacttggtgaaaatgtgctcttgatgatgatttgtggtgtgatgctgtccacagataaaccagtgccatnagatggaaggcagaggatactgcgaccacccctgacagacgntggcgtagacaccagntgngccctntggggctcagagcaacggatggtcanntgcgaacagtntcgtccgatgttaggaaatggtcctgcggccg

SEQ ID NO: 517105 - DNA, 160 bp, Homo sapiens
tgttgaacacgatttggtaaaggtagcgatgagaggccatgtaggagtacatggtgggttgtctcattgcagccgtcctcaggaactgagttctgtgttggttgatccatgaacagctactaccacgcattaggatccgggcgctccaagctctctcgac

SEQ ID NO: 517106 - DNA, 423 bp, Homo sapiens
  misc_feature (294)..(294): n is a, c, g, or t
tgggaatgggatgggaggtatagtagaatcaggaaactgtccagtcagagacttcgacggtcatggattgggagcttcctagccagtggctgagttacgaacagagcaaacatagagcccgctatgcttggtagtattatggcggataaagagctttggtccgggtagctgaaacttttcattattggtccaagaatactgtgccggtgggttagagtccgcagaacaggacaagtagaggacttctcctgaacggtattaggtgattgaggggtaaatcctggggaggtcggnaccatagaggacatccaggctgacggcgtcactgcggatgccaccatatcggtcccgtatttcacattgatagggtccggttccatttctcgtgacacggggtagaaggaggatccggactaaatggtg

SEQ ID NO: 517107 - DNA, 846 bp, Homo sapiens
  misc_feature (54)..(54): n is a, c, g, or t
  misc_feature (93)..(93): n is a, c, g, or t
  misc_feature (96)..(96): n is a, c, g, or t
  misc_feature (99)..(99): n is a, c, g, or t
  misc_feature (167)..(167): n is a, c, g, or t
  misc_feature (172)..(172): n is a, c, g, or t
  misc_feature (175)..(175): n is a, c, g, or t
  misc_feature (186)..(186): n is a, c, g, or t
  misc_feature (196)..(196): n is a, c, g, or t
  misc_feature (199)..(199): n is a, c, g, or t
  misc_feature (203)..(203): n is a, c, g, or t
  misc_feature (206)..(206): n is a, c, g, or t
  misc_feature (222)..(222): n is a, c, g, or t
  misc_feature (275)..(275): n is a, c, g, or t
  misc_feature (278)..(278): n is a, c, g, or t
  misc_feature (306)..(306): n is a, c, g, or t
  misc_feature (323)..(323): n is a, c, g, or t
  misc_feature (333)..(333): n is a, c, g, or t
  misc_feature (337)..(337): n is a, c, g, or t
  misc_feature (339)..(339): n is a, c, g, or t
  misc_feature (343)..(343): n is a, c, g, or t
  misc_feature (356)..(356): n is a, c, g, or t
  misc_feature (369)..(369): n is a, c, g, or t
  misc_feature (373)..(373): n is a, c, g, or t
  misc_feature (378)..(378): n is a, c, g, or t
  misc_feature (384)..(384): n is a, c, g, or t
  misc_feature (390)..(390): n is a, c, g, or t
  misc_feature (399)..(399): n is a, c, g, or t
  misc_feature (409)..(409): n is a, c, g, or t
  misc_feature (413)..(413): n is a, c, g, or t
  misc_feature (416)..(416): n is a, c, g, or t
  misc_feature (419)..(419): n is a, c, g, or t
  misc_feature (428)..(428): n is a, c, g, or t
  misc_feature (437)..(437): n is a, c, g, or t
  misc_feature (443)..(443): n is a, c, g, or t
  misc_feature (447)..(447): n is a, c, g, or t
  misc_feature (449)..(449): n is a, c, g, or t
  misc_feature (453)..(453): n is a, c, g, or t
  misc_feature (456)..(456): n is a, c, g, or t
  misc_feature (501)..(501): n is a, c, g, or t
  misc_feature (510)..(511): n is a, c, g, or t
  misc_feature (514)..(514): n is a, c, g, or t
  misc_feature (533)..(533): n is a, c, g, or t
  misc_feature (553)..(553): n is a, c, g, or t
  misc_feature (564)..(564): n is a, c, g, or t
  misc_feature (649)..(649): n is a, c, g, or t
  misc_feature (653)..(653): n is a, c, g, or t
  misc_feature (676)..(676): n is a, c, g, or t
  misc_feature (683)..(683): n is a, c, g, or t
  misc_feature (717)..(717): n is a, c, g, or t
  misc_feature (721)..(721): n is a, c, g, or t
  misc_feature (775)..(775): n is a, c, g, or t
  misc_feature (827)..(827): n is a, c, g, or t
cggggggggaggggggagggggggggggggatatggggtcagtggagtttccanttcctgggttcaagggatggtgctgggtcagcgtccggngtnggngggactagagggaggggtgaccataatttttgtatttttagtagagagatggtttggggatgtggggnggggnggngtggaagtggngaggtcaagngangggnggnggggtcggaaagtgtngggattagaggggaaagcgaagggtgggggggagggaagaagtttagaatganggnaatatggaaaagaagatgagatgaaggntgaattaattaggatgnatgaattagnatangngggnaattatgagtatntggaaaggattgnaggnggagngggtgngaagangtgtgtggnggatgggggngagnggngangggggaggnttgtgaggnggaggnatgngngggngangagtggggaaaatagggaagggggggggggaggagtggttttatngggtgtggnnggnaaatgggtagggatgtganggtgggtggtgtttggtatngtttgaggaanagtggagggaaaaggttatggtcttcagcgttttaattatatccacgactagatactggggtctgtattcttcaaagtgtggggntgcntattctcccaggaaccaaatggnctccgtnttaagaaagtatgcttactaggaaataccctgcntacnttaggaataaatgctacttaaggaaaaaataagagagctgaaaaagctggtgcnatttgaaaaaaaaagggaaggaatgagatttaactggtgctcaaagtttctncgatacaaaatatttggtt

SEQ ID NO: 517108 - DNA, 173 bp, Homo sapiens
ctcaggactatcgggagccttaccctgagacaaggtgtcaccctgtcatccaggttggagtgcagtaggtgcaatcatagctcactgcagcctcaaatcccctagatcaagccatcctcccacctcagcctcccaagatagcatgggacacatagtgcacacacaccacacct

SEQ ID NO: 517109 - DNA, 215 bp, Homo sapiens
cgacgtccgtctctgtgccggtagccgcccagctcgcagcatgccctcgtgattacggatctctatgacagaacacttgtctttcatattacgggactgtgttaagtgtctgctggcctattttaggttgtcgtctctcttctgctttcggagctttcttctctagtgtcgcaccgacctgagtgatttgaccagcagtgctgcggtaaacgctt

SEQ ID NO: 517110 - DNA, 304 bp, Homo sapiens
cggtccgtcgacggacatcacaataaaaagatatacaggaagggccgggcgtggtggctcatgcctgtaatcccagctacttgggaggctgagacagaattgcttgaacctggggtgtggaggttgcagtgagctgggatctcaccattgtacttcagcctgggtgatgagaaactctgctcaaaaaaaaaaaaaaaggtttccccggtttttggcccttttctttaaaaaattactgctggaattccaacctttagggacctcagggttccattggttaattgttgattggagttctaagcgt

SEQ ID NO: 517111 - DNA, 104 bp, Homo sapiens
agccgcgcgtccagcatcatagacgagctcttccaggacaggtacttcagccgggagccccaggataactaacactacctgcccttcagcctgacccaccggag

SEQ ID NO: 517112 - DNA, 135 bp, Homo sapiens
tctgcattcgtcaaggccaagtaggggcacgtatctttttctatttcgtcacgtggttcatcttcccaccacacttatcttgcaccatgtccgcatgtccttaacaccactcctttgcgcctgtccatatgcaac

SEQ ID NO: 517113 - DNA, 335 bp, Homo sapiens
ccaccagctcacctagtctctggttccctctcagtaaccatcttttctgttgaggacatgattggctccttctctgtgggccttttcgtataaccgctttggccggcggaattcaatgctgatgatgaacctgctggccttcgtgtccgccgtgctcatgggcctctcaactctgttgaagaccttagacatactgatcttgagacaatacatcatcggtgatgtagtgcgtacctgtaccacagctgtacgcgcccatgtatgtgtggtgaaatgacgcccacgagcccttatagcagacctgggaaatctgcatcaggagggcatagtcgtca

SEQ ID NO: 517114 - DNA, 360 bp, Homo sapiens
ctgactcagccacgttctgtcggatatggagttacatagggcatcatacctggtcttcactgtcaccactctatataacactagaccatatactcacataaaccaccagagtgatctttcaaactaaaagcataaataatattcaaaaacctccagtggcatccatctcatgtaaataaccactccttcctacaagatgacgcctcacctgccccgacagactcatgatagttccctctgcacaatgaccaattagccacaagatgtgtgctcctgctggctcttggatgagcccaacagtcacacttctgcctgagggcctagcacatgctctggttgctgtctgagatacttatcccc

SEQ ID NO: 517115 - DNA, 404 bp, Homo sapiens
  misc_feature (92)..(92): n is a, c, g, or t
  misc_feature (361)..(361): n is a, c, g, or t
tgatgatcacgctcgcgggcgcgatgagcaccgccgagctcggcctcacgctcgccgaaaagatccgcgccgataaggtgcacctcatctcntgcaccggcgccaacctcgaagaagacatcttcaacctcgtggcgcacgaccactacgagcgcgtgccccactaccgctccctcagcgcgcaagacgaacaggcgctcctcgacaagcacatgaaccgcgtgaccgacacgtgcattcccgaaggcgaagcgatgcgccggatcgaagacgtgatgctgaacctttgggcgaaggccgagaaggaaggcaagcgctacttcccgcacgagttcttcttccaggccgttcgctcgggtgngctcaagaagcactaccagatcgatcccaaggattcgtggatg

SEQ ID NO: 517116 - DNA, 598 bp, Homo sapiens
gagtagctaggaccacaggtgtgcactaccataccaggccaaagtaatagtttttaaccatggtttgggacagatatcttttgagaatctaatgaaagttacataatttttcactagaaaaatgcatacatgaatgtcatcgacatattgcataaaatttgggtgactcacagaagcttcctcctctgatgcatctataaacccttgcaccccagttatgaagaagtaatcacttgatttttatgaattttatgttctgtaacaccaaagaatcctccctactttcacctcctctttcatttcttattaagaaaacaaaaaaattttgctcttgtgaccatgtagtattaattattatcgatatggaaaacatgttgtcctcatgctctttagcctggcacatctcatgccaagagttatctgtgcgagggagtttagtgggtataagaatcaggttttggcatcagacagatctgggttcaaatatggagtctgcagttagtggggtacaatggcaagttactcaactgccataccccatttcccttatcagagagaactgcaccttttttagtgggatgcatgggcaagttactct

SEQ ID NO: 517117 - DNA, 197 bp, Homo sapiens
tctaccaccagctagtgtgttcttgtgacccccaagcctgggaagggggaggtgagtttacacaaatggaaatgctataaaatggatgaaaagtgtgaaccatgaggttttgatgaatgccctagatgtaggtagatgtaatggcctaccatgctgctgcctactggtgtgcagtggcagcagtggcatgagtgaga

SEQ ID NO: 517118 - DNA, 199 bp, Homo sapiens
atagatgttgtactgtaaagaatggaagaagaatatgtggaacaggaggttgtaagccagcgcacctttaatcaaaacacagctatttgaattcaaaatccagtacacaggactctggggtattggtgtagcgactcagaaggttaacttgaatccgattcctctaggacagagatatgcacagtctggtgatgagaaa

SEQ ID NO: 517119 - DNA, 109 bp, Homo sapiens
  misc_feature (67)..(67): n is a, c, g, or t
ctccttctcccgggctctggaaatgccacccggactactttatcatctgccctataatcgacatggncagtgcctggcaaagagggcccgatgaaacgtcttcatgtac

SEQ ID NO: 517120 - DNA, 453 bp, Homo sapiens
  misc_feature (427)..(427): n is a, c, g, or t
  misc_feature (444)..(444): n is a, c, g, or t
cattgcataataataaagagttcaattcaatgagaagacctaactattgtaaatatatacccacccaatgtaggagtacccagatgcataaagcaagttctgaaacacctacaaaaagatgtagataaccacacaataatagtgggatactacaacatgacactgacagtattaggcagatcattgagacatacaactaacaaaaacattcaggacttgaactcaacacttgactaaatgggcctaatagatatctacagaactctgcatccaaaaataacagaatataaattattctcatctgcacatagcacatactctaaagtcaaccacatgattggccacaaaacaaccctcagcaaatcaaaactggaatcataccaaacatactcttaggactacagtggcatcaatcaacactaagagnaatggcttacctatgcnatttcttgg

SEQ ID NO: 517121 - DNA, 346 bp, Homo sapiens
  misc_feature (318)..(318): n is a, c, g, or t
tagacttagatatacgtccaccaatggtgtatgatatacctgttttatgtgtagaaggatagagagacttagggctataaaggaagcatgaaagttgtattgccatagggagatgtattgccatagggaaaattgtattgccatggggatgtggtcatgatttatgaagattaatctggtgacagtgggtaggattgattggcggaatcagaatttagaagcagggagatgtaattagagaatatgtcattacctagaaatgaagccacaaagtctaaagtaaaagcagttagaaaggaagtggacagataaaatagntggattaatcgtatttgagtgtacattt

SEQ ID NO: 517122 - DNA, 499 bp, Homo sapiens
cgatgggatttcatcatgttgcccaggctggtctcgaactggaactcttgggctcaggtgatcctcccacctcggcctcccaaggtgctgggattacaggtgtgagtcaccggcctagccaaaaatcttaaaactgtttttagtcatcatattgttagtagtaataatgttgtaaaatatttaaatatgtggaaacgttttagattattaatactaatgcatagtatatattttataaatttactttatgtttcatagtatataaagcacaaataggcaactatgttggtgttatcaagaaccaagatttttcagtgtaagagaagagaaatctaaacaaagttaagctcaagtcacattcccatttaaaaggaagcatagttttgactactagtgtaagataaaggatagaacataaactaccctaagtatccaataggcaaaattcaataaatggtaaattctacaaatgatctggtttcttcagtaaattgaaaga

SEQ ID NO: 517123 - DNA, 392 bp, Homo sapiens
ccttttttcaaaaccggaatccagtgggcaaaggcagctttgcagggggtccccggacggactccttccccgactgtacccccgggggagttacccggcctctttgtgccgcttcatttgtaaagggctgtaacagtgacctcgcccggtcatccggagtattaagccccagtaaggtgttcaggactggtaaacgactgtcctcaagtaaggcccccgtgttgggccccccccgtgggggccgggtccccccctttgggccctgggtgggcccccccctgcccccctacaaaaaccagactgggttccccgggcgccagcaggggcagcccccgcctagggtgggctccagccctgcggggcttttttgcaataaagtcccgggggtttga

SEQ ID NO: 517124 - DNA, 529 bp, Homo sapiens
ggtcccgtctcatttgaatccttctccatctaaactatctaccctgccctacgacaatgctcgaagtaaacattgtacgaagcagatgatctaaggcaaactcttagcaattaaaataggatatcacgatacaaatgtctggttgaaatgcatcacaaattctgtccgcacattaaacaaaagcaattgttatgcttgtgtgcatggacggccagaggcccagattgtcccctttccactcgaatggtgctccagtcaaccgggcatgggctgcatggtaactctcttccaggattctacagctaggagtaataaatcatgccaagctctctccctgctctataccaaagtacaacacactgtgggttagaccccaagggccatccagcttccatctctcaatgtacatttcaccttgtgtctctcacggaatgggaaaaacttggcgttcctgggaagcttaatggaacacagtgagcttaaagccttccaagagcttaccatcagtctgccttatgcatcttgagcc

SEQ ID NO: 517125 - DNA, 1403 bp, Homo sapiens
ggctggaccccagatgcgctttcgtgcgtcctggtatggctcgccgtctcttccgacggcgaatgtctggcgcgcgaggcagtctgtatagtcatgcgacgtgtccatgacgtggaggggctccgctccctgcccctgtccccagggccgtgtcctcatgccctctccctcgggtggttctcaccgcgccgtccacgtcggcgcttgcgtcgaatgcagctgctcgcagcgtaggcggcgtagtgcttgctcatcgacgctggatgtcctcggttactacgtagtatccgacttgcggggtttccgcgtcggtttgccgcttgcggtctgttagagccgtgaagcgcccgctgattggctctcgccgtgaatagcgggctcgcggcacgggtgtgaaccgccagtcgacagggctccgctcgttggccgtggtccaattagggctcggtgtgaagcccggggggctctccagggttggttctcagctctcggagtctcggccctttgcgaccgtttcgtccgatttggccgccgcatggtgggcgcccgtatgtggcgtttgtttgtggcggtccgcggtcctggtcttcgggtgaaggccttcgttgtgaacgacggtgtgcgcttttggtaggtctttcctccaggcgttgccgcgttacaggcgctgcccttaccttgcgcatcacctactttgccccttacaattcccctgagtgctgttggggttcccatttccaggtttttgcgtgctctcaattatgcgctgaatttatggcccgccgattaacttataagcgcacactgtgagaaggaggtcccccatggcaatggggggccccggaggcttgggttaaacatcggacctctcgaaattgagccccccaagggtgtcgcccaaatgagaaggaaagagccgagcgagtgttggaatgtgaacttggttcggttgggggaggcctattggggaggcgaatttcgggttgcgcccacagagggccccgaggcaagatggtaaagcgaccgaaccttcgtgttatggttgtacccccatttgtgggtggaaactagggccgctggaggccaaatccaagagagattatccacaagcctccgaaagcaagcgtataaagttatggacgacttggtcggcaagttgcagattccggaggctcggcgagggcacaaaggcactttgtggtcacatttccaaaatggatggccagatcttaaagaggtaaacgcggtacactattcctccagaggcaccattccgcgacccgccgggatctcttacccacgctagaccgattagcacccttatcttggacaccgcgtacacacaacggggttttggtcggcagatgacacaaggagaagtttgcggagatattaacgccatt

SEQ ID NO: 517126 - DNA, 940 bp, Homo sapiens
cccgggggtgagggggttacccttcccagtgttttttattcctgtggggctcaccccaaagtattaaaagtagcttgtaattccaaaaaaaaaaaaaaaaaaccagaaaaggaaaaagaaaaaatggaaggggaaaaggaggacctgatggaaaggttgaagcaaatcgaggaacagattaaaagggttcagcaaaaacgggaagaaacagaccccgtaagggctctgggaccatggagcgggaacgggaagctgtgcccagagctgagagcttgaaaacgctgggccaagggagcgtcaaaaagctgaagaaggccaagggagggcctggttggagggcctcccggggaccagaaaaagactcgggaacagctgggcctgggaaatgggcagagctgacagtcgaatctcccagcgggagatgggcccgcaagaaaaaggagaattgaggttggtggatgtgggcgagcaaaaggcccagtatgggtacggaagatttgggagaaagacccgtgctggagttgaaatatggcttggagtaccctctaatgttggaaggagcccggtgtgagaataatgagctggatgagcgggatgacaaataggggcagagggtaagtggctggaccctacgggtggtatgctatggccacggaccgggtggggcgggcacgtaccctcttggggcggagaaaaatgacgcttgtgcggaagccctgaggccctcatcgggagtgggcatgccagagtgatccagaaaatgcgattgagtgtcccgggtgaacatggatgggcgagaaataagacctggcaatccggtggacccagcgggtggatggttttgtgtggccagttaggcccctcctttctggcctaactatatcctttaaaaattttaaaaaaaaaaaagggtttgtggggaaagaaaggcagtatttca

SEQ ID NO: 517127 - DNA, 579 bp, Homo sapiens
  misc_feature (574)..(574): n is a, c, g, or t
aaaaattactgaaatgtcaaggattttgttttgtggcttgggttccctgaagcctagcttgaagagaccagcagtgaattacagtgtcgcactgtaaagacactgacaagatttttgtcattaaagttaaaaatattgcagcagattgcctgggtaatcagaccttcctttgatgtgtgtggtaagaattcttattcaagggaactgaggtgggatatatattcattattagagactccagcgtggatatgattttaggtttcaatgaaaagctttcttccagaattaccatgcttgaggaaatatgattaagagttgatcacatttgttcaccagccacagacattcttgcctgtttgagagcacgggtacgagtgatctctgtgcttctaggcatatgcacctatcattgttgggtcttccaaggatctaatatgtcaatccagatccatgcatctggtggctttcatccctctgcctggagcacagcctcactttcatgataatggatgcccttccaactttctaataaggaggctttgtgttggtccttgtgtttgttcttgggataaanggtaa

SEQ ID NO: 517128 - DNA, 218 bp, Homo sapiens
catcaatcatccacatttcaatgacaacaaatgtgtttccaaaaataccattcgttgaaggttcaggtatctttcttttctctatgtggacatctttcacaggattacacatatgtgtaaattcaagtgcttcttcattcaccagcaaatcacttgaaacagaataaacacatcaaacatggcccccacttcctatttcaactactccatctccaacc

SEQ ID NO: 517129 - DNA, 176 bp, Homo sapiens
cacgtgcgaatattcaatttagaatctcctgtaacctcaagaggacagatgtgcacacaacctgtattgatcagctcttgagcagcagcagcacatagctacactgattaaacagattaaaaaaactgtctcaagttgtctgtgtcggtatccccaatgtttgtttaacttcacta

SEQ ID NO: 517130 - DNA, 507 bp, Homo sapiens
gtgtcacactggttcgagtcatacaagaggtataccttagactaaaggttctctgcctctatcttggaaatacggacaacaaattccagaataaaatatggtacaacttcaccagcctataatgaaattttgtattccaagagagtcaaaatcacggcgtccattgtctgattaaagattgccaggcatagaaagagcaagacaatagcaatacacaaccagggaagaaaaatcagtcagcagaaaagagcaagaacatgacagcgctaggtggcgatagaaggcaagtaccttaaaacagctatgataaacgtttcccatgtgtttaaaaaggtagacagcaaaatgtgaacattcacagtgcaaaaactggaaaatctaagaaagacccaaattgaacctttagaaaagaataataccagtatctgacatgagaaacactgaatggaatgttccagtagagtggacaacgcagaagcaaatgtaagtgaacttgaagacatagca

SEQ ID NO: 517131 - DNA, 114 bp, Homo sapiens
  misc_feature (81)..(81): n is a, c, g, or t
cggtgtctcgcaaaggttctagaggacaaccggcgccactcggtcgggagctcacatcttgtccgcccataaatattcgtnccctgtcttgggtcgctggcacagccccagacc

SEQ ID NO: 517132 - DNA, 495 bp, Homo sapiens
gtaggatcaccccggcgctgtagcgaatatctggcacgcagaggggagtctgtagaagatgggcgctgtcacgagaagatgatggggtacacagggacagagctgtgccaccatatctcctgtgagataggagacgggcagcacagatagcccacaagaccgccagagagcacagacacgcggtagagcctgtgcgctcgtagagggaggcgttgcgggagcacagagacgcgcctcttctctcacacgagcgtatatccgcgcggttccacgcatatccatattgtgcggagctccctcttcctcttcttcttctctctacatctgggggctctctatatctcggtgtgtcctctgagatgcgctatactcttctttttgtgcgctctggagacactcttacagcctgtgcacacagtgtacactcttttttctctgtggagagtctcgaacatttataatatagggtgaatgcgctcgtgtgagatgcgcact

SEQ ID NO: 517133 - DNA, 718 bp, Homo sapiens
  misc_feature (396)..(396): n is a, c, g, or t
ctctgtactatctacagggagagatggtacaggatctcccttgtggaatagactcatatgcgggggagtggaagcctggtgcaccattatctattaagaggtagaggtgccacaacagagatgaaagagtgggggagtagacacttggacctcttgtatcccaccatcttgggccatgaaggggctggaatcgttgagagtattgcagaaggcgcacgcacagcgaaaccaggtgacaacagtatcacactctttctgtcacagtgtggagaatgtgcctctttgctgagatctgagggcaagttttgtatacaactcatacagggcagaacccaactgatgtctgatggtaccagacggttacactgcagggacagtcaatatatcacgtatgtnatacccagaccctctgtggatacacagggataataggtacctcagtttgccaggaatgatgcagtcgctcctctagagaaagtatgcctattagctggggcgttcccactggttggtgctgcatcaagactgccaagggcaacaggttctacttggccttgaatgcctgtgaggcgccggcttgtctgtgttaagggttgttaaggacatgaggcagctcagacataggggtggaggtttaccctgagaaatttaagcaagcccaggattgttgctccttttaccttaccctaggactatagaccctttagaggtgtttggc

SEQ ID NO: 517134 - DNA, 369 bp, Homo sapiens
ggatctagaggacccccgagctctgctctgatcatgcgggcacttacactatatgattattagcataagtgtagagtggcgtgtttgaggaagttaagagaaggtacatgtggcctcacccgatgtcacttccatcttattgacatacaacctttccaacacaaatgcttgtcatgtctcccctaagaaagaagccctgaaaatgctgcggaatccaacagatgaagatgttccttggcctggattcattcttgggcagaccccagcttcagtatggtactggtgtgctgaccaagtcatcgtgcagagggtctgtgtagatcatagcattgcgtgctctcaggataccgagctcgcagtccgaccagt

SEQ ID NO: 517135 - DNA, 291 bp, Homo sapiens
aaagggccctgtgccccccccccctcatccctgggttggggccccggtggctaaaggccctttcccttgggcccccccccccccggatggggggccgccccctcccccggctgggtttctcccccaaccccctttaatgggggagggaaaggggggaaggggggggggcccccccccccccccgggcttttgggggggcccgcccccctggggttttccccttcccggggggcctctcccccccccctttgtttaaatccaacccggattaaaccccccggttttttttga

SEQ ID NO: 517136 - DNA, 302 bp, Homo sapiens
gataaagaaacgtgggggcagtgcacggaggctcatccgttgtaatcccagcacttggagtggctgaggcggagagatcacctgagtgttcgtgagttcgagagcacggctgtatgaagcatggcacatccccgtctctactaaaaggacaaaaaattagccgtgcttggtggtgggcacctgtggtcccagctactcaggagcctgagacaggagaattgctggaacctgggaggcagaagttgcagtgagccaagatcattgcactccagcccgggccgacaacagcgagacaccgtctc

SEQ ID NO: 517137 - DNA, 555 bp, Homo sapiens
cctccccccctgcctttcataaccactcccatgacacactcccctatttcagctcggtcccccaaccgatttaatatcgctcttgctcccctcttgcaatattgatatagaactcgccttacgcccccgctttgtgtttccccccaaaggagcacctcacctacttcgccgcccttattctccccctacttttgttctatttgttcggtaaccacatctcgcgccttactgtctattttcccccaatatttgacgcatcgcgcggagcgcgcatgcatccgcctggcgcacactgcttcagtcagaggcgacctcgaccctatggccgcccgcttattatggagccgccccgcctcgggctcgatgttaccaccgcacgtgacgccctttcccgtcgcccacggtagtgtttagttcgccgacaatatgtattatgccctgagtaatccctaagtaatacagccgctccccgctttcttccccaccctgcataggtgttatcaccacgcatctaggtgggtaacgcctctgcaccggccggccacccctcaatca

SEQ ID NO: 517138 - DNA, 941 bp, Homo sapiens
gggagttggggaagctgggttggctgggttggtagctcctacctactgtgtggcaacgaacggtatgggtcatgaacagaaccaaggagctgcgctgctacagatgttaccacttctgtggctgctaccccactcctgggccgtccctgaagctcctactccaatgtggccagatgacctgcaaaaccacacattcctgcacacagctgtactgccaggatgggagtcccagctgtgggactctctgaggcctacgacgaggaccagcttttcttcttcgacttttcccagaacactcgggctgcctcgcctgcccgaactttgctgactggcgctcaggaacagggcacatgctcctgcccatcttactttgacaacagcagcttctgcgagctggcatgatccacgccaaatagggcccaaaacctctgcatggcacgaactcccggctgtccacgagcggtttcctaatcgctgaagtgtctcacgcctgaagcccccctggagctctggcaagccccaaacactcttggctctgctcctcgctcagctacatcttcttccccacccattgctgacagctgcaactggcacgcactcaatttcccgtccccctgtgcgacagggactctgggggccctacctcttcgctcctcagccttgctcgcactgcgaccttcacgctttccacggcctcctcctctcacttcacaccctttcacaaccagaaacccttctgcagcacttcatccttcctggccactggtgacctcacccgcaaccatctgaccgccttacaccaggcaacttgtgcctaatcggggtacccccgggaaaccgcacctggccccccacgaattctgcctggccgccattgctgcctgccgttcgccgtctggcctctggcccttggcgcctgtgtcctcgcacacatcccatcc

SEQ ID NO: 517139 - DNA, 347 bp, Homo sapiens
cggaaaaggtacagacagatgaagagtgctaggaacgtagaaattctagacaggccgagtaatgtaggtgcacgggaaggacgtggtgagagactaggcttgaaaggtaagcaaaggctgtattatggcaggctgtaaattgactttatctggtctcaaacagaggagtgaaaggaaatgatgtatatctttttttttttttggaaacaggtgttgcagtcgtggttcccccgagggtgggaggtgcaagggcgtgtgatctcagtctcacgtgcaaccgtccagcctcccgaggtttcaagcgaattctccttaccgtcgctctcctgagttaccggggaattacg

SEQ ID NO: 517140 - DNA, 508 bp, Homo sapiens
agcagagtctccagagctatttgcacaccctccatggcagcactggtagacaaaaggtggaaaaaacccaaatgtccactgatgtatgaatggataaacaaaatgtgatatacacatacaatggaatactacacagaataaaaaagaaaatattgtagcacattgtcacatgctacaatatgagaaaatttgagggctttatgctaatgagataagccaatcacaagaggacaaatacggtatgattccacttacataaggcatctaagctagtcaaatacataggtatacaaagtacacagtggttagcaggggtgaagggagggggcaaaagggaattgttgtccaatgaatatagtttcatttctgcaagataaaaaagttctggacatctgtttcacagcaatgtgattatacttaacactactaaactgtacacttaaaaatggttgagatggtaaattttgcaacacatgtcccttaccacaataaaaagcaaaacaaaaac

SEQ ID NO: 517141 - DNA, 668 bp, Homo sapiens
tagccaggcgtggtggcgtgcgcctgtaatcccagctacttgggaggctgacgcaggggaattgcttgaaccagggaggtggaggttgcagtgagccgagattgtgccactgtacaccagcctgggtgacagagcaagactcttatctcaaaaaaaaaaaaaagtgctccagggcttttaaagtgagaagttaaaatttttcttaagtttaattaaagattgaagaatgtgggctgacttatttattgattgaaccattaacttaaagtgtctttatttaaagcaacgtgagtgtgtcttagccccttaaatttaaccgaggtaaaaacgtgttaacacttaaccgtgaagttttgggtgaataacgtgttcttataaccttattggagaatgttgtgcaagaaaagtgcacattccaggggtggaacgtgggaagctagtgaaagttgactaaatttcctcctttgcagtggtttacctttcaagatggtataggtattctctcctctttctttcccccagtccccatttacttattggcacactggtttaacctggacttccggtttggatatttatcaccaagaccataaactcatcaatatgaatttcctggatgtatactcacgatggtcttggatttatggtccctaaattttttcagatag

SEQ ID NO: 517142 - DNA, 513 bp, Homo sapiens
  misc_feature (26)..(26): n is a, c, g, or t
  misc_feature (33)..(33): n is a, c, g, or t
  misc_feature (61)..(61): n is a, c, g, or t
  misc_feature (70)..(70): n is a, c, g, or t
  misc_feature (160)..(160): n is a, c, g, or t
  misc_feature (162)..(162): n is a, c, g, or t
  misc_feature (173)..(173): n is a, c, g, or t
  misc_feature (328)..(328): n is a, c, g, or t
ggattcaagttgggcaacggaccaanagctgtntccaaaaaaattccaaaatggttgggcncagtggttnacacctgtaatccccagcgctttggaggccaagcgggcggatcatgaggtcaggagtcgagccagcctggccaagatggtgaaacccatntntactaaaaatncaaaaaattagctgggcgtggtggcaggcacctgtaatcccagctacttgggaggctggggcaggagaatcgcttgaacccaggaggtggagattgcagtgagccgagaccacgccactgcactccagcctgggcaacaagagcaaaactccatntcaaaaaaaaaaaaaaaaaaaaaaaggaaacagaaaacaaaagattagccgaggatggcagcacacacctgtagtcccagctacccgggaggctgaggtgggaggatcacctgagcctgggaggtgcagtgatcataccactgaactccagcctgggtgacagaataagacccgtgtcccccctg

SEQ ID NO: 517143 - DNA, 135 bp, Homo sapiens
tgggtctgtttttttaggtctaccgggccgggtaaacctaatttccctctaaatttctctcaaacaggggttttatttttatttttaattcataggttgaggtctaccgtgggggttcccgacctcgaattccgt

SEQ ID NO: 517144 - DNA, 653 bp, Homo sapiens
  misc_feature (541)..(541): n is a, c, g, or t
aagtcagctaaggcaataagcttatgcatgaacatttcccagactttcatgaagctgtggaggtcctagggcaattaactgcagcagttgcgataaagtaaaaacatctcacctaagtctccttttcttcataagcatagatactgacatgatgaggaagctctcaggcttagggaaagagaagtaagattattaggagttatacgaagcatggatgtgcaaaaggtgacatggtaaccaaagtgtggctggacaccattatctcggtaacgcgtgggtgtagtcgtcttcctgtggtggtgtgagtcacctctcgagagaaatgtgtgtgtcgcaccgtgagagagagtctctaatgttgtctggaacagagaaagtctgtagcctttccagccagtttactgtgcgtagtgggtgaaaggtaagactctggaacctagggttgcaagagctctgtatccacgagagcgtctggttaattccgtctcaacggccttagaaataccacttaggcaagcaacagatgcgcgcgggtataacncttgtgagagagttgggcttctggtgtcgtgcgacaagccccattaaaataacccgaacactgtggggcttaagtctcgccttatgtgggaccccctaattttaacaggccg

SEQ ID NO: 517145 - DNA, 468 bp, Homo sapiens
tcgagctgccgcccagcgccactagcgctgatcacagatatgatggggctcgggacaccggtgggggccgcactgccggtactcatcctgggggccctggcaggctgcatcccgcgaagaagggcccacagcatacacgctcccgtcgctgggtgcaagccccacacgtgacgctgcaactgccccatgacgcccaggcctgccacttgccatgcactgggcgctgctgcgggaagcagtctggggtcttcacccagtggccctgggactccgcacccccgtacgaaggcccgttgcattcacgcgtgcgctggtgtcggccctgggagcagctggcggagcacgcgctacagctcgaccactcatttcacgttccatacactgcccgggcatggcacagggcaatgttgcaaaaatcggttcgcttctcagggccctcacaggggttgcccgcaaactgggggggcc

SEQ ID NO: 517146 - DNA, 766 bp, Homo sapiens
ggtcttcctttgtcttctgccgtgatcgtgaggcctccccagccatgtggaacttataaaataataatgatggctgatcctgcaaagaggcggcggtgacatcaaacagtgactcagtctctatgatggtattagtaactggacagacctgactctgcctattgtatctatcaacgttaatgttccgacaataagacttgtcaagatctcgaggaaagaatgacaaatcaccttccaggcatgggttcaacgttaagaagctgaacactagtgtcttcgtatcagctcaaagagaggtttcgatagtgtcgtggcttccttgtgtattggttgaggaactgtgccttggcatgcggtgcaggggtagtcttgagaatgggtcaactgatggagggggagtggaagacattggttgcccaagaaatatatgtgcaacgtctgtccatcactgctactccggcctgattatcatctcttctgcttctgtaagcaccaatgagactggtgccactgaaacatattctttgtagcctgtcagtgatttcccaccattgcgccactgctgtatatgctaagtgaggaagcccaggttttagtgtgggtgaaatagacttttcaggcagcatacagtgggtcaacaatctcggactctgtacagcggtcagcctgtctgtgagagggtcctctttcggacgggtccttctcacaactgattggtgagtgcgtctggcgttaggaaggccattaaccatctgggtggtgtccg

SEQ ID NO: 517147 - DNA, 660 bp, Homo sapiens
gcatgggacccatgtctcctgggacagaggccatctctcttccagagagaggcagcattggcccacaggataagcctcaggccctgggaaacctcctgacccctgcaccttcgttggagcccctgcatcccctgggtccagccccctctgcatttacacagatttgagtcagaactggaaagtgtcccccaccccacacctcgagcggggttcccctcatgtacagatggggcaggacccagacacgcgtgctggcagagatggtcatgagaacacatccaagccagatccccccagaacacagcgttcccccatccgtaacctaactgtaggcttgccaccacagaccgacagcgggtcccaggccccagagaagatgagatctatggcatcaggatctgaaaaccaggaaagcacacatacaggagcggaatcctcccatgcactttcaacacagcatccaacgccatcacactcatctggaactacctaggcaagggcgggagaagggagggggcataggagggtccccaaaaccacccaacgatggccgaatactaccatagaggaaacaacaggagggaccagaaaaaatagggaccaagcagaagagactgagatgaggacaaacaagggaacaatcaaggccagaccccggga

SEQ ID NO: 517148 - DNA, 418 bp, Homo sapiens
agtcgattctagaggtatcccgtactcccactcaggacgaaagagatccttagtatcgtattttggtagtggatgtttacacagaggacagcttccgtgtttttcacaagtgaggtgagacatctaccacgctttgagacaaactctatcttttcctatgaactcttctctaaagcacgtcacagggaaaaaaagggtttaaagagaaataacttctccgggcaaaaactgaggttagcgggcctatcagctgtttcttctcactccaccactgctgctgactggaggagcagcctggaaagcagccgccctcccgcaaacaggtaaaccacattacctattcctgtggcggaggcaaatggatggtcaaacctaacggggtagtgctgaagttcggggacaaaagcccatcggggag

SEQ ID NO: 517149 - DNA, 108 bp, Homo sapiens
tcttttgataggaggagaattggggataggtgtataacctagggtgtatctcgtgtgaatagggtatatgttgtactgtgtgggtagtagccccattgtgtttgtgga

SEQ ID NO: 517150 - DNA, 577 bp, Homo sapiens
ggcggatcacgaggtcaggagatcgagaccatcctggctaacacagcgaaaccccgtctttactaaaaatacaaaaaattagccgggggtggtggtgggcacctgtagtcccagctactcggtaggctgaggcaggagaatggcatgaaaccgagagacggagcttgcagtgagccaagatcgcgccactgcactccagcctgggcacagagcgagactctgtctcaaaaaaaaaaaaaaaacgagaacaaaaacaaaaaaacttaccatctaggccaggcacggtgactcacgaccataatcgtagcactttgggagggcaaggcaggtggctaacttgaactcaggagtgagaccagactgggcaacatggtgaaaccccatctcaacaaaaataaaaataaaaataattagcagggcatgtcagtgcactccagccccagtgcactcagtagccccagctactgaggaggctgtgttgggaggacggcctgagccctggaggtggaggttgcaatgagccgtgaatttaccagtgccctacatcctgggtgacagagtgagaccctgtcttatt

SEQ ID NO: 517151 - DNA, 220 bp, Homo sapiens
cgcagtccacttttcctacttctcccccactctttcgggctttttgtgttcgcccactctcctcatctccatttctcccacattgcacagtccatgcctcacactgttcccatatctcttttttctctccattcatggcatcgcactgcatgtctctcctgcacccgcgcttcttcatccctcggccgcctccccaagcgggtcccgcagctcgcaattg

SEQ ID NO: 517152 - DNA, 310 bp, Homo sapiens
tccccttggtcctgctgacacagtgctggccagggacatgtaagtactagtccagctggggatagctttctttccataatcaaaaatcaaaatcttatgggagatatttttaggccttcagccttcttcctgccaagaatattgaactgatgcctggaggttcatcatgagtatgaaaactaattcgagggaatgctctgcaaatggattgaaagacttggttttgtgatgtcatttatcacctgcagtcttatccattccttggtctgtcaagccccaggctgtggggggtccgagctcgaatttctaa

SEQ ID NO: 517153 - DNA, 197 bp, Homo sapiens
gaagacaacagtaactaagtggggggaaggcataaggcagggactcactggtactcaatggatcaattacaaagagacaatgaaaagcatgaccctggaaagaacaaataagcagaaggcaatagtcggtcaggcatcaatgacaaaaagtaaagccatcacaagggtttacttttctttcttattctctcttttat

SEQ ID NO: 517154 - DNA, 816 bp, Homo sapiens
tgggctaggacgaggccgcagatgtacaacaaggacagagggtcttaccccccatatcagctggaagcatgctgtctgttctgcatggagcagctgaacatctacatagatgttgcccggccctccccatctgcaccctgttgagttgtagttggattagtctagtttatgctatggacttcaccagagtgactactgactagtgaaaagaaaaaaaaaaaaaaaaaaaggacagccagtgatactactggaacacggcacggaaacacgaggaacccaagaccccaccccaccaccgcaggaggcctcaacaacccccacacaccgggagagcacaggaagagtgcccactgaagaatgaagcaagccaacaccagtgcccagaggcacccacacacacgaatcagagaaagagcgctatctacacctcaagacacaatcaatgagagaccacaaacaaacaaaacaacacaagcatacacaccacaaacaataagagcgaacacaccgcgaacacaacacacacgagagacaccgacacagcgacacggaaagaagcacaacaagacacacatcacaacggacaacaagagacaaaaaccccgaacaacaaacacacgacaccacaccccagacatccccacagataacacaaacgtacccaccaccaacaatgaagacaacaacacaccaccacctggcgacagcctcaaagcgcgcgaaccaaacaacaaaaacacataaaaagagaaaccacaccgaccacgacaccaacaagcaaccacaaggagaacacataaaaaaaaaagacaacaa

SEQ ID NO: 517155 - DNA, 147 bp, Homo sapiens
  misc_feature (104)..(104): n is a, c, g, or t
agacagccctggcatccaccgagcgcagtggagccagcagaccggaagcgcgccgggcgagaaaccgagcagagctgggtgcgtctccgggccgccgctcacgnactgccagcgccctccccatgtccctgctcccacgccgcgccc

SEQ ID NO: 517156 - DNA, 658 bp, Homo sapiens
taagtagctgatagttctcattagtcatatcctcaaccttaattacttctaatcatcgtagtcaagatgcgtgcagaagacgatgtcggctatgaggttgcagtgcgcgcagccattgagtaaggtgtggtagataggtcggcctgtgtgtcttcctgagtgcttacagcaggaagtgggcctccttaggatccggctctcatctcactgtctctccatcacatagttccttagtgtggtcagggagtcccgccggatgtccgtccaggtaggtccattattatagatgatctctccatgtcgctgtgcgcatggtacgcgaggaggtcgcctctgctcgagtactcgtccttgtagtccagcagcgcttccttcaccgccttgtagccgtgcatcaccaccatgcgcttcgagcacacgtacagcgtgcactccggcacgaagctctgggcctctcgtgtgaaggacttgcgaatattcttcaatttcgactggaagaggttcacgatgatggcatagcgggagagtgcctgtgggcagattccaactgctgtgcacctgcctccacatggacatcagcaggaggacggccgcccactccagcagggccgcggtgactccgagcgcacacatggtgccgctgaggccctctcgtgcc

SEQ ID NO: 517157 - DNA, 536 bp, Homo sapiens
  misc_feature (21)..(21): n is a, c, g, or t
gtgggctgacttagaggaccncgagtgggtccctgccctatccggatccctctgcagaccttcctaccctcgggcagatcagcacttcagcctaagttggtaccatctgcagacttcctgagcgtgcactcaattccctcatccggaccactgatacaactgctaaacaaaacagccacacaactgagctccggtgatcgtccaccagccgagctgagctctgctcacagtgactccaatcctgagcacccagcaagctgtgcagctgcccaagccacagacaacccagctgatccgggacggcgccgttaaacacttcactcagccctgttagacagcacccacagccttcctctcttctgctgtgtaggttcctgttgcaggtgtcgtggaagggctgatttggccgcccagaaggagccctgccctggagctggcagctggtggtgaagctgggctctgtgtccagagacatgcagagatgcctggagctgagatgtggggatttcatattctagcagaaaaagcagcttcat

SEQ ID NO: 517158 - DNA, 404 bp, Homo sapiens
tctgagaggacctcattgaacatgggaagcttcccttcatggccactgctgcggaagctgtgccaccctgctgcgggttggaatcagtacccgccaccatgagctccttctccagagactccagcatgcgacgtcggtgatccacagtcggcagtatccatagcagatttctaaacgcccatgatgccattgatgccctcgaggctcaactacagaactcacgcattgccctattccttcgaatatcacactgatgaggcggcatactaactagccctgcacacgcacacgtcccagagcggcaggtttctttgccaactaagccgtcagcagcttcgtatggcaatgcggatacctgtgtcgtctgagcagctcaagagggcacaactgagagtacacaaggc

SEQ ID NO: 517159 - DNA, 841 bp, Homo sapiens
  misc_feature (311)..(311): n is a, c, g, or t
  misc_feature (841)..(841): n is a, c, g, or t
tggacttttaaaagaagtaagcctttattcccttgttttggcaaataaaatctgggctaagtgggttggcttttggtgtgattagtcaaagaaaccaaatcccatatcctcgtccgactcctaccgatctcttccttggcttcaacctttagctgtggtggctgcagcacgcagcaaggagcatgctgtgtttggcatgcagccacagtggtgcagcagcccacaaatggcaagattgggatcatgccacaagaatggccttgacccttttcaagcaatgtggtgaagtgttgtaactcctgtcctccacnagacaatggccaagtgacctcgtttgtgtcccctgttgatggatacgaatgtgtgggtgtacttgatggcaccttgttcggtgtacgccaatcttgcagacagacactgggcacctttgctggacaccctccatggaatgcgagattgcagagttccctctgtgatatcaagcacttcagggtgtgtagatgctcgccattgtcgaacacctgcctggtatgaccagcccaatgtgtcgaccgggggacgatgttgacgctttgttcacgcagcgctggtcttcgctggctcccactgttgtctccacgtctttgatcatgctgcacatccactcaggaattcaatttggtgccccgtggagatttagtggttgatcctaaagcctggaacaaggaggtcttctcgggcccgacacagtgttctgctgtgcacgtagtctcctttgggccatgctcagcctgggcatgttgccctttgtgcgacattcctatctcagtgtgccccggcacccacccgtccccgtttggcn

SEQ ID NO: 517160 - DNA, 217 bp, Homo sapiens
gagggtttcaatgagttcctgttgctgtttggtgagcacaacatttctcgttggcatcgtcgttctcgctgttcgacccttatggcacaatatgccagacgggggctgttgcttcaatcacggtctgctgacctgacgaaggcaatacgtcctatacgtcaccgctaccccagcgccgacgcgacatgcttcaggatcgcttcgatcgcatgcgcgc

SEQ ID NO: 517161 - DNA, 242 bp, Homo sapiens
  misc_feature (82)..(82): n is a, c, g, or t
cggctgctgcggtcgcctctcgcaggctccccctttccccaatcccttcaaggcgcacatgtactcccatttctttccgggnggttcccaatcactccaccatgggggtccattttggtccagtggcccagttggtgccagttgtgtgcacttccatggcagcacccattcacctgcaatgcagccaggtgcaacagcccatccacagcacatggggtgcacccacgtgcacccacacttgc

SEQ ID NO: 517162 - DNA, 392 bp, Homo sapiens
gatcctatcttgatcataccgtagctccagcatgtatagagcattaaatctcatggttccataatctgacttcatttccgctgtgccacatatatccaactctgaaacgcataaatttaatgcccgatacaggctgcaccggtgctgccacagggtattccatactgttccacttctccgttttctcatcaatccttctgagcggacagctgtgcagctggcagttggtctacagctttatcaggtctttcctcgaggagaccctctaggtgcaactttgcgggggttgccttgggtgattcctggatctcccctgttgattcggtgctctcctggggaccttacctgtacagcatgtctcttctcgaagacaaaggtctggcagaggtgtc

SEQ ID NO: 517163 - DNA, 249 bp, Homo sapiens
  misc_feature (173)..(173): n is a, c, g, or t
ccccaagtgaccaaactgtgttttttgcctcatttttttccttgaaaatgaagaatggcctgtgtcactcagcagtgggacagcaacctgtaaagtggccagcaagggggtgtttagctttatgttggatttcaagagccctgtcagtaaagaagaagttttttccagtttgntttgcccttttttttaccctggtggggaaagtacaacctgaaaaccctttgcctcaaataaaaaggggttttgtga

SEQ ID NO: 517164 - DNA, 489 bp, Homo sapiens
tatatctctcgtgcggaacacaggccaggtatgtaacaggtgtcaatttatatgtgtgacgaatgaatgaatggactactaacgttttggtgtttttttctacctctgtgttctcataggtaggttttttttttggacctaggtgatggcagcatacggcctcgtttaattcttacgtaacacttacctcaattctcatttaattctgcctaacttcaaaagagtttttaggtgacggtatgtttttctcatccattctttcagtagaaatagcacttatttccttaaaaagggtctaaaagcatcaggcaggggcagatatatacaaattttatgtattggaaatcggtgtgggcctacatcagggaaggtaagtaacataccagagttggtggtcagcatcggcagatacggaaatagtacagggtataccagctttttgggaaaaacagcggtgtcattttatccatctttaaggctggtccttca

SEQ ID NO: 517165 - DNA, 1069 bp, Homo sapiens
gcctgcagagggagatgtggcccttcctccccctcattgaggacttaataaattggattgatggcttctgctcctccactggtacctcagactcataaatattcacataaaggcacacaacacaaaaccataacaaccctattgtaaagaaaaaatacactaaagaagattaggaaaaacgaagaaaacaggccataaaaacaacaccacaacgaccacgtcaaacaaaatcataaacaccaaactaccacccatcaaagaccaccacatcaactaaataacactaccaataatacaacaagaacaaacatcactacccatcataaaatacataacctcaaatcctacccctcttacacacagaaatcaaaaacctacacacataacataaaaaaatcataaaaacacacaccacacatcaacaactaactaaccacacaaacacacaaaacacaccatacctacgacagggaggccaagacgacacgagagacatcagaacacccaagagactgaacccgaccaagcaataacgagagtcggcaaaacaagaggacactgagcaacacccagaaccaagagagccgctacggccacacggaaccaggaaagctcgcacacgcaaggcgtaggcgcgaacgataggacgacgacgacagacacgaccagaaccagcacgcagagaggagaactaggatgaccgaacgacagagacagagcatacgcacgaccgacacgagagacactagcaacacaacaacatcagcataacgatacagcaacatcaaacatgcatacagaaactaatcaactctatatcacaaaacatatataacacataaacaaataaataaaaatcaaaaaacccaaaaatctaataaattatcataaatagttacaaaacagacaaaataatcacatcccaaccaataataatacaataaaagatatacacaataataataataataaatcattatatgtaatattctactacactattaaaaccctatttaaacatcaatataaacaataaaatattcaatcaacaacagtacaataaaactaa

SEQ ID NO: 517166 - DNA, 1495 bp, Homo sapiens
  misc_feature (348)..(348): n is a, c, g, or t
  misc_feature (1495)..(1495): n is a, c, g, or t
tggagggggtggtccttttaattgggaacccttaattctctggtccacaaaaaaattattttcttacaatccagagggtcctcttgtgtgccgccctacacaaaaaaagtgaagctctttgtggggtttaaggggcacaaggaagaagaagaacagttaacagagaggaaccaaagaacccctccaccgaatgaaagtgtcttcttacagcccagtctttatccagctttgtgtgccacacagattttcttatcaaagtgggtctcccacccatatatatataaagggcgctgtgtgtctctgtgagagaaatgtggtctcatatattctcaccctgtgcacaaaaanatctctgtggtgtgaaatatctctctttgtgatgtggctctctctctattcaggggtgttcccccacgtctatctccccacatatatattgaccgcgtgtgagaaaagatctctctacaaagacaaccgctgtgagaatgtgggctgtgagaaaacacaagaaaacgcgcgcgtgtatatattattccgcgtgtgcacacgcgggagaaacaccggtggccacacacctgtgtggttctttctctctctccacagaaaatgttttctcactctcacataatatccccacagagagtattgtgtggcaatagtagatatatctctcccgtggagagagagaagacttctgtagtataaatctctcttgtgacagaagagaatctctatatcgtgtaggcacccccaccaccacggagggcggaccacacacactcttcgtggaataaaatgttgtctctcacgctgtggcccacaccaccacagtgtgtgtggggggagattctcccagagtagagtactcccagaacagagagggtgtgagagcgtctcattaaagaaaggagagtctcccacacagggtgtgtgagaataataagactgtgcccccacaagatgtctacgacaccacaatatgtgagcgccacccgcgcgatcaaaacagaggatatacaccaagtgttgtggataatatggaaccattctcaccaaaagatgtgtggggcgccacaacagcgttatataattataaaccacgagggggctgcagccagggggcgtcctcccagttcctacaaaaagatatctactaacatccgagcgagtaggggacccacacaattatagataaaatacatccgctcgttggtattccccacgaaaaaggtgatagcacataaaaaaatccccccatctttcactgttggagcagacaaggcaggcggaaccaaacattcaacctattacaccggatggaacattatatataccccccagtttattttcctagttattgagccaccacaggacgtatcaaggcagctctatgtaataataccccccaccacaacgtacaaaaaaagaggggggataatcttgtagggaccccaataattataattgggtgcagacaaccacccttctttgtgan

SEQ ID NO: 517167 - DNA, 267 bp, Homo sapiens
aaaacgggggggtcccgggccccccctttttccccccaccaaaaagttttcccccccccgggggggggggggggggggcccttggggaaaagggggccctcttttttctcccttcttttttttttaaaaaaaaaatgttcccggggggtttttttttttttcgggggggctttgggaaatttttgggggtttttttttttttttccccccccaaaaagggggggggtttttttcccccgggggatttaagggttcccccagggggga

SEQ ID NO: 517168 - DNA, 272 bp, Homo sapiens
gtcgttaagactcaccattgcgttggaattaacttttcagaatcaggtctatctaccggggcctgttgccagatgataggatcgacaccagctggctgaatcatgaaaagctggtagaactgtgctggagaaagtactgttctaggcatattaagagttacaccaagttgctgccatggtgaatgtatattggcttgaccaaaatgagcatatagcggtggcgctgtaactcttctagaagcaccatttggtgaacgctcatcaacataaag

SEQ ID NO: 517169 - DNA, 470 bp, Homo sapiens
tactcaaaggaagatagtaagagaggacgaaggaacaaagagtctataaaacaaccaaatggcagtagtaagttcttacctatcaataataaccttgaaagtaaagggtttaaattctccaatcaaaagacatagagtgcgtgaatgggttaaaaaaaaaaaaccgatctcaatagtatgctgtctacaagagactcaccccacctgcaaggacatgcctagactgaaagtgaagggatggaaaaagatactccatgctaatggaaatctaaagagtggcaggagtagctatacttatgtcagataaaatagactttaagttcaaaacttttaatggagacaacaaacatcattttataatgataaagggatcaattcatcaagaggtcttaacaattataaatatttatgcacccagcattggaatgcctaaatatataaagcaaatattaatggatctgaatggacag

SEQ ID NO: 517170 - DNA, 123 bp, Homo sapiens
ctacacgcatggtgatcggttggtttgcaattacataatagtatatcgggggtaggtatctatcttagaaagtccctagtcacctaattatatgttattaggctgcttgtgatcgccatgggg

SEQ ID NO: 517171 - DNA, 404 bp, Homo sapiens
  misc_feature (364)..(364): n is a, c, g, or t
  misc_feature (391)..(391): n is a, c, g, or t
  misc_feature (403)..(403): n is a, c, g, or t
tggcccacccatttcgtccaagagcctttgaagaaaggctctttactagggaatggtgtcagaatccaacatctgagttctaagtcctaataatgttttaaggatagattcttaggattataatttttttttttttttggtcacagtatagttttggagattctttatatgtatcaccaaactgcttcctggaaatgtactgatttattctcctacctgcagtgcataagaacgcacttctctttccatgctcactaacattacctttttcctaacttttcaggtagaaaagtatataataatttttgtttcctaggatgatgatgatgatgatgatgattattattatttgaggacaggagtntccctctgtcgcccgggctgggagtgncagtggggctgng

SEQ ID NO: 517172 - DNA, 1380 bp, Homo sapiens
  misc_feature (264)..(264): n is a, c, g, or t
caaaaaaaaaaaaaaaaaaaaaaaaaaaaaaaattcctaaaaaacaaaacaacaaaaaaaaaacatttttttttccaaaaaatttttcttatagggaccggattattgggataattattgtggcccattcttaattacattatttgtgggggccatttctccttatacattgtgtctcttggaaccaaggattataacaaggtgtctctgtgggcccaaatatttgtgtgatattttatattgtgtggggagacacttctcttnttctccacagagagtatagagtgtgtgtgcccacagagaggagagagtctcttagaggagacatttgagcagagtgtgtgctcccccaattcacactgtgggtttgggagaagtgtggtgccaatttctcttaaaagagagacattttggagattctcccgtgggaaaatgtgcaccaattcttattttttacacccttgtggggggggggagaaagagagagtttttgaggaccccccaagagctcttcccacttcctgagagacacctgtgtgcgaaacattatactctctttatattgtggccactgtgtgtgttggagccccccatttaaaacggcatatgtattgtcttaagaaaacaggtggcgccattttacccggagaaaacaaattttaacacacacaattcctggggggatatacatatgcgtgtgcccgaaaacaaaatacagtgtgcacatctaccagagggtgtctacaccccctttaacaacttttctatcatctgtgtggcaacactggtgtctcccaatggggcacccacacacctttacaacagaaattcttccttttatgagggaggacttataacacaccaaaaaaaacaaaacacaaaacaacacaaaaaaagcaaaaaaaaaacaaaacaaaacaacaaaacacaacaccaaccagaccacaccaaacacaaacacaacaaaacaaacacagcaaaagccgaaaaacgaccaaccacacagccagcagcaccacgaaacagacgcacagcaatacacaaacacaaaagcaccgaacagctataaacatattctctcaacacaacctcatacagacacctataaaaaaaaagaaaataaaccaagataatgatcaactcataaccacaaaaataccacattaacaccaatatagtaaacaattaaaaactatcaactataacattatccagtcattatcctcacgaacaccacaatcgctttctaataatataattcaatacacactatacatcccgctctgagcaacgcccaacacatcctaatcatcggccacaaatgactaacaatccactcttcaattttttactatgacattatatcagcctagcactttt

SEQ ID NO: 517173 - DNA, 919 bp, Homo sapiens
  misc_feature (602)..(602): n is a, c, g, or t
gaagctggatggagctgcacagctggatgtgcaatcactgagtgctccaagcagcgctggtgtttcggccgagcaccatccactcacagcttagccaagtgacatcaactgagaacaaactggatcgacaggtgagatatcggtgctactccaagtgactgaatgagtcctgtggaaaggcctccgttcgactacatcctggactggcgtccgccgattggtggtaccgcggcttgccgttcggcgcgcgtgggaggcgtggagcgacatgctggactccatggctgggagatggtaggcatcggcggggccacgcccccgaagcgtggcgcggcgagtctcgccgagcggcatgaacgtactggttgcacccgctcggtgcgcgtgctgacttctgttaccggctcgggtggtgaatcgccagagatcgccttaacagcgaaatgggttggccacgtgccctggacgtggcgaggagcataggctaacaagccggggtggtagcgaccacggatgttcggccgtattctggtcccacgtcgttccaaggtgatagagggacgcaataccatactggggatgatcgctccggatacctacgnagcacaattacgtacgcgagagacactatggcaaagggcttgagaagtgtcctaacgtacgtatcggttccaggtgaggtgaccttgccctcctagggggaatgtttcgcgttcaagcaacgacgggagggcaagccacgcaggtggagcacgaatcacgccctcgcgcccggggataacgaggcgcactttttaagtgcctccctagagaggcagtgttgattggcgtgagtcggaagttcaccgctcccgaagagtgaagcattggactagaaaacggccgatggagaatttcgaccagtttgggagccgggatg

SEQ ID NO: 517174 - DNA, 428 bp, Homo sapiens
  misc_feature (253)..(253): n is a, c, g, or t
acagcccggaatatcaagattcatctttttcactaattgtggcattcacatgtctgcacactggaaattcttcctggttgtgagacaagacctcagacttatctgagctaaggggaagaaagactgcaacagtgttgggcctgtgggtacacagaagtcaagaattgaagattggaaacctccacctagatttcagaggacatatggaaatgcctggatatctaggcagaagtctgctacaggggcagactcnactggagaacctctactagggcagtgtggaaagaaaaggtggggttggagactccacacagagtccccactggcacactgcctagtggagctgtgagaacagggccaccattctccagacctcagaatggtagatcaaatgacaacttgcaccatgcaccaggaaaagccacaag

SEQ ID NO: 517175 - DNA, 564 bp, Homo sapiens
tgtttaataatgtgccccttttgggcagacaaattgccagaaagcatttactcccttggcctcagtagtccaggccatggtacaatcagcccagatggcccaggtgttgggaggatcttctcaaggtcttcagcatcatttttagttgcacagctttctccttcattctcccaaactgaataatgaaatttacctatatttctaccatctatctagctatccatctatccatctattatctatccatctatctttctattcatccatccaactatccatccatccatctattatctgtccatctatcatctttctatgcatctatccatccattatctatctatccatctacctatcatctatccatccatccatccaactatctgtctatccatccattatctatccatctatcatctttctatccatccatccatctatccattcatccatctattatctatccatgtatcatttttctatccatccatccattcattatctatccatctatcatctttctatccattcatccatccatctatccacccattatcatctatt

SEQ ID NO: 517176 - DNA, 657 bp, Homo sapiens
  misc_feature (101)..(101): n is a, c, g, or t
gatctcttatgatagtcgcattagcggacgctccaaagcagcttcgttgtgaggcccggcctggatctaggaagaacctcagatttcttcaggtactcaancgatcgctaatgtgcattgaattgcttgcagagtgcgacctcatagcaagggctataattctccttaagtgaacttacactaagagtttgccggaccatggtcgtgctccataatcagcataggggagatcactccgggcgaccaaacaggacatcgttgggtcataccatataagatatgcaggtgcttgaccgacgtatgaacgtagttccccgtatgaggcttactcttagcgcggttaaacctacagctgatgaaagtgaaccccgagtactagtgtcaatgagggggacgtgcaagtaagcacacggtggcttacaaggcaacgtaggaacatattcttcacccccctccacgggggaatctcgaggacagttccttgtcaggttactcccaacatgggtgcgtatgctcctccctctagctcttaggctgagttcgctcggcggtagaaagatcccatttcgaggtggccaaagctttcgcccttggagttgcgttgccctggcaaagtcgatgcctggtaggacctattgcgatggccctttactcgtg

SEQ ID NO: 517177 - DNA, 164 bp, Homo sapiens
tgacagcactcccaaagcacgagacttcgtggcagagctgagagcagtgggagctggctgggatggtgaagtcctgggcaagaagctggaggaaaggggtttgacaaggcctatgttgtccttggccagtttctgtgctacagaaagatgaagacctcttccgg

SEQ ID NO: 517178 - DNA, 321 bp, Homo sapiens
taacgaaagcttatagtgcagacatatttctccaatcttcttttttggggatataaaagcctgtgatgccactggttctgggaaccaagttgagggaggtgactgtcattctgtgtgttggatcttagataatcctccagctttccacatggtccctaacaagagtcttcagcagtgtcttgagtttgaagtctctgtggtataacctctttaaaactttccttcagacttcccacctagggctggtgggagtatgcttttggctgttaaggaactggagagtctaatgatttctgaccccactttaagccctcacctgta

SEQ ID NO: 517179 - DNA, 101 bp, Homo sapiens
tcaggcagtccggaaaaacatcttcagtgctccggtgacaacgtgtatgtcctcccaactggctgtcgtccaaattcagcttctcttcttggttgacaata

SEQ ID NO: 517180 - DNA, 222 bp, Homo sapiens
agaagactgaatgcgcatcaggaacgagtcgtgccggtacatgtggtgcgccgacagcacgtgttggcgtacaggtctttgcggatgtccacgtcacacttcatgataggagttgaaggtggtctcgcggatcgcgcaagattccatacccaggaaggaaggctggaacagcgcctccggacaccggaaccgctcattgccaatggtgatgacctggccatc

SEQ ID NO: 517181 - DNA, 1041 bp, Homo sapiens
  misc_feature (38)..(38): n is a, c, g, or t
  misc_feature (78)..(78): n is a, c, g, or t
  misc_feature (80)..(80): n is a, c, g, or t
  misc_feature (131)..(131): n is a, c, g, or t
  misc_feature (153)..(153): n is a, c, g, or t
  misc_feature (184)..(184): n is a, c, g, or t
  misc_feature (524)..(524): n is a, c, g, or t
  misc_feature (528)..(528): n is a, c, g, or t
  misc_feature (785)..(785): n is a, c, g, or t
  misc_feature (975)..(975): n is a, c, g, or t
  misc_feature (1038)..(1038): n is a, c, g, or t
ccccccccccccccccccccccccctcccccctcctgnccccgccctgcgcccctttccctctgtcctgccggctgcncngcccggctcctccccggccccctgcgctcctggttgtcgccgccctgtccngccgcggcgctgcctgcctgcntttttctcctcttgttgcggcgccggttgtncgcggtcttccgcgtccttgctcttcccctggtcgtcgtctccccgcctcgtggccccggccctggtcctctcctccttgccttcgtccccgtggtctttgtcctcctgccgccctcgggccgtgtggcgtggggtctgtggccctcccctcgcttggttgctcccggggtggttcctgccctgcgtgctggtccgcctctctgtggggtctgtcttcccccggcggcggctccgctgcttggcctcctccgcgccttctgccccctccggcttggggccgccgtcctggccccggcgcctcctcctcttcctccccggggcgctggcctggcccgtgtnggcntcgccgggtgggccgcccccccggcggctgtccctgctgcccccccgggcccccctgtcccctgccttgtcctccttctctggcccccggccctccggggccccctcctcgggcgtctcgccgggtgtctgccgggccttttgggtggtctccttcgccccgcccccctcggtgcgcttccgccctgcgtctttctccttcgctgtgtcgcgtcggttttccggcttgccctctcggtgggccctgttctggctgtnccgcccctggctggccgtgcccctctcccgccttctctctgccgcttctctctccgtgcccgcctggtcgccccgctcctgcctcctgctgcccccctcccccccttccctgccttccctgctgctgcggcgccgcgcttgccctggtgcctgttctcctccccctcccggctgccgcccctctgggggncgcccgccgcctgcccgttctggtctccctcctgccgggccttggggctgtcctcccggcgcntcc

SEQ ID NO: 517182 - DNA, 177 bp, Homo sapiens
ctgggacggtatggaggaggctccgggtggggctggtgaaaggcaggacgtgggtggggtgtggggagcacgggggctgctggctgagaggagcagccactcctgccagtgcgcagtttgtaccagttagttaccagcagtcctgatgtgacggcatgatcttttgcaggctctggg

SEQ ID NO: 517183 - DNA, 884 bp, Homo sapiens
cagaactacggtgagcgggaatcccgttctgcttccagaatgtggatagtgctcacggatcggggaaatctgcaaggcatacccctgtcgaatggtctcgctccaaggaagattccaggcgttccagattcaaagtccaggctcccgagtctgaatctaggtctagatccagagagaagctcccgaaggcattatacccggtcgacggtcttcgctcccgctcccatagacgatcatcgtagcaaggtcttacagtcgagattatcgtagacggcacagccacagccattgctcccatgtctactcgtcaggcgtcactgtgggaagtctgggcaaatcctgatcctaactgttgtcttggagtactttgggctgatgcttgtacgaccacagaaccagagatctaacgcagaatgtgttctctaatatatggtcccagttgccgactgtgtctacttgtactatgaccagcagtctaggcgttcaagtaggatttgcctttgtatactttcgaaactgtagatgatgccaaggaagctaaagaacgtgccaatggaatggcagcttgcatgggcgtaggatccagagtccgagctctctataacgacaaagaccacatacgccaacaccaggaatttacatggggagacctacctatggcagctctcgccgtcgggattactatgacctgaggatatgatcggggctatgatgatccgggactactatagcagatcgtacccaggaggaggtggacgaggaggaaagctggaaagctggccaagaacagggatcggactgatagaaggccgtcaccttctccttactattcgtcccgggacggatacagatcacgttcccagcatctccgatcatagtcaacg

SEQ ID NO: 517184 - DNA, 87 bp, Homo sapiens
gaagatcgccattactatggttcggggagttttgggccgtacttctttgactactggggccagggaaccctggtcaccgtctcctca

SEQ ID NO: 517185 - DNA, 623 bp, Homo sapiens
ggaatcaccagttcagtatgctgcgtatgtcaacctctgggaggcatcacctctgtttattaagctgatgttatgcaggacttgttctttttcgttctcttgtgaggtttggaattggaacggcaacttcgtcataataattcccattggttcttctccatttggctatttgttcaaaatcaaggcccaactactttatacagattgatgctgcctcatttcatcgctgacattctgttggtcaatggatacagccataggcactgggtacaggatatagaacaataccacaatatcaaaagtttgtactcagagtgaaacggaccagatggctggtctattgtggcttaccctccatagctatggttcaggcaagccatgactcgttctaagctgatgcttctcatctgcctaatggcgggcggggtcttcacacctggagcagcttgttgccaaaacaaaggtagattgacagactcaacaaacatcggtattgagtttagtgttattagcagctctgaagtctaaacactggaagaattaactgaagtcataacggtgcgctgaattaacagcttctctatttgatagctggcaattcttctgtaagcctgtccgtagtt

SEQ ID NO: 517186 - DNA, 432 bp, Homo sapiens
  misc_feature (1)..(1): n is a, c, g, or t
  misc_feature (29)..(29): n is a, c, g, or t
  misc_feature (63)..(63): n is a, c, g, or t
  misc_feature (88)..(88): n is a, c, g, or t
  misc_feature (109)..(109): n is a, c, g, or t
  misc_feature (146)..(146): n is a, c, g, or t
  misc_feature (197)..(197): n is a, c, g, or t
  misc_feature (201)..(201): n is a, c, g, or t
  misc_feature (213)..(213): n is a, c, g, or t
  misc_feature (353)..(353): n is a, c, g, or t
nttctattcaccatggcttcttctgatanccaggtgaaagaactggagaagcgtgccatcagncaaggcttttgagcatgattctcancctcggtcaaaagaatctgtncagaattcccctttccctccaaagaagaaggatcttncctggaggaaattcagaagaaattagaagcctgcagaagaaagacacaagnccantgaagctgaggncttgaagcagctggctgagaaactgagagcaccgagaaagaagtgctttcagaaggcaatagaagagaacaacaacttcagtaaaatggcagaagagaaacttgacccacaaaatggaagctaataaagagacctgagangcacaaatggctgccaaactggaaccgtttgcgagagaaggataagcacattgaagaagtgcggaagaccaaagaatcc

SEQ ID NO: 517187 - DNA, 1107 bp, Homo sapiens
  misc_feature (1)..(1): n is a, c, g, or t
nggtctaataataaaccaacaccgccccgcctcctttctatatgacaccccgctacacgacgcccccctagcggcagactccctccccccacacccccctgcttttgttgacccccccccacaagaaagatcaacctccatcgcgggcgggccgcactttaccgccctcccccccggcacattcttctacccaccacatacacccccccgcgcggcccgacgacaatacaaacaccactcatactccaacccacgggtcacacccctgtccgctcgcccactcacggccccccacctgtcttgatggtcgaccaacacacttccacagaaacacacacactcttggctcacacacatacaagacaccgctctgtgatctcaccaccgcctcccgcaatttctccccggcacatatccacagcatctgcgagagggggcgccacactctctggagtagggcgacacaacaccgtctctcaacataaaatctccccccccctctctccctagagtgagatactccaccccatagtcacccccccccactcattggctccgccacctctctaatgagtgaacacacacaagcacacacacactctcctctctcttcctggtgaacaccccggctccaaccacgacgagaggcacactacaatcccttgtggttccgccaccacaccacatccgcccccccccccaagaccgacctcaactctctcttgggggacgtcccccaccacaacaaaagttgtttgctccccacgcgctgcgacccacattcatttttttcccccaccccacccgcggggcgtcacacacactccacccccagcatgtgtcccacacctcgcggggcggttgtggccacacacaccttcttttctagaggtgtagtatccttacatagcgacctcctgcccacctctgtaacatcacttctctcctccacgagtgttgcccacctaacgcgggcgccaccccgtcgatattagagttcctccataataaaagattggtccggcgttgttttcccctttttttccacggggttttttttaaaaaagagttttttttttccaaaaaaaaaaaaagttttttttggga

SEQ ID NO: 517188 - DNA, 115 bp, Homo sapiens
atgctgtgatcattgatcaggaactgtccaggtttattgctgccggagactacactgcaaaatagataagtgaatgaaatagtagaaaccaacccgggttctgtcatgaacaaac

SEQ ID NO: 517189 - DNA, 1218 bp, Homo sapiens
gacgcggctcattctacactcagcggcggatacactgtgtccgccagaaagacgtccagactgcgagaggtagcctgagggagcagaaggactaaggaggctcttagagaagagtacccagtgctcctgatcggagacgggtgtatgagcctgggctcggcatatcgaggagccagcaagcaggcgcagccgcagaggcagaccagcaggcggcatgcatgttggagctgcagtgcgtgtgagctagcgagcgctcgaggagcagggtacaccggtgcaggtcgaacgggacgagatggaacagacagctgtgcagcccgggcagaaacccggtgatggccgccagctgggtaaagtcgagggagtcacagcgtgtactgggagcagtgacaccggttcgtggcccgtaaaaagttgaagcgcaagggaaggccgaccctgtcggggaagccaccaggaagtaaggggagaacacacgcgaaagtagtgccggccagggggagcacgtcccatccgggccaggggaaatgctaacccgtaacagtagggcttgccccagtcgtccggtcacctgccaagcagaaccctgagcaagagcccaacgctggcctgtaaggcgcagtgttcaccgaagccattagcaccttggacccccattgtggcagacgccagtcgctgtgggccaggagtcaccctcgcgttgagtacccacctcagttcgcactctgagttatgaccttagggagaggaagtcgatagccggcgcgaaaaggcaaggcgcatcaagagggggactttcgcccaagaggataacggaacgggcactttgaatactgcctaagagcgagaaagaggggcgtgaccatttagactcttgggaaacggcaccgataagccctttgagtgagtacaacgaacaagggggcacatatagttatcgccgcaccgcaaatgaaacccgttgggagtaccccgtaaattcagagacgggacacgggtcgcgccgttcgtacaggattcccacattctccataggaaacgccttctcggaaagaaatactgcgagttactcaggcagcgtggtccaacacaacatggtgcaacataccactccggttttccccgttaacagttttatcgcccaacagattacccgaactacgacccaacgtcatatggtatgacctatttccctgtgagccccacattctccctagg

SEQ ID NO: 517190 - DNA, 228 bp, Homo sapiens
agatgtgcattgcactccagcgtatggcacaaagtaaaacgccgtctcataataaaaaaattccaccttcagatttgacctgtggtaattctgtccagactgccgtaacagaagaccataaatggggtggcttcacatttttacacaacacatttttttctctcatagtatctggaggcgggaaagtccattatccggttacgggccaacgtgttaccgctagctgtg

SEQ ID NO: 517191 - DNA, 219 bp, Homo sapiens
ggctcaacagctggaggtttagtccacttaattatagcactggaaggactcatcgtcgcattgattgagaagacacgtgcggaggagggcttctgtcaccgagcagatatctgagttggcacgaggacgcgacgatcttcaaagtaacccttcttctgatggccaacagtccgtggaatgcgtatgctggcgctgcgatatggtacaccagcagaaagt

SEQ ID NO: 517192 - DNA, 666 bp, Homo sapiens
  misc_feature (666)..(666): n is a, c, g, or t
gaggagaagatggcgaccgtgtgggatgaggccgagcaagatggaatggggaggaggtgctcaagatgtccacggaggagatcatccagcgcacacggctgctggacagctgaagatcaagatcatgaaagagtggagtgttgagagtcacccatgagctccaagccatgaaggacaacgatacaacagagaacagtgagacaaatcaaagtgaaacaagaacctgccgtaccttgtctccaaacgtcatcgagctcctggatgttgatcctaatgaccaagaggaggatggtgccaatattggactggatcccagaggaagggcaaggtgtgctgtgatcaaaactctaaggacagaggtacttccttcctgtgatgggttggtggatgctgaaaaagctaaagccaggagacctggtgggtgtgaaccaaagaattcctatctgatcctggagactgctgccacagagtatgactcgcggggtgaaggccattggaggtagacgaagagggcccacggaggacaatacagtgacatttggcgggttggcacaaggcagcatccagggagctgttggaaggccattgtcttgccaatgaacacaaggagaagtttgagaacttgggatcaaacctcaaaaggggtgctgtggaatgggccccagn

SEQ ID NO: 517193 - DNA, 2053 bp, Homo sapiens
gcaaacccagctccaccttactaccagaacaagcttagccaaaccatttacccaaataaagtgataggcgatagaaattgagagatcctggcgcaatagatatagtaccgcgaagggaaagatgaaacagattatagccaatgcataattatatgcaaggactaagccccttttacccttcgtgcagtaatgaagttgaacatagaaataacgtttgcaacggagagccaaagctaagacccccgaaaccagacgagcgtacctaagaacagctaaaagagcacacccgtctatgtagcaaacatagatgggaagatttataggtagaggcgacttaaactaccgagcctggtgatagctggtatgtccaagatagactctctagtacaactttaaatgtgcccacagaaccctctaaatccccttctcaattgcactgttagtccaaacaggaacagctcttgggacactaggaaaaaaccttgtagagagagtcaacaaaattaacaccatagtaggactaaaagcagacaccacattaagaaagcgtcaagctcaacaccactactaaaaatcccacacatcctaactgaactctcaccacccaatggaccaatctgtcaacctatagaagactaatgtcagatacgtaacatgaaacatctcctccgcataagcctgcggcgatcaacactgcactgccataaacggccattctcacgaacacaacagtattattagctacggtccccacttgtgctcttggttgtcccacgaacgctcggaactccgggtgcacgatagttcccctaggcggcgacttgagcaaggaagagaacactaaggcagagggctattaagtgggcgaactacacatcgtacacagaaaagtaacagaagcaccagacgagcgcagatcgagaggacagtactgctagcacaccgcgcagcgcaccaacaacagtagcaacaactcacacgcaacgagacgactcaacaatcagcaacaagcacgctacccagaacgctaggacacacagcacctaaacctacaacggtacagcacgcagcaaaacaacactaaggatagacaaacacctgcaagcacaacgaggcaagcagcagacaagcaacgaccgcgacgaaagcgcgcagacggacacgcgcacagagagcacgaaacgagaacggaaccagagacgaggaaagaggaagagggagaagccgacagggaacagaaggagagcacagagacgcaagcgccgcaggacggagaagagcgggaaaggaaacgcagagacacaaggcagagagcgagtagaagaacaagagaaagcacgacgccacgagaggcagaaaagacgagagaggcaggacggagcgaggcaacagacgacgagatcggaaacaggaagaggaagcagacacgaacgcagctgaccacacgcgccacagagcgacccgcaggaagggcaaggagcgcgcagcaaagaggacggcaaccgcggagcaagcacagcgaagcagcagcgacagaacaggcgagtagccacagaagagacaggaggcgagactgtaccagacagaactacagagcgacgcgacgcgagcagagaagagtccagcaccaagagagagaagccagcagcgagaagagcgtagcgagataagcgacacgcgagacgagcagaacgaaggcgagccacgcacaagaacggcgatagagacacaacacagaaagcagaggggagagacgaacgaagagcaagagagcgagcgcacagacgacgacgcaagagagcgagagaaggatcgacgaggatcgaggagacgcggaggaagaaacgaagggcgcgcgcagcacgagcagagactgaggccagaacggaccaacacggacagagacggacgaaagaagcagtgcagcgacgagacgatgcagccagacgcgccgagtgagatgagagagcggcggagaggacgcgagcgagggatagacactcgccgagagaacgagagcgacgcgcagaggcgaagcgagcggatagcggag

SEQ ID NO: 517194 - DNA, 1666 bp, Homo sapiens
  misc_feature (39)..(39): n is a, c, g, or t
  misc_feature (92)..(92): n is a, c, g, or t
  misc_feature (124)..(124): n is a, c, g, or t
  misc_feature (144)..(144): n is a, c, g, or t
gttgggcttgagctgtatcagtctgtcctttctatctgnttcagctcgagctgcgttgttgatctgatgtctccgctgctgtggcgcgcggngtgcgtgtcgcgtactcgagggttgtgtgtgntctttcgactcgtgctgagntagtctcgctgtcggtgcttgtcatctgcatgtcgttggcggcgatcagtgctggtgattggctggagcgagctgcactcgatcagaccgagttcggtggtcgtcagctcgtttggtcatgaattgaatagtgtgttcgctgcgtcgctgcctatggtctgttttgactgtgtcctgcggagtttctgttttgtggtatctcacgtccggtgtgtgtgggagccctgcagtttgtgcttcgggtgcgtactgtctcttgcgtggccgtggcggttcgacctttctctgttccgctcctgctcgtcttgactacacttgcttacgcggcgtgatcactgatggggactgccacccacgttgtttattttttcttccctctgtcataagtagagtgggttggtctccctccgacttgttttgtgttagtatcgtgtgttggtcgccgcgtgtgggggacctcgtcttctgcgtttttgttccgcgtcatgtcctttgtatgtttccttctttgggagttgttttttcgcgttcggcgctttgtgtgtgattcctcgtccatggggggcttgttgggggggcgccaaataggcgtgtttggtggggggttcctttcctcctcgccgctgtgggggccacatgtccacgggggttccttttttgggaggcgtcccgccccctttgtgccgagacacagctgttcccgccccggccttttatgttgcttgtgtgtaggggggctccccggggctcccttctacgcgcttcttgttgtgtagccacagggtctgtatgggtgtgtcttggggggagcagtgcgtctgccccctcgggatatataccgtttttgtgccccctcttcgggtggtgtccccacttgtccccccgcgcgttgtgtagatatggtggacagtgtttagcccccgcgtctaattccgcgggcgtccccacccaccctctttcgcccctcgcgggggttttttctcgcggagggaaaccctctttttccccgggcacacctccttgtgccctcacctgtttgcctctgtctttggatagttccctcggggtgtgaccccgtggagaggacctttccgcctctctcgcagtttgtctggagcttggattgtttccacagtttgggccacacgccccttctttccgaccccctgccaccctttgccccttcctaactcctgtccaccgcctctgaaagggtccaacgcacttttggggtgaagcttctgggtttataggggccccccccactccctcacggctataccccggagtttttgcccaccctctcttcctcacgaggccccccctgagaggggccgctatgccctcattttatgggctgtggaaaggagagcacgaactggtgttttaaactttttccctccctcctgcccaccaccaccactccaaaggattttccctaccaccccttttttgcccttatttttttgaatttggggccaccttggaactaggggtttttgggatataaggagaactggga

SEQ ID NO: 517195 - DNA, 268 bp, Homo sapiens
tctctgcctccagattcaagttattgtcctgcctcagcctccccagtaagctggggttacaagcatgtgctaccatgccttgctgatttttagtaggcttagtagagatggggtttcaccatgttggtcaggcttgtcttgaactcctgagctcaggtgatccacctgcctcagcctcctgaagtgctaggattacaggcgtgagccactacacttgggctccttgattcttcatgatccttttggtcttggtggtgggtgcctgtgc

SEQ ID NO: 517196 - DNA, 877 bp, Homo sapiens
gacttccggcggcgcgggaggcgccaggcgagccagagtggtggctgtcccggcgaaaaattctgagctgtacacctctagggacaagtgaaacactaagttcagaagaaggcctgtgtacaacctcttcttacaaaatacaatggtggttattccacccaagtgaggggtcacagccaaaagccccttaaaaaggcgggggacattatccttccggaagccttcaaaggcccaagggtggaaacgggccttatttgaagcaaagcatagggcggcagaataagcatggggccctggtgacaaggcgggcgcaacacaaagatgtgtgtgggggcaattggaacaataattatgccggaattgttggggacgcttacgaaagggctttgccaaggggtaaaaggaacgtctccaagggaaacaggaagcagcgcttgttgggaatttgagaccagaaatcgcccctataaattgacacggtgtggttcacccgtggacacagtggggttggacacaagaaggaaaggctttatcaccaaggttacgaacgaaggtttctcccaacagcggtttctatttatgttgttaaccgaaagggagatggcagcaaggaaaagagggaaatttccgccaaagttaacgcgtgtggtgaaacaagcaggggaagagaatatttcccccgacatattcacgacagtttggggtttggcccattgagacagtttagtgggatcgagggagcgaaagaagaagaacgggtatctcagctcgtttattaaccacaaagaaaggatttcgaataaagagttgcttaccagattttgaccacggacaatattgacgcgagacggtggggaattatcccacaagtgttagg

SEQ ID NO: 517197 - DNA, 238 bp, Homo sapiens
agagaccggttcgcaatgttagtagtcaagcatctccgtttagcaattatgaatggatgctatggacctttgccttgaaggaaaggaacacagttcattctcaacaatcaggaaaatacgggaggaaggttaagtcacaaaataaagttatacgatattatttttttttggaaatgagttctggcccatttgcccagctgggattacagagccttgatcttgtctcatggcagccgtc

SEQ ID NO: 517198 - DNA, 110 bp, Homo sapiens
gtttctatacatacatcctgtcagctacatacagtgacagttttgcctcttctcttcccatttgcatacattttatttcttttgtttgtctgattgccatgtgcttcatg

SEQ ID NO: 517199 - DNA, 433 bp, Homo sapiens
gatgctttcacctatactggctgtggagggaatgccaataactttgttagcagggaggattgccaacgtgcatgggccaaagctttgaaaaagaaaaagaagatgcccaagcttcgctttgccagtagaatccggaaaattcggaagaagccattttaaaccttcttaatatggcctcctgtttggcttaaagcgttatttgcccttaagggtggatctgaagaataatatggcagcctggggaaaccaatccttgggggtttattcccccggttttattaaaaccaggccctttttaaaaaatttgggtttttttatatataactagctgctattcaaatgggggtttcccctttttaatttatgggtcccctggttggggggctggattcttgcaatggataagatataaaagccaatatggctcccccca

SEQ ID NO: 517200 - DNA, 226 bp, Homo sapiens
tttattttttggctttatttctttttttttccgagacgaagtctcactttgtcccccaggctggaatgcagtggcgtgatgtcgactcactgcaacgattcaggtttttgacctgatgctgggtgctggccttgaaagccacgggtggcaactcattccgaaggtaatccagccttttttccacaacctccttggggaccaggtcaatcttgttcaagaccaggac

SEQ ID NO: 517201 - DNA, 365 bp, Homo sapiens
ttgacacttcagcctgggcgacagagtgagactccatctcaaaataaataaataaataaaaaattttattttacctttacttattcattctataatgctcttccttttttaaaaatgtagacccaagtctgacagatgttaatttctttatctctgaaaaatttattttaaaatttctttcaaagtaggtctgctggcaacaaattttcaatttttatgggtctttatttcacttttgaaagataatttcacaggatatagaattctaggtttggcgttcttttattttttttcctctcgactctactttattcctgcgtacatagtttccgaggataagtcagatataattcttatcttagctt

SEQ ID NO: 517202 - DNA, 149 bp, Homo sapiens
ttactccaggatgcgctccttgctcatgacgtgatcgattgtaggtcagcaccagttcctggcccttgcgcaggtagctgcgggaactggacaggaacaggttcttggccaattgttgcgtgatggtcgagccgccccgcatcttgctg

SEQ ID NO: 517203 - DNA, 147 bp, Homo sapiens
gcagattctatcgcgggttggcggctggctctgcgcgccctcgatgtgttgctgggtgtttacccgtctctggctattgtgggcgccaccgatgacatttatatttgcttccccagcaactgagctgctgtcagcacaaagtcttct

SEQ ID NO: 517204 - DNA, 290 bp, Homo sapiens
  misc_feature (156)..(157): n is a, c, g, or t
  misc_feature (186)..(187): n is a, c, g, or t
cggggcccaaaaaaaaaaaaattatttccagggggggggccccctttttaggggggggttttccccccttgtggggggggggggaggggggggggccccgggcccccccccccccttcttccttttgggggggggggtttttttggcccccgggcnngaaaaaggggggggggggtttttttttannacccccccccccccccccccccccccccttttgggggtttttttttttttttttgggccggggttttggttggggggttttaaagggtttttttgggggggga

SEQ ID NO: 517205 - DNA, 301 bp, Homo sapiens
aaggctgaggccgctaagaaatgattcttcgtcagcctccgtcttccccatgaagcatctgacgggcggcgcggcaacatctccttggtctgcccctggattcttacctgtaaccagagtaggggtaggaaacggtgtggtgggggtctcatgaagtcagagaaaaagctagagagagaagggagagccctcttatgaaatgcttcttccatttcagggatcgaaaggaggaggacgcaagtgccttggggtgcctggacaagatcagactagcatacgaacttctctgctggcaacggtt

SEQ ID NO: 517206 - DNA, 833 bp, Homo sapiens
ctttaaccttttggggtcagatgcacaccttcctcctcccccaatcctctcctcaggcagccctccccagacccaggcaaccgcatcacagacctccctgcctgggaccacctagtggcagcctcagcagtgtgccaggtgcccctcccccacagctgcctccaaagccgccagtagtccccagccctgtgcttcaaagcaccatcacgaagtgactggggactggcgggcaaggccactggctctgacactctgcacgtcccctggactggtggacgaggcttaacctttaccccagccctgaagcagggcctgagcactgacagtagcaaggctaggcattccacatgggacttgctatgcagggccattgcacaacacatccccactcatcgacgacacttggagagcaagccctcgcccacatctcataccaaattgacctcaaaccacacacagatacaacttacagaacaagtagcattagaacatgggtgagcgacgcagacgagaccaaaccgcatcacacacacacgaaaaccacccacagcaaacagaaacaccgcaaaacaagagcaacgagaacacacatgcgaaccaccaccaataactaaatacctcactcaagacacacagtaaccaaacaaataccgtgccacattaacacacaaaccatgaaacagaacactaacccacatcagaaaaataccctacaataataaaccaacacatccaaaccataaaaaaacacaaccatacaaactataaaacaaaactaccacaaaaacaaaacccaacacacattataaccacaaccaaaataccataaacac

SEQ ID NO: 517207 - DNA, 774 bp, Homo sapiens
agcggctgtgaaaccgtcatgtttctggggagtcacctcagctggcagttaccaccgtgttagaaagcagcctcaggaccggccacctccatcactgtgcgtcaccatgggggctgtgctgggtgtcttctccctcgccagctgggttccatgcctctgcagcggtgcctcatgtgtgctgtgtatgttgctgtcctaacagtaaagaaatttcccacgggtggactcgcgctcatttatgctttcattctcctcctgagcactgtgcgtatcctatatcatgcacgagaaaagagatggaaacttacttgaagaagattcctggattttgtgaacgggggatttaaaatccatgaggcgtgagtatataatgcgcgatataagattgtgatagtgcgtgggttgggtgtataaagctcgtgtatcgcgatcacgctttgcgcatggggcactctttttcttttgtgccttttctcctgctcactgttcacaagtataaaacacagtataaagatctcccgagcggccagtacacacatggggtgtttgggctcttccccaaatttgcgttgacccttatttggagatcaactggttggcatcctttcttacattccctgggggggcgtatattccagcatcagatcttggtttgttgtttggcactgaatagggggcccgcctccttcatccctcattcagctggtgctgctggtagaattttgctcattcttggaatgaatcatgggtaaatcgaatggagaaacgaaaccc

SEQ ID NO: 517208 - DNA, 1190 bp, Homo sapiens
  misc_feature (670)..(670): n is a, c, g, or t
gggcgtgatgtctcacagaacagttctccgactcccatgacatgtggtccctcgtgcttcctgacctcgtgaagctgcagcacgcatgtgcatctgtggtgacagtgtgaacgacgccttccactacaggcatgaccccactccaatgcctgtgatccaaccatcaccactgccctatccttggtgactaccacacggccttgggcatgaacatcaccactctgctgccgtggacatgctcgaccactgtgcctgcgggactaccaaactggattgacaccacaagcaacagtgcagcgttgggctcgggcatgtgcatagcttgcacgctcatattgcttcagccaagtcaaccaacccacgcccaaatagtgctagcggtttggttagtgcgcccactctctggtagcggtggcctaaacatggcttagagaacaaaatcccacacccacttcctggaactggagacaccataccccggagacacacgacaatttatcacaacatgggaaacccaattgccttccatacatcatagggcacattacggactcgcactagacacaacgtttcaacgaggtctccggaactataggcaacaccacactttcgccccagtacacccggtggaacaagcagaggagcccacgggacattcatgacacctccnattaaaagcttttcacagacgcctgccacacaacgtttggtcggagctggaccagcaatattaacagagatcacgtatgtcccgttcaacgcaccgcggccacacaccgaggcaaaaccacgctggatggccacccccatctacatacttcacaaccaccccgaaatcaaccttgggcgctatcccacccgctcttagtggtgcccaacgaccaggcgaccaacacacgacacgcgtatggggccgagtgccccaccacactggcgcggaaaacacacactggacagaccacgcgcacgcgcacgacctattgcgaggtgccaccagtacaacaccgcgcgaccaacaacggtgcccgcacaagctgacgcccccacttgcggcgcagcatccggcgcaatacactcggtccagagcaaacgccatgtaacatgcgacaccaactacccgcacacaagacgacacgacaacatcgcacaccacagcacaggtacacccacacgtgcccatatcacacacg

SEQ ID NO: 517209 - DNA, 110 bp, Homo sapiens
  misc_feature (4)..(4): n is a, c, g, or t
atcnactgagccaagagtgcgcctttgcactccagcctgcgcgtgggtccccgcccatagagctagcctactggaggttctagggaaatagggccgcagatcgcatgaag

SEQ ID NO: 517210 - DNA, 931 bp, Homo sapiens
gcgagtgatcttaatgatgccggaagggtctgggttgaaaggttctccgaaccctgtgtggccaaccggctttggctacgccggtttgcggcggccctctggggtgttgcccgtggggggcctcgcacagtctctctgcgcacgctcggttggtctccacagtgtatcgggtgcaccggggaaaacaattgtttaaagcccgctcccagcgtttggttcaatgccgtccccccagaggttcgcactgcgtaactagggaccctgggattgttgagacgccagttggtgggacttctgggaacctgtgggtctcacgacaaatacagcgcccctggcaggtccatataccgcagcgcgccgagggccctcacatggcgggaacctcctcctgaccccaacgagcgcgagaaacgcccaacctcggtcgtgccccgcaattccccaggggatttaccgcaaatctcaggggagggcccccccgtaagcataaaatagggtcacccacccagccgatgggtcggggaaccccgtcgtaccacctgctccagaggacaatgtgaggacaatctgcaacgcaccatggcgggaccccaggcacttcaccaccccgctgagggagctgccaggcgccagcccgggccgcacataatgaggaatggctcgctaaaaggcgaaggagctgtgggcacttacacatggtaatcggtacccaataaaccaaaaaaatattgctcggcgcccctacgataaaaagtaagaactgtgatactcgatacctgatacaatctatgttgggcagatagatgctgtttcttgggtgtctagggttcgacgacaaaaaagcgagttgtcacgcgggtgtggtgttgcacggtgatgccctcccctggacaagcttaaaactttgcttttttggacccaaccacaaaac

SEQ ID NO: 517211 - DNA, 492 bp, Homo sapiens
tcttacaaagtagacccaaataaataaataaagcattaacattaggataaaaccgtgctgtgaaacaaatgacatcccaaagcaaatactcaaagtacgcacacacggaatgatccagacattaccatagtgtccttattatcacattcagcttataaaaataatgccaagtgcagagaaaagattacaggatgtaccatccactgggatgatgtagaatgggagagtttctaccagataccggatcatgtgacaaatatgtgagcaactttcctactgacatggagtccacgttggagctttttccagaaaaaaggataaacccagggaaggtctccacttcctagaagcagcaatcacacttcagagacatggaagagtctagcattacctatctcagatacatgcaactttcccagcagctccaaaaagtggtcctccaatcttctagcttgtgcaagtctctctccccagagtctccaaaggcatccc

SEQ ID NO: 517212 - DNA, 130 bp, Homo sapiens
gcttagaagtagtggtcatcggagctgtggtcgctactgtgatagtagtaggaggaagagctcaggtggaaaaggagggagctactctacaggctgcgtagcagcgacagtgcccagggctctgatgtgt

SEQ ID NO: 517213 - DNA, 108 bp, Homo sapiens
agttacacttagtctatttcatagcgcatgaagataaaccaacaaggtactataacagtgaactgaaacatgcaaaccaataagacactcagttaagagattcctatt

SEQ ID NO: 517214 - DNA, 464 bp, Homo sapiens
  misc_feature (251)..(252): n is a, c, g, or t
  misc_feature (296)..(297): n is a, c, g, or t
  misc_feature (310)..(311): n is a, c, g, or t
  misc_feature (316)..(316): n is a, c, g, or t
  misc_feature (322)..(322): n is a, c, g, or t
  misc_feature (377)..(377): n is a, c, g, or t
  misc_feature (415)..(415): n is a, c, g, or t
ctggttttttagggagatggtatcccctggagtagagggcaagaggagagagcgcctccagtctagaaggcataagccaataggataatatattcagggtgcagggtgggtaggttgctctggggatgggtttatttaagggagattgcaaggaagctatttaacatggtgctgagctagccaggactgatggagcccctgggggtgtgggatggaggagggtctgcagccagttcattcccagggccccnnatcttgatgggccaagggctaaacactagcatgtgtcagtggcnntttggagcaggtnntaggnctgggngctcatcgagggttctcaggccagagagccactgcggtggtccagtgcccccacntgagagactagaggcagagcagctgggggcacttgtgnttccatggagcgctggatttaaaccagtgtctttggaggctttctgtga

SEQ ID NO: 517215 - DNA, 258 bp, Homo sapiens
  misc_feature (4)..(4): n is a, c, g, or t
gtanctgagtccacatcatcagctgaactcccatgtaaatatccccattagatagacagcgctggcacaaggaaataaacctgcacagacgcaacactggtttaaaagtgtgatcaaacacattgtttcttcaactactctagatatctacagagtaatatgtatagtatacaaggtggcaggcgaggccagaccagacttaagtatcctctgtggccataaagggagtcctcagttctctctctccctctctctctc

SEQ ID NO: 517216 - DNA, 284 bp, Homo sapiens
  misc_feature (12)..(12): n is a, c, g, or t
  misc_feature (81)..(81): n is a, c, g, or t
  misc_feature (90)..(90): n is a, c, g, or t
  misc_feature (102)..(102): n is a, c, g, or t
  misc_feature (113)..(113): n is a, c, g, or t
  misc_feature (120)..(120): n is a, c, g, or t
  misc_feature (123)..(125): n is a, c, g, or t
  misc_feature (129)..(129): n is a, c, g, or t
  misc_feature (136)..(136): n is a, c, g, or t
  misc_feature (139)..(139): n is a, c, g, or t
  misc_feature (141)..(141): n is a, c, g, or t
  misc_feature (149)..(149): n is a, c, g, or t
  misc_feature (160)..(160): n is a, c, g, or t
  misc_feature (209)..(209): n is a, c, g, or t
  misc_feature (251)..(251): n is a, c, g, or t
  misc_feature (266)..(267): n is a, c, g, or t
  misc_feature (284)..(284): n is a, c, g, or t
aaagcctaacanacctctaaggcacagactggtagcaggagaaaactatgtcctgtactccagatgctgggtaaggagcanctggatgtnctcagatggggntcatctgaganggtggangtnnnatanatggcanaananagtaagcnacttccaaacntccctccaaaaaatctgaaaggagttactatgctaatgcgctgggcatnaatccaattcagaaccaatctggtgggcccctcatggctcanaaatactctgggtanngctggctgttacttcan

SEQ ID NO: 517217 - DNA, 314 bp, Homo sapiens
tcccaaggtccaaatcatcaaatatttcgtgatcacaaggggtggacaccagcaatttccacgtgtaactacatgtatccatacttgtgacaagcaatttcgataagagagtccaggcacaggtggctcacgcttggaatccctagcacttatgggaggtcgaggtgggtgaactgcccgagctcaggagttcgagagcaggctcggtaacacggtgaacacccaactctactaaaatacaaaaaattagctgggcatggtggtgcgtgactgtagtcccagctacctgggaggagcgatcctctagagacgag

SEQ ID NO: 517218 - DNA, 525 bp, Homo sapiens
tacatccaagcactgggggattctggtgggctccaaattagctttactgattgaacatccacagagatggaggcatttaatacaaaaccaggaactccgaatccattgctctttcctcctttgctttcacttcttaagtatatgtgttctgaagttgagatgggagagatttgaatatagaatttttattctcaaactgtttagtcatctaaggcttcattgtacttcggggagagctataagtaactcacctttaaaacaacaggctctgatttgctgaagaggtttggtattttttaaggtatgtctccctgtttgcactcagggttaaagtgtcagactaaatttttagaagaaaacagaaattcaggtgtgtgttcattataggttattcagcaaagtggaccctgacagtttctcggtttccccagtgctgaagacagcattgccatccaaagaaactcacattttctttaaagctatcacactttgtcttcttatcccctgcttcctgttccttcagcc

SEQ ID NO: 517219 - DNA, 551 bp, Homo sapiens
tgtggagacggggtcagctaatacctcccattatggcatcctgtgccgcagggtatgaacagcactggttgaggagccagcactacgtgtacctgtgtggagaccatgcctgggctgggcagggtgctcaggaggtccttgtacgaggaggagcttgagcccaagtggcctacaccggaaaaggtaacggtcagggtagggtgagggggctgaagtcccctaccaagtcgaaacatcttaagcttcatcgtggtccatgtctgccagctctggaatcgggacatgtggatgcggatgccgtgaacaatgccggggccgagagtgcatcatccctgaggtatcccgatcctaccacttgggcatcgtcggcctcaacatgaatggctactttcacgtgagtgggaggcagggagcagggcacagtgtggcctgacagtcacgaagaagaacagggactctgaagcaatcttaggtctgctagtggctagccatgtaagcttggggcaagagctatcctattttgtgctcagtgactttatctgaaagctgag

SEQ ID NO: 517220 - DNA, 1722 bp, Homo sapiens
ccagaacacaggatgtcgatgaacaactacccctaaaagccaaaatgggaaaggaaaagactcactatcaacactctgctcgctcattggacacgtagcattcgcggcaagtccaccacatactggcacatcatgatctataaactgcggctggcactcgacaacaagaaccatctgcaaacaacttctgagcaaggaggctgctgagcatgggaacagggcctcccttcaagctactgcctggcgctcattggcactaacacatgaacagcctgagcgctgaacgctggatactcacccactctgactactctcctctgcatgagaacactctcgacgaccagccaaagatactaatgtgactactcacttgaatgccaccaggcacaccagacacaccatttactcaaaaaaacactgaaatctaccaggggcaacactcatcacggacatgcaccatagatgcaatgcatccctgaaaattggattagcactagcactgcgcctgatctgcgctggaaaatctatgaaacgccctgagctcattcgttcccaaagaacactgggggcaaagcacactcaagcagcgaggccagttgcccaccatcattcatgcggccttataaccaccaacatggaagatgcttgcacaaaacaaccatcaaaatttgatccggcttgcttatacaccaaaccacagtgggacattacacaccattgaagcaccaaacccacttaaccagggcaccacgcaaagagaagcactacctagcagcgcaaaaacttcggatctcacagcgacacgcatccaaggccacccatctcaccacatgacaaacgacaccacactcttgcgccctaaccaacagcgacccggaacagaagccagccaaggacaaataactggatgacacaacacaatctaccatcggggctgcgagcacatcatgcagatgaaacacaaacagcattgcccatagcgcacgagcccaaaacgctggcattacacaaagtggaacatatagcaactactccaaaagggagaattggcgacaacaggctcaacacccaccggtaacagaggaaatgagacaaaacagaccacagaaggagaacaccacaaaaccggcgatgagagagcactcagtagggaaagtggcaatcatcgtaaccgacacacaacaatcgcgacaccaaacatgcgaagcacgagaccaccttatacagcccagtgacacacacacccacaaggaagtggtcctgatcaacaaaacatgcgaagagacaaatagaagaacaagagacacaccatgcttggcacccaacagtacaacacatagatgaatcacatcacacacaccagggaacatggaggagcacacaccaagtagcacaagaccagacgacgcaaagcgagacaacaaaaaccagaggcacgaaacgacaacagacagacgtaacgaagataccacgcccacgagcagaaacaagaaggcccgacgaccacaaaggatgcaaaacacgcaacacgcaacagaccaccacacacaagcccccacaagaacgacagacccacgcgcaagtgacaataaaacaaagcagcaatagcgagacgaaaggataagagccaagataaagcgaagatagtgccaaagctagactacatgacgcagacatcgaacacaccagacggctaaaaacacacgaccgaagcacgaacca

SEQ ID NO: 517221 - DNA, 812 bp, Homo sapiens
gatttatttttgaaggaaaaattgcttataactaagtccagagacatgctaggtgagcccttttgtcaggctgctaatcatgacatgccgatggttgttaatatgtgtaggtgtgcatctttttcttcttagcaattccttgtatgatcaccattcccttcttgttcactccctcccgctctctcaaaaggaacttgggaaatcttgtgaaatccaggaaaacctttagtcttatacctcaactgacctttcagtccgtgtctggtgttctgaaagtaacgtgaagtagaagaacttgatgtattatgtcctgacataagaatatatttatcaatacacgttttaatgcagtaagctctccttaccataaatgtttcttgggtgacaacatctaagacaatattagtgggatgaagaaagaaaagcaggggtgcttttggaagcagagttagtgttacctcaaaatgtcggaacaattgcctgttgatatattaataagacattaaagtccaaattttaatgttgggctctcaaatgatttggataccagtctgcaaagtatttctaactttaattcccaggttttgaaaagagatataataaatagcatttaagtggggaatatactaggcagtggaaaaagtatttgaaacgtaaattgaccgttagaagattaagattggttttccaagtggatgtccattaaaagtagaaaaagttatttgggaaaagtgaggtgtgtttccttaaaatgggtactaaataaaattactgggatacaggtattcctttgggaggaggccagtaagagg

SEQ ID NO: 517222 - DNA, 268 bp, Homo sapiens
  misc_feature (11)..(11): n is a, c, g, or t
  misc_feature (49)..(49): n is a, c, g, or t
  misc_feature (58)..(58): n is a, c, g, or t
  misc_feature (216)..(216): n is a, c, g, or t
  misc_feature (240)..(240): n is a, c, g, or t
tttcacctggntaatggggttgatttaccgagacggcgtcatgcaagcnatggacganttcgacaagagccagttcctgtttagaaacccccactgtgacctgggcgagaagctgcctggaacacactggcccagcaaccacatctacagcagccaaggcctgatccccttctacatggggttcatccccgccatgcaggacaactacgccctganattcggcaacagaacccggaggcnttactggaaggaattgggcaaagcgaaa

SEQ ID NO: 517223 - DNA, 1057 bp, Homo sapiens
aggaaaaaaaatccacattaatattgaaactgcacctgtagatcccagcactttgggtaggctgaggacagaggattgcttgagcccaggagttcgagagcagcctgggcagcaaagtgagaccccatctctactaaaaatttaaatgtatttatcaaaactgtgctctagaagcttggactgaatcccaaaagtgtccataagttcaaaagcaaaagtatagtaatttcaacaacaaaaaatgtatttctatcatgtaatcttggaaattattaaacagtccttttagcttctagcccatattttgtacaaaagagtttcaaggaatgggtggcttggtcatggttcgcaaataaaaccacactgttatactgacgcaggccgggcgtggatgagctcacccctgacaaatcccagcacatttgggaaggccgaaggccaggcagattccacacaggtccggcaggtcccagatcaggcccggggccacgaatggatggaacccccggcctctcacaaaacacacgaacaaaattgcccacggcgaaggcacgcaaggtgccctgtagatcccagcacaactggggaaggtgaggacggagaactcgctcgactccacggaacgacaacggacggcagcgagcccacacaagccgcgccgacacccccacccgcgccaaccgcgccacacccgacccaacaaccaaccgaacgcaacacgcaaaccccgcaacccgaccaacgacagcccacgcgcaggccacaagaaagaggacacacaggcccaagaccggcacgccagcgacaacacaggccgcagccgacccgagcacgcaaagcagccgcacagacacagaccaagcaccacacacggacaccacaaaagcgcacacagcccgcctgcagacaagcaaacccgcgcagagacgcgacacacacaagcggcgacccgacgagagccagtcacgccaaacaacgaacgcgccaaacacgcacaccaccatgaccgtaattcacacgcccccgcccaacagccgcaccgacgcccacacacaca

SEQ ID NO: 517224 - DNA, 320 bp, Homo sapiens
  misc_feature (159)..(159): n is a, c, g, or t
acaccgatattagtcaatgggtaaggtgtaccttggtgccctccagaaaggcaggacaactagaaggatggggggcatccaggtcatagataagagacaaatggttgcattcttttgagtctttgatcagcttttcacttaatacacaatttacatgtnagacaaagggataggaggatatgtcacttatgcctatggcggcttaattgatcttccgttttaacatacacagatgggacagaggaggcagtcagttcgcgcatttgcctctcaggtgggagagaggggtgactctgagttctgtcctctgtcccatacct

SEQ ID NO: 517225 - DNA, 152 bp, Homo sapiens
ttaggctgactctagagtgatcccattccctgtcggagacaacacgaccttgcatttgtacggaatctcagcggcgatcacaccttccggtcggtatttctgcgtttcgcccacaccctgtcgtaatctttcccatccaggttcgcaggctt

SEQ ID NO: 517226 - DNA, 167 bp, Homo sapiens
  misc_feature (116)..(116): n is a, c, g, or t
  misc_feature (120)..(120): n is a, c, g, or t
atagggacaggctagaactttcactttatggggctgacaaagaaaacaccatttgctgaagaggctgacaaggggaatacatagggtacggggggggtctacaaactcctattttntcanctgcttgggtggattaaaacttcaataaagatcctgtgataaaacag

SEQ ID NO: 517227 - DNA, 1142 bp, Homo sapiens
  misc_feature (1)..(1): n is a, c, g, or t
ngtgttattacacgcggcccgtgctttttttttggtcccccttctcgtcatgttctcccttcgtgtgggtgcgattcgtcctcctccccccgtcggtgtgttgtgtgccgcccccctgcttttgttggacctcgccgcgggggggcgcggttttcgttcgctgttgtgccgggtggtttgtttgtcgctttgttgaccccgccgcggggggcgggggggtgttcgcatcttggttttgccctcccggggggggcgcgcgcttgtgtggcccctcacgtgtggcccccgtcttttttgtgtgcgcccccctcgttttggtcgcccgcagtgtggtgtctccctcttttgtcactcccggtgtgttttcccggcgttccgcgagatattttccccgcgcgtgtgtgtgttgttggtcctcccccctcgctttttgcgcggggtccctcccccgcgcgcgtgtttttttgtagtccgcgctctttctttttggtagagtgagctccccccccctggctctctcttgtttgttttgtgtgtcgcccaccccccgctctctctttgcgcgcgggcgggggtgtcccccctcttgtgggtgtgttgagataagagggcgccaccactaaaatgctgtgggtatacgcactcctcgcgcggcctcacacaaatataagagagagtgttttttataagagagaacacccctcccgcgcccccccgcttgtttctcccctcgtgtgtggtttgtgcgccccatctcctccccccccgcgcgcctgccgcgcgctctgtgagacgcccccgcgcgcccctcctcccgcggcgggcccccccccgcgcgcggtggccctctcccccctctctctctctcttttccccccgcgcgtgtttccccccgcccctctcgcttcttttttttgtcgtgctctctctcccccgcgcggcgggcgcccccccgcgcgcccgcgcgcgcacaagagagagaaaaatccccacaaaaggccccgcggggggggggggggggagagaaaacaccaagagagagagagagagagagagaaagaccccccctcccctcccctgggggtggtggggtgtttttttttttttttcccccaaaaacccggggcccccccttcccccca

SEQ ID NO: 517228 - DNA, 970 bp, Homo sapiens
  misc_feature (181)..(181): n is a, c, g, or t
  misc_feature (478)..(478): n is a, c, g, or t
  misc_feature (511)..(511): n is a, c, g, or t
  misc_feature (545)..(545): n is a, c, g, or t
  misc_feature (567)..(567): n is a, c, g, or t
  misc_feature (610)..(610): n is a, c, g, or t
catgacccctaagcaggggccctctcagaacctcctagatgagctccggcctacccatgtgatttcacttccgactcccataacgctcctgcatactctggcctacttaagcacacacactcaaccattataccaagtgcatggcgccgatgtagacgcgagaacagcagcataccaaggntcaccagcacaacgcagctggtgcaacacaaggtctgtacgtatagcgggcataactccgtactttagttagcctcgagcacagttgtcatctcgtgtcagcacgagactttggtcattgaggctcgttcttcaccctacgtcccacgtcacatagaccactcgtaaaccgccacgaatttgaacggatgcggcgacgttgggtgccatcgagagcagtggcgatacatccgcgcggcgtagacaatcgcctctatagtaacgttcgccaacttcgcttaagacgacgattccagtnagtgtatcttcgacagtgcatgcgatgatactncagagtgcatcgctcgtacggctgcgacgcgatnacgatgcgtcaaattaggcaanagaacgaaccgcgtagaacgtgcccagagtaagtaacagatgnctacatggcgtgtagttaacgaagtacttaatagtggagaatcatcctagtctattagcccgtcccgtatcgaagtcacgtcaagagggatactatcaaggatcgtcccccttcgagcgaatttcgcgtaccagacggtctaacaggcgtcacacattcatagagtcagccaccagtgcttccaacagaacttcgtcgattcttcggcgtcaccatttacttcacctatctcggttcaaccgcccaaggaactattcaacttaacattcccaacatcactttggcttcgaagcagccgcatgatacaggcctttggagaccgtggttgactactgctgatgctccacactgccgggttac

SEQ ID NO: 517229 - DNA, 253 bp, Homo sapiens
tgtcttccttgggtcctctccactgctcagctcagtgattgggtagggcttccagaaagacagaagcttgtcaggagactggggctgggacagtgtgccttctcttctctcagcagccctgagttgtgtactcttcccaggcgctgccacctagcagccctctgtgcccagcactattcacttccatgtcaggccccagggccagtgcggtggtccccatgctgctgcagtagggggaatagggctcagagag

SEQ ID NO: 517230 - DNA, 108 bp, Homo sapiens
gacactaccttcccgaagttgaaggcaagcggtgattgtttggtagacggcgcttggtcatgggacctgtgcggttgggaatattgcttttcctttttgctggccgtg

SEQ ID NO: 517231 - DNA, 563 bp, Homo sapiens
  misc_feature (410)..(410): n is a, c, g, or t
ctcaacgctttatacttcttattggggtcttcaaacttaatttccttactatttcctacctgatcccttctaagtcatgatcttgtttatatcaacaatcacttgttttagttgttacaaattgtctgcagtgtttatcctcatgatggcaacattttgagagaaatgtcttcctgcctttgcttttctcattcgcctttttcctttgtgtggtgcctatgctgtttcttcttcttatcgtcgagtatgctttttcggatccagctatctggaagaacttaatataggtccgggcacagagattttccttgtggtgacgtaagtttgaccgtgagcattctgagccttttcttcttcacggcccagagtcaggcaagtatctcaggcagacatgttctgccatgtggttngtcagggtgtttcctcattcacccccacttcctttgcatatctgaagcagacgaggtcctagaaaacttcagtgccagcctttccttctagagaactctggcttttacactgaggctatgcaaaggaagtataagcgtgaggggatcctctag

SEQ ID NO: 517232 - DNA, 258 bp, Homo sapiens
  misc_feature (97)..(97): n is a, c, g, or t
tgggcaatgtggcctatacagaagcagattattaccatacggaactgtggatggaacaatgccctaatggcaactggatgaatggcgagatttctanccatagataaagtctctgttctagaattattttgagctatgctggtatatcatgcagggatgacctggataatggcactttttgctcacaaatgaagcttcttgaactatgatccttgatatgattatgagatgggtacctgatgctctgagattctgtaa

SEQ ID NO: 517233 - DNA, 80 bp, Homo sapiens
gcggccgcctactactactactgctcgaattcaagcttctaacgatgtacggggacatgtattttattaatttatgttcc

SEQ ID NO: 517234 - DNA, 1248 bp, Homo sapiens
gtgaaatctgtggagcaaaccacagtttcatggcccaatcgtcctagcaattaattcccctaaaaaaaaaaaaaaaaaaaaaaaaaaaaacatatgtgtgtggggcgcgcgttgtgcggccccccgggaaaagctttcaaacaacaattcggtgtgtgggcggcgcggcgggcccacagtgggctatgtcggacacaggtgggaatatcggggtgtccctaagagaacaccccgcgggcgcccaagcaccacaacgggcctggagaatttctccaccccaataacaaaacagcgccgccggcgggaccaaccgagaaggcgctcctgcgaacaaaatttccccacagcggcatcctcctggaaggccccccacacgcgggaacctctaactaccacggtgagagctcccagcgcgcagaccgccctccataaattactacaaaattatacaagcgaccccgcgcacaccggtgggagccccaaccatacccttaccctcgccacccaacatccaccaagctcctaacgtacgcctacatcacacattcaaccacaagccgaaacccaaacaatcaccaatcaaaacacaacaccccaagcaaccacccaaatcaccactcaacgaataccacatcaacatcataccccaaccacacaaaccatcacaacgcttccacacagactccccataacacaataccaagcacccactactaagcctccctactataccagcccaccactccaaattctcccgtcactacacaaacctctcatcaccaacacagctcacccctcccactacgttcacactcaccaccatacctaccactcgacacatctcagcatcctcaaccactctcatcttccgcaccagacacatctaaccgtctcccacacaccttcaacccaaccgaccaccatcatctccacactccatcacgactaacacccgaaacagactcaaaaacgcacatacctacacccacactaccgacacatcactcctcacaaacacaagctactaaaccacagacccaacctcactccaactctaccaaccataccaccaacgcgtccacaaactcaactaaccatacaccccactcctactcactagccacgcccattaacagacacatcgcccaatcacacctacccataactctactacctgctgactcgacccgaactcacttacatcgattcataataacaatataccacctcctccatcatacacaaccc

SEQ ID NO: 517235 - DNA, 424 bp, Homo sapiens
gtcttaacacaggctgggtgaagtagctcacatctgtaattctagcactttgggagactggggcaggagaaatgcttgagcccaggagtttgagaccagctcgggcaacacaacaagactcagtttctatcaaaaaagaagaaaaaattctttaaattagcctggtgtggtggtgcacaactgtagtcctagctacgtgggaggatcacttgagcccagggattcaaggttagaatgaactgtgatcgcgacactgcactccagcctgggtgacagagtgagaccctgtctcaaacaaacaaacaaataaaaggagaaaatgattccttaacttgcatactgtgaagactgtgcttacatagaataagcaaaatacagcacaccaattacaatgcatactaccaggtcaggcctgtgggttaga

SEQ ID NO: 517236 - DNA, 377 bp, Homo sapiens
attaacggtagtacataatggatatccacaacagatagtatatgtagagcaaattatgtactaaatttccacaaaacttctattatgtaagatctgatctactttgccttacttaatgtgtcctccctaagagataaagtaatactcttacatggtcatcagtataggtggtacttacgtagattaacatagctataaatagagttgaacacatttataaactcaagagaataatttttataaaccctgtattccaatctgtcatttacttaaattattttggttgtttttccctttttttccttcttttcccaccccctccccctccatgtgaagatttgggtgcttaacatatcatttttttccctgccggaatt

SEQ ID NO: 517237 - DNA, 634 bp, Homo sapiens
gatcacaccactgcactccagcctgggtgacagactgagactctgtctcaaataataataataatatacatttaatttttttccttggttttctgtcactatgtatgctcatgtatccaggtatataaagcaaatattattggagctgaagagagacattagacccaaatacaataatagctgcagtcttcaacaccccacttttagcattggagagatcataacagaaaataaacagatcagacagaaaataaacaaaaaaacactggagttaatctgcactgcagaccaaatggacctaacagatatttacagaacattcatccaacagctacaaaatacacattcttctccccagcatatggatcattctcaaggatagactatatgttaggccacaaaacaagtcttaaaacattcaaacaaaagtgaaattttatcaagtatcttctctgatcataatggaataaaactagaaatcaatagtaaaaagaattttggaaactatacaaacacatagaaattaaactatgtgtttctgaatgaccagtgagtcaatgaagaggttacaaggaaatagaaagatttcttgaaacaaatgataatggaaacacaaatacaaaactacgtaata

SEQ ID NO: 517238 - DNA, 468 bp, Homo sapiens
tcttaactgccccaaactcactaccccaacaataaaactatttccaccactgggcttactgcagtcacgatttcaacctttactgaactaccatgaaaaatgattttagacagctgaagcagcatacttttaaaaagtatcccttcttatggacgaaggatttggcagtgcggtcattgagatttcctacttcttgttgcaggcacaggggattagctcaaatggtagagcgctcgcttagcatgcgagaggtagcgggatcgatgcccgcatcctccaactatttagtttagttcaatcagcacacattgttgtagctctggattgtatccactcattacaagtaatttccaccactgtgcttcctgcgggcactacttcaacctttactgaatttgtcatgaaagatactttcagacagctggagtaagcatactttcaaagaagtgtcctttctgatggacgagg

SEQ ID NO: 517239 - DNA, 350 bp, Homo sapiens
gggagttaatatgatcatcacgtatcaaatctaattgttaattccattacagcatatattgtgcgaagagtgcatgaccttatgggttaacagatggcatgtgcactctgcggaactgagatttcataccatataaacaaatggaaggatggagccactttatcacaccttcgcatatattaagctgcttaaactatcacgggcacaaagtactaagggcatttgatcataatgactactgatagggcatcagaaaggattttcagggctaccacaagaatgattccagatggttttacaaagtaagacttaggatccaattaagcatgatatacagccaccctgtggtt

SEQ ID NO: 517240 - DNA, 818 bp, Homo sapiens
  misc_feature (20)..(21): n is a, c, g, or t
  misc_feature (29)..(29): n is a, c, g, or t
  misc_feature (55)..(55): n is a, c, g, or t
  misc_feature (63)..(63): n is a, c, g, or t
  misc_feature (65)..(70): n is a, c, g, or t
  misc_feature (84)..(84): n is a, c, g, or t
  misc_feature (87)..(87): n is a, c, g, or t
  misc_feature (89)..(89): n is a, c, g, or t
  misc_feature (93)..(93): n is a, c, g, or t
  misc_feature (97)..(97): n is a, c, g, or t
  misc_feature (105)..(105): n is a, c, g, or t
  misc_feature (111)..(111): n is a, c, g, or t
  misc_feature (113)..(113): n is a, c, g, or t
  misc_feature (115)..(115): n is a, c, g, or t
  misc_feature (120)..(120): n is a, c, g, or t
  misc_feature (150)..(150): n is a, c, g, or t
  misc_feature (153)..(153): n is a, c, g, or t
  misc_feature (156)..(156): n is a, c, g, or t
  misc_feature (159)..(159): n is a, c, g, or t
  misc_feature (166)..(166): n is a, c, g, or t
  misc_feature (170)..(170): n is a, c, g, or t
  misc_feature (174)..(175): n is a, c, g, or t
  misc_feature (177)..(177): n is a, c, g, or t
  misc_feature (180)..(180): n is a, c, g, or t
  misc_feature (182)..(182): n is a, c, g, or t
  misc_feature (186)..(186): n is a, c, g, or t
  misc_feature (192)..(192): n is a, c, g, or t
  misc_feature (195)..(195): n is a, c, g, or t
  misc_feature (201)..(201): n is a, c, g, or t
  misc_feature (217)..(217): n is a, c, g, or t
  misc_feature (221)..(221): n is a, c, g, or t
  misc_feature (230)..(230): n is a, c, g, or t
  misc_feature (240)..(240): n is a, c, g, or t
  misc_feature (242)..(242): n is a, c, g, or t
  misc_feature (320)..(320): n is a, c, g, or t
  misc_feature (336)..(336): n is a, c, g, or t
aggtacttgaagcaatttcnnctaacgcncttcatgagccaggaggaggtggagnactggttntnnnnnnaggagaatatgatnganantttnttgntggagaangcaaantnanatttnacagatttcctgagcttttatacgctgggntgnagnatnatgaagnatgnaagnnanaanantgtnaaaagntgnttattntttctacaacgttcanagcncagagcgcnctcttctagncntcatgagcgacgcccttgtcctcgccaaaatgaaagggtttgatgtgttcaatgcactggatctcatggagaacaaanccttcctggaagaagntcaagtttggcataggggacggcaacctgcagtattacctttacaattggaaatgccccagcatgggggcagagaaggttggactggtgctacaataaccagtcaccagtgcgattctagataaagccactgaaaattcgaaccaggaaatggaaccccaccactgttggtccaattttcacacacgtgagaatccctagcaaagggagcagaactgaaccggctttaccaaaccgccagcgaacttgacaattgtattgcgatggcgtgggctgcgtgacgtcacctccggtcgtgtctctggtctccgtgttttccagttaattacatcctcatgcagccgtgatcaagggaatgtaactgctcatgcagccgtgatcaagggaatgtaactgctgaaaactagctcgtgattggcatataatggagttaacgggtgaataataaaagtatatatatatattatatatatataaaaaaaa

SEQ ID NO: 517241 - DNA, 787 bp, Homo sapiens
  misc_feature (20)..(21): n is a, c, g, or t
  misc_feature (29)..(29): n is a, c, g, or t
  misc_feature (55)..(55): n is a, c, g, or t
  misc_feature (63)..(63): n is a, c, g, or t
  misc_feature (65)..(70): n is a, c, g, or t
  misc_feature (84)..(84): n is a, c, g, or t
  misc_feature (87)..(87): n is a, c, g, or t
  misc_feature (89)..(89): n is a, c, g, or t
  misc_feature (93)..(93): n is a, c, g, or t
  misc_feature (97)..(97): n is a, c, g, or t
  misc_feature (105)..(105): n is a, c, g, or t
  misc_feature (111)..(111): n is a, c, g, or t
  misc_feature (113)..(113): n is a, c, g, or t
  misc_feature (115)..(115): n is a, c, g, or t
  misc_feature (120)..(120): n is a, c, g, or t
  misc_feature (150)..(150): n is a, c, g, or t
  misc_feature (153)..(153): n is a, c, g, or t
  misc_feature (156)..(156): n is a, c, g, or t
  misc_feature (159)..(159): n is a, c, g, or t
  misc_feature (166)..(166): n is a, c, g, or t
  misc_feature (170)..(170): n is a, c, g, or t
  misc_feature (174)..(175): n is a, c, g, or t
  misc_feature (177)..(177): n is a, c, g, or t
  misc_feature (180)..(180): n is a, c, g, or t
  misc_feature (182)..(182): n is a, c, g, or t
  misc_feature (186)..(186): n is a, c, g, or t
  misc_feature (192)..(192): n is a, c, g, or t
  misc_feature (195)..(195): n is a, c, g, or t
  misc_feature (201)..(201): n is a, c, g, or t
  misc_feature (217)..(217): n is a, c, g, or t
  misc_feature (221)..(221): n is a, c, g, or t
  misc_feature (230)..(230): n is a, c, g, or t
  misc_feature (240)..(240): n is a, c, g, or t
  misc_feature (242)..(242): n is a, c, g, or t
  misc_feature (320)..(320): n is a, c, g, or t
  misc_feature (336)..(336): n is a, c, g, or t
aggtacttgaagcaatttcnnctaacgcncttcatgagccaggaggaggtggagnactggttntnnnnnnaggagaatatgatnganantttnttgntggagaangcaaantnanatttnacagatttcctgagcttttatacgctgggntgnagnatnatgaagnatgnaagnnanaanantgtnaaaagntgnttattntttctacaacgttcanagcncagagcgcnctcttctagncntcatgagcgacgcccttgtcctcgccaaaatgaaagggtttgatgtgttcaatgcactggatctcatggagaacaaanccttcctggaagaagntcaagtttggcataggggacggcaacctgcagtattacctttacaattggaaatgccccagcatgggggcagagaaggttggactggtgctacaataaccagtcaccagtgcgattctagataaagccactgaaaattcgaaccaggaaatggaaccccaccactgttggtccaattttcacacacgtgagaatccctagcaaagggagcagaactgaaccggctttaccaaaccgccagcgaacttgacaattgtattgcgatggcgtgggctgcgtgacgtcacctccggtcgtgtctctggtctccgtgttttccagttaattaaaaccccaacgaatatgagactaagggaatgtaactgctgaaaactagctcgtgattggcatataatggagttaacgggtgaataataaaagtatatatatatattatatatatataaaaaaaa

SEQ ID NO: 517242 - DNA, 132 bp, Homo sapiens
ttgctgctgcggtcgcctctgacggctccccctgttcccggggacgacgacggcctcagacacgacaaccacgccctgccaacaccttgatcttggacttctagcccccgggacacagctccccgggatcag

SEQ ID NO: 517243 - DNA, 515 bp, Homo sapiens
cgctccttcgtggtggtctatagcgcctttggtgttcaaggcttagcactccgcttgatgacagatagaacactatccggtgcctgatgattcgttttcgtcctgtacatctcgctgtaagcttctccccaagaggtccgagttactgttcctcgtgggtgtgtttgtgttgctttgcagcgctctaaagaactttgtgtttgggcagctgtgtgtctgtcatgtcaggctgctggacaggagttgatgcttacggcgccgctgaccagggctgctttactgaagctcactgggtgtccatcaatcacaaagtggcgtatgcagcctgtgaagggtttgctgggggccaagcgtggtgtcagtagagattctggaacacctccaacaaacacaggctccctgtgatcaattggttttggattcaggggtccaaccacatggttcacttcagagtccacatccaactgaaccacattagaatctctaataactgtaattctgtgccatctggcatc

SEQ ID NO: 517244 - DNA, 185 bp, Homo sapiens
tgatctagaggatctcccgcgtacagttgcgcgttgctttcgaccggattgagcgatgccgacgctgaattctggtgggagctttggctccgtcgttcgaacggcaacatccagatgcgattgccgatgccgtcgtcgcgatcttcactcaggccggcttgcaggtgcacagtgatcgcctgcgg

SEQ ID NO: 517245 - DNA, 417 bp, Homo sapiens
  misc_feature (61)..(61): n is a, c, g, or t
  misc_feature (218)..(218): n is a, c, g, or t
gggaggaatggtcccaatttgccccatggggtggacccaccgggctatgcctatcccggtnccgccgccgcccccatggttgggtttcccatgccccccgggtttttccccttaggcctttaaagggaaagggaaagggcggttttccaaaacgcccctttaaatggggggttttcgcccaaaaaggttttttaaaaacctggggatttcccaaaatncttccgggcccccggtattttgggggccctttttgcctttttaggtggggatttttcccccctccccgaacccttttttgggtttttttgggcttaaaaaagccggccggggtttcccccaaggtaatgggccggggttttgaatccccttaattgaggcccgggcgggccctccccttaaaaaatttttggggccgga

SEQ ID NO: 517246 - DNA, 725 bp, Homo sapiens
  misc_feature (230)..(230): n is a, c, g, or t
  misc_feature (280)..(280): n is a, c, g, or t
  misc_feature (386)..(386): n is a, c, g, or t
  misc_feature (514)..(514): n is a, c, g, or t
  misc_feature (534)..(534): n is a, c, g, or t
  misc_feature (543)..(543): n is a, c, g, or t
  misc_feature (590)..(590): n is a, c, g, or t
  misc_feature (665)..(665): n is a, c, g, or t
acccctccatgcagttgattcccagatctgtattattctactgaaaatccattccccaactttcttggctagaataacagaagcccagttagaattcatgataccagtttcccaccaccaccaccgtcgccctgccattgttagcaaaaccatctcttgagtggagctcaaagatttgtaatcccccactccccagaaagataacttcagactcagcctagaagtaaagntcctccagatatggcctcaactaccctccaacccatgtccccagtgcatncctttgatgcccccttcagtggagtttggagtgagtgtttttcttttcacatactcctggtgttcttccatgaatacaattttcacctcttgaatattttcaatanttctccatgctacacacagtgaaattcaagctccccatcaggaccccagtcttcccaaatgctctttgcacttttctgtctccatgctttcccttgggtcatcctcttctctaatataaccttgtgtnttactctaggttctccaganaaagagcanagagatagaggtagagctatacacatagagagagacagattgattanttgtaagggatggctcacatggttatggaggataaggagtcctggagtctgcagccagcaagctggggacccagnacagccaatgatatagttccaactcgagtccacatctgtcaggagaagattgtgtcccgc

SEQ ID NO: 517247 - DNA, 667 bp, Homo sapiens
tgcagtcgctgggctgcagggactgtgggcctgagggaagttctgacgggcacgcgtgagtggaggctggcggacaggcgacaggactgtggaggacagaggagcgagagcagaagaaacacaccaggagaatgttagggaagtgtgaaactcagagggggtatgacgagtcagaaaaaaagaactctgggggcctagaaaaggagaacccaatgagaatggctgacctctcggagctcctgaaggaagggaccaaggaagcacacgaccgggcagaaaacacccagtttgtccaggacttcttgaaaggccacattaagaaggagctgtttaagctggcaccacgggactttacttcacatactcagacctcgaggaggaaatggagcgcaacaaggaccattcaggctttggccctttgtacttccccatggagctggaccggaaggaggcgctgaccaaggacattgagtatttctttggtgaaaactgggaggagcacggtgcgcgtggcccaagggttgccagaagtacgttggagcggatccacttacattgggcagaacgagaccggagactactggttggcgccattgcattcacccggtacatggggggagtctctcggggggggccaggttgcgtgaagaaggtgtgcccacgcgag

SEQ ID NO: 517248 - DNA, 186 bp, Homo sapiens
ttacacgcgactcttccctaatagcatatattttaaagagatagcaatatgaccaacataacttgaaatttgaaaagcagtcataaggttcacccttgctattgctgtctgtgttgcagtgctgatacagaattggtttcattaattcctacatgtttataatcactcatcaagaaagtgggggaa

SEQ ID NO: 517249 - DNA, 124 bp, Homo sapiens
agcgactacggggaattcgtcataaagaccctgatgagtgcggtgtggggcgttcgcaagtgcatgccccagatgaattacgacaagctgagccgggccctgcgctattactataacaagcgca

SEQ ID NO: 517250 - DNA, 277 bp, Homo sapiens
taaaaagttaaggtctggtgcggtggctcacgcttataatcccagcactttgggaggctgaggtagaggatggctggagcccaggagttcaagaccagtctgggcaagatggtgagacctggtctctacaaacattttaaaaaaaaaaaaattagccaggcatagcaacccacacctatgttcccagttacatgggacgctgaggcaggaggatcacttgggcccagaaggttgaggctgcagtgagctgtgttcctgctctttaagaccctgtctc

SEQ ID NO: 517251 - DNA, 365 bp, Homo sapiens
  misc_feature (25)..(25): n is a, c, g, or t
  misc_feature (30)..(30): n is a, c, g, or t
  misc_feature (322)..(322): n is a, c, g, or t
  misc_feature (327)..(327): n is a, c, g, or t
acagaagggcgtggtggtgcgtgcngtgantcccagctattgggaggttgaggcagagaatcgcttaaacccaggaggtagaggttgcagtaagccaagattacagcactggcactccagcctggctaacacggtgaaaccccatctccactaaaagtacaacaattagccaggtgtgatggcacgcacctgtagtcccacctacttgagaggctgaggcagaaggattgcttgagcttaggaggcagaggttgtagtgagcggagatcacgtcattgcactccagcctgggtgacgggagtgaaaccctgtctcaaaaaanaaaanaagagaaaaggcggccgctcgttgttcgcgcggccgcg

SEQ ID NO: 517252 - DNA, 326 bp, Homo sapiens
gacaactccagacttgcgggaaatggcctgagctcgcattggacgctctggggtgccacatgtctggacactgtttcctgggagacctccgcctctccgcgcggatgaatgaggctgcagactgccgaagaagagctcgagtgctgtggggcacttgatggggatctggggtgggcacacacgcagaacggccatgggtacgctatctttccatgacactggtctccacaggttatgaaacagcttccaacacgtttccagtgcctccatgcctggcaatgcctctcccccctgctccccgacctcttgcaagggaaccccacgcg

SEQ ID NO: 517253 - DNA, 396 bp, Homo sapiens
agtgcacaatcttggctcactaaacctctgcctcccaggttcaagcaattctcctgcctcagcctcccaagtggctgggattataggcacccgccaccaggcccagctaatttttctattttttagtaaagatggggttcaccatgttggccaggctggtcttgaactcctgacctcaagtgatccgcacacctcggccttccaaagtgctgggattacaggcgtgagccactgcgtctggccctctttcttgtaatatatttaacagataattttgtgtgaatgataggtgtgttccccagaatactgatgttttcctcatactcactcactatcactgtaaatgactagtctggagtaccacctcttttttctttttaattagtacaacaggaa

SEQ ID NO: 517254 - DNA, 515 bp, Homo sapiens
  misc_feature (372)..(372): n is a, c, g, or t
ctcgtgtctgattcgctaggttgtgctcaggcgcaaatcctcttgtgaagcatatggtgaagacatggactcctataagtccagagtaccatgcgtgtgtcccggtacgcgaagagccgcggtcgctactatccagcggtctgcatgtttacgcccgctatatgattgtctactagtaatgatcgttataccgcgactgtcttttagtacagtgcagtcttacagtacaacgtcaccgacgatgtccttgaactggctcgatatgcataagaccacttactggaggagcgtgttctttatggagaccttgcgcatgctatttttgagagacaatgaatgtaggctcttatgcaggctactaattcaggtcgnggagctataacactcatgcacacataggtgaatgggaaggatcgtcaacatgttactgtggccatgatcctggaatgcattgtgtatcagaaggtatatactctgaccgctgtcagtttgttgaatccagcggaactgtactt

SEQ ID NO: 517255 - DNA, 138 bp, Homo sapiens
ctctagaggactcccggactgggagatgtctgagaaatacaagtggttgggaaaaatcgaggtgtagtggcttggtatgtggggaggggtagaagggatgaagtgaagggtgacggcccctcataccctccatcttgc

SEQ ID NO: 517256 - DNA, 249 bp, Homo sapiens
ctcgtcttttagggagtgtcgtgtgttcctctgcaagctcgcgtggctggttggtaccggtatgttccctctagtgtggcttgagcgtgtccaccttctccctctccactcccagaagacaaactggcttccctcagggctcaagaatgtgtcaggctggtggggcccgggtgacccactattttgtgtccttgagacatttgtgttgtggttccttgtccttgtccctggcgtaataactgtccaatg

SEQ ID NO: 517257 - DNA, 499 bp, Homo sapiens
  misc_feature (40)..(40): n is a, c, g, or t
  misc_feature (42)..(43): n is a, c, g, or t
  misc_feature (73)..(73): n is a, c, g, or t
  misc_feature (89)..(89): n is a, c, g, or t
  misc_feature (150)..(150): n is a, c, g, or t
  misc_feature (180)..(180): n is a, c, g, or t
  misc_feature (186)..(187): n is a, c, g, or t
  misc_feature (190)..(190): n is a, c, g, or t
  misc_feature (206)..(206): n is a, c, g, or t
  misc_feature (265)..(265): n is a, c, g, or t
  misc_feature (299)..(299): n is a, c, g, or t
  misc_feature (304)..(304): n is a, c, g, or t
  misc_feature (315)..(315): n is a, c, g, or t
  misc_feature (346)..(346): n is a, c, g, or t
  misc_feature (410)..(410): n is a, c, g, or t
  misc_feature (419)..(419): n is a, c, g, or t
  misc_feature (440)..(440): n is a, c, g, or t
  misc_feature (443)..(443): n is a, c, g, or t
  misc_feature (447)..(447): n is a, c, g, or t
  misc_feature (449)..(449): n is a, c, g, or t
  misc_feature (451)..(451): n is a, c, g, or t
  misc_feature (457)..(458): n is a, c, g, or t
  misc_feature (474)..(474): n is a, c, g, or t
  misc_feature (476)..(476): n is a, c, g, or t
acatcgccggctctagaatgagataaacctacataaaagncnnctgacgccaaacagaatatcgattgcaatnatcttgaggaaaaacnggttaatagccactccagcaaatctcacatcaatggcactgaaaagtgcgcttcagaaacnaggtcgaaatttaagaaactcctttagatnctaggnnttngagtagcggatccttntcctggtttcccgggaagaacacggcttttgcacggttgagaaagacactcaggccttngcttctgaccacattcccaggactattttctatngggtngtattccttgngtttatggtacaccaagagggagatcacagngacaaatatggccaagcagccaagggagaatcagggcacggtttgccatccttaaaggcgaggntgggtctcngtcaggaacagaaatcagggngcncgtnananccaggnntgtgtcatcccccagngngaggtcacacaagacgtcccaga

SEQ ID NO: 517258 - DNA, 82 bp, Homo sapiens
atgtgcgtttgggcggtgtggagcctgctgccatgttgtcggcgagagctaagacaccccggaaacctaccgtgaaaaaagg

SEQ ID NO: 517259 - DNA, 205 bp, Homo sapiens
tccagcagatgtggatcagagcaggagtatgactgagtcctggcccctccatcgtccaccgcaaatgcttctagtgcgtgactatgacttagttgctgttacaccctttcttgacaaaacctaacttgcgcagaaaacaatgatgagattggcatggctttttttttttttttttttttttttttttttttttataacgaggggg

SEQ ID NO: 517260 - DNA, 388 bp, Homo sapiens
atattttatattctcttatcagaaaaaatcaccatttgggaaagtataaattgtaaatggtaaataatgtgttttcttctctttttttcctttaatgtttttctaaatgattatacaaagaaaatcatctggctgggcacaatggctcatgcctgcaatcccaacacttttgggaggctgaggtaggagaatcagttgagtctaggagttcaagatcagcccgagcaatatagtgagacccctttatctacagataatttaaaaattagcctgatgtggtggcacgcacctgtagtcccagctactcgggaagctgaggtgggaggattgccagagcccaggccgtggaggctgcagtgagccctgatcgcaccactgcactccagac

SEQ ID NO: 517261 - DNA, 324 bp, Homo sapiens
  misc_feature (193)..(193): n is a, c, g, or t
  misc_feature (310)..(310): n is a, c, g, or t
ttgcccagcccgacatctttatttaaaagctttttgggccaggcatggtggctcacgcctgtaatcccagcaatttgggaggccgaggcgggcggatcacaaggtcaggagatcaagaccatcctggctaacaaggtgaaaccccctctgtactaaaaatacaaaaaattagccaggcgtggtgctgggcctngttagtcccagctacttgggaggctgaggcaggagaatggcatcaaccagagaggcagagtttgcagttgagcttgagatcgtgccactgcattcccagcctggggccaaggagttnaggattccgttttc

SEQ ID NO: 517262 - DNA, 200 bp, Homo sapiens
cccaaacccactccaccttactaccagacaaccttagctaaacccatttacccaaataaagtataggcgatagaaattgaaaccttgccgaatagatatagtacccgaaggaaagatgaaaaattattaccccggattatataggaagggcttacccccattatcctttgcacaaagtagttaactaggagatatctctt

SEQ ID NO: 517263 - DNA, 232 bp, Homo sapiens
gttgagaaactcattgaaaggcaagtgttgaagatgttgtagtatatagctacatagtgtgttttcacagagtgaagttttttgtaactaaattaaaggggggtaaaaagtgtaacatatttgacattaatgtaggtattttctgcaaatcaaaacaatccctgagaactctctacctctacaatggatagaaggagcgatagatctaaaaacgctaggtgacagcagagac

SEQ ID NO: 517264 - DNA, 362 bp, Homo sapiens
ctactatactctgagatttttcatgttgtggtatgtagagcagcggtcatgatgcatataattaacctacatgacgcttgaagccctctatctaaggcgttatgagagtgaatctgctcttgcactgaaccttctgcagttatactattgcagcgcatttttgaagcacagacaccagaggcctaacgattcctccatgctgtgtatcttctgtcagggcgttggatttacaccaaccaaatgtacttaccgctgtgtaaccttttgagcgctatatacttgctctaatatctcatggtacagcttgtatagctttaaatgtgagacatattagcctggcaggcttgcttgcctcgtgccgt

SEQ ID NO: 517265 - DNA, 122 bp, Homo sapiens
tatgtctcgatcgttataatgctatgcatggctgaagcctccagaaatgatctcttctgctacatcaagccggggagtttacacaatgatacactatgtcttaccttcaaagataatgctcc

SEQ ID NO: 517266 - DNA, 896 bp, Homo sapiens
actgtcatactcccctcccctatcgccttgaacaaccaaacaaggagcttaggtagccaccctccagtactcttgctgctccacgcacgcactcttctacttcgtcttcttctacccttttcccatctttggcattcttatcatcaccatccttctggtgcgttcaagagccggaactccagcaagaactctgatgggaagaatggggtgcctctgctgtggatcacagagccacacctcaactactacactacttgcctggaaccctctgtgctcattatccacccactggcacgtttactaacgccgatgatgcccccacccctgtaggccacagcggagacgtcgctcttccttccttgtgcgatggagcatccgaccgccgttaaactctgcagcccatgccagcgcgcatttccgcctacaccgcaccccctccgtcctgcggcccgtccgttactcgtacccgaccgccccccacgatccaccctatcctcgtacgatctatgctccacgctaagttaaacgttcccacctccccgggcgggccaatccctattcaatatccaccccctaattttcctgccatacgtaatgcgtcccggtcgggcttcgaacctaccccgtattactctcccgtcgaacggagcatcacatacccgtaccttaccgcatgccaaatcacctatacctcgctatagctcccacccgcaattagcccacctgcctaacgcaacgatcataatctacatccacctatctgttgacccctttgatcggccattccataccctcattccccgtgcacgttttcccccctacgttcccacctgctcccccgccgccgccgcaactactcccctaaccgtctcatgtgtcgcaacgcagccggcccc

SEQ ID NO: 517267 - DNA, 207 bp, Homo sapiens
tcgggagcgtgactaatcatccatccaatcaattgactaagtcaaacgtaacctcaatacaagctgataaccatacacagatcactaagaggacgaacctgattctcttatactagtatcctttagatcatttgtattgccacaactgtcctcctcggactcctgcctcactcatttacaccaaccacctcactatctataaacttt

SEQ ID NO: 517268 - DNA, 299 bp, Homo sapiens
taacgatacccaaagatctttgagcatcacctagtatttacattgtattttatttttctgaggcagggtctcactctgtcacccaggggggagtgcagtggcacactctcggctcactgcaacctcacctcccaggctcttgcagttctcctgtctcagcctcccaagtagctgggattacaggcacacaccaccatgcctggctagtttttgcatttttagtagaaatgaggtttcaccatgttggccaggctggtgtcaaactcctgaacttaagtgatccgcccgccctctgcctc

SEQ ID NO: 517269 - DNA, 535 bp, Homo sapiens
  misc_feature (127)..(127): n is a, c, g, or t
  misc_feature (404)..(404): n is a, c, g, or t
tggggccctcaagaccaggttgggccaaaacccgcggggggcccggcccgggatttccggggaaaatagggggggggtttctcttaagccccctgggtgtggggggggcgagcccccccccccgggnggggttttatgggggttgggcccccggttaagccccaaggtccccaaaacttgggggggcccccccctgggggccccccccccaggtccctgggggggggccccggcccccctttgaagaaaaaaaaccccccaaaaaagggggggggggtggggggtccccccccccccccttttaaaaggccccccccccccccgggggggggggggttttttttaggaaggggcccgcgggggaaggggggggcggcttttttttgggctggttaaccccaccngggggggacccccccccttggggggggaatttttcctttccgggggggggggcccggggggggggggggggggggttttccccccccttttcccccccccaaagggaaaaccccaaatttttttttgggga

SEQ ID NO: 517270 - DNA, 126 bp, Homo sapiens
ttgaaggaccatagtagtgcctaagaagcaggcgacatttaagaaagcgttgaagtctcaacacccacttatctaaaaaatcccaagacatataactgaactcctcacacgcaattggacctagtg

SEQ ID NO: 517271 - DNA, 741 bp, Homo sapiens
ggctagacattacgatattgcggggtggcccaagactacactgatgcagcatcacacaagagccaggcgtctcttgcagatcaaagttatcaagacatgatctgacagggaaggcgtgagtatcacactgctggtgcggggcctacgtgtatgctcccagagttctggtgagtgcactgggtgtgggagccctctgacgcatcaagaacgcatgtgcctgatcgacttctgtgccggcgtagtccaagctgtacaaggtgggcctgggcttgggctatctggagctgtcacagtatcaatctactaagtctctcctgatggaacataagctagtgtcccaaggttggagcgtgattgccaggaatgcggctgctgcagagtctgcttggacacgcgctgcgtgtacattctggactgttggtccgacgtgttcatctggctcgtgcgcaagtccccgcgcctggtgcgcgctgccgccctcaagctgggtcaggagctgtgcgggatgctgcaccgagcacgccatgccacggtcagccgcagactcgagggcaccgaggcgcaggtgttcaagggcaagttcaagaattgggacgatgtgtggacggtggactaaaacatgcaatgcggatgccgtgctgccagagcccgggtctctccgggaagggtgaaacgcgacgccgagaagaatgaccagatgaaggctgactcaatgcgcttttcctgccgcggcagcagcca

SEQ ID NO: 517272 - DNA, 1039 bp, Homo sapiens
ttgaaggtaccaaggaccccagccggaaccgctacaagctgtttctggagtgcaccctgatcctcacctcggtcgtgcctcctgagctgcccatcgagctgtccctggccgtcaacacctccctcatcgcccatggaccaagcatctacatgtactgacacagagcccttccggatcccctttgctggcaaggtcgaggtgtgctgctttgacaagacggggacgctcgaccagtgacagcctggaggtgcgcgagtgtggccgggactgagcacgacgggaacggacggtgaacccccaggtggccccaaagatatcccgtgctcagacacacaacacacagaggccactggacccatcagtgaccacatcgcatcatgcagcctggacagacggcacccatcgtgggtgaccctctagagaaggccatgctgacggccgtggactggacgctgaccaaagtgccctgaagcgaatgtccgagcttgcctcgtatgacacgctgggcatccaccgacctctgctacatcgcggccggtgaagggggccccgaacctctgcactccatgtcctcccagtgcccgcccgactaccacacatccaagaccgagatctcccggcaaggagccccggtccaggacgcctggcgtacacggagcctgggacaacttcacttcaccagcaagcccgcgagcagtcaaacaggacagaccctgacagtagcacctccagctacgacacggcaccactcgcagactcatgccaccactccggcctcaccccaagcgcgggacatccgggagcatccaaatgcgcaccaacggcgcgtgcccggactcccggcggaaacacaccgcgagcaggggcagtcaccccgtggccccccgaccgcacgcagcagggaaacaggcacacacgggggcacccaacagccccacccaggaacgccgcgcaacacaacgagcccacgacacagcaccacactcccgcccggccccggaaccacagcgacgacccggaacgacgcaccacggaccca

SEQ ID NO: 517273 - DNA, 299 bp, Homo sapiens
  misc_feature (22)..(22): n is a, c, g, or t
cggtttggtcgcgctctccctncactgaagtcggcacgggtgtcggcgattcttcgtcgcctatcgggggtgcgacagtgcccaggcgacgtgctcggggaagttcaacaacctggtccgtttccgcggcttcccctacgtgccgattccagagaccgcgatttaacaaccccacgattcaacccacagacccgccaaacgcgggtctttttgtttgaggacgagcatgacgacaccaccgccgattgagcaatttactggtgcaggtagccagctccaattccaacaagcactgagtg

SEQ ID NO: 517274 - DNA, 1473 bp, Homo sapiens
  misc_feature (949)..(949): n is a, c, g, or t
cctgcctgcggagataactgcaagatgatgctgtccgtgcgcgttgctgcgtgcctgtggtcctgcgcccttcctcggcgtggccggactggtctccagaaatgctttgtgtgttcatctttcatttgcttgcaaggaacttccatgcctctaacactcatcttcaagaatgactggtgacttgctgagcatgtcctctacttcttgaatgatgcgtattctctgtgagcttgatacctcctgttgatcttgcaatgaaactgtggctgtgtcttaacgctatattggtcgactggtatttgccctgcgtacatgcgtgctgagtgacatgtctcacatgccagaacgaaattgtgtagacgcttctctctatccagctgccttacacatgtgtgtcatagtcccttgcacccctgcgacactctcgactaacttgttggttgtcttgtccgttgtctctgtgacaacttgattcaacctcacattcccctgcggacaggcggcaatcatcagctcggactccagcgaccagcgatgcccaatctgcttgcgcaacccgtccccccacgctctgcgcttgcatcgtgcggctctcagctccgcgcgtctgtcggtacacgtctgcaattcccccgtttagtcgctaaacttggccttaatcctggcatttcgcgccacaccgtggcgctttccccacactcgttgggctttcacccaaagcaaccggctcgttaacctgcctccatctcttggggagtcccttgtcacaacgccccgcgcgctgaagtcaatccccatcttcccttaccagaacaatctccccaatcagctattgcctgtgtcaagaaacccccctacagtcgggccacggaatcactcgggccaccagctctacagcgtgtgcccttcgcgctacttgcacttcatgcccccatattgcgctatcacnctcaagactattgcgggaacccgcctctggcactccccagcgacggctatgcagcacccttttggactttcagcttctggagctagcactccttcaatcaagcaaccactgtgccgcgcaaccaccagacccccccctcccacggcaagcgtgcccacgacgatgggtcgacgacccacccaccactcccaccctactaagcagcccccaccgaacaaacaaacccgatctcaccccaccacctcgacacctccggcgacacccccttgcacccactgagcacagcaccggtcgccagaacacgaccgtgtcggctcgcctatgcagcacacatgcaaaacctggccctggcgccaccacctacctgcggcactccccacaacaccctacagtcactctccaccatgtgattgatgcccccccacccaagcccatgcctacatcaacgccaccaacgcaccgcttagctcctgccagtgtcacggcactattccccccacatagacgcaacataactcccacat

SEQ ID NO: 517275 - DNA, 509 bp, Homo sapiens
agattgaggagtacgtgtgggttaattcactgtatcgcgtggggtagcaataatagtgagagccatggttccagattttatgcttactcagatttcggatactgattcaatcatcttagtattcatagcatattcagatgttttatctgtggtttagtctgggtgcatttagtgtttcttgaaaatttgcctgtcatctgggttatcgaatttttggccacacacttgctcatagtactctcttaaatcttattaatttctgtagaattgttagtaatgcccctacttttattttggtcttttgtagtatgattttctctgtgggtttccatctgtggctttggctatgttgagatagtttacttctattcccagtttgttgaatattgttcttatgaaaggatatagaattttgtcagatgctttgctgtgtcaatggagaagataactttttttccattcggttaatataatatatgaccttgatttgtctgtggagtatccgttcg

SEQ ID NO: 517276 - DNA, 232 bp, Homo sapiens
gtattttcagtttgtttgtttttgtcacccaggttggagtgaagtagtaagccgagatcataccatttcactccagcctgggcgacagagtgagacactgtcaaaaaaaaaaaaaaaaaaaaggaaaaaaaagttctccaaattgtgggctaatttttggggggtttctccctttttttttttccaaaatttttaaaattattacctttcttatgggcgttgaaattggtcc

SEQ ID NO: 517277 - DNA, 713 bp, Homo sapiens
taactgcgccagaggtctgtgcgcgcgcacacccggcacctgcccgagcccagtgtagtgagtgccatgatgattcctgatgtgtgtgagtgagctggtagtggcggctgtgagtgagtgtgggcgtgcgtggtgtggtgtggctggggtgcggtgatgcgctccccgtgcccctctagccccgtggtggtacaactgcgaagtgtgtggtgaatgtgccgcgataaacctggaactgcagcccgagcggacacctccggcttcacttccgtaagagtgagagtgagtgtacggcaatgggtcctgggaactgtgaacttggccctgcctcgtttgtgagctgagctcagcggaacgctatttgtggcgtcactgcactgttaccccagcacctacgtgtctctgacgctgacaccttctcactgtgaaactgtcgctgagctgtgacgtctggggtggcgcctcaaatcgttccagctccaggcatcggatcccggaaaggcagcgtcggagactggacccaaaactcttcactgtactgccatgcagagttgagccccgtccagggtcctggagccggacgtagtacttgaccgctgagatcacctgtatcaactgcgattctcgagatcacccgacgcatcacatgtctggagccccagggaatgaccggtgcatacttccagcccaggagggcctacatcatcagtgag

SEQ ID NO: 517278 - DNA, 232 bp, Homo sapiens
gtgtgcacctgtaatcccagctacttaggaggctgaggcaggagaatcgcttgaacccgggagacataggttgcagtgagccgagactgcaccactgcactccagcctaggtgacagagtgagactccatctctaaaaataataataaataaataatgacatcactttggtcagagctctaaaatggaggaggaggcattctaaaaggactcctacatgacctgcacttgaa

SEQ ID NO: 517279 - DNA, 923 bp, Homo sapiens
  misc_feature (22)..(22): n is a, c, g, or t
  misc_feature (283)..(283): n is a, c, g, or t
  misc_feature (304)..(304): n is a, c, g, or t
  misc_feature (320)..(320): n is a, c, g, or t
  misc_feature (342)..(342): n is a, c, g, or t
  misc_feature (344)..(344): n is a, c, g, or t
  misc_feature (349)..(350): n is a, c, g, or t
  misc_feature (352)..(353): n is a, c, g, or t
  misc_feature (356)..(357): n is a, c, g, or t
  misc_feature (361)..(361): n is a, c, g, or t
  misc_feature (363)..(363): n is a, c, g, or t
  misc_feature (374)..(374): n is a, c, g, or t
  misc_feature (394)..(395): n is a, c, g, or t
  misc_feature (399)..(399): n is a, c, g, or t
  misc_feature (424)..(424): n is a, c, g, or t
  misc_feature (440)..(440): n is a, c, g, or t
  misc_feature (448)..(448): n is a, c, g, or t
  misc_feature (450)..(450): n is a, c, g, or t
  misc_feature (465)..(465): n is a, c, g, or t
  misc_feature (503)..(503): n is a, c, g, or t
taagtgtttagcagcagctttnatagttctgacggagtctggcaggtctgctcaccaggtggccagataccgcccacgtgcccccatcattgctgtgacccggaatccccagacagctcgtcaggcccacctgtaccgtggcatcttccctgtgctgtgcaaggacccagtccaggaggcctgggctgaggacgtggacctccgggtgaactttgccatgaatgttggctttgcccgaggcttcttcaagaagggagatgtggtcattgtgctgaccggatgntccctggctccggcttcaccnacaccatgcgtgttgntcctgtgccgtgatggaccctnanagccnntnntanncccntntcccacccccntccccgcacccatccattannccancaacgcttgtagaactcactctggnctgtaacgtggcactngtaggttngnacaccagggaataanatcaacgcctcactgaaacatggctgtgtttgcagccngctctagtgggacagcccagagcctggctgcccatcatgtgccccacccaatcaagggaagaaggaggaatgctggactggaggcccctggagccagatggcaagagggtgacagcttcctttcctgtgtgtactctgtccagcttcctctagaaaaaatggatgcccagaggactcccaaccctggcattggggttcaatgaaacagccagcaagagttaggggccgttagggcactgggcatgattgttccaattgaagccgactctggcctggcccttacttgctatctctagctctctaggcctcatccagtttgcaccatgtccccaccctccacatcagctgtcctgcagcaaacactccaccctccaccttccattttcccccaatactgcagcacctcacaggccatgttgc

SEQ ID NO: 517280 - DNA, 304 bp, Homo sapiens
  misc_feature (273)..(273): n is a, c, g, or t
gactctagaggcatcccgattctggccacgcagtgggcatcccatgtaggcagaagctccctgaagctgggagcagggcagcccttggtcctctcctagaggaactggaacgcaggaaggctccaacttcagtcccatcttaacatttagacctcttcctggctggcatgatcatcatcagaccacagatctcagggatgagaggtgctcaccccagaacacggcagcagagagcagacacatgggcagagtgtgatggcggtgctattcccnacatgggcagacacttcacgagctacacgca

SEQ ID NO: 517281 - DNA, 101 bp, Homo sapiens
atataagggtgaattacatgccagaggtgaatttctgaaatacaaggaaatttctctcaagtagttcattcacataaggggcaacatcagcatagtttcca

SEQ ID NO: 517282 - DNA, 103 bp, Homo sapiens
ccccccccccccccaattggggtgccaaattttccggtttgccccggggtattataaaaaattttttgtttgaataatgaaaattaaacccccctcgtggcca

SEQ ID NO: 517283 - DNA, 335 bp, Homo sapiens
  misc_feature (204)..(204): n is a, c, g, or t
ggggccggatggtgcaaatagagtaaaactaaaaggtgagaaactagaaaaccaatactagctattccagaaaactaaaactaaaggatgcttgaaaaatagtctttagcaagataaagcagagtgacctatagacaagaccagagatagttttttctcccatgtaggagcccctgaaggtctggtgattaagagtggcaatanggggtctagagaagtctcactggatgacgtgcttcatacaatttttgcatgcagtctcgtatgactagtgcatcctcatatggcattacatgtctctctctagctgtggacggtgtccttcaggtacaact

SEQ ID NO: 517284 - DNA, 91 bp, Homo sapiens
catgggtggccattaagctttataaaatcatgtgggctttcaaattgttcttttatgtgtctagcaagtatttaataatcccttgtatagt

SEQ ID NO: 517285 - DNA, 727 bp, Homo sapiens
ctcaggtggccggcagtggcgtgcctggtgccctttctcctcttccgcctctgttgctccctttggtcctctggggcctcagagaggcaggtcctaaggagggggggtctcctgggggcagaccgagggtctcggaggatagaactgagaggtttccagggctggcagcagctgctgctgcgctgctgtgctgtgcaggaaggctttcgctttcaacacaacatgaacgatacaagaggcagctaggcaccctgcggcttgcgaacccaggggagcagactgcgggggcctgtagcccctgacactcgcgaatcgtcccgccaaaaaacagcaggggcagcaagagaccgacaacgaagggacgagagggaggaaagcaacgggcccgaaacgacaaagagaggacagaccacacgacaacaaacggcggggagagagccgcgaacccaaaacaacggacgacccgcacaagacagaacaaaaggagcaacggccgcagggaacgaggcaaagctcggcataaggagagggaacaaataaacgagcagattcagcggaccgaaaagagacgaccagactgtagtgcgcaaaagcacaaaacagcaacaacaggccagaaacacgcggccagggaggacaaagagagagcggaatacgagaaagaagggaaaaggacaaaaagggacggacaacgagaacaccaaacgatgagaaaaaacaaaaggag

SEQ ID NO: 517286 - DNA, 338 bp, Homo sapiens
  misc_feature (103)..(103): n is a, c, g, or t
  misc_feature (174)..(174): n is a, c, g, or t
  misc_feature (288)..(288): n is a, c, g, or t
  misc_feature (318)..(318): n is a, c, g, or t
aaacccacacaaagacaggctaaattatgtagacagtttactccacagtgagcttgggaaggtatcagactgttcaaaatgttagtattacaagagctgtctntaaatgcagcattaacactgccctctaattttacaaaagtattttaaaggatcaaaagggcggataacttnttggaatagaagatcctgttaccttaaaccattattttcttcacctggttatatatcaatgtgccttcaattaccctttctctgtggaggtgatgaacaaagcttttaagttgntctcctcccattattggagatgatcctttncccttctctccctgcctccc

SEQ ID NO: 517287 - DNA, 938 bp, Homo sapiens
  misc_feature (194)..(194): n is a, c, g, or t
  misc_feature (206)..(206): n is a, c, g, or t
  misc_feature (283)..(283): n is a, c, g, or t
  misc_feature (396)..(397): n is a, c, g, or t
  misc_feature (530)..(530): n is a, c, g, or t
  misc_feature (532)..(532): n is a, c, g, or t
  misc_feature (699)..(699): n is a, c, g, or t
catcgacgaatacattggaaatggtggtgaacggttttggaaaagctacaggcttccagcagacccaaagccactggtggttttgggcaagacgggtcctggatggtacacagcttggattggaaattccactggctccacttggatacggttaattcagcaaaccccaagggaatgggctggtcccccatccntccatggtgggntggtggtgggagactccagacctggtggttggtggtggggagagtttatataaacgtggtctcccccagaatctggnaaaacaacaaacaaaaacaacaaaaacaaaacaaacaaaaacaaacaaaacaacaaacaaaaacaaaaaacaaacaacaaaacaaacaacaacaaacaaaaaacactcggagnngggggcggccgcggggtaaccccaacttcgggcccctaatagtgtggaggtccggttattcaccaaattccacgtggggccggtcgcgtatttcaccaacggtcggtggcacgtggggacaacaccgcgtggngnggttacccccaacgtgtaagtccgccattggcagacaacaatccccccttatttccgccaggacgggggaggtaaatacgccgaacgagggggcccggcacccggaattgcgccctatccccaaaaaaggttgggggccaacacctgagaagggggggaaattggcncgaacttggtaaaggcggtctaacactttctgggttaacaaattccggggtatcacattttctgggtgacactcaaggtcccatatttttaacccaatatggggccgaaaatgggggaaagatccccttatatagtccagacgaaatagaccggcaaatagggcgtcagcggttggtccccgggtgggggacaccgaggtccccctaatagggtgtggcccccagggtgagggggggcg

SEQ ID NO: 517288 - DNA, 247 bp, Homo sapiens
tgacatcagcaaggtgatccagtgcgcctatgacatcagccaaggcatgccaagcagctggatcacatcaacacccgcagagaagaagcagtgacctctctccccacaccctcacctgcaccctaggacctcactggacataggagctgggccactccagacattaatccccaccccaacagagccactggcacaagtgcccttagtgcatgacacactccctggcagccaggtgccctggtgacca

SEQ ID NO: 517289 - DNA, 840 bp, Homo sapiens
tcttggtgcaacacttaatggggaaagatttacacacggtgacctgtcataggccaagcgatgagaagagggcgccaggagtgctggggtcccgaggtggctcaaatggaagccatggaacggccgtcccaaggcccggcggacacccgtcacctcagttctccccgttgggtgaaattgggaagctatatgctctccttccaagtcgtgcaatatgggtgtgcgagttgagctaaaaggtggagcgaaagtacacagggaagaggcttcccactcccaggaccgggcccccaagctcgcgaccccacatgggtggattgcaaagaaagggaattgggcccaaaacccatcgttgccgaggggccccttgccgtttgggggaagtgcaagtgctctctggatacccaaaagctgggagcagggcgccagtgactctggtctgggacaatcacttggatttggtaggagtggaggtggcctctgggcagagggcagggaggacacccccgggtctgctctcagttcgcaggcaagggtattaacgctggggaagaggaaattctctccaggaccctctccaaggtaaggaccctcttctggggaggaagacagcacgcctggttcacagaatccgggggaccagctggcagaagggagcgtccggacagttactcctcccggaactcctcggggcaaggtggggggctggatgtcgcttcggctgggttgccccactaaagcagccagcccaggttgccggccagaaggttcagaagttatggggccaacaaggtgtcgccagaaaaagcgaagcagcacatgtgaaagggctctcagaca

SEQ ID NO: 517290 - DNA, 343 bp, Homo sapiens
atcgctcatcgttaacggacgtgtcatgactctactccctacataatacctttattgtgacttctatcaggcctcgctaacctcgccttatcctccaatattaacttactgcgagaactctctgtgctaggcaccacgttctcctgatcatatatcacgctcctacttacaggactcaacatactagtcatagctttttcctgttttaaaatatttaccacaacacaatggggctcactcacccaccacattgaagcaacataaaaccctcattcacacgagaaaacagcctcatgtgcatacacctatcccccattctcctccacgcaaagtagtaattcct

SEQ ID NO: 517291 - DNA, 233 bp, Homo sapiens
tctcctgcctcagtctcctgtgtagctgggattacaggagtgagccactgcacctggctactttttgtatttttagtagacatggtgagccactgcacctgcccccatttccttctaatctgtatcttttgcattatttccctgccaaaatttcttgagtaaagcccatttccctagcgcagcatctgaggtgggcagtgcacacagcacagcagcctagggtactctgccct

SEQ ID NO: 517292 - DNA, 225 bp, Homo sapiens
tttattatcaggaactttatttttaaacttattacaggtacccaaagttcaaaagggtaatttttaccaaaatgagaacctcaacagccatagctgaatatttgctgcttattcttgtggccaaagaggaattctactaaatgtcaaatgaaggatgtctctaaactagaagacatgttaaagggccttgttgtcatttctgtcattgtagtgttggggataaca

SEQ ID NO: 517293 - DNA, 1234 bp, Homo sapiens
ggcggatgatgagaaggtggcggccggatgggatactggcatgatcccgctagactcgaggacctgagctgtacgtgactatcaaactcactatcgactgaaacgtcgtgccacggtgtgggagtctgcgtgctacccgggaacaggggagttatctgcgtcggtcaatagagagagtggcgaggtgtgaggcacttggcccagggatcaacagacgtgctccgcaacactgcctgtggttgtgtgccacagcaccagctcacgaggcgtgtcctatccgtccctgagcaggccaggtacactaatcacctcgtgtacgcaccggtaggaggcccatgggtaggcctgagtcgcatgggtatacctctccgaggacatactcatgagatcggtgacgaccggaaggatcatattgatcgtcatcgtaggtgacatcatacgggttcagacgaactgcatggcatcatgtaccaaatgggccaggagggacgtaacctaggggatgtcactatcacgtacagaaggatcacgaagtacatcaatacgcatttgtacaagaccggcactcagattcaggcagacatgttgaggaacggggaggacgaatgtagtccggggtcgcccggtagttaccaccagggtagtgtccctggctaggtccacaatttactccaattacgtactcgtcgatcgttgaaagttgaacggtggtcgggggaaagtccgcagtgacctgggccctctgttgagacacggacaaaggggcgagactcatcgcacggagtttcaaggatctggacccttatgacaccagaacaaggcctacccgttgggacacagagattcacacactctagattcgcaacttgaccaaccccgatctctacatgattgctttagggaccgggccacgatctcagaatgagaggcccgcaatttgtggtatatcgtaagattttaagggcccagctgacttttctcttgcgtagggttttccaagttgcaggtcaagaaattgggtgagaaaccgagcttcctagttgccggggaccgcgaagagaccacattgggtgggccctaccttggcaagccgagacttttgttagacaaaggcgaacgccgcttttaccaccacgcgccctagattttgaaagaggccgctaggaaaaatcaatcttgtaaacacaggggctcagcagggaaacacatcaagctcaacagaggggctctctaa

SEQ ID NO: 517294 - DNA, 472 bp, Homo sapiens
gcacgagatttatattgacaatgtattctaacgtacacaagttcactaagagttgtgtaataaagaaataaatctactgtagtcaatataaacatcacgatgtcaagtcagtaaactaaacagagagatgagatttcactgaaaataccacttcagtaattctgatggagtctaaggacaaacttttctgtctttaaaaaaaaaaaaattcatgaattttcactaacgattatcaagaaatatttcaatactgacctaaatagaattctgggggaaaaaagcaaatagcacatttatatttaagtaccttttaaacaaaaatatttaaactggtttgatataatttcaaattatatggtaatgcttttctaaagaagtaaacttctgagttttttcctagtaagtgaaaccaagttctagactaggtaaacacagagctgtccaaaaaggaattggatgttcttaacaaaca

SEQ ID NO: 517295 - DNA, 772 bp, Homo sapiens
  misc_feature (72)..(72): n is a, c, g, or t
atggggcccgggtccatggggtttcaaaagttggaagaaacccgggggcttgcggtttttaagcttccgganatttgggctcataaaactctaggttaagtttccaagtaaaaaccctactgggttcagctccccatagaaacccaagctccgtcaaagttgggatgcgccttggatagattaaaaaggcccagtggacggttggttttaaaagtgccagtgtgggattttagggcctttgcgggccctccgatcaaaggagggaaaactgttttgggggttttgttttttttggttttaaagcaattggctttttcttggaaagtaattttcctatggcatgttaactggggcccatcgggtaacctgtttggtgagcaacccacaattgggatgagttctagggacatgggtttgctgactttggggtaaaccactttgttataatacagtttttgccccaaatgcatgtgacctcttcaagggcccaaagtggcttaagaaggaaaacttccaactgggcctgggggttccaaacagtcattcccgggttaaatgattcgcagcctagggcatcaaagccccgcctccccaaagacttaaatcagagctttgtcctggtatgataaaattcctttgcctggaaaaagaaatgcttaaaaccagtgtttaaaatttttgggccgatgacccaagccattggcttggcccaaaaaaggtaagggaaattaacctttttccaaatggtaaaaagaaagtaaaaaacaaaaca

SEQ ID NO: 517296 - DNA, 384 bp, Homo sapiens
  misc_feature (241)..(242): n is a, c, g, or t
  misc_feature (352)..(353): n is a, c, g, or t
cgaggcagcatgattgttacaatgttgtgagaaaatgctgattgttgcagtgcatgcaatggttgtccctgcactaccatgagatgtggccattcacatgccttttccacctttaatgtggaattgcggaacaaatggctacgtgggaacttgcttttattgtcatgcattgccactccatgtgaccccctgtgacttcaatgccacctgaaccacatcatgatgtgcaccacatgatgcnnccccctcatgccttgacatgggcctccctgcatgtggcagacatgatgcctcatgcctcatgctgcatgggatggcaactgatgaatccaatgactgccccatgcctgcnntctcctcacatgtctctgtggcccctggggt

SEQ ID NO: 517297 - DNA, 1011 bp, Homo sapiens
tccactactggtgtgttcacgtacgtatatctagaggcttaacatgacattctgaagtagaagatgtgaaaatgtgtgccttgctttgtgatcgacaacaagacatctgttcgcctgtctgatgtgacataggatattggaccacatgacacgatttgctcattactgatctcctgtattactccgattgtccgtgctcctcatggttccgaagtaacgtctagtgtactcggtggccaatgaactatagcgagatttattgcaccagcataccttgtcatcatgctggggaccctactcagtgttgggcgacgcataggttacgttaaaaactcacgtgtttcgtacaaggttgaattgcccagacacaaccttgggagcatactctaaatatgggtcgtgagatctcaatagggacgaatgtggcacgaacgtgcccctgagggcataggaacctactttgagtcgttgcgtctggccgacagcactcaatgtggattctttgtgccttttagggtgtacttcgcttgaagttacccgggtccaaggggtggagctcgagtctcgtttttcaagtgagtggcctaggaggtgggtccctagtaggtgacctaggaccacttggttgatcttgaccgaccatgttgtcccttaggagtcaagaccccttggggggctatcatgtgtgtcccctttacccctttaggttgctatggttggcacgggcgctctcgagcaagagggctgctgcacggctcacggctcgatgatcaacctgcaatgtattgctgcagagtggtccggaggacggtgccgtggacgctttggtctaccactggaggggtttggtctccgcgttggggagccttggttccccgaattggaggattccccattagtgttggcccagaggttgcccggtcccctcgcctgggttggcacggcctcggcgggtccccgcgggacattggggcccgcccctgttccggcttttggcggcaacatcttctc

SEQ ID NO: 517298 - DNA, 127 bp, Homo sapiens
tgagcttgcgttgtggcatgtgcctattatcccagctactcaaggcaggagagttgcttgaacccgggctgagatatgcaccactgcactccagcctggtgtgacagggcaagactccgtctcaaac

SEQ ID NO: 517299 - DNA, 483 bp, Homo sapiens
  misc_feature (22)..(22): n is a, c, g, or t
  misc_feature (53)..(53): n is a, c, g, or t
  misc_feature (464)..(464): n is a, c, g, or t
  misc_feature (475)..(475): n is a, c, g, or t
ggcggatcacccgaggtcgggngttcgagaccagcctgaccaacacggtgaancctgtctctaaaaaattagccggcgtggtggcacatgcctgtaatcccagctactcgggaggctgaggcaggagaatcgcttgaacccagaggtagaggtcgcggtgagccaatatcgcgccaatgcactccagcctgggccacaagagcgaaactccgtctccaaaaaaaaaaaaaagaaaaaaaggattcatgacctaattacttctacctgcttagccatctgcgtgatccatctttccatcatggtttcaagcaagtcttattattctgttgctttttttcctacagcagtatttcaatgctgtcacacaggttaactctcccagctctatttgggaagtctgtattaggacaggcaacaaggcaacaacagacttattcactggactacattttcccgggtttttnccaggcattanttaaattc

SEQ ID NO: 517300 - DNA, 374 bp, Homo sapiens
  misc_feature (101)..(101): n is a, c, g, or t
  misc_feature (110)..(110): n is a, c, g, or t
  misc_feature (116)..(116): n is a, c, g, or t
  misc_feature (143)..(143): n is a, c, g, or t
  misc_feature (164)..(164): n is a, c, g, or t
  misc_feature (269)..(269): n is a, c, g, or t
  misc_feature (323)..(323): n is a, c, g, or t
  misc_feature (366)..(366): n is a, c, g, or t
aatgaaagtttgcccaaacccaaggttgaaaacatttactgggttaataaagaaaagaaaacccaatagaaaagaataagagcccaggagtggtctctcanacctgtaancctaanactttgggaggccgaggtgggcggatnaccacctgaggtcaggagttnaagaccagcctggccaacatggtgaaaccctgtctctattaaaatacaaaaattagccgggcatgatggcaggtgcctgtaatcccagctactcaggaggctganacgggagaattgcttaaacctggaagacggaggttgcagtgagccaagatcgcntttactacactcccagcctgggtggctgagtgagactctgtcncaaaaaaa

SEQ ID NO: 517301 - DNA, 303 bp, Homo sapiens
gactctaaaggatccctgtgggtacacataaatctgtttccttctttgcttccctgtgtgtaatattactttttgctctggctgctatttaagatttctctcttgctaggcttgaactgtttatgatgtgcattggtgtggtttactttatgtttcgtgtgctagacattgcgttgagcttcttggatctgtgtgcttacagaaatcatcagtttagaaagctctcagccattacttatgtaaatattttttctgcctccttctccttaacatataattatctgcttattagaccattttatg

SEQ ID NO: 517302 - DNA, 173 bp, Homo sapiens
gttatgcccagaaatggggtcatgcatgtggacgagtgtgtggactttcacagattgtggagtgccatgcagtttgtctactgcattcccgtgggacacacgagttcacagtcgagcagtgctttggtaatgggctacactgggctggctgtatgatcatcgcacttcgtggg

SEQ ID NO: 517303 - DNA, 265 bp, Homo sapiens
gctgtgactggtcccagtgacttactacgttattggttgctgtgggtctggtcgggcctggatgctcgaagggagttatattttctctcctattgcatcccaggtggggagggagggaggtttcagactccagtttctcccttgcgcttttattcccacgcctccttggccccagtatgagtgtagggaactctctgccagcttcctgagttctgcctaaagatggcccccagcactggttggggacaagggccaaattggtgac

SEQ ID NO: 517304 - DNA, 868 bp, Homo sapiens
ccggttcggatggtgcccacccccttttatgagtggtctcccccccgccataaaccctttgtgggtgccttcttttcggaagggtgacccccgcgatgttgtcgttagtttggggggctctctcctcgacttatatacagggaggcacggtctccatctctcgtctggttggaccgcccacaatagatttcttggtggttcccgccgcaccccgccttcggtagggagatattgaacgccccctctcgcgggatgagtgatgctttctcgcgggcggaccgtgggttgttcagagccacgccgcggttcgctctcggttcggcacccaccattcagtccccaccccagcgtgggtccccccccgggaggagcctcactagatatcacgcccaccaccccctgtgggcttccccccccagatgacggtgtggctatattcccacagagatggttttgtttttctcccgacttaacccccgcacaggggccacattttttgtctgtcgcccagcagatgtgtttcacaccagccaccacgtgtatagcttgtgtgtggtccacacacatgtgggcctcccctcactacctcgcccccgcgtggacaccgcctgtttggtttgtcccacagttcctcccacagcggggccacacgccacaccacgcggcctgtgtgtgtgaggatcacacccacactggggaagctacaagatgcacacggagctgctttgttaaacttacattttataacgctgtgtacccccgcaggctgtttttcttccgcggaaagttgtgcgacccacgcccctttggggggcggtgggcacccgccccacacatattctgatccgccttcgcggcgatcatgatc

SEQ ID NO: 517305 - DNA, 160 bp, Homo sapiens
cttgctggagctgtcagagggagaggaagatgatggtaatgtaaattacacagaggaggagattgattgactgttgaagggaggatgcccatcatatgagcagtctccttggggaagatcatggtgggacattttgagaagggagaaagagggattaaaa

SEQ ID NO: 517306 - DNA, 143 bp, Homo sapiens
  misc_feature (80)..(80): n is a, c, g, or t
agaaggagacaaaacacctcctctgtaatagtacctcgaatggattcagctttactcctctataactcatcttcacaccngcatatttaaacaaactaacaaaatgaaatactaatagtaaaaaggctgacccatgtggcttt

SEQ ID NO: 517307 - DNA, 405 bp, Homo sapiens
gagagagagagctactctgaagatgacgaagactatttatgcagtgaacaagcatcattagcatgtggcactatgcttctcatcttggccagcccgactattggcttgatggagactctcgaacattgtatcctatgcactaccaatgactgcgaagacaactcggcagactctgatggctgagatgaacgactgtccgggtccatagccctactattgttcccatgaccagcctcttataatctgagccagtccagggagatcaataacactctcaacttgtgtatacgcagagctttcattatgaacaactgagactacctaattcccaattatggaacttcattcgactagaggccctcggaggctgtacttgtacacatatgcacgtcgatgtctggcggc

SEQ ID NO: 517308 - DNA, 311 bp, Homo sapiens
aaaaaagggcatatagtatgctctgttagtaaaagttctatggtttgataacaaataaccaacctcagtgattagttgtgctactaaaaagtaatatagttgagtgtggtggctcacacctgtaatcctaacactttgggaggccgaggcgagaggatcacttgagtccagcagttagagaccagcctgggcaacacagcaagaccccatctctacaagaaatacaaagcttagccaggcctggcagcacatgcctatagtcccagctactctggaggctgaggtaggaagatcacctgaacccagggaag

SEQ ID NO: 517309 - DNA, 200 bp, Homo sapiens
ttttatttatattatgtatatatatttatatatatgtatagatattgtgtacatattttatatatttatatacatatttatgtatatatatatttatatattatgtgtatatatatttatgaatatttatgtatattatgtatatatgtatatatatttatattcttccatctgtattcacttaagtgggtagtcacaga

SEQ ID NO: 517310 - DNA, 112 bp, Homo sapiens
ccccccccgcgggggggggggttttttgggggggggggggggggggggggggtggggttccccccttttttttcccccccccccccccaaaattttttttttggggggccca

SEQ ID NO: 517311 - DNA, 361 bp, Homo sapiens
ggcccttttgaaaaatgaattttttgataaaaagaatttttgttttagccccggtgaggcccataaggggttttcaaatttgggggataaactgggtttaaacctttgggacaaagttgggttcccttccttttctggggaaggtagcttcccctcccttccaggtttttaaaccatttgccctagggaaagcccttttaaaagttccttttgaaattttttccttttcccccagggaaaaaattgtggaataagtagtttttttgaaaactggtggggttttggccttccttggaaattgaaagggggtccccttcctgtccaaaatgttggttttttttaaataaaatggttttgccta

SEQ ID NO: 517312 - DNA, 943 bp, Homo sapiens
  misc_feature (553)..(553): n is a, c, g, or t
  misc_feature (648)..(648): n is a, c, g, or t
  misc_feature (656)..(657): n is a, c, g, or t
  misc_feature (667)..(667): n is a, c, g, or t
  misc_feature (673)..(673): n is a, c, g, or t
  misc_feature (681)..(681): n is a, c, g, or t
  misc_feature (688)..(688): n is a, c, g, or t
  misc_feature (692)..(692): n is a, c, g, or t
  misc_feature (696)..(696): n is a, c, g, or t
  misc_feature (699)..(699): n is a, c, g, or t
  misc_feature (701)..(701): n is a, c, g, or t
cagaagaagggaaggcgcgagtgaggaaaggaggtactgtagctacacttctggaaaattcagtatggacagtctccgacttaggatttttcaactttaggatggtgtgaaagagacacccattcagtagaaactgtacttcgagttttgcattttgatcttttcctggcctagtgataatgtggtacagtacactcttgtgatgctgggcagcggcagcgagccacagctcccagtcacccatgtgatcacgggaatcaacaacccatcctctaccgtgtactgtgttgtcagctttttggatattgtgttttgtgttttcacattccatcatgtctacaaaatgtccatcagtgtctcctgtttctggtgagatgaagaagaggaaggcaattactcttgaaatgaaactcaagataattgcccagcatgaaggtggcaagccagtaatggccattgcacgtgagttaggactttggaatccagatttcaaccatcttaagggataagaagcaaatcagtgatgcagcgaaatcgtcagcatcagttaatncactgtcatcacaaagaaaagggctggacaattgatgatatggaaaaattacttgtatgtggatggaagaacaagatagagaaggtatacattanctactganngatcagctanggcaanaagttttnaatatgntaanagancgngncagtgatcctacttataccaagtttaaagcacgtcagtgatggttcaggggttcaaggcggcttacttcaccagtcacgtgccgcggggcacagtaggagaggcactcaggacagcgataggatagtcaaaatcgcaccggagtgccgcaaaacaggcgagaggaaaacaggcacacaagagggtgacgggccagaaaacagcgcgaagactagaacgctttctccgctcgcacttctagct

SEQ ID NO: 517313 - DNA, 456 bp, Homo sapiens
  misc_feature (44)..(44): n is a, c, g, or t
  misc_feature (374)..(374): n is a, c, g, or t
  misc_feature (399)..(399): n is a, c, g, or t
  misc_feature (403)..(403): n is a, c, g, or t
  misc_feature (430)..(430): n is a, c, g, or t
agtaaataccccgggctcataccgctgtgcctgctccgaagttntcactggtgatggctttacctgctcagatgttgatgagtgtgcagaaaacataaacctctgtgagaacggacagtgccttaatgtcccgggtgcatatcgctgcgagtgtgagatgggcttcactccagcctcagacagcagatcctgccaaggtgggtcaccagggattccaactcattttcaagttggatcaaccacagtaaatgaaaccacaacaagggctggaacaagctccacctgggaaggcaggaattacattaggcacatgcttgcactattaaaagttcatttcgttttaagcgtgggatttttttttggccggaatggantaattgatggatgggcgggttttcntctntttatggaagtttttcccggggcccangagccattagtttgggagttttggat

SEQ ID NO: 517314 - DNA, 623 bp, Homo sapiens
actagataacggatacacagaccgtcctgcaataaacgctataataaaggttgcaacatacatgccgctaatcctgcatcctttcctacaatcattataactcgcctatacaatcctgcttcttataggatgaacacctagcaaaacaatataaatttgctgaaaaacaaaattacaaacaaatgacagaacttaacagaacacacagcattaaaaggactaggaagagcaaggtcttaatacccagtacaataaagccaagaattttctaatgctgaccagtctgaagactgaaattaaatatcagttctttttacttctctaggagtgattctagctcctcttgcacagagctgagttgctccttttctcggtcttcctttagttagagctcatccagtacagcctgaaatctgttcttgagagccagattttccacttacatgatgagatcctcttgtcgtttcgccctgtcctgggtctcttggagcttgccattcatgttgtcaatctgcttctgaattcccataaccagctgattggttccttcattttcctggtgctgttcatctgattcatttagcttgtactgtagctgtctctccagatcttcctccgtgtca

SEQ ID NO: 517315 - DNA, 805 bp, Homo sapiens
ggtcttcgcagatagacggacagaggagtcgtagcggtcgagggttgtgtggctccgagtgtgccggtagagtatgtttatgcataataagtggataattttacatgatacaatgactagatggcgccaattcgtttaagagcgagaagtacataaaacgtttattaaaaatctgtggtatcttgtgacggagcctatccaaagaggagcatgacatattttaacacaagggcgtagatgaacattttccttaatcataataagatgtgaggaatccatgagaagatcaaatgaactttatggacagggcgaagtatgtaatgaaaagaggtagaagggttgtagcttccggttagggaaagtacagaggtatgaagacaacgttgtattattcagatgccatacgagtagactagtgtgagtcagtttagtacttttaatttagctatcaggtgccagcgtgtttatgtataccagatgtcgggaaataatgctaagttaaaggtgggaagatatacattgttgtgtaaaaaattcctgaagtggcctaatgaaactaaaggtaaggtttcaatttcctagttccataaccgggaggacaagtatcaggcacttttatgctcagtttggttaaggaacattgcgaaatacggttatatttaaccggtgattactgaagtgcggccccctttggagtggcaccatagtcacttatccctatagtgaaggggttcacccaaatttgcgcgtttcccctttctggcgaagcctccagcgttacccaattcaaccgccctcaacgagg

SEQ ID NO: 517316 - DNA, 342 bp, Homo sapiens
  misc_feature (76)..(76): n is a, c, g, or t
  misc_feature (112)..(112): n is a, c, g, or t
  misc_feature (151)..(151): n is a, c, g, or t
  misc_feature (173)..(174): n is a, c, g, or t
  misc_feature (336)..(336): n is a, c, g, or t
ccccagaaagcaaaatttaagatgtaccacaccttggaggctggcccgtggcggcttacaccctctaattcccagnacccttgggaggatgaggcgggaggatggcccgaancccaggggtttgagacccagtctgggaaggatggagaanccctgtctctacaaaaaatttnnaagttagccgggcatggtggtgcatgcctatagtcccagctactcgggaggctgaggcaggaggatcacctgagcccaggaattcgaggtggcagtgagctgtgatcttgccaccacactcccactccagcctcagcaacaaagcgagaaagtgagaccctntattaa

SEQ ID NO: 517317 - DNA, 248 bp, Homo sapiens
agaggattcgcatcccggttctgggtattcggggtaagatctgccctcctggcgggcacggtggctgacggctgtaatcccagcactttgggaggcgaggcgcgtggatcacgaggacaggagatcgagaccatcctggctaacatggtgaaaccccgtctccagtaaaatacaaaaaattagcagtgcgtggtggcgggcgcctgtagtctcagctactcgggaagctgaggcagtggaatcgcttg

SEQ ID NO: 517318 - DNA, 523 bp, Homo sapiens
gaggatccatgagtgttcttcagacttgcgtgcttggtctccttcatcctcatcttcacagatatcagtcttttgtcctttatacgtcttctttatcttcttcatcctcatcatcttcatccccttggtcatcactgtcatcgtcatcatcatcgtcataatcacagtatcctcccttccttctacgcttgcatcctggagtgggtgtgccacgggatgctgctctgctcccagatcaatgccaggctgaagtgtctctttagcctgttttcttagcatgaatgattctgagcttgcggagttgaccttctaccatccatttatctctcctcaagtcgtcatataatcaatgtccttgtcgatatcactgagcatacacatgctgcatgccggttcatcgatcaggtacgccaggactgaagcttcctagtgctgacgtgagggcctgaaaagcttgggtctgcagactatcagtaggctcagtttgtccacagtggacttccataaatatctgtaaaatctc

SEQ ID NO: 517319 - DNA, 904 bp, Homo sapiens
gaggtttctcgtgcctgaagaagcgtcatacgagaccggtttgttttcgcgtggcccatgtgtccccggatgcttgtgtgcgagtacatgatgagcaccgtcggtaatgctggtaggcacgctggtacttgacagagaggatggcgctgtcgacctactaggtctcccatgaggaagcagatagagcggaaggctccccgtggcgtttctgaaagcagagtctctcaagctgatgatgaagcgctccagacttcgtcgtggacgaacagagttggtggatttattggtccatcgtgaactgtccgacgtggtttgtccatcgatttagccatagagcagtcctggacaaacgcttgtgcagcagtacgtgtagagtcgttatccacatgagcatgtactggccgtcgcgaaaggtaacttcttaagacagagcagaggttagaagtcatgagaccatattcttgaacaggttatgatgcattcttgagggtgggtaacagatcataatggaccattttttacaacgatctagtcaatatgggattattactagtattggctatcacctaaattgtcgcgtgttaaccaaaatggacttcctttttggaggccaccctacagcccagaaagagatttgaggacacttcgttgggggaccgcccggcccctaatttaaggaaccacatctggggtgacaaatcccctgatgtaccagttaagcaatacccggtgcgcaaatatacattggtgtcgggaggtgttcgaccacaattgaatggaagcccccgggggttagccatcggcgtgtgttttaaaaggaatcgcaaaatgtgagcgccgttaggggctggcaactcggctttttgaaaccacggggtcactgaggggcctgaattgaatttcg

SEQ ID NO: 517320 - DNA, 329 bp, Homo sapiens
ctttgagattgttattctgagattgtgtctttaagaattgagttcttgggccgggcacggtggctcacgcctgtaatcccagcactttgggaggctgaggcgggcggatcacctgaggtcaggagttcgagaccagcctcaacatggggaaaccccgtctctactaaaaaaaccaaattagccgggcatagtggtgcatgcttgtaatctcagctactcgggaggctgaggcaggagaattgcttgaacctgggaggcagaggttgcggtgagccgagatcgagccattggactccagcctgggcaacaagagtgaaactccctccaaa

SEQ ID NO: 517321 - DNA, 590 bp, Homo sapiens
ccttactgataaaagatgttacatctaccagagcgtattgtgaactgttgaatgttagagaatatgaacttaatgtagcaatatcgcatacccacgatttttcattttctacatactttaaaatctccaatggtgttgcacaagggttttaaaatcagctatgagctagcaattatgtctacaatgtcaccctataatcaaacaaaagaaattatattttgtaaaaagaaagtttatagaaatattattactattattattattatgtctttttaaaatgttgtatttaaaaatgtcttcttgacgcaaaatataatttcttttttgggaatgagacatgttcatgattcatgttttttcagtgctgcttttctttccagtcattgtttttattaaatatatgtgattcaaaatggttgtggggaatctgcattgagacattttctcatctccagtgtgatgatttagttggcgtgttctgccactcctgaatgatgggaaattcgtcattatatttgtgtgagtgtgtgtgtgtgtgtgcgaatctgcaaattagtgttttaataaattgtacatttaaggaaaaaaaa

SEQ ID NO: 517322 - DNA, 892 bp, Homo sapiens
  misc_feature (574)..(574): n is a, c, g, or t
  misc_feature (579)..(581): n is a, c, g, or t
  misc_feature (583)..(583): n is a, c, g, or t
  misc_feature (601)..(601): n is a, c, g, or t
  misc_feature (617)..(617): n is a, c, g, or t
  misc_feature (630)..(630): n is a, c, g, or t
  misc_feature (636)..(637): n is a, c, g, or t
  misc_feature (641)..(642): n is a, c, g, or t
  misc_feature (670)..(670): n is a, c, g, or t
  misc_feature (681)..(681): n is a, c, g, or t
  misc_feature (686)..(686): n is a, c, g, or t
ggtcactcatggtgccacctcgtgagatactgaatcccctggtcgaacgttccgtgtatactatgtcacggagcggctagcccgggccagcctgcgaagcctacacccgccaagggtatatcttttcagtcgcttgccggctgtctgatgaagatgcatggcagactggctcgcttccattcggtgtcctcgtacgtagatagaacacaagagtcccagttactgccgaaatgtggtagctattgtaacctgtaaggtctctagcatcaaattcacgctttgccaaaggtacatcattcctgtatgtggaggtccatgcctcttaagaactcttttcgaggaacatatccgcactggaaagatgtccgagcaactgacgaaagacaaggttgcgatttataagagtttccgcccaggtgacattgtcttggccaaagtgatctccttaggtgatgcacagtccaactacctgctaaccaccgccgagaacgagctgggagtggtggtagcccacagtgagtcaggtatccagatggttcccatcagctggtgtgagatgcagtgccctaagacncacannnanagaattccggaaagtagnccgagtacaacccganttcttgcagaccnaagaanncacnntttaccctatggaagggggtaagctgtncctgacgtatnacacnaagatggtgcgatcaggatgcagacacgcgcgcgacgaccgacactcacttacgagaacaatcttcaagtatacgcagtagatggacaggtttatgttatcatagcaatggagtttcattgttcagaatgagaatatcgtatctgatagaagggtacatacaaagagaacatgatggttgtgataagagccgcgtataataatgaa

SEQ ID NO: 517323 - DNA, 353 bp, Homo sapiens
agcgtggggtcaagatggacggcgctcaggttctgcttttacctgcggccagagccccattcatgccccggtgctgagcggcgccgcgagtcggcccgaggcctccggggactgccgtgccgggcgggagaccgccatggcgacctggaaaagctgatgaaggccttcgagtccctcaagtccttccagcagcagcagcagcagcagcagcagcagcagcagcagcagcagcagcagcagcagcagcagcagcagcagcaacagccgccaccgccgccgccgcgccgccgcctcctcagcttcctcagcgccgccgagggacgcgtgcgcctcagcgagcggcgcggcggcgg

SEQ ID NO: 517324 - DNA, 147 bp, Homo sapiens
catctagcgatcccgttacgcagacgtgaagtctgtgcggaggctttagtacaagtgacattgggatgataagttggaatattgagaaccaggagaggaagcacaggacgtatgtctatgtgctcatatgtcactgacagtgctggc

SEQ ID NO: 517325 - DNA, 89 bp, Homo sapiens
ccctgagatgggtagaaaagagaggtgtcgaagagaagtcctgaattacctgagagactgaaaggaaaagggtagagagaaatagtgga

SEQ ID NO: 517326 - DNA, 398 bp, Homo sapiens
cattgttgaaggcagtggcagatgttgcagtgagctgagatcacaccactgcactcgagcctgggagtgagagactgtctctaaaaaaaaaaaaaaaaaaagaaagagaggaatgaaagtccctgaacctcaggaagctcaagtccaaagaggaagaaacttaagtagtaccatttgataagtgaattgggaacgtaagtacttgatattcaaggaatacagagaaagagaatgttatacaaatttggggatggttaggaactgcttcccagaggaaatgatttctcaaacaaagtctgtagtttacatttatggttctctctttgtattgtacattctatggattttgacaaattgttttgatgacacttttccacccttatagtatagaatagtta

SEQ ID NO: 517327 - DNA, 851 bp, Homo sapiens
gacagccattgcagtactattgagctccataaaaactgtgccggggcaagtgacgagccggacgggctgtgagcgactctgtgtcctcgtctgagggaagaaataactagacatggtgcgatgcgagatcctaacgaacgacctgacgaggccaactgtcctcaatatgtcgactttgtgtgtgcaaaacttgtcgggaggagcataagaagaagcacccagatgcttcaggtccaacgttctcagagttttctagccaagtgctcagagaggtggaagacctagtgtcgtgctacgatgagaatgggcaatatttgatacgactcatggcgagaagcgggacaaggcccgttttgtaatagtagacattggcaatacgctatatccactccccaaagggggcagtacatcaaaagaagtgtctataggatcccaaatgtcacccgaagagggctcctttcggtcgcattcgttcctcgttcgtgcgtctgaggtatctgcccagcaagatcatcatgcagaaccatcgcgtggcgcatgttccatatgcgtgatcgttgtgaaggaaactgggagagtatgtggacatacatcactggttgcgagattgacaaagcagggcttatgatagagaaggctgtgaagctgaaggacgatatgcgaaaaggagtataggtagcatatcgagtctacactggaagagcctttagtgcagcaaacacaagggagttgtccatgttgaacaaaaatgcatgattgagaatggagacggacgaagatgaggccagaatgatgaagattgcgtgagggaggaggaagattgaagaagaatgcagatgggataacacgtg

SEQ ID NO: 517328 - DNA, 216 bp, Homo sapiens
gactcataggggctggggactggacggcgacaggcatccggcgtgcggcggcggcgcgtgcttcctgcgagtacgcagatctgcagccctccgctcccgcttgatcttcctcttgctgctccgtgatgccgtacagcaaggcctcggcccccggtggcctccctgtcctgtgcttccccccgggcaccatgcgctcgccccccggctacccgcgag

SEQ ID NO: 517329 - DNA, 896 bp, Homo sapiens
  misc_feature (2)..(2): n is a, c, g, or t
  misc_feature (78)..(78): n is a, c, g, or t
  misc_feature (99)..(99): n is a, c, g, or t
  misc_feature (112)..(112): n is a, c, g, or t
  misc_feature (114)..(114): n is a, c, g, or t
  misc_feature (121)..(121): n is a, c, g, or t
  misc_feature (126)..(126): n is a, c, g, or t
  misc_feature (165)..(165): n is a, c, g, or t
  misc_feature (251)..(251): n is a, c, g, or t
  misc_feature (356)..(356): n is a, c, g, or t
  misc_feature (386)..(386): n is a, c, g, or t
  misc_feature (537)..(537): n is a, c, g, or t
  misc_feature (575)..(575): n is a, c, g, or t
  misc_feature (589)..(589): n is a, c, g, or t
  misc_feature (596)..(596): n is a, c, g, or t
  misc_feature (598)..(599): n is a, c, g, or t
  misc_feature (606)..(606): n is a, c, g, or t
  misc_feature (687)..(687): n is a, c, g, or t
  misc_feature (690)..(690): n is a, c, g, or t
  misc_feature (692)..(692): n is a, c, g, or t
  misc_feature (694)..(694): n is a, c, g, or t
  misc_feature (715)..(715): n is a, c, g, or t
  misc_feature (730)..(731): n is a, c, g, or t
tngagtcacgccttggcccatggcaccagatccccatagccgggaggcccgtcagcagcgctttgcccacttcactgngctggccaatcgtctctgtgngaggagatagttnantttgctnaaacngctaccccggctatcctgcagctcagccggggaggcacncagattgcccctgctgagagaccctctgcgatcgagagtgatgctatctggagacattctcggaaggtacaaccctgggaggtgangaagtttcccctacctcaaggattatcagttataaaccgggaagactttgccaaagcagggctgcaagtggaattcgtcaaccccatcttcgagttctccagggncatgaatgagctgcaactcaatgatgccgngtgtgccttgctcattgctatcagcatcttctctgcagaccggcccaacgtgcaggaccagctccaggtagagaggctgcagcacacatatgtggaagccctgcatgcctacgtctccatccaccatccccatgaccgactgatgttcccncggatgctaatgaaactggtgagcctccggaccctgancagcgtccactcangagcaantnntttgcantgcgtctgcaggacaataagctcccaccgctgctctctgagatctgggatgtgcacgaatgacgtgtctgtccccatattntcngntnttcttggccggatggctgagncctggtgctgcctcnntagaagtggacagagctgagaagggcgaaacattcctgggagctgggcaaggagatcctcccgctggcattaagacagagagtcaagacgggtaaaacaaagagaagatcaaagataagaatctagaaaataaaatacatacaaaaaaaatacacatccgtgggg

SEQ ID NO: 517330 - DNA, 107 bp, Homo sapiens
gggggcccccgggttttttttcccccccccccccccccccccctggggtttttttttggttttggggggggggggggaataaaaaagggggttttttgcccccggta

SEQ ID NO: 517331 - DNA, 499 bp, Homo sapiens
  misc_feature (2)..(2): n is a, c, g, or t
gntgttcaggaacatagtctgggctagaagttagtgccagtttctcaaaggttctacagatttaaaaagaaaaaaaagggctggttgcagtgcgtcacgccctgtaatcccagcactttggcggccaacgcaggctgatcacctgaggtcaggagttcaaggccagcctgaccaacatggtgaaaccccgtctctactaaaaacacataaattagccgggtgtggtgacgctcgcctgtgatcccagcagtctgggaggccaaggcaaggttgggatcacttgagggtcaggagttccaaggaccagtctggggcaaacattgggtaaaaccccatcgtcaccaaaaaacatagaaaaatgagcccaggcatggtagcatgttgccctatagtcccagctactcgggaggctgaggagggagaatcactgcaacctccgcctcctgggctccagcgatccttccacctcaggctaccaagtagctgggactacaccatg

SEQ ID NO: 517332 - DNA, 769 bp, Homo sapiens
cggtcacgagggctgtgtctcaggtgatacgtcactctgtcggtacctcgtgcaattgcccctcacagcatggctgtcgtgtctacggcaactccacaggacccagtctgcagctccagcaggtggcgctgcagcagcagcagtcaacagcagcagttccagcagcagcagccaggcggcgctacagctagcagctagcagtcagcagcaacagcagcagttccaggctcagcagagtgccattgcagcagcgagttccaatgcagtagtgcagcatgcacgcagcagctccagcagcagcagcagcagcagcagcatctaattaagagttgcatcatcaaaatcagcaactgatacagcagcagcaacagcagcttgcagacgaatagacacagctgcagctccaacaacagcaacagcagtcagcagacagcagcagtcagcagcagcagcaggcttatgcaggcccagccacaattcagcagaccaccgagtgcagcagccacagcctccggcctcccattgcttcatgccccagacagctgcagcagatgcattgacacatagcatgcgaccagcagccgtcaccaacagccccagtcagcctccgattgctcagaatcaatcatcacaactcccgccacagtccgcagacccagcctttggtgtcacgaggcgcaagtctcgctggacatgttgttcccaacacactgagtttgtcgactcgtggtggtgccagcccagtgagccagtcacacagcagacacaa

SEQ ID NO: 517333 - DNA, 200 bp, Homo sapiens
tggattatatacaagatacaactcagtcatccctcccccacgtaccctttggttacagaagcttgtatttaaagtctgtgagtctgttttgtgttgtaaataagcttatttgtggagctcccgtcatggctcggtggttaaagaatccgactaggaaccatgaggttgcaggttcgatccctggccttgctaagtggggt

SEQ ID NO: 517334 - DNA, 357 bp, Homo sapiens
cagccgcggagtctccagcgcccctcagcagatccccgctctcccgggcgccgctactcacacaggcttccagcgccacggggtcctctgtctgctgcagcggcggcggcacagagggaacggcgactgcagcccggccgcgtctcccagctccgtgcccgggacagatcggagaagcaaaggagagagacgccagctaggaggaccgcccggacgctccactccgcgcacgttgcctcggctccccatacggcggccccaggtcctttgctgccacatgatgtcgtatttataatatgtggagttgagaacatcacccagcttccccaggagcttcctcagatgatggctgcagca

SEQ ID NO: 517335 - DNA, 334 bp, Homo sapiens
ggcatcagtaggtattgtttcgatatactagtatggggataaggggtgtaggtgtgcttgtgtagagtgggcagggcattttaatcttagagcgaaagctatatcactgcgcccgttcataaggggatggcatggctaggtttatagatagttgggtggttggtgtaaatgagcgaggcaggagtccgaggaggttagttgtggcaataaaaatgattaaggatcctagcttactacaggagcatcaggttcgtcctttagtgttgtgtatggctatcatttgttttgaggttagtttgattagtcattgttgtgtattgaaccggatagcttg

SEQ ID NO: 517336 - DNA, 912 bp, Homo sapiens
cgcagtggctcacgcctgtaatcccaacactttgggaggccgaggtgggtggatcacctgaggtcaggagctcgagaccagcctggccaacatggtgaagccccatctctatcaaaaatacaaaaatttagctgggcgtggtggtgggcacctgtaatcccaggtatttgggaggctgaggcaggagaatcccttgaacccaggaggcaaaggttgcagttagctgagatcgcaccactgcactccagcctgggcaacaagagcgaaactccgtctcaaaaaaaaaaaaaccttaatgtaaaccatggacttgggggggctaacagatgtctgaatgtgggtccatcacttttaacaagtgtgtaccacttccgggggggatataatatatctggacacatacatataacctggagaaatccttccatttcggataatctaccaaatcacagattctgaacattaagttttcacatacaagggcctataggtaccacacaagatcctctttaaaggaacctactctacggtgcccaaaatggtttcacatttacagcaggtgaacccatccaaaaattacgtacagggtcaagttcccacgaagttgtggacttctcctagaagaacaaggttttatagagcgcagttataagcgtgcggacacatttcttatgagacagaacccacaaagttagtgggactagtgcccactttgtaagtacccaacaagtgaaccggggcagctgaggccaaaatacctagaggaactttacagtcttgaaacacgtccttagagggacataactcccatacaggggctaggggactcatacacctctttgcccaagaaacccctggtaggcttagaattgtcagcgtgacccaccgttagtgtcaaggtggagaaacccc

SEQ ID NO: 517337 - DNA, 349 bp, Homo sapiens
tctacaggatcttaacacgcatctaagaaaagaaactgtagtgggcagtgctcacgctgtatccagagctgaggcaggcggatcacctgaggtcaggggttcgggatcagcctgaacaaatggagaaacctactgcaatacagagttagccaggcatggtggtgcatgcctgtgctcccagctgctcaggagctgcaacaagagcaaactcagctcaaaaaaaaaaaggaaagaaaagaaagctggagctggtggcttaggccatcacccttcccttggttggaactactggacagacccttttgagatgtccctgtggtgctgtggagatgtgtgtaggggcctaagc

SEQ ID NO: 517338 - DNA, 319 bp, Homo sapiens
gctcttacagtgggacacaggaagagactcactctggtgattcacagcaaaccagtaaacaaaaacggaaataaataaagtgatagtaggggtaggggcgtaaacgggagtcatgttccccaaatcagtgcatgacagaggggtaccaaggacctagaagctagggctacacactgactacctcccatacagaacgagagtagctagaggcctaccggaacatggcgagctagtagcacactatagaccacctaacatcctagacgcagccatagcctatacatagctacctagacgcaggatagcacaaagctacaca

SEQ ID NO: 517339 - DNA, 741 bp, Homo sapiens
tgcagaagccggtgtactccgccctgcgtccctgctgcagcaacctggagctggagtcggatccctgaactgcaccctcgccatggactcgtgccctcagactgatcctgcataactggtagtgcctgatggcatgtgctggccccaccagacagcacatactgctgtgcctgcctaatccactgccctgagtggcatcgcgctggcctactggcaagcctcctgcttcataggctgcttgctagcccatacttacttactgtgcgcccgtgcgctacctgtacgctgctgccctgctgtgcgaagaatgcttcagacattgcctgaaacaatcaccagccgggatgcctgacctgcttccccatcatacgcacagctgcacactacttgtgggctctacctacttatttcaaaatattctacccaggagtacatcaacctacctgctgtccatgtatttacttacgtgctgggaatcctggccctgtcccacaccatacagccccttacatgaataagtttttatccagccagctataccaaatctgacagtaccagctgctacatcacacatgggttctggggaaaacaatggacggatgatcatcaattatgaatattgacaccaaggacctggtgtgcctgggcctgagcaagcatctgttggctgtctggtacctgctgaggaggcactggacttgccaacaacctttttggcctggcttctcccttaatggagtc

SEQ ID NO: 517340 - DNA, 149 bp, Homo sapiens
accttaaccttatgcaggaaattattagttcagcataaaaaatctgatgcactgcaagatgagaacaaaaatagagagggacttgcgagatggttattcagtgattcaaggcaattcgtcaaatatcagaactttgtgacttcactttc

SEQ ID NO: 517341 - DNA, 107 bp, Homo sapiens
gtagtctcacattcttctctatctacacatcgcacatactctgaaatcgaccacattatttgacacagactatcttgtaaactaattataataaaaactgaaatcat

SEQ ID NO: 517342 - DNA, 678 bp, Homo sapiens
  misc_feature (304)..(304): n is a, c, g, or t
caagtgacaaaaccttatcgtgtcattaccatttcaacaaaccccagaaagttggtgcttttccaaggagttttatcaacaaacagtcacgccagatccaggtctctatattataagctccccgccaccttcattctagtgagttgtaggaagttgcctccatcaacagttctcttctcgaatgttccttgaagcataccttagattggcagtagcagtggtggtactctccttcgagggatgatccaacgcagcaatctacaagtcgctgttacagtgcagctctcgttatcaaaaagtatcnatgtttctattttcaaagtgttcttaccatgcgtgtcatactagtatagtcacggcatagatgtctaacagatcatgtctgtatcagctttccaccagtctaggttcatacgtttccaagcaatcctgtagcaggctagcaaaacattagtcatgccgtatcccagacttaacttactgtgattcaggttacccttacctgtcgtcagctgtggtattataatcttacatacaagcttgcaagcaaaaatctcaggtatgagactcggcacgctggctatcgtctgtaacgccagcactctggaaggaagatatgtgtagatcacttcaggtcagtcttcaagacaactgtagctaacctcgtgccgaattcct

SEQ ID NO: 517343 - DNA, 321 bp, Homo sapiens
atcagagttcccctctgcgggggttccctgacagatgggtactgggggtgcttcaggcgagctgttaaggtatagtgacaggggccgctggctctgcagcaccacagtcatcgcgccaggccaggctggctcttgcaccccatccctgccggtgtcccgccactggggctccagtgcccactcactcaccctcctcctcaagggccgtggggtccacctccaggtcgtacaggccgagagctgcgccaggcggagcgcacaaagttccctagcagggaccggcagcccctgtctccgaatcttcaccgtgcggctgtagta

SEQ ID NO: 517344 - DNA, 161 bp, Homo sapiens
ggtggatgctgattacaggggagagaatttgactcgggatctctggattgactcgggaagtaattgaaataggaaggacatagaacgccagagaactagagttggcggataaatgtgccccagggaagctccaccatgccaggagtcttagtgtacaacag

SEQ ID NO: 517345 - DNA, 379 bp, Homo sapiens
gctgagattgcaccactacactccagcctggatgacagagtgagacttcatctcaaaaaaaaaaaaaaaaccaaaaaaaaacaacccggtagcattgtcccttccccactgacaaacttatcaaatccagaagctttagagtttcgtctctaattatttttctcctgaacaaaattacccaagtcaaaacaaaatgtatttttagaattacggcagcatacgacctgaattttgtgagtttcgtggctttatcttaaatcaccatttccctaaaaatggtttctttctccttagaaatgctggtggcaacttgatgaaacagccaaatgcaccagggcaggtcactttcccattacactgattccacaattaaaaaaaa

SEQ ID NO: 517346 - DNA, 928 bp, Homo sapiens
gctagacctagcccacaaacccactccgaccttactaccagacaaccttagccaaaccatgtacctcaaataaagctataggcgatagaaattgaaacctggcgcaatagatatagtaccgcacgggaaagatgaaaccttataaccaagcataatatagcaagtgcctaaccccgtatacctatctgcataatgaccttacctagaaataacttggtcaaggagagccaaagctaagacccccgaaaccagacgagctacctaccgaccagctaaaagagcacacccgtctatgtagcaaaatagtgggaagataaataggtagaggcgacacacctaccgagactggtgatagctggcttgtccaaagatagaatcttagtacacctttacaatttgcccacagaaaccctctaaatcccctatgtcacaattcaacctggttagtaccaaagaggaaccagctctatgggacactaggaaacaaccttggtgcgagcagtaaaaaatataacacccatagtaggcctacaacgcgccacccaagtaagaacaggcgaccaagctccaaacaaccaattagcctaaaacaaacccaaccactactcgatggactcctcacaacccaagtggcacacaacaatcacccgtatacgacgacatacggcagaaaacgtagaagaacaacaatacatcaaccgcataaagccgacgacaacataccaaccgaacctgacaaccaaacgcaaaggaaggagaaacacaccaccggtacaaaaacccccagggcaacccaaacagggcgaaccaaaggagaaggaaaaacaagcacaaacgagcgaactaacccgcgggcacaaagactcccagcaacacagaaagcaacaataccaggacaagaaacaggaggcaacaacagcgagaacca

SEQ ID NO: 517347 - DNA, 1492 bp, Homo sapiens
  misc_feature (1183)..(1183): n is a, c, g, or t
  misc_feature (1247)..(1247): n is a, c, g, or t
ggtcctctgggtgcgatgttccggatatccttggggtcgtgtccgggcggagctgtaatcccttgtgctgacgcgacgggatgccagcaagagctggtataattatcgtcgcgctgaagagggatcgattgggccggctgatgcctacgtatccggctggcgtgggtgatgcgtgtgtactatggatgaatggcccacgagatccaatcacagggaatactagagcctcatgatacagaggtgcatctcacgcagtgggctcagttactgagcaacgaaaagtccagtacccgtatcatatggatgctggtgtaatcctcttatttgggagatgagttactgtcaaggaagtcagtaggtgaaaccaattggaaggtggcgacgccactgaagagggttcgctagacgcgatgtacgacgagactcacgtttacgcacatatgcgatgctagtagtcctgtaccatatggttgagacccctctgggattgagacgattcccaaattagaccgtgggctctagggcaattttagaccaatgggacttggctgcgcagttgataagtaggcgctataattatattgacaatggagggagatctaacaacgcactatctgaaaggtgctgatacaatggaaactcaaaatcttaacaaaagacgatgggatttatgggccacaacatcggagttcaaagaagcggagagttgggcgtgttcgaaccaaggagtagagcggctttttagatttgtgcttcggagtcttcctttggggttaaaagttaccggggcgactctattcttgacacttgtggagcgacttgggagttcacttgaaggatcgtaataccttgtttgggagagagacgggcttttcaaaaaggagggacacaaattaaaccctttcccctttgttggacgccccctttcaacatagggaggggatttgctcctccacaagagaagcagcggttggggacaattttggacaggcaacaaaagaggaaccccacccccaagttttgtggtaacgaacacgggtgggcgcaagatttcgcgttgggccaaccagcggggacacgggagccccaaggagattcaaacacaaggcgacgtttatttaaggaacacagacatttgaaactctagagggtgtgtgttcttacccccagggaaatttaattnttttcacttacacgagccgtggcgtggggtctcaactacaacccacgggttacccgttggtccnctccacagttgtggtatcatccacgatatattaactacacaacaactcgtgcgggggcaccccaagatgtaccagggggctgcgggacaacacgaggcggctataattgaaacagtgctcaagtggtccccaatgacgctgtaaccgcatgaccagcagcggtgttgtgtctcacaaacgggtcggtagtacattgagccggggcccccccattagcggagaccgcataaatactgagagaccag

SEQ ID NO: 517348 - DNA, 391 bp, Homo sapiens
tatttccacaggagggatcagtattcttctgaagcctaaggggtctagaaagacttttttctagaagggaggaaggggtggctattgggatggcctttccggtaatagggtaggtagatcgtttcccactcagggaagatactctccctatccttgggggccaggaggctgggaattatagaacagtcgaggccagcggctctcatccacgggctctttaaacattttcctttcttccggccatcagtatggacacgaatggaagtacagagtttcagccagcagcccatcaggctgacaccacacatatggcttcgtggtactttagccacaccagtgagattggggggggcaatgggcccgggggaaaagtagggtacgagctcgaatt

SEQ ID NO: 517349 - DNA, 1060 bp, Homo sapiens
agcgggtttacactcctgacagcggcggcagcaggaggaggatcgggagtcgcgggaggatgggccgccgctaggctcgcactccggacagcgcctcgcagtgcgcagggtgggtgccccgggcctgcagctgtccgccggggcggcgcggccgggaggtggcgacaggctccgggctcgacagcctcagcccccggtccagcgcgcttaccgacggggggccgggccgaaaccaacacgaccgcccaaggtctctcgcgggcgggcagaacgggaaaaaactcccaagttcctgagttctaaaagttcctgtttgcttcagacaattggatgagcaattcaacacagggacttggcaaggggccacctgttccctcaagtttccaagccacagaaggcttttagaacggagatatgggggctaataataacatttaggccaagcgtttgcggactaggaaggaaggaaccaatgggggccgcgggaccaattttacggtgaacggtttaatacgaaggacagagctggtctactttgggattggagggtaccagagtaaggctttttagaacacacacatgttgccaggactcagtggggatgttaaagtggggactggcccaaaatggcaacggttgcgtgaagtgtgacactcaagacggcacacattaggaatctttcgttagaaggacaagatcgaagcgattcgcagaatgtgttagttaacagatattttagtggcatccaattgtcacttggagagattacatggaacgttaagaacaatgaagtttgtgggggaaaactttaagcacggaaatggcgtgggcaggaacagccataatttcccaagaacagatggcatttcagaaggaccattgtatacgagaaaggacaaacaaagaagggcttaacatttgcctggaagaagaaatgctggtttggggacaggtaattgagtgggtacacaggattttggcacagttgcattgtgggagacccagcattggatatttcgtgcgaagaagtcgatggcaattagagaggagatgtttagac

SEQ ID NO: 517350 - DNA, 542 bp, Homo sapiens
  misc_feature (25)..(25): n is a, c, g, or t
  misc_feature (36)..(36): n is a, c, g, or t
  misc_feature (75)..(75): n is a, c, g, or t
  misc_feature (91)..(91): n is a, c, g, or t
  misc_feature (141)..(141): n is a, c, g, or t
  misc_feature (185)..(185): n is a, c, g, or t
aaaatccttggcccaggaggggatnccagctatctngcttctgaaatttctacctgggatggagtgtttgtgacnccctcagaaaggcttntgagaagccccctgagaaagaaggagggggaggaagagggggagaacccngaagaaccacctcaaggagaagaagaagaaagcatggagactcnggagtgaccttccctttactgtttcctccccaagggaagagagctaagccagccaccatggggctttagatggcggcatttctgtggcattagggagacagcaggaagggaaacaaactgaaaagaaaaaaacgctactgtttcgatagtggccaagcagctagaagtctcccatttgtgactgcgtatgccctctgtccgtctgtgaggaagcagaatgccacacattcccaatatttaaacctaaccactcccaaccaagtactttgtgttgaaatgctgtaaacggtcattgagtatctgggaatttttttttttttttctaagaaaaatgattaaagtacttcctactaggta

SEQ ID NO: 517351 - DNA, 151 bp, Homo sapiens
cccccccccccccccaaacccggggggggccaaaagttttttttttttcccccgggggaaaaacgttggtttttttcccccttccccccggttttttttttaaaaattaaaagggggttttttttttgtttaaaaggggggccctttggga

SEQ ID NO: 517352 - DNA, 658 bp, Homo sapiens
  misc_feature (192)..(192): n is a, c, g, or t
ctcgagagaaggttccctgtgacgcgaccttgtgggacgtgattgccctttctgtgcccacccaccccctcggcagttctgtggggcaggactttggcctatacaaaggatgggggttgtggctgtggagcggaagtgggtctcaaccactataaagcctctctgtgcccgtccggagctggtgaggacagnctgccagagtctggtctctggacactatgggcacacgaattctcccagatctgtgttttgtgctcctcggattgggaattgaggtgcacgggacccaacaggcccagcaagatgagatgcctagaccgagctttctcacccaggtgaaagaatctctctccagatactgggagtcagcaaagacacggcgccacaacctgtacgagaagacatacctgtccgctgtggatgagaaactcaaggacttgtgcacggaaagcacaggggccatgagcacttacacaggcgtttttactggccaaggtctttctgtgctgaagggagaggagtaacaggccgaccccccatcagagggcaaaggggagagagccctactcccctgagcccccagggttagactgagctctccctttccaggagctcttgcattctcctcccaactctagactggattcttttaaataaa

SEQ ID NO: 517353 - DNA, 417 bp, Homo sapiens
  misc_feature (2)..(3): n is a, c, g, or t
  misc_feature (88)..(88): n is a, c, g, or t
  misc_feature (229)..(229): n is a, c, g, or t
  misc_feature (241)..(241): n is a, c, g, or t
  misc_feature (270)..(271): n is a, c, g, or t
  misc_feature (359)..(359): n is a, c, g, or t
  misc_feature (361)..(361): n is a, c, g, or t
gnnttcggcacgagggtctttctgccttgacagccaggtacccctgtgctgtccagatcatcagtgaggagcgcttccggcagctggngaagatcaagacaattggtagcacctacatggctgcctctgggctgaacgccagcacctatgatcaggtgggccgctcccacatcactgccctcgccgactatgccatgcggctcatggagcagatgaagcacatcaatgngcactccttcancaatttccagatgaagatcggtaagaagnnctggatcatggcacgttttcccagggctgttttttggggtgaagctggaggcagcaggctgggggatggtgtatcaggagtcctgttngngggtttcctttttctcctgcttcctatatcatctgatgtaaggatagatccattta

SEQ ID NO: 517354 - DNA, 1192 bp, Homo sapiens
cgccgagctgcgagcggctgcgagcgagagagctgtaagagcaagagagctagagagcgagcaacgggcactcgccccacgcctcccctcagccccacccgcgcgctccgcttgcctctccacccctgcctgatctaccctggcctggtccctgctgctggtgcacagccccagagctctgggtgcggtgcagtgcagcctcgggactcatcctgtgctgcagccgactgcgtacccagacaaaggcttggcactggtggcccctggacctgatgctgcccatcagacatcccctagaacatcacccaaggcatcctatcctcaacgcctcattacacaataaccccagacgcattaggcaatcggagctgccgagcttccagtagcctagggcccgcaacaacgataaacccaggccacaagtgcaaaacagagcagaggaataagagcccatcacacatattcaacgacgaagttggccagacagagacagcttgaaaccaatggcgcggcccaccgacggcctagggccccaggacaagacaacccagggtggggcccaaccgggcaccctacctgcaccagaaccagaaccatatccgaaacaccgacggacgaccaaaggactacacggcaccaagagcaaagacaaagcagaagcacccaacataggaaacacaagcaagcagacccacgcgcggataccaaggcggaacagcgcaaccacaatggccgacgaaccgcaggaggacaacacgcacacggccaccgtggcccacccagagccagggaaacacacaccaaaaaaaaacaacgagcaaagcaaagacgaacaacaccaggacgcgctagagagtcacctgcagtgcacgcacaacgaaaacggccacacagaggcaaaaacagcgccacccggacaaccgccaagaaccgaaacgaacacgagactcgcgtttcggatcgccgcacacatatggtaaagcctggcgcgcattgccgcaccccatccacacagctcaccccacgtccgcctgccgactgccagactccacccttgtaggtgacacccagctcacacaccccaatgatgcactgctcccgcggtgcctgctacactcccgtcgctccgtccacccacggagcccccaacttcgcaggcgccactcctacgtactctctcaatgctccggcc

SEQ ID NO: 517355 - DNA, 391 bp, Homo sapiens
aagaataaagaaataactttaacttatttaaataacaggactcgtacacgaagatgagaattaaagaagtaaaaaaaaaaaaaaaaagtgaatgttagaaaaatctggtcgggtgtagtggctcatgtctgtaatcccagcactttgggagtccgaggcggaccaatcacttgaggtcaggagttcgagaccagcttggccaacatggcgaaaccctgtctctactaaaaatacaaaaaaattagctgggcatggtggcacacacctgtagtcccagctactcgggaggctgaggcagaagaattgcttgaacccaggaggcagaggttgcagtgagccaaggccatgccactgcactccagcctgggtgacagagtgagattctatctca

SEQ ID NO: 517356 - DNA, 301 bp, Homo sapiens
ccctcagtttctttgcctttcataacttttaacaaggatcataatctgtcatcttggatatcctttcccgtggcttcaatcttcttggtccatcgtgtggtctgcccatttagtatcgatgtctgccttctgccaggtcttgtcggacatacttcaggtgggcaatgcgcggagacttgatgatgacatcagtgagctggatgcacttgaaaggcatggcctgtctcctcacttgggtgcaaggtccatcgaccaaagccctgttctgatcaataacatctataatcgccggtcacgagat

SEQ ID NO: 517357 - DNA, 337 bp, Homo sapiens
ccaggattatattatactccactgtatgtatatacagggcattttttttttgcattcacctatcaatggacatttggtttgcttccacctttcggctattgtgaataacgttgctatgaacacaggtgtacaaatatctctttgaaaccctgctttcaattcttttggatatacaccaagaagcagaattgctggatcatatggtgattatatttttaatcttttaagaaatccccatactgtttgtcacagtggctgtaccatttcatattctgaccaacactgcacaagggtttcaatatattcacatccttgccaaccctcgatattttcttgg

SEQ ID NO: 517358 - DNA, 556 bp, Homo sapiens
ccatcttatcatagaagagctctatccagcactacagctacctgagaaagtatacctagctgttgtctcattatatatcttaggtcatgtatattatatgtgccttaggaaggaagtggtatgcccattatacagataggagaatggggaggtgaggggattggcccagaaaaagttactcattcagcaaaaggcttttatgcccttcctctgagctgtcatctctgcatcctccatagtattgagaacaaggcagcagtgagacaggtgtgtgtgtgggtggctttggagtcagtccagcgtagttttgaacctgaatctatcgtgtgccaaccatgtgaccttgacaagtgatatttctccatgtgtaaaacagctgagcctcagtttccccatgtgtaaaacagctgagcctcagtttccccatgtgtaaaacagctgagcctcagtttccccgtgtgtaaaacaaccagtcctgcccctcctttgcccattgctccagctcacttgtgtatggattcgatggcagcacgtcctgaggctcgtggtttcccag

SEQ ID NO: 517359 - DNA, 93 bp, Homo sapiens
  misc_feature (52)..(52): n is a, c, g, or t
gccgctttactgctcagttcggagctaccgcttcgaaagcaacaaaaaagcntttgcaaatgaaacgagattgctgaattgcgtacaccgaga

SEQ ID NO: 517360 - DNA, 318 bp, Homo sapiens
ttttaatttgacacgtttaaatctcatgtgacattattttatacaagtaatattctatacaatcagtcaatattcacagatttacctacatattcatcttgtgtattaccctttatttcagctgtcatctgggattatattcttctgcatgaagaatatcctttagtttagtttttttttttttaaagtataggtcaggccgggtgcagggactcatgcctgtaatcccaacattttgggagactgaggcaggaggattgcctgagcccagggagtttgaggaccagcctggggcaacataggagagactccgtctct

SEQ ID NO: 517361 - DNA, 237 bp, Homo sapiens
ttttgggggccccccccccccccccccccccggggttttttgccccctttttttttaggccccccccggggggggggggcccccttttggggggggggggggggaaaggggttttttttttttttcccccctccgccccccccccccaaaaaaatttttccccccccccctttccccctttttttttttttttgggcccccgggaaagggggtttttttgttaaaggggggggggga

SEQ ID NO: 517362 - DNA, 925 bp, Homo sapiens
ggacagcagggagggagagacgacgatgttagagttcttccactttgggtttcccgtgtcgctccttgttaagttcccgtcgtaagtcccggtcggaccctcctaatccgcccttttccaattgctggcttctccgacttcccgattgtttccccctgtgggttctctgtccagggtttttgcccccggacccgcgtagtggggcacacgacgaagccagacttggggaccacacaaaagacccaaactttcggtacacaccttgtgtcggcctttctcctccgggaggttgtgcggcgcccaatttctcaaggggcccacttggaggacccgaccacggtgtagaatacgggaaaaacccctgggggtccctccaaaagctatgtcagtgctcgggaaaccccggtaagtctttccgctgccccgtaaatctagtagggtactagctcatttccgggactgtccttgcacagacaacgcccgccgaaccctggcgtctttgagcagtgatagcccctggggcgtaggaatcctatctattagtaagagtttcaatagtgttcaccccacacaacgttgtctcctcttccttgagtaccaacctcgaggaaacatttccctttcacaagccagcaaaaaatgttgtccttctgaataaaccccattctgtacacactaaagccaccccataacctgtttgtcttctatgcaccccacctgctgtcaatccatcaccaaccggtttatctcctcacatattcctacgaggcccaaaccactcacatcgtgatatagcacccgccacgcagaaacaccgacacaccacctctagcagtgggaccccaacgatcagacagcccccacgccccggggggaaaccccccaacaccgtggggcgccacacactggaacaccaaaaaaaaca

SEQ ID NO: 517363 - DNA, 148 bp, Homo sapiens
ccgatagatgcgtgagtagcagggggtgttagggtacatacgggccctctttcaacgattaataggggaattacttctaggacgatgggcacgaaactagtggtttgctccactagatttcagagctattgaccgtacgtatacccat

SEQ ID NO: 517364 - DNA, 206 bp, Homo sapiens
  misc_feature (62)..(62): n is a, c, g, or t
  misc_feature (64)..(65): n is a, c, g, or t
  misc_feature (67)..(67): n is a, c, g, or t
  misc_feature (74)..(74): n is a, c, g, or t
  misc_feature (107)..(109): n is a, c, g, or t
  misc_feature (112)..(112): n is a, c, g, or t
  misc_feature (194)..(194): n is a, c, g, or t
  misc_feature (197)..(197): n is a, c, g, or t
tggtgtacatattgtctatggctgctttcatgctacagttagagttgaatagttgcaaccangnntnacatagnctaaaatatttattatatagccctttatagggnnnggngctgatccctccatggaagaaagagttttgagaaccattgtagttaacagttgtttaaaaatcaagtaacaacaaaataaantgnttattaaat

SEQ ID NO: 517365 - DNA, 185 bp, Homo sapiens
catgtagacatacacgtgtacatgtgtgcatcgagagacatgtggaggcatcattttccatttgtgccttatttatgcttatattgggcttctgagctgactctgagctgattctgggaaagcccgggttaaatgccaagtttgcaggcagaaggagcagtgaagcctgaatccaggccaggcag

SEQ ID NO: 517366 - DNA, 337 bp, Homo sapiens
aagatgtataattttttttttcagagatagagtcttgctttgttgctcaggctggagtgtagtggtgcaattatggctcgctctaacctccaactactgagctcaggggatcctttccactcagcctctcgggtagctgggactataggtgtgcgccactacaaatagctaatttttctttaatttttttgtggagacagggtctcactatgttgcccatgctggtgttgaattcctcgggtgatcctcccgccttggccttttgaagtgtttggattgcaggggtgagcccccgtgcctggccccaaaatatttaaaaataaaaatgttcttgaaa

SEQ ID NO: 517367 - DNA, 340 bp, Homo sapiens
cttgttgcccaggctggagtgcaatggcgcaacctcagcccaccgcagcctctgcctcctgggttcaagccatcctcctgcctcagccttccgagcagctgggatcacaggcatgcaccaccacgcccggctaattctgtatttttagtagagacggggtttctccatgttggtcaggctggtctcaaactcccgacctcggtgatccacctgcctcagcctcccaaagtgctgggattacaggcgcgacgactcgggcccacccaaacccccagaagtcccaaccctgtatactaggagaaaagtttgttttgaaaatattatataaacaagagaagca

SEQ ID NO: 517368 - DNA, 186 bp, Homo sapiens
attaataaattatggcagcaatctgttcccctcagcatcctgatttacttttctgttgctttgctttcttctacattaatagttactgaactttatgcatgttgatctatattgactttcactgcaggttggaatgaacaaattatttcagtgtgacagccatgactcaagttccaattagtctga

SEQ ID NO: 517369 - DNA, 1686 bp, Homo sapiens
  misc_feature (380)..(380): n is a, c, g, or t
  misc_feature (723)..(723): n is a, c, g, or t
  misc_feature (1287)..(1287): n is a, c, g, or t
gaccgaggtggagcccgagttcgggaccaaggtggaggcccgagttcgatgaacccagtgggagcctgagtatcgatgacccgagctggaacccggtagtttgagggaacgaggaggagtgagtgcgataagagagacggaggatacgccaacgtggctcgaggctattccctctttcaacaactagtatcagactcttactacaagttgaatcgtttggcggattgtctcgcatgaatacacgccgtcctgaccgaagtaccccgaggcccgaactcaaggcgtacaggcagcggctacattgcgctcaaggcctgtctgcaccgaccaggttcatcgattcagcctcatcagcacagtggacatgggcacccctgggntactgtgcacacagctgaaagaggcgataggggggctcgggtctcgtgtcgcccatttttgatggtgggaatgggcaatactcactgaaccgttggagactccatataggaggcacaagaacgtgctcggtgtaaggacgggctacacgttggctgccataggcttgcccatgttcattcggttgaacgcagcagtggtggatatggcctggctaggattgttgtggaggacgataatgcgcgggacaacgaaggggggaaagcggcgcaggcgccaagtggggtttctacctacacgagtattcacacaagaggccagaagtacatttcccaagttggtggnccaaaaggaaagtaaccacaaaaggagaacgctttaacaaacttgcagcgagaacaacactacatctcagctgccgcacggaagcgggggaagccgttggtgaacaccttggcacgattagggtttgttgggctttccacccctatacctattaagcagattgggggtgtgggcacaccccgcacaaagaaagagctacaattttgaggagcccctttattaacctcggcgcgagagatggttttctacagactgatgccagcaggacaagcagcacaggcacgaagcggtatggcccctacctaaaacaatatcaaccagcagaggagccgattgggccgatcacaatgttaaggaccaggagtggcgaacgaggatcccaacccagcagggggtggctcaacttggtgccaccgctaaaggagatggcacacatctgacgagacgtgggcgtggcattgacatctgggggagaccactaacaataccgttagagcgcccaaaagcgcagttggtggggggaagccagtatattattccacctccgcaggcgaggacggcacnaggcggtgatgcaaaccaccacacaatttagagaatacaggacacgtgtcagacggcgtccgcggcagggcgaacactccacatatatcagctgagtcggggtgcgaacaccaggggtaatcgagtcacaaccaccagtatagatggacacaacatttgttaaacaagaatgccgtctggtcccacaagagacagggaagcgcatgcagaacttacgcagactgtctgccatggaaacgacgcgcgtgactaaaacagacggggcaggtgcatgaaaaagaacacatacacacggtgtgtgacaaagaggttagtcgccttggggagtagcgcccatcatgaggaagaacgaacttcgatcgcagagaccgacagaggggcgaaacacacaatgaaagc

SEQ ID NO: 517370 - DNA, 412 bp, Homo sapiens
gcggccgcctactactactactactaaattcgcggccgcgtcgactcgaattgtgccaacggtatgacacgaaagcccgtgccaggtattgacctggcgaccaactcagcgtcgagccttgaaacgacggctcgaattgccttcccttcgccggactccgcgcaaagaatttcaaccggcgtgctcgcaggcgtgtcgctgaatccgacgatgcgaaccagtccataaagacgcaatgaggttttcaggccgctggggtgaagcgaggtatcgagcgtgcaggcgcaggggataggcacgtccatgggtgaagagcgcatcaaattttacggtccttgtaaatttgcgtcgcgaagaatgccccaagcagaagccgggctcaacaatctttacagcgttttggctggcatcc

SEQ ID NO: 517371 - DNA, 1010 bp, Homo sapiens
gaacgaactataacatgtacatcttctcgaagtcccgggccagcagctccacggggatggtctccctgcctccaggcgcttctcattctcatggatcttctggcccgggacgtccgagaaggaacggataagcatgtacatccttccctgtacattgggagtacggccagctggaccagcatcccattgacgggtaccctctcccacacacgagctgtgtccacgtgcgtgctcccgcttctatcgccctttggagctattgctagacaccccccgctttttcgatgaccttggtgatcctggatcaatgacgaaagtacatcagccctgtgagtgagtgggccggctgctacgggtatcaaagtagaatggatatctgacttaggatcttgttgatctaatactccagcgtcacgttccactatgtacctgagagttcatctcctttaatgcctcccctttgcgtgctctccccgagatggtgtataatccagtgtagaggattggatttggtagggctgcctggaggacaaggtgcgtacctatagggatttcaagatgagataatgtcaaccgtggctaacaatacgagagagttctagatcctatgagagtgcacaattctgtagcttgctaacttataactacttaaaggccgttgccagcacgcagttgatagatcccattgttactcattagcacattcgtagcctagcccatggtctcgataggcacgatggtgtggaccaacggatcttgctgggcgctgcctgtaagcagacatgcagaatgaattcgtttctcgtaagtgtactgttgacattattattacgagacagacttgatgtccatccacgtcagggcctgggctccgatgtgttcccagcgtgctggttgttggcaagggaacacgccaccggttttgtaaggcagtgttggaacaaactgccaggggacaaccgcaacccaaccacatgcgcggacgaaacaaaacgggacatgcaaacacc

SEQ ID NO: 517372 - DNA, 191 bp, Homo sapiens
gctcccaacaagagcaaactccatcttaaaaaaaaaaaaaaaaaagggactctgtttctacaaaaaataaaaaaattagccaattatactgacacattgccttgtaacagccccagctatttgggaggctgaggtgggaggattacttgagccccggaatttggggctacagggagctatgatcactacac

SEQ ID NO: 517373 - DNA, 244 bp, Homo sapiens
cagtccaacatccggtggtgtcagagagagggcagcaaagaaagctggtgaatatttataaggtaagttaggtaatgggggcaggggatgtgggaagaatccatatcacaaatttggaacacaaatgagtccaaatatggccacatttaacggtccggcttctcgggaagaataccaaaatgggtccaaaaggaagaaataagcaagggaccatacgcaggtgtgtgatgccggtgcaatgggc

SEQ ID NO: 517374 - DNA, 378 bp, Homo sapiens
gggaaaaatcaggatggattatcaatacgtatttcacaggagatttgagtttgggccctgacagaaagaacacgtactaacctgaaaaaggctacgttgagattaaagagagaaacagctaaacaccaaatcctggtgagagagacgtcaatttaaaaggccagccactcaactgtagcgttgacaacttcccttcttggggttagccaaggaagcagagcgttgagccaattggcaatggtagcgttgggccaacgaaggtgccaccttccccaaggaagcccaacagcaagcccaagggaaggcctttgggaatcagcttttgccttcagccggctagtcactttcttcattcattccgcgcccaatagtttaatt

SEQ ID NO: 517375 - DNA, 229 bp, Homo sapiens
  misc_feature (65)..(65): n is a, c, g, or t
ccccccccccccctttttttttttcccaaggggggggggggggggtcccccccttttttccccantagtgggggggggggggggccttttttttccccccccgggaaaaaaggtttgggaaaaaatttttttttttcccttttttttttgggggggggggggggtttttttttaaggccctttctggggtttttgggggggcaaaaaacccccggccccccccccccca

SEQ ID NO: 517376 - DNA, 923 bp, Homo sapiens
  misc_feature (214)..(214): n is a, c, g, or t
  misc_feature (224)..(224): n is a, c, g, or t
  misc_feature (269)..(270): n is a, c, g, or t
  misc_feature (295)..(295): n is a, c, g, or t
  misc_feature (297)..(297): n is a, c, g, or t
  misc_feature (313)..(313): n is a, c, g, or t
  misc_feature (339)..(340): n is a, c, g, or t
  misc_feature (344)..(344): n is a, c, g, or t
  misc_feature (348)..(349): n is a, c, g, or t
  misc_feature (357)..(358): n is a, c, g, or t
  misc_feature (368)..(368): n is a, c, g, or t
  misc_feature (379)..(380): n is a, c, g, or t
  misc_feature (382)..(382): n is a, c, g, or t
  misc_feature (393)..(393): n is a, c, g, or t
cggcggcggtggcggagaaggaactcgacacgcagccgacgcccgtcccgttccccagcccgaacgcgtggaagctgtagcccgctctgggccggggccatgggcgccccgcgccgcccgggtcatgaggacggaggcggaggtagcggggacgcgcatcgagcccggggactttgtgcaagctggcgctgtgcccgtcatccagcagctctancacttgggantgtggcctggcctgctccaggatggtgctgcggtacctgggccanntggacgacagtgagtttgagagagncnctgcagaagctgcagntgaccaggagcatctggaccatcganntggnctanntgatgcanncactttggcngtgaggcaccnntnctgtacccagnaccgctgtggtgtcgacaagggctacacagaagcagtccgttctagcaggaagcagcggtttgatctcaggaagagacccgggtgaatcaagctgttgtgcacagagcaaagggcctgcaaggtgctggtggagaaaatgcccagtgagtgtgaatggacagtccaggcgcgacctggcgtcaggggccagtgtgcgccagtccgtgcgtggtagaactcgggggttgctagcactggtgagctgtggctcccaggcccgtgtcacacgtaacaggttgtttcacccgccagtggcacccacgtgtgttcttgccgacacttcctgactaccaggggcacttcatcgtgctggggttggtaacaaccgtggccacgggtggctattctagaagacccagctatttggaccaggaatggtgggtccagctagtgacttgaggaggcaaaaaccctttggcatgagacactcttggctcatggagcgcgccacagaccgggggcgagaacctgagcacatcaacacagggca

SEQ ID NO: 517377 - DNA, 108 bp, Homo sapiens
tgtgtaacttctccagcatttgagccagtacgtgaaagcccacaacacgttcatggtctttagtattacagattatttttgcataaatatttgttgttatctcttgac

SEQ ID NO: 517378 - DNA, 102 bp, Homo sapiens
gatccccactctcgacacgtctggacgatgcctcggccggggcgagggtccgaggttctgtgacgtggtcatacccgctctctctgtcttttgtttcgtgtg

SEQ ID NO: 517379 - DNA, 751 bp, Homo sapiens
tagtcatttaaaatcaggtccttaaaccataacttgcttgtaaaaactggatgttaggcttgtgtcagtcagcttatgcttaagttatgcttcggtaacaaacagcccccccctccaacttcagtggctttgatatcagggtttacattacatgtccgtcacagttccatttcagctctgcttcaggaaatattcattctgggactcagacttttcccccacgtcaataaaggagggccccagtgcttgctaatagtgtcttcctcctttgttcccagttcctcaccctgtagctcttctctcatagacacatatcagttggttctttccttaatttaatgtccctgtaatattattgtcgcttgtgccagggtatctttggactaaaacaatatatttttaaagcatctttgcagccaaaaaaaaaaaaaaaaaaaaaaaacaaaaaactggtgttgcgcgccggccttcggcgccctcaagaaaagccttcttaaagacccatctccggtgggggcgcggcgggcgccccagtagagacacgtgcgacctgggggcaaaagcggtggtcccctaaggagaaagaccccggggcccatcagataggggcgctgggggctccctcacccaataaaaaaaaaccccgggggggacgccaggctcgtctcgacacaacctcacagggggaggcccagagggcccacacgggggctctacaccacgggggcccaaggcaaccccaatacaaccc

SEQ ID NO: 517380 - DNA, 277 bp, Homo sapiens
ctacagtcggatgcagcacccttcaggcacgccatgtcgcattggagcagagtgtataccacaacctgaagaatgtcatcactggagaaatatgggaaagatgccaccaatgtggggtgatgaaggcgggtattgctcccacacatcctggtcgaataaatgaaggcctggagctagctgaagacgtgctatatgggaaatgctggctacactagataatggaggtcatacggcatggatcgtagctggcctccgtgggatcctactagcagtctac

SEQ ID NO: 517381 - DNA, 1083 bp, Homo sapiens
  misc_feature (134)..(134): n is a, c, g, or t
  misc_feature (154)..(154): n is a, c, g, or t
  misc_feature (212)..(212): n is a, c, g, or t
  misc_feature (221)..(221): n is a, c, g, or t
  misc_feature (242)..(242): n is a, c, g, or t
  misc_feature (246)..(246): n is a, c, g, or t
  misc_feature (273)..(273): n is a, c, g, or t
  misc_feature (275)..(275): n is a, c, g, or t
  misc_feature (312)..(312): n is a, c, g, or t
  misc_feature (361)..(361): n is a, c, g, or t
tcgggtacccactgcagagtgctgaagacggggtagccacgaggttgcaaattcgtgaagaatcagcatcatgtttggcagctgagtattggagccaggagcctgccatgaggttttgagaacagagtgctgtnttagagctggcagcagcatntcagcccaagagaaggttatattcccagaggatgtcagtcccaaggaccagtagctgncatcagttnggattctgaaaactaactggnatcnacactgggtgtagaaacatgcttgccntnatgtatcagaggacatgctcagcagatccaagagatntattggcaactttttctagaaaaggcacatgggtatcattcattacatncttgagtttgctgggtttttcttttttgggggaaacagctctgggctgttttgcccaggctgaagtgtgggggcacaatcacagctcaatggccatccgtcaatcacccaggcctaagaaaatcctccccacctgtgtagcggggactacagctcacagcacacggggcataaagatactttgggtctgagacggggatactctaatgtggcccagggggggatctaaggcaccggggctcagagggtcctcctggcctcagttgccaaagggcacaggccaagtgggagctgggccctaggcaatataggcccaaacaagaggttctataccctttgcaatgcgaaaggggacctgcccataaagatgggtaaacggtggggagggcaagaacccattacagcgggggaacatttgggaaggtccctcccgggaaacgtggtttctccccggccaagtcacccgggaccttaatcctacacaactacggggatgggcctgggggtgtccaaaacaacacacacaaacgccacacagccccactccagatacgctacaacacacaaaacaaaggggcgcgcaaaaaacatcccgcaggggacgacgatacgaccaagtgttaaaagggcgcgacagaggatctacacaagacagcggcgacacaacaccagacgacaagacgtgcgattatcaaccaacctctgcgtgcgaggcccaccaat

SEQ ID NO: 517382 - DNA, 120 bp, Homo sapiens
  misc_feature (55)..(55): n is a, c, g, or t
  misc_feature (87)..(87): n is a, c, g, or t
acatcaatgtcagcatggcatgtggtcagcaccagcatcaccatcagcatcagcnatgcatcacacattgccatcagcaccaccatntgcatcatcagcaattgcactgcatcagcagca

SEQ ID NO: 517383 - DNA, 886 bp, Homo sapiens
tgtggtggctcatgcctaatcctagcactttgggaggccaagacaagtggatcacctgaggtcagaagtttgagaccagcctggccaacatggtgaaactctgtctctactgaaaatacaaaaattagctgggcatggtgacagctgcctggaattgcagctactcaggaggctgaggcaggagaatcgctagaacacgggaggcaggggttgcagtgagttgagatgcgccatgtgcactccagcctggtgaaactcagtctcaaaaaaataaataaataaataaggccaggcgcggtggctcatgcctgtaatcccagcacattgggaggcagagggcaggcagatcacctgaggtcaggagtttaagacctgcctgggaaacctgttgaagccccgtctctactaataatagaaaaagtagctgggagcggtggtggctgcagtaatcccagctatcaggtggaggctgaggccagagaatgtgcttgagccagggaggcacaaggtgcagtgacggcaagatcacatcactgtactctagcctggtgacagagctagatctggttccagtaaataagtaaatcctgaggtattaattcttggagcccattagtgtactccttttttacactctcctcttttaaccattttttttttgtacccctttaaaaggagatataccctataaatacctacacacttggtggaaaccccggggtaaaggaaaagcgcggggtgggtctacataaacccgtgaggaggctcgaaggaagcttttcacaaggggatgtccgcgggggagcaacggcagcacaaaaaacgtcgtttgtgcaccacgcgcgcaaaacttgtgtccggagaaataagagaggcggggcaccgt

SEQ ID NO: 517384 - DNA, 932 bp, Homo sapiens
ccgctctttgcgtgtgacgtggggtaggccccgctaggttattgtttcaggcagagtgtaccggggtggtgtccccgcccgggctagcagtgattctgaccctccctggtggccttccctattttgcccgaggatttggcgagaaccagggtccatttttgcccttctctttaatgccttgaccttccccccatagtgtgccccgagatacataggcgtattgatcccttaaagatgcgtgttataaattgaggaggggcttttaaagggtaagcacaccaagaagttgtgaagatcctgtgatgttaagaaggaacgtttggagaccatccctgagaatctgatattgattgaaagtttaaattatagtagtttgggccatattgagtaaaacgcatatgagtaattgaaattgaatattacccggttcttttgcccttttaaaaaggtgaccaatgagaccatgttgaattatatatatattactccatcttaaagtttctattggaccatccctgctcttagaaacttcctctctgtctctctttctctctctccactcttgccggtcttccatttttggcccgctggatagaccggatctggcagaggactatgaagtccaccaggaaatggtccatctttgactacaatggaagaccagatactgtctttcctggattacccattataggaaagctgccttatgacccagggacacctaccatttaactgttttatgtgtgagaaataatttttttgtatgtccagcccctaagatgtgtatggtgtttgtaaccgaagtaattataccctgactaataccaatagtatggggaagagttgagccagattaagatgatccgaatgttaaggtccctaagatagccccatttgtgaagataaggagccgagacctgaagattagtgga

SEQ ID NO: 517385 - DNA, 1181 bp, Homo sapiens
cgtgtggttcggttacattcattacgtgagtttagtgtggggctggcacgctattttaacttaggtcgatggccaaatgtgtcgtgataaagtcagtgtcatgagttttcagatctcatttactcggcttattgtcatgtgttaaaccccggtttctttgatatatattactccgtatattacttatcgtgggctctttgtagtgcgggtggctcgatgagcggttccaagctgtgtcttccgagatgtctgatgttcatcgcagtttcgtccttgaagccgggggaaggacggaggacttgtcaggaatgctctgagtattcctcatcctcgtcactttgcatacctttgggtgccgaccaaggtggtggtaaacgtcgattctgctaacggttcggagcacaatataatggtagcatttgggacctcactagcctatattatctctatggttaaaagagggaccatacggatagctatggtaagataggtatcgtggattgtttctccagagcttactcgagagttaggctgtctacagagatgatatttggatgctggtatttgtatgtggttaagtaaggagttttgccttggtagtataatttatatagagaagggcaggcttaagtgtactagcccggtgtcataaaaagaggagtaccgatacattgcatgcacgatatcctttgactcggcaattgcactggcaggaattctgcggttatcctcacacacatacggctcctaggcactatgtctaaggatcctcattagcagcaatgtctgcaagacttagtcactgggagtggcctgttggtccctcatctaggacactgctgtacaataaagctatggtacagctctataccgtgaattcccactactagacgcatgtaagaaagcaatgtaaggcagggccctatggtgctggtcggctcgatcgcacgtagtaatgaccctagcaactctgggtagagccgagtcgggtgaatacaccctgaggatgcacggcgtttcgagacgacgccgtggccaaacatgatgaaaccaccgtttttactaaaaatactaaaaattagactgggtatggtggcaggcgcctgtagtgcccagctactaggggaggctcgaggccaggagaatcacttgaagcctggagcatagcaggctggcgctga

SEQ ID NO: 517386 - DNA, 886 bp, Homo sapiens
ggcagacactgaccttcagcgcctcggtccagcgccatggcgccctccaggaagttcttcgtgggggaaaactgaaatgaacgggcggaagcagagtctgggggagctcatcgcactctgaacggcggccaaggtgcggcggacaccgaggtgtttttgtgctccccttaatgcttatatcgatttcgccgggaagaagtaagatccaaagatgtgttgtggtgcgcagaaattgttacaagagtgactaatggggctttaaggggggagatcaggcccgtggccattgatcaaaagattggggagccagcgggggggtgtggttcctggggcattcaagagagaggggcaatgtcttgggggaagtccagaatgaggctgttgtggcaggaaggttgggcctgttgtttgtgggaaaggggactgcgggagtaatcagcgtgaatgtgggagagaagctacgtatgaagggaaagttgcatcactgaggagggttgttcggagcagacaagggtcatcgaagatagtgtgaggatgcagcaggttgtcctggcatatgagcctggtgggggccattggtatggcaaggttggaaaccccaaaggcccaggatgtacccgagaagctcgggatggttgaagtccaacgtctctgtgggtggtccgagccccgtatattatgggggtccttgcctgggcacctgcagagtggcagcgctgtatgggtgctcctggggggggtcccaagccgatggggtctttcaggcaagtggcttttttctccttgcgccgggtatgcaagccgttgcttcgctttttgggggtcgctcggccacaggttcgtgtacgggggggccccttggaacgccgggggggggcccgagcct

SEQ ID NO: 517387 - DNA, 164 bp, Homo sapiens
cgaatatagaagtgccagcttaagttctataatacacagaggacttactacatgcgaggcactctttcaaacacgttacatattctcttttagtcttcacagaaacttacccaggacgtttttaatatcatccctacttaacgggtaagaaaactgaggcacag

SEQ ID NO: 517388 - DNA, 441 bp, Homo sapiens
aaaacgagaagacaattctcaacatttagggcaacccgcactgatggctgacatttccagaaagatccaatgtggccagacccatgagaatcaagtagctgacaccatagcatccttgaagatcggtcacaagaatgaggaacagtttcaggcagctctgcccgtcgctttaggagaaaatccccctcttcagggaagcctgaagctgcttccctggggggctgaaggagcggaggggagagggagtgaatgtgctgtgtggtggagagaacactggaacctctaaagcggacagagcaagccctgggtgcacaccgagggaagacgagagacagaggggacctcgtgggctggggacgggagctcaggatggcacggaacaaattcatgggaacagagaccacgtggaagataaatcaaaaggagttccgaagacacagt

SEQ ID NO: 517389 - DNA, 184 bp, Homo sapiens
ggatgtgtatttgcaccacagtacgccagtgatagttgacctcagacgggaggcactgagctcctccatcccaggaagggcctctccagctggggcagcatctacgccactctggccatccactagcccagggggggacgcagaacccacactccatggagtctggaatgcatgggagctgccc

SEQ ID NO: 517390 - DNA, 165 bp, Homo sapiens
ccagtctgatagtgagaggaggcgactaaagcagtctacaggaagaaatgtcctcttcaggcccttcagtgaggaatagcgtctctgagtgtagcagggccaggaagataccccaggaagaagaccagcccttgcctgcccgacggttctcctctgactgcagcg

SEQ ID NO: 517391 - DNA, 83 bp, Homo sapiens
  misc_feature (24)..(24): n is a, c, g, or t
  misc_feature (26)..(26): n is a, c, g, or t
ttggttttttccggtttccataangngaaacttttgtagtatgtatttttctaattgaagagaataaagattaaaacaaagtg

SEQ ID NO: 517392 - DNA, 1768 bp, Homo sapiens
  misc_feature (1581)..(1581): n is a, c, g, or t
gtcacgcgctgggacagtcgtctgagccttaggttcgaggaacaagtagagatagtcgtcattcacgtctcgtactcactctccgttacgtatagcgcgttatgaagagaactatgatcgtatgctgctggctcgattgatatgctgacatcttctgtagacgcgctcaaatagaccgatccgcgccatcataattcacatatgactatgtggccttagtcagcacataacttacgtacataagcacgtcatgctcacaggacaggatgtcggccaaagtcccctagtaactgtctcgatatctaccagaggagcatgaagggcctcagaaagtacgatcagcgagtgaatcgtgcattggctgatcgtcccagattgcctgaagaacgtgaatcgtaccgcgaactagtgaataattcacatgatccaacttggaaatgactgtaatttcttcccgatgagaggacacaacggtgtggactcttcgcgagtcgcaacaactcaaccactgaactcacggtcaaatgcctgtttaaagtttaatatgcgcgttaatccaagtcggcgcttctttggcataacttagcgggctgtcacacgcgaaagagatgtcgaaactaccacccaaacgccgtgaactgtgcaagggcagtgggtaagccccgcacggagaaacgacgatgtggtcaacgacgtgccacgagaaacgccacccgaccatagaaaaagaacaacactggcgcacaccgatacagagtaaagacaagagagtagaaagcgagaagcgcttggacacacacaaccgcgtaaaccacaccgttacccacggaggaatgtccgctggcggctaaagtaccccagggggacccgaagcataaacagaatccccgagtgagtagcaagagccgcaacccaatacgttacgagccgcaaaacatatcaaaagggtacgctaagcgcgtacgtttccataacagtatagcgtaaaggttccgttccgcaccgttgacggcgggggagttaccgtacgctaccacagatatgagttataccgaacgtaactagacaatgacacccagacgaggaatagtcaaaacatgcgagagaagtatcttgacagtaaaatcataggcgcttagccagcaaacaatctacgaatcaaacatgtatatatccacgcaaacggctaaattgggggctgagatgacaaattccaactcaactaggacttttgagtgcggcgaaagtgcattgaccaatgcaaactagagcagttgagaagcaatccatatgaggatagatttaagacgcgctgaagttacgaagcgagccccggacaggtaaaggactgacccaattatccccctctatcgcgtcgagttccggaaagcgcatatttttatgctagcattccagagatactgagcccctaaaggagagacacaaatacagacatcgcaacgaaagcagcggtagccaagcagcgacgtcccaaagagagctatcaaaacacccgtgagagccaacaagccatgcacaaataggacagaatcgtagcacaccaaagcagatggacaacgnacagacaggagcaccaatatagagggagccgcccaatagtccaaaccagtcaggaccgatgtgtacgagcgcccaatagaggaggaagaaactatgcgagaggagtaactaaaggagtggaagcagcagaatgccaaccccgaatacagcgcgaaaggactgcaccactagacacagagaagcaaat

SEQ ID NO: 517393 - DNA, 331 bp, Homo sapiens
ggaatcctcctgctgctcgagctgtatccattgaccttctagctaccattcattttcttcactgttcacgaaagaatgagtgtgaaattcagtgaatgctgttactagtccgtgtgtacgatgatgaatctcatttcaccaaaattaaattatgtaaatccgctaagatgatgcactacaagttgaatacacatcactctgaacatcgtcagacctcaccagttaaggctccacagtggctgacctcaggtgaactctatcagcttatgtctgaaacagtctaagatggagagtgaaccaatgtgtaaatagatctatgcagctggatagc

SEQ ID NO: 517394 - DNA, 347 bp, Homo sapiens
catggctttggaaaggagaatggaaaaatagaagaaggtcggccgggcttggtggcttaagcctgtaaccccagcactttgggaggccgaggtgggcggatcacctgaggtcaggagttcgggaccagcctggcaaacaccccatctctactaagcgaaaacccatctctactaaaattacaaaaattagctgggcatggttgcgcatgcctgtaatcccagctactttggaggctgaggtggggagaattgcttgaacctgggaggtggaggttgcagtgagccaaggtcgcgacactgcactccagcctgggtgacagagtgagactccatcgttgtatgaagga

SEQ ID NO: 517395 - DNA, 241 bp, Homo sapiens
gaaccatatcatattactttcagaatctacaactgcaataatttttctttaaaataaaatagtcttgcttagggtaataggtttttcctacagaaatgtgatttcgtgttttatgacaccgcatcaatacattattttaataaatggctcttggttcaccagcaagtgctgtatttggacaatatcagccaaccttttcattcgtttaagcaggaaaagtagggtgccaaaactaaagcta

SEQ ID NO: 517396 - DNA, 427 bp, Homo sapiens
actcctagatcagtcaccactccttagcagtactccacagctcactaaactaatcatcaacactgattaaacacaaatcagagggtggggtgttcaggattcacgggacatgaatgtaaaggaaaatagtaactttttggaaggtcccagaatggcacagtttaaccatagattttttttttaattaaaaaaaggtgggaaatcagttaaatttgaaggtaaaatgaattctgaagtcagaaatgatcccactgatgattttaagacttgacctgaaaaatggaggcagagtttacatcaagaaatcttcaaatcgcaaagtttagagacataaccactattcatttagttgctaagacgatctgagagttctccctcaaaaatccctccgattcatcccccctttcactgatctataggagtggtg

SEQ ID NO: 517397 - DNA, 252 bp, Homo sapiens
tacatgacgaccggtgaacccggtagagcggtctggaccgaagtccgcaactcatggttcctagttggattcgttaaccactgcgccacgacgggaactcctgatatttaactcatgtaacagcaaaagtgtagtaagggcagaaatttaagttatactggttaactaatctttataaatatatacatccaaatatcagcccccagataaagatatggactattaccagcaatcaattgaacatctagaatt

SEQ ID NO: 517398 - DNA, 1144 bp, Homo sapiens
gtggctggatgactgcctggtgcagctggggggtgcccggggtgccctggtggccctgtgtgatgggtgaacctgcggtgtgcttcctgctggatggtttctggcatgtggcatcctgtgggcctggggtctgctggcctgtggactggtggcctggtggcctgatggcctgctggatgcttctgctggagtgcaatggcctgaggataatggacgtggattgccctgtcaccaagttgggcctgcttggtcaaggacatgaagatcaatgtccctggaggagatctatctcttctccctgcctattaaggaatcacgagatcattgatttcttcctgggggcctctctcaaggattgaggtttttgaacgattatgccagtgcagaagcatgaccctgtgcctggccatgctgcaccaaggttcacaggcacttttgtttgctatctggggactacaatggccacgtcggtcttgggtgttaagtgctccaatggacgtgtggccacctgccatccgtggggccatcatcctgtgcaacgctctccatcgtccccgtgctgcagaggctacttgggggaacaagatcggcaagccccacactgtcccttgcaaggtgacaggcctgtgcggctctgtgctggtacgcctcatccctgcacccagtgggcactggcatcgtctccgcacctgtgcctacgaaggctgtcatgactgggtgggtatcgatgactgtacacctcagccggggctgactgcaccttgggaacttcgccatggcaactttgattgcatttctaagacctacaggtacttgaaccccggaactctgtggacggcgactgggtatccaccaagggttctcctaatcaggagagtcactggccaaccttcgtaagcaccgcaaccagaagttccgcgggcacggtgccacaggcacacgcagttgtgctaaaacacggcgcttaatcacagaacgataagtcgcacagccgtgcgacaaacaccatgtatcataacatgatcacacagcacagcaacaaaccacgacccccattgcttgacatgcgccacgcgatcgtcgatcaccaacctcaatgccgtgctaatattacagcgctgttagtacgtacctagacgcataa

SEQ ID NO: 517399 - DNA, 325 bp, Homo sapiens
gctcgacattcaaaaggtaaattgttacaattaaggttccaattaaaaaagtcccgccatatggctggacgtagtggctcacaactgtaataccagcactttgggaggccaaggcctgtggatcacgaggtcaggagatcgagactatcctggttaacacagtgaaaccccatctctactaaaaatacaaaaaaattagctgtgtgtggtggcacatgcctgtagtcctagctactcgggaggctgaggtaccagaaatgcttgaactggaaggagggatttgccagtgagctgagatcatgttgtcactgcactccagccgtcg

SEQ ID NO: 517400 - DNA, 272 bp, Homo sapiens
cacccaatctgctggcgccaggcgttgctggctacatggctgacatgttgaccctctttggacttaacttattattcaagtgagtaccctttgttggtgtctttgctgaagttaggggaggagtgactgctgagatgcacctcttgttgcaagtcgtgcatattaacaggagggacgtaatatccaggataggagacttgtgtgccgagacgggatgggagaagacaggctctccatgatttgttctggcagaaagcaaggaatgtctgaat

SEQ ID NO: 517401 - DNA, 421 bp, Homo sapiens
  misc_feature (15)..(15): n is a, c, g, or t
  misc_feature (51)..(51): n is a, c, g, or t
ctccctgtgagcccnccaccacttcctccctgtgagctccctgtgaggccnccgaccagtccctccctgtgagcagtaatggcgccactgcactccagcttgggcaacggagtaagaccctgtctcaaaataaataggccgggagtggtggctcacgcctgtaatcccagcacttgggcaagccgaggtgggaggattgcctgaggtcagagtttgagacacagcctggccaatatggcaaaaccatctctactaaaaatacaaaaattagccgggtgtgatggtggcgtgcacctgtaatcccagctactcaggaggctgaggcaggagaactgcttgaaccctggaggcggaggttgcagtgagccgagactgtgccgttgcactccagcctgggcaacagagtgagactctgtcacaa

SEQ ID NO: 517402 - DNA, 169 bp, Homo sapiens
  misc_feature (81)..(81): n is a, c, g, or t
atgcgtctcacactcgacagtgcaatactagtgcaataatcgagggacgggaacagagtcgtgggctttgatctctcaganaaaaggaagacggaagctcagaacaagagacgaggatgaaaagaagagagggagtggtgggacggcgtcatccgctggagagctcagc

SEQ ID NO: 517403 - DNA, 293 bp, Homo sapiens
agaactcctggactcaagcgatcctccagcctcagcctcccgagtagctgggactacaggagaatcgcttgaactcgggaggcagaggttgcagtaagtccagatcgtgccactatactccagcctgggcaacagagtcagaccctgtctcaaaaaaaaaaaaaaagaaaaaaggaaaaaagaaaaaaatagtttctaggagggagaagagaaattcccagaaatataaggggttttttcaggaaattagagaaattggtggtcccaacaaggaaaaggagaatttttcttgg

SEQ ID NO: 517404 - DNA, 97 bp, Homo sapiens
cctatacgaggactttgtttagactgtttattacatattgtcagtagcctcattcattgacttctgcatcttcttgatagctacactgtcagcgcaa

SEQ ID NO: 517405 - DNA, 673 bp, Homo sapiens
  misc_feature (585)..(585): n is a, c, g, or t
gggggccctggtggccctgggatggggaaccgcggtggctccgcggaggtaacggcagtggcataccggggccggggacgcggccgtggacggggccggggccgaggccgtggagctcgcggacgggtatggcggaggataatggagtggatgcccgtcaccaaggttgggccgcttggtcaaggacctgactgatcaagtcgcctggagggagatcaaatctctatctacccttgccttattacgggaatcaagagatcatttgatttcttacctgggggcctctctcaaggatagaggtcttggaacgataaatagccagttgcacggagagcaagaccctgtgccgggccagcgcaaccaggttcaagggcaataggtgtacgcgatcgggggactacaaatgggccacgtacggtctggggtgtaaacagttgctccagagggatggttggccaccccggcacatccggaggggcccatcaatccttggaacaaggcgtactccgatacggtcccctgatgcagcatgaaggcttacgtgtgggggaaccaagattacgggcaaaggccccaagattagtncccttgtgcaaatggtgacgcatgggccggcgtgcgggaccactagtagcatgggtagcgccctaacagtaccctgggcaacccaagg

SEQ ID NO: 517406 - DNA, 1358 bp, Homo sapiens
  misc_feature (374)..(374): n is a, c, g, or t
  misc_feature (497)..(497): n is a, c, g, or t
  misc_feature (937)..(937): n is a, c, g, or t
  misc_feature (1076)..(1076): n is a, c, g, or t
tcccattttactctttttattctgctctttattgttctgaaaaaaaaaaatggggaaaaggggtttccaccacagggtctccaaaaaaccaagagttgcaaattcagctccatttctcacttttcacgtgctcgtgaaaatagggctctctaaaacccaggattacaggggtgtggaagtgtcgcttattatgtggacctcaattgtgcttctccggacctttttccaaagccttttcgtgctccaattgtgtcgcttgaccagaaacgtgattagacacagagcacaacgcgagaagagactcaggggccaacaccacaaccagaaaaacgccccctgttcagaaccttttcacaaaaatataagcgcgtggnttggtctcccattccaaagcgctgtagacgcggggcacggctcttttgagaaacctttcatatttctttctgtataagaattagacgcttcgccattgtgtgtgcattcttctcttctgtacnatatattcctgtggtgggcgacacccaccactctcgaggggggtatagttttttataggcccgggaaaactttttagacacgcgtatgggagagaggcacactctcttctctgtggcttatacccaaccaagaaacttcttttctcaaccagaagcccgagtcatttttggccaaaaatttttggggagagggtcgcctatgttgcctttggcaaccagggctttctctcatccttctcgcctgttggcacacggggggaaaaagcccctttctgttgtcttttgtggcggacacagacaacgctttcttatcagaggcgggtggaaaagacggccacctatgagaggcaaaccccccagagggccagagagcaaggtgttgcgcgtgcgcccccctgtgggcgggggaggaaaggcgcgccaagaagcgctctcttccncccggtagggacacaccccccagataagaacgtatatcgttgaggagcagcgcgcgcccatagtgttgtggcttccgacaacccctggtcttgtgagaacaccaagagagggggcgcccctttaatctctccacaaagnaggcggccctttcgtggtgccctcttcccggtgtaaggaataaggcggaccaagagagggccggcgacacctttatacactcttctgtggcaacgcccccttcccacgagagaggtgtttcccccaggggcttcaagggcgccaagatgcaaaagggcgcccggagaagtatttggccccctattattggggcagccacgaaacggaacatctatcattacaggggaaagcgttcccccgtgtttggcccaacagcgggaaaaacaaacagtacgaaatagt

SEQ ID NO: 517407 - DNA, 213 bp, Homo sapiens
tgacgcgataacaacaatagaaaaaggcagtataacaaacatgaaagtttgttaggcccaaaaaagctctggccaggttaactagtgaaggtcttctcactaatttcggcgctgaagaatacaccaacttaatggaaaaatgcaacagaggagttcaacagcagatcagagcaaacagaataaagattcaacaaattcaatgtcgggttacct

SEQ ID NO: 517408 - DNA, 461 bp, Homo sapiens
cggcaaacgtgggatacactggagtggagtgagaatctgatgttgtaaaaggaattgtcactacttctttacagttcggaagatatctctccagtatgttttatcttatgtctatttagatttgaagatttactaaagactttcacacattttttagattgaatgatttcggtatgtgtagtatatgacagatcggttaagtccattacaacattctttctgcaccttagattcacccacactttcccaattctttctttaattgtatattctcaatgccatatctttcatctgtgctcagtatcactttttgaaatgaatcttttatgccatgctctggcaagaggtcttgggtgaaatgagaagaaacagctgggtgtctggctactgtctcatgtttcttcacattccagggctcattcctttgctctagacaggtgatcaggtctggcttagagaca

SEQ ID NO: 517409 - DNA, 145 bp, Homo sapiens
acatctacatgaaaaacgggggtctccctacctgaactcaccaccctgcactttcccccaccaatgcccaccccccttgaccctgaagagacagcctaccctagcccgagtgggggcaacagtacgtccatctgacccatactat

SEQ ID NO: 517410 - DNA, 286 bp, Homo sapiens
  misc_feature (135)..(135): n is a, c, g, or t
gctcatgcactcaacttccctggtcaagtgattctgtgctcagccacccaagtagttgggattataggtgtgagcaccacgcctggtaatttttgtattttagtagagatgggattctccatgtggccaggctgncgtcaaactcctgaccctaagtgattggcccgccttggcctcccaaagggctgggattacaggagtgagccactgcgcctgacctaaaaattttttcctgaccattgcttgttttctgggaatcttgtgataagtgctttgtctgataatg

SEQ ID NO: 517411 - DNA, 159 bp, Homo sapiens
cgtcgagtacgtcggctcggtaggcggaagtgtgtggagaagtagattacgcgatgatatatagtgaatgatttgcgtaggttgtctagggtgtagctggaataggggaatcagtgaatgaagctcctatgatggcaatacagctcctatttgatagga

SEQ ID NO: 517412 - DNA, 177 bp, Homo sapiens
tagaagcatacatacacgcgtcatttaaaatggcacatcccattctctacactacagaaatatctgcaggagtgaccaaagctatgtgtacacctctggtcgagcttgcagcctcagttataatcctaaaaccatgaaacccaccttatttcaaaaacatcttggtacagaccgtcg

SEQ ID NO: 517413 - DNA, 316 bp, Homo sapiens
tagccggtcccctcgctacattgacacatgagactaagtatgaaaataaaggggcgcatgcagcttgcacgcctccgtgtctggctcctttcattttcgtaatatttcggggactcatttgggactgctgtttgtatcagtagtagctcatgccttttagttactgaacagtactgccttctatgattacaataggctagattctaatacacaccaggcattttcaattcagctgtgagatctgaaaaacaattttaaaaaataaaattgctgtcaatactcagaaacttgtaaacaccaattagaatccaaacag

SEQ ID NO: 517414 - DNA, 128 bp, Homo sapiens
atgatacgaagtcgagctggtacctcccgtatagcccgagaggactttaaggagccgacttaagcaaagaccagggttctcaggtgacttcctccgaaactcccccacccagccatagctgtggacag

SEQ ID NO: 517415 - DNA, 740 bp, Homo sapiens
  misc_feature (15)..(15): n is a, c, g, or t
  misc_feature (76)..(76): n is a, c, g, or t
  misc_feature (96)..(96): n is a, c, g, or t
  misc_feature (102)..(102): n is a, c, g, or t
  misc_feature (107)..(107): n is a, c, g, or t
  misc_feature (112)..(112): n is a, c, g, or t
  misc_feature (114)..(114): n is a, c, g, or t
  misc_feature (116)..(116): n is a, c, g, or t
  misc_feature (133)..(133): n is a, c, g, or t
  misc_feature (135)..(135): n is a, c, g, or t
  misc_feature (137)..(139): n is a, c, g, or t
  misc_feature (141)..(141): n is a, c, g, or t
  misc_feature (143)..(144): n is a, c, g, or t
  misc_feature (146)..(146): n is a, c, g, or t
  misc_feature (149)..(150): n is a, c, g, or t
  misc_feature (155)..(155): n is a, c, g, or t
  misc_feature (164)..(164): n is a, c, g, or t
  misc_feature (167)..(167): n is a, c, g, or t
  misc_feature (172)..(172): n is a, c, g, or t
  misc_feature (190)..(190): n is a, c, g, or t
  misc_feature (209)..(211): n is a, c, g, or t
  misc_feature (215)..(215): n is a, c, g, or t
  misc_feature (238)..(238): n is a, c, g, or t
  misc_feature (253)..(253): n is a, c, g, or t
  misc_feature (268)..(268): n is a, c, g, or t
  misc_feature (277)..(278): n is a, c, g, or t
  misc_feature (293)..(293): n is a, c, g, or t
  misc_feature (311)..(311): n is a, c, g, or t
  misc_feature (318)..(318): n is a, c, g, or t
  misc_feature (324)..(324): n is a, c, g, or t
  misc_feature (345)..(345): n is a, c, g, or t
  misc_feature (354)..(354): n is a, c, g, or t
  misc_feature (365)..(365): n is a, c, g, or t
  misc_feature (379)..(379): n is a, c, g, or t
  misc_feature (383)..(383): n is a, c, g, or t
  misc_feature (387)..(387): n is a, c, g, or t
  misc_feature (400)..(401): n is a, c, g, or t
  misc_feature (416)..(416): n is a, c, g, or t
  misc_feature (420)..(420): n is a, c, g, or t
  misc_feature (437)..(437): n is a, c, g, or t
  misc_feature (441)..(441): n is a, c, g, or t
  misc_feature (450)..(450): n is a, c, g, or t
  misc_feature (457)..(457): n is a, c, g, or t
  misc_feature (467)..(467): n is a, c, g, or t
  misc_feature (479)..(479): n is a, c, g, or t
  misc_feature (484)..(484): n is a, c, g, or t
  misc_feature (491)..(491): n is a, c, g, or t
  misc_feature (495)..(495): n is a, c, g, or t
  misc_feature (502)..(502): n is a, c, g, or t
  misc_feature (508)..(508): n is a, c, g, or t
  misc_feature (512)..(512): n is a, c, g, or t
  misc_feature (516)..(516): n is a, c, g, or t
  misc_feature (596)..(596): n is a, c, g, or t
  misc_feature (598)..(598): n is a, c, g, or t
  misc_feature (667)..(667): n is a, c, g, or t
  misc_feature (701)..(701): n is a, c, g, or t
ccaagtcagcctganttgactctcattgttcccctatctacccacagtccccatccaacacgaagaaatatttgcnttcacattacagcataaagnccaccnaaccnttganancngacttgcagtgggacancnannngncnnanggnncagangcattgaancanttggncatccagtaatggctcanccagtcagcccggcctggnnnatgncgttcaaagacttgacggtagtnatatccttctttggntttaggagtgttganggggaattnntgggctgcatttgcnatcattgcatcatcaacntgatgtncaaggngttcgtgtgaaatgttaaacnaggggttgntatttggggtngttgcatcactggngggntctnttggtggcgaggnngtgtgtttgggtgtnaggntgggatggtcaaaggtntttntgagggggngtttttntatcccattntttgggattgtnatttntggtggnaggnggaagtnattggnaggnaatngttgatctagaaatgggactgtcagttcaagaccatgggcagcagttgttcgatctgcgcggagaacatcaaacaaatananttccctcagaagcctctcactctcctcctcggctttttcaggagaaggagccttgtgaaaatatatgtnaccctgcgtaagttcatctgatccttctccaganaagatcaccacgctatctgtgttcttccgaatatacttg

SEQ ID NO: 517416 - DNA, 97 bp, Homo sapiens
cttgaagtttaggcagcccccccccccaactttatttttttatgggttttttgcaacaaatgagggttttgaaaaaaaaggacccatgtttttttta

SEQ ID NO: 517417 - DNA, 179 bp, Homo sapiens
aggttccaggctgttgtcagtggtagaggggatagcctgacttatagcgtctgcccacttccatagtggatgtaaataatcccaccacggttgatttcaagctaccaacaccaggtgactgaatgtggagttgggcagtagcacacctctatattattccctccatacagatacgacaa

SEQ ID NO: 517418 - DNA, 1045 bp, Homo sapiens
  misc_feature (352)..(352): n is a, c, g, or t
gcgaaagccgacaggaaaagcgctccctcataccggggcggtttgaagaagcctcatcgctacaggcccgaagaccgtgggcgcgtttcccagtagattcgtcgttgtcaggaagttcgtagtcgaggctgctcagtccgtgaagctgactcttcccagtagtgttggtgagggacatcgcgcaaggaattctcaaaaaacccgaccctgaggtttcgagtagctgctcagacacggatccggtgctgcttgcgaggaggcgtcagtcgaatgcaggtacgctggatgtggatcgtagatgtcgaatataccaaaaacttgtgtgctcgaatcccaatgcataagtaggagntcgcctatcaatgctcgcaatggaactaatccaatgttagtgcgtcgcgccggtactacgcgcgggagaagagaagctgttagatgtgcaaatgggctagatattattatgggcggtatttaagtggaattagaaatttctgatagatatagtattgttctgggtattaatctggtgggatctatctttggctgtcagagcatagattgtgtttattaggtattgtatcgtaatatatgatcgtataaaaagattccattactcaatcgtatatgcactttcatgtgaattgcatactagcgaaacaaagtgggttggtccacaagtacccgtccagtagagtgttgaatggcactgttagggatccacggagatgatgaagtacgcatatgtattgcgagaaagagggatggtgtagattacctttgttgccttcgtcatggagtgccggtgatcacctagtatagatagagcgaccgccggtatgcgatagcatccttcatccgaaacgaatgaagttcgataagatgtggtcaaggggtcctgttttgcaagcccacaaaagttggatattggcgatggcttaatggagcttcatggggaagggagaaatctggagaaaccactggggacgggagcacgcacgtaaatttagaacgaggctggtggattgaggccccggccagaattgtg

SEQ ID NO: 517419 - DNA, 213 bp, Homo sapiens
gtccatcagttggttggaggcaccttccaggggtatgggagaagacgagtcttcgtcccatcagcaatatcttaaagaacaagaatcatatgataatagattgcttatgggagatgaacgtgtaaagaatggccttaatttcatgtatgaagccccaccaggagctaaaaaagaaaacaaagagaaagaagaaactgatgggagcaagactgg

SEQ ID NO: 517420 - DNA, 268 bp, Homo sapiens
  misc_feature (7)..(7): n is a, c, g, or t
  misc_feature (83)..(83): n is a, c, g, or t
  misc_feature (126)..(126): n is a, c, g, or t
ctgagtngggggtcgtgggccagtccccgaggagctgggccctgcacaggcacacagggccggccacacccagcggccccccnacagccacccgtggggtcatgcccttatgcccggcgccggacncaaactccatgtttggtgtttgtctgtgtttgtttttcaagaaatgattcaaattgctgcttggattttgaaatttactgtaactgtcagtgtacacgtctgggaccccgtttcatttttacaccaatttggtaaaaatgct

SEQ ID NO: 517421 - DNA, 266 bp, Homo sapiens
acggtgggagcactggttgacaaacaccccaatggaagtgcttgatgaaactgtatactgcatttactttttaaggaacccacctgtgttcccaagctgtgcattgtacatcctaaccaccgctaggacctggataaaagggggctaaggcgcagttaaataaaatactgtgagttactgcccatttgcattgggcttttagagggaaaaaatctagccgggtccttgactggatctcccaaagatacttttcaatcatttgaatg

SEQ ID NO: 517422 - DNA, 396 bp, Homo sapiens
aatggaatcaaaggcaatcatggtccaatggaatcaaatggagacaccattgaatagaattgaatggaatcatcacatggaatcgaatggaatcatcgtaaatgcaatcaagtggaatcatcgaatggaatctaagggaatcatcgaatggaactgaatggaatctttgaatggattcgattggaatcatcatcgaatggacttgaattgaattatcgaatggatttgaatggaatcatcatcgaatggaatccaatggaatcatcgaatggaatcgaatggaatcatcattgacttgaattgaatggaatcatcaaatggactcgaatggaatcatcatagaatggaatcgaatgcaattatcgaatggacttgaatgaaatcacctttgaatgg

SEQ ID NO: 517423 - DNA, 499 bp, Homo sapiens
cacgagggcgacgaccagcgccagctccatcggcgccttcagcggcccggtgacgaggaggcccgccgcataggcgccgacgccgaaataggcggcatggccgaaggagacgatgccgccattgccgatgagcaggttcagcgagaaggcggcgagcgcgaagaccatgatctcgatgccgaccttcaccttgtaggtgtcgccgaagaccgggacgagcagcagggcgacggcgaggccgatccacacgagcgtctccgttcgggtgaaggtcttgaggttcaggatgccctccggcagcacggcgcggcccgaggccacctccggcttgccgagcaggccccagggcttcaccaccagcaccaccgccatcagcaggaagaccagcacgagggtgatcttcgggaagatgaggatgccgaaggcctccagcatcttgatgatcagcgccgcgatgaaggcgcccggcaccgagcccatgccgccgatgacggtgacg

SEQ ID NO: 517424 - DNA, 567 bp, Homo sapiens
cagaactttctcttgcatggcaccaagaatgttaccgaattcaagcagtttaagattgccaatgacaaagatagtgatggtggtgcacgaaaaataatcactcgtgaacatataatagactgaggagatatagtcgtgactctagccaaggccactcatgatacatgaaaaacacgaatcaggcgtgccgaagtatagtacaccaaagaatggctacagcagtaatgcgtatgagagaccacatctaacggggatacgtctacgagactggacggccaccacagcacactagacgcacgatcgacgaaggcatgtgagctccagcgagacagcgaaacaaaacattaggccggaacaagacgaccagaccacgacacgacaggaaccgacagacaaacaacgatacaacaagataagagagaggaaacaacgacaacgaaagaaacacaagagcaatatcacgaacacgagagagaacacaaatacgaaagagcacaacaaagaacacagacacaggaacaggggaacacgacaacagagcaacaacagcgaaaagagcaagaaaca

SEQ ID NO: 517425 - DNA, 272 bp, Homo sapiens
gtcgacacacagtaacctcaccatcaccacagcatcaccatcactatcatcacaccattaccacacagtaacctcaccatcaccacaccaacaccacaccatcaccacaccatcaccacaccatcaccacaccatcatcacaccatcaccacaccatcatcacaccatcaccacaccatcagcacaccatcaccacaccatcaccacacagaaacctcaccatcacaacaccatcaccatcactatcatcacaccatcaccacactatcatc

SEQ ID NO: 517426 - DNA, 307 bp, Homo sapiens
  misc_feature (235)..(235): n is a, c, g, or t
  misc_feature (251)..(251): n is a, c, g, or t
  misc_feature (290)..(290): n is a, c, g, or t
gagacggattttgctcttgtcgcccaggctggagtgcaatggcgccatcttggctcactgcaacctccgcctcctgggttcaagcgattctcctgcctcagcctcccgagtagctgggattacaggcatgcaccaccatgcccagctaatttttgtatttttagtagagatggggtttcaccacattggccaggctggtctcaaactcctgacctcaggtgatctgcacccccgnttggcctcccaaagtntgtgagccactgtgcccagcccagagtttctatcttttngatgtatcttttgaaga

SEQ ID NO: 517427 - DNA, 250 bp, Homo sapiens
cttgacgatagctttcaattattcatggcaccatttgttgaattgggtatcctttccccactttataacatcaaacatctttgttgaagatcagtttggctgtaagtattaggggtttttttctgggctctctattctgttccattggtctatgtgcctatctttatgccagtaccatggatgttttggtgactatggccttatcgcatagtttgaaatcaggtaatgtgatgcctccagatttgctctt

SEQ ID NO: 517428 - DNA, 910 bp, Homo sapiens
gtctctcgccaggcgtcctcgtggaagtgacatcgtctttaaaccctgcgtggaaatccctgacgcaccgcggtgatgcccaggaagacagggcgacctggaagtccaagtatcttccttaagatcatccaattatttggatgattctccgaaaatgtgtcatccgtgggagcagacaactgtgggctccaatagcaagtatgcaatgcatgatcccggtagtgtcccgttcggcgagtgaagggactgtggtgctgagtgggcaagtaacaaccagtgatgcgcatagggccatccggagggcacgcgtgggaaagagaaaacccagtcttctggaagaaactggtgcgcatcgattatcgcagggggaaatgttgggctttgttgttcgaccaagggaagtgactctcacgtgagtagtcatgggaacaatgtggctggacactaaggtgcaagctagttgcccgtgctgatggcatgtgccccatgtgacagtctctgtgccagcgccagaatactggtctcgggcgcgaggaagacctcctttgtccaggctttaggtatcaccactaaaatctccaaggggcaccattgtgaaatcctggaggtgatgttgcaggctgatccaaggagttggagacaaaaggtggggagcaagcgaaagccaacgctggcttgaacgattgctcaaaatctacccccttctccttgtgagtggctcatccagcagggtgttcgacaatgggggatctaacaacctgaagggctgaactgacagaggaaatctggatctcgttcctggaggggtcgcatgtgcccatgtcgttgaacggcgtcccacttttttctacccttttataaacgggaaaaaccggcttttggggagtaaccccctgtgaaggagctctgt

SEQ ID NO: 517429 - DNA, 435 bp, Homo sapiens
tcataaagaccggtagatgagttggcttaggtgaccagtgtcctgctcgcggtgatcgatgggctctacaatatgaccccacagcaacagatactggatattttttattttttgagaaggagtcttgccctgtttcccaggctgccgtacagtggtgcagacatggctcactgcaacctgcacctcccaggttcaagcgcttctcctggcttagcctcccgagtagctaggactacaggcacctgccaccacgactggctaatttttgtatttttagtagagatggggtttcagggttgcccaggatagtctcacttctggacccaaccaatattcccgccttgggctcccaaagtgctgggattacaggcattagctagaatgccacacgaattttttttcctaaactacaaccttttttacaacccagagtgt

SEQ ID NO: 517430 - DNA, 101 bp, Homo sapiens
tggttgaaacatgagcctgtttggctacgactaccagcgagagatgaagtggccacctggggcgccgcgactttcctatcaactgacttataccatgttag

SEQ ID NO: 517431 - DNA, 322 bp, Homo sapiens
tatcccccttcgtgcttgcatctcgtacgtaagccacactttattagacggccaaggagaaggggtgggccagcggcgttttatcctccaagatggtcttccgcctgcccccattgacatcgatgcttgagatggagtgaagtttggagtcaacccagtagaggcggccactgaggagatctagacacacaagtggataaggagaggtcacgtgctgatgccagtcccagaggggcctgagggcctggccacgctgctccgggcaggaagaccccctgccagggacctagcagaaaagcaccctgtagaggcagctccaacc

SEQ ID NO: 517432 - DNA, 436 bp, Homo sapiens
cctacatataaataccactgtcatctcctcccaatttactgaattgatctggaaacacctcactcatttctttgaaaaatgtagtaagaaacgcagtatgttgtattcagacatagggatcataggtccaaaagagtccaactagtatagtctactgtcacatgtgagtccggaggactctctgatctataccccaagatagtgtatgcccaggtgtatcaaattctggcgatgactcgaatcccactgtaatcaggcatattcaatcaccatacggacatcatttgttgtataaactatgagacaaagaatcgctccctcaatagctaaactcaggagaagtgatgctctgatatgggaaacacgggccataccgtatcccggcgagtgaagaacataaaactgcactaacaagccatgggccaatcaagctaga

SEQ ID NO: 517433 - DNA, 410 bp, Homo sapiens
  misc_feature (232)..(232): n is a, c, g, or t
agccagtgggcccgaggatattggtttgtgcccccccccttctccccgaggtagaacccaaacccctggggaaaaatttccaaacccggtgttttatgcttacgaaaccccccaaaaatcaggtttttgtgcttgccaacccaaaaaagaagctcccaagttgctgaagacttgaaattgtaaagaaaaaaaaatttccccacgccttctgtctgtcaggccctgaaacttntaaacccaaaaagtgttaaaaacctggctagtgtggaagcatagtgacccccccgattgggtagggtttaatgttccccccccctttttttaaaaaaacccagttttaaaaatttggtttcaaggggccctgggtgaaaccaatattggatcccccccaagtgacccctgttttttta

SEQ ID NO: 517434 - DNA, 490 bp, Homo sapiens
gaatcgcttgaaatccgagagcagaggttgcagtgagccaagatcgcaccactccattctagcctgggcgaaagagtgagactctatttataaaaaagaaaaaaaaaaatccttgtattatgcttaaagcaaaaacctaacatgaaagtgttctaacattcaaagttgatgaatcaggaagtggctgctattaaagtgtagcaaacctgtctaactgactcttagaagttgatcactttatcaaaactggtgttttacatataaaacaaattatatctctatggagttctcaaaaatacatggtggtacttgtagaaattcacccacagcccaaatgcaacaaaatttcttctacagaacctatacagatgtatcttgctttatacaaagtacatattccagaagctgtgtggattatatgttaaggctatgtatggactgaggatcacattacgttgtgttaatgagagtcattgtacctctccactgt

SEQ ID NO: 517435 - DNA, 122 bp, Homo sapiens
caaagacccactgtatgcacacaactgttcttgctggtttgggataggctgccatgcttttttaatgttagtacagcctgtatattcattacggaattcagataaaatttccttatgttaaa

SEQ ID NO: 517436 - DNA, 385 bp, Homo sapiens
cgtgtccgtatagcgacattctatccagtctgcgacatgctaggcagaatgatgaagtctgtgaattgagtataggctcccataccctcaggctgtcattgatcagtgacaactttataaaaacaaactgcaaagtctgtggctcgtggatgcctgcttcctagaagtagcccattaaggttaaactctgtggtcggtatttgcaagcgccgggcgtggtggctcacgcctgtaatcctagcaccttgggaagccaaggcaggcggatcacccgaggtcaggagtttgaggatttgcaagcaaaaggtcctctcctgagtctttcccagatacccagcagtgcagaggctagctgtggaaggttgcagtgggacacgaatgttca

SEQ ID NO: 517437 - DNA, 867 bp, Homo sapiens
catcatagttaagtgaatgtgtcgtgtaaacttgacagtatgtaatgccttttaaaagatcattatgcaggctgggcacggtggctcgcgcgtgtaatcccagcactttgggaggccaggacgggcagatcgcttgagcccaggagttcgagaccagcctggccaacatggcgaaaccccatctctactaaaaacgacaacaaaaagaaaaattagccgggcatggtggcacgtgcctttagtcccagatactcaggaggctgaggcaggagaatcacttgagcccagaaggcagaggtttcagtgagccgagatcgcaccactgcactcaagcctgggtgacacagtgagaccatgtctcaaagaataagatacattttgcatgcccagcttacgtgcagttcaattaccggaaccagcgatagccgtgtgattggtgagggggaataaggggagttaaatcttctaggtacgcacagttctgggtcatgatgggcaagaaccacagtgtttgacgaaagatccaaccttttggaagtatgctggatggaaggccatgtgttgacttctttgacaaggaaaatgttcaagcaatttttccctgtgtggtgatgtggtgccttgtcaggccccggctcatcggggaggctgacgccggaggtgtcatcgaaccaggggtcaaggttgcagtgagccaggaacaggccattaactccagctgggtggagaagaccccctttaaaagaagaaaaagggaagaaactgtggggcccgcccccaaaattcaaacactgtggggggccagagaacagtcaaaggcccgaaaacgcagaggggttcccaaaacggggcgggttaaacaggtgg

SEQ ID NO: 517438 - DNA, 427 bp, Homo sapiens
  misc_feature (320)..(320): n is a, c, g, or t
  misc_feature (419)..(419): n is a, c, g, or t
cgcaggaatttggatgagggatggggccccagttcttgggggaagctgattcatggactgggatgggctggttgggactcaaactttgttgcattcttggagtagaagacctcctggaatggggacagccacctttctccatgtacccagggatgagagaaagctggtttccgaaaagaagaatgaaatagaattgcagagagaagcagagataagatctgtggtgcacacaagttacatacactaccttggttctgcatgtcttcctggttcctggttctgatcccttatcacctccagctgtacttcctgcccttggnttccatgaagtagcctcattcctttccagttcagtttcctttttatgttttaagccagttttcagtggggtgtctgtttcttacaaccaaatgtttccnttgttgaa

SEQ ID NO: 517439 - DNA, 233 bp, Homo sapiens
aatacataggtatcgtctgagctatgatatcaattggcttcctagaggtttatcgtagtgagcccaccatatatttacagtagaatagtactgactcactagcattttcacctccgctaccattatcatcgctctccccaccggcgctccaagtatttagctgacctcgccccactccacggaagctatatgaaatgatctgctgcattgctcttagtccctatgattcatct

SEQ ID NO: 517440 - DNA, 431 bp, Homo sapiens
aaatgtactctttcatcactactttaaagtaaaagatccaatggagtgatggtgtaccgttctgtcacgtatatgtgccctgtgtactttttctatagtcaatctgagtttagtgtccttcttgggtttacactaactgttgtaagctgtgttggcattgttcttaggacaatggttttaatacaggttaaggctgcattcaggagacgtttccaaaccatcctggaatcacctgagtttggtaagtcgccctcttataccatccctaaggctaactaagttagatgttactcattagaacacacaaataatcacagattttcctgaagatgttgagccagctatgaaagttatcccctccacccaattttggtcctaacaagtgttctgaacccgatttccaaagacataacggtcatatatgaactaca

SEQ ID NO: 517441 - DNA, 232 bp, Homo sapiens
aaatgtccacggaggactgtgtgtcataggtggacctgctgccgtgttgcaggcgctcctgtggtgaggcccagacatctgccaaagtgtctgagcgagcacgagtgttggggacgacggacccactctggccacacggcgaccgagtgacagatgggtgcctgtgtcccataggcttgcctgaaggtgggtagggcgtgctgcggcatagtggggtggctgtgggctccca

SEQ ID NO: 517442 - DNA, 175 bp, Homo sapiens
cccatttttgaaaaagtttttttccaaattttaaaaaaaaaccccttttttttttttaacccccagggttttctttcccccaaaatttggaaaaccggttgattttgggcccccccccaaaaaaggaaaaaaggcctttttttttttttaaaaatggggaattgggagggcccca

SEQ ID NO: 517443 - DNA, 885 bp, Homo sapiens
  misc_feature (76)..(76): n is a, c, g, or t
  misc_feature (106)..(106): n is a, c, g, or t
  misc_feature (237)..(237): n is a, c, g, or t
  misc_feature (495)..(495): n is a, c, g, or t
cggacgcgatcgggcgttttattaataggaccttagagaatagactcatcaggggattctttcttcattttttcanttggggtgggggtggtgtgtgctacttaanaataccaaaaataaatcactcatctcccactttgcctgttcaaccttgttaacttccttgggaacagtgaaaaaatgagggagggccttggagagttaatttggctctgtgacactaaaatgggggggagngaaaatgtgggcctggaaataccaaacctgtcgtctgcaaaatgaaagaagcctgagagaacacagctttcaggaacaagcagttgaatgcaaaaaccacacattttttaaaatgacaagacccagagccccagaacatagggctctctccatcctccatcgctttctcatgggaggccaagggcagccacctgacagggcttttagaaggggggctgggatcctaccacaggccagcacttcctcagactggcacanactctgctttgggcttaaatgtaaagggctcttcactcctccactggaggggagcagttctgtggtggggcagttgggttccattggatcacgtagctggccggaaccataataaactggtggagggggtaaatgggagacccctttgggctcgggcttgcggtgggtggggatggtaaaaggggacccggagcgggggctcgggatgatgggggtggggcgatggaagctccgttcggggatcaacgaggggggtggggtgggggtggtataaaagacggggtggggaagagtgtggaaaagtggtgggacattaacggaaggcgctggcgggggagagagggggccgggggggccggcatagccttgagagagtggccgcgggggggg

SEQ ID NO: 517444 - DNA, 203 bp, Homo sapiens
gaggggctgctggcataggtctaccgactggtttgcgtgcacgcgctactgctatacacgacatagacatcatgctatagcgtgggatcaaacacgattgtaggcgaccacggatactctctgggcacacagcgacctctggacatataaggccctatgtgccataagatgcatgcaagcacatacatcggactggggtacaa

SEQ ID NO: 517445 - DNA, 266 bp, Homo sapiens
tgaatgaattcgcgcgaaggattgatgcggtcgggagcaaacgcacgatgcagcgcctgctcgacttttttggcatccggcacattgcatggcatagacacaatcgaagggaagcggaaccgcgctgctgctccccagggatgcgatgcgctcgcccgcatccgaagcccgcgtcataccgatcttgacgataccgggcatggccggattcgtaagcacgtagaccgtctgaagttcctgctgtaagtgcgcgtcgtccatttttt

SEQ ID NO: 517446 - DNA, 899 bp, Homo sapiens
  misc_feature (46)..(46): n is a, c, g, or t
  misc_feature (254)..(254): n is a, c, g, or t
  misc_feature (369)..(369): n is a, c, g, or t
  misc_feature (482)..(482): n is a, c, g, or t
  misc_feature (492)..(492): n is a, c, g, or t
  misc_feature (501)..(502): n is a, c, g, or t
  misc_feature (508)..(508): n is a, c, g, or t
  misc_feature (513)..(513): n is a, c, g, or t
  misc_feature (518)..(518): n is a, c, g, or t
  misc_feature (523)..(524): n is a, c, g, or t
  misc_feature (549)..(549): n is a, c, g, or t
  misc_feature (553)..(553): n is a, c, g, or t
  misc_feature (557)..(557): n is a, c, g, or t
  misc_feature (583)..(583): n is a, c, g, or t
  misc_feature (586)..(586): n is a, c, g, or t
  misc_feature (588)..(588): n is a, c, g, or t
  misc_feature (603)..(603): n is a, c, g, or t
  misc_feature (605)..(605): n is a, c, g, or t
  misc_feature (618)..(619): n is a, c, g, or t
  misc_feature (635)..(635): n is a, c, g, or t
  misc_feature (665)..(665): n is a, c, g, or t
  misc_feature (685)..(685): n is a, c, g, or t
  misc_feature (687)..(687): n is a, c, g, or t
  misc_feature (699)..(699): n is a, c, g, or t
  misc_feature (707)..(707): n is a, c, g, or t
  misc_feature (751)..(751): n is a, c, g, or t
  misc_feature (756)..(756): n is a, c, g, or t
  misc_feature (758)..(758): n is a, c, g, or t
  misc_feature (782)..(782): n is a, c, g, or t
  misc_feature (794)..(795): n is a, c, g, or t
  misc_feature (806)..(806): n is a, c, g, or t
  misc_feature (811)..(811): n is a, c, g, or t
  misc_feature (816)..(816): n is a, c, g, or t
  misc_feature (818)..(818): n is a, c, g, or t
  misc_feature (822)..(822): n is a, c, g, or t
  misc_feature (833)..(833): n is a, c, g, or t
  misc_feature (891)..(891): n is a, c, g, or t
ctcgacatgttggcctatgggcaaaggctggaagcagagcgaatgngagcagagcacacagagccgtggagcgagagatgccggccctgggctgggccgtggctgccatcctgatgctgcagacggccatggcggacctccccggggactctgcccaggaaggcaggggtgttttcagacctaagcaaccaagagctgaaggcagtgcacagcttcctctggtccaagaaggagctgaggctgcagccctccantaccaccaccatggccaagaacaccgtgtttctcatcgagatgctgctgcccaagaagtaccatgtgctgaggtttctggataaaggtgaaaggcatcctgtgcgggaagcccgntgccgtcatcttctttggtgaccaggagcatcccaatgtcaccgagtttgctgtggtgcccctgctcagggccctgctacatgcgagcactgtcccccaggcctgggtaccantcctcctggncatcgatgnncatctncacancagantatgnnctcctctaccacaccctgcaggaanccancaancccctgcatcagttcttcctcaatancanangcttctcattccaanantgccatgacaaanncctggccttcaccgangtggccccccggggtgtggcttctggccancgccgcagttggcttatcananaacgctatgtanaaagctantttctgcaccccactgggctggagctcctcgtggatcatgggancacanangctgggcactgggccgtggagcangtgtggtacaannggaaattctangggancccanangaantggctcggaantatgcagatggagaagtggacgtggtggtcctggaggacccgctgcctggggggcaangggcatga

SEQ ID NO: 517447 - DNA, 964 bp, Homo sapiens
tcgtgccactacactccaacctaggtgatgggaacgagactccatctgaaaaaaaaaaaaaaagaaaaaaaggaagaaacaatattccttaccaaatccagggtcttaaactcacttgggagtggctggtttgtaaatggtggtggttggtggatgtggtggctctacaaatatgttttgacgcttcggcttcattcacccaacccaccatccaattcacgctagccgttattaatcaccttataggtgggtccagaccctctgggagagcattgggcaaccacctggcttggggggcagcatccatgttggggttacaacggagcaaggagttgaagtgggtttgcacacccgggggcggcgccacaggggtttggaagtaacacctggtggtcactttggcaatttagagagatgacaatctccggctattggaaggaaattagagccttagcccgggagtataggaaattcgaacccacttcagagggtcccaatcaaggtcgcatggtctgggagacgaattaccggcacagaaccgctcctagaagagccaggaagaagggaacccagtctggtgtttggggcaaccacttttcggtcggagacaccttacacttggggtgaaagtccagacccaacgttacatcagcggcgcggcaccaacacttactcggtgtcgacaaactaacttatcctgaaaaaggggtgacacaatggggaggactggagaagccggcactggctttaaaccacagggcttggcccctgttcaacattggggtggggcgaagatcacctatacctgtcccacgttgtttcccccccggaagagggttaccaacggcttatgggcaagtcgggggatcacatgacaacttggccgttccactatggcacacagctggacggcaccggtgcgcaccacggcatcccagtgttcgcatcaacatagacattacgc

SEQ ID NO: 517448 - DNA, 1107 bp, Homo sapiens
agcgagcgagcctatatctgtgcccaccctctggtacattgtgacatgctgcaggcacgcgcgacaggtgtcccctgtctaccgcgccgcccctacccatgggcccgattgactgagatgatcgtgattactcgttgtgtcttcacgtaacggtgcttcgcggtaagtctactccacatgggttacacgtccgttttatgttgccccgttggcttgcatccctgcagatgtggtgtggtctgccactgggccatgccgggaggagtcccatcattacctatggcgtatttgactcgtgcatggacagttgcatcctcttagacacgggagccgatctcacagtgttctcgacacgtggagtccgagataaagcatggtagcacatggaacttgcatttgagcccactgggaaacttggacgtgcgatatgtcatgcggtcaattagtagggacgtaccatcctagtagttcgtgaagaactgcgggcataatgcgtgacttgcctccaggtgctgtgagagtggtctgaggggaccttgtgtcagcgttgctcggatatgaccactatctcctgtcttcgagaccagcatcgattcctccgtacaggaaagcgagccttggaataagacctcctgtacatgaagtgctagtttcatcttagatactaggaggagacaagtacaggccactttcaataaacatgattactcaagggacacccatttgtataccacaatgaattatcaatgagtgtcccccaaatactggtgggtcctggtttggcctttttgcttgtccctttgtgcaacatctggtacctctttatgcaaacctaggccttctagatagtgcgttgaccagtcggggaaccccttgaggaatcggcccctttttgggttgatccggcccgccggagatcccccttttgttcactcaccccctgtcaagcagggcatggcctccaagaatggctaaaaggaatcacagaacacaacaggttgccatgccaaaaatccccttgggggttcttgacgcccctttagtttttcaatccattctcaaggaagatgataggggaagctgtcttcacgttgaagaagttcccag

SEQ ID NO: 517449 - DNA, 165 bp, Homo sapiens
tagggcgatctggctgcgacatctgtcaccccattgatcgccagggttgattcggctgatctggctggctaggcgggtgtccccttcctccctcaccgctccatgtgcgtccctcccgaagctgcgcgctcggtcgaagaggacgaccatccccgatagaggaat

SEQ ID NO: 517450 - DNA, 152 bp, Homo sapiens
aaaaaattttggggtttttttccccaaccccccttttgggggggaaccaaaaaaaattcttttttcggggtttttggggccccccttggggtttaaggcttttttttttggggttaaaggggttcccttaaaacctttttttttttttttta

SEQ ID NO: 517451 - DNA, 369 bp, Homo sapiens
agagaatgattattgatatttcattaacttttccagctaatgtttcattttctttagtcaacttcttccagcgtaaggagaataaaaccctatgcaaaataaactgagaactagatctttttttccctcctgatggacttagattctgtgaaatatactggtaatagtttcacaaagattgctttgtcaatgcagattcattgaacactttccacctttttttcctgtgatttctccacccctttcacttctgtctgtgtttagagttttgacaatcccttattagttccagagtagaacttatgagagctaataagggtttacattacagctctgacagctggcactaaaggttaatagagagcaatt

SEQ ID NO: 517452 - DNA, 114 bp, Homo sapiens
ggcggcccgattatcaatactccactttctgtcataaaacattgagagaatatggtaaggaaacagaagactagaaggcagtaaaaaaacaattatttttaataaggatcccct

SEQ ID NO: 517453 - DNA, 1003 bp, Homo sapiens
  misc_feature (469)..(469): n is a, c, g, or t
  misc_feature (494)..(494): n is a, c, g, or t
  misc_feature (762)..(762): n is a, c, g, or t
  misc_feature (971)..(971): n is a, c, g, or t
agcgggcggacgggtccggaggtgacgcttgatcgggcccgagttttctcgtgtggtgctaccgaggtgtccagccaggacaggtccccctcgccgggtcctgtctctcctctgtggctacgaggtgccgctctcgcgtcggtaggcgctcgtcgcggatctgagtatcggaggggctgtttggtgatggccatggctgcagtggcatgggggtgcgttagccggttgaattgggatgctgtgagcggcgtgcatgttctccatgactgactacgattgagttacctggagcaatatcaacagctgtgaatctgcttgcaaagcacaaatgtgccttacaaccgaagacgtggagaatgcacatttgaatgcgcgcacagcgagggcaagtgcttaccgcagtggttccaggcctcatgagcggtgcatgggggatattagagaaacgtgaaaattgttagaatcgtgntgattgaacgcagttataatggtancttcctaggacatggaatttgtcaattgaaagatcaagagggggaagagtctaggacagtgtaggcaagaaactcttgtccttgtagagtcattactcattcgagggttggaatgatgggagcattttaggagatgcaaggagggaaggaaaccagttttgttttccttcacgtaagttccatggatggacaaagtactttgacctgggttatccaagggaaaatctcagcgtgtagatttccgtaaaaaatcacgatgtggtatacngcgaggttaagccacaggacacacgagtatttcaaggcccacaccacaagttttgttgagggaattgtgattcggctataatcagagggcaaccttttgggaaaaagacccattgggcgttcttttcaacattttaatgaaggacgataggttaaaatcacaaactcccaacatgggtaaaacgcacaaacgcaacggccgtgaatacnacagtgaggaacagattgttgtttcccccccg

SEQ ID NO: 517454 - DNA, 448 bp, Homo sapiens
  misc_feature (115)..(115): n is a, c, g, or t
ttgtgcctatcgtgagacgtagatggtcagttgcatcagactcaagtgctccgcttcattgtagatagatgtacggaagagctaggatttcacgtctgctagtccttcgagaccnctaaggtcggatctcagagccatgtgtgtgcaggactgcactagccttgtcaatacgataatatacatatccgtacatagccccgttagtgcgcatagcctgcagcaacgcaagtgtccactcatggatgaatgcataaacttgtgatacatcatgcgaaaaggcgttggatccttcataaactgtgcatcttctagcatatgcgttcaacatagtcgcatctcgagcacccctgtgctcaaatcattaagcctgtcacgtgcagcgtcatgcttcgtgacgcaagtggcattgagtgcttggcatagcctcccgaacagggtcatacagtag

SEQ ID NO: 517455 - DNA, 512 bp, Homo sapiens
  misc_feature (504)..(504): n is a, c, g, or t
  misc_feature (507)..(507): n is a, c, g, or t
ggaagaattatagacttatgattttaaacctttgtgaaatcttagaaatcatctaacctagtcctttttgtttcattttttatattgagatgaaattcacataaagttagtcatttgaaaatgaacaatatcaatacttcattttttatggctaaaattccatttcatatatatatatcatatgttatatatatatttataaaatatatcccataatctgtttattcattcacctcttcatgaacatttaggttgtttttaccttttggctgtagttactagtgctgctatgaaaacacgtatgtacacgggtacctgttttcaattcttttgggtatatcctaagaggagaattgttagaaagtatggtaatactatgtttacctttctgaagaacagccaaattgtttccaacagtggctgaaccattttacactcccaccagcaatgtatgagggctccaactttttcatatgcttgctatcacttcttgttttctttaanaanaaaaa

SEQ ID NO: 517456 - DNA, 183 bp, Homo sapiens
tgtcatcgatgacatggaggacgtctctgccctggaccctcagatcgtgtgccagaccgttccctgcaaacagagctgtccgtggcacagtgcacgcagcggaccgtggacatcgtcttcctgctgtacggctccgatgcggctgggtgagcagaacttccacaaggcccggcgcttctgtgt

SEQ ID NO: 517457 - DNA, 367 bp, Homo sapiens
tcatagtccaaacagtgccaggctgtgttttattaaagggtaggcgatggctggacgcagtggctcacgcctgtgatcccagcattttgggaggccgaggcgggtggatcatgaggtcaagagatcgagaccatcctggccaacatggtgaaaccccgtgtctactaaaaatacaaaaattagctgggtgtggtggcgcctgtggtcccagctactcgggaggctgaagcaggagaatcacttgaacccgggaggcagaggttgcaataagccgagatggcgccactgcactgtagcctggtgacagagtgagactccgtcaagaaagaaaagaaaggaaggaaggaaggaacgaagggagggaggg

SEQ ID NO: 517458 - DNA, 867 bp, Homo sapiens
ctccagctggccctccccagtgttgtatccctggggtgcctccccctcggcgttcttcttcttagggcttttttggggccattcttgggccctccagggccctaggttcttcctgggtattctttgtaccttgtttgcggtttctagtctccctgcctccatctccttttcccggcgttctccccctcatttgcgatctcggagggatcttagaccaattctgttccgagtccttgcgtccctgtctttaaccctccgggactccctggagacccttggtcccgagcatatgcttcttataccaggcccctgccccttcttgcaccagcctcctatatcctgcccggccaacaccattgtagtcttctgggtacctcctccagcgtcccgcgcccgctcttgtcttgagcaacccctgctatctgttgcgtcccttccctcgtttgtgcttaggtgtttctcttccatgggctacatcatctccctctgacaacgatacgatccccccactgggctatccatcccccaggacattcccaacaatacccctgggcactctcgtgtgtgacatcacccccattcccattgacccatagatcgtgtgtttgggatctgttcttctccccaattatttgtgagccccttggccagataggggtggcacatttgtgtgttgtgcacatctgtgtacatatctgtgatggattcgcttgtttggtatatcgtgctgtgactgttacctttaactgtattggtatatatgttttgtatttttatcacgtaatccaccattatgtggcagccttttagctatagtttaccatggtccaaagttgaacccacccaaccaacctacaaattaaatta

SEQ ID NO: 517459 - DNA, 114 bp, Homo sapiens
agacttgccaccaatcttcatcctcattcattgtctatgatgccccagacaagaggacctaggagcgtgcaagatctctgaagtcctggggagcggtggagcaagggtaccgag

SEQ ID NO: 517460 - DNA, 418 bp, Homo sapiens
  misc_feature (47)..(47): n is a, c, g, or t
  misc_feature (97)..(97): n is a, c, g, or t
  misc_feature (103)..(103): n is a, c, g, or t
  misc_feature (112)..(112): n is a, c, g, or t
  misc_feature (125)..(125): n is a, c, g, or t
  misc_feature (129)..(129): n is a, c, g, or t
  misc_feature (135)..(135): n is a, c, g, or t
  misc_feature (138)..(138): n is a, c, g, or t
  misc_feature (157)..(157): n is a, c, g, or t
  misc_feature (169)..(169): n is a, c, g, or t
  misc_feature (177)..(177): n is a, c, g, or t
  misc_feature (181)..(181): n is a, c, g, or t
  misc_feature (183)..(183): n is a, c, g, or t
  misc_feature (198)..(198): n is a, c, g, or t
  misc_feature (200)..(200): n is a, c, g, or t
  misc_feature (202)..(202): n is a, c, g, or t
  misc_feature (233)..(233): n is a, c, g, or t
  misc_feature (238)..(238): n is a, c, g, or t
  misc_feature (250)..(250): n is a, c, g, or t
  misc_feature (254)..(254): n is a, c, g, or t
  misc_feature (257)..(257): n is a, c, g, or t
  misc_feature (265)..(265): n is a, c, g, or t
  misc_feature (278)..(278): n is a, c, g, or t
  misc_feature (280)..(280): n is a, c, g, or t
  misc_feature (293)..(293): n is a, c, g, or t
  misc_feature (307)..(307): n is a, c, g, or t
  misc_feature (311)..(311): n is a, c, g, or t
  misc_feature (316)..(316): n is a, c, g, or t
  misc_feature (354)..(358): n is a, c, g, or t
  misc_feature (375)..(375): n is a, c, g, or t
  misc_feature (379)..(379): n is a, c, g, or t
  misc_feature (383)..(383): n is a, c, g, or t
  misc_feature (392)..(392): n is a, c, g, or t
  misc_feature (398)..(399): n is a, c, g, or t
ggtccttcttgacacagcaccatcattcagaaatgttaaaaaaaaanacttctctcctttctatcttccattagcaaaatagaatcaagggcaaatncatggncgccttgtntcctggttacgangggngagggnggnctcctgggggggtgaggtnagggctcctgcngggcggcnttangnttccaagagtctgcncntncatgccacacactattatgaggcacagattnaagtnacatttacatantagngtncacgtgtnacctacccaaaancngggccatttcgcnaaacatatacaggnggtnaaatncgaacaagtgaggttctgggaacacaaatttttttgcnnnnngggttctgtttctttcngctnttgncaagccgtnatatannacattttgccactcgggat

SEQ ID NO: 517461 - DNA, 407 bp, Homo sapiens
cccacccagagcctacaaaaaagagctgggtagcaattcctactgaaacccatttccaaaaaaattggaggggaagggaattcctctcctaactcattcctacaaagccagcatcaccctgatacccaagactgagcaaatacacaacaacaaaaaagaaaacaatagcccaatacccctgatgaacatagacacaaaaatcctcaagaaaatactaacaaaccatatccagtatcacatcgacaagttaattcaccatgatcaagtaggcttcattcctgggatgcaaggttggttcaacataggcaaatcaataactgtgattcaccacataagcagaattaaaaaccaaaaccatatgatcatctcaatagatgtggaaaaagctttcggtaaaatacaacatc

SEQ ID NO: 517462 - DNA, 165 bp, Homo sapiens
gcttaagatgagggctccactttgttaaataaccttggatgattggaaaaataggactgacgaaaaggggaactatttaagctagtgaagtggttcgaattaagggttgaaaactaaacctctgagaataaggcataggtggtcgagatgaatatggggagggaa

SEQ ID NO: 517463 - DNA, 221 bp, Homo sapiens
ggatcctaactttcttactgaaggaagttcttcacaagtacccatctgccttcagggaagaaaacataactcattttggtctttcaaattcagttctcaaaaccaaatcctgttgtcagcaatctgtgtcccaacgcctttttcagccacagccttttccccggggaaataaggttcccaatgtaaatttctcaaataaccccctgaagattaaaaggaaa

SEQ ID NO: 517464 - DNA, 1436 bp, Homo sapiens
ctttttcctcacttatatataacgtcacgtgttttcttttatctctctctgcattgtttttttattccgcccggtggcgcggtatttatatattttttttcttcatctcgtgctatcttgttttctccttacttaccttcccttattttgttgtctgctttcataattttttataacagattttttgtttgttctacaactaataacatatcttgttttgtttgtcttttttcctcctttatttttatgctgcgcgtaaagttgttttgttcttcggcaatacacatacatttctttttcttcttcctacttttctttgcttgggtctggctatttgtgtgtttctggctgtctcgtgcggctggctgcgctcttgtttttttttttttgtttttttttttttgttgtctggcgcctccgctctcctctgtagcgttcccatcttgttgtgttttttttctttcttctctctttccttttttttttttttttttttttttcttttgtttttgttttgttctctttttctctctcttcttttttttttttttgttttgtgtcgttcctcgatttgtttgttttgtttgtttgcctcttctcctcccgctgtcttgcttctcttctcttctcgtcgtgttgagttagtttttattttttttttttctttttttatcattcttttgtgtttttttcttttcttcttcttctttttttttgttctctctcttgtttgtgtgttatttctctccccctctcttctctctttctttttctctctctcttcattataatatattatctctcttattttgtctccctctcttctctcttgatatttattttggttttcttttttcctctctcgcttgttttctcctcgtctcgtctcccgttgctttttatgttaacctcctccgccctcgtcttcttgtttatatattatttatttcctctcccccgcttggcgtctcctctcccactctattattctctttcgcgtgtgtgttgttctcctctttttctcctcctctcacttcttctttctcttttttttgctccctctctctcccccgtcggcggggcgctcccctcgctcctcttttttctccccccctcgcggcggagggggagagagcgctctcctccccacctctctctctttttccgcgtgcggcggcctccccccccttcggagagttttttctgttattatatatatgtagagagagaaaaacacactccgctgtgctctttctccccgctctcttcgttttaagataaaacaatttttttattttccccccccccccccccccgtgtggggggggcgcgcctcttctcttttgtgtggtggggcaccctctcccccctgtgtgtgtgtgtccctctcttgtttttgtgtgtgtttgggtgcgcccacccacccccccaccaga

SEQ ID NO: 517465 - DNA, 198 bp, Homo sapiens
gatctgtaatgatcaagtcagggtatttagaatgaaagagctactggaaccagttaacaagctggacactataaataagtgaggcccttgtttgctgggaccctctagagcttaagtcagcaatccagaggcaaaaatagcatctccctccaagctccttaagtgaagtgcatacggcttccccatgtctcctagatc

SEQ ID NO: 517466 - DNA, 135 bp, Homo sapiens
tgcgcgctcgcttttatacaccattacatgacactggctttatgttactcttgcaagatctttttgtttctaccacatgtcatgcaagccttcttcatccaacatattcacaacaatcatagcaaacaaacatgc

SEQ ID NO: 517467 - DNA, 142 bp, Homo sapiens
cgaactgggcctttgcagcttcttccagagcttccttataccatatctgcagtgactttaacatctgttgcactgtttgttgctcattttagctgtcttctaacaacgatctcacgctctggcgaatgtcagacagcagcta

SEQ ID NO: 517468 - DNA, 274 bp, Homo sapiens
tcttcagggatagaaggcaggagtagacaagatccaaaatacgtgcatagtggggtgtcacgagttatagagatggacagatactaattattagtcagaaaaaggatttcgctaagagtgctgtaaacttgaagatggtactccacagagagatgcagagaaagtaagcaatgaaggttgttttataaaggtgatgaccattatagagtcagaaatgggagtcgttgcaggaatttccttgggagtcgcttgcttccaagacatttagggtccc

SEQ ID NO: 517469 - DNA, 252 bp, Homo sapiens
ccccttctgtgctcccgcccttccccggcgagatagccttcggcctgtgctgctgcttccaccctcgccgttcctttgtaagcttttggtctgttatccggcgtctgtccctcttgtccctgaactcttcatccggacttgatacctgtccttgctgggaccccgtccacctgggagggccagtcccatgctcttcaagtcccaggcccttggcctcttgctcctcaagattccaagttgttattcttcttt

SEQ ID NO: 517470 - DNA, 163 bp, Homo sapiens
ctcagagatgctttcctgatatacccactgttcagaaagttatattatattcttcataagcctatatatattacttttatatattattatttttttggagatgaattcaccctctatggcccaggtgggattgcggggaattgattggggaccagtgaaacgg

SEQ ID NO: 517471 - DNA, 141 bp, Homo sapiens
gcaatcacaattacaatatatacaccaacgaacaatgttcaaccagtaactactactaatcaacggccatgatcatacaaaggcaaggcacttattcagtgaacactatcagaagaaatcttcctttatataattcctaaa

SEQ ID NO: 517472 - DNA, 759 bp, Homo sapiens
  misc_feature (207)..(207): n is a, c, g, or t
agcggagtggcgcgcatcgtaaactgcagagtctaggcactacggtcgctcagcaagcgtggtggcgagtctcgcttctaacctgaggttgcattccatgaacgcagtctctgccgagtgttaggcagcatcgcgcgtgatgctttgctgatgccctgggtcaggggcaggttcagtcgtcaccctgtgggttatgcctctctccgntcgccacgtcccggcgggggtcccatagtcccatcgaagcgctcatgagtgatggctgtgtctggaccagcggtccgtggtgcctggtgggtgcacgcggaggctcggagttccagagcttcgctaggcctcggacgagagcgagaacagcgtatttacttatgggatgtaagaaggcagaaaatcatttttgacttccttgagttctattacagtagctgtcaacctaaggcgcattagtcacgccgcaagattgtgaatgctctgaacgagtcaagtggagcaaacttgaccttaacatctagagctttctataataacgtacttggtgaatatgaggagtatattactaaacttatcaactagcacaagagttcttcctatgaatacaggagtcggaggcgtggataggactgcctgtaaaactagctcgtaagtggggctataccggtgaagggcattcagaaatacaaagcaaaccattgtgtttgcagtctggggaacttctggggtagggacgttgtcctagctatctccaggttccacagaacc

SEQ ID NO: 517473 - DNA, 216 bp, Homo sapiens
acagttaaaacaacggactatcaggaaacttttggatgtactctactgtctctgaaaaagagagaggtgtctaggacacgagcttaacccaagggcattgcattgttattgtgctgggattacgggcgtgagccaccgtgcccggcggcttcttttaatcttttatgcatcagtattagatggctcaattaatcactgagacacggtcgagccgag

SEQ ID NO: 517474 - DNA, 102 bp, Homo sapiens
gaattccacttcaaccgctacctgacacggcgccgccgcatcgagatcgccaacgcgctttgcctgaccgagcgacagagcaagatatggttccaaaacccc

SEQ ID NO: 517475 - DNA, 385 bp, Homo sapiens
aatagcaagatctcatcaagttcacatgtctttaaagataaatggaaaaaaatattcatctattttaagagtcaaagagatgagaactccaatgcagtgatgagcccgaataggtcctgccatttcccatcaacagactgaggcatcaggctatgtgggctctgtgcccgcccgtaaaggccatgccttgttttccttctaaaagctgtgcataatgactacaatatagggttcagtgaattccagctgggcccatgagaggaatccagtgaacaacccagcaaacattttaattaactgggacaggactggtcttccttctgtgggtgtatatattttaacctttggaaaatttagagttaaataaagaaaagcaaaagagaaa

SEQ ID NO: 517476 - DNA, 120 bp, Homo sapiens
gactgtaggtgctgcagtagtgaggcgacaagtggaaggctggagggtggagtgtttgctgcaggcaagggtagggaagatggatggggctcattgtttggcattgatgatgtccacgaa

SEQ ID NO: 517477 - DNA, 159 bp, Homo sapiens
cctgagaggtgggacacgggtctgtgctgcagagcctgtgccacatggaagacggggtcgagctcctgggcctgcactccgaggtgggcgcagggccagtctgtacccccgcagggcctgcgagggcccccttccagacaacgaccgaccgtgcgtcag

SEQ ID NO: 517478 - DNA, 395 bp, Homo sapiens
tataagcgcgtcatggtgccatgaacctgttcgccactgggaggtggacggctccagccccagctgcgtgcccaggttgtgcagcctgactctgaagaagctggtggtcttcaaggagctggagaaggagctgatctccgtggtgatcgctgtcaagatgcagggctccaaacgaatcctgcggtcccatgagattgtgctgccccccagtggacaagtggagacagacctggccctgaccttctccttgcagtatcctcacttcttgaagagggaaggcaacaagcttcagatcatgctgcagcgcagaaagcgctacaagaacagaaccatcctgggccacctctggttctgccgctcaccgtctgcacgccccgccagctcgcactgtacag

SEQ ID NO: 517479 - DNA, 3165 bp, Homo sapiens
tataagcgcgtcatggtgccatgaacctgttcgccactgggaggtggacggctccagccccagctgcgtgcccaggttgtgcagcctgactctgaagaagctggtggtcttcaaggagctggagaaggagctgatctccgtggtgatcgctgtcaagatgcagggctccaaacgaatcctgcggtcccatgagattgtgctgccccccagtggacaagtggagacagacctggccctgaccttctccttgcagtatcctcacttcttgaagagggaaggcaacaagcttcagatcatgctgcagcgcagaaagcgctacaagaacagaaccatcctgggctacaagacgctggccgcgggctccatcagcatggctgaggtgatgcaacacccgtctgaaggtggccaggtgctgagcctctgcagcagcatcaaggaggcccccgtcaaggcggccgagatctggatcgcctccctgtccagccagcccattgaccacgaagacagcaccatgcaggccggccccaaggccaagtccacggataactactccgaggaggagtatgagagcttctcctccgagcaggaggccagtgacgacgccgtgcaggggcaggacttggacgaggacgactttgacgtggggaagccgaagaagcagcggagatcgattgtaagaacgacgtccatgaccaggcaacagaacttcaagcagaaagtggtagcgctgctgcggaggttcaaagtgtccgacgaggtcctggactcggagcaggaccctgcggagcacatccccgaggcagaggaggacctggacctcctgtatgacaccctggacatggagcaccccagcgacagcggccccgacatggaggatgacgacagcgtcctcagcacccccaagccgaagctgcggccatactttgaaggcctgtcgcactcgagctcgcagacggagattgggagcatccacagcgcccgcagccacaaggagcccccaagcccggctgacgtgcccgagaagacgcggtccctgggaggcaggcagccgagcgacagtgtctctgacacggtggccctcggtgtgccaggcccgagggagcaccctggacagcctgaggacagccccgaggctgaggcctccaccctggatgtgttcacggagaggctgccgcccagcgggaggatcaccaagacagagtcccttgtcatcccctccaccaggtccgaggggaagcaggctggccgacggggccggagcacatccttgaaggagcggcaggcagcacggccccagaatgagcgggccaacagcctggacaacgagcgctgcccggacgcccggagccagctacagatccccaggaagactgtgtatgaccagctcaaccacatcctcatctccgatgaccagcttcccgaaaacatcatccttgtcaacacctcggactggcaggggcagttcctctccgacgtcctgcagaggcacacgctccccgtggtgtgcacgtgctctcctgcggacgtccaggcggccttcagcaccatcgtctcacggatacagagatactgcaactgcaattcccagcccccgacccccgtgaagatcgccgtggcgggagcgcagcattacctcagtgccatcctgcggctctttgtggagcagctgtcccacaagacacccgactggctcggctacatgcgcttcctggtcatcccactgggctcccaccccgtggccaggtacctaggctccgtggactaccgctacaacaacttcttccaggacctggcctggagagacctgttcaacaagctggaggcccagagtgcggtacaggacacgccagacattgtgtcacgcatcacgcagtacatcgcaggggccaactgtgcccaccagctccccatcgcagaggccatgctgacctacaagcagaagagccctgacgaagagtcctcccaaaagttcattccctttgtcggggttgtgaaggttggaattgtggagccatcctcggccacatcaggcgactcggacgacgcggccccctcgggctctggcacgctctcctccaccccgccgtccgcatctcctgcggccaaggaggcctcacccaccccgccctcctccccgtcggtgagcggaggcctgtcctcccccagccagggtgtcggcgccgagctgatggggctgcaggtggactactggacggcagcacagcctgcggacaggaagagggacgccgagaagaaggacctgcctgtcaccaaaaacacgctcaagtgcactttccggtccctccaggtcagcaggctgcccagcagcggcgaggctgcagccacgcccaccatgtccatgaccgtggtcaccaaggagaagaacaagaaggtgatgtttctgcccaagaaagcgaaggacaaggacgtggagtctaagagccagtgcattgagggcatcagccggctcatctgcactgccaggcagcagcagaacatgctgcgggtcctcatcgacggcgtggagtgcagcgacgtcaagttcttccagctggccgcgcagtggtcctcgcacgtgaagcacttccccatctgcatcttcggacactccaaggccaccttctagccccacccaccagggggcccacctcctgccccatgctgtgaggggcccagctgcatttctgttaacatttcagtttactacagagacagacgcttaaaacacaaagagaaacagtcttaagtatgaatgtgctcacaacgtggaaactaacgggggagctcctgccaggagccgaataactgctctgcttattaacccgaacgttcggcccggggctgggaagccagaaggacgatgctgagccatggatcgcggaaggcgtcctctggcctcaggagccacccagagcctcacaggctgagttcttgcctctgtgtcctgtccttcctggaagtcaggactctgcttcctcagggagcccggggaaggcggagctcagtggccacaggccgagggccatggggccgctcagtcccgttggggttgtcctgagttgagcctgggggggccgtcctgcccgcctaagagatgcccccagcaccgcacactcgtggttcccaataaactcctgcctgcggcggaggttttatagcagcaga

SEQ ID NO: 517480 - DNA, 3547 bp, Homo sapiens
tataagcgcgtcatggtgccatgaacctgttcgccactgggaggtggacggctccagccccagctgcgtgcccaggttgtgcagcctgactctgaagaagctggtggtcttcaaggagctggagaaggagctgatctccgtggtgatcgctgtcaagatgcagggctccaaacgaatcctgcggtcccatgagattgtgctgccccccagtggacaagtggagacagacctggccctgaccttctccttgcagtatcctcacttcttgaagagggaaggcaacaagcttcagatcatgctgcagcgcagaaagcgctacaagaacagaaccatcctgggctacaagacgctggccgcgggctccatcagcatggctgaggtgatgcaacacccgtctgaaggtggccaggtgctgagcctctgcagcagcatcaaggaggcccccgtcaaggcggccgagatctggatcgcctccctgtccagccagcccattgaccacgaagacagcaccatgcaggccggccccaaggccaagtccacggataactactccgaggaggagtatgagagcttctcctccgagcaggaggccagtgacgacgccgtgcaggggcaggacttggacgaggacgactttgacgtggggaagccgaagaagcagcggagatcgattgtaagaacgacgtccatgaccaggcaacagaacttcaagcagaaagtggtagcgctgctgcggaggttcaaagtgtccgacgaggtcctggactcggagcaggaccctgcggagcacatccccgaggcagaggaggacctggacctcctgtatgacaccctggacatggagcaccccagcgacagcggccccgacatggaggatgacgacagcgtcctcagcacccccaagccgaagctgcggccatactttgaaggcctgtcgcactcgagctcgcagacggagattgggagcatccacagcgcccgcagccacaaggagcccccaagcccggctgacgtgcccgagaagacgcggtccctgggaggcaggcagccgagcgacagtgtctctgacacggtggccctcggtgtgccaggcccgagggagcaccctggacagcctgaggacagccccgaggctgaggcctccaccctggatgtgttcacggagaggctgccgcccagcgggaggatcaccaagacagagtcccttgtcatcccctccaccaggtccgaggggaagcaggctggccgacggggccggagcacatccttgaaggagcggcaggcagcacggccccagaatgagcgggccaacagcctggacaacgagcgctgcccggacgcccggagccagctacagatccccaggaagactgtgtatgaccagctcaaccacatcctcatctccgatgaccagcttcccgaaaacatcatccttgtcaacacctcggactggcaggggcagttcctctccgacgtcctgcagaggcacacgctccccgtggtgtgcacgtgctctcctgcggacgtccaggcggccttcagcaccatcgtctcacggatacagagatactgcaactgcaattcccagcccccgacccccgtgaagatcgccgtggcgggagcgcagcattacctcagtgccatcctgcggctctttgtggagcagctgtcccacaagacacccgactggctcggctacatgcgcttcctggtcatcccactgggctcccaccccgtggccaggtacctaggctccgtggactaccgctacaacaacttcttccaggacctggcctggagagacctgttcaacaagctggaggcccagagtgcggtacaggacacgccagacattgtgtcacgcatcacgcagtacatcgcaggggccaactgtgcccaccagctccccatcgcagaggccatgctgacctacaagcagaagagccctgacgaagagtcctcccaaaagttcattccctttgtcggggttgtgaaggttggaattgtggagccatcctcggccacatcaggtaaccccgtcccaccctgaggccttgtgagtggcccgtgggtgggctgcaggagcacggtcattcgagtcctgcagaccagatcaacctttcagggcctgagagccgccacgtcccagtcttgctgtggtgcttctgtcctgcggggggttcatcctccaaggactgctgtcacaaagccccacatcaaggctggcaggggttgtcttccaaaaaccgaggagaatccgagaccctcccgtctctcacaggccactggggactcccaccctgcccacccccaggagctgcctggcctggccacatcctggtccggagggcctggtggcacccgggcagagcagcaggtgggctcagcctgccctgtgactcctccccaaaggcgactcggacgacgcggccccctcgggctctggcacgctctcctccaccccgccgtccgcatctcctgcggccaaggaggcctcacccaccccgccctcctccccgtcggtgagcggaggcctgtcctcccccagccagggtgtcggcgccgagctgatggggctgcaggtggactactggacggcagcacagcctgcggacaggaagagggacgccgagaagaaggacctgcctgtcaccaaaaacacgctcaagtgcactttccggtccctccaggtcagcaggctgcccagcagcggcgaggctgcagccacgcccaccatgtccatgaccgtggtcaccaaggagaagaacaagaaggtgatgtttctgcccaagaaagcgaaggacaaggacgtggagtctaagagccagtgcattgagggcatcagccggctcatctgcactgccaggcagcagcagaacatgctgcgggtcctcatcgacggcgtggagtgcagcgacgtcaagttcttccagctggccgcgcagtggtcctcgcacgtgaagcacttccccatctgcatcttcggacactccaaggccaccttctagccccacccaccagggggcccacctcctgccccatgctgtgaggggcccagctgcatttctgttaacatttcagtttactacagagacagacgcttaaaacacaaagagaaacagtcttaagtatgaatgtgctcacaacgtggaaactaacgggggagctcctgccaggagccgaataactgctctgcttattaacccgaacgttcggcccggggctgggaagccagaaggacgatgctgagccatggatcgcggaaggcgtcctctggcctcaggagccacccagagcctcacaggctgagttcttgcctctgtgtcctgtccttcctggaagtcaggactctgcttcctcagggagcccggggaaggcggagctcagtggccacaggccgagggccatggggccgctcagtcccgttggggttgtcctgagttgagcctgggggggccgtcctgcccgcctaagagatgcccccagcaccgcacactcgtggttcccaataaactcctgcctgcggcggaggttttatagcagcaga

SEQ ID NO: 517481 - DNA, 1736 bp, Homo sapiens
gacacgtggatgatggggtcagagatcactgagctgcccctcaagggggcctggaaggagggtggtgcctaggcggtcgatggctgtcgttgtgctggcttccatctgatgagaggctcatcttcatggaggctcagagaaccaatgtaaagctgacaatagaagcgtctgatggcttccaacagtgaataccaaagagataagagaatacaacaacagaaagacgaacgacggacagaagacaacaaccaggtgttatccaccgagcagggggtgcgggacggcatacgcagaggagccctcccccgcaggagggcgcgcacccagccgacagagccaccgccgaccatactagcagcggcacaccaggaggcgcgccagacccaaagaagcgagagaagactcgcgagaaaaagaaagaaagagggcaagagcgagagagacaacgcacgccgaatcaaacaggagagggacggcgagggcgagcacacacacagaagagagagaggggaaccgaccagcagaagcggacagcacagcagcagcgaacataccacaggcctgccggcgcggcgaggacagcgaggaagatggggagagaacagcgaggaccacacccaaagacgaggactacaacgcacgcgcacgacacggcgggcggccgacacaggagcacacaccccgcgacgaagggaggagatcgattagagtgcgtgagagcaaacgaacagaggccgagggacaattccaaacccggagagaaccggcgcagaacacaactgaagaagggagcagagaggcaggcgggcgagagccgtctgcagacacgcggcgggaaatgagaccggagaactgacaataagagagagaggaggagccggagagctgaggaggcacacgaagcaccgcccatcggcacgagaggaggtgaaaagagcagcgcacgctcgagggggcagcggccgcacaggggggacggaccgagccgcggggagaagagaggagaagataacaacgagacgggaggcagagaccagagaacacggaggcgtgaagagaacgagaagcgggagaggaaggaagagaaggaagaaaagagagagagcagaagaaggaagacaaggagaagagataacgacaagacgacggagaagcgagcagagagagagacgagacagcgacagcgcgagaggagggagagagggcagcagagaagagaggagagagaggaaggaagaaggagagcaagaaagagaagacaggcacggagagagaaggaggccgcgagcggcgcgcagccgcgtggagagagcagcggagagggctggagcagagggggagcggcacacgacagaggaagagacgaggagtgagggaaggcaagagtggagggcaaaggggagcaggacagcgacggagcgcagggagagcgcgcggagacgaagaggacgcggagacgagggacacgccgcgcgacgaacgggacgcgacggcgcacggaccgagcgcggccagaggcggacgaggcagacacgagagacgagacggagaggagaagtagagaagaaacagggagaagcgaggcagagcgacgggagaccagagcgagcgcgacgcgaccagagcacaaggaggaaaggcggagcggaggaggcagggcgcgcaagagaagcagcggacgagggccaggagggacacgcagaggccgcgcgggcgcgaaagagagcagcgcgcca

SEQ ID NO: 517482 - DNA, 103 bp, Homo sapiens
catcgagctcggtaccgctctggaggcagtgcctccgctcgccgcccgctgctcctcacccctgcctgcaccatcctccctcctgagagctcattcactccgc

SEQ ID NO: 517483 - DNA, 3520 bp, Homo sapiens
tataagcgcgtcatggtgccatgaacctgttcgccactgggaggtggacggctccagccccagctgcgtgcccaggttgtgcagcctgactctgaagaagctggtggtcttcaaggagctggagaaggagctgatctccgtggtgatcgctgtcaagatgcagggctccaaacgaatcctgcggtcccatgagattgtgctgccccccagtggacaagtggagacagacctggccctgaccttctccttgcagtatcctcacttcttgaagagggaaggcaacaagcttcagatcatgctgcagcgcagaaagcgctacaagaacagaaccatcctgggctacaagacgctggccgcgggctccatcagcatggctgaggtgatgcaacacccgtctgaaggtggccaggtgctgagcctctgcagcagcatcaaggaggcccccgtcaaggcggccgagatctggatcgcctccctgtccagccagcccattgaccacgaagacagcaccatgcaggccggccccaaggccaagtccacggataactactccgaggaggagtatgagagcttctcctccgagcaggaggccagtgacgacgccgtgcaggggcaggacttggacgaggacgactttgacgtggggaagccgaagaagcagcggagatcgattgtaagaacgacgtccatgaccaggcaacagaacttcaagcagaaagtggtagcgctgctgcggaggttcaaagtgtccgacgaggtcctggactcggagcaggaccctgcggagcacatccccgaggcagaggaggacctggacctcctgtatgacaccctggacatggagcaccccagcgacagcggccccgacatggaggatgacgacagcgtcctcagcacccccaagccgaagctgcggccatactttgaaggcctgtcgcactcgagctcgcagacggagattgggagcatccacagcgcccgcagccacaaggagcccccaagcccggctgacgtgcccgagaagacgcggtccctgggaggcaggcagccgagcgacagtgtctctgacacggtggccctcggtgtgccaggcccgagggagcaccctggacagcctgaggacagccccgaggctgaggcctccaccctggatgtgttcacggagaggctgccgcccagcgggaggatcaccaagacagagtcccttgtcatcccctccaccaggtccgaggggaagcaggctggccgacggggccggagcacatccttgaaggagcggcaggcagcacggccccagaatgagcgggccaacagcctggacaacgagcgctgcccggacgcccggagccagctacagatccccaggaagactgtgtatgaccagctcaaccacatcctcatctccgatgaccagcttcccgaaaacatcatccttgtcaacacctcggactggcaggggcagttcctctccgacgtcctgcagaggcacacgctccccgtggtgtgcacgtgctctcctgcggacgtccaggcggccttcagcaccatcgtctcacggatacagagatactgcaactgcaattcccagcccccgacccccgtgaagatcgccgtggcgggagcgcagcattacctcagtgccatcctgcggctctttgtggagcagctgtcccacaagacacccgactggctcggctacatgcgcttcctggtcatcccactgggctcccaccccgtggccaggtacctaggctccgtggactaccgctacaacaacttcttccaggacctggcctggagagacctgttcaacaagctggaggcccagagtgcggtacaggacacgccagacattgtgtcacgcatcacgcagtacatcgcaggggccaactgtgcccaccagctccccatcgcagaggccatgctgacctacaagcagaagagccctgacgaagagtcctcccaaaagttcattccctttgtcggggttgtgaaggttggaattgtggagccatcctcggccacatcaggtaaccccgtcccaccctgaggccttgtgagtggcccgtgggtgggctgcaggagcacggtcattcgagtcctgcagaccagatcaacctttcagggcctgagagccgccacgtcccagtcttgctgtggtgcttctgtcctgcggggggttcatcctccaaggactgctgtcacaaagccccacatcaaggctggcaggggttgtcttccaaaaaccgaggagaatccgagaccctcccgtctctcacaggccactggggactcccaccctgcccacccccaggagctgcctggcctggccacatcctggtccggagggcctggtggcacccgggcagagcagcaggtgggctcagcctgccctgtgactcctccccaaaggcgactcggacgacgcggccccctcgggctctggcacgctctcctccaccccgccgtccgcatctcctgcggccaaggaggcctcacccaccccgccctcctcccccagccagggtgtcggcgccgagctgatggggctgcaggtggactactggacggcagcacagcctgcggacaggaagagggacgccgagaagaaggacctgcctgtcaccaaaaacacgctcaagtgcactttccggtccctccaggtcagcaggctgcccagcagcggcgaggctgcagccacgcccaccatgtccatgaccgtggtcaccaaggagaagaacaagaaggtgatgtttctgcccaagaaagcgaaggacaaggacgtggagtctaagagccagtgcattgagggcatcagccggctcatctgcactgccaggcagcagcagaacatgctgcgggtcctcatcgacggcgtggagtgcagcgacgtcaagttcttccagctggccgcgcagtggtcctcgcacgtgaagcacttccccatctgcatcttcggacactccaaggccaccttctagccccacccaccagggggcccacctcctgccccatgctgtgaggggcccagctgcatttctgttaacatttcagtttactacagagacagacgcttaaaacacaaagagaaacagtcttaagtatgaatgtgctcacaacgtggaaactaacgggggagctcctgccaggagccgaataactgctctgcttattaacccgaacgttcggcccggggctgggaagccagaaggacgatgctgagccatggatcgcggaaggcgtcctctggcctcaggagccacccagagcctcacaggctgagttcttgcctctgtgtcctgtccttcctggaagtcaggactctgcttcctcagggagcccggggaaggcggagctcagtggccacaggccgagggccatggggccgctcagtcccgttggggttgtcctgagttgagcctgggggggccgtcctgcccgcctaagagatgcccccagcaccgcacactcgtggttcccaataaactcctgcctgcggcggaggttttatagcagcaga

SEQ ID NO: 517484 - DNA, 879 bp, Homo sapiens
  misc_feature (306)..(306): n is a, c, g, or t
  misc_feature (308)..(309): n is a, c, g, or t
  misc_feature (311)..(311): n is a, c, g, or t
  misc_feature (313)..(313): n is a, c, g, or t
  misc_feature (318)..(318): n is a, c, g, or t
  misc_feature (384)..(384): n is a, c, g, or t
  misc_feature (544)..(544): n is a, c, g, or t
  misc_feature (553)..(553): n is a, c, g, or t
  misc_feature (592)..(592): n is a, c, g, or t
  misc_feature (603)..(603): n is a, c, g, or t
  misc_feature (606)..(606): n is a, c, g, or t
  misc_feature (612)..(612): n is a, c, g, or t
  misc_feature (627)..(627): n is a, c, g, or t
  misc_feature (646)..(646): n is a, c, g, or t
  misc_feature (657)..(657): n is a, c, g, or t
  misc_feature (670)..(670): n is a, c, g, or t
  misc_feature (681)..(681): n is a, c, g, or t
  misc_feature (702)..(703): n is a, c, g, or t
  misc_feature (714)..(714): n is a, c, g, or t
  misc_feature (719)..(719): n is a, c, g, or t
  misc_feature (721)..(721): n is a, c, g, or t
ctgacctgcgacagtgaatcgacaatgccgtcttctgtctcgtggagcatcctcctgctgacaggcctgtgctgcctgctgcctgtcttcctggctgatgatcctcatggagatgctgcccagcagacagatacatcctaccatgatcaggagcacccaaccttcatcaagatcacccccaacctggctgagttcgccttcagcctataccgccagctgtcacaccagtccatcagaaccaatatcttcttctccccagagagcatcgctacagactttgcaatgctctccctggggaccaacgcngnnantnacgangaaatcctggagggcctgaatttcaacctcacggagattccggaggctcagatccatgaaggcttncaggaactcctccgtaccctcaaccagccagacagacagctccagctgaccaccggcaatggcctgttcctcagcgagggcctgaagctagtggataagtctttggaggatgtgagttgtaccactcagaagccttcactgtcaacttcggggacaccgnagaggccangaaacagatcaacgattacgtggagaagggtactcaagnaacatcttctntanaggcanatgggagagaccctntgaagtcaatgacaccgangaagaggactnccacgtggaccangtgaccaccgngaaggtgcctatgatggcgtnnatgcatgtttnacatncnccactgtcagaagctgtgcagctgagtgctgctgatgtacctgcgcaatgcgactgtcatcgtattcctgcctgatgatgggatactacggcacctggtgtctgccagcttacatttacccagactgctcattactggaacctatgatctgggcgtcc

SEQ ID NO: 517485 - DNA, 331 bp, Homo sapiens
ttcttgtagtatttagttcagtagatttaaaaaaaaatgtatcctttgctttggaagcctacaaaacaaccctaacgctgttttactctattaatatgcatggacatctctccctttggagtgacgcactttgcgcatcaaattctagggagaaactccatagaaaccaatgaacatactttcttccttaagtctgctcgtatacttcctctgcccctcacataaatataaaccaccagattggatcccttaacaatgcaaatcatattcatttcactctctacatcgtaactgtgcaccagaactgtcagtcatcactaacattctacga

SEQ ID NO: 517486 - DNA, 3138 bp, Homo sapiens
tataagcgcgtcatggtgccatgaacctgttcgccactgggaggtggacggctccagccccagctgcgtgcccaggttgtgcagcctgactctgaagaagctggtggtcttcaaggagctggagaaggagctgatctccgtggtgatcgctgtcaagatgcagggctccaaacgaatcctgcggtcccatgagattgtgctgccccccagtggacaagtggagacagacctggccctgaccttctccttgcagtatcctcacttcttgaagagggaaggcaacaagcttcagatcatgctgcagcgcagaaagcgctacaagaacagaaccatcctgggctacaagacgctggccgcgggctccatcagcatggctgaggtgatgcaacacccgtctgaaggtggccaggtgctgagcctctgcagcagcatcaaggaggcccccgtcaaggcggccgagatctggatcgcctccctgtccagccagcccattgaccacgaagacagcaccatgcaggccggccccaaggccaagtccacggataactactccgaggaggagtatgagagcttctcctccgagcaggaggccagtgacgacgccgtgcaggggcaggacttggacgaggacgactttgacgtggggaagccgaagaagcagcggagatcgattgtaagaacgacgtccatgaccaggcaacagaacttcaagcagaaagtggtagcgctgctgcggaggttcaaagtgtccgacgaggtcctggactcggagcaggaccctgcggagcacatccccgaggcagaggaggacctggacctcctgtatgacaccctggacatggagcaccccagcgacagcggccccgacatggaggatgacgacagcgtcctcagcacccccaagccgaagctgcggccatactttgaaggcctgtcgcactcgagctcgcagacggagattgggagcatccacagcgcccgcagccacaaggagcccccaagcccggctgacgtgcccgagaagacgcggtccctgggaggcaggcagccgagcgacagtgtctctgacacggtggccctcggtgtgccaggcccgagggagcaccctggacagcctgaggacagccccgaggctgaggcctccaccctggatgtgttcacggagaggctgccgcccagcgggaggatcaccaagacagagtcccttgtcatcccctccaccaggtccgaggggaagcaggctggccgacggggccggagcacatccttgaaggagcggcaggcagcacggccccagaatgagcgggccaacagcctggacaacgagcgctgcccggacgcccggagccagctacagatccccaggaagactgtgtatgaccagctcaaccacatcctcatctccgatgaccagcttcccgaaaacatcatccttgtcaacacctcggactggcaggggcagttcctctccgacgtcctgcagaggcacacgctccccgtggtgtgcacgtgctctcctgcggacgtccaggcggccttcagcaccatcgtctcacggatacagagatactgcaactgcaattcccagcccccgacccccgtgaagatcgccgtggcgggagcgcagcattacctcagtgccatcctgcggctctttgtggagcagctgtcccacaagacacccgactggctcggctacatgcgcttcctggtcatcccactgggctcccaccccgtggccaggtacctaggctccgtggactaccgctacaacaacttcttccaggacctggcctggagagacctgttcaacaagctggaggcccagagtgcggtacaggacacgccagacattgtgtcacgcatcacgcagtacatcgcaggggccaactgtgcccaccagctccccatcgcagaggccatgctgacctacaagcagaagagccctgacgaagagtcctcccaaaagttcattccctttgtcggggttgtgaaggttggaattgtggagccatcctcggccacatcaggcgactcggacgacgcggccccctcgggctctggcacgctctcctccaccccgccgtccgcatctcctgcggccaaggaggcctcacccaccccgccctcctcccccagccagggtgtcggcgccgagctgatggggctgcaggtggactactggacggcagcacagcctgcggacaggaagagggacgccgagaagaaggacctgcctgtcaccaaaaacacgctcaagtgcactttccggtccctccaggtcagcaggctgcccagcagcggcgaggctgcagccacgcccaccatgtccatgaccgtggtcaccaaggagaagaacaagaaggtgatgtttctgcccaagaaagcgaaggacaaggacgtggagtctaagagccagtgcattgagggcatcagccggctcatctgcactgccaggcagcagcagaacatgctgcgggtcctcatcgacggcgtggagtgcagcgacgtcaagttcttccagctggccgcgcagtggtcctcgcacgtgaagcacttccccatctgcatcttcggacactccaaggccaccttctagccccacccaccagggggcccacctcctgccccatgctgtgaggggcccagctgcatttctgttaacatttcagtttactacagagacagacgcttaaaacacaaagagaaacagtcttaagtatgaatgtgctcacaacgtggaaactaacgggggagctcctgccaggagccgaataactgctctgcttattaacccgaacgttcggcccggggctgggaagccagaaggacgatgctgagccatggatcgcggaaggcgtcctctggcctcaggagccacccagagcctcacaggctgagttcttgcctctgtgtcctgtccttcctggaagtcaggactctgcttcctcagggagcccggggaaggcggagctcagtggccacaggccgagggccatggggccgctcagtcccgttggggttgtcctgagttgagcctgggggggccgtcctgcccgcctaagagatgcccccagcaccgcacactcgtggttcccaataaactcctgcctgcggcggaggttttatagcagcaga

SEQ ID NO: 517487 - DNA, 937 bp, Homo sapiens
  misc_feature (306)..(306): n is a, c, g, or t
  misc_feature (308)..(309): n is a, c, g, or t
  misc_feature (311)..(311): n is a, c, g, or t
  misc_feature (313)..(313): n is a, c, g, or t
  misc_feature (318)..(318): n is a, c, g, or t
  misc_feature (384)..(384): n is a, c, g, or t
  misc_feature (544)..(544): n is a, c, g, or t
  misc_feature (553)..(553): n is a, c, g, or t
  misc_feature (592)..(592): n is a, c, g, or t
  misc_feature (661)..(661): n is a, c, g, or t
  misc_feature (664)..(664): n is a, c, g, or t
  misc_feature (670)..(670): n is a, c, g, or t
  misc_feature (685)..(685): n is a, c, g, or t
  misc_feature (704)..(704): n is a, c, g, or t
  misc_feature (715)..(715): n is a, c, g, or t
  misc_feature (728)..(728): n is a, c, g, or t
  misc_feature (739)..(739): n is a, c, g, or t
  misc_feature (760)..(761): n is a, c, g, or t
  misc_feature (772)..(772): n is a, c, g, or t
  misc_feature (777)..(777): n is a, c, g, or t
  misc_feature (779)..(779): n is a, c, g, or t
ctgacctgcgacagtgaatcgacaatgccgtcttctgtctcgtggagcatcctcctgctgacaggcctgtgctgcctgctgcctgtcttcctggctgatgatcctcatggagatgctgcccagcagacagatacatcctaccatgatcaggagcacccaaccttcatcaagatcacccccaacctggctgagttcgccttcagcctataccgccagctgtcacaccagtccatcagaaccaatatcttcttctccccagagagcatcgctacagactttgcaatgctctccctggggaccaacgcngnnantnacgangaaatcctggagggcctgaatttcaacctcacggagattccggaggctcagatccatgaaggcttncaggaactcctccgtaccctcaaccagccagacagacagctccagctgaccaccggcaatggcctgttcctcagcgagggcctgaagctagtggataagtctttggaggatgtgagttgtaccactcagaagccttcactgtcaacttcggggacaccgnagaggccangaaacagatcaacgattacgtggagaagggtactcaagnatgggttgcggatcaggtcaaggagcttgacagagacacagtttctgctctggtgaattacatcttctntanaggcanatgggagagaccctntgaagtcaatgacaccgangaagaggactnccacgtggaccangtgaccaccgngaaggtgcctatgatggcgtnnatgcatgtttnacatncnccactgtcagaagctgtgcagctgagtgctgctgatgtacctgcgcaatgcgactgtcatcgtattcctgcctgatgatgggatactacggcacctggtgtctgccagcttacatttacccagactgctcattactggaacctatgatctgggcgtcc

SEQ ID NO: 517488 - DNA, 215 bp, Homo sapiens
atgtcaccgagtcgaaacatgtttaaccggggagacaggttacacgcgtcgagaggagatcagatcgggaagtctttatgtccgtggggtcgtgtgactgtcaggcagaagctagtactgagtgacaggtgatagatccgagaataattgccatatgtgttaacatttttccattgctaaaccatccttagagaaaatcatatatggggtcacac

SEQ ID NO: 517489 - DNA, 208 bp, Homo sapiens
ttaaactctgtgagtagaacgcacacatcccacagcagtttctgagaaagattctgtcagtttttataggaaaatatttccttttctcttttggcctcaaagcgcttgaaatctccacttgcaaattccacaaaaagagactttcaaatctgctctgtctaaaggaaggttcaactctgtcagttgaatacacacaacacatagaaga

SEQ ID NO: 517490 - DNA, 2531 bp, Homo sapiens
tataagcgcgtcatggtgccatgaacctgttcgccactgggaggtggacggctccagccccagctgcgtgcccaggttgtgcagcctgactctgaagaagctggtggtcttcaaggagctggagaaggagctgatctccgtggtgatcgctgtcaagatgcagggctccaaacgaatcctgcggtcccatgagattgtgctgccccccagtggacaagtggagacagacctggccctgaccttctccttgcagtatcctcacttcttgaagagggaaggcaacaagcttcagatcatgctgcagcgcagaaagcgctacaagaacagaaccatcctgggctacaagacgctggccgcgggctccatcagcatggctgaggtgatgcaacacccgtctgaaggtggccaggtgctgagcctctgcagcagcatcaaggaggcccccgtcaaggcggccgagatctggatcgcctccctgtccagccagcccattgaccacgaagacagcaccatgcaggccggccccaaggccaagtccacggataactactccgaggaggagtatgagagcttctcctccgagcaggaggccagtgacgacgccgtgcaggggcaggacttggacgaggacgactttgacgtggggaagccgaagaagcagcggagatcgattgtaagaacgacgtccatgaccaggcaacagaacttcaagcagaaagtggtagcgctgctgcggaggttcaaagtgtccgacgaggtcctggactcggagcaggaccctgcggagcacatccccgaggcagaggaggacctggacctcctgtatgacaccctggacatggagcaccccagcgacagcggccccgacatggaggatgacgacagcgtcctcagcacccccaagccgaagctgcggccatactttgaaggcctgtcgcactcgagctcgcagacggagattgggagcatccacagcgcccgcagccacaaggagcccccaagcccggctgacgtgcccgagaagacgcggtccctgggaggcaggcagccgactggctcggctacatgcgcttcctggtcatcccactgggctcccaccccgtggccaggtacctaggctccgtggactaccgctacaacaacttcttccaggacctggcctggagagacctgttcaacaagctggaggcccagagtgcggtacaggacacgccagacattgtgtcacgcatcacgcagtacatcgcaggggccaactgtgcccaccagctccccatcgcagaggccatgctgacctacaagcagaagagccctgacgaagagtcctcccaaaagttcattccctttgtcggggttgtgaaggttggaattgtggagccatcctcggccacatcaggcgactcggacgacgcggccccctcgggctctggcacgctctcctccaccccgccgtccgcatctcctgcggccaaggaggcctcacccaccccgccctcctccccgtcggtgagcggaggcctgtcctcccccagccagggtgtcggcgccgagctgatggggctgcaggtggactactggacggcagcacagcctgcggacaggaagagggacgccgagaagaaggacctgcctgtcaccaaaaacacgctcaagtgcactttccggtccctccaggtcagcaggctgcccagcagcggcgaggctgcagccacgcccaccatgtccatgaccgtggtcaccaaggagaagaacaagaaggtgatgtttctgcccaagaaagcgaaggacaaggacgtggagtctaagagccagtgcattgagggcatcagccggctcatctgcactgccaggcagcagcagaacatgctgcgggtcctcatcgacggcgtggagtgcagcgacgtcaagttcttccagctggccgcgcagtggtcctcgcacgtgaagcacttccccatctgcatcttcggacactccaaggccaccttctagccccacccaccagggggcccacctcctgccccatgctgtgaggggcccagctgcatttctgttaacatttcagtttactacagagacagacgcttaaaacacaaagagaaacagtcttaagtatgaatgtgctcacaacgtggaaactaacgggggagctcctgccaggagccgaataactgctctgcttattaacccgaacgttcggcccggggctgggaagccagaaggacgatgctgagccatggatcgcggaaggcgtcctctggcctcaggagccacccagagcctcacaggctgagttcttgcctctgtgtcctgtccttcctggaagtcaggactctgcttcctcagggagcccggggaaggcggagctcagtggccacaggccgagggccatggggccgctcagtcccgttggggttgtcctgagttgagcctgggggggccgtcctgcccgcctaagagatgcccccagcaccgcacactcgtggttcccaataaactcctgcctgcggcggaggttttatagcagcaga

SEQ ID NO: 517491 - DNA, 858 bp, Homo sapiens
cataagagcatcacgcctgtaatcgcagcaagtaggtaggccaagatggtggatcatccgtgacgtcagaaaattctagacctgactggtcgactcggtggtgaaaccgtctcatacataagaaatacagagaaaattgatctgtggctgtggtggctggcgacgctcggtgtgtatcgcgcagctcactcgggaggtctgatgcggaaacagagaaattcgctgtggaacctcggagtagtgcttggatggttgctgtgaagctgagatcgtgcaattgcactccagcctgggcaacaagagtgaaactccatctcaaacaaacaaacaaacaaaaagaatatatccatattagtaaaaactctttccccctttttactaacctactcccaaaacagggataacctaagctcaataaaataaaggagcctactatcagtgggtttacctcaaggggtttaatcattgtcctggtaaaaagctcttctgtgcttcccaaataagatctggctagatatacagattcagggccccattcaagagatggtatttcagtgggtctcaagtcaggttcctagaaatgactatttttaacacgtgtaccaggtgctgcttggttatggtagttatcacaggccatttctactctttacctgtcagtttaatttggtccaactctgagataggtttctaatagcatgtgtcgaaataaaagtatccagcctggtggattatcagttgaacaaaacacaaatgagcaccaataagttaagtgttcattaggtaatacgcagatgtccttggtcccagtgattcgtacaggagcatctgtctgggagggtacacttcaaaagaatg

SEQ ID NO: 517492 - DNA, 3141 bp, Homo sapiens
tataagcgcgtcatggtgccatgaacctgttcgccactgggaggtggacggctccagccccagctgcgtgcccaggttgtgcagcctgactctgaagaagctggtggtcttcaaggagctggagaaggagctgatctccgtggtgatcgctgtcaagatgcagggctccaaacgaatcctgcggtcccatgagattgtgctgccccccagtggacaagtggagacagacctggccctgaccttctccttgcagtatcctcacttcttgaagagggaaggcaacaagcttcagatcatgctgcagcgcagaaagcgctacaagaacagaaccatcctgggctacaagacgctggccgcgggctccatcagcatggctgaggtgatgcaacacccgtctgaaggtggccaggtgctgagcctctgcagcagcatcaaggaggcccccgtcaaggcggccgagatctggatcgcctccctgtccagccagcccattgaccacgaagacagcaccatgcaggccggccccaaggccaagtccacggataactactccgaggaggagtatgagagcttctcctccgagcaggaggccagtgacgacgccgtgcaggggcaggacttggacgaggacgactttgacgtggggaagccgaagaagcagcggagatcgattgtaagaacgacgtccatgaccaggcaacagaacttcaagcagaaagtggtagcgctgctgcggaggttcaaagtgtccgacgaggtcctggactcggagcaggaccctgcggagcacatccccgaggcagaggaggacctggacctcctgtatgacaccctggacatggagcaccccagcgacagcggccccgacatggaggatgacgacagcgtcctcagcacccccaagccgaagctgcggccatactttgaaggcctgtcgcactcgagctcgcagacggagattgggagcatccacagcgcccgcagccacaaggagcccccaagcccggctgacgtgcccgagaagacgcggtccctgggaggcaggcagccgagcgacagtgtctctgacacggtggccctcggtgtgccaggcccgagggagcaccctggacagcctgaggacagccccgaggctgaggcctccaccctggatgtgttcacggagaggctgccgcccagcgggaggatcaccaagacagagtcccttgtcatcccctccaccaggtccgaggggaagcaggctggccgacggggccggagcacatccttgaaggagcggcaggcagcacggccccagaatgagcgggccaacagcctggacaacgagcgctgcccggacgcccggagccagctacagatccccaggaagactgtgtatgaccagctcaaccacatcctcatctccgatgaccagcttcccgaaaacatcatccttgtcaacacctcggactggcaggggcagttcctctccgacgtcctgcagaggcacacgctccccgtggtgtgcacgtgctctcctgcggacgtccaggcggccttcagcaccatcgtctcacggatacagagatactgcaactgcaattcccagcccccgacccccgtgaagatcgccgtggcgggagcgcagcattacctcagtgccatcctgcggctctttgtggagcagctgtcccacaagacacccgactggctcggctacatgcgcttcctggtcatcccactgggctcccaccccgtggccaggtacctaggctccgtggactaccgctacaacaacttcttccaggacctggcctggagagacctgttcaacaagctggaggcccagagtgcggtacaggacacgccagacattgtgtcacgcatcacgcagtacatcgcaggggccaactgtgcccaccagctccccatcgcagaggccatgctgacctacaagcagaagagccctgacgaagagtcctcccaaaagttcattccctttgtcggggttgtgaaggttggaattgtggagccatcctcggccacatcaggcgactcggacgacgcggccccctcgggctctggcacgctctcctccaccccgccgtccgcatctcctgcggccaaggaggcctcacccaccccgccctcctccccgtcggtgagcggaggcctgtcctcccccagccagggtgtcggcgccgagctgatggggctgcaggtggactactggacggcagcacagcctgcggacaggaagagggacgccgagaagaaggacctgcctgtcaccaaaaacacgctcaagtgcactttccggtccctccaggtcagcaggctgcccagccagggtgtcggcgccgagctgatggggctgcaggtggactactggacggcagcacagcctgcggacaggaagagggacgtggagtctaagagccagtgcattgagggcatcagccggctcatctgcactgccaggcagcagcagaacatgctgcgggtcctcatcgacggcgtggagtgcagcgacgtcaagttcttccagctggccgcgcagtggtcctcgcacgtgaagcacttccccatctgcatcttcggacactccaaggccaccttctagccccacccaccagggggcccacctcctgccccatgctgtgaggggcccagctgcatttctgttaacatttcagtttactacagagacagacgcttaaaacacaaagagaaacagtcttaagtatgaatgtgctcacaacgtggaaactaacgggggagctcctgccaggagccgaataactgctctgcttattaacccgaacgttcggcccggggctgggaagccagaaggacgatgctgagccatggatcgcggaaggcgtcctctggcctcaggagccacccagagcctcacaggctgagttcttgcctctgtgtcctgtccttcctggaagtcaggactctgcttcctcagggagcccggggaaggcggagctcagtggccacaggccgagggccatggggccgctcagtcccgttggggttgtcctgagttgagcctgggggggccgtcctgcccgcctaagagatgcccccagcaccgcacactcgtggttcccaataaactcctgcctgcggcggaggttttatagcagcaga

SEQ ID NO: 517493 - DNA, 243 bp, Homo sapiens
cacgaggccagctctattcttggaataaaggcttctccggatcagtacatgcatgtcacattttcacacacacacacacatatgtgcatacacacacatgctcaatcagtgtgtgttggaatgacatacctgggctcaggggaagcacgggggcttatcatttgtggggtattcccataaggatggcagttaagacccagagcctcattaccactgccaatgtggatttagcaggggagggga

SEQ ID NO: 517494 - DNA, 311 bp, Homo sapiens
ccgcggcgggtggctgacgagacgacgcacatggccgcacgaaagacgagcgttctcccgacgcgaatctggaagtttcctgcccgcgtcgcgcaggcaggcgagccgcgcgtgcgcgatctcctcctggcgtgcagccgctactacaatcgactcgtggccatcgaggcggagcgggtcgcccagttcaacgagatccggcgccgccacgttcccgagctcgcggaagccgagtcgaggcgcgcggcgctgcaagcgcagatcgacgccgtgtaccgcaagatcaggcagcagcggcaagagcgcttctc

SEQ ID NO: 517495 - DNA, 797 bp, Homo sapiens
  misc_feature (2)..(2): n is a, c, g, or t
  misc_feature (5)..(5): n is a, c, g, or t
  misc_feature (8)..(8): n is a, c, g, or t
  misc_feature (12)..(12): n is a, c, g, or t
  misc_feature (22)..(23): n is a, c, g, or t
  misc_feature (31)..(31): n is a, c, g, or t
  misc_feature (42)..(42): n is a, c, g, or t
  misc_feature (47)..(48): n is a, c, g, or t
  misc_feature (51)..(51): n is a, c, g, or t
  misc_feature (54)..(54): n is a, c, g, or t
  misc_feature (56)..(56): n is a, c, g, or t
  misc_feature (59)..(59): n is a, c, g, or t
  misc_feature (65)..(65): n is a, c, g, or t
  misc_feature (67)..(68): n is a, c, g, or t
  misc_feature (80)..(80): n is a, c, g, or t
  misc_feature (82)..(82): n is a, c, g, or t
  misc_feature (85)..(85): n is a, c, g, or t
  misc_feature (95)..(95): n is a, c, g, or t
  misc_feature (98)..(98): n is a, c, g, or t
  misc_feature (103)..(103): n is a, c, g, or t
  misc_feature (112)..(112): n is a, c, g, or t
  misc_feature (115)..(116): n is a, c, g, or t
  misc_feature (123)..(123): n is a, c, g, or t
  misc_feature (148)..(148): n is a, c, g, or t
  misc_feature (164)..(165): n is a, c, g, or t
  misc_feature (177)..(177): n is a, c, g, or t
  misc_feature (189)..(191): n is a, c, g, or t
  misc_feature (195)..(195): n is a, c, g, or t
  misc_feature (208)..(208): n is a, c, g, or t
  misc_feature (210)..(210): n is a, c, g, or t
  misc_feature (213)..(213): n is a, c, g, or t
  misc_feature (216)..(216): n is a, c, g, or t
  misc_feature (220)..(220): n is a, c, g, or t
  misc_feature (222)..(222): n is a, c, g, or t
  misc_feature (234)..(234): n is a, c, g, or t
  misc_feature (240)..(240): n is a, c, g, or t
  misc_feature (244)..(245): n is a, c, g, or t
  misc_feature (278)..(278): n is a, c, g, or t
  misc_feature (281)..(281): n is a, c, g, or t
  misc_feature (289)..(289): n is a, c, g, or t
  misc_feature (292)..(295): n is a, c, g, or t
  misc_feature (304)..(312): n is a, c, g, or t
  misc_feature (314)..(314): n is a, c, g, or t
  misc_feature (317)..(317): n is a, c, g, or t
  misc_feature (326)..(326): n is a, c, g, or t
  misc_feature (331)..(332): n is a, c, g, or t
  misc_feature (334)..(335): n is a, c, g, or t
  misc_feature (339)..(339): n is a, c, g, or t
  misc_feature (341)..(342): n is a, c, g, or t
  misc_feature (347)..(347): n is a, c, g, or t
  misc_feature (353)..(353): n is a, c, g, or t
  misc_feature (364)..(364): n is a, c, g, or t
  misc_feature (368)..(368): n is a, c, g, or t
  misc_feature (370)..(370): n is a, c, g, or t
  misc_feature (386)..(387): n is a, c, g, or t
  misc_feature (393)..(394): n is a, c, g, or t
  misc_feature (406)..(406): n is a, c, g, or t
  misc_feature (417)..(417): n is a, c, g, or t
  misc_feature (435)..(435): n is a, c, g, or t
  misc_feature (452)..(453): n is a, c, g, or t
  misc_feature (466)..(467): n is a, c, g, or t
  misc_feature (478)..(479): n is a, c, g, or t
  misc_feature (482)..(482): n is a, c, g, or t
  misc_feature (490)..(490): n is a, c, g, or t
  misc_feature (498)..(498): n is a, c, g, or t
  misc_feature (513)..(513): n is a, c, g, or t
  misc_feature (518)..(518): n is a, c, g, or t
  misc_feature (556)..(556): n is a, c, g, or t
  misc_feature (560)..(560): n is a, c, g, or t
  misc_feature (564)..(564): n is a, c, g, or t
  misc_feature (590)..(590): n is a, c, g, or t
  misc_feature (615)..(615): n is a, c, g, or t
  misc_feature (623)..(623): n is a, c, g, or t
  misc_feature (646)..(646): n is a, c, g, or t
  misc_feature (698)..(698): n is a, c, g, or t
  misc_feature (731)..(731): n is a, c, g, or t
  misc_feature (736)..(736): n is a, c, g, or t
  misc_feature (773)..(773): n is a, c, g, or t
tnagnacncaangaattgcctnnatttcggnatgcccccccnttccnnccntcngnggncccgancnnccagtggaaagncnccnccattcgccnggngggcnagccccccnatnncgggganccgccgtcccccccgggtccccccntaacccccgccgaggnncctgggaagccnccgccgcccccnnncccnggcctgccccggntnccnggncccntntgtccccgtcgncagacncccnnccagccccccatggattcccaggccgccccaanganaccccccnccnnnnccccccccnnnnnnnnnanccnaagccgtcnccggnnanncaancnntcccnagggcncccgtgtcccncccngnccccccccgcggcccnncccccnntccccccccccnggcccccgcgngccggccggcccgagtcnccccggggcccatcccnnccccccccccccnncccgagccaannacnatgcatcngccgacgncagccgagggtggcngggcngaggacccaatattcatttcccaggctggtggagagtnagtnagtntggttccaaaactaaacaagggaggncagaggctctttccaaccttacctnatggcttntggccaaagcaaggaagtttcanggaaggtgttgggtggtgacggtgcaaaaaggaacttgaggaggagggaganaaagcagcccccctcgataaaggtgggggaganaaganatggggaaagccctgaattcctcaccgaaggccaatntcagaggggactggaggggttaca

SEQ ID NO: 517496 - DNA, 3210 bp, Homo sapiens
tataagcgcgtcatggtgccatgaacctgttcgccactgggaggtggacggctccagccccagctgcgtgcccaggttgtgcagcctgactctgaagaagctggtggtcttcaaggagctggagaaggagctgatctccgtggtgatcgctgtcaagatgcagggctccaaacgaatcctgcggtcccatgagattgtgctgccccccagtggacaagtggagacagacctggccctgaccttctccttgcagtatcctcacttcttgaagagggaaggcaacaagcttcagatcatgctgcagcgcagaaagcgctacaagaacagaaccatcctgggctacaagacgctggccgcgggctccatcagcatggctgaggtgatgcaacacccgtctgaaggtggccaggtgctgagcctctgcagcagcatcaaggaggcccccgtcaaggcggccgagatctggatcgcctccctgtccagccagcccattgaccacgaagacagcaccatgcaggccggccccaaggccaagtccacggataactactccgaggaggagtatgagagcttctcctccgagcaggaggccagtgacgacgccgtgcaggggcaggacttggacgaggacgactttgacgtggggaagccgaagaagcagcggagatcgattgtaagaacgacgtccatgaccaggcaacagaacttcaagcagaaagtggtagcgctgctgcggaggttcaaagtgtccgacgaggtcctggactcggagcaggaccctgcggagcacatccccgaggcagaggaggacctggacctcctgtatgacaccctggacatggagcaccccagcgacagcggccccgacatggaggatgacgacagcgtcctcagcacccccaagccgaagctgcggccatactttgaaggcctgtcgcactcgagctcgcagacggagattgggagcatccacagcgcccgcagccacaaggagcccccaagcccggctgacgtgcccgagaagacgcggtccctgggaggcaggcagccgagcgacagtgtctctgacacggtggccctcggtgtgccaggcccgagggagcaccctggacagcctgaggacagccccgaggctgaggcctccaccctggatgtgttcacggagaggctgccgcccagcgggaggatcaccaagacagagtcccttgtcatcccctccaccaggtccgaggggaagcaggctggccgacggggccggagcacatccttgaaggagcggcaggcagcacggccccagaatgagcgggccaacagcctggacaacgagcgctgcccggacgcccggagccagctacagatccccaggaagactgtgtatgaccagctcaaccacatcctcatctccgatgaccagcttcccgaaaacatcatccttgtcaacacctcggactggcaggggcagttcctctccgacgtcctgcagaggcacacgctccccgtggtgtgcacgtgctctcctgcggacgtccaggcggccttcagcaccatcgtctcacggatacagagatactgcaactgcaattcccagcccccgacccccgtgaagatcgccgtggcgggagcgcagcattacctcagtgccatcctgcggctctttgtggagcagctgtcccacaagacacccgactggctcggctacatgcgcttcctggtcatcccactgggctcccaccccgtggccaggtacctaggctccgtggactaccgctacaacaacttcttccaggacctggcctggagagacctgttcaacaagctggaggcccagagtgcggtacaggacacgccagacattgtgtcacgcatcacgcagtacatcgcaggggccaactgtgcccaccagctccccatcgcagaggccatgctgacctacaagcagaagagccctgacgaagagtcctcccaaaagttcattccctttgtcggggttgtgaaggttggaattgtggagccatcctcggccacatcaggcgactcggacgacgcggccccctcgggctctggcacgctctcctccaccccgccgtccgcatctcctgcggccaaggaggcctcacccaccccgccctcctccccgtcggtgagcggaggcctgtcctcccccagccagggtgtcggcgccgagctgatggggctgcaggtggactactggacggcagcacagcctgcggacaggaagagggacgccgagaagaaggacctgcctgtcaccaaaaacacgctcaagtgcactttccggtccctccaggtcagcaggctgcccagcagcggcgaggctgcagccacgcccaccatgtccatgaccgtggtcaccaaggagaagaacaagaaggtgatgtttctgcccaagaaagcgaaggacaaggacgtggagtctaagagccagtgcattgagggcatcagccggctcatctgcactgccaggcagcagcagaacatgctgcgggtcctcatcgacggcgtggagtgcagcgacgtcaagttcttccagctggccgcgcagtggtcctcgcacgtgaagcacttccccatctgcatcttcggacactccaaggccaccttctagccccacccaccagggggcccacctcctgccccatgctgtgaggggcccagctgcatttctgttaacatttcagtttactacagagacagacgcttaaaacacaaagagaaacagtcttaagtatgaatgtgctcacaacgtggaaactaacgggggagctcctgccaggagccgaataactgctctgcttattaacccgaacgttcggcccggggctgggaagccagaaggacgatgctgagccatggatcgcggaaggcgtcctctggcctcaggagccacccagagcctcacaggctgagttcttgcctctgtgtcctgtccttcctggaagtcaggactctgcttcctcagggagcccggggaaggcggagctcagtggccacaggccgagggccatggggccgctcagtcccgttggggttgtcctgagttgagcctgggggggccgtcctgcccgcctaagagatgcccccagcaccgcacactcgtggttcccaataaactcctgcctgcggcggaggttttatagcagcagatatttttaatgcttttcaatacatgttctaatgtagctgccaaaa

SEQ ID NO: 517497 - DNA, 140 bp, Homo sapiens
gcacgaggtgtgtgtttgtagtcctagcaacttgataggctgatgcaggatgattatttaagcctaggagttcaaggctgcagtaagctatgtttgcaccactgcactccagtctgggcagcagcaagaccctgtccctt

SEQ ID NO: 517498 - DNA, 3111 bp, Homo sapiens
tataagcgcgtcatggtgccatgaacctgttcgccactgggaggtggacggctccagccccagctgcgtgcccaggttgtgcagcctgactctgaagaagctggtggtcttcaaggagctggagaaggagctgatctccgtggtgatcgctgtcaagatgcagggctccaaacgaatcctgcggtcccatgagattgtgctgccccccagtggacaagtggagacagacctggccctgaccttctccttgcagtatcctcacttcttgaagagggaaggcaacaagcttcagatcatgctgcagcgcagaaagcgctacaagaacagaaccatcctgggctacaagacgctggccgcgggctccatcagcatggctgaggtgatgcaacacccgtctgaaggtggccaggtgctgagcctctgcagcagcatcaaggaggcccccgtcaaggcggccgagatctggatcgcctccctgtccagccagcccattgaccacgaagacagcaccatgcaggccggccccaaggccaagtccacggataactactccgaggaggagtatgagagcttctcctccgagcaggaggccagtgacgacgccgtgcaggggcaggacttggacgaggacgactttgacgtggggaagccgaagaagcagcggagatcgattgtaagaacgacgtccatgaccaggcaacagaacttcaagcagaaagtggtagcgctgctgcggaggttcaaagtgtccgacgaggtcctggactcggagcaggaccctgcggagcacatccccgaggcagaggaggacctggacctcctgtatgacaccctggacatggagcaccccagcgacagcggccccgacatggaggatgacgacagcgtcctcagcacccccaagccgaagctgcggccatactttgaaggcctgtcgcactcgagctcgcagacggagattgggagcatccacagcgcccgcagccacaaggagcccccaagcccggctgacgtgcccgagaagacgcggtccctgggaggcaggcagccgagcgacagtgtctctgacacggtggccctcggtgtgccaggcccgagggagcaccctggacagcctgaggacagccccgaggctgaggcctccaccctggatgtgttcacggagaggctgccgcccagcgggaggatcaccaagacagagtcccttgtcatcccctccaccaggtccgaggggaagcaggctggccgacggggccggagcacatccttgaaggagcggcaggcagcacggccccagaatgagcgggccaacagcctggacaacgagcgctgcccggacgcccggagccagctacagatccccaggaagactgtgtatgaccagctcaaccacatcctcatctccgatgaccagcttcccgaaaacatcatccttgtcaacacctcggactggcaggggcagttcctctccgacgtcctgcagaggcacacgctccccgtggtgtgcacgtgctctcctgcggacgtccaggcggccttcagcaccatcgtctcacggatacagagatactgcaactgcaattcccagcccccgacccccgtgaagatcgccgtggcgggagcgcagcattacctcagtgccatcctgcggctctttgtggagcagctgtcccacaagacacccgactggctcggctacatgcgcttcctggtcatcccactgggctcccaccccgtggccaggtacctaggctccgtggactaccgctacaacaacttcttccaggacctggcctggagagacctgttcaacaagctggaggcccagagtgcggtacaggacacgccagacattgtgtcacgcatcacgcagtacatcgcaggggccaactgtgcccaccagctccccatcgcagaggccatgctgacctacaagcagaagagccctgacgaagagtcctcccaaaagttcattccctttgtcggggttgtgaaggttggaattgtggagccatcctcggccacatcaggcgactcggacgacgcggccccctcgggctctggcacgctctcctccaccccgccgtccgcatctcctgcggccaaggaggcctcacccaccccgccctcctccccgtcggtgagcggaggcctgtcctcccccagccagggtgtcggcgccgagctgatggggctgcaggtggactactggacggcagcacagcctgcggacaggaagagggacgccgagaagaaggacctgcctgtcaccaaaaacacgctcaagtgcactttccggtccctccaggtcagcaggctgcccagcagcggcgaggctgcagccacgcccaccatgtccatgaccgtggtcaccaaggagaagaacaagaaggtgatgtttctgcccaagaaagcgaaggacaaggacgtggagtctaagagccagtgcattgagggcatcagccggctcatctgcactgccaggcagcagcagaacatgctgcgggtcctcatcgacggcgtggagtgcagcgacgtcaagttcttccagctggccgcgcagtggtcctcgcacgtgaagcacttccccatctgcatcttcggacactccaaggccaccttctagccccacccaccagggggcccacctcctgccccatgctgtgaggggcccagctgcatttctgttaacatttcagtttactacagagacagacgcttacgggggagctcctgccaggagccgaataactgctctgcttattaacccgaacgttcggcccggggctgggaagccagaaggacgatgctgagccatggatcgcggaaggcgtcctctggcctcaggagccacccagagcctcacaggctgagttcttgcctctgtgtcctgtccttcctggaagtcaggactctgcttcctcagggagcccggggaaggcggagctcagtggccacaggccgagggccatggggccgctcagtcccgttggggttgtcctgagttgagcctgggggggccgtcctgcccgcctaagagatgcccccagcaccgcacactcgtggttcccaataaactcctgcctgcggcggaggttttatagcagcaga

SEQ ID NO: 517499 - DNA, 172 bp, Homo sapiens
tttttggggggggggggggggggggccccccccccccccctttttgtaaaaccccgggggggggttttttttcccccttttttttttttaaaaagggcccccccccgggggaaaaggggaccctttttttttttgttttttttcccaaaagggggggttttttttgggggga

SEQ ID NO: 517500 - DNA, 2684 bp, Homo sapiens
tataagcgcgtcatggtgccatgaacctgttcgccactgggaggtggacggctccagccccagctgcgtgcccaggttgtgcagcctgactctgaagaagctggtggtcttcaaggagctggagaaggagctgatctccgtggtgatcgctgtcaagatgcagggctccaaacgaatcctgcggtcccatgagattgtgctgccccccagtggacaagtggagacagacctggccctgaccttctccttgcagtatcctcacttcttgaagagggaaggcaacaagcttcagatcatgctgcagcgcagaaagcgctacaagaacagaaccatcctgggctacaagacgctggccgcgggctccatcagcatggctgaggtgatgcaacacccgtctgaaggtggccaggtgctgagcctctgcagcagcatcaaggaggcccccgtcaaggcggccgagatctggatcgcctccctgtccagccagcccattgaccacgaagacagcaccatgcaggccggccccaaggccaagtccacggataactactccgaggaggagtatgagagcttctcctccgagcaggaggccagtgacgacgccgtgcaggggcaggacttggacgaggacgactttgacgtggggaagccgaagaagcagcggagatcgattgtaagaacgacgtccatgaccaggcaacagaacttcaagcagaaagtggtagcgctgctgcggaggttcaaagtgtccgacgaggtcctggactcggagcaggaccctgcggagcacatccccgaggcagaggaggacctggacctcctgtatgacaccctggacatggagcaccccagcgacagcggccccgacatggaggatgacgacagcgtcctcagcacccccaagccgaagctgcggccatactttgaaggcctgtcgcactcgagctcgcagacggagattgggagcatccacagcgcccgcagccacaaggagcccccaagcccggctgacgtgcccgagaagacgcggtccctgggaggcaggcagccgagcgacagtgtctctgacacggtggccctcggtgtgccaggcccgagggagcaccctggacagcctgaggacagccccgaggctgaggcctccaccctggatgtgttcacggagaggctgccgcccagcgggaggatcaccaagacagagtcccttgtcatcccctccaccaggtccgaggggaagcaggctggccgacggggccggagcacatccttgaaggagcggcaggcagcacggccccagaatgagcgggccaacagcctggacaacgagcgctgcccggacgcccggagccagctacagatccccaggaagactgtgtatgaccagctcaaccacatcctcatctccgatgaccagcttcccgaaaacatcatccttgtcaacacctcggactggcaggggcagttcctctccgacgtcctgcagaggcacacgctccccgtggtgtgcacgtgctctcctgcggacgtccaggcggccttcagcaccatcgtctcacggatacagagatactgcaactgcaattcccagcccccgacccccgtgaagatcgccgtggcgggagcgcagcattacctcagtgccatcctgcggctctttgtggagcagctgtcccacaagacacccgactggctcggctacatgcgcttcctggtcatcccactgggctcccaccccgtggccaggtacctaggctccgtggactaccgctacaacaacttcttccaggacctggcctggagagacctgttcaacaagctggaggcccagagtgcggtacaggacacgccagacattgtgtcacgcatcacgcagtacatcgcaggggccaactgtgcccaccagctccccatcgcagaggccatgctgacctacaagcagaagagccctgacgaagagtcctcccaaaagttcattccctttgtcggggttgtgaaggttggaattgtggagccatcctcggccacatcaggtaaccccgtcccaccctgaggccttgtgagtggcccgtgggtgggctgcaggagcacggtcattcgagtcctgcagaccagatcaacctttcagggcctgagagccgccacgtcccagtcttgctgtggtgcttctgtcctgcggggggttcatcctccaaggactgctgtcacaaagccccacatcaaggctggcaggggttgtcttccaaaaaccgaggagaatccgagaccctcccgtctctcacaggccactggggactcccaccctgcccacccccaggagctgcctggcctggccacatcctggtccggagggcctggtggcacccgggcagagcagcaggtgggctcagcctgccctgtgactcctccccaaaggcgactcggacgacgcggccccctcgggctctggcacgctctcctccaccccgccgtccgcatctcctgcggccaaggaggcctcacccaccccgccctcctccccgtcggtgagcggaggcctgtcctcccccaggtaaaggtgcctcacggctcagcacgtttcacttacccgccccaccacatgctgcctgattcagtcatcctcccctatgtcacatccacctcccagggcacctggcctgtcagccacgaaggcggaggggctctgc

SEQ ID NO: 517501 - DNA, 881 bp, Homo sapiens
  misc_feature (211)..(211): n is a, c, g, or t
tacatctgcacggccccctcagtgctgataagtctactcaatgggtcactcataatctattcatctgtatcttaatggcccaggcatctgctctggaaactattgagcttgctgtacttgaaggatggatgagtcagacacgattgagaactgacaaaggagcctgataaatacttgaccctcctgtgaccaacctgtggaattcagaaantttaaacaaaaaaaaaaaaaaaaaacacaccccttgggtaccatttcgtgtggattttcaaaaaccgtgttttagttttacttggtaccatttcttattggttaaaattcacctaaaattcttcagaacttttatagcaggactttggttgttccaggttaagggagagattggccaagccagggacaattggtctattagaaaacccgccctaagaagattcttgggtgttgggccactttagggtcatcgtggggcagaagtttagcattaatagtggtcctgaaacgtgttttatcaggtttagagcccatgtggagtctcctttccatgggtttccataaatattttaaccctattgttagcgaggtttggtcgttaaagtaaaggttacctcttgatgatttccataaataatctttctaacaattggtttgtcgaccattccttgctgatccagaaataatgctagggcatatgcttttcggcacattttgttttgtccgcagtatttgggaccttaacactgttctcaccagggacaatgacacagtgagggggggggggaaaaggcactacaccgggcatttgacacaccggtacaatccggtgtctaaaaccagcgccgaatgggtcccctaaatcacatatcccccgaacttccatcaag

SEQ ID NO: 517502 - DNA, 904 bp, Homo sapiens
agcggagtcctccggccgggcggtccggaacagtgcgacggcagactccggcccgctgagccacccgaggggtcccgtggcctccgcggacccggaatctgggccctcgcggacccgggccctcgtgcagacggccgccgagggctggcgcactacgaccacggagtgaatgtcaggcgcaggccatggcgtgggaggagacttagccgtcataccgggagaaggtggccaggagatgtgtcgggaccgtggtgacgagggtgaaggcagagacggaccgatcggcccacgggccaccggaacgcgtgcggaggtcagccccggcggagccattagcctgcacgggacaccctggagttcacgtgggagcccacggcatccatgcactgcacagacgtacccagcacatgagagctgttgggccatggccagtcatgctaggaacggcctccatgcgacgtggcctatgcccatgtccatcagaaggagtaccccgccgaacttcgtgagatggcatcgcccatcccaattccgcaggtctttacttccaggcaatgcgagaatcactggaattcttcccttcaatggtggcccacgggggtggatctagcctgaaatgattgtccgaggctgcgctgctcccgcgtgccgaaaggggcaagcattgacctcaattcaagcgagcctgctatcatcttcctgcagcgaccaccaagtgcgtgggcaccaggcttgcaaggcccgcggggcggggtggtcattacctggggtccgaaggaccgtccagaagacggcctgcaaagccacctgggatatgaccccacaggcggggcagaagtccttgctttgcagcagagcgtccaggagggtcaggcgcctggggccaaggctccgacgggaacgt

SEQ ID NO: 517503 - DNA, 275 bp, Homo sapiens
tggagaacaagtaatgaacaaatatgtatgatcacatctgttagagacagctaggcacaaacaatcttgcaggcacaatgacctcattccacacgtagcacccttcagcaggaccctatgaaactttcctccagcccttgcctctttgcaggttgccccttctctgctgagctgcccactgcaacatattttcacaatttctctaataaatctgcccttctttacctacaactatcttggtaaatggctttaccacctgcaaaactgaccctagg

SEQ ID NO: 517504 - DNA, 1581 bp, Homo sapiens
  misc_feature (429)..(429): n is a, c, g, or t
  misc_feature (1097)..(1097): n is a, c, g, or t
  misc_feature (1374)..(1374): n is a, c, g, or t
tgtgtgcggggttgtgttggttgggtgatgacggacgcgcggcaggcgggacgtcgttgctggtgttgtgtgtgtagtacgtatcgtcgttgtggttgtgagttagctctgtcgccgttggtggctccttcatttgtgattcgctgcgctgctgctgttcgtcggtgggtgcgccgctcgtggggtggcctccatagcgggtggggtcttgctgctgtgggtgcctgtgggcgggcccactgttgttgtgtgccccgccgggtgttagttgtgtgggcccctcgttatttggccccccgatgtgttctccaggcctcccgggcgccagagagggagttgcttcgtcggtgagtttcttcctggccgccctcctggtgctgtggttgatttagcgtgggggggggtgtgcccgggggtccgcacggtgcncgcctgggcctgcgccgctcctccgtgggtttgcgcgttgtattatggcgcttggtcgatgggaaaccgtggtggtgtcgccggcaccgttggtgcccggcgtcgcgcccccagaccggggggaatactcttctgcgcccccagtgttggtgtggctctggctgggggggaagaaagtcgtgggttttcggcggtatttggtgtcttggggggtttattgttggccaccttggttgcggcggtgttttgcacctgggggccggagcctttttgtgtggttgcgaacaaagcccgggcccccaggtgttttgccggccccacgcacgtggtggagaccgcccctgggagatgggaggggccactatttgtcggagggggccttgcattaacgtggggccacgccccctgtgaggagaattgtggcgcaacgggggcgtcccccagcccactgtcctgggacgccggagtctctctcggggcatatatgggggataaggcctgacgccaccccctggcgttgggttcacccctggcggtggtggtgtcaccccgcgggctctctgacgggcagtcgccctggtgcagccacgctggatggcctatcgaggcccacgagttcccgcgggccacttgaggagcctgtttcccaccgcgaaggtttgggcccnccaagaatgtctcccggtgttgccgcgctggggcccactaaagtgccctggaggcccacgcgtctccgcgagcgaggacctcgtgaagaattgtgtggcctctctcggagttcgaaagtttgtcaccacttgggctcgttacaccacgtgggcgcacggaggttgttgggctctcttgcttctcccttctcgaagggcgaggttgtccacgggctcgctaacccccttggaatgggcacactcttgtgccaaaggcctgcacgccccttggcgcatnccacaggaagcttctcaagccacccgtcaccccactgaactcgctgagttcttcctaagaagtatcctgctgggtttctcacagttccacgttcccactcctttgagttgatcactctccctgacagtccccctgtatcgactttgtcacccaatgctgtcttctctttcccccatccacgaaataataatccctcgagtttaccca

SEQ ID NO: 517505 - DNA, 504 bp, Homo sapiens
  misc_feature (455)..(455): n is a, c, g, or t
  misc_feature (482)..(482): n is a, c, g, or t
agatgcggaggagggtgacgcactagctctccagttcgcccgttcctggcctgacccccaccaaggcccataccgcagtaggctcctcgggctgcccctcggttgacaatggtctccaggatggtctctaccatgctatctggcctactgttttggctggcatctggatggactccagcatttgcttacagcccccggacccctgaccgggtctcagaagcagatatccagaggctgcttcatggtgttatggagcaattgggcattgccaggccccgagtggaatatccagctcaccaggccatgaatcttgtgggcccccagagcattgaaggtgggagctcatgaaggacttcagcatttggggtccttttgggcaacatccccaacatcgtgggcagagtttgacttggagacaacattcctaaggattttagttgaggatcaaggggtancccagacccttccaaattcctgtctgntggcaggatgatggatgtctgt

SEQ ID NO: 517506 - DNA, 419 bp, Homo sapiens
  misc_feature (12)..(12): n is a, c, g, or t
ggtgctaacagntcgtgacagaagacagacattaaacattgcacatgaaggccaggaattggtggtgcacacctagtaatcccagcactttggaaggctgagactccagtgaattgcttgacgccaggagttcgagaccagcctggacaacatagtgagatctcatctcaaacaaacatgcacaaacacacgtgaacataaaacaatacttcaataagagcaacgacagtgtgctatgagcttgaccagctggaggctcggcacgtgatatttagccatgatctcaagactaaattgagacttagcagacgaagggagattccggacctagggggaaagagtacctttgcagaggagacaaatacttaataacagccaagactatacgtacttctcaggaaacactgataccgcaaagg

SEQ ID NO: 517507 - DNA, 199 bp, Homo sapiens
  misc_feature (110)..(110): n is a, c, g, or t
tcgcgctcggtgatgtttcatgagtatcagtcaggtcccggccagccacggatccatactgcaggatggcttgggggagggcttacccctcgtacataggcacagtgtgntgtgaccccgtcaccggcagtccatcacagtatgccagtaggtacggtcgaaaggcgtacagggtatagcacaggccctggcagtagca

SEQ ID NO: 517508 - DNA, 316 bp, Homo sapiens
agtcccaagaattctgaatgtttcataggtagcaatgataactggtgagaatttagaggtgctattgataagtaagcaccaaaaccaccagtattacacagttaaaagcttcactattttgagtcacttaaattagacttcagaatgtgttgtaaaattatcttcaacagcaggtttgtgcttttcaggtgacatcagcaatggcaaaattagtcgccttcgtcgagagtgcccttctgatgaatgtggtgctggggtgatttatggccagtcactttgacagcacattattgtggcaactgttgtctgacttcac

SEQ ID NO: 517509 - DNA, 112 bp, Homo sapiens
aacaagaggttatttgggtgatccagtgcatggctgagtctttgtgatttaagtattttcaatttttttagtggaccatctagtattccttttctgccttgttagtctggcc

SEQ ID NO: 517510 - DNA, 984 bp, Homo sapiens
  misc_feature (981)..(981): n is a, c, g, or t
taccgcgagacggtcagtgaagagtcgaacgtgctctgccttctccaaggtcccccaatcaaagcacaatcggctgtacatgaaggcgcggcccttccccgacggccatggccgaggacgtcgataaaggcgaggtgtccgccccgtcaggagctcaagcgagcgggcgcgctactggccgagaagtacgaggtgggacgtggctgaggcccgcgagatctggtgcttgggcccgacggctccggccccaacatcctcaccgacatcaccaagggtgtgcagtaactcaatccgcagatcaaggacagtgtggtggccggcttccagtgggcccaccaaggagggcgcactgtgttgaggatgaagcatgcgtgggtgtgcgctttgacgtccacgaagtcagcctgtacgccgaggccatccaccggtgaggggcagatcatcccccttggcccttgtgctgcctctactccagtgtgctgaccgaccagccacgcctcatggacgcccatttaccttgtggacgatcgggtgtccagagcatggtggtctgggtggtactttaacgggggttcgaagcaggaaggcgggggcctgtgttcgagggactcccgggtggccggcaccgcaagtgtggtcaaagcctttctgccgtcgagtgtgcttggtataccgtgacctgaggtccaacaccggcggcctgcgtcccccatgtgtgtttgcctctgcagttctggcggacccttcgaaaagtaggcggtcctgcagtggtgggtggcccgtaggcggtctcaaaatggctccctgccttgggactcctcggcaagggggggcctctgaagccgcgcccgggttccgcccactctcgtttagagctgggagcagagcccaagttggcgtgtccacagtggccctttacacgcgacactagagcggggggcgccagtacatattgcctttgtgtctgtcttgcttccaggnggg

SEQ ID NO: 517511 - DNA, 978 bp, Homo sapiens
ataccaacatgtgctgtgatgactgccgtgtgcaagctgtatgtggtggccctgtgatggccctggttgccctgggatgtgggaacctgtggatggcttccgcggagtgtttctggcagtgtgcattctggggcctggggccgaggccagcggagctcgccggagtgcaaggccgaggataagtgagtggattgccctgtcaccacagttggtgcctgcttggtcaaggacatgaagatcaagtccctggatggagatctatctcttctccctgcccattcaaggaatcagagatcatttgatttcttcctggtgggcctctctcaaggatgagggtcgaagattatgccagtgcagaagcagaccctgtgccggccagccgcaccaggttccaaggcatatgtagctatcgggggactacaagtgtgccacgtcgggtctgggtgtcaaggtgctccagtggaggtggccaccgccatacctgtgtgggccattcatcctgtgccaaggctctccatcgtcccctgtgctgcagaaggcttacttgggtgtgaccaatgatcgggaatggcccagatgtggtcaccctttgcaaggttgacatggcctgctcggggtcgtgttgctggtaacgcctcatcgcttgcgacccagggggcacttggcatcgtcatccggcaacctgttgccttaaagaagcttgattcaatgatgggctgggaatcgattgactgctacacctcaaggcccggggctgcaactgaccaaccctttgtggtctaaactgtcggccacacaggggcgaaccattggggattgcccgggtatggctagaggagtcatacgacggattacggcttaagcacccgtgaagcctcatgggcagcggttgaaccttgataatgtcagcgcagggtttaccccgaagtacagggaagtatgcagtgtgacaccacaccattcggtgtgcaggaacgt

SEQ ID NO: 517512 - DNA, 1006 bp, Homo sapiens
gctcatgcttctctccgggtctcccgcgtccagggtccagccccaccggccggtcccgcacggctcgggtagccatggaggacgcagcggcgctggagctttcgtcggacgaggcggggaggtgaggaggttatgaggagtcccgcgcagaggtatcaagcgcagggcctgggcgcgtggacgattcaagaaggccttctccagggagaagatggagaagaccaaggtgcgtacccgcgagaacctggagaagacgcgcctcaagaccaagggaaaacctggagaagacgcggacacccctggagaaggcgcatgaacaagctgggcacgcgcgtggtgcccgccgagcggcgcgagaaactgaacgacgtcgcgggacaaccgttgcgcaaaatccttcaggcccgacacgttgttgtacgcgcgctccaagaccgcggtctacaaggtgccaccttcaaccttcacggtcaagaagatccgcgagggccaggtggaatgtggctcaggccaccgagatggtgcacggtgggcgccgaagacgtagaggggcggccgcggaacctgcgggagggccggtgacctgggcgggggggaacaacccgaggtgccacgcctgctggggatacccgaggattcggcacgcgtgtggtggaacatgagcgacagcgcctgacgcgcccagttgcaccctacccgatttcttgggtcttcggactccctcgtttcgattctttttggctcgacctgatggacgttctctaacttggaaaccctgcccccttccaacttctggagtccatccagttagaggtgtacgcccgttggtctgcccccgttagacaccctgtgcagcgccgtgagtggtgcatgtccccggctgtgcaactgttcacggatgcgtgcccgtgcctgggtgttctatttccccacgtgtcccgtcttctcggtcgtacgccagtctggcgcctccagtgtgccacaggggctgtgtgttgttttgtgt

SEQ ID NO: 517513 - DNA, 872 bp, Homo sapiens
  misc_feature (154)..(154): n is a, c, g, or t
  misc_feature (429)..(429): n is a, c, g, or t
  misc_feature (840)..(840): n is a, c, g, or t
  misc_feature (867)..(867): n is a, c, g, or t
cagaccagcctggccaacatggcgaaatcctatctctactaaaaacactaaaaaagagccgggcgtggtgacgggcacctgtaattccagctacttgggaggctgaggcaggagaattgcatgggcctgggaggtggaggttgcagtgagccgngatcgcaccactgcactccagcgtgcatgacgagagcgagactaccacctagaaaaaaacaagatgtgttttggacttttccggtgatacgttcaaaaaattattggcagggtgcggtggctcacgcctgtcaccccagcactattgggaggccaagtagggaggattgcgttgaggcccggagttctagaccagcgctaggcaacatagagagaccccgtttctacaaaaaattaaaaaaagattcaggccgggcactgtggttcatgcctgtnatcccagcattttgggaggctgagagcaggcagcatcaccagaggtcaggagtttgagaccagccatggccaacatggtgaaacctcatctctactaaaaaaaaatatttcataaattagccaagcgacgctggtgcatgtcgtggaatactcaactgacttggggggaccaaagcaggaagattgcctgagcccgggaggttgaggctgcagtgagtggagatggcgccactgcactccagcctgagtgacagagtgagaccctgtctctaaaaaaaaagtaaaataatttttttttgagacggggtttctcttgttgcccaggctggagtgcaatggcgcgatctcagctcactgcaacctccgcctccagcgttcaagcgattctcctgcctcagcctccacagtagntgggattacaggccccaccaccgcgcntggct

SEQ ID NO: 517514 - DNA, 441 bp, Homo sapiens
  misc_feature (173)..(173): n is a, c, g, or t
  misc_feature (262)..(262): n is a, c, g, or t
  misc_feature (313)..(313): n is a, c, g, or t
  misc_feature (364)..(365): n is a, c, g, or t
  misc_feature (378)..(378): n is a, c, g, or t
tatgaatcccccggcttctcaaaatgtagggattatatgcgtgagccactgtgctggcatgacttgtattttaaaaagcaaaagtgttttgcgtgtgtgtgtgtgagtttaagatggagagatgttctggagagacgtgtcagtctcgtgctctgctcttagcaatgcaggtncagtgagttcaggaattaagagactctgggtgactcgcatgcccatcccacaggagactgacgtcaatttactcatttacaatgaaagnataataccccgtcagctgagcacacatccttcctgctggaagtcgcggccnaggctgaatgtgcagggcaccagtcattgggaaggctcagtctgaagggtnnactcaagcctgtngggccccacagtaagtccttcctaatgcctggaataacacacaatccccagagcagcatctcc

SEQ ID NO: 517515 - DNA, 301 bp, Homo sapiens
acccactactggctctgtcaagtgtctatggccaatcaattgtccttctaatcactggaggggcagactctgtcagacagcaccaagtcactggcatcccaaacttttcaatgataccaggcctttaacaactcccctccacctccaaaccctctctcaccagattgtgtaatttctttgtttactgctggcttcatcatgcacttttccttcatagcctattttaagaagttgatttgctgaactgctttttagccaagctatttgtaaatcaagctacacaaagtatgtggccagtagt

SEQ ID NO: 517516 - DNA, 922 bp, Homo sapiens
  misc_feature (44)..(44): n is a, c, g, or t
ggactctctgatgatttcgccctccgccgttgatgagtgttttncgagccggttgtgtcttcccgctcattggtggcttcgtcgttctgtatccatccggagtttggtcgattgtgtgtgctcgtagcggttggtttgcttatcaccgtttccctgtgggtgcaccagtgtgctcgtttcgtagacaccgggtcgtttgtttcgttcggtcacccccccaatagtgggtcatcttgttgcttttggagtgtgcactctttgtcgccgtggatcgtggtgccacactttgtgttggaacaagggtcgggttcctcttgttccaccacaaaagtgtggagaccgccaccatgccgtcgcgactcttgatgttgtgggagaaaagttctctgtcccggcgagagtagtcggttcaccaccaacgagggtggtgttgttgcacaaaggtggttgcttcggcctagctgtgtggaatgatattccttgcttttttttagaacaaataatgattgtgtgtaaacacccaattctggtgtgtcatcaagttctcgtcccggtccgctgtgttagttaactcactgccgtctcaccacacggtgagagatcttgcgggccggctcccgtctctttttgtatcgctcagagtgtggataccttggctcgcgaccaccaggtggtggagaaaatatgtgccgcgagagttcttgtgtgcccagaaatattgttgtggctccctgaatgcacgggtgtgtttttgaagaagtgagttaccaccacgtgtgttggtgtgttgaatatcattagcggaagactgttttatcgagacatatattaggtgcccgcgtccaataaaccggaattgtgggggaacccaaaaataaaacggggtataaccccctttttttttaaacccactaatatatat

SEQ ID NO: 517517 - DNA, 228 bp, Homo sapiens
tcagctcggaccatcccaacacagatatatgccaggagtgggattgctaggtacttcatgtatagttttctgaggaatctccatactgttttccatagtggttgtaccaatttacattcctaccaacagtgtaggaggggtcccttttctccacaccctctccagtatttgctatttgtagacttattaatgatggtcattctgactggtgtgaggtagtaactaatt

SEQ ID NO: 517518 - DNA, 112 bp, Homo sapiens
acaagagtgcctcgtcggaagtcgccccagctgcaggagagcaggagccagggctgactggggccctggagagctggaccgagcccacgagcacgagggacaccaggaccat

SEQ ID NO: 517519 - DNA, 911 bp, Homo sapiens
  misc_feature (618)..(618): n is a, c, g, or t
  misc_feature (730)..(730): n is a, c, g, or t
accacagcctaattattagcatcatccctctactattgtttagaccaaatcaacaacaagctatttagctgttccccaaccttttccgtccgaccccctaaggaagcccccctcctaatactagctacctgactcctacccctcgacaatcagtggcaagccgaatcgccacttgatccagtgaaggactatcacgaaaaaaaactctgacctctctatactaatctcgcctacaaaagtctccttaatgataatcatgtcagcagccacggaagctaatgcatattttatatcttcttcgaaacgcacacgttatcgcccaccttggctatcatgcacccgatgaggcagaccagcgcaggaacgcgctgaacgcaggcgacgatacttcctattctagcaccctagtaggcctcgccttcccctactgcatcgcactaatttacagtcacgacaccctaggcgtcactaaacattctactactcattctcactgcccaagaactatcaaagtcctgagccagcaattaatatgactagcttacacaatagcttttatagtaaagatacctcgttagggactccagtgattgactccctaaagcccatgtgcgaagnccccatcgctgggtcaatagtacttggcggagtactcttaaaactaggcgggtatggtattagtacgctgggatcattttcaaaccgtgaaagaaataggctacccgttctngtttatctatgagtcatttacagtcctttgtgagaaaaggctaatggcatgtattcttagaagccatagctcgggtaaaggattcataaccgagtcgggggattcataccgggacgcaaaatggtggaaaaaagggacgggatttcccggaaccacatgggcgacggccccaatagggggc

SEQ ID NO: 517520 - DNA, 687 bp, Homo sapiens
  misc_feature (488)..(488): n is a, c, g, or t
acatattaaatttatgaaaattataaaatacaacacttacaaggatatagtggagaagtatacagtgacagtgtaaattagtacatttgctggaacattgtctgataatctgtaataataaacataaaatcgtcatattcttttatctaaaaattccaattctgacagtttcttaaaaacaaaacaaaacagaggcaggagaattgcctgaggccaggagtttgagaccagcctgggcaacatagcaagacctgtactctacaaaaaattttataattagctgggcatagtggcacacacctgtagtcctagcttacttaagcagctgaggcaggtcacttgagcccagagttcaaggttacagtgagctatgatcaggccactgcactccagcatgggtgagagagcgagaccctgtctctgaaacaaacaaatctatttttaagccaaaacagtacaggttgtttgaagtgtttgtagagcaatgntacaaaggggttaaaagaatataccccaaacaagcaaggctaatggccacagtttatcaattttcatgcatattatagaggtatttaaatgattaatcttggaaaagccgacataaaaactggtgtgctaacaatttacaggcgtattaaatatatttccacttaatgttgtgcggataagctggaatgaatttttaat

SEQ ID NO: 517521 - DNA, 914 bp, Homo sapiens
  misc_feature (450)..(450): n is a, c, g, or t
  misc_feature (636)..(636): n is a, c, g, or t
gtgggaaatgggttatacgtacagcttaatcttgcttggtttatctgtgacaagtggttctcttcctctggtcccttctgggggactctgtttccccatttacttgctgctgttgtcctcgtcaccatgttccttgcaggattccttcgtgttctagatgccgcttgtaatcataatcatattgtcgctttgtgaaggacctcaccagtgtggctgctagctcctggccggttctctctttgccctgccaaggccgtgagactcaagtgattgtcatctccgaagctcgctctgccatgttttgtggcctcacttcgagtagcttggttggcgtcaagactagttagctctgggcagagccaggggtgatgggagaaggctctgtggagcacagcgtcgggatggcgcgcaccgtgtggctgtcaggctgggctactgtacggcgccggntcgtaccctgtagggaacccaattggggccctcggtgctggcctgctaccaggtagttgtactgtttcaagtcgcttggttaccttgtgttgccttagttgctgattgctgctgttgtaattgcgtccttgtagaactacgacgtttcggcgaggcgaaaagcaggatagaactctagtaattcangtttggcccggcacttggtacggatagggttcgcctgggaccctcccgctggttgttccccagtctttgtgactcgggagcgtcttctgcaagtccgttggttcttgtgggtaacccgctagggattgcgcctttgtgatccgtactgagggggctggcccggagtcgctgcatggtttgcccctggtggatggtttcctgacatgccccaggggctggggccttgctggggtcgcaatttggccccattcgcgggtctttgaggttccttcccttcg

SEQ ID NO: 517522 - DNA, 197 bp, Homo sapiens
gcgaggttaatgcggggagacgaagtggaggaagaagcgaatgcgcagcgtgaagcgcaaaagaagaaagatgaggcagaggtccaatgtaaaccgctagcttgtttgcaccgtggagtgccgcatggagcatgaaaacatgtgaatggccatgacgctggtgagatgctgtgtacaaggttgtgtggacttgcatt

SEQ ID NO: 517523 - DNA, 151 bp, Homo sapiens
gggtagaaaggcaagatgaagtcgacttatcaaaggggtacacggaatttccaggcatcagttcaaggggaggcctcccttcttcaggggacataagggtagccagttggccttctatcatctctccatcaatcccggaagggagcccaaa

SEQ ID NO: 517524 - DNA, 452 bp, Homo sapiens
ggctcgaccgcccacagcgcgctgccgtccttgcgcaggtaacgtttttcaaaagtgacgcttgaacactggccctggatcagcctgggtatttcgtcccggccagcctgaaggtcgtccgggtgggtcagttgctggaacgaggtaccgcgcactctgtcttcggtgtagccgagcatccggcagagcatcgggttcgcggcaatccattcgccgctcaggtatgcaacggccaggccgttgccgctggaatcgaaggcgaggcgatagtcttgctcggcggggcccagcggtaatccttcggttttgtcagggccttgcgtgggagcgagctctgcagtaacggctgagtccattcgcctttctcccggttattttgcctggagcatagcgcaacgcccagcgctatgcacacctgttcggtctggggcgtgaggtcgttgatccgtatc

SEQ ID NO: 517525 - DNA, 252 bp, Homo sapiens
catcataaatcctctctcaggacttcaaactctactcccagtaagtagcttgttgatgacttgcatagcaagcctcgcgtaacctcgccttaccccccactattaaactacggggagaactctctgtgctagtaaccacgttctcctgatcaaagtatcactctcctacttacaggactcaacatactagtcatagctgtatcctgcctctacatatttaccacaacacaatggggctcactcacccaccct

SEQ ID NO: 517526 - DNA, 191 bp, Homo sapiens
cgcagttgcaatagaattgcgtcatcatatttgtaacagcaacacaaccgcttcacgctctggcaacactttactgggtttgggcgttggtaaggtctcagtcaaacccgtcacgccaggctacacaacctgtcttgcaatgggcatgattaaaccatgctgtgcctgcaaccgtggtgcatacgctgtag

SEQ ID NO: 517527 - DNA, 119 bp, Homo sapiens
cgttatctctcacgggcagttttgtgatgttttgtctttttccaggtcttcattatgatactgtaattccagcattttgggaggacaagacaggagtttgagaccaacctgggcaacat

SEQ ID NO: 517528 - DNA, 1300 bp, Homo sapiens
tggggctagaggttggggcttaattggcagcgggggttaaaaggaaacaaaacacagtaattctgaagaagccacagggcaccaggcagccgaggcaccagccgtggcccatctccaggccagcagtgcacctgaacatgctgattctgtccaagggaggcgtgcgtgctagtggtgctacacacggggaggcaagctcttggggcgcacgtggaggccctcttggcgacacaacagagggcaaacacgtgctcaggcctcagaaagctccaagggaaccgtggtggggccaaggttagatccctgtgcagaaccccgcaagtgtgaaaggcgagaaacacgtggacatagcgacacgggccctttcagaccgtccgaagaaattgggggtgcacagatcaaaggtgaacatccagaagtgaaaccacgaggaaccccgcgacgaacaagggacaacaagacacgcagacacacgtcacatcacacatgtggcgccccacgaccaggtggagacacctcaaatcacccgcagaaaaccgagacgaagaacacaccgttggaaaaacacgcgggcgaccggagaaaccccatatacgtggacatggtggcacataaacaaagaaccacaaacaaacgcgccaccacgaaagcagtacccaatcaaggcaagactgaacactccaattcaacacaacggccctatgaggcagagacacgcacagagcaacggtgacgaacgaaaacgccaccgagggagagctcaccccggaaagaacccacccacgagaagtcccggagcccaaaaaccccagagggagcatcaaccatagggatctccacaaacaaaacacccactcagtgagcaaactgctaccacaaacctgacgaagtagaacacccagaccggaaattggcacacgtggcacacgctccaacgagcacccatttggagaaaagcgcacaaaaaacacggtggcacaccaccccaggaaccaaacccactgcatatgccccacccccacagagaaaagtgcacccacaaaacggagcaccaaacaggcccccgaccaccgacaacagtggccctaagtagcccccacagtgcgcaagtgaaacatagggcccacaaaacaccccccgatatgaaaccacgccacagacaacacgcgatggagacgtgcgaccaaccaaacagtatactacaaaccatatcactaagacaaaaaaaacatataaacaaccaagcaacggaaagagataacacaaacaaaacaagacaaactcaaaacaaacgatcacc

SEQ ID NO: 517529 - DNA, 180 bp, Homo sapiens
cgtggaaccatacagaagtaactttcgagctatacagaagtggtgactactgaagaaaatattcctgacgtggtcccgggctgtcatcttactccattagagagagagagttcttcacctattaagtagttaaccagctctgaacctggacagcatcgcttattcactcgttatcaactc

SEQ ID NO: 517530 - DNA, 1241 bp, Homo sapiens
agcgggcgcgcgccccgcgcctccagcccagcgctcggagccgctttcgctgccactgtctgctcccccgggccgcagcggcggactcctggactgacttgcgggcgcttcctccaatgctcttcccatggcacctgcggcgcgaggcgtcggtgagctaggcgagggactatcttgatccgcgatccggtaacagtttcgagcgcatacttacaaggctgctgctgactcctggtcacggctacaacaggatcatcactcacgaaggaattaccaagcgacgcagagaatacccggcgccacaacaccggccgcccagaccccacacaacaacgaacgagcgtaagagaccacagcggagcaccacgacctctgcgcaaccccacagtcatctccagccgggcgtacacactgacccataacaccgtagcgacgcagaacaaaacacggaccccaaaatcacccctctgcttttatgtacgcggttggaatgactaactccttggggcttctttctctggcacctactccaatcgctccctcgacatcgcacgactttctgccagcccacactcggtccccttcctcacggtaacacgatctacgatctggctaccacattcgttccagctctcatactctcgtaaacccctcttctaataactctcaagaacttttcgctgctaccacctctagcgtagcgacggactcacccgcattattttcctcgcttcattccctcctgtgacactatcttcgtcctcactctcctctgaatgcaccaacagcacaacatggcgcacttgttctcagaggctcttccgtatccttcgttactctagcgcactacaccccgattaattatcaccatctcccgatcaccgccagtgtttggctgtgtggtcccatgtggcagccagccctcttccttctcgctcggcatgctgaacgctaggcccttccgccgcgcacgtgcctgcgctggtgtcgcgcgagccatcagtccccaggccgcaccgccaccccgacgccatctggcgcgcgcgccagcgcggcagcagcccaaccagcgcaggccacagaagagcgaccgagcctagctgcgacgaagcgacggacagcgaaaccaacccgccacacgaggagcccaccaaagcgacagcacacagaagaagcgacgacacgacagcacgcaaacccagagagcgaccagaggaaaacacacagagcaaccagccgac

SEQ ID NO: 517531 - DNA, 453 bp, Homo sapiens
attcgcggccgcgtcgacttttttttgagatggagtctccctctgtcacccaggctggagtgcagtggcacgatataggctcactgcaagctccgcctcccggattcctgccattcccctgcctcagcctcccgagtagctgggactacaggcgcccgccaccacacctggctaagttttttttttttttttttttttgaatttttagcagagacggggtttcactgtgtgttagccaggatggtctcgatctcctgacctcgtgatcaacccgcctcagcctcccaaagtgctgggattacaggcgtgagctaccgcgcccggcctttcttttttttgaaaagactattcttttcccattgaattaccttggcacctttgttgaaaatcagttaccacataaataatacctaaccaagtttatttgtcgacgcggccgtgaatttagtagta

SEQ ID NO: 517532 - DNA, 703 bp, Homo sapiens
agcgggcgcgcgccccgcgcctccagcccagcgctcggagccgctttcgctgccactgtctgctcccccgggccgtccgccgcctccccccgcaggcccggggctctgtccgtctgggcccgttgctgctcgccccgggccaggagaacgagctcgaggaggatgcctgggacccggtgcaaggttccccctctctcccgcagctgtggagaggacggaagcggaactagagatgcccatctggagtgagtgcaggaccaggtcccgcgcggacccgggtgaggcacgacccgcgcgcccgaccggcgccatgggaaggagcgggcgccgttgcttgaccccggcggtgcgcgcacgacttgagacctgccacgggcagtgcccgtgccgcgggtcccgagtgacgctggtggcacctgaggagatgtggcgcgggtcctcggggaccacgctgccggagcccagtgtccagtgcaagcgtcttgagtgaccctgacgcccgtgccgtcgccatggtgatgtcccagggcaccttacacgtttcctcacgtgctacgccggctgctggctcatctggggtctcatcgtcctgctctgctgccttctgcagacttcctgagccgaccgcactcaaacgcgccaggaggagcgacttgcgcgagcaggaacctgagcgccctagagctggagccctcggaactcg

SEQ ID NO: 517533 - DNA, 276 bp, Homo sapiens
gcagtaccgcacttaggtgcttctacgctcttcctgctggaggaggcggtggtggtgtacttagatgtgtggaactgccgactccaacagagctagaggccaaccccaatggctctgccaatgatggaactgaagccaactccaacgccaagaacactgccataggagtagctgcttcctccacccaggcctaagccacagacgacaccactggaaccgccatagccactggagacggaggactgaaccaaagagatgtagcctttcggagaagat

SEQ ID NO: 517534 - DNA, 329 bp, Homo sapiens
gatagaatcacatggagcacagtggtactaacacaaggctaactgtctacatctgtcacatactgcaagggtctacaatataagctaacctcaacagtacagtggactcacagactatgcaagttaccggctaatgcgcaaattcgacagcaaaataaagttaagtaacgtactacaaacatatacccacgagatattcttggggggaacaaagcaaacaaacaaagtcgtgcagaagtcacagctatgcatgcatatgtgtagtcagataacattcacacacagccaatcctgcaacagggaggtccatatatatcgtcacataaaca

SEQ ID NO: 517535 - DNA, 304 bp, Homo sapiens
gattttttgaaaaataacttttttttaaccgcaaaaatgggttttcccttcatttttcagtaaaaacaacttatttggaaatcagggtttcatcccttgataaaaccagtggaggatttggatagtaaccaactggttttgaattgcttgaaaagaatcttgtaaatttgtagtccaaagggaattttgcgattgcttcaaaacttggaattgcaaaagtgctgtaaggactgattttcttacaagaccatggataaaccaaggagttttttggattttccagtccccaaactggatccatgga

SEQ ID NO: 517536 - DNA, 139 bp, Homo sapiens
gagtgagaccctgttcccccccctctctcccccaaaaaaaagataaagaaaaaagaaggaagaggaaaggatgaaggtgaaccggaggaaaaggaagggtttaaagccaaagatgatggccatgacaggggagttgggt

SEQ ID NO: 517537 - DNA, 183 bp, Homo sapiens
ttgctgcagtttgaacgtgggaccctcagttcccagaccacggattgcacctcggctgcagatggtgagggtgccgagccctaaccactagaccaccaaggaactccctctgaatgtccttttgacttttggttttcccatatgaacaaaggaagggtgcttagagactaatactcttgcatc

SEQ ID NO: 517538 - DNA, 851 bp, Homo sapiens
  misc_feature (204)..(204): n is a, c, g, or t
  misc_feature (210)..(210): n is a, c, g, or t
  misc_feature (229)..(229): n is a, c, g, or t
  misc_feature (240)..(245): n is a, c, g, or t
  misc_feature (247)..(247): n is a, c, g, or t
  misc_feature (250)..(251): n is a, c, g, or t
gtccatatgtgactagacgaaaacagcttgaagaccgaatcgcctccagaggattatagactatcttatttctgtgttgggggaggcatgtccagtgcggatgggggtgactgaatcagttgaatgacttatggaacacagatctggcaggctcacttggagtgacgcacttttgaagaactcaagaaacatgaagattctgcnattccncggaggctagagtgtctanaagaagacttnnnnnncnacnngaaagagaaaaggaacttcaacatagatatgctgatttgctgctggagaaagagactttaaagtcaaaattctgaagtacagtttatattctgtcacaggattaattaattgccggttttcatactctagaaggctgaaactgatgttatcttcattgacaaatttacccaccatctgtggtttttcagttgtttattttaaatgatatcgatcttacacattctgagtataaagaccttaactccaccaggacggacattttagagggtaaattctcaaggctatcattcttttagaaatgtcatatttgcaaacttttctacctttggcctttcaatcaaaatgcctaaattcaaagtgccgcctgtgagtaaccttctgactcaatcaaatttacaaaaaaaaaaaatatggcctggttgatctcattggggggagcttatgcggccctttacttttaccaggggataacacatgatcctggattaatcgcctcgatgcgctctgagattccgtatgctgataacggtataatcatactctcaggcggatatcccgttctccccagaatcaggagaacacagggaacgacctctgaa

SEQ ID NO: 517539 - DNA, 1566 bp, Homo sapiens
tccaaatggagtctcactctgtcatactcagggctgggatgtggcaggggcgtgtggatttgggtgtttattggcgaacctctggtcttcctgggtgttcaaggcgagattcctcctggcctcaagcctcccagatgtacgccggggtattacagggctctgtggccaccaaggcccaggctaatttttgtgtattttttaaggataagaagacgggggttttcaccatatattgggccagggcttgggctcttcaaactctcctgtgacctgtgtggttgactcacacccacctctcagcactgtggagagggccagagggccgggcaagatcactctgagagggtacagagatattccgggagaaccacatctctgtggcccaacctattgtgtgtgagaaatctcccatctcttctaatcttaaaatataaccaaaatatgtggcggccggggctatgagatggcgcaggtggcgcctgtgtaatatcccccaaaaaaaaaaacacaacaacacaaaacactctccgagaggggggtatctctctatgtggcgcgggggggcgcggagagacaacagagcaggtgtatatggagacaaagtgggggcccatatgtggggcacacaaaaccgcgtggtgtccctcgtgagagcccacaggttttttctcctgtgcgtccaccccaaccggggggcgcagagaaacctctcgcgcgcgagaggctacctccccccaaataatataagagaggggaggcgcgcgaggaaaataataaaatctcttcgcgagaaaataaaccgcccgaggcgtgtttaaccgcaccgggcgcactttaatgactgccgcttggtgtccgtacgcgacgaagacaacacgacgccaactaacgagcacgaataacagcacaaaagcagccacaggctacaacaagcaacgaccacaacgacacaacacacaacacgaacaaaacgaacaggagggacacaacaaacacaaacacacacaaccgtagactcacaccaaaaccaaacaacaaacgaagcatagacaaacaacgacagaaaaagacaaacgacaacagcacaacacacgctacagaaacctgaatataactactcacacacaacacacaccaccacaacacaccagaagcaacacaacaaccacgaatacagcaaccagacatacaacagcccaatctaaacaaccaagaagcaaaagcagaaaaagaggagaacgagcgaggcagatgcataccagaggcagagagtaacaataaaggacgcgctagacaacgaagaacaacgatcgtgaggcagcggcgggagcgagcggaaccgtgtccaggcaagataccagtacacgtggaagtagcgacgcgagcagcagagcggagaggagaggagagacaaagcggagaaaccggagctagaagacgcaggaggaggtagatgaagacggagcgggcggcgagagcgacaggaagcagcacgacggcagtatatggatgagaagagaacacacagataaggacggaagagagcagggcgtgaagaagggatca

SEQ ID NO: 517540 - DNA, 357 bp, Homo sapiens
gacaaaagatacatatacgaatcgagtctcggtacctggttacgggagtggcgggatctcggctccactgcaacctccgtcacctggtctcacgtgattctcctgccttagcctcccaagtagctgggactacaggcatgtgccactacgtgtggctattttttttttttttttttttttttgggatttttattaaaaatgggtgtccaccattgttgggccaggtttgtctcaaactcttgacctcggtgtctctgtccacctctgcctcccaaatgtgtggggataacagggctgtgacccaccgtgcctgggcccatttcttttttttccttttctttctcttctcctcttttt

SEQ ID NO: 517541 - DNA, 259 bp, Homo sapiens
cgaatcatggtggctagcatcaaactactatctaatcatttactgtcattaccagtatgcactcacaggagaaaacgccatcattatcactatactgaatgtcctcgttgaagcagatagaactattaactgtattagatcttgattgtgaagtacacatctttgtagtactctataggatgaaatggaaagtgcataaaaagcactcatactgcataccaaagtacaatggttgttttgaggggaaaagaccctgtgt

SEQ ID NO: 517542 - DNA, 1174 bp, Homo sapiens
ggggaggcccgggtgtcccggtgcgaacagaggctgcgggtgggagccttcgcgggcgctgcagagcgggcctggtggtgagtgccgggatggagcccctgcggagtggacttgacgcctgcagggtgctgagctagaccggctcctgcagccatctccagcgggatccatgacgacctcctggtggactgctgtgcggacgggtcttgtatgtgctggctgctggcacatggcatcaccatcctggggatttgcgcacaccacgcacatctacgacgtggaccccatgacggacgctcttacaaccaacgacgtcgaacctgcgatatgtgccaatggtgctacgattttggcgagagtgtactaccaacggtgcattcgagtagaccacgacaacagtgacggctggtggccagtcaacgactcagtcgaccctgcgcggactgtgccgaaggactgacgatcgagtgaccatacacagacatgtgcgcatcacctggtccttcagttcacgtgccgacccagccccctagcatacacgcacgactacatttggcactcactaccgtaacagatgcaccaacgctcatggactcgatccatggcagtacgctggcgcggcgcgctcacgcacgtggaccttcgcttaacatcaggatcccttggcagcgagaccatactatgccacggatcctgcagaggaccattctgcacgggcctaggattatactgactccgaaacgcccgatccaccgagacatcgacgctgccaacgtggctcactcctcgggacccagggcgacgatgacgcttcggggcacatacgggcgacaccacggcacggtcacacacacgcagaatacccaggaaaccatacgagggcacccgcatccgggcatagcccctgaggacaccaacgcactcggcccacgcactcacggcgctaccctcgagaccctgcgggcacccaggggcacagacgtgtgcacagggggacgccgcccgagccctgacgcgcaccacaaggagggtacgggacgcggagtcgcaggagcagcccgcaacaagtgggacaggcaagaaggcgatacagagaccaggagaccgcgacaaaacccgccacggccgagcaaagcagcataagacgacacagcggggacaaccacccacgaag

SEQ ID NO: 517543 - DNA, 636 bp, Homo sapiens
agcggattggcggcgagacctccgagtcgtccgtgcggcttgctgtcgcccgttgctagacagccggggccttcgtgagaccggtgcaggccatggggtagtctcctgtctggacagagaagagatcaatgccggacactggctcagtagatgcctttgcaatgagtacaggctttaggcatacgcagtcactggttgcttctggtgggatctttggctatgtgaaacgccggcagtgttgccgtccctgggctgcagggctgctcttgtggacagtctagccggcctgggtgcttaccatgcgtgtctcatggatccaaggaacgttcgggttttcctaggctacatctggtaccttggctggccttctgggaatgaggttctaccactctggacagttcatgcctgcaggtttacttgcagggtgccatgctactgctcgatggtctgccaaagtccggagctaagtatgttcaacagaacccgatcaggagaagtcacggttccagcttagactgatgacacgacatttggatatctgccatctgccagcttattttcaatagtattcagagagactacagtgcagcagttttggcagtctgagcattttacctaataaacatgatgacacga

SEQ ID NO: 517544 - DNA, 234 bp, Homo sapiens
gacgtgtaacccactacacccagctgcttttttattttttaagaggtggtggtcctgggagtcttgccatgttgtccaggctggtctcaaactcttgtcctcctgtctcagcctcccaaagtgctgggtttaacaggtgtgagccactgcgccctgcctgggttcatattttttaagcaacagtcatgaatgttaagtctcctggcctacttgagttacatatgaagctattga

SEQ ID NO: 517545 - DNA, 407 bp, Homo sapiens
  misc_feature (130)..(130): n is a, c, g, or t
atctcgccgacgacgaaccctgccaccagaaccggctcgtcgcatggggctgtgcgatgctcggcgcgcagttgccgccgttgcaaacgttggacgaggccgggctgtccccggctgcacgcgcattatngcgccgaaaaccgccgcgtcgcgaacggccgggcgaaacgattactggactggacgccgcgctatccgagttttcgcgagggtctggccgcctgccgttagagcagcacgtcgaccgtgtagatcagcacgccaaccagcccgccaaccaacgttccgttgatgcggatatattgcaggtcgtcgccgaccgcattttccagccggtcggtgatcgtcttggcatcccagctgcggatcgtgtccgacaccagtttgagtgcagtctcgccatggct

SEQ ID NO: 517546 - DNA, 417 bp, Homo sapiens
ttctttttttttgagacggagtcttgctctgtcccccaggctggagtgcagtggcgcagtttccgctcactgcaagctccgcctcctgggttcactccattctcctgcttcggcctcccaagtggctgggactacaggcgcccaccaccacgcccggctaattttctgtattttttagtagagatggggtttcaccatgttacccaggatggtcttgatcttctgaccttgtgatccgcccgcctcggcctcccaaagtgctgggattacaggcttgagccaccacgcctggcccattacccattacttgtttcttaatgttacattctctttccctctttttttttttgttttttgagatggagtttcgctcttgttgcccaggctggagtgcaacggtgccattttggcccactg

SEQ ID NO: 517547 - DNA, 879 bp, Homo sapiens
  misc_feature (305)..(305): n is a, c, g, or t
tgggctctaaagggggtaaagggggtgctatagggtaaataggggccctatttcaaaaattttaagggaaattaattctaggacgatgggcttgaaactgtggttggcccccacagatttcagaagcattgcaccgtagttatcacccccggttcgtgtagcggttgaaaggtggtttgggttatagacgtctccgggaaattgtgctatctgtttttataacccctaagtgtggggcacagcctcagtgagtgcaagaacgttctgggtgatgtatttattatacaaagtggggggctttcaangctcgggggagtatacataacctcgaatgtgtggtcaacgcgtctcaagggagtctcgcaggtctcgcccgtggatctcatagggaacatataatggtggggggcaagtatattgttagtgagtttgacaaattatagtctccgccgcgatagactcgggtgtatacctcgatagggtttccaagatcaccatgtgtggggtggcccaattgtgattggagtggttaaggggagggactcggtgtgaccctcgttcgtggttattgttaaaggattgcgttagggatatggggagggcaaatgaagacacataggagtgaatgtgggggggacaggtatagttcacaagaaagggggttcataaatatcccctgaagacgtttttaaaaatttgttaggaatattagataaacaattagggtggagaaagttgttttgggaaaacagggccacccacggggacattaggaaagcccgatttatggggaaaagactattaaggaggggggatcacaatgaaaggggtgtaaacccttttataaagagaggagaaaactgtgtgttacaccctgag

SEQ ID NO: 517548 - DNA, 410 bp, Homo sapiens
  misc_feature (59)..(59): n is a, c, g, or t
gaggcggagtattgctctgtcgcccagactggagtgcagtggcacgattcttggctgantgcaacctccacctcctgggttcatacaacttcttattttaaacgcaaaaaaacaaaaataataatactgatataattatcagatgccaaagtgatctatcatatacttgttagtatcttcaagaaagccgaattacaaagaataaaaccatagttcgtgtatatttctactggaaacgaagatagtgaaactttatttgctttttaaaaaattcctctgtgtataaaacagcaggtggtgatatttttcaggatggccaccagactggcaagacagaggaaaatgtaagtaaaccgtaagaatcagattatcaaaaaagtctggcaaaacaaaaaaaaagttggcggccg

SEQ ID NO: 517549 - DNA, 415 bp, Homo sapiens
ccggatatgggctgtgctcccattctggtattctcgggctgcggagatttgaattctccctgagatggagtgccccgggggaggggtgggctgccatatttgatgttttggcgacttagccattcgaacctttgggctttgaggagtcccagctgacttagggtggatatagcccaccagcacagcacggctgctgtacaaaagcatagccagactgcttctttgggcaggtcccggattcatgcctcctcactgtttgggacttcccaactggggcctccagccacccccactggtgttctcctgctgacagtgatttcagttttttcttgactggagctccctgatggaggggcaggccatcctgtttgctgtttttgcaacttaaccacttcagccttcagtctttggagtg

SEQ ID NO: 517550 - DNA, 1230 bp, Homo sapiens
  misc_feature (918)..(918): n is a, c, g, or t
tctcttgaccaaaaaaagattggttatacctaccatttcatgggtagtttggcccagggtgaccattttttgtggtgtgtgtgtacaggcggtcttatagggctttggcctttaaaggatctctatacgggtaaagaaaacacaattaaaaacaaactggtccgggctacgggacatgtgtggtacttttaccaagatcatcactagccagaagtgttcagttgtgccacattggagttcctttagtgaaatctcataaataagagaaatgtgtccttcctttgggggatttatacactaagagtttcaagaaatgtgtccaaagttcctgtgtaaagtgtttcatcttaaatatcaagccccctttataaaattcttaaatcgtgttgggcgtgataacaccctctttggacaatctagtgaatttaatttttaaacagtgggcgataaactccccgaacttcaatttccaggggaaaaagtggccaaagaaagggttatttctccctttgtgaggcgaggaaaaactgtgggggtggcccttctatataacgagggtggataaaaatttatttgactccacattccctattatatcacccttttgtggcataaaataactcatagtggggaccagaaaaactttgatcacacaatttaattcccccttgtggtgacagaagcggcacaatatttgttagagacaaagagggaagatattgaacacaactcccgatataaacagaacagccagggggtcccccccaggaggggatacatctcaagaacaacataaaaacaacacaagacaactcagaacaacagacggcgggtgacacacaccagagaaactagcccgagtgaggcacccgcggaaagtaaaacagaacaagaagacgaagaagaactacaaacaanagagggggcgggcggacgcaccgcggcactaccaaaagatagaagaaagataccatcccgccaccgatagcaggaggtggggcggcccacccacagagcgctatgaagaagcgagggatatccacaccagaaggaatttatcactgatggacataacaacaataggggggtgggccccaccgaaaaaagaaaggataacgaccgcaggagtaaaaacaaagaaaaacacatacacaggacataccgtgtggcccgcagcaagggagataaaaacacaaaaggaggtgcagacgcaaacggggagaacaataa

SEQ ID NO: 517551 - DNA, 381 bp, Homo sapiens
caggaaagagatgtcactatgatgtctacttcactcgggagacataagatataatcaggacacgttattcacgtccgcttcattcttattgagaagatacgtggttcacaaggtcaacataaggctcacagcgagtacatgctgtcactgctccaatgattttttgggttatcaaaagcctatgctctagcatatcactcaggaaggactcacaggaataggatttcatatggttatcatagtgtatatcatgtcagttaggctcactgcactgcattgtctgctggtgtatataattgctatcaaaaagaatgactccattctgatatggtttcacagcttggatttattcatttgaaagtggggactaaataccctggg

SEQ ID NO: 517552 - DNA, 1394 bp, Homo sapiens
  misc_feature (155)..(155): n is a, c, g, or t
  misc_feature (279)..(279): n is a, c, g, or t
cttcttccccgttctgttggcacccctggtatcggctcttttcgcctgttggtcgccctcttttggcgggagggaacatcctttcttctgtctgtattttgtctcctcgcatcagcgatggagttggtttttgccgcccaccccacgtcttggtnggggtgtgggctcgtctcttccggtcagacaacacagtgtctctccgctagtaagctcggcttgcgtcgcttcaagcatgctcatcttgttggtgtgttgctacatacccccctcttcggtcgngggggcggcctctgtgtttgctgacgaaacgacgacccctccctctcgggttgatgagacctctccttgttgtttctgcttgctcgtcgacaatatgtttttcgtgtgctcctctccgtggtccgtttttttgtgctacgaggaaacgcatcgtcgttggttcgcaactcttatggccctctcgttcttgttgcaagagctcgtctcttcgtcctccgcttggtacatctgttgcgggcgcgcatctttttttgccgtctcccgcgcccggcggtgtgtgcgtgaggttggtctttttgggttggttgttttccacacgcgtcctccgtcgttgttgttgcgtgaacacccctcctgttgtgttgcagcaccctcttcgcgcgtggtgatatcttctccaacgcaggcctcttttgttgtggcatccgagtggcgcctcgtatcgttgttggtctctatactttgtggagacccacgctctcttctctccgcgccgcgttgttgtgtgagttcgggaggacatctgcgtgggttcccgcaccttctgttttgtgtcggttattctctcttctttctctctgtgattgccctcgctggagggggggtaccccacccctcctttttatactccccgacgcgctgtcgctctgtgggggtctttggcaccagccatagacacactctgttttgtggcgccctatggtgcacacacccgctgtctcgccgagtggccctcgctccctccctccctgtgattttttgtgcgccgcccgtgtgggtccaccacaatttgtgtgttctcttggcgcttcgtggggtgtatactgctgagggcgccactattatagggtgattagggacttgtcacgggtaggggggccaaacacaactcttctccttgtgccgccctttattccctggtgtgtccggttcccactcctctgggagcgggacttcacattgtgcgggtgggggcacactagtgtgcccccctggggcccccccacataccccgggggtttcgccccccgtgttttcaattttggggcctaaaattgtggtgaaaagggtggtatgttattaaaaaataaagggaaaatttttttcaacccaca

SEQ ID NO: 517553 - DNA, 1493 bp, Homo sapiens
ttttaatttattatttttatttttgggttgagcacagggtacttatattggatggaacatgacaaggtgcggttccctaggcccctaccctctcttcaagggtgtactacataggcaatctgtgtagagtgacggggaaatatcagtggtagcgggggagaactagagtagtaggacaggaatctaccccagcaagtagaggtgtctactctactatcctactatgtgcttcttagcgggggcatgggtggcgtccaagagggctcttatacctcctttgagaaggccaatgtggggccacttgaaggtccacacacccttgattacgcttgtaagcacaaattctctgttggtctataccagggaaatgtgacgcttggacacaaggtggggcacagtatggacgcgcgcaaatcgcccagcccaccaaggggtcaccacagggttgcgacggatgttgggcggagtaccgctggtgaagacagctcaagaagcaaccaccacacccttggagggccaaccaagaggtcaaggcccccacgggaatgccccttatggagaggggggcccccccagcaggacaggcccgtgacttgtgacctacacacatttacatgagaaagtgcttcactcaaatattttttgagccacagggatatattcctatacaaacacgtgaccatgggacacaagggttccccactcaagagggacaccaaggagtatgcagcaagtttgggagagaacacaagcgagaaaagggcaacaatgcccaagatggaccgctatctcccccggtagacaaaacctcgacggggtgatgtgaaccctctgtgccccaagcatggctccatgggtggcaagcgcccacgagatagcaaaaaggcagcaggtgccatatgactagcgaacctggcacaagaaaccccccgtgcggggtccactcatgcccgcagaaggatatcccacggaaaaagggcaacaatacacaacaagacccctacaaggagtagagagactaagcatcggcatacggcactcggagtgtcaactaagaaatacccatattcacgaagaaatacgccaaacaaatgagaaacgtaggcaactagacacctagcgactaacacaggagaagtggcaaaataaaagtaaggcgatacataccaaaaaagtgacaatgtccataatcaacaaacttagcaaggggtgctagaagaacacataaagaagggaccaacaaccaccatgtacataaccagtggtgtgcaaacaaacacagcgaggtgagacaatagcagagaaccacccttatagatgcccccggacagaagagatcgcacgacaccatcaaagaagagataagcaaactaggacggcaccctgacaatatcagtgacagatcagcacccgcaccagaatcagatgtggacgcagacgatacagcaaaatatctgaaaaataacttcataatacctgacactgaactacac

SEQ ID NO: 517554 - DNA, 104 bp, Homo sapiens
taggtggtccaactttgtgaacgtcctaaaaaccctgggaccagtgtcccctttgggtgaattatatggtctgtgaatatcccaataaaactgtttaaaaagta

SEQ ID NO: 517555 - DNA, 487 bp, Homo sapiens
atcactgtagctcagtgaggcaggtgcctcttctaccacgagtcccaggtaccctctgcccgagctgtgacagctcacttgggcctggacatccatcctgctgtagcatcctggtcatcttgtagctcctcctcctcgggtgaacctgggaccagcagggtgctccaagctgtccatgtactgtgcagtatggggactacccagtgtgctatggacaggctatggtccttgcttgtcgcatgaggcttgctccacgtccacgcaggtccatggttgctgaagggacggcaggcgcatacatgaagaaggggtgcaccccccaacctgtggggtgctaagggtcgcggtgcgggggatccgaggccccaaagcttgtcctgttcaccaacccgaccacgaaaagcccacctcgtggggccgagtcctgcttgcctatacatagcgagcgggcatcgggagataaaccccctggtggcagaaactccca

SEQ ID NO: 517556 - DNA, 919 bp, Homo sapiens
  misc_feature (772)..(772): n is a, c, g, or t
gttgagaccaatgtttcctccccccggtaatatatgttttagtgcatttttcaccaggcagaatcttgagaaactttaaaggtggggaccacctctacccccggtctgagagcccaagccgggtccccgagaacacccaccgtggcgcccgagggcaatgtccctttgacccgcgtgcccacattttattatgaaccttctttccagtgaggttatcttaaacccttgccaacagcaccgcgactttgcggcaactttgacccagcgttccacaaggagggtccggacccgcacgcccaacgaccctcttggggcaccccaaacggcggtggaccccccccccccactcttttaacaaaaacaagccctttttattaccgtccccatagaacagggctgagaacccttctaatacatggctcccaggcgtgacttcccttaattatgcccgacacaaagcgagctaaccaaggtcacttccttaaatggcgccccccctccctttcctagtctttgagaacaagttccccatctttctttacgattaaccatagcttcttccctatgttaggaccaattaatataagaccggcccgccccccccttcccaacgctgttatattccacctgcgcgtctgtcgacaacgtttcttaaacaagactctcctaatataaaagccaccacttctttcgacgcccccttttggtgacacactcacagacagcatttcttcccccctagtatccttgtcccaagtaagcaaccaccagngggtcctcatctcaaaaaacactgtgaaccaaacactctcacttcttctccagactccgcatccaatagacgtcacacaatacaccccccgggtagaactaaagaatctcctgtgcaatccctgtaaaaacgtcccttgcagctaca

SEQ ID NO: 517557 - DNA, 1498 bp, Homo sapiens
atggtttgcatgcctgtgatgcctgcccatgcatcacctgagatgcctagttcctgtgccatgtggtctgcccctgtgcaaaccactgatgcccatgccaactcatgctgcccctgtgaccttgcaccatgatgccactgtgctctgtgccagaacgatgcacattgatctgtacttgtgctcaccctcactgatgatgtgactgatccatatcaaaactaacttgccactgcaactggacgtgccttgcattgcatgccgtgctgcttcttttgcaacacgcacactcgacacctgggacttgtggagactgtgttgtgcttgtgatgctctgtgactctcctaattgccccatgacacctttccaaattcaccaaattcactttatcccatgaaacactcacacaattcagccatggtggctacacacctctgacatggtgaccccattgcctgaaaccctttatcaatgctaagtcccttgacccctgaggttctttggtatctttggtgctttacctcaatacttgaaatgttcccacttcattggaactgtcctcaatgaactaactcatggttggtgcactttggaactcgacacataacgaacatcgcctatgagcacacagcgcccctgcgccaaaggaaccccctttttggtttggtaacttcattctcgccaaatagcatatcacccgcacacctttggcacagcattgggggtatcacttgtggagatagtacaccgcattgggcccccaatttctccctcggacaacatgtagtggctattggagatatttgtgaatagcctggactcggttgggtcacaaataactcgtggcctgcaccagatctttggcgctataaccacacactctaatccatgccgtttgccacaaccttggataattgtcgaacccacaaatggagtgtagcacccggttatccctggggaaacgctaacccgacactggtgccagagttagccatatgcaccccaaactacgaacccgacccttgcagctgggcgcacacagtgagagctatccgcgattgaggttgccgtacattccgattggcacaacgctggtcagccttcaccaagcgcgggtggggaacccacttgacatagatttggatcacacttccaccattagggaccaaaagttctcacggaatcgtttgcgcactcttcttttggcacttctaaccctggttgagcggacttcatcccacatcggttcttacgaaggaaaagcccgtccagtatcttgggatcacctaaactaagcgccacgtcttgtggcgaacacagccgtctccatgctaagagaaccggcgcccggtaactctccagaactttacctttggcaaatgagcagcttggagataagcaaaatcctgcagcccgctcggacctaacaaccaaatcgagcaggcagcacttagatcatctccccgccgcgcacatcactattagctcaccaatagcgag

SEQ ID NO: 517558 - DNA, 1284 bp, Homo sapiens
ctgtcgcttacagcttaggagattctcaacttagacttgagcgctctgagctaaatctagccccaaacccacgtccaccgttactaccagacgaaccattagcgcaatagccgattgtacccaaagtaagagtataggcgatagaacattggaaagctggtcgcaatagatatagtaccgcaagtggctaggatgtaaaaagttcatagcctaagcgataatatagcaaggcactaactcgccatatacctttctgcataatgaattaactagaaataactttgcaatggagagccgaagagcttaggacccctcgaaaccgagtacgtaagcatacgctaagaagcagtctcaaatagcagctagcagacctgtctcactgtagcgagacatagtgcggaagatcgataggtcgaaggcgacaaatctaccgagcctggtgatacgctggtcgtccagagagtagaatcttcagtgcagatctttagagatttgcccagcagaaccctctgaaatccccttgtaaaatgtgaactgtatagtgccaaagaggagacaggtcttgggagcacttaggaaataagcctaggtagcagacgagtagcaacatttaacaccggatagttaaggcctttaaaagcaggcacgcagtatcagaaacgcgtgcaagctcaatgagccacatactctaatcaagatcccgagagatttaattgaacttcctcagacccaacttgggaagcaactctaattcaaccttagtagaaagaaactaaatgtccagcattaggttaccattgcagagcatttgtccctctgcataaagcctggggtcgaattaaaacacattgatcctgcatgtaaaagacccatatattttccagcgaaccacacaggtcataatagccctcacggtgatcccaacgaagagggaggccacatagggcacagggatactgacagtaacacgacaccggggcacccttactccccggctgttgtaccaagaaggcaacacctctgccatcacccgattaaaggaccgacgcccatggacaaggtttaggcgcggccccctccggcgagcggcaaaacagtgtgctataaggcacgtatatgcacgcggcagagcaattataaacacgctgcaaggcaacaatagcaacacctatttatcagaccccgaacatacttgtgcagcacaaacatactacacttcagttgtccctacgagcttctacccagcgctaaacgacagagcgccggcacggagacacgcataca

SEQ ID NO: 517559 - DNA, 343 bp, Homo sapiens
cgaatctagaggatacccgtatactaggctcccatttgaaaccacttttccccagccgtgtgctctgcagctgttctattactcagatctttagtgcctctagaggatgtcttgcctatcttacttgagggggcccctaggggtccccaaatcagttgaccgtgtgctccctggccgctgggcctgcaacactctgcccagctcctcttgctcgctgtagttcttctcagacctcctcgtgcaggtggacaaagctccttctaccatgcatgtaaacagcactcactgcgacaatgaggcaactttgctgactccttgcttgacgcattccttggaaggtcac

SEQ ID NO: 517560 - DNA, 266 bp, Homo sapiens
ccgatctgatgtgcctggacctgttctgtcaggacaaggacacactcagcatacactagctcatgctgcccgtgttcgagaaagaatcgattgacaagaaaacagagagtgcagctatctcagatacagtctgtgatcgaacttggaagagtgatcagagaccgaaaaactattcccagcaagtatcctttgaaagaaattgtggtcatccatcaagatccataagctcttaaagatatcaagtactttgcgaggaagtatagtca

SEQ ID NO: 517561 - DNA, 331 bp, Homo sapiens
  misc_feature (159)..(159): n is a, c, g, or t
ccatctagcgtgatcccacatccaaccccgatctccatcttcgtccctactcctggaaacctggcccactgaatgaccctcggtgtgctgccaccatgctctcaggggcccagttgacagtgtccaattctcagccgggcgcagtggcacacgcctgtnatcccaacactttggcaggtcgagacgggtggatcacaaggccaagagatcgagaccatcctggccaacatggtgaaacccgcgtcttcactaaaaatacaaaaattagctgggcgtgaagatgggcacctgtagtcccagctactagggaagctgaggcaggagaatcgct

SEQ ID NO: 517562 - DNA, 237 bp, Homo sapiens
gtacggcactagtgcccgctcattgatgacactagccttcaccctgctcatcgagagacactggctccatactctgctctttgacagacactggcccccaccctgctcattgacagaacctggtccctgctcccctcactgacagacactggccccgcctctgttcattgacacagtcccagacatctgaacgtagacagacacataaaccctgcctctgcacattgacagacactg

SEQ ID NO: 517563 - DNA, 214 bp, Homo sapiens
  misc_feature (72)..(72): n is a, c, g, or t
tttgacatgagtgagcagttgaacagttagcattgatctaaagcaccatgaagaatttcctggctgaatagntatggaaaatgatggaaccaggagtcaaaaatgagccgaggttgcaggtttgaagactgaggaagggcacaaaggagaaagccctctccacctctagctcctcatttataatgcgagaggccgggcatggtgtctcatgtca

SEQ ID NO: 517564 - DNA, 392 bp, Homo sapiens
tggggcagtaggggaaattccccccaattttgttatgagcctaaaccctctttaaaaacggtcagttaactaaaaaataaaaatcagtttttagggagagtagaacccccctttacctaaaaagcagggacatttgaaagagacgtattaagttaacatttttaaaaatccaaatgaaagtaaatggaataaatgtatcaggtaaaggacgagttgtaagcttggatttttaggtctagcaaaaccctgtttacaagagcatcccctaaaatgtgccaaaagatgttgaaaggatgaaaaaaaggtatagtagcacatcccctacccaaaaatgtagctctttgaatctcagaaaaaagtagattttaataaagtgtgaaagttgtccatca

SEQ ID NO: 517565 - DNA, 157 bp, Homo sapiens
gcttcaggtaggcatggacaaggtcgagacattcctgcgcatggtgcagagccgctctgtggagggcagcatgtggcttcataagtgcccgagtagcatcctgtgacccctccccagatgcctctccatggaccctgaacggtgccacatccagatg

SEQ ID NO: 517566 - DNA, 390 bp, Homo sapiens
gttatgatcatgggccctaaagtcagagcgcctgggattaagttgtcacaggcactatggcccctgcgaggtgctttttcaaacttccttcagtttccccatctgtcagttaaggcgggattacctgcttcataggggtatgggaagaattaaacaatatgtgtaaagcccttactagccccctgcctaacccaataagttagaaatataatttgtgtagaactctggccacatacatttaaacagatgttagtaattttgggataaggtttgtcataacccaatggaaaagtaggaaacatttataacgtttttaaaaaatagaaaattccccccccttttttttggacttgaagatggcccccctggaataaaaacttaagaccctga

SEQ ID NO: 517567 - DNA, 529 bp, Homo sapiens
ttattagaaaaaaataagcaacaaaaaaaaaaaaaaaaagagccaagcctacttttggcccagttaagaattaagggagtgtgtcccagaatttggcataacagccactgtggttttatttttggaaacagaataaaagaatgaaagtattggaagaaaacagaaaaaaacactctccgaaatgcaagaaaaaattggtttaagtcttttttactccaaaaccggttcttctcttacctctccaccacatctcgggtgtgagcgctacacatctcactgtagtttagattataacattacgatgtgtaatttcgtgtcccctttctcctgtgtttcattcagcctcattattgggttctaatgtgaatgtgcgtgagatattcgtggactcaactttactatttatgcccccattcatacttttgggtggagatgcccagttgggtttttttaccagttaattagccatttaagattcacggttggctccatttcattttcaaagccgccccaactttttcccacccct

SEQ ID NO: 517568 - DNA, 664 bp, Homo sapiens
cgacagccagacggttttcttttgcgtcgccagccgagccacatcagctcagacaccatggggaaggtgaaggtcggagtcaacgagatttggtcgtattagggcgcctggtcaccagggcatgcttttaacatctggtaaagtggatattgtatgccatcaatgaccccattcattgacctcaacatacatggattatacatgattccaatatgattccacaccatggacaaattcacatggcaccagtacaaggctgagaacgaggaagcttgatcatcaaatggaaatccacatcaccagtcatatccaggagcagagactcccatccaaaaatcaagatgggagcagaatgcatggacgactgacgatacgatcgatgagaagatccaacatggacgtcattcaacacaccaaatgagagaacggcatggagagacatcaatattgacacagaggagaggcagaccaaaaaaaagagcattcaaatcgaatcatacatgacacacaccatacaatgacatgaattgacccaccacaaatgaatatcagaaacaaatgagagataggtagaccaaccaagtgaaagcacagatactagcacaaaacaagacacatcacaaagacatccacatcacgaccaaaaagacaacattccaatgac

SEQ ID NO: 517569 - DNA, 751 bp, Homo sapiens
ccaaatatcgtgtgtgatgcaagggggccgaaaattggtctatactggtgaagagacccggtgagggaattcgggtgtttgacagacaagagggattgtaagagcaccagggatctctggattatattgggcctcctttgttagcgagacgaggcccctggctgtctttccgttgtcgctacgtggccgtgggaatgaggtgtttgctcctctgaggaatagtaatctcccgtctaaatccttactcttgggtggcttctgtggcgcgtgtctcccgagagtcgtctttggtcaatatgtctggaataatgagcgagaggttcaggaatgaacggtcagtcagatcaggcgacgcccatggcggcttgggttggagaaagggaaccctaccgtatttatgccccccggttctcgtgcacgacgccgtggagcatctaggccacacacatctgcgatctctgacacccccaccccctctttgtgtacagtcacgtcttggaatcttggcacatctaccctggtaggaaagcaccgcagcatgtggggagagcaaaacgtcctggaatgaagcatgtaactctatggggggaggggggagggcctgcctggaaaccatccatctgtggaaatgacaccggggaaggtttttatgtgcccttttgtttttgtaaaaaagggacacccggtaagactggaagaatacattttatattctggatttttaccaataaagatggctattattatggga

SEQ ID NO: 517570 - DNA, 269 bp, Homo sapiens
  misc_feature (6)..(6): n is a, c, g, or t
  misc_feature (37)..(37): n is a, c, g, or t
  misc_feature (46)..(46): n is a, c, g, or t
  misc_feature (63)..(63): n is a, c, g, or t
  misc_feature (68)..(68): n is a, c, g, or t
  misc_feature (92)..(92): n is a, c, g, or t
  misc_feature (99)..(99): n is a, c, g, or t
  misc_feature (104)..(104): n is a, c, g, or t
  misc_feature (111)..(111): n is a, c, g, or t
  misc_feature (122)..(122): n is a, c, g, or t
  misc_feature (127)..(127): n is a, c, g, or t
  misc_feature (136)..(136): n is a, c, g, or t
  misc_feature (141)..(141): n is a, c, g, or t
  misc_feature (157)..(157): n is a, c, g, or t
  misc_feature (165)..(165): n is a, c, g, or t
  misc_feature (178)..(179): n is a, c, g, or t
  misc_feature (203)..(203): n is a, c, g, or t
  misc_feature (206)..(206): n is a, c, g, or t
  misc_feature (214)..(216): n is a, c, g, or t
  misc_feature (251)..(251): n is a, c, g, or t
  misc_feature (262)..(262): n is a, c, g, or t
gtgggntgtgagtgtacaagcagtgtgtgtccagagngggtgtggnttcatgtccgaatggtntttcnatgtggaaattgataggccagtgnctctggnccccnaatcggngttgtgactangcatntagaaaagntaacntggcttctcatagtanctgagaanggaggtgtccccnncgtgggctcactaatggggctgtncanggtgggcnnnccccattgcttggtgccacttgcacccgacatgcntaaagaatacnagggggc

SEQ ID NO: 517571 - DNA, 219 bp, Homo sapiens
aggaggaggaggaggaggaagtcaaggaggggcagttgcaacccccggagtttcaagccacagaggccagactcgacccgcaggtctcagaactctgggggctctgactcagacaagatccttccagatcgccaaaggaccagaaatcaagtcagctcagctcagagccagagagatggaattttaaacttaataaagatcaggctcttaaaacctaaa

SEQ ID NO: 517572 - DNA, 407 bp, Homo sapiens
ccaccatactatagatcattcacaaaataagtttaccagtttcagaaccactttcttttaatacttaccaagataaaattatgggcattgttaaagtaatattacacaaatttatactatgcatccttactctaccaattagagctactgtgtcctctttgaagaatcagaaaccctaaaaaaacacacattatcatagcagaagataacattgtaacacagtccaaaacaagctgtgatggtgttggtgttcaaaagagctttgaggactgagatgagcaatccactgtaattttatactggtcaagctgatgttcgctttttcaattcatcccttgcatgtgtggcagaagaaagagcagaagataaaatcacttccacctggaccactgcttatctttatctgt

SEQ ID NO: 517573 - DNA, 1214 bp, Homo sapiens
gtgtactgcgagaattactatcatcatcacaatatgactgtctgttatgatatcccaatagagtatctctgacgccgttgcgagacagtatcaccgacaatgtggtgcgtacgattccaaatagattttcatcccataatcagtcagatgactggagtgatcctacaatgcgcactcacgatgtattgtcatcattgtgattcatgatgttgccaactcagtgttcggctaacctaggtgtgcagaacagtaaacagaaaaaatgatagtgaactacgaaacgtgtactgttgcgtatgctgcttgccataactatacaaaaataatgcgtgtggatatatagataggggtgtgcatgaataaatagtcgtatgaaaagtgatgttcttggctacaaccccatgaattttacgttctgcaagtttatagtatgtgatgaacgtaaatcatgatttacttcatagttatagagatgtgttttgcctggaataagcatgatgagtgtgcactgcagcgaatttgtggccttaattctttcattgggaggaatatatagactaggcaaaagttaagtgcgctgcttcttgcgagattttaataggtctacatgaggcactgtgtgtgcacaggtaaccattgactgatattgacgatgacttttttatcatagagatcgattttcttggcggatggtaaaattggttcgaaatagaccatcgtcactagggttgtgttcgtttggattccaataggagagcaccaattgtttgacaagttacatgttgtctatttttcattagcatatgctgaccaaagaactatctaaggtcaacgcggcttgtacaaacattggaaaggtaaaaacctcagaaaatattcaacgtgattaagggctgggttggttagtgcccctatttatctttgaatatggggaaagatggacaggataaactaagtttggtaagagtctacatggttgttaattaatatggttgaagttgaatgggaacgaccttttgggggaaaatgaggggggaatggcagggagcaaggaagacgcggaagtttgaccccgttgtcgcagcgtcaattccttgggctagcgtgagggtaaaacactatgggtttaatagagcgatttaggggagacttcgtttgctggtccttttggcattaaaggataggacggtgatggcctatggtttaaggtataa

SEQ ID NO: 517574 - DNA, 143 bp, Homo sapiens
ggagcgcggccagcctggctaacactggtgacaccccgctctctactactatcaatacaaaacttaggcatggtggccggcgcctgtaactcccagctactcacggaggctgagtcaggcgcctctcttcaaccagggagccg

SEQ ID NO: 517575 - DNA, 1594 bp, Homo sapiens
  misc_feature (322)..(322): n is a, c, g, or t
  misc_feature (450)..(450): n is a, c, g, or t
  misc_feature (583)..(583): n is a, c, g, or t
  misc_feature (805)..(805): n is a, c, g, or t
gagaggctccagagcccgcgcgccgacgcgcagagagtctctcagcgccggtcggcagccatagccgtccgctgcgcctcgctcaagccatccaatcgatggctagaataatcgtccagcccgtgacagtagactagtagcgagtgcgtcgagatcccatgcatttgcatgatcgttccatgaagtatgctggatgatggatggttatagaactatcactactcgtgctcgagaaggatcagggagtgtgccgttagacggcttcgaatgaaagtaacattgagagcgtatggcgtagcacttcgagcacagaggagagccnacgaaaggaagcacctgcgttgtctctttgagcccggcatgattgaatgaaaactggcacaccagatcagtggattggctcatgcctaggatttatcatctagtaaagattttcttatagtcttgatntgtgggctggtccttagacgtattaggcatatgccattggaacatcactgtcgctcgaagggcatgtctccatgtcgccatgataggctggagcacttgaaagggaacactaccttggggacgccttcgtgcncctttgcaaaaaacactctagcacgccatccgtattcccctttaccgaggacacatatgtgcatagctacgaattcagtctttctctaaaaaggccacgaacacgcaagtgcacgccgctggaagccaagaacataaaacacaagcattcatatcgcaggcacgcccaaacctgttgcaccgaatcaggttcaatcaataggccggaagatgtcgagctttntatatttaaacagagcaattgtaaaaaaaattaaaatggttaaatttaaaacctcggagcggacatcttaagtgatacgcgcggggcggggggagacaaaaggaggggtaatgtgcacaagtgggcacacacgtgtcgtccaataaagctgggttcccacgtgggacccccaaggcttttcttttggctcccacccggggtgggttcacgattcttcgccaggagttcttcccccatcaattaagggggaagaggcggtaactaaaaattagccggaataaaggccatgtgtttaacccttgtcaagagaaccggcagccgaagacgacccattgaaaacacccacacaccaaccccccgcgcgggcccgccacaaaaaaggggggttcacccacaccctatgggtccgacgcaaggacaaaccaccgcaggtcgtagacgccaccaacaacacgacaagcaacgagcagcggaagaaacgacgaactaaaaccccacgagcccgccacgacagcagagacggagaacgacgcggagaagaaggacgagtcagaagagaagaagacagaggagaaacaagcgaacagaagccccggagacgcgagccgaagcagagcgagagcagggaacaacgaagagacgaaggaagcaaccacagcgggatcggggcgagagagaacaaagagaaaggagaagcgaagagcaagcagcacgcgcgacgaagcgacgacgcgaagaaggaccaacacgaagacagagcgaggaggcagcggaccgcggacacgagat

SEQ ID NO: 517576 - DNA, 2720 bp, Homo sapiens
tttcagctgttatggctaagtcagttaacctcatcaacaattttttcttctgtaaattgaggacaatttttgcttttatgaatgaagtcttaaccagcaggaagaaatataaacaaaggaacatatttttaatttaatgaagcaaaattccatacatcattttgaaaatagtgtttctttccctgataggcctgttctgcatcattcttttagcttccttctgccctgtttatcacttggtcccacttttatatttttcctcttcggtccagaatttcttatttagtttcttgtattttgcctactccctcccttctccatgattcagcctagtctttccgtcctctgtggacttgggtgtgccttcctctgggccacctcgtcttttgctgctgttagccctcccgcctgcgcacctgccacttcaccctcgcctgtggtccacttacgttccactcagcccggtcagtcctgctttgttcttctccaccgccttggtctcccgtgtgtcttatctagctctggttccttctcgtctccacatttattttgttttcttcctgtgcttgttagtccttgtgcacttggtccttgagctctttttctattaataggtattactagatggatttgttgtctgcctttacatagaacacacatccttactgtgcatttcctgggtagccaggatgaatcaattattattaacttcccttcgaacattgagcttcctctgttttctgtttctaagaattagattagtattctagaagactaatactactttaaagacagtcaaaacagtcatacgctgccatttcagccctttatttaagagtttgtgacatttatcactcccttgaaagattaaagaacacccaaagcaagtttggggtggaggtggggaaggcaggaagagaaaggtaagtgctataaaaggactcattgttaatttctagaaattggactgagatctgaaagcataagccttaacattttttagataaacggtccctgaaaagaataaaaagtatcagtacttccgttaactagctttagtattgggtcatttgtagtttacattctcctttaagttttaagaccttcagtagttaacaaagcagacagagactggccgggcacagtggctcacacctgtaataccagcactttgggaggctgagttgggtggatcacaaggtcaggagattgaaaccatcctggccaacatggtgaaaccccgtctctactaaaaatacaaaaaaaaaaaaaaaattagccaggcgtggtggcaggcacctgtggtcccagctactcgggaggctggggcaggagaatttcttgaacccgggaggccgaggttgcagtgagctgagatcgcgccactgcactccagcctgggtgacagcgagactctgtcaaaaaaaaaaaaaaaaaaaaaaaaagcagagacttaatcttgtaaatactcattttatttttgagaggcttaatgtctccttaaatattaacctgtgtcattttgtaattatactgtaatagtgtcagaatgccattaacaaccaacccttttcgtttcttgtgtgggaaagctcataaattgtgtggtcttacccctctggaccctgtagttgtagcattgtgaaaatggagcttttggcaaaactttgtattatgctgttgactcacattgtctcatatttttcctttattcttctatattctatgaatatggtgctgtcctgtcatttaattattataatatatgtgaactgctggaggtagactgatgtgagtgcagtttttcaacttaaaaacccttatatatcacattcatggtgtttaagatataagaacagccctacaaagaggggttgattgtattgaagattctttctgctgagcctgccttaattgtgagggtggttgtttgggtatcttagagctctatgttctattttcagttttctaggaaaccagaaaaacatgggtagtagaaatgtatagaaaatgtatgaggtctcttaaccattgtgttaaacttgcattaagcttcttttttagcaatatcgatgtcagtgttacctcttctttcctttttatttattttttttgagacagagtctcattctgtcgcccagactggttggagtgcgatgatgcgatcgcggctaactgcaaccgctgcctcccaggtacaagtaattctcgtgccttgggctcccgagtagctgggatttttagtagagaacaggtttcaccatattggccaggctggtcttgaactcgcaacctcaggtgatccacccacctcagcctccccaaagtgttgggattacaggcatgagccaccatacctggccccttttgttgttttgaggggcaggcagtaagaagcagggatttcttcaaatgctagtaagcacaaagagagggagaagtttttgtaagtaacgaacagggccgggcatggtggcgtgagaggccgaggtgggcagatcacgaggtcaggagttcgagaccagcctgaccagcgtggtgaaacccccgtctccactagaagtgcaaaggttagccgggcatggtggtgcacgcctgtggtccagctagtcgggaggctgaggcaggagaatcgcttgagcctgggaggtggaggttgcagggagctgagatcacgccactgcactccagcctgggcgacagagtaagactcccgtctc

SEQ ID NO: 517577 - DNA, 155 bp, Homo sapiens
aacgatggtcctcagctaaagcagtaaggaaataaaaattataaaaaggaagcaactggatgcagtaattaagcgggaccagcaaaaaatcaaagaaatacaattaaaaacaggacaggaagaaggtctaaaaccgaaagctgaggacctcgttg

SEQ ID NO: 517578 - DNA, 189 bp, Homo sapiens
  misc_feature (92)..(92): n is a, c, g, or t
ttgttctgctcatcctcgggggctgcaccactttctaacatgtccattgagatgagaagggtaccgcagttgaaactgcagaactcacctgncttctgcattggtctctctgggagctgtacctttttggccatcttgccagatcccatgaaataggacttttatacgctaatgaggagaagtcagcac

SEQ ID NO: 517579 - DNA, 877 bp, Homo sapiens
ggaaagcagcaagccccgggctgtgctcaagccacggcgcgtgtgcgtggggggcaagcgccggcgtgatgacatcagtgtggacacgctcggacttcaccaagaagatcctgcacacgggctggcgacccggctgagaacatcattgccattgccggaaccaacaaccgtgtacatcttccaggacaaggtaaactctgacatgcactaggtatgtgcagatcccgggccatgccacccagcctcatgcaagtcatccccgacatgaccttcacgaccgtgaatgcaaggaggggaagtaaagtcacaggcactgactgacggacagctgcagaggtggcagctgtgtggacacaggaagttagggccccctccctgccccagtctttcctaggccagaatcgtgttcggcagtaattgtctgtgtaagagagatagataacaagaggcagaggacagcgttcaccgtcgcgacactcataaaatggacatgactgtggagtcttacagttcagggttctttcattcacgtcccttcctgtctcggtctgcggtcttgaccacatcaataggactctgtatgcgtccgggttaagttcctcactccagtgtgtcctgttgcggggaccggagctgatgggagctgcttctcccccatgcctcacgtggtccgagatcagggtctccaggcacagatgatgagtctcaaacgagccaagccaggggttctgataggccataaatgggggcaattcgccctgttctcagagctgattgacctcacccgagtcctgggatggtgaattctagctgacgactttggcagatgcaagctcctcttctaggtcttctgaatgtcttgaacaatccagggccc

SEQ ID NO: 517580 - DNA, 291 bp, Homo sapiens
accccgctctatcaccgaacacaattctgcttctcaaggcacatcttggcttagcttagaattaggaagtttgcagtcacaccatcatccatctatacatatgtcactagtgacattacattcacttgtgtttcatattccagtaagaacgaacaaagccaaacccctctagaatgaccagtacttcaagatctttacttagacctgcaccatcaagaacttctccaaatggtactaaacatactcttatcagagtcctgattcggtatagagcggagaagggtaacgaag

SEQ ID NO: 517581 - DNA, 686 bp, Homo sapiens
accctttggggaggggcaaaaatggccaattcagctaaatggggcccaatttatgggggctccaaatcattgttccccaaaaaaataacccacccaggtttggggaacagcataatagaaggtggccgtccccgctaaggctcggtagggagatccccaagcacgtgggagttttctaacaataagactttttttgcttggagggacatgcggaccccattaattcccaagcccagaatgaattgcctttaaaccaaggagtatttaaatgcctgggccctctcgagtcaagagtattttctcatatgggaagaaataggggaaattttaatgctcagaaagttttcacccctttttggttgccctgaaaatgcaaggggccccataactagggaaaccggtggcctttagagcaagggggggttcccttcttgttagtgagccaagcaatccgtgagttcaagaaatgcaaaaccggcaagtctgctaaggactacaatgagcttggaactgaacttttagcttcaggtgaagacacgggctaacaaagcctgtggttgagtctttccaaaaaaagcaacctctccaagccgggattttggcctgtccacatttaagttaataaaaaaatgttgtaactgcttccgacaatgtcaaattagacaattaaaataatagtgatcaac

SEQ ID NO: 517582 - DNA, 209 bp, Homo sapiens
tgttcacgtgtgtcatgattcatcccggaaattgtggctattcatctggcaccagcccaagccaatctgtcccagctcctgggatcacttgtggacaggaggtcatctgtgctgtctggtgttgacctgtgctgagaaccgggatgcagctgcatgttgcaccatgaatggtgcttgtatgactgcctacgctgtgagtgccgatgctg

SEQ ID NO: 517583 - DNA, 158 bp, Homo sapiens
cgcgggcccgcaccagcgtctccgcgggctcatcgataagcagatagcgtcgagcccacagcattccttccgccgccggccagagggggcattccccgtcgccggctaccacgatcggctgcttgagggccagaaaggcctgcaccaggttctgaccc

SEQ ID NO: 517584 - DNA, 421 bp, Homo sapiens
caatgcacaggacaattttttttacagcaatgaattatccagttcccaatttcaatagcaccaatattgagaaaccctgttgaagatggagactatccacggggcattgatcttggggtctcccccttcctgaaaacttgaagtcccctcggcagacttttggatacctccagcaatggggagctccccccctgtttttaaaccaggcaggtttgggctctttttgtaactgtgtgactttggattttcccataggtgggagtggatcccccccctttagcttcagtttcctccagtgccatgggattagcaacagccctgcctcccagattgggtgaggatgaaattaaattatgctccttagttggctggtgcagtgcccggtacccaaagagtgctcaataaatgttccctgctgtga

SEQ ID NO: 517585 - DNA, 215 bp, Homo sapiens
tatgctggtccccagcaggaactcaaggattccacttttgaagtgtcatacacaacttttccttgctatgaagaaacatgtactttccagctgctacaaaagtaaaaatttcctccctgactctccccagagaatacatgcacagaaaactgaattcatctgttctggtgctgcttggaggtaagaaaaataaagagaaaaagaaaactgttaaa

SEQ ID NO: 517586 - DNA, 657 bp, Homo sapiens
  misc_feature (276)..(276): n is a, c, g, or t
  misc_feature (472)..(472): n is a, c, g, or t
  misc_feature (505)..(505): n is a, c, g, or t
  misc_feature (520)..(520): n is a, c, g, or t
  misc_feature (551)..(551): n is a, c, g, or t
cacgagcggtacgcggactggtcggtcacttgacccggttattgcaggtcgaacccttggctgcgggcctgcccatggcgcgggtgaggttggtcgcgggtccaggtcagcatgtgtccttttcgatatgaaaggccgccaaggtagcgctgaggcggtcatcaaacagctcgctcttgacccccacctcataacccacgccttcttcaggcttgaaggacttgccaccggcgtccaggccactattgggcttgaacgacgtggaggcgttggcanacacgccgacttccggcgtgagctggtagagcaggccggcgcgctgagtgaaggcgtcgtgggtttggcggccattggcgtggttgcgggtgaagtcgtcggtgctttgttcgaagtgttcgaagcgcgcaccgatcatgccgcgcaggcggtcggtgaagatgatctggtcttgcaggttgagtgcgtggctttnggtctgttcgaagaagtcggtaccggagcgttnccgttgggtttggcnggccgtacaccggcttgtagatgtcgatggnatagtcccctgcgatcgccgtcacgcgctctttcttgcgagtatcctcgtactcggtaccgatcaacagttcatgttgccaactgcccatatcgaacaccccgcgc

SEQ ID NO: 517587 - DNA, 831 bp, Homo sapiens
accagatcttcattccataactcgtgcttctcgtcctaaattatgtactagaaaaaattgtaatcctcttactataactgtccatgaccctaattcaactcagtagtattatggcatgtcatgggaattaagattttatatcccaggatttgatgttgggactatgttcaccatccaaaaaatcctggtctcatggagcccacccaagccaatcgggcctttaactgatctaggtgaccctatgttccagaaaccccctaacaaagttgatttaactgttcctccaccattcttagtcataaaagatacactccaaaagttcgagaaaatctagataggcgccaacaggaacgagaaaacaacatcccctggtatcaaagcatgttcaactggaacccctggctaactactttaatcactgggttagctggacctctcctcatcatactattaagtttaatttttgggccttgtatataaaatggtttcttaatttgtaaaagaatgcatagcttctgtcaaacttatgtatcttaatactcaatataccccctgttataatggaggaatcaacgattgattcccaaaaacacaagtgggaatgtaatgccagcttgttttactaaccctgttttagactctcctttctttaatacccaagctgttcacctgattgatctcctttagtaaagagcagaagatccacttgggctcctgggccgtcccaagactaatggaagggcccccaccaaaggtacgtaaacggggcgctttgaccggatatttgaaccaccgctaactgaattacaccggagataggacactaagggt

SEQ ID NO: 517588 - DNA, 462 bp, Homo sapiens
aactgaccaaccagagaaaccgattggcaacccaaggaaaaaagcccattgcccccagccccccagacccaaacgcaagaaaagccactagaaatggtgaactgtgagccagtcctataagccttgagaaccatctaggcacatctagtgtataaaactactgaaatttatcataactgttcaaatttaaaaattattgtcaaacttgaggttattcaaattgccagcttttttgtacataccagtggtttctggtcccaagttccccttgaacttatttactacaatggtctttttacgcctatttatttccttctacaatagtacagaaaggctaaccattcatgggtcccataaaaaacatatgtgaaggacaggttctaagagtgaccaaatataccagtgaacatgactatctttctgaatgaagaaagcaattaagtgtccaactggatagagatc

SEQ ID NO: 517589 - DNA, 1568 bp, Homo sapiens
  misc_feature (562)..(562): n is a, c, g, or t
  misc_feature (612)..(612): n is a, c, g, or t
  misc_feature (1140)..(1140): n is a, c, g, or t
gctgcccgagtctgggtcagatgagcattgtcctttagagcatcctcaccgccagggaactagatgccgatggccaggggctcatggattcaatgcctgtgttcaaacacgctgatccgctcctggctctgtctcatgatgatgactcaatggctgtgaatgacagtcttggccgtagaatccgagaactacgatgaacatgcagttatccgtcgacgggggcgaacatatgtgtagtttgggtggaaacgcatcaatatttgccccgtgccttcatgcatagctcgtcgcgcgagcttgaaaccaagggcaccatcatctttagagcgttgctacacttgcggaagggaagcatagggggagaagatcggggggggagagagggccccgttgtcgcggtgcacacaggccaagcttccgtggctaacgactcttgccacaacgtacatgagcgctcaaatgcttggcgatctactagagtagtcatcgaaaataggaggcaccatgaaggggcaaaaccacccaaggtatggtagatactcctagcgtggtgacgtggganggacatcacgagagatgaagaacaagtctactattctactaaaactcacncaataggcatctatgcgtcctcggaggaccactttgcttccattgccccctgcccaaagcccaagccaaggatgcgggcggagggggttggcaccttcccttaatatccccgcgaagccataacttgccctatagagggttcccaaggggcacgggcacacacatggaactattataccaaggggacaggaacattggcaccaaggtcgggcgttcgggaagccccaaagttcccaactgtcccgttttcccttttcagtaattcaatttccccccgtggccgcaagcgttccctttttccaagagtaacgttggaccgttgggacacggggaacaggtttccagggggttcccttggagggaaacaaatgggcgcccccgcaagatatttggcccttgagaaacctttgtgcaggagggcggccaaagaacggcgaaaggcaaagagaactacaattatcaaagaaggttacttacttagaaagggcgtgaaatgggggggctttgaggcaaagggaaagggagggngcgccataggcgagcataaaagacacgccaccacacgggcggctttaagggcgacgactagggaaaggggggatatcactccgggagccaccaattttatgtagactccaaaggcgtggcccgtatagagataggcgggagaaaaccggccaggcgaaacacacatattcagcgagccaccggtttttagactagctaagacaagggacccagccgaagatataccgagcacaaaaataggggaagactaacaatccactacgcagaggaagaggcgaacaagtaggaagtcacaccaaacgaaggacaccaagcagtaagtggatacgacagcatagcagaaagaaagtcaaacaggagggcgtagaacaaacaaacaagcagggtgtcgccgcagaataaaaaatattactgcagcgcaccaaaag

SEQ ID NO: 517590 - DNA, 420 bp, Homo sapiens
cgacgaccatcacactcttcttgaggcgcaagaggtcgttacacgtgcgcagctgtggcactcgctgcttgctccagactacgcgctgactgctgctgtgacagctacacatatcacgattatggccatctatatgtgtgaccccgactgggttggtgacactcctaataggcgtacctatgctgatgatctgaatgagtgcattcccaaggtaatgcatgctgaagtgaccatgacgatggagtggactctactttggccatacgagatacactgcaagaaggcatctgtcgatgatgacctggaacatcattggaagcggcactgtagctagcacgcgtacgattgacgacgcacctgagtaatgactacgggatgtactactctgtacgcatgcatgggatgggatctgttgccgcc

SEQ ID NO: 517591 - DNA, 216 bp, Homo sapiens
ccctctagacattcacttaactcattccatcatgccaccctgacctgctcaagtgtcacctgttcaaaaagattcttccagagctccttatgtaaagtagcagtccctgtctccctgaatgtgattaccctacattatgtttctttgtcctattatgcttttttatttagacaaggtctcaccctaccctgggtgacaaagtgagactccatctca

SEQ ID NO: 517592 - DNA, 1161 bp, Homo sapiens
ggcccggcgccaaggcttcgcactcacacggcgcccccgagcgtacgccgggtctaacatggcgcggccaaggaagccactggcccaccccattgagggcaccgctgactatcgtccccgcacggcgcaccacgcctcggccaccggctccgaccccccgggacgcagtgggactcccaaacagggggaaaacagactcgccacaccaacaagttcaaactgccggggccctcttggggatgcctcccccagtccttccgttacaagggctcacgaaggtctaccgactttgcgacgctttctcgctacagatcgtccctccttggccatatgtaaccctggtggggcgtgccgacactcatgcttggataaactacgggacgcactgaccaaaccgctcgaaccgtctagcgactcggtcgacctgtactggtgtcttcggttcataccatggccgggcgagctttatatttccgtgaaggcccgtgcgtccccccatacttggggatccacaggtgcacccgatggacgcatagacaattcggtgcgtccgggacaccgttacgcgcgtgaccttcgcccggtcatccctcctgtcgaccagtgcatgccgcggctcccctcgccaacctgacgcggatctgctgcaggcaatcgcgggggatccctcgcatctgttgtggcaaggcagcaggcgacgctgcccacatatacggctgtaccgggcaactggacacgtgcactgaccacgatcagcaccattaccgcctaccactggagccctgcccagaatgagcgccagactgcctgactgtctctgttcttcgtcctagggtatgcctgagtgtgcccctctttcctcctgcaccgttggaggtggggatcttgcctcaacagcgctacggaggcaactgcagaagctctcgtgagtgtcaccctgaagtaccctgtgtcctgctcagggactggagaagggctggagaggggctcagttccactatgcttgggtgctcagcacacgcctccaacatctgagggcgtggaccattggggtactgctggtccaggggtaggatagtaataggaagtagaaggaggaaggagggttagataaagaatgctgaataggcagtagatagggagagagcctcaatattgggg

SEQ ID NO: 517593 - DNA, 206 bp, Homo sapiens
ctctgacaggtgatgccccgccctggctgcagcttccttcctcccctgcatcaaccctttgtcctgcggcacaagttttcatttgagtttcctttttctggtttgttttttgtgagacggagtttcctctgttgtccaggctggagtgcagtgaccatgatctcagctcactggaggcttcaaccccccaggttcaagtgattctt

SEQ ID NO: 517594 - DNA, 978 bp, Homo sapiens
gagcagtaccatggcggttggcaagaacaagcgccttacgaaaggcggcaaagagggagcctaagatagaaagtggttgatccattgtctaagaaagattgggtatgatgtgaaaagcacctgtctatgttcaatatagtgaaatataggaaagaggctcgtcaccaggacaccaaggaaccaaatattgcatctgatggtctcaagggtcttgtgtgtgaattgagtcttggtgatttgcagaatgatgaagattgcatttagaaaattacagggctgattactagaagatgttcagtggtaaaatacatgcactggagtaacttactcatggcatggatcttatcctcgtgatacaaatgtgttccatggtcaaaaaatgtgcagacaatgattgaagctcacgttgatgtcgatgactaccgagtggttacttgcttcgtctgttctgtgtggtttatactaaaataacgcaacaatcagatacggatagacctcttatgctcagcaccaacaggtccgacacaatccggaagacgatgatcgggacatcatgacccgcgaggtgcagacaagtgcactcgacacgaagtggtccataaattgattccaagacagcattggaaaagaccatagacaaaaggcttgccaaatcctatttatcctctcccatgatgtctttcgtcagaaacagtcacaattgctgacagaaagcccaagtttgaattgggacacggctcatgacacttcatggtgaagggagcagttttcgagacacgccttggggacgagcaccggtgctcaagtttgacgagtgacgatatgagcacaggacacaattcgctaacgttcgcctcactctggcatctacaaggccttgtgacccaccaccacatagaaaccccctcgtcccaccacacaccaccaaatcggccacgccacacccgcacaacatcacgtcctgagccacgcactacc

SEQ ID NO: 517595 - DNA, 323 bp, Homo sapiens
agttcccattcacctgctctcaaattggaaaaaaaaaaaaaaggaaggaaaccgggtacctaaatccaaataatttaggcttttctgtttcctttccggaaaaattggaaaaattggccttggagaatccccaaatagcttcagttgaggaaggaggcctcttttttacagaagaatgtcatttataaggggggagtaacagaattggacttgggccattctgcacctctaatgaaattattagttctggaaaggatagggttaatggttgaggagaaaatgcttctagcacatttgcccaatgagaagcagattgtcatcac

SEQ ID NO: 517596 - DNA, 153 bp, Homo sapiens
agctagtcttttcatgttaaaaaaaaaatgtatttcatatcttaaaacctctatagcctttagctgagcccagcttccaggtcaagggtacaacttctaaatctcaaacattttaggcaagggtatatacttaactgcacctcaatatcttgg

SEQ ID NO: 517597 - DNA, 89 bp, Homo sapiens
ctggtgttcttgctaactttgcccttcactgttgcttaattggaccagccaaaagctatatgttatggcttattgtgtgaaggtaacta

SEQ ID NO: 517598 - DNA, 158 bp, Homo sapiens
ttgagcctcggaggaggccggtgaggcgcggacagggcggcctcataccagacactgtctcgacagcagcaattatagtcagctcgataacaaccaggctctgacaggttcagctgaccagggagcttaacaaagaagcaagggcggcagcccgcagg

SEQ ID NO: 517599 - DNA, 224 bp, Homo sapiens
ctagattgacttgccatggctcttagaacagttactcttgtcctcattgtagagatggcgatactaaggcagaatatggctagcctggacttcacttctgcaacatttattgatgaaagcaagtcacaagaccagactgattcaaggggtggagaaatacaccctacttcttgatggacggaggagcccacccacatcgcacagggacccgcacaaacacaggc

SEQ ID NO: 517600 - DNA, 810 bp, Homo sapiens
aggatcggcgctgcgatgggagccggcgccatgtctgcgcatctgcaatggatggtcgtgcggaatctgctaaccagcttttcctggatcaacggacggtaatataggcagacctatcgaagcacgtagagactccatagtagacttggaagtgccactgcaacttccgtgtccagcgtacgatagcgagactgagtacgaccagcatacgactgttggagtcgatggagctctggtcatggctcgtacggcgattagaggtgatcgctgggtggctcatttaacctggagatccgggcctagcaggaatgcctgcctaccttcgctatgtgcggaaccgagtcgatcaaacccttggacttgggcgttcgtatgctgacggcctctaaggccagtcgcatacactggatcagcatagataccggccatagaaacgaagttaaacgcggctccggactctgcgaacattgggagatgttcagtacccgacgcaggtggtccaaggcgtcccattcccttgccgccagccgagatagtcccttggtgacagtggtcgacaccgaacgggaacagacggggaaccttggtcccccaagcaccagttgcgaacgccctcaccttggatatccccgcacctttggttccatcgcaaaacaaaggcctacgctaaagcaaagttacaattggcatggcgtgcgtatcacctctcaaccgctggttatcacgaactcagccacatctctcctttgcgtaacgacgcccaccgttgtacctcgttgcacttcccctatgtaataccgcctatacttg

SEQ ID NO: 517601 - DNA, 734 bp, Homo sapiens
gagaagaggatggattagacaagctggagctgctggctcccggatgaatttcatacctgcggttctcagctgcaggcgacttggactaccaggacctcctgatgttgctgaccatgctgcttaccacccctttctgcgtctgtccatattgcctgcttcagcaccaccagccacctcaaatcctgatccagctgtgtctcgtgtcatgaatatgtctgtcatcctgccactgtctgtgcagagagtgtagcggctctgtgtggaccccagacaccgccaggggccagtgaacctgctctcacaccctgagcaagggggtgaggtgactgctcactatgagagggaggctgggttctcatggatcgaagtgaccttcaagaaccccctggtatgggttcacacattcactgaacacgtggtggtgactctgaaccgaataagctctgtgtacaattggaaggagacgctattctcagtgatgcccggcctgaagatgaccatggacacgacaggtctcctgctgctcagagacccacacacagtgaccatcagcctgttgttatgggatggccgtggagaggggctacagctccttctgcgtgacactgaccgattctacagccacgctggagggacccttggccagatctaccaggaggtgctctttggatctccacagcatcatatgacggcagacgcacactgaggggtcatggcaatgaccactctgcccc

SEQ ID NO: 517602 - DNA, 367 bp, Homo sapiens
  misc_feature (1)..(1): n is a, c, g, or t
  misc_feature (78)..(78): n is a, c, g, or t
  misc_feature (92)..(92): n is a, c, g, or t
  misc_feature (357)..(357): n is a, c, g, or t
naaaacctaactatcctaaatatatattcacccaaaatagttagcacccagatttcataaaggcaagttcttaggagnacctttcaaatagnacttaggactcccacacaataatagtggtaggacaaagatattcagggacctggaaatcagtaccaggatcaaatgggacatgataggacatctacaggggctctccatcccaaaacaacaggttattcattctcctcattgccacatgggcacataatctaaaacaaatcacaaaatcagggaataaaacactcttcaggcaaaaggcaaaaactggaaatcattaacaaagagtctcttggggccaggggcacaatcaaattngggaatcaag

SEQ ID NO: 517603 - DNA, 337 bp, Homo sapiens
aggactcccggcgacggattgtcagacttgatgaagaaggacaccactctagtcaagagtggtgagcgtgagagctgagaacgccaggcaaatggcaggatagagcacaatattagaagctgagaggagaccactcgggctggagcttagcaagaaatcagcatttgatgagagttcaatgggaaggcaagaaccagttctcataaaccaaggtgaacagtttacagttttacctgaggggtaatagaaagcagaagggttctaaacaggggggtgatcagatttttatttcaaccacccaatcctggccaggtgtggtggctcatgcctgtaagcc

SEQ ID NO: 517604 - DNA, 647 bp, Homo sapiens
gcgtggatgacggccatccgatcaactaaccctggacagacagtttgcggaatacaataggcacaacggtccggtttccaaaaagaggaactgtagttgctgtctttggggatatgccacttgaggctggtaatatatacctctccccagaggtgctacccagaagataggacttctagcatgtctcccagaactctgttacctgtcctataaccccactcctctaggtggtgccagtatttctgtgggggatctttagtagatgagcagtggatactgacttgccggggaggttctcctcctggtgagcctgccttgtgtttggagaccaaatctcatgccacattaaactttccccagagaagctaacaagggagctctagatgcaagacactgagagtcacaaatgacctttaacagctttgtacccaaccgtatacctttcaccgactatgaggcatggttgaccaccccagactaacgtcttggaaagccaggcttacatatcctccaattacccaaaatgatttgtggtgccttaaactgccagtttttcctgttttaatcttgaaatgtaaagcctttaccaccttttgggcccaatgtttctttcgcccttgggttttttttcccccacgggacttttg

SEQ ID NO: 517605 - DNA, 107 bp, Homo sapiens
aaacaaaaaacaaaaacccacacaaaatagagaaagaaggagactgtatacatattgggccatcgctcagcgaagacgagcgcagcgagctaggagcgaggaagcgg

SEQ ID NO: 517606 - DNA, 498 bp, Homo sapiens
actttcatagtgcgagcaagatgtgtttgacagtctgtttcatccacattcaagcatttcttttccagatttctcaacattacagaagtttgttgtatttgttgatattttgggtagtggtggccaatgtctgttatctctctcctgtatcgctgccccttgaggcccctgggacacagattgaaaggtcgcagcttccccaaggtacttggactgcagacaagctggctagcggtcagcaggcggcatgttgtgaatgaggagacccgctcatttctatgacccatcagggaagctgaacaaaatctagaaatgtcaccaggataactgcatagggagatacagcatccttgacagctctataactattatgcagaaaatagcaacagcagaatcaactaaggttgtaaaggaacattgaaaccattatgaatggagatctaaaagaagtgatcagaaaagcactacaggatttggcaagcaccctgtggaaacgta

SEQ ID NO: 517607 - DNA, 469 bp, Homo sapiens
ttggtgacctttgtaatgtggaacagtatttttcattttaaataaaatttagagtgattaaaaaaatgattattttcctggggcattaaaccaagtctgatgaggtttttagcttcatttgtgatgtaaaacccatagttaaaattaaaagtagttccttaagtatgcaaaccctgtgaaaaatatttctagtttcaaaatccttcctaagggaaatgcccatgctatggaaatccctatgattagccttaattgttatgcttcttgggtccccctgcaaaaaaaccagacttgtaaaaaccaacctcttttttttgccccgtaaaggtcataacaacagacattgtcttaaaatggaataggaaaatggtctcttgactgatttaaatggtaatatgtaataaaaaaccattatattggatgggtgatatgggagggaaccttccttaagttacatttctttcatatt

SEQ ID NO: 517608 - DNA, 213 bp, Homo sapiens
gagcgtgtttcttcatcgtcgggcgcccagacacagggcgtaatggtgggatgggcagaaggactcctacgtgggcgacgaggccagagaaagcgtggcatcctgaccctgaagtaccccattgagaatggaatcgtaaccaactgggacgaatgaagaagatctggaacaaaccttctaaaagagctgcgctgggccccgagagaacccagt

SEQ ID NO: 517609 - DNA, 1585 bp, Homo sapiens
gccccacaaaacaccttcagtagagccttgattaaaaggaaacctgcagactctcaaaaaaaaaaaaaaaaaaaaaaaaaaaaaaaaaaaaaaaaaaaaaaaaaaagaggggcggcggcgcgccaacaaagaattccccgccggggggcccccactactcgacggcgtcccccagttttgtgtgggaacaaaggggggcccccataagggaggggcgttatttatataacggcagaaggagcgggggcgcgaggggtgtttatacaaaagggtgggagaggtgggagaaaagcggggagaacgggggagatcttcttggggagaagaggagaccttatatatttctgggggggggggggagaaatatatgtgggggagaacatctctctctctctagaaaggagagatatattatagagagctctctctaggggggagaatataatatataaatatttataaaagaggggtgttatatgaggtgggtgtagaaacaatagagggcggagatatattcgtcggggagcggagagtggaaaaaagtttatgtggagcctactatacgggcgaggtagtctatagtagtagtatttatggcagaaacactatatattatatacacgagacgggggggtctttttgtttttgtaaataaaaaaaacggacgaaaaaaaacaagataataaaaagaatacagaacagtaaaagagaaaaaaaagaaaagggaccgcgagcagacagagagagcgaagaagagcgaagggacggcaagaacagaacagcgcacggacgcgcagcaggagaggaccaccaagcgaaagggagacgacgcgaggcagggcagcaggcggagggaggggaacaaggcagagaggcgggctagacacgacgagaggcaacaacgaacgcacaaaaagacaacacccaaggaaagcaacgcacacagaaaacaacagagaacaagagacgcaggagacacgagcaggcagacaggagcggaggcgagcgggacggcagagcgccagacccgcgaacgccgcggacgacgcgagagcgacggcagaacaacgacgccggcagcaggagcggcagcggaccagaggaacgacgcacaggccggggacggcgaaggggcggaacaggcaaaagcacaacgcacaactgcccgcccacaacgcgggaccactgcccgacgggggcgcggggagaagcgcgcgcccggcgaggccgagcgaggaagacgaggagggcggggcacggcagcggaagcacccgaccggaccggccccagcgccgaggcgagcagaacgaggagacaacgagcagacgacgcgaagcgacgggcaagagcgcgcaagggcaccacgagcgaccgcacaaaagaccaacacgcaagagcgaacagaacgagcatcgagacgagggaccagcaggacgccagggagcggggcagggcggagggacgaggacagcggaggacggagccagcgcgacacgcaggagaagagaggagcggaagagggacacgacacgagagcgaggaggcacaggagcacgagagcagacgagaagacgacggaagaaa

SEQ ID NO: 517610 - DNA, 344 bp, Homo sapiens
agcagttgggaggtctccaggacccggtggtccccccagtactgggtccatggtagatgtagatgtggccagtgatagtcatagacccgccggtgacatgaacgccatgggtaccgtgggccaccgggctctgctccccgggttccaactggcggctcccggtgtcaggtccagacggactctggctgtttgcggcaccccgtgcctccaaaactgggggctagcggggagcccagttggatactgggggaaacattctccagaaagtgggtagcatgtggctgtaccaatgccaggcgccgtatggcatgggccttcgggaggttcccacgctggctcagacg

SEQ ID NO: 517611 - DNA, 321 bp, Homo sapiens
gaggatacaggatggagttcgctctgtcaccaggctggatgtgcggatggcgcaatctcagctcactgcaacctctgcctcccgggttcaagtgattctcctgtctcagcctcccgagtagctgggaatgcaggtacgcgccaccatgcccagccttctgtatttttagtacagacgaggttcaccatgttggccaggatgatctcaatctcttgaccttgtgatccgccagcctcggcctcccaaagtgctgggattacaggcttgagccactgcgcctggcctattcttttgttcttaaatgtttggtagaatttgtca

SEQ ID NO: 517612 - DNA, 406 bp, Homo sapiens
  misc_feature (406)..(406): n is a, c, g, or t
cagagtctgaactctggacactatgggcgcacgactattccaagatttgtgtcttgtcctcctgacattgcgatatgagagccatatgacccaacagacgcagctggatcagatgcctagcccgagctttctcacccatgtgaaggaatctctctctcaggtactggcagtcagcgaagacaggcgcccactaacctgtacgagaagacatacctgaccgctgtagatgagcttatggacttgtacagccacagcgcaacatacatgagcacttacacaggcattcttactggccaaggtctttctgtgctgaagggacagtggtaacaggcataccccgcattagtggacacggggagagtgccctaatggcctgattccccgctcagactgagcttccctttcn

SEQ ID NO: 517613 - DNA, 249 bp, Homo sapiens
ctcataatagcctatatatgacgtaatcgtactaacaaatagacaaccggttccagaccgacagaccaccccgtctatccaagacgctcgcaacagccgacagaacatctcggtgcccaccaaaatgccgctaatgaagtaacaacaaccccgcaaacgttgtgtagattcccatggcactatgtgctaacatgttagtcgtatggagcagtatacccaaccgtacgaggaatcttgagcgcgcacacg

SEQ ID NO: 517614 - DNA, 359 bp, Homo sapiens
cgcccatttacctttcctctacactcataatattcacactgctaatactactgagtattctagaaatcgcgtgtggccttaatccaaggctacggtttcacacatttagtgaggctctacctggacgacaacacattatggcccaccaatcacatgcctatcatatatggaaacccaagccatgacccctaacaggggcccttttagaccttctaatggccttcgggctagccatgggaattcactttcacttcatatacggttctcatactatggctacttaccaacacacttaccatataccaatgagggcgcgaagtgacacgaggcacataccaagggcaccacacaccctgtgc

SEQ ID NO: 517615 - DNA, 1024 bp, Homo sapiens
  misc_feature (281)..(281): n is a, c, g, or t
tggaaaaagggggccctgccattcaaattagggaagtggtaattcgccttggggaaaagattatacagggaagcgccatcgttggatcgcgtgcagacccccggggacacttttctaaggagaccttcgcttacttggggaccggaccttgtcttgttaaaagtgccgagcctcgttctgtgaagaacattgccccagaggacttctcttggtcgtgtcggggcaagtactaagaccacttgggggttcccaagggcactgggacacatttccccacatgnccccctggttttttatcccacgctgggcccgcttcgtcccctgtctgacatggaacggggtatcaaagaccactggaagatggcgtgtcccacagcccacgccgtctaatccaagggtctctacgccgggatttatactttcgggggtctccacacaccgctattggagaactttcttgggcccaaaaccccacgggcacagtgttaatccaccaccccaactgggacacacgagcccacttgggtgggcacccgctggtcaatcctcgtcacaacacaatgccggagttcaatgctgctccgggtcaaccctccaccgagttccaccacgagccacggaacacattccacatgtggcctctacatggcacctgccaccctggcgcctttgccctattttctgttcacgttttttataaagtgttgtaaagagaacttcctgagggaaagaacaccaccacgtttatattctgtaaaagtaggctctcgtgagagaggccacccacatgcccttgtgcccttgccttttgggactgaccacggaggctgctcaatgtgcgtgaagaggtgggaccactttccttgcggcacagtggcttccgcgtgccccgtgtgctggtgccggttctccctcaccgccgacccggagaagggtgtttgcgcactctgatcaactggaacctctgtatcaagcggctggattccctttttcctttactccaataaaagctacatcagactga

SEQ ID NO: 517616 - DNA, 473 bp, Homo sapiens
  misc_feature (33)..(33): n is a, c, g, or t
  misc_feature (35)..(36): n is a, c, g, or t
  misc_feature (46)..(46): n is a, c, g, or t
gcgttatcgaggatcccgtctgagcagctgggnanngtactgctgnttttcagcgacaggtcttctcctccagagaaaactgcccctcataggctgggtagaagggaagccccaaggcaaactgaacatcgccagcagctccagtgctgcatggccgtagttttcaggagcatggtacatgaagacgtctcctcgggccctctttgcccaggcactggccattgtcgattatagggcagatgataaagtagtcccgggtggcaattctccagagcccgggagcaaggaggcatagtcatccgtgcagtgctccagagagtaataccatgtagcagcagcctcgaacgcgggcaatctgagtcctcgcaaccagagaatcttgcagttgctggaaaaaggctgttttgctactggtccggcctcgatttatcctcaaattgcttcccagcttgttccagacggggaatcctcta

SEQ ID NO: 517617 - DNA, 744 bp, Homo sapiens
tggcacatgcaagcgcagagtaggtctacaagacgctaattcccctatcatagaagagcttatcacctttcatgatacgacgccctccatagatctgtttgccgttatcgtggcgttcctagttccgtgttatgcccgtttgtcctaacactcaggaactagaaaatctaactaatactaacatctcagacagctcaggaagatagaaagcggtcgtgaacgtattcctgcccgccaatcgatccttagttccgtcaattcggcctcgcattccctaatgcatttcgcttgcacataaccgagaacgaggttcaacgtatcccttgccctttaccatcagaaatgcaaatttggggccgagcctaatggttaactgtaagaccctacgtaggtacaccggagtacggtcgggcagctaaagtcgtttcagaaactgccgtagaatagttgtccccccatttagttccttagaagaccgagggcggaccttgttgagtttcccttttgaggtggttcgaaccaaatcgggacgctcaagtagactccccgtgaattgtggagatgtccgcccccactggccggtatttaagtcacttttaacgattcagcaaaggacaggtcttttggcgacgtccaattgacgctggttccccagagcatttagggcttaagaagagccaggatttgcaaattgccgggaactgtgctaaaccaaaccgattttcaaccgttaccatggaccgg

SEQ ID NO: 517618 - DNA, 1018 bp, Homo sapiens
ctacgcggtcttgccgctcttggggaattggcttgtcacaactcgttgtctgtgctatttgccggttttgttcaccgctccggggttctccgccgcgtttggtggcacactgggcccagttatgttgccgcgatgttaatcctcgtcgaaaggcgccctgtaactgttgggtgaagcttttccctggggcaccattgggcctccaagttcaggaagtgtgcttgtcaaggttgttcctacgtgcaaccttcctggtggctgcctaatgtgccccccccatgggagcaccttggtttcatgggtcaggtgattatcctgacccttcccggccctattagtctccggcttattgcccctgtattggattgccaacacggctcacaattgcaagcaagtttgctgagctgaaggtaaagattgatcgcccttctggtataaaagctggaagatggccccttaattcttgaagtctggtgatgctgcccattgttgataatggttcctggcaagcccctagtgttttgagagctttctccagactatacccacctcttgggtcgctttgctcgttcgtggataatggagaccagaccagtttcggtgggtgtccatccaaagccagatggaccaagaaggctgctgggaactggccaaggtccacccaagtcttgccccaggaaagactccagaaggcgtaaaatggaattatttatccccttaataacctgccacccccacacttcttaatcacgtggtggaagaacggtttcacgaactgtttgtttcacattggccactttaagtttagtagtataaagactggttaatgataaccatgcactcgtaaaccttcagaaggaaaggagaatgttttgtggaccacctttggttttcttttttgcgtgtggcacgttttaagttattagttttttaaatcacgtactttttaatgggaacacaacttgagcccaaaatttgtcacagaattttgagaccccatttaaaaagttaaatgaga

SEQ ID NO: 517619 - DNA, 142 bp, Homo sapiens
caagagatggtccaacatttaaaatagcgaataatatcttagacccatccaaaaacaatccttcttaaaggtttatgaacttaataacagagcctcaaaatacatgaggaactcatagaactccaaggagaaacagacacat

SEQ ID NO: 517620 - DNA, 409 bp, Homo sapiens
gttcaacaccttccaatattaaagagcttggtatttcatcttgttcccaccgaaataaagtatcaccaagagaattacctgataaatgattcttgcacgatccagttgcatgcactgtattacttttccttcttgcttttctgaacttgaccgcatccaaatttattaaattcctgccatacagattgaagttcttgaagagctgtatgaggtcgggaatatgcgcttcatgaggctgctaaaatgtattcatggtgcctcccctttgcaaacgttcacatatccttttcaccatagccggatcgcaaagatggatcttcttaaccgcctttccttgttatgacaaccaggggaaggcattcctggtcctgatgaccctttgaacacatgcttagccgtggaccatgga

SEQ ID NO: 517621 - DNA, 859 bp, Homo sapiens
gcccaagggatggcgatggcgtacttggcttggagactggcgcgggtcgtgtccgagttctctgcaggtcactagtttcccggtagttcagctgcacatgaatagaatagcaatgagagccagtcagaaggactttgacaacattcaataaatcaagtgaaactcttgaaaaacggatccaggaaaccgaagtgaagctaaaaatctctacgcgctatataagcaggccacttgaaggacctgtgtaacatgcccaaaccaggtgtatttgacctgtgatcaacaaggccaaatgggcacgcatggaattgcccttggaggccgtgcccaaggaaagcttgccaggcagaacctatgtggattgtggtgtccagtttgagtccttcatgtgaaaattcctctaagtacaggttggagcctgaaaccagacaggaacatcaactgggtttggaaacttcttggtggtgacctccggaaggatggccttcacaaagatcatgtcaaccggcccaaaaaagaaattgcctataaaacacttgagaatgttttcatggaaattatggcgtgcactttaacagcttggccacgcaaggattgacttccaagttccatcacgttgttttacaccaaggacattggttggcctatcaccacgcacggtggggactgactcctggactaaactttcgttgatttttccccctggggaagtcgacgagaacaagtaaaaataatgccgtactgggcggaataggggggcgttatagattcctaggctctgatggcgggccatggccagggtggcctctcgaccctcctgggtaacggcgggtgctctaccggccattctaccctaggc

SEQ ID NO: 517622 - DNA, 373 bp, Homo sapiens
  misc_feature (43)..(43): n is a, c, g, or t
ttcccagaactgatcaaagtagcttactatatttaaactgtanaacaatatagtttctcctgaacacctgctttccttctgggagtctggaattttggtatgtgccaggcagagactacctttgtgaccagctcccagtaaaaaccccaggcactcagtctctaacaagcttttctggttgacagtgtttcacaagtgctgttacaactggttgctgggagaattaagctcatcttctggattccgcggcggaggattgttggaagcttgcccgttgagtttcccctgagttcaccccatgtgttttctttcgtttgcggattttgtgttgtatcctttcgctgtaatatatacaaggccgctagcaaggagg

SEQ ID NO: 517623 - DNA, 180 bp, Homo sapiens
ccacctaaccaagaaggccacaaggccataggagctcctggaccaacttgctggcagtaacgactttgccagcaatcaagcatcaatggtacttatccggttctctaacttcctgtctgtaaagccattggttaaaggcttcccatacagtatttccagtttaatcaacttctctgtctg

SEQ ID NO: 517624 - DNA, 150 bp, Homo sapiens
  misc_feature (92)..(92): n is a, c, g, or t
  misc_feature (110)..(110): n is a, c, g, or t
  misc_feature (129)..(129): n is a, c, g, or t
  misc_feature (141)..(141): n is a, c, g, or t
tagtggaagttacatctccattgcaggaccctactgctatcattccacaggataaagctgtgacacctgacacctccatgctggactgtgantctcccatcacagggagnaggagtgttaggacatctncacgatgtgagncagtataag

SEQ ID NO: 517625 - DNA, 149 bp, Homo sapiens
gcctagaggatcccagaggggtgtaagcagtaatatcatggaattggcaggtgtggaaagcaggaaaagtggatacaagttcgggggagggggttcaacccatgaatatctgcatgcgaggccgaggacaggaccctcctctgtgctgt

SEQ ID NO: 517626 - DNA, 1229 bp, Homo sapiens
  misc_feature (61)..(61): n is a, c, g, or t
  misc_feature (63)..(63): n is a, c, g, or t
  misc_feature (334)..(334): n is a, c, g, or t
  misc_feature (340)..(341): n is a, c, g, or t
  misc_feature (353)..(353): n is a, c, g, or t
  misc_feature (356)..(356): n is a, c, g, or t
  misc_feature (369)..(369): n is a, c, g, or t
  misc_feature (372)..(372): n is a, c, g, or t
  misc_feature (428)..(428): n is a, c, g, or t
  misc_feature (493)..(493): n is a, c, g, or t
  misc_feature (498)..(498): n is a, c, g, or t
  misc_feature (502)..(502): n is a, c, g, or t
  misc_feature (529)..(529): n is a, c, g, or t
  misc_feature (556)..(556): n is a, c, g, or t
ggccttcgcctcctgacaggaaacggtttaacgggggacacgagccctgggaggccgggcngngctcgggggccaccccgggggcccgggccatggatgtgcgccgtctgaaggtgaacgaacttcgcgaggagctgcagcgccgcggcctggacactcgaggcctcaaggccgagcttgctgagcggctgcaggcggcgttggaggccgagggagcctgacgacgagcgggagctcgacgccgacgacgaaccggggcgacccgggcacatcaacgaggaggtcgagaccgaggggggctccgagctggaggggaccgctgcagccacctgcngcccgnngctgcagctgcnacngcggagccctggnggntactcggggccggacggacattatgccatggacaatattaccaaggcagaaccaanttctacgatacccaagtcatcaaacaagaaaacgagtcaggctacgagaggagaccacttggaantggangcangcagcaggcctatcgtccagaaatganagacagagatgaagcaaggagcacccnaccagcttcctcccgccctgaagcttctcaactcaagccagacagggcagcaattccagagtcgcaaagaggcctttatgaagaaaacccggggacggggggtactttgacgcacccgagaggatcggaggggccggtctcctctgcgctctgctcgcccaggatgaagatgactttgactgataaccatggtagacatatcgacacctataactgcgaacgttcacttcacggatggaccgagatcgcgagtaaatggctatccggtccactgatcgacgtgctttgcagtaccttgctaggaacacggagagccccgttgtccaagcgtaagcgaggtccagaacgggcggcgtgtatagcattcgagacttgaaaaatcagttataggaagtcaaccggagaacagcaccttcgggatacagtgagcttagggccccaattgagatacacgcaggcggacgactgggacccataggaggcacttaacgttgccccacacggtgaaattacaaaaaaaagcccatagaaagcaaccacgcggcgaatttcaacgaggacttaagggagaaaacgtcacacaggggcacccagagtctgggaccgacaccggcgacgacattacgacaaaaagaaatcaggattagaggatcggtagacgaattagaaaacg

SEQ ID NO: 517627 - DNA, 161 bp, Homo sapiens
ctggtaggggcggtggaccagcgcatcaggagcgggatgcaccgagttctaaagacctttcgcccttggcccttcttgtccggcctccaggggcacagatctccacccagtgtgtaccaccccttcccaacaaatccctcagcgagattctagcagagggg

SEQ ID NO: 517628 - DNA, 1111 bp, Homo sapiens
  misc_feature (61)..(61): n is a, c, g, or t
  misc_feature (63)..(63): n is a, c, g, or t
  misc_feature (310)..(310): n is a, c, g, or t
  misc_feature (375)..(375): n is a, c, g, or t
  misc_feature (380)..(380): n is a, c, g, or t
  misc_feature (384)..(384): n is a, c, g, or t
  misc_feature (411)..(411): n is a, c, g, or t
  misc_feature (438)..(438): n is a, c, g, or t
ggccttcgcctcctgacaggaaacggtttaacgggggacacgagccctgggaggccgggcngngctcgggggccaccccgggggcccgggccatggatgtgcgccgtctgaaggtgaacgaacttcgcgaggagctgcagcgccgcggcctggacactcgaggcctcaaggccgagcttgctgagcggctgcaggcggcgttggaggccgagggagcctgacgacgagcgggagctcgacgccgacgacgaaccggggcgacccgggcacatcaacatgccatggacaatattaccaaggcagaaccaanttctacgatacccaagtcatcaaacaagaaaacgagtcaggctacgagaggagaccacttggaantggangcangcagcaggcctatcgtccagaaatganagacagagatgaagcaaggagcacccnaccagcttcctcccgccctgaagcttctcaactcaagccagacagggcagcaattccagagtcgcaaagaggcctttatgaagaaaacccggggacggggggtactttgacgcacccgagaggatcggaggggccggtctcctctgcgctctgctcgcccaggatgaagatgactttgactgataaccatggtagacatatcgacacctataactgcgaacgttcacttcacggatggaccgagatcgcgagtaaatggctatccggtccactgatcgacgtgctttgcagtaccttgctaggaacacggagagccccgttgtccaagcgtaagcgaggtccagaacgggcggcgtgtatagcattcgagacttgaaaaatcagttataggaagtcaaccggagaacagcaccttcgggatacagtgagcttagggccccaattgagatacacgcaggcggacgactgggacccataggaggcacttaacgttgccccacacggtgaaattacaaaaaaaagcccatagaaagcaaccacgcggcgaatttcaacgaggacttaagggagaaaacgtcacacaggggcacccagagtctgggaccgacaccggcgacgacattacgacaaaaagaaatcaggattagaggatcggtagacgaattagaaaacg

SEQ ID NO: 517629 - DNA, 106 bp, Homo sapiens
cggggagtatcgctgagcctcacttattacactttcatgatctaaaacttcaatatcacgggtggtagaagtacctgatggaaaggtactaacaggaggagaaggt

SEQ ID NO: 517630 - DNA, 686 bp, Homo sapiens
  misc_feature (61)..(61): n is a, c, g, or t
  misc_feature (63)..(63): n is a, c, g, or t
  misc_feature (310)..(310): n is a, c, g, or t
ggccttcgcctcctgacaggaaacggtttaacgggggacacgagccctgggaggccgggcngngctcgggggccaccccgggggcccgggccatggatgtgcgccgtctgaaggtgaacgaacttcgcgaggagctgcagcgccgcggcctggacactcgaggcctcaaggccgagcttgctgagcggctgcaggcggcgttggaggccgagggagcctgacgacgagcgggagctcgacgccgacgacgaaccggggcgacccgggcacatcaactgatggagtgcctgatgttacatgccatgccacncctacaaccatgggatggttacatgccatgggctacagcagccccactcgcctccacctccaccaccaccgtgcctacgaactatgggagctactggcggttacaacaccggccccctataccccaccgccaccccccaccgcacagaacctaaccctcagacccagctacaaccacgacactcagcacccctgcccagcacagagaaccagacaaacagacccggccccgcacgcaccgcacataccaccggcaactacgaaccacgaggacacacacctaggagacacaaacgaaagcaccacaagataaccaagaagccaccgccgaccccaaaggaaccacagagagcccaagcaacacacacgacacagca

SEQ ID NO: 517631 - DNA, 402 bp, Homo sapiens
  misc_feature (2)..(2): n is a, c, g, or t
anatgcatccccaacacttctgagagagttatgtttttattatccagtttttaaggataaaacatagtataaatggaatggtgcatgtaaaagcatttgtattattatatcacgaggcccaatatcatagaatacataaatgctagagccacttgtgatttttggtatttacaaaggctgataggcaggtggatttcagcatccctgccaacaaggtgggatctgaggctgccagggtgggaaccactcgtcaaggagaacattccctgtgtctaccagcaaagatccaggccaactgctggctgaagagagagcaaaaagaaacaggctatgaagggcttctgctcttacaaccctataaggagtatatattttacactggaaaatctgatccttagagca

SEQ ID NO: 517632 - DNA, 294 bp, Homo sapiens
tctgagaatcgacgcaccacttgaatgcggtagtagttaggataatataaatgttaacttacgaatggttattttagggttgcactgtacaactgctattattcatcctatgtgggtcattcacgagtatgctaagattttgcgtagctcggtttggttaaatccacctcaactgccctctatgatgtactaacacttgagagagtgaggagaaggcttacgttaagctgagggagagatttggtatatcattgatatgggggctacattcagtcatgctgagaagaaccaggc

SEQ ID NO: 517633 - DNA, 775 bp, Homo sapiens
  misc_feature (551)..(551): n is a, c, g, or t
  misc_feature (765)..(766): n is a, c, g, or t
  misc_feature (775)..(775): n is a, c, g, or t
gggaccacttaattgttaaattcggtgtccgatagggactacagaaaaggttttcctcatgataaaccatttgcaggctctgaattaaaaatctcatgtaaggaatgtttcataataaaaaaaggatcttgccctataccttatgcataatgaattaactaataataccttttgtgggcggtttcggcgataatacttttgaatccagacaagttatttatgagcacctaattgagccctccttggcctattcccccttttggggatgatttttaaattgaggggccaacctttccaaacctggtgattggtaaaacccctggtttgaccatttttatagctttgaatgtgctccccctttcctcaaattgccttaataaaaagaacccctgacccatagaccttcccatcttttgacactcctaaatagccttttgaaaattgtaacctttttttttcccttaaattgccttaaaacttttcctaattaagattgttttttaacccaacagccgctacctggaaaatccctttttaattaaaaaaaatanccctcgttaaggttgggccgttttaccatttggaacaagaagcccttttttagaaccgggtctccacctactagggcaaaaaacctttattagggggatggccactacctggaccctttcttaaaaaattttttgggggaaaggggcctaaacactaaattggctccctaaggacccccttttttaaggtggaggggaaaacgggccccccggnngcgtggccn

SEQ ID NO: 517634 - DNA, 99 bp, Homo sapiens
agcgcgtccaggtgggaggttagtgttggcccggggcgtcccgctcctcaagcgatgtgggcagccccgagccatgctctcgccgtcccgagtcgttta

SEQ ID NO: 517635 - DNA, 282 bp, Homo sapiens
tctagacggatcccttaacggtaatttttgtattttacgtagaaataggtttcaccatgttggccaaaccggtctcctgacttcaagtgatctgcctgcctgggcttcccaaagtgctgggattacaggtgtgattcatcattcctggccagttcccagactttataggtggggaaggtgagctttagaaaggagaaatcctgtgtcttaatttgaattctcctgagaacaaggacttgggtgcaggtagtttattttggagagtgatcctaggaagtgggc

SEQ ID NO: 517636 - DNA, 151 bp, Homo sapiens
gagatcactcttcactatggaacaaggaggcacataagctagcttcagtatatggacacttagactaaatggcccccaaaatgcccatgacttaagcaatcttactgccttactgcgcttactgcaaaatagcagcacagcagatgaggtg

SEQ ID NO: 517637 - DNA, 132 bp, Homo sapiens
ggccactagaagtatcctccacgaccgaaggttgtcattcccaccgaaaccacctccaacgacaccaacaaagtttccagaaccacttaagagatcttaggctggatgcaagccactagccatctcttgctt

SEQ ID NO: 517638 - DNA, 384 bp, Homo sapiens
ttcggcagacacagcacagcacacatgaggggccctctcctttcaccatatgctgaatggcagtgcacagtttgcgtgatgcgaatgagcctcgatgttactgtgggggttctagaacccagtgacctcagttctggatcatgggaaagggatcagtatgccgtaacgtgtgtaaggttccagatctataagccaggacctataacctagtggtttcacagtgggcatagcagtttggaataagccaggttaggggtgggcgaagacagccagctctgtgctctgcatgcggattccctggagggagatctcagatttagaaaggaagagtaagatctggtccagacaggaccagaaagaccggaaggcatctggactgagact

SEQ ID NO: 517639 - DNA, 852 bp, Homo sapiens
gcacgatgagctcaagtcggcgctgggtatgacctgtcagactctacatgctctcctgacggaacgagtttagcaagttgaatatgctatgaaggctgtggagaaatagtagtacagctatgggaatcagatgcaaagatggtgtgtcgtttggggtagaaaaattagatcctttctagactttatgaatgcaatggtgcctactaaggactttttagtgttgatcggcatgttggaatggcacgtagaaaggtttgttggcagatgcatcagttctttagcagacagtaggcaagagaagaagcttccaagctttgagatctaacttgggctacaagattccactaaaacatcttgcagagcacgagtggccatgtatgtgcgatgcatatacatctctacagtgctggtaagaccttttggcttgcagttgtctattgtataagggtcttacgagtggtgaatgacggttgcgcaactctacatgatttgaccctatcacggtgttatcatacgggttattgcggtgcttgttggcatcgggaaaagccaggcaagcttgcaaagacggaaatagagaagcttcagatgaaaagagatgagctgccgtgatatcgtataagagaagttgcatgaaaatgaataatacatatgtaacagtgatgagagttatggataacgccttgggaaagtagaactcagctgggtggatgaattcacctgactggaagacttgaaattgttccgagaagatgtagcggagaagaaggcgaggaatatgctaaggaagtctctgaaggaagaaggatggaatcagatggtgaataatttgttaacattgattcagggtta

SEQ ID NO: 517640 - DNA, 112 bp, Homo sapiens
tcttcatcatacctaccttcctttttccttcctttccttccttccttctttccttcctttccttccttccttccttctttccttttcttcgtggtaggtatgatgaaggacg

SEQ ID NO: 517641 - DNA, 339 bp, Homo sapiens
taaaaatacaaaaaaaacaaaaaaattaaccaggtgagtagctgggattgcagggcgcgccaccacacccagctaattttgtatttttggtagagacgggatttctccgtgttggtcaggctggtctcgaactcccgaccacagttgattcgcctgcctgggcctctcagggtcctggaattacaggcttgagccactgtacccggcaacattctgtcttaaaaaaaaaaaacacgggccgggctcagtcgtcacgcctgtcatcccggcactttgggaggccgaggcaggcgaatcacgagacagatcacctgggcaagagagggagactccatctca

SEQ ID NO: 517642 - DNA, 1029 bp, Homo sapiens
  misc_feature (418)..(418): n is a, c, g, or t
  misc_feature (435)..(435): n is a, c, g, or t
  misc_feature (437)..(437): n is a, c, g, or t
  misc_feature (501)..(501): n is a, c, g, or t
  misc_feature (515)..(515): n is a, c, g, or t
  misc_feature (534)..(534): n is a, c, g, or t
  misc_feature (556)..(556): n is a, c, g, or t
  misc_feature (689)..(689): n is a, c, g, or t
cagaggctgaaatctagaacttcatcccgggcaatgaggttctcacagaaggtgcagttttataactaactacgtccacttatatatattcacactctacatatatatatatatatatatatatatatatatatatatatatacacaaatgcacagtccccctcccactccgttacctaactgtacgtcttttcatgtttataaactatacagaaaactgtatttgctgaactaaggattgtattggtgatttctagcaaaaacaaagtgatagaatttttgtctagaatcccaaactggcaacgatagtctccaagggacctggccttgccaagggcctggggcaaggtgtcggcgggacggtgaggaagggggaggcagcaagagtcactttgggggaccaatattcttagatatntagagcatcaccttgtntntatatgcaacacaagcctgtctgccaccctggagcgccctgtcacccctgctgtcgtagctgtnggcttcagggtganaagtgagaagcagcttatngtatatgagggagccaggcccngagggtgagcgagatggcagaaggggcaaggaaggggctccgggatctggaaaccagcaggccaggcagcatccacagtgttagtccaaagggtcggaccgtgtccgtcagcctagcgtttggtcagtgacgngctggacgggccaaggagactccgggcttgagcccaggcctcccgcacggctcagctgctgaatttttccttgacggcctgttggtgtgtgacccagcaaagggccctgtgtgggacagcaggagggaggcgtcgggggccttagcacaaggggaacaattgaagggcatctcatgaaccatctccacgcacttgctggcattaacggaaccacctggccctcccagcgaaccagggcactgcctcaggcgcgcacggcacacgacccggacaggccgccaccccacgggcaaaacccccgaccgggacagacaaccgcaccgcaaacgcggcctcaccc

SEQ ID NO: 517643 - DNA, 106 bp, Homo sapiens
gacttcgctattcatcggcacctcgctattcatcggcactgggtggtgatccactggatcaggatctgctccagtggatcaccacccaggtgccgatgaatagcga

SEQ ID NO: 517644 - DNA, 898 bp, Homo sapiens
  misc_feature (9)..(9): n is a, c, g, or t
  misc_feature (23)..(23): n is a, c, g, or t
  misc_feature (28)..(28): n is a, c, g, or t
  misc_feature (36)..(36): n is a, c, g, or t
  misc_feature (83)..(87): n is a, c, g, or t
  misc_feature (89)..(89): n is a, c, g, or t
  misc_feature (91)..(91): n is a, c, g, or t
  misc_feature (93)..(93): n is a, c, g, or t
  misc_feature (99)..(99): n is a, c, g, or t
  misc_feature (172)..(172): n is a, c, g, or t
  misc_feature (183)..(185): n is a, c, g, or t
  misc_feature (193)..(193): n is a, c, g, or t
  misc_feature (198)..(198): n is a, c, g, or t
  misc_feature (215)..(215): n is a, c, g, or t
  misc_feature (218)..(218): n is a, c, g, or t
  misc_feature (228)..(228): n is a, c, g, or t
  misc_feature (230)..(230): n is a, c, g, or t
  misc_feature (234)..(234): n is a, c, g, or t
  misc_feature (236)..(236): n is a, c, g, or t
  misc_feature (241)..(241): n is a, c, g, or t
  misc_feature (273)..(273): n is a, c, g, or t
  misc_feature (279)..(279): n is a, c, g, or t
  misc_feature (299)..(299): n is a, c, g, or t
  misc_feature (315)..(315): n is a, c, g, or t
  misc_feature (343)..(343): n is a, c, g, or t
  misc_feature (348)..(348): n is a, c, g, or t
  misc_feature (379)..(379): n is a, c, g, or t
  misc_feature (384)..(384): n is a, c, g, or t
  misc_feature (387)..(387): n is a, c, g, or t
  misc_feature (393)..(393): n is a, c, g, or t
  misc_feature (442)..(442): n is a, c, g, or t
  misc_feature (450)..(450): n is a, c, g, or t
  misc_feature (519)..(519): n is a, c, g, or t
  misc_feature (670)..(670): n is a, c, g, or t
  misc_feature (673)..(674): n is a, c, g, or t
  misc_feature (679)..(679): n is a, c, g, or t
  misc_feature (681)..(682): n is a, c, g, or t
  misc_feature (685)..(685): n is a, c, g, or t
  misc_feature (687)..(689): n is a, c, g, or t
  misc_feature (693)..(693): n is a, c, g, or t
  misc_feature (695)..(695): n is a, c, g, or t
  misc_feature (717)..(717): n is a, c, g, or t
  misc_feature (732)..(732): n is a, c, g, or t
  misc_feature (736)..(736): n is a, c, g, or t
  misc_feature (743)..(743): n is a, c, g, or t
  misc_feature (751)..(751): n is a, c, g, or t
  misc_feature (755)..(756): n is a, c, g, or t
  misc_feature (888)..(888): n is a, c, g, or t
gagggggcnacctagctgactcngcggnccaggganacccccgcccccccccggtgtgaggcggccacacagggccgggtggnnnnncnancngacgcngcggcggaggaggctgtgaggagtgtgtggaacaggacccgggacagaggaaccatggctccagcagaacctnagcaccttatnnnctgttgcngcaanacctcatcggggcgganatngccggacgananttcnanaaaancttgggaggtgcctcgaagtgcctctataaangatatnaaaaaggcctaaaggaaacnagccctgcagcttcancccgaccggaaccctgatgatccacaancccangagaaattccaggatctgggtgctgcttaanaggtnctntcaganagtgagaaacggaaacaaaacgaaacttaaggggaagaaggattaaaanagggtcancagagctcccatggagacattttttcacacttctttggggattttggtttcatatttggaggaaccccncgtcagcaagacagaaatattccaagaggaagtgatattattgtagatctagaagtcactttggaagaagtatatgcaggaaattttgtggaagtagttagaaacaaacctgtggcaaggcaggctcctggcaaacggaagtgcaattgtnggnnagagntnnggntnnnccancngggccctgggcgcttccaaatnacccaggaggtggtntgcnacgaatncctaatgncaannagtgaatgaagaacgaacgctggaagtagaaatagagcctggggtgagagacggcatggagtaccctttattggagaagggagctcacgtggatggggagcttgagattacggttcgaatcaaagtgtcaanaccaatattt

SEQ ID NO: 517645 - DNA, 293 bp, Homo sapiens
tctaattcgacctctctttcccctatgtgaacccgttcttacctataaaacacgatctaagtaccttaaaagattcacaggtcctcaaaaccaaaattcgtggccgttctcgagggaaacctttaaagtcacaccggtttactaatagttcgtaacgtcgtagagacggtcggagggtgggaatctttccaccgtctcactctcaaatttatgggaacctttacacaaagtagagtcattataaaggtgacccataggtactgtatgtcataccagacggtcccgacgtccgt

SEQ ID NO: 517646 - DNA, 308 bp, Homo sapiens
tgaatttaattgacacgaattttgtatataataaatgtcagtgatgacgaatggctttctagcaatatgtagatttttggcaatatagtgtggcttaaaaaaaaaagtttggtcacgcctgtaatcccagcactttaggaggcaaggcaggcagatcatgaggtcaggagatggagaccatcctggctaacacagtgaaaccccgtctctactaaaaatacaaaaaattagccgggcatgggtggcgggggcctgtagtcccagctactcaggaggctgaggcaggggcatggtgagacagcatatta

SEQ ID NO: 517647 - DNA, 472 bp, Homo sapiens
gcgtcgcccacgcgtccgcatctccaggtgtgagctcatctctttccccaccacaggtggccccacccgatctcagctctgcctttcccgcctctctgctgggttgcataagccagcgattcccaaccccggctgtacctggaagctaccccaggagcttctggagaatgtgccgtgtgagccatccccctgcactgagccctggtgggtcagcggtgggggcgcccaggcgtgggggtctatttaaagctcccaggtgctgtgcggccaagattaagaggcactgctccaaactgtcctggcaactctgactgtacccggcactccccacgcccaagctcccttctgcccctgggcaggttggcatccagtgtcggggagaaccctggaggcgaacgccagccttatagagccccactgttgggaggcctgcaggttggacaaggcgaggtctgagtcaccttggttggga

SEQ ID NO: 517648 - DNA, 741 bp, Homo sapiens
ctagatcgcgagcggcgcccttttttattttttttgggtctggtttggctttaggccctactggtgcctcgggggggggatggattttggtatagtcaactcttaaaatcattttaaactagaagagaaatatttccccgagaatcacaaattaacatcgctccagtgcagggtggggttgccgggctccgagtgggacaccgaagaggaaaagccggtgctgtgtcctagaaagagtattacagatggtcacacttcttttatagtgttttattgtgccgcgacaactattacaggcgagttaggacgtgctcgtggtgaggacgtatgaggaggactcctgtgaggggtgtgtgcgcgataggtggctaaagtgggtggatggggggtatgggtggaatagttgtggcgggataaactgtggttatattttcctgtggtgttttataatatatatatattctgtggcgcagtgtgggtgtggcaaaggtggtggtggtgagacagtggatatgtgttgtgtgataagtgggtggggaataatccggaaatgtcgggaattggatccctgggagcgacgtggcgggacgggacaacaggggcaaagagggcacggacaccacgcgcgacgagggcgcatacggagcggccagagatggcgacaacgcgacgctgggggggaagaacgggacacacggacagagggcgatgagcgggggcggccatggtgggtaactcaaa

SEQ ID NO: 517649 - DNA, 140 bp, Homo sapiens
atgccccctaaaacacatgattctccctaaaatgtccaatgtgggacttgtgccatatgaggccttcggttaacgaacggcgatgcttcactccactgaagagggcgagacacacactcgtctaaaggcacctgaaatat

SEQ ID NO: 517650 - DNA, 275 bp, Homo sapiens
cacatcttggcctgtctccatcaagtggattttagcctgggaggcagtgcagtctggattggggtcagggaatgactctgggcttgaatcctaaaggatctccagtagaaaatcacatctatacaaataatggcccctgaaaatatgttgatattattgggcctttgaatgccttcagtgtggtctattattttatgagcagcatttgccacaactcgttctacccccgtgaggtccaaacttttcattgtgcatacaaagccacttatagccga

SEQ ID NO: 517651 - DNA, 940 bp, Homo sapiens
gtcggtggatctgccattctgaggatgatgtacctcttctcacagctccactaggcagtgcccctgtagagaccgtgtgggggctcgaccccacatttcccttccacactgtgctagctgaggttctccatgagggccctgcccgtgcagaaaccttttgcctgggcatccaggcatttccatacatgttctgaaatctaggcggaggttcccaagcctcaattgttgacttctgtgcaccctgaggctcaacaccacatggaagttgccaaggcttggggcttccactctctgaagccacagcccaagctgtaccttggcccctttcagccatggttggttggggcgactgggacacagggtaccaagtctctcagctgcacacagcacgggaaccctggacctggcccacgaaatcactttttcttcctgggcctccgggcctgtgatgggaggggcttctctccatgtctctgacatggcctggagatattttcaccatggtcttgaggattaacattaggctccttgctacttatgcaaagttctgcagccagcttgaatttctcagaagaaaatgagtttttcttttctatcacatagtcaggctacacattttccaaacttttatgcttactttccttataaaacctgaatgcctttgacaggcacccaagtcacctcttgaatgctttgctgcttagaaatttctttcctccagatactctaaatcatctctctcaagttccaagtcccacaatctgtagggcacgggcaaaatgctggcagtctcttgctaaaacataacaagagtcacctttactccagctcccaagttcctcatctccatatgagacaggctcagcctggaccttattgtccatattcctaatcagcatttgggcaaagccttcaacatgttctctcagggaaattcgca

SEQ ID NO: 517652 - DNA, 248 bp, Homo sapiens
cggcctaatttttgtatttttagtagagacggggtttcaccgtcttggtcaggctggtctcaaactcctgagttcataatccacccaccttggcctcccaaagtgctgggattacaggagtaacttttaaacaactagagaattgtaaatcactcctgaaaatattgggttactacctagtggagtgagcaagtatgaggaccatctccttcaatcatagagaaaattcaagatgggtttctgtgacc

SEQ ID NO: 517653 - DNA, 123 bp, Homo sapiens
ggttcccgctggattaatgtggtctccccagaattggctgtggcggcctgggcatagatgaggaagtgcgcccaccaatgaatagccccctgagcggggtcagccagtgatgggaagcaggtc

SEQ ID NO: 517654 - DNA, 239 bp, Homo sapiens
tagggcaagtccttcatcttattctgggtccttgtgttttctttctgaacctacaatttctccataggtcccatggttttcaaaaattctcattttccattttctgtccttttatattacctacttgaaaaccacagtcatctttcaaaacaaaaccatgtcttaattttaggattttattggggcttgttattcctaaatacaaatttacaataaataataacaattaagacatggaa

SEQ ID NO: 517655 - DNA, 273 bp, Homo sapiens
  misc_feature (82)..(82): n is a, c, g, or t
  misc_feature (111)..(111): n is a, c, g, or t
  misc_feature (120)..(120): n is a, c, g, or t
  misc_feature (145)..(145): n is a, c, g, or t
  misc_feature (150)..(150): n is a, c, g, or t
  misc_feature (154)..(154): n is a, c, g, or t
  misc_feature (158)..(158): n is a, c, g, or t
  misc_feature (176)..(176): n is a, c, g, or t
  misc_feature (182)..(182): n is a, c, g, or t
  misc_feature (261)..(263): n is a, c, g, or t
atggtgccatgtcatgttatagcattccctgctacagtgctttatacacagtgtgtgcggccagtgatcttttgatgacatnaagagttgtggttcatctggctagcaaantggctgganacaaaatcctgtgggttccacaacntcgtnttanacanacagagattttgcatganaattanggcatattaacaataatgctttacattatgaccttctttgtccaattcatctggcacattgctgccaggtaataaaatnnnctcatatcag

SEQ ID NO: 517656 - DNA, 313 bp, Homo sapiens
gcatgtattattttgataaaaatttaaaacaacccgtcttcctaaatatccttacaagagggagtgaaggtggggaatggtggttcatgcctgtaatccctgcactttgggaggttgaggcagggttcaagaccagtctgggcaacatgtcgaaaccccatccctacaaaagattagccaggcacgtgcctatagtcccagctactcaggaggctaaagtgtgaggatcacctgagcccaggaagtaaaggctgcagtgagctgtgatcatgctactgcactacagcctgggcaacagagtgagatgctgtca

SEQ ID NO: 517657 - DNA, 310 bp, Homo sapiens
ctctacaggatccccgacggatctgatcgcacttttttgtgtctgttttaggccggtaaaatcaaggcgaccccagaaaatggctcctcccccaaaggaggtagaagaagacagtgaagataagaaatgtcagactataggaggattatgcagcggagaagaggtctcagtgccgagttgtcttatactatcaaatggaggatgggaggagttggtcttgactatctgaaacttctggcaggtctcgggttatattcataacgtgtactgttgtaaaggttgagtgtttcccaaactttttattgacctg

SEQ ID NO: 517658 - DNA, 1060 bp, Homo sapiens
atgaatattctctacgatgttgtacatgaaggccctcaaccgtcgtggtgaaccacgagacagcgctgtgaagtaggcttcggagatgaccaggatcatgaacttgctatggcacactagagtccccgtcatcccgacgaacttgctgaccactatccgtcagtgtagtgatcgtgtgatgcacatgcagtgcccgaatctaagtcggatggactgtatgtgcccagtacttcgttttcctcattagtcgctggctcgacagtgatatgcgaccgttagccttgtgagctagtccctcacgcaatgcgtctgacaagaaagaagtccttgaaaaacacaaaaataggaggcctcagtggagtcactagtggtggcagtttggctatgagaatgcatgccggggaacttaggatgatcactgggagggaccccattcgtgtgatcttgtcaaactatggggatagagtatgagaaggatgggctttgagaatggctgtattgtgtgcgtatgcatgccacaacaggatagtatttcacggtaagtgctgatgataaatgcttagtagaaaggaatgctgactttgagaatgatgcaacgtgaaaaaagccaagactaacaaagtctgaatactggataagtgatctagtccattgaatacatatggtgggatgaggtaggagtggcaggacggtgcgggacgtccagagtgagtccgtgacactgattggtgtggcacgtgcatgctaaccactgtctgtggcaggacgacgaggtgtggcatactcccgtgatgcatgtcaatggtaaattaactagatgacatgttgggtagatggaagatattgcgtaatggtatgacatgttgtcgcagagaggcgaagggtttccctagggaggcgtgatagcaagatgatgtctacaccactgtgcaggggacacgcaagtagtaaatgcaaagtttctgggcggagtgaacaaggtggagaagaaaataataatgggggacaaaaccgaagggtgtttgaaattgtccaaaataagggttagaaaaaagacgaa

SEQ ID NO: 517659 - DNA, 439 bp, Homo sapiens
aagcgacctgcgtctcccaactcctgggaacttctattctactctccatctgtgtgaatctgcccatactaggcgcttcatataagtagaaattgtacaatatatgtccttttgtgtctggtttatttcatcttgcatgtaatcaaggttaatcaatatagtagcatgtatcagaatttccattcccttttaaggctgaatacatcttcaattgtatatctataccacagctttaaatttttattaggttataagcatggatgtgatatggcacctaataacactaataaaggtacacatctccaagcaaacagcaatcagttcctatttcggatatattctcccacatatcatcttcacttagcttatttcccattttgcttaaaggataatttgtttctgtaataatggaaggtgacatgtcctcccctcacgggta

SEQ ID NO: 517660 - DNA, 424 bp, Homo sapiens
gtcagcccccttttttctccaccggtgcctaaaggggaagagggcaccctaccgtcgggggtttttccttcccctccccccaagcttttctctctcaggaggggccccagggggggtccacacagccgcctgggggccctctgtggggaagaggggggggccccccccctgcaccctcaaaggggggttagattgggggacgctgggggtgggttcttccagcggggggggcctctttttgggcccgaagggggaatttttttgggggaggtttaagacccattatcccccagggttttttggggccggttggtttattggcacctttaaacatttcccccccccattggaaggggggggttcgcccaccgggtacagttttttccccggttttgtgtccggcaagggaaaaaacaacacaaag

SEQ ID NO: 517661 - DNA, 340 bp, Homo sapiens
  misc_feature (4)..(4): n is a, c, g, or t
  misc_feature (65)..(65): n is a, c, g, or t
  misc_feature (329)..(329): n is a, c, g, or t
aaanaaaacgtgtatcatatgtagtctcttatcaagattgcactaatgtaatctttaagcttggnagtgcttagaactacacacaactttcggtaataattactattatgttgctctgcgctcactgtttttggccagataaatgccaggtccacccccattcagtagaattggacaggaccaatgtatttggtgggtctcacttaagatttccagcgccagggagcagcaagaaatgttacaaattttgtggcattaagcctgtctcccgaagtacaggtctctcgatcgaccttctgatgcaatctgtgtataacaccaaactagtnctaaggttctg

SEQ ID NO: 517662 - DNA, 116 bp, Homo sapiens
caggagtatcaatcacctgagctcagccatagtctaatagcaaacaaccgaaaccaataattcaagcactgacttattacaatttactgcatctctatttgacccaccacaaggca

SEQ ID NO: 517663 - DNA, 1167 bp, Homo sapiens
gggcggatcacaagttcaggagatcgagaccatcctggccaacatggtgaaaccccagctctactaaaaatacaaaaattagctggacgtggtggcatatgcccgtaatcctagctactcagaaggctgaggcaggagaatcacttgaaccagtgagtcagaggttgcagtgagccgggatcgtgccactgcactccagcctggtgacagagagagactccgtctcaaaaaaaaaaaaaaaaaaatatacaaaacacaaacaatattaagctggggtgtgtgggtggggtggcagcgcctgtaaccctttaagctatatgcaggaggttgagaagagggagagaatgtccgtgtagaaccaccaggggaggcgacaagaggggtcaccaggtgagacgccggaaagactcgggagcacaccgggaaccttcatagacctgggggacaaacagggatgtcagagagaatcacagtcgtcgagaaaacagacaaagccgaaacaaagaagacaagacaagcccacatataataccaaaaagagcattagggagaactctaggaacgggggcacgacacacctcctgctacgggcgaaactctacgaggcggggaacaacagctcctactgcaaagcgtcggtggggcaacaaacggggggaagtctgtaacactgcacgaagaccagagtttacggcgttgaagagtgaaatagtaggagaaacccccacctgaggtgggtggggttaaccaaagccaacaacggacgaaccgagagagaacacaagagccggcacccgccgaaaatagaacagaggggggggaaaacccaaggaaagaagaacaggagaggaagaacaagccaacaaacaacggggaggcagaccgcagccagaccaaatgaaaccacaacaaggtggcggaccgagcagaacaaaagacgaacgtcgagacgcccatgaccggagcagagcaagaaagcccaccacacaccagacaggaagacacatacgcaggcggaccccacacgagaaaagagacgacgacgagagagacaagcaactacacaagcggggggggaggagacaactaatcagacggagagaggagaggtgagaacgagaaacgaaaacacgcgtggaacgatggagggagaaagacaccccgaga

SEQ ID NO: 517664 - DNA, 1035 bp, Homo sapiens
caacaaatgggtgttaatcgacgagaaaggcgctcgtacttagcggaagagattgactcccactctcagcgcgacgggttgttttatccaacgacagttggtgctgtggactgttactgatccgcgcttgttgtctggtcgtcccagcaaagctgcgtcgcctattgtgacttcaggaggcgagagtcgtgcgtgatgtcagaactacgcccccgtgcgtggcctatggacaactcctgtgtggcgtcgcggcctcccgcaccacaccatcggtgtgggcagttactctggaagaggcgcggcagacttgtattgagttggtcctgaaaggcgaagagtaggtattttcttctcccctcccgccagcaactgacgatcaccgctggcgagtacatcatgtatctgctatactatcccactatacatcatggctgccccactacttcctccccccgtccttcaacttctatattagtgatctttcgtgttcgccgtcccgcaccctcacgctaataatgtcattacgcgctctccttctctcacttagtcaataaagagctccatctctctcttcctaggtcggtctcgctccccacgcatcaaggagtactgctatatcatacgtaaacaataacagtccgctctcttcttcttctgacaatacaaacaatacaaaatatacaacaagtataacagtagtaagaagaataaacactccctactacttttcgtagtgtcatcattaatttattccacttcgttggctgtgtcattaccgctacagcacccggtcgtattcatactactactccccctcttttctactcagactagcctatttttttcctcgtctcgtaacatctctgtacaagcaccggcacccctccactctattcatatccacccccctctcactactagagaaacaacatataacaatcctttttttttttctagcaaatagaaaacaataaaacagaaaaaaccaaacaacataaaaaacaaataacaaacaaaaaacaaaaaacatcacaa

SEQ ID NO: 517665 - DNA, 208 bp, Homo sapiens
tcacaactggaattcgggaattctgaagtgtagagctgaacagactgagacggactatgcgccgggacgcatcccctctattccaaattcatcctcattgcggactgagagttgaataagtgaatcgtcttttagaatccttcattcacagtggcacttccaaccggtactcatattgtgtataaatcaacgcccagggtttgaaaga

SEQ ID NO: 517666 - DNA, 912 bp, Homo sapiens
ggttgtctgggctcgtgcggcagccgggctcgagagtggacgttccactatggggtcgtccaataagcatcgcggagagaatgaggcgtgccggtgacgtacgtgcggcggcctggtaccttattggtgcacatctgagcatgccgtctgcagggcaccgggaacacgaaaaacacaacgacacctggagtaggcggcagtgtgcggtatcggtggcgaagcgactggatagctggatgccggtgaacgtggggggcgaagcggcggggagtcggggcaggacagcggggccagaaggctgagagtccctgggaagtcagccatggcaacatgcgtctgcgagccgtgggtcagtgcgatagccctccgaggtgtgccgcgtcgaagccggggagaaggcgcggattgaacgggcttacggagggcccggtatgccctaggtcttcccaggaacatttacatgtcgagggccgaatgccttcccttcaattttccaagcattcgggaaggaaggaacgtaagcaagtatttccagagcgcaaccaaggtatgaggcgctttgacaacccccgtttgcgtacgggtttagattgccacatcaaaggaaacgtgaggggctgggggccaccccaaaggagacagggaatgccccccgtcgatgaaaagcgagggccttcgtagttacgtccagtttcataagcccctttatttggggccacttttggccggaacggacgcgcggcaaggcatgtgcaccgcctttggccgcgggaaagaaaaggtattgggggcagacgtattgcccatacagggggaaggcaacagcctggccttagtgctagaaaagcggagccaccaagcgtttggtgtgggaccggtagtaagagagtgacccccattagcgtaacgccg

SEQ ID NO: 517667 - DNA, 314 bp, Homo sapiens
tgactcctcactctacatatgtagttctagtttaccagtaaaatcctacctcctttctccagcctatatgtcaggcatctgccctgtacaatccctacattcccacaaaagtagttgctttctgctgtcctccataagtgatctctacttaataagtatttttttcaaaaagcttactataccttttattttttaaaaaaaacctagaagctactagtcattaatgaaccacggaattggtcccaccaggacaccaatccctactttttcccagctaccctctttggtgtggtcacaggtggcaaaaaaatatt

SEQ ID NO: 517668 - DNA, 224 bp, Homo sapiens
atgacagtgctatttgcattagaaccaggaacagcaagacatactcgccaaggttctcagtgcacgactcgaccgggaagtgcgcctgcaagttgcggaggatgccaccctgattggtggtgtcatcattcgcgccggcgacctggcttatctgatggctcgattcgcgggcaaactcggcgaatctgtgccgatgtattgaagatcattgatgtttgatacgg

SEQ ID NO: 517669 - DNA, 178 bp, Homo sapiens
cccgcggccccccttggacgccagagtttttgcctcaaaactgtctttcctgggcccagcagcatgagggtcccgaggccattgtttccgaagggtatgtgccaggtttgagtggcgagggtgatgctggctgcttttttgaacaaataaaggagcatgccgatttttaaaaaaaaaa

SEQ ID NO: 517670 - DNA, 178 bp, Homo sapiens
tattctaatctctgctatttagctcagttcagttatctgatctgcttggacccctactcattgcattaaaatcaggaaaggaccccaggaagaaagcacaggtcaaagtcggtcttaccttatttgtttctcttctttcatgagttaaatgtttgtgggtcctactttcaggtggagg

SEQ ID NO: 517671 - DNA, 101 bp, Homo sapiens
ttggggggggctttagggaaagctgatggagattacgtatagttacctcctgctccccaactgaccagctgcccttgttatctagggttatgtgattattt

SEQ ID NO: 517672 - DNA, 510 bp, Homo sapiens
  misc_feature (377)..(377): n is a, c, g, or t
  misc_feature (424)..(424): n is a, c, g, or t
  misc_feature (481)..(481): n is a, c, g, or t
atgacgaatgtaccaagtcagcgagcgcagctgtgcgttcatcatttatccgccggcggagttcaccgacaagaccttcaaggagcacctgggggaggagtttttattcgtgcatgaaggccaggttgaggtggatttcatgaacgagcgcgtgctgttggcgcgcggtgatgcgctgcatttcaacgcgcagaaaccccaccggattcgctcggtgggagaggtgcaggcgcagttgctggtggtggtgcacagcgctgaggagtgagactgagcccgacttgaaatgcattcaatgtgggagctggcttgcctgcgatagcggtttatcggtgcccaatctgtcgctgacccaccgccatcgcaggcaagccagntccacattttgctcagcgttctacagggacggacaatgccggattgnccagtgggtgcgtacgcgcggtaaagaacctcagtcacattagagccctcgaacagntccacattcgtaatcaagtcgactgatta

SEQ ID NO: 517673 - DNA, 641 bp, Homo sapiens
ttgactttcgtcccgcgggctcctcccagggtaaaggtcttgaagtctatgcccgtccagacacgacccgtggccgccaccgcgcccggttcagcgcatatgttgctatggggggatcacatggccccgtcggtctgggtgttaagtgctccaagaaggtgaccaccgccatccgtggggccatcatcctgggccagctttccattgtccccgtgggcaaagggtattgggggaacaagattggccagccccccactgtcccttgcaaggtggcaggcccctcgggctctgtgctgggacccctcatccctgcacccaggggccctggcattgtctccgcccctgtgcctaagaagctgctcatgatggctgggatcgatgactgctacccctcagcccgggggtgccctgcccccctgggcaactttgccaaggccccctttgatgccctttttaagacctgcagggacctggccccccgcctttggaaggagggctgttttccccaagtctccctatcaggagttccctggcccccttgtcaagaccccccccagagtttccgtgcagcggactcaggctccagctgtgggtcccacatagggtttttataccagaaaaataaagtgaattaagggtga

SEQ ID NO: 517674 - DNA, 142 bp, Homo sapiens
ctacaggatccccgcgcaggcagtcattatcgtgatagaataatcatgtaagtagtgccctggcggttctcggtgggccgcgtgcccgtcaacagcacttaagcaggctgggaggtgggggatgatactgttctctgcagat

SEQ ID NO: 517675 - DNA, 100 bp, Homo sapiens
tgtgtgaaagtgcaacaagctatacacttagaagtgtatagcttacaacattctaaaaaagaaaaaataaaaaagatacgaatgagacctatgaaatcca

SEQ ID NO: 517676 - DNA, 470 bp, Homo sapiens
cattggaaagcttcatgcccactcacctatggagttgtggaaaaaagtgtatgaaaagctctttccaccaaagagtattaacacgctgaaagatatcaaggacactgcgagagatcctcagtatgctgaaaatgaagtcgatgagatgagaattcagaaggatctggaactggaacagtacaaaagaagttcttccaagtcttggaaacaaatcgagcttgattcttgaacctatttcaattactgtatatttatttcttcttttccaacatacaaataagattataccgtgaattaactattgtggcacatcatgcgacagaaacgttaaactgcacaacttcttaacggacaagccgcatctcctggactagtgcatctccccgtctatcctgaagcttctcaacagcaaaacttattgtacacccccgcgtaactttttttacactacaacaatcctctactacctc

SEQ ID NO: 517677 - DNA, 1242 bp, Homo sapiens
cgcggtggctcacgcctgtaatcccaggactttgggaggccgaggcgggcggatcgacgaggtcaggagatcgagaccgatctccgggtaacagacggtgtaaagcccgtctctacgtacaaaagtagcagaaagagattatgccggggcgtacgctggcgggggcgcctgtagtgcccaggctacttgggacggctgatggctaggacgaagtgtggcgtgagactccggggagagcgtgagtcttgacttgtgatgaccgaagatgcgccatcacaacttggcaactgccatgtccttggcggcgaacatgaagcgatggactaccagtactgctaaacaaagataagacaagacaggacgaaagcgggctatgtatcccgggtagagccacaagggacatttcgcgagaggaaacgcggcgggtcactctagcggtggacataagtttgatcgcatccacataggaaggggttatccctgcgcaggaatgggccaccccggcaagggagtcataggcctacgtggataccctctaaaagttggcacccgcaaggggcgtagaactcatctctttttacaacagggaaaacacccaagggggaaagaagagtcaagtctgggaaagcccgtctgtgatgtttgaccaaaggtttccacaaacgtgttgcggaccgatcatataagacgacacaccccacgatgggacccaaacgacttggcaaagcacagctgatagtgacgaaaagagcacgtcccgcgcatggatttagcccgattattaacctggtgtctggtgtgcagaaaggaagtggtgaagacaaagggaaaagtctcgccaacgagatagtaaagggagagggtgttatcaacgaagatggggggcgacagtggttgttgagggggaagaaaaaatggtgcacaccgtctggtttctcatccgatttaagtgggtgaagatgcccggcctaggatacctaggattgatttgtagttgacgacaacggcaaaagagaagtgtcgccgtgtaagtggtcgaaggagattttggaagaccaaaaggcaaacgactaaaaagtaaatggtaaggaaaggtaaagggcggagttattaagttaaactgtgccaagggttgtgtaaatcaaacgaagatggtgtactattggtatagtagaggatcgagcaaaaaagagggagtgtggtgcaaccaaaggaaagatgtggactgcgaggaagaagtaa

SEQ ID NO: 517678 - DNA, 890 bp, Homo sapiens
ctccttggtgccttgttgcccctctgtcccggttgtgggtgcgtcctccgactttctgtcccatgggcgggcacccccgtggtggctcgggccttttatgggacgtttggaccacgtctctagttccgcccgttctgggtggaagggttttcggccccttgggggacttggaaccttctgtttgagatctctgaagaagagtagaggaagaaagtgtgttgaagcccccagatgagagcgcttgattaccccctctccaagacccagtgcctgatcaactcctggaggcttttcatccagtgcctgctggaatggagacccctggactccttgagctgaggaagaagaagattgaggaggcgatggacggaagtgagacacctcagctcttctactgtgttgcccagagaagagaaccagcccctgttggaggggccccttgatgggatccaaccccaccatttatgacatagtcccccggttatgagcccggaagggccccggctcctgagctgcaggtgtggaaatggcgctggcgcctgaagagttgtgagctggatcctatggccctgaccccgaagtatgaggagcatgtgcgggagcacgcaggctccagtagagaaggaggacttcagtgacactggtggctgagcacgctgcccaacagaagccaaaaaaacggaaagctcagcccccggaccaccctgggggcagcacagaaatataaggagttcaagattttaggtcccctcaccctagccctcttttttggccctacgtctggaagcctgggcttcacaccagaaccccctctcccgcagttccccaggacttgtcatttcatgttcttattttagacctgttttgtaaataaagctgtttccccagga

SEQ ID NO: 517679 - DNA, 134 bp, Homo sapiens
agaggatccccgtcggtatgcaaatgtcatctgaaagcattactccttgccaccaagaaaaatgtcacaagacattaaatccattcctttagtttactttcatttattgtatagtaacacaatttacatgcatg

SEQ ID NO: 517680 - DNA, 157 bp, Homo sapiens
  misc_feature (54)..(54): n is a, c, g, or t
  misc_feature (155)..(155): n is a, c, g, or t
aagggcacaggcagcgcgtgtcgtcgtcaggcggcgggtagacgatgacgcggngctcagcctcttcaacccgtgaccggctgcgaatagttccccggtcggacacagcccatccggtccgggtgggccaccgggagtgctgtaggccggatcanaa

SEQ ID NO: 517681 - DNA, 421 bp, Homo sapiens
  misc_feature (291)..(291): n is a, c, g, or t
aacgatggtcctcagctgcataccagccccagttcctgggctgtcttgggcgaagtgaacactgtgtgagaagatggcccagtattgatgctaaaaagtttgcagagacccaatcctaacgaggacacaccacgtgccagagaagggttcacggcgaagagaagcagaagccccaggctgagcggaaggaggcgaaaagggcggttgcccctgctcctgaggaggagatggctgactgtgagcaggcgctggctgctgagcccaaggccaaggaccccttcgctcacctgnccaagagtacctttgtgtgggatgaatttacgcgcaagtactccaatgaggacacagctctctgtggcactggcaatatatctgggagcactttgatacggacggctggtccctgtggtactcagagtat

SEQ ID NO: 517682 - DNA, 137 bp, Homo sapiens
gagggagccgagagtattcgcgatggagtgctggtctccatggacagatgctgggctgcagcctggagcagagcctgtcctagtgtggcatgagcccctaccaccacaaatccctggggcatctagaagattcctga

SEQ ID NO: 517683 - DNA, 955 bp, Homo sapiens
gtctcgctcggggctccctgccgccatcttgttgccgcgtccctgagaaaatgcccggtgaggccacagaatcgtccctgctacagagcatggaggttgccgcatgccgccctagggctagataccggggttcctagtcatacatgcagatcttgactacgttgatgacatgagatacctagaagcttgcggaacaagggttccaaccctcagtggcatttgcacacacaaaaacgcctgagcgtgggcaggactgcggcttgaacttctactgaacgaaccgatgtcaggtaagagcgaaaaacaagagttcgggacgtgaaagtgaccgtgcccgggcctgcgctattgtcataaacttggtcggtcttgggggccacgtgtttaccggagacggtctaacgtagagagttgcgcttatcgcgagagagagcttttaagggaatttcccttccttgtggtacatttcgagcacagaaggcaggatttgtgcttaaaaggggattaccgctgcgtttcaggcacttactttactagtaggatatcagggggaacgccacacgatcgcaaagatttttattcgcccaagtcaagcacgacacctacgtgagcccgtcgtggatgaaggttcaaaacgtcccaagggtgcaatgctagttcttcgacacacgtgtccatgagaaacaacacgggttgtccaagcgtgtacatagagggacgagtagtagccagtgaagacgcgtcgactgaacacagggggtgtcaaacgtttaggggaccattcgaggtggaccatgttcccatagcatagagtggtgtctgagagcaaaaggcagaccggagcgctgaagatgaaccgtcatgcattatgttaggtgcgcctctgcggcttcctggttcccctttttgaacaactgtttcggtggcccacaggggttactgcgtgggctagaag

SEQ ID NO: 517684 - DNA, 217 bp, Homo sapiens
attaagccggtccaacctgtcatgaaagttgcagtgaagatgctaaaacccacggccagatccagtgaaaaacaagctctcatgtctgaactgaaggtaatgactcacctggggccacaatttgaacatgtaaacttgctgggagcctgcaccaagtcaggcccatttacatcatcacagggtattgcttctatgaaggtgggcaactatttgcata

SEQ ID NO: 517685 - DNA, 177 bp, Homo sapiens
aagctgtctggggctggagggggtaaggccggcaatgggcggcccgaacccccaggaggcatccagcggctgcgggacacggaagagatgtaaagcaagaaacaggagttcctaggagaagaaaatcgagcaggagctgacggccgccaagaagcacggcacctataaacaagcgcg

SEQ ID NO: 517686 - DNA, 273 bp, Homo sapiens
  misc_feature (150)..(150): n is a, c, g, or t
  misc_feature (183)..(183): n is a, c, g, or t
  misc_feature (235)..(235): n is a, c, g, or t
  misc_feature (259)..(259): n is a, c, g, or t
  misc_feature (266)..(266): n is a, c, g, or t
tctggaaaaggggatttcacagagaaagtttttcagtcgagcaggaaggctggtgccaggaggctttactgagaggaagcacttagatttaacaattatagacacaccattaggggagttaaacaatgtacacgcagtgacagtgttctnactccagatcacttggttgctacggctaccaanacatgtacagaaagacttcttcgggtagttccagcttgtggccatagccagnttaggacctatgagtgggacctangatctangatcggg

SEQ ID NO: 517687 - DNA, 194 bp, Homo sapiens
ctcacgctctctacttgtatggcagcaccactcccccaccctgacgtagagtagaagacacatgagaagccacgaagtgtggttgagctaccagacattccatgcagtcccgttgagaagccacgtgcgtgagggacagggctaaacggctaggcagtgaacagggctggactgtgtcccgacgtctgctcctc

SEQ ID NO: 517688 - DNA, 86 bp, Homo sapiens
tgcccatggactcaaggctggagcacgtggactttgagtgcctttttacctgcctcagtgtgcgccactcatccgaatcgtcgacg

SEQ ID NO: 517689 - DNA, 105 bp, Homo sapiens
agaagacactctgggactgtaatacttcgaggcgaacctgaaaagttaggtcaggcgttgactgaagtctatgccaaggccaatagcttcaccgtctcctctgtc

SEQ ID NO: 517690 - DNA, 174 bp, Homo sapiens
gggatggtcaactgaaggggcagaggggcccccgaatatccaggggcctggccagggccaagactgtggctctagagtccttgcctttggctctgccctccaccccttctcaccagctccaggtcccgaaaaacaaatgtgtccttgagctgaatttctgtgacctgttggtca

SEQ ID NO: 517691 - DNA, 336 bp, Homo sapiens
gagacaggatcttgcttataaacccaggctggagtgcagtggcgccgtcatagctcgctatagcctcaagctcctgggctcaagcaatctttctgccttagcctcttgagtagctgggactacaagcagacgccatcataccctgctaattttaaaattttattgtagatatgggggtctccctatgttccccaggctggtcttgaactcctgaccccaggtgatccgcccacctcggcctcccaaagtgctgggattacaggtgtgagccactgcgcctggctgtaatacactttttactttcctgtctctctccttcccttctgtcgtcttctc

SEQ ID NO: 517692 - DNA, 170 bp, Homo sapiens
tatgtatcccccatggacactgaggcactgctacaccataagaaaatagaggctgtgtcatgccaacagtggggatttgggacaatttttgagcccagcaggatgacctactatactcacaccatacagtctagctctccatctgaagggcacagcactgcctcaccagg

SEQ ID NO: 517693 - DNA, 140 bp, Homo sapiens
agtggtgttggtggtgatggccacggccacgtgtaggggttcagcaggggttcagcaggggtacgtagagcacatggccgcagcagccactgagcagggcattgagggcagccaggagaccagcagccagtaggcagcat

SEQ ID NO: 517694 - DNA, 366 bp, Homo sapiens
acttaccagagacatcacgacaatcgcagaatatggggaaattaaaaacattcatctcaacctctacaggcgaacaggtatatctgaaggggtatactctggttgaatatgaaacataacaaggcaagcccaggctagctactggaggtgactcaactggccaggtatttgagtgggacagcccactcagcgttgactgtgtgttttgttcaggggtccaccatcaaggcaagaggagaggctcccgaagacgcagcagaagtccagaccggagacgtcgctgacaggtcctctgttgtccaggtcttctcttcaagattccatttgaccatgcagccttcgactaatagtaccgactgtgaattt

SEQ ID NO: 517695 - DNA, 686 bp, Homo sapiens
  misc_feature (337)..(337): n is a, c, g, or t
gacccttttccggcggtgaggacctactcacacgagaacatgtctctcgcaaatgtatctccttcatccctctttcagaataaggcagcacattgaggatccccgagaacagacgccgtgggtgcaagatgcacctctagatatccctacgtatgcgactggaaatgtttgacaagttgccccaacggaagtgtctgatgacacaactcgaccatcggatgcttttgagccgatgcaacaacgacgattagtcttcgtgtgtcggctgctccactgtcctctgccaggcctacaggaggacaaagcaaggcttacagaaggatgttccttcagtggnggaatgcagcacctaagaagcactctgagtcaagatgagtgggaaaccagtctcaataaacacattttgcaaaaacaaagacaggcagaggaattaatacacacaaaaaaaaaattttgggccgcgggttggatacccccgagcggaagaagcgcgttacacagaaccgacccagtgtgtgtagtggcgcgcaggggggcccacaatgaggaatctattaaacaagcggggctccaacaggtgatccccaaaggaaaaaactttggggcccccaaccacacggggagtagagaattccccaccaaataaaaaagcccctgcggtcaaacacagagggtttcgacacaca

SEQ ID NO: 517696 - DNA, 501 bp, Homo sapiens
  misc_feature (66)..(66): n is a, c, g, or t
tcctaatatatggggatgtatcttctgaactatagcttccaatttcaatccccgtctttcccgtgngggcagtattttggcttagcaggctgtgagggtaacagcaggcagtttctactatctggacttggaaggtccttggaggaatctctcttagggatagacttgatatcctgactgtgagaaagatgggcataggaattgaatgctttatcagcgccttcttttgatgagtgaaggaggcgacctttatcttcagtgctactgttctttacatcttgtgactgtctcttactgggaatgggagagataaaaagaacgaacacgcctcctcatgattaaggggttttgagaagaatgatcctcctggcctggaagtctcagcataacactaccaggtttggatgactgtgtagcctcagctagtccatgtccatcagtctcatggggcggcccataccttttttgactggacattcctggaggaccgctgcttttggg

SEQ ID NO: 517697 - DNA, 649 bp, Homo sapiens
acaccatctttttttatttctttggccccctcttttgatcaaaaggggcgccctttagggaggagcgagaccaacaagataggggctgggtccatgaactcccgaggatgcaggacttgcatcaccccccttttgacccaaaaagggggtgtttgaaacccttttggcccccctacaaaaattttgtacccgagccgcgaaaacagccataacaccttttagtggggggccgggggacttcctcttgcccaggacgagctcaagaagaacagggggaaaattgagcggtttttccttcgggggtggagaacaaacatccccccccaacgtgtttggttgaggagaaaactccccccccaacgaaaggccttttgtttttcatagcaaacaagaagcccccccgttcatcaaagaaggggggctgtattcccccactgggggacttactgatgtgggtttatgccgccctcatgggggggggaggacaacaaacagattgtcttcttcacggggccctcccttaacatcattaaggagacaacgggggctcccccctttttctaggtggggtgagacccccacacaacaaaggagcttcttttagatgtggctttgctgcccctacttaacaaaagcggaccctcgcaca

SEQ ID NO: 517698 - DNA, 689 bp, Homo sapiens
tattaccatctagttctctacgtgccaccactgtgcagcaaatgtgcactcactcacgtgacctttggcaagagcaaacagcattgtttctggttgtgctacaactagttccagtgttccctcttacttagccaaaaaaaaaaaaaaaaaaaaaaaaaaaaaaaaaaaaacaaaaaaaaaaaagagagagggggggcggcgcgcgcccaaagaaatctctccccgcgagagggcgcgcccaaccgatgcgcgcgccccccgcggtttttgggaaacaacgggagggcgcccactatgagggcgaggccatatatatataaacgacgagggcgagcgggcgcgccgcgcagctattacaacacaggcgcgagaagagcgggagaaaaaaccgtggcgcgacagcagggagacctattgtgggggaaaggaggagaccccctctcactcaggcggggggggagagagaaaaatatgggcggaacacacacccacaccccgacgagagaattattatgaaccgcccctaccaagcggggaaacactctatacacaaatttacacagagcggcgtgtaccagcgggcgggtgttcacaccacacacgcccagtaattagtggcgtggacgggtctaagacaaatttttcgccacccacgcgggagattatagaatttaacagacaccattttt

SEQ ID NO: 517699 - DNA, 284 bp, Homo sapiens
cagatgtgcacaacatctgactaacgtttttaaattttttgtagagaccagatctcgctacgttgcccaggctcatcttgatccatgcccagctaattttctatttttagtagagatggggtttcaccatgttggtcaggctgatctcaaactcctgtcctcaggtgatctgcccacctcggcctcccaaagtcctgggattacgggtgtaagccaccgcgccggccaaattggtattttcaaagagcccgcctctcttcattcccccatgcgtggattgccag

SEQ ID NO: 517700 - DNA, 168 bp, Homo sapiens
gtccgtcttagggtatgcgagtagagtcagcatataagtagagtacggtatacgcaacgagcttgggaacccgaagagccggcccgagcgcctctacgaggtcgcaactacgacgggcggataggggaagacgctcggcggagtcggcaactcgacgggggctatgct

SEQ ID NO: 517701 - DNA, 282 bp, Homo sapiens
cggtgttatagagtgatcccccagaaaaagtcataggttatactccaagatacacgagacacggcagggttgggcagggcattcctggggtgcagcggtctctagcttgatccaggagacactgggcaggaggttgctgatggcatgattccaggcaggaggtgactcagaaggccgggttgtcaatgcccctctgatccccggtatattcttcaggcctgaagctgtagggagggggatggctctgtgggagttgagcccaggctggggttacagaatcac

SEQ ID NO: 517702 - DNA, 816 bp, Homo sapiens
gacaaaactatgactaggacgtcctcggttgtaaatcagcacagggctgtctctctgttagaaggtagtgggtagcctgctctctctgacggaggtgggggtagctgctctctaccgaggggtaggaatagccgctagtctactgaggggtagggggtgccgctctaaatatggctaccatatacatatatgagtattagggtatctggctgtttaggttctcttcatctctattactgcactacagcattataagcctatcacaaagaggaaagcctctggccgtcacacgtaggacgcatgcaaggtcactcgtggtgaggctagacatgctcacacatatacaacagtagagagggaaaatcctaagacagagggaactaccaagagatagagtgtactaggagcgctatcagtatacagctatataaatggccaggacgggccacacgtggctaggcaggcctcgtaaccaagtaggcggcacgtcctatgggcagtctactaatagtctagcagctcaagggctaggcactactttctatacaatataaaaaatagggtagttcatatctaatatatctacaatctagtcaaacgtagatattaactcggtactatctagtatgaccattctggggatgataccatgttctagcgctagtgtacaatgtagagatcggctgcgtactccttgatgtttatgccgtaggcttggggattgtacacgggaccagctacacgtaatgcattgcctgtacacatgtaataaaaagcctcttactttaggggaaaaaaaaaacaacggggccccgg

SEQ ID NO: 517703 - DNA, 170 bp, Homo sapiens
actctgtggctatgtttcccacgcacggactgaaacacagaaaaatcaatcttcttattctcattcttgatcctttcttctctaacgagctatgggcgaggtaattatgtgccctttattgtcacaggccctaacggacattttggtgaagtcctcacttcatcatcgat

SEQ ID NO: 517704 - DNA, 310 bp, Homo sapiens
atgtgctagtaaataagacaatacagtaattacagatgtaataactgtatgtctttatttacacttcatgtacaatctctgcactttgtttgggtatagttgtatgtttcttctactaatttattgatcgagatgaggttttgccatgttgctcaagctggtatctaattcctgagctcaagcagtctgcccacctcgtgcctcccaaagcgtagcattacaggcgtcagccactatgcctagttcaccctcatgtttaaatattgcatttctctttacccttgatagaaactgaagagggaggccgcag

SEQ ID NO: 517705 - DNA, 155 bp, Homo sapiens
atccaactgtcagttttcagtcctcatctttttctttttatttggagacagagtctcgttctgtcacccaggcttgacatgcagtgttgtgatctcgggctgactgcaacctcccacctcctgagttcaagcaatttcccttcttcagcctcccg

SEQ ID NO: 517706 - DNA, 1440 bp, Homo sapiens
  misc_feature (766)..(766): n is a, c, g, or t
gctgccttacatcttgactgtgcatagccattgggcaacacatcggtcagggctggagagacagcaagtatgagcgcccggcctagatgcaagccttgctatcgtacgctcgccatacacactatgacgtgatgttgtacggagcgttcgcttgacgtactttgagatatccagagtcttacatcggttagtcattgcgtagacatccagctagacaccgagaggtcagaatcgagccgtgagcgcaaagagctccagatccgtcctctccgtctcatatggattctctaggcagcgtggtacgcagtacgataacctatcacttcgacctaacaatatccgatggattgtgatagcagtagatagtgatcgctatacgtatcctactggagctctacgtgtcactctcacatagcatggtcattcgtggcgccgggtgattaggctggtggccacttgaggcgcaagcgtgcgcccccgtagcgatgccgccatggcggagtcctccgaggatctggtaacactttcgagtacactaaaaattaagttctaaattaacgtccacatgatggccctgtttgtacactacgtagcccgccacgtatgaatgtaagccttcgttggcacgtgggcccgcgatgtttcttaagccgtatgtaactcgcgacgactaccttacgccgaacgctaaacgacaagacaatgtgcccacggcgtaatgggcgtgacgcctgtcgggatcttaggcgccatcgagaggcgaatntacccccggcagcatttatctaattgcccgacgatttcccttgttccccctaggttaggtgtccgtagttctgaggtacatttccattagtagcccgggatcttccgatgcgctctgcatggtcagaggcgcaatcgggagtccgagtacaatgaatgcgcctaaggaggagcgcggacgacccagtgtccaatacgagtgcgctccgtcgttacccttatgtttcctgtctggtccaatgcgcgccaagagacgttaacggtcccatatggcgaaaacacgtgttaaccttgtggtgcggacaattgcccgattcggcaatttggcgttttagcccaatggtagtttcgaagtcgcctatgtcgaatcctattattggggcatctatggaagaacaccatcaatttggtacaattaacgaatgatagggatcacgttgggcgatccattaccgtaggaccctacgtgtccgtcaggtagcccacttgtggctgtgtatgaagccgaaaagaatagaaaaagcgggtgagaccctctatgtccagggtagactactctcgagataagaggacctatctttacactaatgctgcacgaaggtagccccataacaccccatcaggcgtgcgagtgaacgtggacgcacccattgtcgagagggcacaatcatcatc

SEQ ID NO: 517707 - DNA, 139 bp, Homo sapiens
tcatgtagcggagcaggagaatcacttgcccgggaggtggaggttgcagtgggccaagatcagcccactgcactgcagcctggcgacagaaaaaaaaagaaaccttgacatctttactacaacttagcaacacaacata

SEQ ID NO: 517708 - DNA, 355 bp, Homo sapiens
gttgaattatggagggaaattcttttttgtcctaagcgtttctatatttaaagtaatattttaggagaatatgttagacttaggatgatatttttagttacttgaagaagaaatagaaggtgcttgttttaatatagtctttattttttatttagatataggttgagtattcttaatttgaacagttaaaacccccaaatgccccaaaatccaaaccttcctgaatgctatgacaccatgagtggaaaattccacacctaacaaacacatttgcttttttatggttcaatgtacacaaactgttttatatagaaaatgatttcaaatatcataaaattaccttcaggctatgtgc

SEQ ID NO: 517709 - DNA, 247 bp, Homo sapiens
  misc_feature (228)..(228): n is a, c, g, or t
caaaagatctgacagatgagatagtttagtaggttgaagaaacacaagatcgattttaatgtaaaaagcagttccactcaagtgaacattacatatataaagtacttgtaccactttacatgtaccctactatgagttggcatttaacaaactgttctagagaaacagagatagtgttgcaagaattggagggtagtgtcaaacggtgggataaacggttagctcccnatagattctcatgctaagc

SEQ ID NO: 517710 - DNA, 882 bp, Homo sapiens
ttataatgtcagggtacggctagaaaatatgatttctacagcacatcagggccaaatggagggcgttgttgggtgcatctctttgggcctcagtgaacactttcactaaattctttacatgcaatcatgcactgcatagcaacatttctgtcaatgatgcactgcatattcaacaggggcctcgtcagatgatgataccgtgtttttgctgtaactttcctatgcttagatacacaaatccttaccattgtgtgacagttgcctgcaggattcagagcagtgacctgctgtacaggtttatagcccagaagccatagactgtgccacgtggcccgggtgtgtagtgggctgtaccatctaggggtgtgaaatcacctaaggacaccttccttagaacctatcccagtcaagggatgcgaggctgagtaacggggccccttgggagttcagcactcagcatgtttcagtgagtgactgaaataatgaacgttctgatcgggccctctctggctggcacctgtgaaccactcgctttgtacccattatttcttgttcccacagcatcattataaactgctgatctactgtttctttgtcaaacgggaggagataacatgagggtcatgagaaatgtttgcagacggagtgaatgccttgaaagtgctgcgaccaggtgctgacacccggaggtctggctgctcaaagtgttagctgacacggaagacacacggactttccctccattccccaaaactccccttccctgactcgtcagctgcataaaaaccctctccttatctctttgtcaaggggatttgagaaatcttgctgtcttgtcttcttgctttggccaaatggaataaacctttctctgtctccaga

SEQ ID NO: 517711 - DNA, 1060 bp, Homo sapiens
ttataatgtcagggtacggctagaaaatatgatttctacagcacatcagggccaaatggagggcgttgttgggtgcatctctttgggcctcagtgaacactttcactaaattctttacatgcaatcatgcactgcatagcaacatttctgtcaatgatgcactgcatattcaacaggggcctcgtcagatgatgataccgtgtttttgctgtaactttcctatgcttagatacacaaatccttaccattgtgtgacagttgcctgcaggattcagagcagtgacctgctgtacaggtttatagcccagaagccatagactgtgccacgtggcccgggtgtgtagtgggctgtaccatctaggggtgtgaaatcacctaaggacaccttccttagaacctatcccagtcaagggatgcgaggctgagtaacggggccccttgggagttcagcactcagcatgtttcagtgagtgactgaaataatgaacgttctgatcgggccctctctggctggcacctgtgaaccactcgctttgtacccattatttcttgttcccacagcatcattataaactgctgatctactgtttctttgtcaaacgggaggagataacatgagggtcatgagaaatgtttgcagacggagtgaatgccttgaaagtgctgcgaccaggtgctgacacccggaggtctggctgctcaaagtgttagctgacacggaagacacacggactttccctccattccccaaaactccccttccctgactcgtcagctgcataaaaaccctctccttatctctttgtcaaggggatttgagaaatcttgctgtcttgtcttcttgctttggccaaatggaataaacctttctctgtctccagacacctatgtcgcagtgttcggcctcagctatacggcaggtacatgaacctggtatttgggcttctacaacaattgtacttatagcacaaataaagtacaaagtgttagggaagaccaaagaccataggtagaaaacttggatacaacttccaaataaacactcttcaaaacatttaaa

SEQ ID NO: 517712 - DNA, 776 bp, Homo sapiens
ggcaatgcagtcagaagtataggtacagataatgtgtgtagagatagactggaaaagaccatcatgctttagactaaaagtgctttaggacttcttggatcagcatcctttgacattgactcctctaacttcagaggatcactgggaatcttcctgtagagcgtagtgtttttacagaagatcggtgaaggcgttacattatgaacgatgtcagtagtccaatgtatgaactcttcattgaagatgatggtcaaagaattatgctgtataagccatcgcaaaaattttgaagatagcagccctgtaaactctgtgaagcccataagcattaagatggcattcgtatcacatatcgctactttgagagagatatgtagaagattagtactctgcattattgtgcctattcaactgacagaagaactgagcaactgtgggaagaagacccaggaaggctgtacaggggacgaaacaggacggagattcttggaaactatagttcgaggccatgcagctgaagtatcatgggatgagatatattccatgaatataagtcagactcttagctcctgtacttctagaacctgatgcaaacacgttcaaggacgcgcacaaagtgtggagagatatgaatgcactgttaagtacaaatgagtgctgtgtataagtgctgttggattaggtgcttatgagctcttggacagtgtagaattttgatcaaggggttgagaaaccaggttctgccagaattacaaggtcattcacaaagaggtata

SEQ ID NO: 517713 - DNA, 181 bp, Homo sapiens
actctgtgcttagctctgactgtctgtctctctctttccttctctctgtctctctcatgcctgtctctctcactcggtcttctgtcttactctctctctctctcaaacttacagtgttcatagtcattgacctcagcagcaaatttgaccttgaattcccttacggctcgcaggactcacg

SEQ ID NO: 517714 - DNA, 784 bp, Homo sapiens
  misc_feature (107)..(107): n is a, c, g, or t
aaggagcctctgcagaaacggaaccagcgggaaccttgacctgagacttgcagcctccagaactgggagaaaatagatttctgttgtttcaagcccccgagcctgtngtattttgtcccagcagcctgagcaggctgaaatggtcccaagttcttgtcccacatccagaagaataaggttatgcagacaaccagagagtgagcagggcagaaaaaaacttctattgcatgatggaacagctcccagcgttgaggggacctgagagtgggcagccactacctgaagcatcattataaactgctgatctactgtttctttgtcaaacgggaggagataacatgagggtcatgagaaatgtttgcagacggagtgaatgccttgaaagtgctgcgaccaggtgctgacacccggaggtctggctgctcaaagtgttagctgacacggaagacacacggactttccctccattccccaaaactccccttccctgactcgtcagctgcataaaaaccctctccttatctctttgtcaaggggatttgagaaatcttgctgtcttgtcttcttgctttggccaaatggaataaacctttctctgtctccagacacctatgtcgcagtgttcggcctcagctatacggcaggtacatgaacctggtatttgggcttctacaacaattgtacttatagcacaaataaagtacaaagtgttagggaagaccaaagaccataggtagaaaacttggatacaacttccaaataaacactcttcaaaacatttaaa

SEQ ID NO: 517715 - DNA, 410 bp, Homo sapiens
ttttcaaattttttaggctttcaatttgccatttgccatttgggttgggcaattttttggaagggctattggttgggctctttttggtttttcgccaatttgggaaagggggttttttttcaaggggttttagttgggttacgccagggtttttccagtttcgagttttttaaacgcgggccatttaatttttattcggttcccttttgggggaatttggttccggggccccccttgggtttttttttttttttttttttttttttttttttttttttttttttttttttttttttttttttttttttttttttttttttttttttttttttttttttttttgttataggcaaggaggtatgattatttattagtttctacattttagactatggtgttgtgctcgtgcc

SEQ ID NO: 517716 - DNA, 867 bp, Homo sapiens
  misc_feature (107)..(107): n is a, c, g, or t
aaggagcctctgcagaaacggaaccagcgggaaccttgacctgagacttgcagcctccagaactgggagaaaatagatttctgttgtttcaagcccccgagcctgtngtattttgtcccagcagcctgagcaggctgaaatggtcccaagttcttgtcccacatccagaagaataaggttatgcagacaaccagagagtgagcagggcagaaaaaaacttctattgcatgatggaacagctcccagcgttgaggggacctgagagtgggcagccactacctgaagctcttggaacagaaccagacttctggccggggctcagtcagtgcttgcaagatgtttgttggcaccaggctgtgccaggagagcatcattataaactgctgatctactgtttctttgtcaaacgggaggagataacatgagggtcatgagaaatgtttgcagacggagtgaatgccttgaaagtgctgcgaccaggtgctgacacccggaggtctggctgctcaaagtgttagctgacacggaagacacacggactttccctccattccccaaaactccccttccctgactcgtcagctgcataaaaaccctctccttatctctttgtcaaggggatttgagaaatcttgctgtcttgtcttcttgctttggccaaatggaataaacctttctctgtctccagacacctatgtcgcagtgttcggcctcagctatacggcaggtacatgaacctggtatttgggcttctacaacaattgtacttatagcacaaataaagtacaaagtgttagggaagaccaaagaccataggtagaaaacttggatacaacttccaaataaacactcttcaaaacatttaaa

SEQ ID NO: 517717 - DNA, 822 bp, Homo sapiens
cgcggtggctcatgcctgcaatcccagcactttgggaggccgaggcgggcggatcacgaggttagtatatcaagaccatcctggccaacatggtgaaaccccgatctccattaaaaatacaaataaataaataaataaataaataaataaatagccgggcgtggtggcgggtgcctgtagtcccagccactcgggaggctgaggcaggagaatggcgtgaacccgggaggcggagcttgcagtgagccgagatcgcgccaatgcactctagcctgggcaacagagcgagacttcgtctcggaacaaaaaaaacatatataaatggcaataacatttcaatctttgtgagctatgataggctaatccctaccaagatatacacagatttatggcagtaacaggtgatagagtaaagacaatttcagcctaatctgggtcatactccttgcaaacgctataatctggtgcggacaggtaagtcatctatgtacattggcctggggctaagggtcctctgactacatggtcagatctctttgaggaactctagggagcacaatatgggtcaccagaaacgggttagggaagagcaaggcatgtctcagctactggatcttgaccattgacctagtaataagtgtccgactgcacagtatacaaggtggcaggaaggtctccaacttccctagcgtgacgtatggcatacgttctgtgagtgcacagccacgcgctggctccagcaacatggcataggttcaggcctttatacgggttgatcagacgcggatctcccagtagtaagcgcagcgttgggacgctgac

SEQ ID NO: 517718 - DNA, 1031 bp, Homo sapiens
gggtgcgagggcttctctgtctatgctgccaagagcaaggcaccccgcaacccgcatggccaagtggtgcggtgggtgaggggcccctcaacgagttcgcctatctcgccctgatggcctgtgcacctggcctgtgtgagccaggatggctgcctgcgcagtcttccacttctgactccatgctcctgctgtgggctcatgaacgagctactcttggtgggccttgctgtgtgtgtgctggagccctgacggccgcatacgtggttgacgtggtggcgaagatgacctggtcaccgtgtggtcccttcaacgagggccagctgtggtggctcgatggccatgtggcacacaagtcctgggtcaacgctgtggccttttgacccctacaccacaatggtacagaggagggccggcgaccacgcagcccgcgtgctgcatgggcgagccggagccgcgcgaaacgaggacggccacgaggaacccacgcacgctgcaggcgcaaccagcgcctcaggaacgcacgacgccaaccgcatcataaaacaactgcgaacaaccattgacttcgcctaccacactacaacctcacacccgccttcacgcaggtccagcgaccctgagccaaccgaacacacgaacggcacacctagcacatgacagggcgacattccacctcgcacacaacgctcgcaactaaccccccagcacacacggcccaccaatgacaaaaccaaacacgcgaacccattccacaggcgcaaaagcagagggaaacacacaagaccaagcgcggcaggcccaggcaaaacacacgaaagagaacgcacgaagaacatggagacaacaagaagtccaagacaaagacaagacacaacaagcaacacaaaaaaaaacaccggaaacccaacgggacgcagacaacggaaacataacaagaaataaatcataaccaccacgaacacacacaccaaacaaaaacaaaaaacagaaaacagaaagacagaaaaagaacaactagacaaaaaaaaata

SEQ ID NO: 517719 - DNA, 753 bp, Homo sapiens
tctgcctaggaatctgtcttctgctactatcagagggaccacgtttcgcttatccagtcgtcattcacggaccctgcattgtctctgcctcttgggctttgtgaagaatgctgctgtgaacaggggagtgcccctgcctgtttgggtccctgctttccatttctttgggagctcttggaacagaaccagacttctggccggggctcagtcagtgcttgcaagatgtttgttggcaccaggctgtgccaggagagcatcattataaactgctgatctactgtttctttgtcaaacgggaggagataacatgagggtcatgagaaatgtttgcagacggagtgaatgccttgaaagtgctgcgaccaggtgctgacacccggaggtctggctgctcaaagtgttagctgacacggaagacacacggactttccctccattccccaaaactccccttccctgactcgtcagctgcataaaaaccctctccttatctctttgtcaaggggatttgagaaatcttgctgtcttgtcttcttgctttggccaaatggaataaacctttctctgtctccagacacctatgtcgcagtgttcggcctcagctatacggcaggtacatgaacctggtatttgggcttctacaacaattgtacttatagcacaaataaagtacaaagtgttagggaagaccaaagaccataggtagaaaacttggatacaacttccaaataaacactcttcaaaacatttaaa

SEQ ID NO: 517720 - DNA, 411 bp, Homo sapiens
aatggctgtgacgtcagtgtctgtcatgcccttagttcttttggtccagagaagcagctggccagtctgttacagctggcaacagactggctggcaagttgtggggctaggtcagaaagtgtctgcacttgtaatcgcggtgcctgctgtccacaggtggactctgcgggagccaggccctggatcccaagtcctttgtgtccggagcctttcctggcctgtgccttgagggtagcacatctttccagcctcccagggctttgcagcctgcagatgccacctgtccctgagagaagttagcgtccctggccctggccggtggtctctcatccttgtgtgctgctctgctaagagatgtccaaggcggagccggggcaagatccttccagactcatctgtcagagccccaag

SEQ ID NO: 517721 - DNA, 670 bp, Homo sapiens
tctgcctaggaatctgtcttctgctactatcagagggaccacgtttcgcttatccagtcgtcattcacggaccctgcattgtctctgcctcttgggctttgtgaagaatgctgctgtgaacaggggagtgcccctgcctgtttgggtccctgctttccatttctttgggagcatcattataaactgctgatctactgtttctttgtcaaacgggaggagataacatgagggtcatgagaaatgtttgcagacggagtgaatgccttgaaagtgctgcgaccaggtgctgacacccggaggtctggctgctcaaagtgttagctgacacggaagacacacggactttccctccattccccaaaactccccttccctgactcgtcagctgcataaaaaccctctccttatctctttgtcaaggggatttgagaaatcttgctgtcttgtcttcttgctttggccaaatggaataaacctttctctgtctccagacacctatgtcgcagtgttcggcctcagctatacggcaggtacatgaacctggtatttgggcttctacaacaattgtacttatagcacaaataaagtacaaagtgttagggaagaccaaagaccataggtagaaaacttggatacaacttccaaataaacactcttcaaaacatttaaa

SEQ ID NO: 517722 - DNA, 162 bp, Homo sapiens
cctgagcatgatgtctggagatgggtggtttgtatgtcaactgtcatttatttacgttgttagatattgggagtagtgtgattgaagtgagtaattaggcgtaagtagagtaaaggtaaaggaggtgatggtggctatgatggtgggatgatgaggctattg

SEQ ID NO: 517723 - DNA, 606 bp, Homo sapiens
  misc_feature (107)..(107): n is a, c, g, or t
aaggagcctctgcagaaacggaaccagcgggaaccttgacctgagacttgcagcctccagaactgggagaaaatagatttctgttgtttcaagcccccgagcctgtngtattttgtcccagcagcctgagcaggctgaaatggtcccaagttcttgtcccacatccagaagaataaggttatgcagacaaccagagagtgagcagggcagaaaaaaacttctattgcatgatggaacagctcccagcgttgaggggacctgagagtgggcagccactacctgaagcatcattataaactgctgatctactgtttctttgtcaaacgggaggagataacatgagggtcatgagaaatgtttgcagacggagtgaatgccttgaaagtgctgcgaccaggtgctgacacccggaggtctggctgctcaaagtgttagctgacacggaagacacacggactttccctccattccccaaaactccccttccctgactcgtcagctgcataaaaaccctctccttatctctttgtcaaggggatttgagaaatcttgctgtcttgtcttcttgctttggccaaatggaataaacctttctctgtctccaga

SEQ ID NO: 517724 - DNA, 1273 bp, Homo sapiens
  misc_feature (228)..(228): n is a, c, g, or t
tctgcctaggaatctgtcttctgctactatcagagggaccacgtttcgcttatccagtcgtcattcacggaccctgcattgtctctgcctcttgggctttgtgaagaatgctgctgtgaacaggggagtgcccctgcctgtttgggtccctgctttccatttctttgggaggtacgtggagaggagattgcggggtcatgtggtcattctgtttggctcttggaggancaggcatcctgttttccacagcagctctgccatcaaatggcactttcttagtgacacctcccgtatctctccccataaatgtatctctccccataaacattgcaactcctggctcaccttccttctcctgtaacttgtcactgtggaactctcaggtgtgcctgagccgactcgtagcagcccaggagggccagcagtgaggccccttccccactccgtggtcagtgccttcacacagggagtttggaggtggctgtagtgggaggactcacaccgcagaaatcagccagtgctgcaggtcaggggccgccatcccccagagctgctgtgagacatcgaccagcacatcagtgggctgctttccgctggttttatttgcatgtattttggtctgtttccctacctagaaaataaactccctgtggcagaagttttatctctctgctcccttcttggttcccagctcttggaacagaaccagacttctggccggggctcagtcagtgcttgcaagatgtttgttggcaccaggctgtgccaggagagcatcattataaactgctgatctactgtttctttgtcaaacgggaggagataacatgagggtcatgagaaatgtttgcagacggagtgaatgccttgaaagtgctgcgaccaggtgctgacacccggaggtctggctgctcaaagtgttagctgacacggaagacacacggactttccctccattccccaaaactccccttccctgactcgtcagctgcataaaaaccctctccttatctctttgtcaaggggatttgagaaatcttgctgtcttgtcttcttgctttggccaaatggaataaacctttctctgtctccagacacctatgtcgcagtgttcggcctcagctatacggcaggtacatgaacctggtatttgggcttctacaacaattgtacttatagcacaaataaagtacaaagtgttagggaagaccaaagaccataggtagaaaacttggatacaacttccaaataaacactcttcaaaacatttaaa

SEQ ID NO: 517725 - DNA, 426 bp, Homo sapiens
gagagagtatagagagagagagagttagagagagagagagagagagagagagagagagagagagagagagagagagagagagagagagagagagagagagagagagagagagagagatagagcgctgaatggttagaacaggcgatggcttacttgctggcatggtctaaactgatgtccgaaactttaaatttttaaaaaggcttctccttagctgctttacctctctctatatcatgctttctgatgctatgtggtcttttttttagattttgtgcatttaatacttaaccttgatttatttcttaatcctttaaatattattcatctttccttataataaatagcctcttacgtaataatataacatcttgatatatcccattctcttatatagtattccattcttctacctatattacactt

SEQ ID NO: 517726 - DNA, 1095 bp, Homo sapiens
  misc_feature (228)..(228): n is a, c, g, or t
tctgcctaggaatctgtcttctgctactatcagagggaccacgtttcgcttatccagtcgtcattcacggaccctgcattgtctctgcctcttgggctttgtgaagaatgctgctgtgaacaggggagtgcccctgcctgtttgggtccctgctttccatttctttgggaggtacgtggagaggagattgcggggtcatgtggtcattctgtttggctcttggaggancaggcatcctgttttccacagcagctctgccatcaaatggcactttcttagtgacacctcccgtatctctccccataaatgtatctctccccataaacattgcaactcctggctcaccttccttctcctgtaacttgtcactgtggaactctcaggtgtgcctgagccgactcgtagcagcccaggagggccagcagtgaggccccttccccactccgtggtcagtgccttcacacagggagtttggaggtggctgtagtgggaggactcacaccgcagaaatcagccagtgctgcaggtcaggggccgccatcccccagagctgctgtgagacatcgaccagcacatcagtgggctgctttccgctggttttatttgcatgtattttggtctgtttccctacctagaaaataaactccctgtggcagaagttttatctctctgctcccttcttggttcccagctcttggaacagaaccagacttctggccggggctcagtcagtgcttgcaagatgtttgttggcaccaggctgtgccaggagagcatcattataaactgctgatctactgtttctttgtcaaacgggaggagataacatgagggtcatgagaaatgtttgcagacggagtgaatgccttgaaagtgctgcgaccaggtgctgacacccggaggtctggctgctcaaagtgttagctgacacggaagacacacggactttccctccattccccaaaactccccttccctgactcgtcagctgcataaaaaccctctccttatctctttgtcaaggggatttgagaaatcttgctgtcttgtcttcttgctttggccaaatggaataaacctttctctgtctccaga

SEQ ID NO: 517727 - DNA, 187 bp, Homo sapiens
cgcgaggcagtctcaaactgctgggcttaagtgatcgttcccctttggcctcccgaagtgctggaattataggtgtgaaccaccatgtctggccttgtagtttatctctaagttcaaattaatgttggtgcttttcctccttttttcttagcagatggtttgctatggtgagactgcctcgccaaat

SEQ ID NO: 517728 - DNA, 402 bp, Homo sapiens
ctcggccctagctgtgtcggggttggaagcgtccgtacgggtagatgtagctgggaagctaggccagtctctccttttcacatttttcttctgctttatattcactggcagctgattagatggtgccctccagattaagggtgggtctgccttccccagcccactgcctcaaacgttaatctcttttgacaacaccctcacagacacacccaggatcaatactttgtatccttcaatccaatcaagttgacactcagtatgaaccatcacaagtccacccctcgccaacttgaacccatacacatctgagatcatacataatcttcaaataaagacaataataaggtcataattatgcctaacatattacaactattctttgtacaaccccgaacacggata

SEQ ID NO: 517729 - DNA, 319 bp, Homo sapiens
  misc_feature (16)..(16): n is a, c, g, or t
  misc_feature (18)..(18): n is a, c, g, or t
  misc_feature (26)..(26): n is a, c, g, or t
  misc_feature (43)..(43): n is a, c, g, or t
taagagccttcaatgntntgtacaanaaaccccacgggtttanttacatactagcatataacgctagacagctgtgatcgacagaagtgatctgtcttcctctccgacagatgagctcacatcgctcacttctcacaactaccggccctgggctctgtccaggcgcccagctacggcgcccggcggtcagcagcgcggcagcgtctatgcaggcgctgggggctctggttccgattcggtcgtcacatcagcgtgtcggctgcacggatacgggtgagatgagtcaaagaagactccacgcccaccctcctccacccgt

SEQ ID NO: 517730 - DNA, 702 bp, Homo sapiens
  misc_feature (1)..(1): n is a, c, g, or t
ntaaagtcaaatgacgatgcctcggtgttcaggaggaggaagatggagcccagcaccgcgtacccgggcttgtggccctctttatggtatgcttgctgaccttgacttgtgtgcggtttgctgccagctggagcccgcaccttagtgctgctggacaacctcaatgtgcgtggagactcattcgctatttctatccgtgagcctgaagtgacctgtggctttgatgctcacattcaatgacctgctgatgaccccagctctgtctctcataaatgtatgtgtgtgaattcctctatgacaatctcatcattttctccccttctgtgttgacgattttggatgtgcaacatcaactgtggatgaccatcatgttgcctttatttgactgtgttggatgtgcatgttgttgctgtgtagcttgccaagctcctgacatatgtgttgaccctacttcgaggagcttgtgggcaaggtgaagttgctgtggctttggcgttttgcactggacggagaaaactgtcttgtcatttgaccatcagcaactatgacatcgtcaggacctttgggcccagcatactgcttcattctgttgagcttgaccacttggacaacctgcttgacatgtgcccacaccatctgttaggtgaaaatccatcttcttagaatccacatcctcttatcagaaggttggtatgggcatgg

SEQ ID NO: 517731 - DNA, 711 bp, Homo sapiens
gagctcggggctgcgcagggggaaggctcgcctagtcgggtccgcagtccgtgtcgatgcgacctgtctggacaccacgagagatgtccacccgttgtggggcaagatgaggccagagaagggctgtcctagaacgtttaaatgctggagagattgtgatatggagatggagggtttgtctttgcgctggagaagaggggctacgtgaaggcaggaccctggactcctgaagctgctgtggagtcgacccagaagcagattcgccagcttcatcgagagttacctcagagctggctcagaacgtcatgcagagcttcaccttactatgcgagtgaagacaagctggagacacaggggcaactatgtcttagacgaagatatctggcgcaggaagtcaatgaagcatgcttgcgacatcggcccgacaagtggctgatgacaggagatgcttgggtagcaggaggagtgagtcacgacacccttccataccttagctgcaagagtgaaactgacagtcacaaccagtcatttctgcaacagtcagaggtcttcatgaacgacggaacgtggacttcttgattcgcaggagtatattgaacacgttgaagaagctgtgtgggcagtttgacacctcgcatagcctccggtaaccctgtgggcagcacacatgtgcattcggcccagaacgcgacactcgccatggcgtgcccc

SEQ ID NO: 517732 - DNA, 964 bp, Homo sapiens
cacgcgtacggtaattcaatcttcgctgtgtgtggtagaagcagtagtcacttttgtaaagccagtctcttcatgcctaaaagacactaccagtcaccttgattcgcgacttttaatttatgattatacttagcctcctcctcctttttttttttttcccaagtggactggacttggctttttcccccgcaagtagaactaatgctagcttccagcgttgaaaagtaaaactccagtgtggagtgaatttggtgtctaattataaacctgtaaccaaaactcagacatctggtacgggtcttggcattgagatgggtccctgtaaaaccccctttaaaagcatatggcatttagatacagagctctttttggaaatgaaggctggagatgtgcattttcacggttgtaacgggttgtatcttataagcaaggagatgggggtttagagtgttggcgtgggtggtttcaattggccaggaactgtggcaggctgctagcacggcagtgagacgctctgggcgagccaaaggggtgcttccaggcctgatttatagagaccctgggttctccttctcctactcccttgtcttctgccatcttgtagcttgtagatttctgccagaggggttgggtcagagcagtggaggggagacttcgccatgtgctctgctctggtcctgggcggggtggcaaaggagatgtgcacctatgagcaagggggcttgaaatacctgaattgaaggaatgctaggtacctgggatacactacggggaaaggacgggcgactaactacggcggactaccggggcgcggggcaaagccatgtgacaccagcgggccgacaccgagctaagggcgaggacaagatggtacagagctaccagtaagggaccagagaagacacaacaacgtcgtgagcgggaacgccccagagtaaaacaccagggacagagaagcgacatg

SEQ ID NO: 517733 - DNA, 147 bp, Homo sapiens
ggagtcaagctgcagtgacctgattgtgccctgtactgcagcctgcgtacacagatcgagactctgtctctaaactaacaaaacaaacataaaaaaatagattaaataggacataacataaagcacccccacttctgtaacctccaa

SEQ ID NO: 517734 - DNA, 470 bp, Homo sapiens
  misc_feature (6)..(6): n is a, c, g, or t
  misc_feature (103)..(103): n is a, c, g, or t
ctatcnaaacctatgaaaaggctgactaaactcccataacatttcactgtcatcaaaagtcccctgataagttaattgcagaaaggggagcacccctcatagntttattcctatgaaatacactattagtattttaaggttgatactgtaactatattctcaaaacagcttctggagcattttgttcctaatagccataaataagacagcacttgtcatacttatcatacatacattctggttccctgggaaaataactttcatatgctcaaaattctttcttcttacctgcctgttggaaaaccagaatttccgttcatggtatgctgataagtagagagcatacatcataccactagtaaccgtgcaagacagccaatgaaaatctttgcaaagcgttgaaataatacatctgaaaaagtatattaaaagtaatcaaaaggtaatatgtacccttgatatgatgtaat

SEQ ID NO: 517735 - DNA, 306 bp, Homo sapiens
  misc_feature (7)..(7): n is a, c, g, or t
catcggngtcctatgctctcttatcggttcccatcccagctgttgatcttatgcaagacgctgcacgaccccgcgcccgccctgcggcacgttacttgaggcagccggagatactctgaggtactcggagcccgacgcctgagggtgagaagaacgcgctggacttcctaaccggccggacctgtgatcgcttgtgggagaccgaaccggcgctcctgccccccgggtgacgcgcagcttccagccgcccagacacatggccccagggcaagcaccccatcaggctaccccgcgccgggacgcccc

SEQ ID NO: 517736 - DNA, 417 bp, Homo sapiens
accgtactataaagaggtgtccgtgcccaatctcaaactatactctaatgctacagtaaccaaaacagcatactactggtacaaacacagacatataaaccaatggaacagaatagagaacccagaaataatgccccataccattctgttttcatgctgctgattaagacatatcaaagattgggtaatatataaaggaaaaaggtttattggacttacagttccacatggctgggaaggccccacaatcatggcggaaggtgaaaggcacatctcacatggcagcagacaagagagcagcttctgcagggaaactcccctttttaaaaccatcattatctcgtgagactcattcactgtcacgacaacatcacaggaaagacccattcccataattcaatcacttcctagcaggtt

SEQ ID NO: 517737 - DNA, 341 bp, Homo sapiens
  misc_feature (67)..(67): n is a, c, g, or t
  misc_feature (90)..(90): n is a, c, g, or t
cccccccccttttcccccaaaaccaaaggcccactggtcccctttttgggtttgtgggtccctgggntttggacaagcactgggggaggngcccccaaagccacccactttttattccaaaaccagtttccctgccccccgacgctggtgatttggggtgtggcctccccggatttatgcaggacagtttgcctgacgccagccctgcctttgggccctggggggtgggctgtaaaaaagttgttggggaaggagggagcttaggagggggcatttccccacttttcccttttgggccccgccgaagctccctgcctttaataaactggcccaggggggga

SEQ ID NO: 517738 - DNA, 106 bp, Homo sapiens
gggttacacagagctcccatctccatgaagaccgcacagcgcgtgtacggccagcccagtttgacctaaagcgatatgagactactagaaagaaacgacacccttc

SEQ ID NO: 517739 - DNA, 223 bp, Homo sapiens
taaaatttcccctttggggaaaacccggttcccccttggggttcctgaaaaaaccgccttttcttttttagccccccctttgtttaaaaacagaggaatccccgccccttttaaaagggggtagggggtttttttttaaaaagcccccgtttttggaaaggaaaatttttggggcccccggttgttccttttttggcccaaaaaaaaaccccttttaaaagga

SEQ ID NO: 517740 - DNA, 199 bp, Homo sapiens
atctcaacattcttgaaccacttaatactctcttgacacactagtagaacagaatcctgaagatatgggagactatacctagatgttgctgcagctttactggatgtaggtgaatataattctgcacttcccttcctcagtgctctatgtatgctctgaaagatacaaccttgcaagaagtttggcttatctgaggggt

SEQ ID NO: 517741 - DNA, 187 bp, Homo sapiens
cggtagacgtctcttcatctatacacgtccagccagcaatcctgcccccaaagcaaatacatatgcaatatggtttaaaacagaatgttgtactctctgattagctcttgttttaacgcaagtaattgctgatgattgaccacatacgctttgagattttcctgcggtcttggccaattcagacacc

SEQ ID NO: 517742 - DNA, 198 bp, Homo sapiens
gctcactctagagtatccccgacggaccgcggatctgcagtcgtgagcctgtgcagacctggttgttcacttcatacacaaagcgcggccaattgctggcggggtgaatttctaggcccaatggactggccagctgcacctgctcgagcacgggcttgtgttccagcagctccttgcggcagcagaccaggatgttgt

SEQ ID NO: 517743 - DNA, 987 bp, Homo sapiens
ctctggatgtttgtgtcgccccctgtctggggcgtcagggttagagtgtcggtgtgcgtgtggggtgccccgccgctcttgtgccacaaaccgttgtttattgggggaagtgcccgtgtcccgttcctcttcctatccgtcccgtgttccctccagacccgtttttttggggagatgagactgtttaaagcctttacctggttggggccaagccccgagttcttaatccctggacgtttgggtgcaccactattccaatggtggtatttttagtgaaacccaaggcttagccccataggtttaaggacccagcctgtaatgggaaaagccgtgtgggaaaacaatatatcccacgccccaaacttgggagcaccttggaggcccaccccttcgcatgcacgttcttctttaaatgttttgaatggaataatatgttttgttaaaggggaaaatatatttcaccgagtgagtccacgggagaatgtaatattataccctgtgaagtcccacgaataaaagtaccccgctaatgccacttttacaaaagaccacgacatttatatgacaaattaatatatgagggtgctctatgaaatggggctcataaggggagaagtgtctcgaaaattatgagtgcccacaaaggaatggagaagaatataatattatgactatccaccccacccgtaaaatgtttgcccaagtggctcgtgttttataaatgggaattatttaccacgcttgattctctattgaaatgtcacgaggccctcataactcttcacggctttgcacatctttgtatatgggagagaaatatgaccatcctaggtaattataaccctagaccccaagcccctacgctttgatgccatttattttttaaataggccctgtttttcacgcttcatctgcacgttttatgtgaagattgataaatcagtttttacttgttttattaattaaacctaatttggatatccttga

SEQ ID NO: 517744 - DNA, 123 bp, Homo sapiens
gatgtcacccattgcctgctggaagccccagtgtataggagatcctccgtgatgtgattctcgatgatagtcttgcacacccttgaaatttgaccactctctctgacagaaaactataacaga

SEQ ID NO: 517745 - DNA, 235 bp, Homo sapiens
  misc_feature (18)..(18): n is a, c, g, or t
ctcgaggatcccgtgcanccgtactttctcgggaaagaaagagaaaaatcccctgcgaggtaaaaggacaagacatcagtatctcaggtctcacagctggggtcaggacaaggacccatagctgaagggaagagggcctcccagcaaatcaggaacatggagcaaaatggagttggctggactgcttcatagccgagctggagaaagtacggttgcacgagaaagtacggttgca

SEQ ID NO: 517746 - DNA, 1763 bp, Homo sapiens
  misc_feature (93)..(93): n is a, c, g, or t
  misc_feature (937)..(937): n is a, c, g, or t
  misc_feature (1092)..(1092): n is a, c, g, or t
  misc_feature (1100)..(1100): n is a, c, g, or t
gtgtcttccattcgtcgcttgtgctcctgtgtggtttgtccgccctcttgttgtttttgctcggaaattttttcctcgcacacacagagatgntgtcgcacacacacgtgtcttgtagtaatacagaggaggcgagcacttgttggtgttgtgacccccttccttcatcactcatgtgggtggttgtgcgttctccttccctcattgggtcccccctctcctttcttagattgtaatgtgggatagtttttcccttgctgcagttttgttcccccccccgccaatcaccgttgggccctcctagggtggcgtcactcaactcctgttgactggtcgtgctgcccaccgcaagattggttgcgtgccccccaccgaccagcggtgctcgtatttggagaagtttgggggcgacatgtgctgatagttgtgagtcgtacgactcgtgtgttgtcgctgccgcagccggccgcccagagcgcccggctgtttggttggggaaggggcccccccaccctacttggggtttttataaggacagttgtagatttctgcccccctcctgtgtggttttgcgcggttgaccccccgtgttgtcccccccgccaaagaggtggttgcaaagcctttttgttgggaaggacagtttgaagtgtttgtgcgaccccacttggaagttggtgcccgcgtgttgtgtgggagaccaccgccgaagttgggcgcgttctcaattgtacattgggggagtcctccccaacagggggggaaaaaagtttgcccacgttcgatttcgcacacacattccacaagacgacacacctcccccacatatgaaattgggcgaatattctctcaccacgcgcccacattgtgtaaataagcgcggcttgtttgaacatctggcggctttctcaggaaaaatcttctgggacatctcttnccaacaccagaagggggcgctcttgtgtcacatatggtgccccccgcggggagctctctgtaagaagcacccccacacacgcgtgtcaccccacagtttttggggcccccgcgtgtggcaacactctgcgtctgtgttgtctcttttgtctctgngcgtctgnggaatatctctgggagtgtcacactctctcaacgactcttgggtgttattatgtgtggttctctccgggtgtaccacacacacttgggtaaagtagactctctctctccacacgccacacagtgtctcatatctctctagagtccacacccagcaccagtgtgtccaaagactctctatatagagagtgttgtgcccagccacaccagagattccacacactctggagacgctgggtgagagaatgtctctgtggcgcacatgttgtataccctgcggttctacatttgaacacatcttgcacatgagaagctgtgagagagagaggcgccacaatatccctctacatctcctcacacaggagccctccacaccaccgcaccggtctactatcccgtgtttatcacacgcctcccctcgagtggcacccctcacgctctgagatgagaagaatgaaggagaggaaagaaggaaggagaggaaagaaagaaggaaagaaagaaagaaggagaagaaaactttaaacccagctgagatgtggagagctggagagtttgtccctcccccgcaggactacgcagggcccttgaagcttagatggaaagtgtgtctaacttgctctctgaccctttagccagatgaaattaaaaaaatatctggtttt

SEQ ID NO: 517747 - DNA, 488 bp, Homo sapiens
ccgccacggatgtgccgattgttgttccctgggcggcgtgcgaacaggtgacatgcaggtcttggcgcccgtggtgggcgactcgtgtgtcaccttgcgcaggcctttggtgcctgtagtgggagtctgggcccttgagcgtggcacaggccgtgtagttgacgttgggcagcacctccaccggctccttgaacatgacgcggaaggtgctggctgagccgtcgcagctgaagcccgtgtcgttctggcccaagacggtgttgctatcggtgtgaataatctggatgttcacttggtagtcggtgggcccgtggatggatccatacagcccaaatcccaccacgaagatgcgcttgttgactgagaacctgatgcggtcactggtcccgctgtagccccagcgactctccacctgctggaagcggttgatgctgcactccttcccacgcaggcagcagcggggccggtcaatgaactccactcgtggc

SEQ ID NO: 517748 - DNA, 183 bp, Homo sapiens
gtggccttgaagatgtaaaactgaagttaaaacagagcatttgagtcgcctctgacattcccttggaatttgttagaatgggcctgacacaacccaagggagttctcctctattggccccctggatgtgctaaaaccactctgtgaggccctgccacaagctgtcatgctctttcgtttcagt

SEQ ID NO: 517749 - DNA, 563 bp, Homo sapiens
ctacatgctcgacacaacaacgaaaaaaaaaaaaaaaaaaggggcacccagagaggcggggaccaggcaaggatattgaggaagtgtcctgaggacagaaaacggggaaatgggggaggagaaggagcggcacatggagctcagcagaggagacagacagaaggaaagatggctggcaggacttctagactagtcccctcagggctttggctgtatctattctgggccacttccaactcataacctgaagggctgctagatggagctttctcaaatccaggcatgatcattccagtgtactttttaaaaccctccaacagctccccaaagctcaggataaagggggataaaagctatacccttcaggcagggcacagtggctcacaccttgtaatcccagcacttggggaggccatggtaggaggatcgctggagcccaggattttgagaccagccggggcaaatgggtgagaccttgtctctaccgaaattttacaaaatttagccgagcttgggggcatgctgtcggtcatcccagctactctggaggctgaggggggagg

SEQ ID NO: 517750 - DNA, 220 bp, Homo sapiens
cagtggaagaagtagagtataccagtttttaaaaatgaataaggctttaaatctggggacaattaaagattatctcttacagagtacatcagaaaaaccttcagtgaattaatttgcttttaataaatgttatcacacgttggtagaaatcaccacaagaccatagatatttatttaccattgtcccggaagtagtgtaacatgtatatattagttcaca

SEQ ID NO: 517751 - DNA, 496 bp, Homo sapiens
tgagttgaagtgggggaaatagaggagtaaatcatttcacgatgtgtggttaagtgctgcagctcaggtaaccaccagtacacagaggaagggcggtttctggagacagggcggagaggagaccgtgggtgggcatttcccagagcagcctctgccagccaccctactttgatcactttgccgccgagcagcagcggcggtcaacctcagcctcccttagcaacctgagtgccccgtccaggagcctttactattggtctcatgcagcgagatgggcagttctgccgtgcaatcccagctcgcagttcttgctccgcgtgtactcacgggaggactcgcaggcgttaccgccttcccgcgtgccccgcccaccctcccgagcgtctttcggcgcatgcgcggactggagctgtgtgcagggccagcgcggagcccgagcagccgcggtgaagcgcctgtgctctgccgagactgccgtgcccattgctcgcctcgg

SEQ ID NO: 517752 - DNA, 233 bp, Homo sapiens
tgctgagattacaggtgtgacccactgtgcccagccaatttttgtattttttgtagagacagggtttcaccaagttgcccaggcttgtctcgaacttctaggttcaagccatctgtccacctcagcctcataaagtgccatcatgggcagcctcatatgttcttttttgttttgttttggtttttgagacagagtctggctctgtcggccaggcccgtgttggcacgatctca

SEQ ID NO: 517753 - DNA, 125 bp, Homo sapiens
tccgtgaaaccctcacagagtcttgatgtcaccctggcttctgggcacactccagaaaactgtttgatctcatagcaggcaaggctcagtgattacttcctaccactgaaagccacagtacggaa

SEQ ID NO: 517754 - DNA, 690 bp, Homo sapiens
agcggagagaattggcagttttaactatttttttcaaagttgagtctttatgtaaaaaagtacacaataagaggctccaagttggctaactaggggcattttatacttgcttcctccactaagaagaacaaaaatagcaagtagataatcacactttaaatagatcatccaagagaaaacactggaattcaacatataagtgacaggcaatacctaaagcaaggaaggagaaagaagcaaggcagcctacttggctggcttagctgggagctgagagagactccccaatatgggggaaagagtgagagaccctcagcagtccacattctcaccctggactccagtcctagccatggaagaacccctcaaccctcacaggccctgaaactaatgtagggagctgacaaggaattgtaccacaagcactgtgccagggaggaaagcttgtgctgggtccctcacattctttgagacctaagcagcaatggcaaggtgccattttagaattccatccccaacaggctgcacactatcctgaagcccagcagcgctgaggctgaggtgcaagaaaagagctggcttaggcatgagtaactgcaggctaccacacccaggtctgaggcatgagtggtatgcacactccccacctgccagtctaggttgccatcactgaagatagcactggccccc

SEQ ID NO: 517755 - DNA, 156 bp, Homo sapiens
caagaagtacatcaaagattacatgaactcaatcatagggaaacttgaagaacagagaccagaaagagtaaaagcttttatgacaggagatgaagaacaaatcaagcacatccttgcaaaatataacaaaaactaccagtagctatacttggtaga

SEQ ID NO: 517756 - DNA, 244 bp, Homo sapiens
tgggggggggttttcccccccccccccgggaaccttgggggggacctttggggtttaaaaaagggtttttgggggttttttgggtaaaaaggctttttttttttggggggcttttgggggggttaaattttgggttttgggggggttttggggggggggggggcccccccaaaccccgatttttttgggtttttttttttttggttttttttccccccttttaggggggttgtttggggcccca

SEQ ID NO: 517757 - DNA, 365 bp, Homo sapiens
gagggagcgggtgccgcagaagtctattccagctctcatccagcttacacgcctggtggagcgtctgcctggtggtctcaccttctccatgtgggccaactacactgttctcctttagcggcgaatatctcgcagaactcatacatctccagcccccacagtttgctgcttgcagtcttgcttaggactgccttgcggattccccttgagtgtcagttccacggtttcctgcctccctgagaccctgagtcctgccatctaactgtgatcattgccctatccgaatatcttcctgtgatctgccatcagtggctcttttttcctgcttccatgggcctttctggtggcagtctcaaactgagaag

SEQ ID NO: 517758 - DNA, 149 bp, Homo sapiens
accccagttgtctcaagatgaatgggtgttacaaaaaatagctatcggctgggagtgggggctcatgcctgtaatcccaacactttgggaggctgagggggaggatcatgtgaggttaggagttcaagaccagcctaaccaacatggag

SEQ ID NO: 517759 - DNA, 398 bp, Homo sapiens
aataatgaaaaaaaaaagttatgcaacaatgtcttaacccaagcatgttctgcctcagggcctttgcacttgttggcctctgtctggaatatgcttttctcagatctgcctgcctcaacttcccaaagtgctgggaatacaggtatgagccactgcgctttaagtcttttttttttttttttttttgagatggattttcactcttgtcacctagaatggagtgcaatggctcaatctcggctcactgctatctccacctcccaggttcaagcagttctcctgcctcagctactcaggaggctgaggcaggagaatcacctgaacttaggaggtagagactgaagtgagctgagatcgcagtgtgggtgacagagtgagactctgtctcaaaaaaaaaa

SEQ ID NO: 517760 - DNA, 320 bp, Homo sapiens
agtaggttcatcttcatcacgtgcatgctgaaaacttcgagatataaggtgctgagttgttttttcagtaggtgagaggctttattgcggtttctgtaggaaggaacaggtgaggtaggatgagcaggtttaggattgcctagtttgaatgatttcagcaagctctgggggtacaggagctgaaatggtttggctgtgtccccacccaaatctcatcttgaattcctactcattgtgggaggttcctagtgtgaggtaattgaatcatgggggcaggtctttcccgtgtcgttcttgtgatagtgatttattaattatat

SEQ ID NO: 517761 - DNA, 105 bp, Homo sapiens
taatcagtcggtaccctcaaagaatactgaaataggataaaaattgaaattggtcatgatgaaatggtgcccactcaccagtaccagtactaaaatgggtcagag

SEQ ID NO: 517762 - DNA, 363 bp, Homo sapiens
ctcggtgcccactcagagtccagcgtctctgagggttgtgtttccctcccggctccctccctcccaccgtctcggccggctgccccgccaggctccggtgagagggagtgtggagtttcccctggaggctctgagcttcaatggatcactacgccagacacgggccaaacctcccgagttactcagcgccccggccaccctcggaggcaggcggcggagcacgtggacgccatcaaaggcctgggacgtgcacagcaggagaggctgtgccagggcgtgggcgcgggctctgtggggagaccgctgcgaccggcgtggacaggcatgcacaaaggacgcaggcgggactgcctctgaagacac

SEQ ID NO: 517763 - DNA, 103 bp, Homo sapiens
gggcccccggaccccgggcgggggggggggggttttttcctaggggaaggggggccccggggggtttggggccgggttttttttttaaaagtttttttttcca

SEQ ID NO: 517764 - DNA, 459 bp, Homo sapiens
  misc_feature (316)..(316): n is a, c, g, or t
  misc_feature (362)..(362): n is a, c, g, or t
  misc_feature (373)..(373): n is a, c, g, or t
  misc_feature (389)..(389): n is a, c, g, or t
  misc_feature (402)..(402): n is a, c, g, or t
  misc_feature (423)..(423): n is a, c, g, or t
acttttccttttctcctcagaggaatagtaaggctataatccttgagccaatctttgcttaaaatgtactctggagtgcatagaaagccagttcaaggacaactttcttagccaagggggaaattacattttctgcaatttattttgttattttgtgagtttctctccttttcctaagttggatccaactgaagttaaattttaccacattctccagatgaaaagtggtgatagaacttagttgcaaggtgtggaaacagcaacaacagcagcagcatttgctaactgttggggtaaatgctagacagtccagggnaacacgttgcctgggtgatctcctttactccccactccagttgatnagggcaggtgncattattacttctaantcacaggtgaggnaaattgggtcttgggggttanggttttaggcccaaaagttgggccagaggaggcagg

SEQ ID NO: 517765 - DNA, 692 bp, Homo sapiens
tggaacatttatttaccaagttatatggaaacctcctgagaacttaaacccggtaaaaaacaaatgaatcaaacccaggccccattctcgggaagtctcacagggtgaaaataggtaactacagaaaacacagccaataaggtgcttgtgaaacagcaggaagaacataaaaaagagtgtaggtgtacgaaaaccgtggaactcaaaaactaaaccggcggagaagggtgacggaggagtgtcctagaccctcccagagaagagcgtggggaacatccagaaagaggcctctggcgtgccgacacagccacatcccctaggctcctcgtggagtatcacgtgcgaggcgtggcccattgtgcgagggaaggcgtgttagaaccaccttataccaatcgaggacgtggcggagaaaacaggaggagccacggggtctctcttctcgtgaacggcgtggttcacccagagggcgccccagaccaagacacaccacaggttctggggaaggtggggaacggggtgtccctcaggggggcccacagacatgtgaagcgcgcatataataaacggggggcgcgtgtgtacaaagcgccgtaaagggggcgggtctacaaccccacagcggatctagaaaaccccacggagaaaagctacaccctccgaaacttttggccaagccgcacgtgacgaac

SEQ ID NO: 517766 - DNA, 308 bp, Homo sapiens
  misc_feature (20)..(20): n is a, c, g, or t
  misc_feature (49)..(49): n is a, c, g, or t
  misc_feature (64)..(64): n is a, c, g, or t
  misc_feature (91)..(91): n is a, c, g, or t
  misc_feature (115)..(115): n is a, c, g, or t
  misc_feature (133)..(133): n is a, c, g, or t
  misc_feature (170)..(170): n is a, c, g, or t
  misc_feature (212)..(212): n is a, c, g, or t
  misc_feature (307)..(307): n is a, c, g, or t
taggctcgggcgcgcgcagntggcgctgcagtgcaagactgtgccgccncacagccgaggcgcnaaagggggacgccggcctctgggccgntgcttcgctttctcttcgtgtgcnaacgccgtccgttaagangcgccccgtaccgggcgataagtgcaactaggaccanagatgactagagcatacctctattataagagataagttccgnaataagccagttctttcatatagataggtaaatgtgatccaaagcttctaatgagattctgacagaacatatccaacactcaatctattatgacnt

SEQ ID NO: 517767 - DNA, 266 bp, Homo sapiens
atggtaaagaaggagatcagacgctacagtatcacttcaggcccagctgtaaggcttcttcgaggctattatatggagtgtagaacctccaatctggaatttctagctaattctctgaaatcacatgactacccgcgacctccagacaaataagactcaaggcccagttagaggtttgtactgcccattaccatcgactaaaagacatcagacagagagacactggctacttcttagtcgctattgtctgttttaatctcagcttg

SEQ ID NO: 517768 - DNA, 201 bp, Homo sapiens
gcatgaggtaatgatatctactgcgctcgtcgtcgacaagggctccggcatgtgccaggcacggcttcgcgggcgacgatgccccccgggcctgtcttccccgtccatcgtgggggcgccccatggcaccagtggcgtgataggtgggcagtgggtcagaaaggattcctcaagtggagcgacagaggcccatgagcaatg

SEQ ID NO: 517769 - DNA, 480 bp, Homo sapiens
acctcccacgctcaggtcacgaaaggatcagcaaagaagggcaagaaggcccagcatttggtgcataccaggggcaaatcagacatcacagtattctatgtactattgtgtacctctgctctgggagccaaatccctggatttagttttattcttaaccattgagggatttggttaaatgatttctcactccagctgggtgtggtggctcatgcctgtaatcccagcactttgggaggctgaggccagcggatcactggaggtcaggagttccagaccagcctgaccaacatggtgaaaccctgtctctactaaaaaatacaaaattagccaggcgtggtggcgcatgcctgtaatcccagctacttgggaggctgaggcgggagaatcacttgaacctgggaggcagaggttgcagtgagccaagtgcgtaccactgcactccagcctgggaaacgagtgaaactctgtctcaaaaaaa

SEQ ID NO: 517770 - DNA, 449 bp, Homo sapiens
cagggtcattcaatgtctaaacaaattcagtatctgaaacatcttcatgaggaaaactgaaggaaaggaatttaaaaacacagaccaggaaacaatcacaaaatataggtttaattactacttttaaacttaaaaaaaaataaaaaccaagaaaacaaacataggtactccagtgggacttgctactctgaataatgtaacattttttctaagttctataaatatatactggaagttttggaacacatgcagacgcttaggaaaggaaaggctggttccttggaagtgacgatccaggatgatgcagtcacttggtggcggagggtgggcctttcttacggttggattttggcaggtggttttgccactggtatagatgggtgatgtgtggatcgcaagttctagagggcgaatgaaggtgctgactccaggtaatttctggatactac

SEQ ID NO: 517771 - DNA, 548 bp, Homo sapiens
gatcttactaacaggaacgtgtgggcccgttcatcgcatgcacggtcagtgggcacgtgaacatgctcgcctggacaactgttctggacagggccgctccaacaaagggctcctggccaggatctttggatccccgtcagcctcagagagcatggagggaccttctcttgtcagggactcctcagggcctgggttgccccttacattacctggacctgttctgcttcctgtctacctcatattataatgcgtgttacttgcaaaaaccttatggtactgtgtttctcagaccaagtgtctactgatggcccaagatggcgttttgtgggcttccactgtccccactccgaactcctgtatgtgcctggctgagtcacctaatccatactgtcatactagcataattatgactattgcatatgcttgtatagtttgactcttggctgcctacgtctgtagggtcccctgaaaatcccacttcctgcccccagaaagggcctttatttccaactaggaggataatgctagtacaggcaatctttctctgc

SEQ ID NO: 517772 - DNA, 134 bp, Homo sapiens
tcatcgagctcggtcccaccttcacgcgcgcgcccttgggacgcgggcgcctcggccaggctggtgatgaagctgcgcacgttgtagcggccgatgggacgggtcttgtccggcgccttgcccgcgggcgtcag

SEQ ID NO: 517773 - DNA, 373 bp, Homo sapiens
ctctggtatcaagtgtcctttacataatggttgctactcttctgtgtatcataggcacacacactactctgagtacatatctgtctacataatagagcactatatttgttcattgtgcctgcacctaggatgtgaattttagacctcttctccccccttaaacctaagaattctcctgtctttttctcttgcctcaggatatcatgaattattcccctttctcctcccacctctatccacggaattgatttctttcttattcctctgcttataagcttctttcctcttgctcttcctttatccagctcatgtcgactaaatcagctaattccatttgtcctgttacagaaatattagctcctaggattgtcac

SEQ ID NO: 517774 - DNA, 824 bp, Homo sapiens
  misc_feature (3)..(3): n is a, c, g, or t
  misc_feature (7)..(7): n is a, c, g, or t
  misc_feature (10)..(10): n is a, c, g, or t
  misc_feature (13)..(13): n is a, c, g, or t
  misc_feature (17)..(17): n is a, c, g, or t
  misc_feature (25)..(26): n is a, c, g, or t
  misc_feature (30)..(30): n is a, c, g, or t
  misc_feature (33)..(33): n is a, c, g, or t
  misc_feature (53)..(53): n is a, c, g, or t
  misc_feature (57)..(57): n is a, c, g, or t
  misc_feature (60)..(60): n is a, c, g, or t
  misc_feature (71)..(71): n is a, c, g, or t
  misc_feature (98)..(98): n is a, c, g, or t
  misc_feature (104)..(104): n is a, c, g, or t
  misc_feature (115)..(115): n is a, c, g, or t
  misc_feature (127)..(127): n is a, c, g, or t
  misc_feature (137)..(137): n is a, c, g, or t
  misc_feature (139)..(139): n is a, c, g, or t
  misc_feature (141)..(141): n is a, c, g, or t
  misc_feature (145)..(145): n is a, c, g, or t
  misc_feature (147)..(147): n is a, c, g, or t
  misc_feature (149)..(149): n is a, c, g, or t
  misc_feature (193)..(193): n is a, c, g, or t
  misc_feature (202)..(202): n is a, c, g, or t
  misc_feature (204)..(204): n is a, c, g, or t
  misc_feature (222)..(222): n is a, c, g, or t
  misc_feature (245)..(245): n is a, c, g, or t
  misc_feature (252)..(252): n is a, c, g, or t
  misc_feature (262)..(262): n is a, c, g, or t
  misc_feature (269)..(269): n is a, c, g, or t
  misc_feature (274)..(274): n is a, c, g, or t
  misc_feature (277)..(277): n is a, c, g, or t
  misc_feature (285)..(285): n is a, c, g, or t
  misc_feature (319)..(319): n is a, c, g, or t
  misc_feature (337)..(337): n is a, c, g, or t
  misc_feature (350)..(350): n is a, c, g, or t
  misc_feature (360)..(360): n is a, c, g, or t
  misc_feature (367)..(369): n is a, c, g, or t
  misc_feature (379)..(379): n is a, c, g, or t
  misc_feature (396)..(397): n is a, c, g, or t
  misc_feature (399)..(399): n is a, c, g, or t
  misc_feature (405)..(405): n is a, c, g, or t
  misc_feature (408)..(408): n is a, c, g, or t
  misc_feature (429)..(429): n is a, c, g, or t
  misc_feature (437)..(437): n is a, c, g, or t
  misc_feature (445)..(445): n is a, c, g, or t
  misc_feature (448)..(448): n is a, c, g, or t
  misc_feature (459)..(459): n is a, c, g, or t
  misc_feature (469)..(479): n is a, c, g, or t
  misc_feature (500)..(500): n is a, c, g, or t
  misc_feature (566)..(566): n is a, c, g, or t
  misc_feature (679)..(679): n is a, c, g, or t
  misc_feature (685)..(685): n is a, c, g, or t
  misc_feature (727)..(727): n is a, c, g, or t
  misc_feature (746)..(746): n is a, c, g, or t
  misc_feature (748)..(748): n is a, c, g, or t
  misc_feature (756)..(756): n is a, c, g, or t
  misc_feature (804)..(804): n is a, c, g, or t
tancccncangtnaaantgctttannaaanctnaaaaaaaaatacagtttaanaaantanctatcttgcanccagcttccttgcagtacactgacttnaaaaanaaaaaaaaaanggggaaaggggnaagggggcananancccnananagttgttggacggaaaaaaaaaaaaggggtttcatttgtattcnctttgccananccaggcctaccgcaaggncacagcacagttttgtaaaaaangttgcanaaaaaagganggaaaanccacnacngccgccangaaggagtgcggggggcggggcggggggtcccanaaaacctgctttccaaangctgctgccgaanactggccttnaaataannnccaggacaanctgtgtgtgaagggaannanccaccncanaagtggagggccctaaaaaanccaaaaangagggcangcncttcactcccnctcccccccnnnnnnnnnnnccccacccccaaaatccaacngccgttgtttgccacagaactttttttttttttaaagaaataaagaaaacagtgacttatcccgcnacccaagcgtgtagagccgcgcgctgtactgcttccgatatgtgccacagagcagcaacgagaagtggacagagccgcaatggttacaactgtaagaggttatttcttaaaanaaaaanaacacctaaggactgagtcccatatgcacttttgagcatttntacagcatgcgattctaanantaaacccncccaatatggcaaacaatcaaaatttttaaaatttaacttagaaagtntgagatcattattttcaaaa

SEQ ID NO: 517775 - DNA, 523 bp, Homo sapiens
ataggatccaggttaacacgtcttcattgggaatactgaggtcgtcaatgatgtgtgaaatttaagtctacacttagttgtttttagaagagaaacaaaagtcttctatacattgggttaatcatattagtagcttaactcttcatagttactatattgccagctttatgtgtctgttgattcagtgaatccagaaacttgctgcccttattcttgattttaaaaatcagagtagaagtttgttcatcgaggtgatcttctgcacgatgaggtgatcttctgcacgataaggtgatcttctgcacgatgaggtgatcttctgcacgataaggtgatcttctgcacgataaggtgatcttctgcacgataaggtgatcttctgcacgataaggtgatcttctgcacgataaggtgatcttctgaggtgatcttctgcacgataaggtgatcttctgcacgatgatcttctgcacgataaggtgatcttctgaggtgatcttctgcacgataaggtgtatcttct

SEQ ID NO: 517776 - DNA, 382 bp, Homo sapiens
ccgggttcagcaattcttctgcctcagcctcccaggtagctgggattacaggcacatgccaccacacccagctaattttgtattattagtagagatggggtttcatcgaggtgatcttctgcacgatgaggtgatcttctgcacgataaggtgatcttctgcacgatgaggtgatcttctgcacgataaggtgatcttctgcacgataaggtgatcttctgcacgataaggtgatcttctgcacgataaggtgatcttctgcacgataaggtgatcttctgaggtgatcttctgcacgataaggtgatcttctgcacgatgatcttctgcacgataaggtgatcttctgaggtgatcttctgcacgataaggtgtatcttct

SEQ ID NO: 517777 - DNA, 295 bp, Homo sapiens
tcatccaagtgccttctgtagtcacatgaattgtaaaggatacgctgctccctcggaggggagcaggaatgctgcacgatgaggtgatcttctgcacgataaggtgatcttctgcacgataaggtgatcttctgcacgataaggtgatcttctgcacgataaggtgatcttctgcacgataaggtgatcttctgaggtgatcttctgcacgataaggtgatcttctgcacgatgatcttctgcacgataaggtgatcttctgaggtgatcttctgcacgataaggtgtatcttct

SEQ ID NO: 517778 - DNA, 527 bp, Homo sapiens
gagactcgtcttcaaaactgagcaaccaatatattcaatttatattatatctcctaaaacatttcattacacatagtgaatttacttgacaattgtactataattattatccataaggttacccatactattaacctttacaggatatatttccaatgggacgttttcacttgacctattgaagtaattagtgaaatttcagaatttccggtatttctaggatttcactctggtgggcattcttttgatttatacggtcacatgctggagtatgtgttaccatgtgtctctgagtgagtcataggataaatgaaggtattctcacattcgataccttcctaaagtttttctctagaatgagtgatgttttaccatcaagtacctctggaacgcccgtaggcctaaccagattttaaactattcgtattggattttcttcagtgagtcctttcaagttttcaacccgcaatggggtacttgaatgcttaaccttattgcttatagtcctaggctctccccgaaaaaaa

SEQ ID NO: 517779 - DNA, 511 bp, Homo sapiens
  misc_feature (225)..(225): n is a, c, g, or t
  misc_feature (228)..(228): n is a, c, g, or t
  misc_feature (230)..(231): n is a, c, g, or t
  misc_feature (233)..(233): n is a, c, g, or t
cccatcgtgcaaacaatacctcggacaggacatgaagtaactttagaaggaggatatgatggatatggcagtggacgtggatttggggatggctataatgggtatggaggaggacctggaggtggcaattttggaggtagccccggttatggaggaggaggtgatcttctgcacgatgaggtgatcttctgcacgataaggtgatcttctgcacgatgaggtatnttntnnangatgaggtgatcttctgcacgataaggtgatcttctgcacgatgaggtgatcttctgcacgataaggtgatcttctgcacgataaggtgatcttctgcacgataaggtgatcttctgcacgataaggtgatcttctgcacgataaggtgatcttctgcacgataaggtgatcttctgaggtgatcttctgcacgataaggtgatcttctgcacgatgatcttctgcacgataaggtgatcttctgaggtgatcttctgcacgataaggtgtatcttct

SEQ ID NO: 517780 - DNA, 143 bp, Homo sapiens
ctttgtacaaatttttatttaaggtcttgactgagcctgtatcaacttcattcttgaatcccgcgtccccgtggctggaggctgacacatccgtgggcaccactgtaacttcctgtgggtcccttcccttctgtcgtcttctc

SEQ ID NO: 517781 - DNA, 891 bp, Homo sapiens
catcctggctaacacggtgaaaccccatctctactaaaaatacaaaaaattagctgggcatggtggctggtgcctgtagtctcagctactcgggaggctgtttggcaggaaaatggcatgaacccaggaggcggagcttgcagtgagccgagatcacaccactgcactccagcctgggcaacagagccagactccgtctcaaaaaaaaaaaaaaaaaattcactctcaaaagtggatttaaagaccttaaattttaaaacctgaaattttaaaacttattaaaattaaaacttagaggaaatgtggttccaaactattgggctctagggaaatttttttattgaattaaaacctcagaaagcccagacaacaaaggcaaaaattaaacaattggttttttcccaaattaaaaagcttccgtgcagcaaggggaacaacagaacgaaaagacaacctgcagagtgggataaattttttgcaacccattctttccaccagggattcttttccagattatacaggggacctcaattgtctcaacaggaaaaaattgaaccatgcattacagtgggaaattgtctgccttctcaaagaggacttccactggcaaaatttttgtaaatggttccacttccttaatcatcgggaaatgccatccaaacccatgaatttcacttcacctgaggatggttttccacagagaaaacatagaaacgccctggaggtggccaagggatcctcacgtggcgggatccatctcagacaccggggaacatggttccctcaatcacacgatttgtccccctgggtgtccacaggcgactcaaatatgtcccttgcgctcaaccaagaaacctatacggacagcgtgcaccgacaaacggtgtcgca

SEQ ID NO: 517782 - DNA, 186 bp, Homo sapiens
acagaggcgttagtgaatttgctgggttttagacacccggtaggccagcctttggactcctgcagtagcagtagtgggctgagtgtgcctgtccttggaccctagggcagtgtacactggtaccattgttagtgagtccaggcaagccaattttgggagtcccaggtggcttgctcaggtggttgg

SEQ ID NO: 517783 - DNA, 355 bp, Homo sapiens
  misc_feature (92)..(92): n is a, c, g, or t
  misc_feature (171)..(171): n is a, c, g, or t
  misc_feature (183)..(183): n is a, c, g, or t
  misc_feature (196)..(196): n is a, c, g, or t
  misc_feature (208)..(208): n is a, c, g, or t
  misc_feature (322)..(322): n is a, c, g, or t
tacgagctctccacttcaaagttgtcctgactcagtagtctcgtgctctccggccttcagctcaggcgatgttgagcagaactggtgacacnctccccacagagacggcatcgggcctctctgttgcgggtgtcgctgattttaaacacggctgctctggcgacttacttncgcccgcctctncttccgagggctncttcgcacaganccggcatcatggctggatggctgctcagcaacagcctgagctccgatcatgctgaagtctgggctggctggcactggctggcatcctgggaggtggaagcaggtgtggttagantcaaacttggcgggagccactgtggcgctgctg

SEQ ID NO: 517784 - DNA, 338 bp, Homo sapiens
ccatttttctaaatataactagggttactagaatgaacaagcttggattatagagccagttatggacgtgatgatactgctgtgtaggttttgaccattgagcaggtcgtggtaattgtttcacagggttgctacttactgaatcactgctactacatgcaatgaactgtgctagactttacagaatgattcctaatcattgaagcaaccctcacaaggtaggcattattatcatcccattttcaccatagcagcgacattcaggctaccaagtttagtagcttgtcctggtttcacagccagcaagtaacagggtctagagagggacccactcaggt

SEQ ID NO: 517785 - DNA, 275 bp, Homo sapiens
catgttttgtgtttaaataaaactgtaaaaactgcaaagaaaaaccaaaaacaacaacaaaaaataatcttgtgttaggcctccttcggtttttcaaaattgcttccaatttccattttcacatatggtattattagttttttttttaagtttaagccttcctgaatggaaggaacccaatgcagtttccaaattaacattttccctgatgactaaagatgttgaacatcatttcgtacgtttaaagactatttggtttttttgtgtgtgtgatg

SEQ ID NO: 517786 - DNA, 292 bp, Homo sapiens
  misc_feature (1)..(1): n is a, c, g, or t
  misc_feature (4)..(5): n is a, c, g, or t
nggnngataccgccggcaacgcgggatccttaacccactgagcaagggcagggaccgttcccgcaacctcatggttcccagtcggattcggtaacctctgcgccacgacgggaactccactctggtgatttttaaatcggggggattaaagaagtcttcacaattcattattaagtgtgttgcctgacactatttccatatcctattttgtaccaataagaaattgatgtcagcaaactatcaacttcattgttttcccaggtgtccatacaatgcactactagactcatct

SEQ ID NO: 517787 - DNA, 376 bp, Homo sapiens
gctctatatctacatccctctggggagtagtattctagggcgcggtgcctcacgcctgtaatcccagcactttgggaggccgaggcagaaacagatcacctgaggtcaggagttcgaaatcagcctgggcaacacagcgaaatcccatctctactacaaatacaaaattagctgggtgtggtggcacatgcctgtaatcccagctactcgggaggctgaggcaggagaatcgcttgatcccaggaaggcagaggtggcagtgagctgagaacgcacaactgcactccagcctgggtgacgagcaaaactccatctcaaaacaaaacttccacaaccagcctggagtgtgtagcccctttgtccaggaatttgacta

SEQ ID NO: 517788 - DNA, 237 bp, Homo sapiens
atgttcggatgtccacacgctcgaaaagatttcccaacctgtttttcagtgtccacagtgcctagatctagacctcacatgaagattaacaaatgccagctgggcctggtggcatacccctgtagtctcagctactctggtggctgacacaggaggattgcttgaagcccaagagttcgaggctgcagtgagctatgatcgcaccaccgcactccagcctgttttaacacaccacgg

SEQ ID NO: 517789 - DNA, 1039 bp, Homo sapiens
ggactggattgcccagaggtctcccgtggcgctctatggtcgtacaccttgctgcgtgggctttgatggagctgggagacaagtctatctatagtcattgcctatcgatttccttgctggttgttgacagaatggcttccagctgtccgtcattgctggctgtgagtacattaactggctgcgcgtccgcagtatgccacggtgtcgatatcactgcgagggcgcggacaggttgtgagctgcgcctgacactcgccgtccgatgaggataggacatggggttggctcggacgacactattggtggcagattgttgtgagagatagggcctcatgagcacagtgcatagactgtctaggaaacttgcactactgggaagctcgattggtatttgcctcgtaacttggagggcctttggaaggtggccgctggtggaccacggaaggccgaatgcgagacaatgcccctctgatgactgccgctggtacaaaccttcagttactgtgcagttatcccccttgaattaaggatcggtgccttgtactgagaagggccgttaccctaggggccaatgaaaggcgttggccgccaaggctggttgaggtttgcaacgataggcactctgggttgtgaccattactaatggggtcagaaaacgctctgactgcattagactagggcatgggatctgttagcccaccgattttggagtaggaatttgatgaactaaggggttgggttgacctgatattttctgtattcgaccgtcacaatcgacaacgcagattcccagtcgctattccggtgagtgcacgcagggccactaactacctgttgagctaacggcagtctcttcacttggccatggcatgagggtgggtgacctccatggaatggcttaactgtgggactcttgggcggaattagcccacaatgtggcgtctttagcccaagaaagacctttctttcctgtttcaacaaggttggctatgaagaatgtccagcaacctgtcttcgggtcagggaaccggctaatgta

SEQ ID NO: 517790 - DNA, 446 bp, Homo sapiens
aggaggccgaggtgggcagaccccttgagcctaggagtttgagaccagcctggataacatggtgaaaccccacccctacaaaagaatttcaaaactagctgagcgtggtggcgtgtgcctgtagtcccagccactcgggaggctgaggtgggaggatcacttaagcccaggaggtggaggctgcagtgagccatgatttcaccactctactactccactccagcctgggtgacagagtgagaccctgtctccaaaaaaaaaaaaaaccaaaacggggaaaaggtaaaagggggggaaaaggagagaccctaggcagggccaaaggcccacataattctaaaaaatgtaagaaaagaattgggctttgggacctattttaggaccaataaaagggttttttgggttttcttcagggaaggaaaaacacacgggaatcctttcgcata

SEQ ID NO: 517791 - DNA, 91 bp, Homo sapiens
aaaaaactttttttttttggctttggaagggcctcatcgcccttaccccgctattcccacctttttccccttttttattaaaattttttta

SEQ ID NO: 517792 - DNA, 160 bp, Homo sapiens
  misc_feature (123)..(123): n is a, c, g, or t
tcagctcgcaccggttatttattatgtattgttgaatcctacatcagttttaaggacacagagaaatgatgttgatgtgttgggaggatcctctacacgtcgacctctgcacggcaatgcaangtcttggcactgtggcctggtcgcttttacaatcagc

SEQ ID NO: 517793 - DNA, 203 bp, Homo sapiens
gggttcataatactgataagtgcaacggtcttgagactgagaggtctgggaaacacgtggtttagccctccagttctgcagtgtgacacggtgtgaaatgtcagctccccaagtcaacccacatattagtcaaaaatgctcactgatgccctcagtgaaaggcacagttgtatgcaacacaacacttcttgggcttcttgggg

SEQ ID NO: 517794 - DNA, 1093 bp, Homo sapiens
cacagttttggaaaaaggtctgtggtagtctggagttgatgaggaaggggtacaagatgtggttagaaacatttctttgttctggaaacaaagtactgttgaaaccagcttggaatttttttttttttttttttttaagttcagttctcccttagtggctgcctttcaaacaagttaccttttatctgatgccttgtatcttcccttggttaagcgtgtaactgtgatgtagggctcaagggttttggtgacaccgaggcagactccacacagagaggactatgagtgagaatatggccatcacctgaaaagtttctatatcttcggggctttgggccccgtggaaacaaatccgacctatgtttgaagctagttgattcccagtgtgcactattcccagttgccctctgaagtccacaggcaatacatggtctagtccttggcgaatttctctgattggggggcccagtttatgaagtttccccacttgtgaacgacgggtccaaaatagcagagccaagcagacagggggtctatccttcataagctcagtgacttgtccacactcgtcttagcacttacgtttcaaaagcttgtcacaaacccttggagtcattcccagataatagacctggcacttgataattcccctattgccaagggtctaggtgtgtctaaggggttatacggggaacgtgtgtggagattaggtgctgcctgctgccctggattggctgaagggcccctgcggcactcttcaatgtgcctgctcggaaaagctcgctattgtgacccccggctcacactgctgtggacccaatttaccatgctgaacaaaggttctctggcacaatctcctgagagggcaatatcatgggatgccccgaaacaaaccaaaagggtgggcctttggggagacacagcaaccaccacacgcacagcacccacaaagccacacataaacacgcaccccagcgacaccagcagacagatcaacgataacacaacaacgaaatgaacgagggctccgtcacaaccactccgtgccgcgccacgaaacgaccgccctcattggcaaaaaccgcacacatga

SEQ ID NO: 517795 - DNA, 101 bp, Homo sapiens
tgcaaggatttgcgaaactcatccggtcgacctgctcaaagattgcgacgatcaccaccgtgcgccgttcgtggggcagtacctggtcttcacgtgcttgt

SEQ ID NO: 517796 - DNA, 163 bp, Homo sapiens
tacaatttgagaagtgccctgacagagatgtgtgtactctatgatgttctcagctattgttagggcatacaaaatttaatgactcttgaatccttgtctctcagtgatgcacttccttccaacaacagaaatcctcagcacgtaggcaatatgcatcatctca

SEQ ID NO: 517797 - DNA, 561 bp, Homo sapiens
gatacaaagatagacgataggcattaaaagctatcccaaaatgtccaagatgtgtgatcagcagtcaagtatttgagagcagctattaaaactatagtcatggggtgaagcaaccaaaattctcataatgaatgaatacatgtggaatctcagcagagaaacgcacattattaaaaagaaccaaatagaaagataatgaaattttaaatagtacttttaggttgattcatagattagaaaaagacagaacaattgaaattattcaatcgtgaaaaaaagagtaaaaaaagtttgaagaaaatgaacagagtcttacaatctgtgggcagatagtgtcctagaaagagtgaagggacagaaaaattaaatggggtgcaaaagtaacaactaatagctgaaaacttgcaaaaatttgtcaaaagcccacattttatatccaagcagtcaacagattccaaaaagaaaatccaagtaaaatcgtacaaagggcacatggtgatttaagaaaactggcaggacagggcttccaattgactttctaaaatttctaatttttactaa

SEQ ID NO: 517798 - DNA, 144 bp, Homo sapiens
gcggctaattttgtatttttagtacgagacgggatttgcatgttgcccaggcggtctcgaaccccgagctccgtgatcctccgcctggcctcctctttgcacactggcgttattctcactcttccaccgaggacttctctgaga

SEQ ID NO: 517799 - DNA, 134 bp, Homo sapiens
ccatccaaaaaactcgacataatgttctcctactgtggcagagcactacacgggagagaaggcagcctcattttccttaatgccctcaatcatgaaggagctaattcctgacaaagtcaatgttttgtttgttt

SEQ ID NO: 517800 - DNA, 119 bp, Homo sapiens
gtatcctttattgcatttatacctagaatggtttatatcgggacgcgatttatcttttcttggtggggctgttaatgaagtagctagtctagtctaaatgcaatcagtctaaatgcaat

SEQ ID NO: 517801 - DNA, 106 bp, Homo sapiens
gcggtttctatttatgttggttttcggaacctgacggcactgacttaacgacgggaccggccggtgggccttcgtacttgcgccgttagacggcgacacttcttgg

SEQ ID NO: 517802 - DNA, 314 bp, Homo sapiens
aagtggcaggaggtggctaggggtcacgcgtacttttctaacattcaacattggctcagaagccaggtcagtgctcacagactgttgctataaagggctgggtggctttctatccccacagctactcagcctaatgccattgccagagcacatgtagccatggacaacacaagggggcgtatccctgtttcacgacagacatattgacaggaataagcaggaggccagatatggtcctccagcgtgtaattacttgggcccctgtttacggagaggtaaaccaggggaggagagatcagtcacggatgacgtga

SEQ ID NO: 517803 - DNA, 103 bp, Homo sapiens
gcctctggatgcaaagtgtccaaggcttcggacctgagccactgttgattgaggtgaggaggactcggggaggagcaggcatagggacactttgcatccagag

SEQ ID NO: 517804 - DNA, 389 bp, Homo sapiens
gctggagcacagtggcacgatcttggatcactgcaagctccacctcccgggcctcagtctgcagagacacagaagcaaatgattgtatgaagctcctgactgtatgaagttctcagtcaaacaaaatagtacctcttctgcccatctcagaggtggataaggataaagtgaaataatggaaagcacaaggaacagtaaaaggcaaatgtcaagaagctgtttgcaaagttaccaagatgtaaaattagattttacttattaataatcatgtcacttgtcattctgtttataatggtcaattcactgctgatattcaagtggaccgtttaaactgtatttttgctcagctatccctccaaataaatatctcaaaatcttgaaagataaaa

SEQ ID NO: 517805 - DNA, 1098 bp, Homo sapiens
  misc_feature (1085)..(1085): n is a, c, g, or t
catctttgcaggcacactcatcacagtgctaagctcgcactgattgttttaccgtgagtaggcctagtaaagtaaagcatgctagcttttgattccgagttctaatcgcaatgagaaatatagaccctcgtttccacaggaagctgccgagtcaaagtattgtccatcacagcaaggcaaccgtcatccactaagtcctttcgtaatctagcatatacctcttacaaacaaatagtactctaccgcgtagcaatgacatcccagtacatctcaaggtgctatcacaagtccaagtatcgtccatcacttagatacatccatacatcgcgcttataacgttacattacaacacctaaggacatacgtccgccttttacgacttcatgcagttcgccagtacggtttgaccgcacaggacagcctcgcatcatgtacatgcacggcactgccttgcgatgcgtgcactagtgatcaacaacacttagaccgccacgattcatcaagtacagtattacgcaaatactgatcgcgctctactaagaacgtacatgccttcatccctcacatactacgtcaagtacttaatccgatccatacgcaaaggcaagtgtgacggtcggcacttagataccataaaccacagcatacgtcaacaactcgttaggcattacgtcactcagagttagcccgacaaataaggattgagatacagtgagtcagttattcgtaacctgatatgaaaccatatacatcaaccaattcgttacaattctcacactactacatcatctattccgtatacatatctacccgaaagttccctacataacgtcaaccttagaacctctcaggcaaccagcagagccttacataaataatactacgacaaccttgacaacaaagcctgaacatttgacttataacaatgcactttaaagttcccgatgcccaaccattccctcttccgctaagtgagaggcatgacccacgattaaccgagctttaatagccgcaaatgggcacataatcgacagaagtccacgaagaatcaatcagcttcatacattccaacatcacaaagcacncaatcaacgctct

SEQ ID NO: 517806 - DNA, 646 bp, Homo sapiens
ggcgagctgtcagcgcgggcggtgaacgcctgcggggctgctggggttggtgctgctggcctgacactgtgtcccctgacgcctgtgcctgtgctgatcccctgtgagcctccctgctgctgcccctgcaccctgacctgtgctcagcctggccggcagcgtaacacgccctacgctcgcttgctctgcctgtgcctcatggtgcaggcgaggctgggctgctgggagacccctgcctggggcctgagacttggggcgggctgacgatggaccaggttacggcctcctctgccatgtcctcggactgcgactgcgggcgaccacataccccctgcacctcctagtctggaagaaactgactaccggcagctcgagaaggagctgcagggccagaatgtggaggctgtggacccacgaggtcgaacattattgcatcttgctgtttccttgggacattcggaatctgctcgagtcttactccgacataaagcagatgtgacaaaagaaaatcgccagggatggacagttttacatgaggctgtgagcactggcgatcctgagatggtgtacacatgttctccaacatcgagactaccacaacacatccatggccccttgagggagttcctgagctgtccacaaaatt

SEQ ID NO: 517807 - DNA, 143 bp, Homo sapiens
cacgagggattcctcgatctgccggatcagcgtacggtgctccgatccacgcaggcgctcggtcagttcggtcacgaccagtcccagtgcatgcatcgtctgccgtaggtcatggttggtggtggcgatgacacgcgacttcg

SEQ ID NO: 517808 - DNA, 167 bp, Homo sapiens
tactacatgactcagatcaaaacagcatacctgtaagctaagatagatggtgtggattccactggttgtgatcaatacaataacaaacctttttcctttgacatactctgaatttggttgttgggggggagggtgtgtgtgtgtgtgtgagtctgtattaactgctt

SEQ ID NO: 517809 - DNA, 418 bp, Homo sapiens
ttttgccgcagttgaattcatcttgtgtctcattcaagtaataaatggaatgcttggaggcttatgtggctattgctgctctcgccaacagcaatataactgctaaaaaagaacacaagacagaagggcgtgcttcctgtatttcactgtaatttgtatattttccctgtgttgtgagactttgcaccttgtgccacatcctaccctttctgcttttgtaaggaaatgtgctgacgtcatcacatgatgtcagtgtttacattcacaaaacaaacaaggcagcaaactgcactctctccgaagggattttacagacttaaggactgttctcagcatagctgagataaactcttcagtgtttgagataaaaatcagagctaactattgtgcatatgtgcatttttttttaaataaaaga

SEQ ID NO: 517810 - DNA, 270 bp, Homo sapiens
  misc_feature (18)..(18): n is a, c, g, or t
  misc_feature (230)..(230): n is a, c, g, or t
tggagggaaatatttatngaatttttgtaatttaaaatattttgttgttagttaattatgaatagatagaagaattttatagatgttgttataaataagtagaaaatataaattttattattaaaatatgttattttaaaatttattttttatattgtatttttaattagatgtattatttttattatttttattgtatgtgttaatgattttatgtaaaaatgtaattnttttttatgagtagtatgaataaaattgattagtttgtga

SEQ ID NO: 517811 - DNA, 879 bp, Homo sapiens
  misc_feature (13)..(13): n is a, c, g, or t
  misc_feature (18)..(18): n is a, c, g, or t
  misc_feature (27)..(27): n is a, c, g, or t
  misc_feature (223)..(223): n is a, c, g, or t
tcccaggattacnaatgnggcatttantaaccccagcagggttggtcctaatgcttctgtgtgggcagctgccaccggtccggcgattctgtccagatctcttggtccctgaggtgtcagttggcggccgccatctgggtcctttccaccattttcagcccctccagggctgggaggacccggggggccacactctgggagcctcggttgaagtggtggggcntgacgccgtttctctgacgtcccccatagatctgggtcatggagccaaccccaggccaccccggaggtacaggtgccggctgtgaaagcagctcgcgtgtagaaccagttctcatcgtagggagcaagctcttggtgctgggccagtttgacggtatccacccattcggggactttcagcttcccggacttttcggaggaaggctgccaaaagctctgacggaactcctgcgggtacacgtctttaacagataactccaggcatcgtgcggatagactgagcatggcatttcttgatcaaccagatgataaccgtgtctcacaaaagacccgcgttgtaacctgaagccccccgggtacaaccccccacgcagaaacaccgtaaaccaaaacaaaaagggaaacaaaacaagaaacccaagaacaaagaaacaagacgaaaaccagaaaaagaaaagcaaacaagaaagaaaaacccaaagacacgaaaaaaaaaacaccgaaaaaaaaaccaaaacacagcaaaaacgaaaaaaaagaacaaaagaacaacacaacaaacacacaaacacagcaaaacaacaaaaacaaaacacaaaacacacagcatcacaacaacagacacacacaatagatcaaccaacaacgagacacaaa

SEQ ID NO: 517812 - DNA, 115 bp, Homo sapiens
gaggatccctatgccgaagagtactgaggatgtaagtccgtgggcgattatgagaatgactacgccggtgaagcttcaggggttggatgagaatggctgttactcttcgggcata

SEQ ID NO: 517813 - DNA, 346 bp, Homo sapiens
tcattatttaataatctgtctgcccacccccaagcataaggatgatgtgaagtaagtacacaagtacactcacagagcatgttttgcttcttgaggttagcttccataaaccaaactgatgtattgctgatgtgttatatctgtaaatattacagaaatggacatgccagatttctcttctttagcatctgctataagagaaaaactaggcagatgcctggaaggcatgggcaattgcaacttttcagtaagatatactgatctggttttaatttgaaataataaagaacattttttcttctctttggacttttttacctattaaaattggttccaaaatgttaaa

SEQ ID NO: 517814 - DNA, 818 bp, Homo sapiens
gttacaggaaagacttatgtcagccccagccctggggctacccgatctgacaaagccttttacattgtatgtgtcagagagagaaaagatggcagcttgggagttttaacccaaactgtggggccctggccgaggccggtggcctacttctctaaacaactagacggggtttttaaaggatggcccccatgtttgagggccttggcagcaactgccctgctagtacaagaagcagataagctgactcttgggcaaaaccggaacataaaggccccccatgctgtggtgactttaatgaatactaaaggacatcattggctaatgagtgctagactcactaagtaccaaagtttgctttgtgaaaatccccgtataaccactgaagtttgtaacaccctgaaccccgctaccttgttcccagtatcagagagccctgttgagcatgactgtgtagaagtgttggactcagtttactctagcagacctgacctccgggaccagccttgggcatcagtagactgggaactatacgtggatgggagcagctttatcaacccacaaggagagagcatttgcagggctatgcggtggtaactctggacactgttgttgaagccagatcgttgccccagggcacttcagctcagaaagctgaactcattgctttaattcgggccttagaactcagtgaaggaatcaaggatttcttctcgctttgtggccggattttgctactgcttgctcttcttactttacttatttctgtgactacctcatggccttaactcatttaaaatctccccaagcttatctgaacg

SEQ ID NO: 517815 - DNA, 531 bp, Homo sapiens
  misc_feature (517)..(517): n is a, c, g, or t
  misc_feature (526)..(526): n is a, c, g, or t
tactactactaaattcgcggccgcgtcgactgtaaagattgtaaatgatattaattaagttggctgtgctttttctcctcacaatggattcttttgttaggctggtaataatcgcgtttttggtaaaaacacctcatggaatttttttcctttctcataaaatagctgtttactgtaaaattgagatagcctctcaagtctggaacaccttccaattcatcaaaaagggacaacctaatattccaaagaagactcaatccttttaacacacatacattttagggccagtcaagagaagtggcctgttctgtaggaaaacatttcttggcacattattattttaagtgattgcaggagaccacagagggagagaaaagagacaacaacaacttctagcatgcctgggggatgacttgctctttcatatttgtggaaccctatgtcaagagagaaaacatctaaaaataaaaacgcatttactcagattctctagggcaaggtgcaaagagcctgtgcngtaggagcncagat

SEQ ID NO: 517816 - DNA, 189 bp, Homo sapiens
tgtcacatagtctcttttaccgatgatcttgtctttactggagtcattatggccactggatacaggtcaccttcacaggtgggtgcaccttcatattcggtctccacgagcagcttggtagtgggtcctattatgagggcatttcacagatgagaccgttcgcccccagggatgtgggtaccgagcgtc

SEQ ID NO: 517817 - DNA, 182 bp, Homo sapiens
  misc_feature (169)..(169): n is a, c, g, or t
tcggtactctagaggacccggcgcctagcacttccgtgtctcttgctgctttcttggcttcagtgtctggatactgagaaagatctagggtcaaactcggctgaacatgcagtcatcgtactcaggatagatgccgatcagcgcgtcgcgtctaggaactagaactctntcttttagggaga

SEQ ID NO: 517818 - DNA, 238 bp, Homo sapiens
ttataccgggctctgcactcatctatggccagcagcagcagcataagacgtaccatggctcccaggtctatgtcaccttacgccgttaggctatctacctggtggcaggagctggtggcgcctcaatacctggccacggccgccaacctcctgcgccactaccccacagaggaagcggagcaggcgctggacctgctctcagagatggaagagaacgagccctaaccggcggaatatg

SEQ ID NO: 517819 - DNA, 1073 bp, Homo sapiens
gcctggcgcattgtcgggactgtctggcgtatcggaaagcaagcctacgttgctcacgtatatacgtataatccttttctgctcaagatagcctgagtgaatgtgctaccagtgagtagaggaggtaggtgtgacgaccttttgccgttgtcagggcagaaatttgcccatactcatgttccctgcagtcatcatatactcttctatttctcaacagaggaagtatttacctgtcggagagtggatctctaaatgcttctgattgccttgtgaccagattcgctagtgaggatgcctagagcatgagcccgttcgaacgttgggacagtaggtaaacagaggcttgaagcattttgacattcattccccaatcccttcaggaacgtatccctgactttaggtagacacaggccagttggctagttgaccagatagcttgaatgctcgatatatatcacatttttagtggaaactcatctgtccatagctctggttactcatatacgcacttcaactggaaggactctatccagtgcttgtggtgccagcacaatactaccatgcagttgggggacatgattcgggctgtagggcctcttctagttccctagcccttaccttttgggtgggcaggaagcaacagctagagttggtgaagtcaccagaatgtcaagccataacgaattgcattgcaaccaagttaattgccttgagcgaaaggtcctatctggcttgtgaagcggtctaccgtattccaacttggtgtccgtgtcgtaggaacccaatgggatggcaagcccccaatttgcttggagggagataacccaaacatgtttgcaattccgtctcagtgcttttacacacgacggcatccaggaagaagaagttatgccttacgaaacgtaagcagtggccggtgctccaaagagggaacggtaagttgacccgtagaggccatttccttccaggattcgcaataggagcctaaatccccaattcgagcccttctgaaattttgggcgtgcacaggggaaccggaggtagagaaggcgacattgaggttcgacatgatg

SEQ ID NO: 517820 - DNA, 198 bp, Homo sapiens
cgactgagtaccacggcaatggtttttgctgcggcccattgcgccgtattaaatagtttagcccgtaacgcagtctcttcagttaaacggtccggtccttgatatgcttgcagtttttgcttttgtaacttgtcgcaaatcacgttttgtatgcaatcttctttatcgcctccaatgaatggcaagtcggcctcaggc

SEQ ID NO: 517821 - DNA, 443 bp, Homo sapiens
catagtagacacatatccagcaagtactggttatcatgattctcattttatcttctttctttttctctactcatcagctttttgctttcttccctccttctttaatctctggaataaaagggcagcagacctggagaaaagggatgcaaattgtcccatacacctattgggaacctcatcaaagagaagactgcagaagacagatgattgatgtttatatggcattgggacaggggcttgcggctggagaggggaggtgtgcagggttgtcttgttgtgcagataatcactcaggtgatctcagagctgctctcagaggaactaggcgaggccgcaggcactcctcttgtgtgtccctgggaccgttcctagatccctctaggcagataatggggcctcagagagagcttctgctcaattctgctgtaacatggtgtggatac

SEQ ID NO: 517822 - DNA, 276 bp, Homo sapiens
atctaaggatccctgtgtctgctctgactgattgtaattcgctcatccactgctgtgactgtttgaggaaagcaagtaactcctccgcaacatctgcttctctaaagcagcagactggtcattttcttctggtgggcggagcaggaatttcaaaaattgcatgaagcaggggcatgaacatctgttgtaaaaacggggatacctgtatcttgaatttggccgtaatctggttgataagaggaatgaactcctggagatcttttgcttcacaaaaaa

SEQ ID NO: 517823 - DNA, 334 bp, Homo sapiens
agccgacaaatgccttagaatccaattttggcctttgatgatgaacggacacttgggcctcttcctcaggtagatggtgtgcagacacagcagactgcataagtcatatgattgtttcttctgaagaaccaaagctgaaatttaatgataatttctacaattaatggaatgcctttcctgctataaaggagcatcccctccacccgttttctagagttcttgacatcttaatctggggcccaagcctgctagctagcgtggtcgacttgttaatatttcttgtagctataacctggtgcttaaaatgaaagcactctctagcggaatcatacga

SEQ ID NO: 517824 - DNA, 110 bp, Homo sapiens
catctataggatccccaccatgaccctgaactctacacaacatattttgtcgaccgagatcctacttctaacctccctgttcttatgatttcagaacagcacaacctggt

SEQ ID NO: 517825 - DNA, 137 bp, Homo sapiens
taccatgtaacgataatcggtttctggtggggtgtcttctttggcacttaaccaccttggatattcaacttaattgccctgttgtcacgaagtctttgactctctcaatttctgagacgctaaaagcttttcggtac

SEQ ID NO: 517826 - DNA, 220 bp, Homo sapiens
ggggggggtttccccccccttttcccccattttttttttttgggggcccccccttttgaggggggggggcccccccccccccccccccccggggggcccccccccccggggggggggggggccccccccccccgcgccttggggggggggggggtttttttttttttttttttgggcccgggtttttcccccctgggaaaaaaaagggtttttcccccca

SEQ ID NO: 517827 - DNA, 761 bp, Homo sapiens
ctcttactgcacataagaaaattcattacctgagtggtctaccgttgctttcagaaacattattaacgaatactgttcctgctcgaataatcaaagaactgtaatgcttttccagtgattaatatacattagactgaccattcactgattagtaacttaccatgtggttcaacgtgtgactctagtaaatacatgtgaacgtatctcttcagctcattttaacaccattgacttctgtgtccaccttctattagacatccgtattataattggtgattacaagcctatcaacttttattcagatctaaatagtagcgctaatgcttaaagagatctgtatgctatacggattataagaaagcctattctccattcactacatatatagatacataacttgctttacagtaagagccaatggggcaactgtgactcacaatatataagctattaacaatattgaatactatcacctagatgacactttaggtatctgcatgttgcaacgctgtttacacgttatcacttcaaaggatacttttttataagcctatcacggatgacctagactcttatttcttcacctatgtcctcatggctagttgactttaaaccattcgatctgcagaggctgtggcctttagcaaacgatgaatgtcatggttgaatccactttaacttcctgctttatttccacaagccccgcagtacacataggccggaatgcttccactgtcggcactcaccagacctctagggga

SEQ ID NO: 517828 - DNA, 164 bp, Homo sapiens
tccattcaaataaaacataataaaaaagtattaaggcgaagattaaaaaaatttgcattacataatttacacgaaagcaaagctatcagctcctgacatgctgggttttttttctgtctccccattacctcccaactaagttacatgttccagtgtggagagag

SEQ ID NO: 517829 - DNA, 221 bp, Homo sapiens
  misc_feature (16)..(16): n is a, c, g, or t
  misc_feature (39)..(39): n is a, c, g, or t
agataaaggccatacnattttgtctttgggtgacggggnccgcctggcctgtgcagggtttgatcccccccctttcggcggagctcgaggagcggatgcaccggtttgcccagcagcatcaggcccggcaggctgccttttagcccccccccctggcctgctgtcctgggtctatccatgtggaatgctggacaataaagcgagtgctgccccccctccca

SEQ ID NO: 517830 - DNA, 109 bp, Homo sapiens
tggacgccacatgctcccatcagtctcttccagaaatctctataaaccctactgtgtgccaatcacagttatttttcactatgctgaatcactattttattatattttt

SEQ ID NO: 517831 - DNA, 104 bp, Homo sapiens
gagtatgtactaaatggatgtacctaaatggctgtacctaaatggctgtacctaaatggcaactcgtatcgccaaatccagcagccattacagccatttaggta

SEQ ID NO: 517832 - DNA, 319 bp, Homo sapiens
ccagccaacctcttgggtcagtccaccatcgggtggggtgggggtagagtttgaagtccttgagagaggattatgatgcgactgtgagtgcgtcactgcactccagcctgggcaacggtgagactctgtctcaaaaaaaaaaaaaaaaaaaaataaataatggggttgtcatttccaaataccttaaaggacctaggtgtcaaaatggtccctcaagtaaaacccaccacaattctgacatacatttatttaaaaaaaacgcgtgggagggggggggctcccttgggggggccactgaacacccacccacttcccggtt

SEQ ID NO: 517833 - DNA, 707 bp, Homo sapiens
aaaatagaagagtaacatgttttatatttttttttgaaaataattatttttaaaataaaatagaagagtaacatgttttatatttctgcaaatattttttatttctggcttaatagaagacactagattctgatatctgcttctgtatcctatctgttgttatatgctgtttggttgaagtctgtgaagaaaatctgaccccactcatatataaagttggaaaagggaggagtattttaatagcttgtctgataattatggatactctctttgataccacaccaaaatatgacaagtagtagagttccttaaaggctagttgcaatgtggattctgaaatcgtatgatgagcttttctaaagtccatgggtgtaccttgtatttaaatagaacttttacctatgtgtgatatttgtaacaccagtccagtgattgatcattcggaaaatattggttcactgagttatgcaaatcttccaaatgttgacaccattttgatattaccaatatctaaaacaaaataccattaattaataatttaccaacaatcccattacaaaagtctaagtcttgaggaagctataaggcacagaagtgtattccaggcttcccaaattttaggtttcctttggaagcttgagttttatccttggcaccaatggcatcaggtttttcccaggcggccttgtcctttttggaccaatctc

SEQ ID NO: 517834 - DNA, 1130 bp, Homo sapiens
gggcggcggctgcagctccggtcgagccgcgcgcgcttgcgaccccgctccgcagcccgctagtcgcccccgagtcaggccaggccccggcggtggctggctgccgaagatggaggcgagcacagcaagacacgacatgctactccgaagaacacacggtgggagcacaggaaccggccgcaacgaagagactaagacaggtagaatatcaacacgccgaaacgagtccacgacaggcggacgtacggccacaaaccgagggcagaagccaggccagaccgaccagagcggcaacaaacgacaccagcacacgacacacgcgccacagggaccagacgcaacgcgacacaccgagagcagcacaggcatagacgcaatagagccaaagcgaagccactcacaacaacaagacgaagacatgccgagacaaacccaaacagcaatgcaagaaccagaaagatgcaagagagaagcacaaacgacacggcatcccaaactgggacacgcaggagcccgtacgcatctaaaacgatgggcgcgaacaacgcgcagaagaacggcaagaaaccgcatgcgcaagacatcacagcgaatggccaacagagtgcacaatacaacacgccgaaaacgcacccccagagtcaccaacccggagaaacggacaacacaacgcaaacccagcacccctgtgagcgccacacgagcgccagaaaacggagcacacagcacacaagaaggaccacaaccaacgagacacacgaccacgacaaagcaaacgcccagaaccagacacgtaaacaccatgagaagaagaaaccccaaccaaacatacagaaacacaagcatggccaacacgcgagaagcgcccacgcgaaaacgaagaaccacaacgaaaaaccacggaccaacacaaaggacagacgaaacaaaccacgaagcggcacacgagatacaggagccgaggacgcacgacagacacaccgacaatcaacaaacgaaggcacaccagccacggcagcaaagagacaaaacaaaagaccgacacgaaacgcgcaccccacacgcacagcgcaccaaccgagacccgacgcaacagaacaccccacagagcaccacgctaaacaccgccg

SEQ ID NO: 517835 - DNA, 101 bp, Homo sapiens
cttttccgcccccctttttttctgcaaatgggttggaccccctggggtgggctttcccccgttttccccaaggatgggaaaaaaggcccctttccccctta

SEQ ID NO: 517836 - DNA, 1154 bp, Homo sapiens
cgttgttttggtcgcccgtgtgttcataatgctcctgttggggagctcgcgtgtgagacaaacacaccgcactttttattagggtgcgcctccctgtctatttcccgcttgtctcgcggtgggggggccggtggcgtccaaaggagcgcccacacaccgctactcaccaagtggtcggtcggtgggggtctcacccacacgacggggggtttagtttacttctattaacctcgctcgttttactctttttctctctctcacggggcggcacttcttttttgtattgagaaaaagagggtggtgtatttattcgaactatagacgttgtgttttctccctctcggccggttgttttagattcagcgcccccttcagtgctcccccctctctccccacagctcgggggttgtatatagagacccactcacacaggtggttcgccccactctcgtgcgttgctctttggtgacacacactggtcgctctatccgttgtcttctcccctcgcgcgctcccggcgcggttgatcagcgcgcccgctcgggtggaggcccccccgctgcttatatttttgtgggctgtttcttcttgtcccccacaaaaggaatctttctgtgcggggcgcacatcaacacacacaggctcccctgcgtttgcacccggagcgaccaccgtgcacacacaggggtctatgtgttggtccctccacacatgcacagcagggtggtgtcttctccccggctgcgccaccccgcgcttgagatgaatattgtggggcggcaccaccacccccgcttgcccagcggggctcaccttttgtgcggtctcctctctccctgcgctgtgttataggacgggcggctaggtggctcattcggcagcactctctcctcattggttcccaccacccccgtgcgcagcacacggaagaagagtgcttttctccgctagcagacagccccatcctggtttatgttgtaaatattattccacacgagtgttatagcttatagcagaaccccgggaagaggacaagagggtggcttccccatggtcccccaaattttttttgtccgggggggtttataaaattttgggggggaaaccccccccggggaaattttttggaaacggaaaaaaatttttttttttta

SEQ ID NO: 517837 - DNA, 833 bp, Homo sapiens
  misc_feature (48)..(48): n is a, c, g, or t
aaggctagtagaggctggtgttaatcggccggcggctcgcgcttaggncgtgcactgcccgcccgccgctcgctcgctcgcccgcgcgccggctgcgaccgcagcatgctgccgagagtgggctgcccgcgctgccgctgccgcgccgccgctgctgccgctgctgccgctgctgctgctgctactgggcgcgagtggcggggcggggggcgcgcgcggaggtgctgttccgctgcccgccctgcacacccgagcgcctggcgcctgcgggcccccgccgggttgctgccgcccgcctgcggtggccgcaagttggcctggagtgctgccctgttgccatgcgcggagctctgtccgggagccggtggctgcgtgtgctgctcgggtgtgcgccctggtggagggcgaggcgtgcggcgtctacaccccgcgctgcggccaggggctgcgctgctatccccacccgggctccgagcttgcccctgcaggcgctggtcatgggcgagggcacttgtgagaagcgccgggacgccgagtatggcgccagcccggagcaggttgcagacaatggcgatgaccactcagaagggaggcctggtggagaaccacgttggacagcaccatgaacatgttgggcgggggatggcagttgttgtccggaagcccctcaaagtcgggtatgaaggagctggcggtgtccgggaggaaggtcacgtgagcagcacccgggcagattgggcaacgggtgccaagcatcaccttggcttggaggagcccaagaagctgcgagcacccccttcaggactcctgccaacagggactggacaggtctg

SEQ ID NO: 517838 - DNA, 506 bp, Homo sapiens
caataggggttgggtatattggggtgctatggttagttaggaggtctggggacatgggcctgagattttccagataggtcggaagatgaaactgtctatcctgggggtgttgatgacaaatctggcagccataaagatgattctatgatgctataatttttgaaatatttactgtagaattttgtccaccctccctgtccacatacacactagcttaggttaattagaagagcaaacagaattaacagtggcatcatggtatctggttgggtcttagagtagcttctatacccaacaagcccacaggagatgtttcccaggaggaggtggctggttaaagccatagaaaggaagtactacagtcaggaagaagagcaagatcaatgctcctattcccatctacagcattacattacctcttctggctgagtgttgattattttaaataggtagcagaggtcttccaaagctttactgatattggttgtggttgtagtgcccttcct

SEQ ID NO: 517839 - DNA, 310 bp, Homo sapiens
ggctgatctacaggatccttagcttttaccgcacatttaagacaggtgatgacactgcccagtcctttcaactctgtctcctcagttaatagaaaggaaacatagcccatctatctggacctgtgtagaagaatttggaggggaaaaaaaaaaaaacaggcaaaaaatgtccccttatttggtgagctacctttattctgccccatggtcctacagcaaagggcttatataaaatattttccagtttccctcatctaatagggctatattaataaatttattaagagcggtaaaagctggggtcccgagc

SEQ ID NO: 517840 - DNA, 425 bp, Homo sapiens
aatgcagcggactcggcagtgcgtagccactgcacccagcccacaagttgtctttttcatatagtggctgcctttcctttgggtagatacccagtagtggtgattgcttggatcgaacggtatatctacttttagttctctgaggactctccatactgttttccatagaggttgtactaatttacattcccaccagcagtgtgtgagtgttccatttgcaccgcatccacaccaacgtctatggttttttttgaatttttatcaatggccattcttgtgggagtaagatggtatctcattgtggctttcatttgcgtttctttaatgattagtgatgctgaccatttttttcatatgtttcttggccactggaatatcttcttttgagacatgtctattcatatcattgggatgcttttcggtgg

SEQ ID NO: 517841 - DNA, 856 bp, Homo sapiens
ggggaagggtgttgaatgtctgcccccctcgtggggggggttccccccatggggaggcgccatgattttcgtccctggcacaaattctatcggggaaggggaccacaactcgtcggaagaccgatcgacatgcgctttcgcaatggcggggcagaactgcctcttctcgcgcggacaccccctgcgttagttttttgtcatacgcgggaggtatgttggttacccacacgcgcggttgccatcagaggagtgccccgaccctcattgatattcggcccgccgatctcaacaccggttcggggccacttcttttctgggcgcgcgcacgacacggcgctgcagtgcccaccgcgcaatcgatggggactcgacgccagccgtgcggaggacaccacacctcgcagcgggggagggaccccaccccaccctgcgaggcacacccgcgcgagcgtgcaatgcaacacacccgctttttagacgggtgcagcaccgacgcggcgatagagagataaaaggagggaagaattcgcggggtacacaacacccgaggaaggtcattccatagcctgcccacttgtgtgttccaccaagggacgacgcactggtcgacccaccgcagggggagatacaagcaggttgcgtcccgacgcagccaaaaaactttgagtcatacacatgatggtcaaaaggtggataatagttgtggataaccatcctgttccaccttcggtggaccatctaccccacatccaccgcctttgtttaacaaagagagggatggaacccacgtcatgatgtgtcggtggtaacaacacattcaagagtatgatataaaaggggtgcgccccaaaagaca

SEQ ID NO: 517842 - DNA, 185 bp, Homo sapiens
tagttgtaaatgatgagagacatatatctccaccctcacggagttgtcatcaacctggagaggaagaagacagccaaaagagagaagtattgtctatgtagacttactagattcacatagtatcatccttctccagatgtgtataggtgtatgtcataaatacggtccagcataaagtaactaca

SEQ ID NO: 517843 - DNA, 248 bp, Homo sapiens
aaccagactgactcctaaactgatggaagatcatgtaaacaaaaggatttttcccctgaagcattgaaaaaagcaaatatcacctattgagtacatgtatgaagaagtgccgatagtaaatataaaaattcacatctagatcaatgtcctaatagtagggaacttgacaaagaagatcagctagttgcagaataaacatgaaatagctcagaccttgccagacagcaatcattaggggaacgaatcta

SEQ ID NO: 517844 - DNA, 139 bp, Homo sapiens
  misc_feature (89)..(90): n is a, c, g, or t
ttatactattctgcctagcaaactcaaactacgaacgcactcacgccatcataatcctctcgaccactaatagcttatgatgactaccnntattaaacctaactgggagaaactcctctgggtgctagtaaaccacgtt

SEQ ID NO: 517845 - DNA, 930 bp, Homo sapiens
tcccccggagttgttcgcgaccgccgtgtcggtgtgtgttttgggttgatctagacccccccgccccgggggcggcgggggcgtgccaagcaccacctttcgtcgcaggttgtgcccgccaggctgggcgcgcgctgctgtcgtcttccacagcccgcctcgtcttgtgtgtgccccccccccccctggggggtgagcacgtgggcgcccaccacacgcccacccggctgtcgtctccacccccccacgcagcggcggctgtgtcgtttgacgccgcacctgccgctctcccgcgcgcgcgtgggtcctcgcaccgccgaagtccccccccgctggtggtgcttacgcaacgccggcggcggcgccggtgtggtgggtggtctgcttctggccggtgcgtgtcggtggtgaagctgatggggcggctcgcccacgccctcccgcgccccgccaccctggtggggggcgcccccccgggccgccccacctatgatgtcccactcctctctctggggtgtggtcctcacggagacgggctctcgcctctcgtttgttttagacagccacgggaagaacctctttggttttttgtgttgtggccccgccgcggtgcccgtcgatggaggcccccggtctcccacgcgtggtttttttgttggtgcccccgtgatgtagcccgcgccaatgtgggggcccgccgcccccgccgccccgcccctcgggccccggggtggcgttgtcccctcgctggggcgaggtgttgagccgcaccggagggggatgtgagagttgttttttttggggcttttttgttttttttctccccccccctccccccccccccccccccccccccccccccccccagtttttttccccccgcggggggttttttttttttcaaaaggaaaggaaaatttttttttttta

SEQ ID NO: 517846 - DNA, 181 bp, Homo sapiens
ttggcccaggatgtcttcaactcctaagctcaagcaatccaccccttggcttcccagtgtgagatacaggcgtgagcatcgtgccagaccagctgagcatctcggagagctgcaggtggggtcatgagtcctcttacccaccagagccaggtactgccaccaccatcaaggtcgcagcagg

SEQ ID NO: 517847 - DNA, 612 bp, Homo sapiens
gaataggatcgagcgaggagcccaagtagcgagcgcgcgagatgaagctcgagccgcctccgaccgtggccgaccacacctcggcctgcctgcactgacctgcggccgcgagaatccggccccggcctccccgagagcgagccccggacggcgagaacaacaagaccggagctaacccgccgaccaaaacgccaccgaggcagcctgagcggagagcaaaggagggagggagggcaatgaagtgcaggccggggcgaagggcgcacgaacaacgcaagcgaggcgacacaacccaatccccgccgggcatacacggcacgggagcggcgagaccaggcgtggacgaaaacaacacagggaaccacagaaggccacaggaaagcgccgagggggcgccaggagagtgacgccaccgcaagagggcccggagaggaagaaaccagagagggaacgaaggccgggaacccaacgcaacgaacaagacacaaaacacccaccacagcaaggagaaaaaagaagcagagacaaccacaaaaacagaacaagcaggacacacccaccagggcgagggcccgacgaccagacgcgaatggagagcaacagggcgaaacc

SEQ ID NO: 517848 - DNA, 316 bp, Homo sapiens
gtcccttgcctttttaaaagcccccccctttttttttaaggggaagggcccggtcttttcccaagtccccaaagggggggggaaagcattgtttttgtgtaaattatgtaaagcaaaatttttttaattttcgcccaaaaactttttttttttgtttttttttgaaaaaagagccttggggcccccccttccccctttttttttcccccaaattaaaaggtaagaagggttttggtttccctgggggggggggggggcagccagggttttctttttccttttttttagaccggtttaataaaaggggcccccttta

SEQ ID NO: 517849 - DNA, 355 bp, Homo sapiens
ctctgcaggcaatagtaacacaagggtaagcatataagtatctaaacatatctaagcatagaataagtacggtaaacgtatgctatgacaatcttatgggaccacggtcattaagcaaaacgtgatgtggtgtcagactgtatatttaaagctgaagtaaatatcagctcttcagaaaatattgtcaggctattctatggaatttatctcaggttacaaaagcagggatagctataaagagagtatcctacgtctggagattggatctgtgcagtggacagctcttgccatgcccattcaatctttctccaaaaagctacatgcaagaaaggacacaaaatccttcattcaacta

SEQ ID NO: 517850 - DNA, 194 bp, Homo sapiens
gatctgacactcttagataagtatggttcaattttccatagatgggagaatatctacgagacctgacaacttgtattgtcgttcttaccttatccaataatatatcttcatttctatcgaaaattttatgatgaccgtattcctctcttgcatatacgtttctatttgttagcaactccatttagtatttcttt

SEQ ID NO: 517851 - DNA, 775 bp, Homo sapiens
tgagcatcttgtgcttccaagggctgcatcaagtgctgaagcgccctgcccggagtgactggcgtgcgtctacgtgaagtgaagtgctacttcttttcctgaggaacccagagactggaacacaggcaggcagtactgccactagccactgaggcggtgctggctgtgattcagagccagaatggagctggaatttatgttcaatgttcacgcaggagggagccctggatttggactacagcagagtttggggacgaattccactgaggtcaactggtggacccgtatatgatcctggacactgttcaccattcgcaggtccagtggtgacgttgtgctcttcggtgagagcccaaccaggcctggtagtcagaacggatgtgctctgactgaccacgtgaccttgggggtggtgcacggccaaagatgtgccctattacctatgaagagctggcgctgcgaggcccaagacgcgattggcaccacggaggcaccttactcgggcacatcaggtaggcacgaaagagggctatggcatcagttgggggattgggtatccattgtcattacacaatggaaacgccgattgggcctaatacactccataagacacggtggataggcgaaccacggaccatctggactctactatccattggactataaacgcggagcagcaacatagccagacttgctaggtagatatatagacaggtatggggaacaataacaaaggacgcactcaaatgtgacgccccacctatcaattcacacg

SEQ ID NO: 517852 - DNA, 798 bp, Homo sapiens
ttcggcgagggagtgggaggctgtagggcgggggaggagggcggggagtgagcgccttcctgtgttggtgccctgccctgagctgccaccgggaagccagcctcagttgactgcatgcgacccccaaacacccctcccccagtgatgtctggaggagatcatcacgccggtgtactgcactggtggtgtcagcccaatgtgcatgaagcagctgtggccatgtggagctgtgagcctgtgtgcctgccatgagaatgccatcaatgtacctgagtgccaggattatgagcatgctgcagtgtgtgcgatgcctgcagagtggttgaccctcttcctgtgatgatgtgccttccccccgtgtaccccagagcctggggttacaaggacctgagtgtacccaatatcactccaaagacctaatgagcatcaatgttgtgaatgctgtcccactgtgaacttgcttgtcaaacccccagtacattgtgggaatggagctacccgcacagacatctagccatgtggagcactggtgggactgctggctcttggctggccatcgcctccctcactctcaaacgacaccctcctgcacccgaagtggttccgcacggcatgagctttccagaattggctatgccgggaatcttccatttccagctgtggcaactttggggagtggttggacctggtcgtggatgactgctgccctccaggacggaagctattgtcgtgcatctgcgaggcaagaatctggacgcccgttgagaggctttcaggaatggagaaaagccgtcgggc

SEQ ID NO: 517853 - DNA, 305 bp, Homo sapiens
tggcacgccgacactccatctcctccctcccgctctacagaaacccctttgctgtctggtcattcggcgtgtgcagtctggagacccgaggatccacacctggttaattttgtatttttggtagagacagggtttcaccattttggccaggctggtctcaaactcctgacctcaggtgatccacttacctcgccctccctgggattagggcgtgagcttctgcgtccagccaccatctctaaatttttaacaaattttcttgtctggagtctcggcgtgtgcagtgtggtcgttcggcgtgtgca

SEQ ID NO: 517854 - DNA, 308 bp, Homo sapiens
tactggaggaacagtataattctagtgcatattgtgctattaggcgctgattcacacacacacacacacacaacaaacacacacacactaccaaaaaatgatcaccagaaaagacatctgtaggccctatccgtgaaaataaacaaagtcttcacaatgacccttgcacggaagctactattttacatatattactgagcaaaacagagactgaaacattaaggtaacaaacgagggggtaacaagaattgagattctaatccagaaactactagattccttaaaaccagctagaagggcaggaatac

SEQ ID NO: 517855 - DNA, 850 bp, Homo sapiens
attcatgatgtcaatggaaccacaggccaacctgaaagttgtggagaacactagtgctgcgcttggatcgatcctggcgtgtgtatcattgccacgatggttgtctagagactttggtggataattagtggaaccgatgtttacgtgattagttagagcgtaaagagataatggaactccaagccaccatccatgttcctgcaaaggacatgatcataaactttgtgcaaccactttttatcgtgtcgccatagtatcttccttttctagaatgtcatatggaatcactatagtatgtagccttttcagactggcttctttcacttaataatatgcaactcccggttcctccatgtcatttcatggcttaaatagtgcatttattgggtagcactgaagtaatactccatgtgtctacgatgaatagtttatccatatacatctatcgaaaggagttcttggtggtttccaagttttggcaattatgaataaagctgttgtaaacatctttgtgcaggtttttctatgggcatgtttttaattcatttgaataaatacccaaagaggcttcaacgaaaacacgagaaacacacacaagaaaacacaaacaagagaaaatatataaaaacacaacaacaaaaaagaaaaaaaaaagaggtggacgccgcgcacgcagcaaaggaaacgacatcaacaaacacacgcgggggcgcgcgcgccccgggaaaatgagcaaagggtacaaatggacaaccaagaaacactggaaagaggggtgaggtttcacacaaacaaacagcggggccacgacgctaacaacagagggcggcagagggttaagggaggcact

SEQ ID NO: 517856 - DNA, 311 bp, Homo sapiens
  misc_feature (23)..(23): n is a, c, g, or t
  misc_feature (85)..(85): n is a, c, g, or t
atacaaggtaactaaagcatgtnttctgtcctctgtagctcacattcacagcagatagtcacaagtactctgtttagtcaatttnctgctgctataacagaataccacagactgggtaatttatacagagaagctatttatttggcttatggttctggaggctgggaaatccaagactatagcaccagtatctggtgagggccctcccatggtggaaggtgtgaggaagtgagcacatgagacgagagaaaaatgggagttgaacttttatcaggtgcctactccaaaggtaactttaacacatccccatg

SEQ ID NO: 517857 - DNA, 679 bp, Homo sapiens
ggcgaagagagtcccctgttcaatcagcgctggtcccagtctctgatggctctaaactactttgtagcggctctacagcggagtccgctgtctggtgtacctgccgtagcaccggactatcagcatgccctacaacgtgatcggacctcacgtgcactgtggtggccgtgtgctaaggctccttagtacaatctcctcacccgaaccttccacatcgaggagccccgcacaggtggcctggccatgcggctggcctaccttatccggcgcgcccgaggtgtccccccactctgattcttgccctttccagcagctgcagcgtgccgtttctctctggggaggggagcctcaagggctgtttctgcacacttgctctccgtcagagtctggctatgttgaaccaaagtgcccctggaaccagcgatcagggcctactagctgtgttgtccagtaacaggagccacgagcacaaatgtggcatttgaatttgaacttaacttagaaattcatttcctcacctgtagtggcctacctctatattgaggtgctcaataagcaaaagtggtcggtggctgattgtattggacagcactagatatacgtatttccatcacaacagaaaggtcggctaggcagcactggccaaggtgctggagtgtactgcccagtgtatgtcacc

SEQ ID NO: 517858 - DNA, 697 bp, Homo sapiens
  misc_feature (129)..(129): n is a, c, g, or t
gcagccttcgtggccgctccccatttcctgcgctgcgtccggagcggcccctggttgcctgccacctgcctgtccccctccctgagtgccctggtgctcgctgacggcagagggctcctgtctggcccnaaacctgagctgggctgccctgctgtgtcctgtgtgtgcatggcctccactcctgctccctcctagggtcgacctgccttccccctgttgctcccccatctggacctgatcgttgcctgccccttttcccccttaccggcgtatcgtccatcgttgcattccccacgccgtgctttgcccctccccattcatttctgcgccctcttccctacgctggccccacatggtgcgcagctgccgcctgggcgccatctgcaattcacacactttgtacacgtggcctctaaacacttcttcatccacgtcgtgtttttcgcgttcctcctcccgtactaatacggtcactgcgactaacagcgtctctgcctgtctacaaacacaagaccaacacaccacaacaaacaccaatcactccgtgataactagtgcattcagccttcacctgttcactttactgtacaaacaaaccagttttattatccaacggacaagaacccaacataccactaccatcaaacctagaacaacacagccacagaacacctgatacatactacactccatccta

SEQ ID NO: 517859 - DNA, 496 bp, Homo sapiens
tctccctcttttccccctctgccatgaagcaatcatgctgttctattgtaaaagaggatcccttacttataaagccaagcttgtcatttaaattcactcaagttaggacaccaccgagctctgtcagatgtcagtctcaattcagcaggagaatgtttttcaacagctttctaacctctttgccgggaaacacagaggcttggatcaagggggaggggcagctgactgggcttgaaggatttttacagaggcaagattggaatttttcatttcaggcaggttttctttttctttacgttttcttattattattttttcctttttccctctaagcctcgtgtaaaagatattcccacaaaaagagagtgaaaaaaagtcagattggttgtaaggaccacttcagttgagggtctccttgaaggtatttaaacctgggagtgatgttggcatcttttctgcattaggggtattggctgtttgccaatcatttcccttg

SEQ ID NO: 517860 - DNA, 445 bp, Homo sapiens
  misc_feature (2)..(2): n is a, c, g, or t
  misc_feature (32)..(32): n is a, c, g, or t
  misc_feature (54)..(54): n is a, c, g, or t
  misc_feature (142)..(142): n is a, c, g, or t
  misc_feature (286)..(286): n is a, c, g, or t
  misc_feature (372)..(372): n is a, c, g, or t
ancggaagaaagaagcagcggcggaaccgacncacgttcaacagcagccaactncaggcgctggagcgtcgttcgagcgcacgcacttaccccgacgcctttgtgcgcgaggagcttgcccggcgcgtcaacctcagcgatncgcgcgttcaggtctggtttcagaaccgccgcgccaagttccgcagaattgaaagggccatgctggcaagcccgctctgcctcgctgctcaagtcctacagccaggaggcgccatcgagcagcccgtggtccccggcccaccgncctgagtccagattatctctcctggacagcctcgttcccctacagcacagttgcaaccctacaggcctgggagcttcagggcccgnaaacccaaggggttcaaacatgggccaacaagcatcggcaagccttccgtcttcaagggccaaagggagttta

SEQ ID NO: 517861 - DNA, 149 bp, Homo sapiens
cctagtgcacacatagaaaaggacactagatgacctgacgagaaggtggcaatctgcaagccaagaagagggctttcaccggaaacaaactcttccagatcttaattgtggatttctagcctccagaatggagagaacatgtggcattt

SEQ ID NO: 517862 - DNA, 434 bp, Homo sapiens
  misc_feature (23)..(23): n is a, c, g, or t
  misc_feature (50)..(50): n is a, c, g, or t
  misc_feature (136)..(136): n is a, c, g, or t
aggggactgagcactgcaagatntaacctgcccggcacatgctctgcctntatcccagcacggggaggcaggcagtcattgacgtcaggatttgagatcagcttcgccactgggcaaaacctgtctctataaaatntaaaattaaccggactgttggcgcccaccctaatcccgctactgggaggctgagacggagatcattgaacccaggaggcagagttcccgtgagcagagatcgtgccactgcactgcagcctgggcaacagagcaagactccatctcaaacaaagaaaaaattagccggatgtggtggtgcatgcctgtagtcccagctactcaggaggctgaggtgggaaaattgcttgaaccaggcggtggagccaagatcacgccactgcactccagcccaggtgacagagcgagactcggtctcc

SEQ ID NO: 517863 - DNA, 1073 bp, Homo sapiens
ggatcccaacttcccgtgcacatccgaggctggcttcataagcagacagccgcgaggagagtgtcctagtgcagcgtcctgctcccacagactacaatattagaccagatgggccgggagcccccctgagggctggcgcattcaccttcaccagcagagcacccgggacatgatggacctacgtatttggccgctgacaccttagaagacctgcggaggctggctacgggcgctgggccgtggcctcccagatgcggaggagggacgactatgggcaacccatggtcaagctgcacgaccaccagcaccggggagggcccacggcggcacccggtggtcacccccggaaggtgagcaagaggggacagagggagccgcaatctcacgaatccacccggaacgctgacctcggacctcatccaggacggtccaagggaacagacaccacaagggcctgcatcagcgtcccaagaccccaaggcaagcgcgcacccttccaactatctggaaccatcgcagaattagacgggcacagcagccgaaggaaggccccacgaaccgtagaatacaaggaccagccgccaacgacggaccgaaccccttcacaggcgaaaggcaccggcaaaggagaacaccgaccaggcggcgccgcccgcagcgcgggggcacgccgcgcacgcgcgccgcgcccgcggccacagcgacgacacgagcgacagacacagacagccaacaacacaacgacaggaagcagcacaccgaaaacggccgcgagcggaggcgccaacaagcagacgacgacacacgagaggacgagcgcaagcgacagcaccaccgcgcaagccgccccgaagcgcccaagaacccaggaaaccaagacgaggggggaaaagccacaccgaagagaggacgccagcggaaaggggggaggcggggcacgagaggcaagagccaggaaagcgggcggcacacggggcggcacgacgcgaacgcgagagggggagacggacggagcgcgagacggagaagccacgccgacggagccggacgaaaagagcggcagggaagggaac

SEQ ID NO: 517864 - DNA, 200 bp, Homo sapiens
tatcttaaaaattaatggagacccaaagagctattgcttatataggtaatagttatctagtagttaccatattattacataaataaaacctgggtatatacaaaatatttatgaatttagcaagtaaaatagccaactctatattaatggcaacctatttcaacatatattttccccaaccaaaaataatatttgtgaga

SEQ ID NO: 517865 - DNA, 640 bp, Homo sapiens
gggttatagtgggagaggggtcagcaggaaaccatgtgaacaaagatctctgtgtcataataagtttaaggaaaaggtcctgtgctttaatgtgcacgtacacaaacatctcagttcactcatatctcagtaaacagaacatacaatcaggttttacaccaagacattccattaccagggacgagcaggagacagatgccttcctcttatctcaactgcaaagaggccttcctctttcactaatcctcctcagcacagaccatttatgggtgttgggctaggggatggtcaggtctttccgttcccacaaggccatctctcaggctattacatggggagaaaccttggacaatacctggctttcctgggcagaggaccctgtagccttccacagtgtattgtgtccctgggtacttgagattagagaatggtgataacttttaccaagcatactgccttcaagcacttttttaacaaagcacatcctgcacagccctaaatccattaaaccttgagtcaacacagcacatgtctctgcaaacacagggttggggctagcattacagattaacagcatctcaaggcagaataatttatcttagtacagaacaaaatggagtttcttatgtctacttctttc

SEQ ID NO: 517866 - DNA, 234 bp, Homo sapiens
tgtcgactctgtaggaccccgagctgtctcaagatatgctctgtgggagcattcatcgggagatgtacaggggcagatcctcagagtcaaccacaccacgtataagatggagatactctggtactcaactcatcacagctgtccataatgaacacacggcggacatagagtccgatgttgttctatttcttcttgttctcagaaaaggtcagagggagcccgtacgagtacact

SEQ ID NO: 517867 - DNA, 242 bp, Homo sapiens
  misc_feature (107)..(107): n is a, c, g, or t
  misc_feature (125)..(125): n is a, c, g, or t
  misc_feature (134)..(134): n is a, c, g, or t
  misc_feature (157)..(157): n is a, c, g, or t
  misc_feature (164)..(164): n is a, c, g, or t
  misc_feature (173)..(173): n is a, c, g, or t
  misc_feature (180)..(180): n is a, c, g, or t
  misc_feature (188)..(188): n is a, c, g, or t
  misc_feature (230)..(230): n is a, c, g, or t
cccttttgggtttaatctttccccttgacccagaacttcctccccccaaaaatgcctttaaaacccttcctgaggcttaagcattttgccccccttactaactgccngttttccagccctgaggnggggcaaanaacggggcatatttaagggggcntctttgngtaaaaaangcatggngtcagganaaaccccccttcataaactgctttgggcaaaaaggaataaanccttttttccca

SEQ ID NO: 517868 - DNA, 287 bp, Homo sapiens
tgaatgtttgtgtcccccaaaaattcgtaaatgaactcttcatccctaggcaacagtttaggaagcgattaggtcctgaggactctggccctcttgcatagaattagtgctcttataaaagatgcccgagggagctcttttgcccctcctgccatgtgaggacacagtagaagctaccatctgtgaaccaggaagcccccctcaccagacactgaatctgctggagccaccatcttggacttcccagcctccagagctgtgagaaataaatgcctgttgtttaagct

SEQ ID NO: 517869 - DNA, 658 bp, Homo sapiens
caaaaattcctttggggccaaagcattcatgtaaagggccagaatttacaaggctgggaaccaggataggtgggatattccggggacccctcaagcttctatggctttagagaagggaagaccctcacagtctctttgagtagagagagtggcattcttctttatttctcgcagatctccacagagttcacattctaagagacccgttaataaacacaccttatcctgcctcaatatggcaatattggaatatgccttaattattagaacttggcagaggctggggaaaatctatagagggaaagagaagtcaattgttttaggttttaatgttcccaccaatccaatggtgtggcctttttccatttttccagataagaagcttgagttttagaaaagacagtgatttcagacagtcccactgagtaagcagcataactgagttttcaactgaggtctacgtgcccactaaaagctgtgcattttgtacaagttcaccactgtttatgcacgtaggtgtgtatggaaggtggttattgagaggagagaggagagtaagaggcaaagagttacacattttaatcctgtgttggcaaattttatatatatatatatatatatatatatatatatatatataaattgaactagttaataa

SEQ ID NO: 517870 - DNA, 150 bp, Homo sapiens
cgcagaagccacgtacagtccagatcccagcgtgtgccggcggatgcatgtatacgtagcaggtcccagcccgtccagggtagtgaagacgaacgtgatcccagagtcgtcgttcaggatgtaatcagtgtcgtgtttcggttacttggt

SEQ ID NO: 517871 - DNA, 265 bp, Homo sapiens
  misc_feature (216)..(216): n is a, c, g, or t
tgggtgggtccaatgtcatcacaatgttccttataagagagaggcaggagagaaagaatcagaaaggcggcagcatgaggaaggctcagcctgacattgctggcttagaagatggaggagtgaggccatgagcgaaggaatgcaggaagcctctagaagctggaacacacccctgctgacacctggacttgtacctagtgaaacccatttcagacntcagacctccaaaactgtgcagtaataaagctgttttgttttaagccac

SEQ ID NO: 517872 - DNA, 161 bp, Homo sapiens
tcccctggtcgcgatcagccgaccagcgcattcgcacagtacgggggttggacgcactgtttaacagcaacagcttgtcgggggagaatgtggatttttgccttgtgtcagattccgccatcagttgacgcctgtcaccggtatttaagcttatccgacga

SEQ ID NO: 517873 - DNA, 184 bp, Homo sapiens
cgatctagaggatcccgaaaacgacatagaggcaggcggatcacgaggtcaggagttcgagaccagcctgaccaacatgacgaaaccccgtctctactaaaaatacaaaaattagctggacgttatggcgggcgcctgtaatcccagcatacttggtgaggctgaggcagacagaatcgcatta

SEQ ID NO: 517874 - DNA, 110 bp, Homo sapiens
cgtagcattggtggccaaatgatctgatggtaaatggagggatcgttgacctcggtctgttatgtaagaggtatgcggttgggatgggagggtgatgaagactaggatga

SEQ ID NO: 517875 - DNA, 1317 bp, Homo sapiens
  misc_feature (338)..(338): n is a, c, g, or t
  misc_feature (354)..(354): n is a, c, g, or t
  misc_feature (358)..(359): n is a, c, g, or t
  misc_feature (363)..(364): n is a, c, g, or t
  misc_feature (372)..(372): n is a, c, g, or t
  misc_feature (377)..(379): n is a, c, g, or t
  misc_feature (385)..(386): n is a, c, g, or t
  misc_feature (416)..(416): n is a, c, g, or t
  misc_feature (427)..(427): n is a, c, g, or t
  misc_feature (435)..(435): n is a, c, g, or t
  misc_feature (447)..(447): n is a, c, g, or t
  misc_feature (453)..(453): n is a, c, g, or t
  misc_feature (462)..(462): n is a, c, g, or t
  misc_feature (477)..(477): n is a, c, g, or t
  misc_feature (479)..(479): n is a, c, g, or t
  misc_feature (638)..(638): n is a, c, g, or t
  misc_feature (655)..(655): n is a, c, g, or t
  misc_feature (658)..(658): n is a, c, g, or t
  misc_feature (672)..(672): n is a, c, g, or t
  misc_feature (726)..(726): n is a, c, g, or t
  misc_feature (743)..(743): n is a, c, g, or t
  misc_feature (749)..(749): n is a, c, g, or t
  misc_feature (753)..(753): n is a, c, g, or t
agtctctctccatgcccctcatctcttcctttagccctcgccttcttccatccatgtcttccaaggcctgatgcattcataagttgaagccctccccagatccccttggggagcctctgccctcctccagcgccggatggctcgtcctccatttggggtttgtcgtcctcttgtgtgtcactcttacttttgggtgctggggtggctgccagtccctgtcccgggacctgctgggagggacaagaggccctcccccaggtctgaagagcatgccctttgccgttgcatgcaagcagcgcctgtgtattccagcgtgcagatcccagcagtccgtgtgncggccgggttgccacngagnngatnncagaaggnctgannnggcgtnnaggaattgtggcgttgactggatgtgcccnggaggggtcgngggggccnctcacagaaggngactgncagtgggcncactcacatcccacngnctgctgttctgaaaccatctgattggctttctgaggtttggctgggtggggactgctcatttggccactctgcagattggacttgcccgcgttcctgaagcgctctcgagctgttctgtaaatacctggtgctaagcatcccatgccgctccctcctcnactgatgcacccaccgnccntgagggcccgtccntaggaatggatgtggggatggtcgctttgtaatgtgctggttcgtctttttttntctttcccctctatggnccttangacnttcattttggtttgtttccatcttgtatgtcgatcttatttagggtgctggggtggcatgccagaccctgtcccagggacctgcgtgggagggacgaagaggccctcccccgaggcagaagagcatgccctttgccgttgcatgcaagcaggcctgtgattccacgtgcagatcccagatagcctgtcggggcaggggtgccaatgagaggcattccagaaggactgagtggggcgttgaggaattgtggcgttgactggatgtggcccaggagggcggtcgaggggggccaattcacagacaggggactagacagtgggcaacactcacgatcaccaagtggctgcgtgtctctccaagaagaaacgacactgcaataaagcaggtcttgtacgggccagtcgtgcccaggggacggggagctacaagcagcctctgggtctgggtccggccaggaactcccgtttctgcagtggtgacttggtgccgtttctccacatctgtgctcccgtgccctcttgcctggctctttccctcggccaacttggctggccccatattccg

SEQ ID NO: 517876 - DNA, 1058 bp, Homo sapiens
  misc_feature (338)..(338): n is a, c, g, or t
  misc_feature (354)..(354): n is a, c, g, or t
  misc_feature (358)..(359): n is a, c, g, or t
  misc_feature (363)..(364): n is a, c, g, or t
  misc_feature (372)..(372): n is a, c, g, or t
  misc_feature (377)..(379): n is a, c, g, or t
  misc_feature (385)..(386): n is a, c, g, or t
  misc_feature (416)..(416): n is a, c, g, or t
  misc_feature (427)..(427): n is a, c, g, or t
  misc_feature (435)..(435): n is a, c, g, or t
  misc_feature (447)..(447): n is a, c, g, or t
  misc_feature (453)..(453): n is a, c, g, or t
  misc_feature (462)..(462): n is a, c, g, or t
  misc_feature (477)..(477): n is a, c, g, or t
  misc_feature (479)..(479): n is a, c, g, or t
  misc_feature (638)..(638): n is a, c, g, or t
  misc_feature (655)..(655): n is a, c, g, or t
  misc_feature (658)..(658): n is a, c, g, or t
  misc_feature (672)..(672): n is a, c, g, or t
  misc_feature (726)..(726): n is a, c, g, or t
  misc_feature (743)..(743): n is a, c, g, or t
  misc_feature (749)..(749): n is a, c, g, or t
  misc_feature (753)..(753): n is a, c, g, or t
  misc_feature (874)..(874): n is a, c, g, or t
  misc_feature (962)..(962): n is a, c, g, or t
  misc_feature (1052)..(1052): n is a, c, g, or t
agtctctctccatgcccctcatctcttcctttagccctcgccttcttccatccatgtcttccaaggcctgatgcattcataagttgaagccctccccagatccccttggggagcctctgccctcctccagcgccggatggctcgtcctccatttggggtttgtcgtcctcttgtgtgtcactcttacttttgggtgctggggtggctgccagtccctgtcccgggacctgctgggagggacaagaggccctcccccaggtctgaagagcatgccctttgccgttgcatgcaagcagcgcctgtgtattccagcgtgcagatcccagcagtccgtgtgncggccgggttgccacngagnngatnncagaaggnctgannnggcgtnnaggaattgtggcgttgactggatgtgcccnggaggggtcgngggggccnctcacagaaggngactgncagtgggcncactcacatcccacngnctgctgttctgaaaccatctgattggctttctgaggtttggctgggtggggactgctcatttggccactctgcagattggacttgcccgcgttcctgaagcgctctcgagctgttctgtaaatacctggtgctaagcatcccatgccgctccctcctcnactgatgcacccaccgnccntgagggcccgtccntaggaatggatgtggggatggtcgctttgtaatgtgctggttcgtctttttttntctttcccctctatggnccttangacnttcattttgttcagataccatgctggtgctagactaaagggtggggacgaggtgatagatgtggccccagcacggctctcaagcagaacgcaccttgcaataaaacgggtcttgtcggccnagctgcccgaggggagcggcatgctacgagcacgcctctgcagtccttggtccgccagcgacctcccgtcttctccgtggctgcttgngcgccggcttctctcacatcgtgtgcgtccgctgcccttcttgccctgcctctttcccttcgcctcaccttgcctgggcccccatactcnccccag

SEQ ID NO: 517877 - DNA, 932 bp, Homo sapiens
gtacaccgtccgttcacccccgtctcttccgttctgctctttacggtgttggaaagggatccatcgtccaggcaggccttcctggtggggcttgtttcctgaaaccatgatgtacttttatcatacatgagtcttgtccagagtgctattgctaccgtgtatcggagtctcgcatgcctccctcccgcgggaggtatctcctactatatagaaaattccgtactgtgggatttgtagacatattttcgacatcagggtatttgtgccacttggccaggcctcctcggagaagctatgtaccaccgatgtggaaaggagacggaagccaggactaggacatagggtcaattcagtgacctgctgcagatgtcgacacatgactagatcattggactacgttgccattttaagagcgtaaaatcggagactataccggaatcctgacaaggggttgatccacccaatgacctaggatagaaggcagactaggtagcgctagaacaagaccactgtggatacccgggacaccaggatctgtggaactatacccccttaccacttccaaggcccagggctatcctacctaccctgatacgtagaggcgtcatttgttgcaccacatgggagctcttcttacaagcaaccgtgcccttggagagacactaggcatcagcaaggcccaggaacgccagagacgccccttggaggtccccaggagagggggcacagagcgggccccgaaggggaaatgccgtggcgccgacgtgacaatcccacaccgcgtggagccagggcggcatgccagaggcaatgagctacattaggcacaagatccgaagttggaacccacagttgggccaaacactaaagggcgggaaagtgatcaccagcccaaagaagacacaacagaacacaaccagacgaagggaaca

SEQ ID NO: 517878 - DNA, 346 bp, Homo sapiens
taaggagcagagtggcattgttcatggacacctgtccttcatctccatctaggctagggaacactcacaagcccctccctggcctcattcctttctcctgcagtgtcaaattcagctttacggagtcccactttgagataatgcatccacatcctggggctgaaccctcaaagatgatgtttcccagttaccatttcatatctaaagcctggaagttttgtgacatgtccgaggcccccagccagcagctcgtccctgtcctaacttggtacgggtccagcatcaccgctgaccagaatatgacagaagggatctcagtgacccactcatctgattgtgtgcccag

SEQ ID NO: 517879 - DNA, 917 bp, Homo sapiens
gcaaagaaagttgttgaaaatgatattaactgcgagtgtaaatgcagaagacacatagtagcttctgcatttacactcgcagttatatcctagcaaagaaagttgttgaaaatgataagtaccctctggagtagaaaaaccggaagtgatgaaccagcctgtcatgtatatatgaatgatcggtgttatatggtttctcatcagcaagtaaaactgtctgaggacttacaataccattccagaggttcacaagaaatacaaggaagatgagcctctgtttacaagcagccttggggtccatcctgtgatgagcttgaatcaaattgtggaaagctgtcttcttcctgagctgaactgtgggagatggcttatctttgataacatgggagcagattctttccatgaaccatctgcattcctaatgattttcagaggccagacatttattacatgatgtcatccagctgattggtatgagatgcaagatgctggaaattacattcagcactcaactgatgaagaacatacttcttgtgccttctgcattcagctgagacaaagaagacagcataatccgatgagagctcccaaacaggcattcaaggccccaccccacaatccagaaagacgacaggtcaaggctaggtcggaacccaacatacccagggcatggcacaaataaaacaaaacaaaacaaaatactccacaactcacacggggcagacaagaacaatacgcacaagcgaatggcgaacacaacaagaaccgggtgcagtagccactcacggggacaacggcgaaccaccagagggacgcagaacacacgacaagaaggaacaaccacaactaactacacaagcaaccacagacgcaaggaaagaaccacaagatacccatcgcagacagaccaacgcgac

SEQ ID NO: 517880 - DNA, 363 bp, Homo sapiens
gagctcggtacccatccttcccttttttacgtattacatattttataaatttatcttggctggctcatctccctcactattatataagctccaaaacaaggatttttgctggtttggttactggtatgtcccaccgcctaaaacaaaaagtggaataacctaggggctcaaaagggatgtgttggatgaatgaaaactttaccaaagcctttttttccagggccaaggagaatttgtaaaaattttaagccccattctctcctttgggagcacaaattcccttttctggcttaaaacttcaagcctttttgttaacccgaatttttgccccccattttttttaaaaacgggccccaacaaagg

SEQ ID NO: 517881 - DNA, 289 bp, Homo sapiens
  misc_feature (25)..(25): n is a, c, g, or t
  misc_feature (111)..(111): n is a, c, g, or t
atagttcataagaccacagcatgantttcaattagcttttctcactgtgtgaagggggaaaaaaagaaaaaagaaaaatcagaccttggagaacagggttgttggaaagcnttttcaatgcctgcacatagttttttcaccagggcaaaactgcaataagatggagaatgggcccaagaatcaaatgctctttaagttagcagttctgatgttagttgtctatttgaagaaaagtgccacatggagagattatttgtgggttagaaatcttaggtccaagttcccagtt

SEQ ID NO: 517882 - DNA, 167 bp, Homo sapiens
ggtagtatgattaatagacattatgcctgatgagcgaagtaccacattatgtaataatatattcaccataggagggtgacgtacgataaatgtgctcttagagccaagtttcaaatgtaatatatattatcatttctaactggtgattgaaactggaagaggttgac

SEQ ID NO: 517883 - DNA, 291 bp, Homo sapiens
  misc_feature (37)..(37): n is a, c, g, or t
  misc_feature (87)..(87): n is a, c, g, or t
  misc_feature (147)..(147): n is a, c, g, or t
  misc_feature (149)..(149): n is a, c, g, or t
  misc_feature (253)..(253): n is a, c, g, or t
ctctgttgcccaggctggagtgcagtgatgtgatctnggctcactgcaacctctgcctcctgggctcaagcagtcctcccgcctcancctcccgagtggctggttctatgagcagccaccaccacacccagctaatttttgtatttntngtggagacggtttcaccatgttgctcaggctggtctcaaaaactcctgagctgaagcaatccatccacctgtgtcaggctcaccaagtgctggggattgcaggngtcaccacttgcgcccggccatggttgggtttttttaa

SEQ ID NO: 517884 - DNA, 161 bp, Homo sapiens
tctactgcctgtgttcccagctactcgcaaggctgaggcaggggaatggagccaacccgcaagacggagcttgcttgcagagagccgagatggctccactgacactccagcactgaacgataaagcagagactctgtctcaaagaaaagaaacgcaaagag

SEQ ID NO: 517885 - DNA, 164 bp, Homo sapiens
atctcatacaggatacccagacggttcgaccagagttgggctgcaggactcggaaactgcctatgggcactgagctattccttccggcggctggtgaactccttgcgatctcactgtcgcaggctcgcatcacctactctccattgacccactacccgatctcc

SEQ ID NO: 517886 - DNA, 961 bp, Homo sapiens
cttcgtgagacagaacactggtgactgggcaaaactcacccctgcaacccgctcaaagcaatgggataggcaaaagcactcattatcaactatatgtcagtccataggacaccgtagcatgcggagcccatgtcgacgcgacgtcacatggcatcatgatctcagtcataatagcaggagcgcaattcagcatacgagcatcaagaacgccatgtgataaacattttagcaccaatcggatggctaggtcgccgaatggggaaaagaggctccgataccacagatagtgccctcagcgctcttgggagataggagtagataaacctggcagtcggatagaaccggtcgggtattcgtaggtaacttaggatcattccccctatgatcgcacacaatgtgcgcaccaagcgagggatcagtaacctcatgtgggcccattcatcgcatgacgaataggcacctccagtagcagccacatgcagcacgtaagattcctaaaccacacaagtagaactatcaccgagtggcatccattcgttcaagaggcttagaacaatagatcagaattggtacccatgaactgatgatgtagcctgccatgagactgcacagcgagtgacaactcacgaaccaggtacattgagaaatggacccataacaaacttgatgagcacatgcaaccacagacgagaggcgcagtgaccacatcacctgcagacagaccagcaccaagacgacgagaaacagatcgagacacacaaacgtaacagagagaaccagcaaaggatacacaaacaaacacagaggcggcaacaaatcccaggtaggcaacccaggaagcaacataaccaaggacacgccaccaagcagaagcagtagacagccgacacacatcggagacaaaagggcaccaggacaagagcaacaagacaccccgtgacagcacacacacaagaggcca

SEQ ID NO: 517887 - DNA, 209 bp, Homo sapiens
tccttgtctttacatggagaatctccctgagatgcttgcccgcagatagccttgcctgttttttaacccagcacacgccgctcctcctctgataataacctctgcgctgctcttacctccgtgcgcccatctacaagttacacacgacttccactattcggccacatcccactccaattaaatcgtatatatatactaggtattaatat

SEQ ID NO: 517888 - DNA, 612 bp, Homo sapiens
  misc_feature (30)..(30): n is a, c, g, or t
  misc_feature (39)..(39): n is a, c, g, or t
gacaagggacttgcagcataggaatacccngaatgtgtnggcatggggactgcaccaatcttccaacttcaaaggactgctgctgcagtagctgcccagtctggaatccttgatagaacaatgtgtctgattatgaggacccaaggacccataaaaaagtatgatggttataccctcgtgccccactggtaactggctaccaaccgagtgattcttgctgagtttgactacacagctcagcccctggaaaccttcccttttgatcagagtaaagagcggaattactatgtacctaatgaaggctgacatgatgccattcctgtactggaatatgatgctcagaggctactggggaggtccagccttcttgcgaaagctgtttcatctgggcatgaattaaagatggctcacagcttgcttttcttggatggcttctggatcaaaatcgcagttactgattgacatgacagatacaaaggactcagaacctcaccctttaaggaggttggacatggtgacctttctaggcctctgaatagctatcatgtggacaacccagaacgagtctttggaaacatccaagtgaaataataaaactctattttctaaata

SEQ ID NO: 517889 - DNA, 665 bp, Homo sapiens
gtttttcagggttctcaatggttacaagatagatcataagttgctgctgacaggaaccccattgcagaataatctggaggagctcttccatctcctgaacttcctcaccccagagagatttaacaacttggagggcttcctggaggagtttgctgacatatccaaagaggaccagatcaagaaactgcatgatttgctggggccacacatgctgcggagactcaaggcagatgtctttaagaacatgccagccaagacagagctcatcgttcgggtggagctaagccccatgcagaagaaatactacaaatacatcctgactcgaaattttgaggccttgaattcacgaggtggtgggaaccaggtgtcgctgcttaatatcatgatggatcttaagaagtgctgcaaccatccatacctttttcccgtggctgctatggagtcccccaaactccccagtggggcttatgagggtggggcacttattaagtcgtctgggaagctcatgctgctccagaagatgctgcgaaagctgaaggagcaaggacaccgagtgctcatcttctcgcagatgaccaaaatgttagacttgcttgaggacttcttagactatgaaggctacaagtatgagcgcatcgatggtgggaagtcttgctggtgggtag

SEQ ID NO: 517890 - DNA, 832 bp, Homo sapiens
gtgaggtcactgccgggctcggcgtgagtcgctgcggggctgacgagggtggcagtgcggcgaggattgacggcctggtcagcacccataatgacttcagcaaataatagccaatcgcagattacaactacaagtgaaacaaaaaatgccaggaagaaattacaagcacctttatgccgggcatttagacacaaactgggcacacaacagcacattacaaccacaccaggatatggcacaacatatagaagacagcaatgggtgtccctgcaacgagaaatttcacctccctattccgcacaatggggaatttctcacggcacacacaggacagcaaaggcaaagctaaaagagtcttcctaaaaaaaccagagcaggaaaaacacaaaaaaggaggcataaaatcttatgcattaatgaggcatgggcaaaacttgatgtggaccgtatccttgatgagctttgccaccagcacgatagctacccatgcagtcgtctgtctcaaggactcacgagtccggaagacgatgccgcttcatgtagattcacaaaaggctctgtatttaacaagaagacgggcaataaaatacttcaaaacaaggaccgcataattgatgaagccaaattgggcgttgctaccacaatcagggcatggatgcccgatccaatataaatcccggggttggccaacgaaacagcagcgtcaggcctaatttaaggactgcaaacaacttggctggtcggccgcaatctgcatggccactcaaccagctgccttgcagcacaagttatacaacgcttgttccaacaaggggcggccatggcttgccca

SEQ ID NO: 517891 - DNA, 110 bp, Homo sapiens
ggacccttatgctacgagaagagaatggctgttgcagtagcgtcagagcagctccagtgctggggattcggacggagagcgcgagactcgtgcggctgagcgcgcccgac

SEQ ID NO: 517892 - DNA, 443 bp, Homo sapiens
ggatccccatggtcctcagctgcatcctgggctccaaggcaggctccatgtccaagcaggagcttgacgacattctcaaatttggcactgaagagctattcaaggatgaaaacgagggggagaacaaggaggaggacagcagtgtgattcattatgacaatgaggccatcgctcggctgttggaccggaaccaggatgcaactgaggacactgacgtgcagaacatgaatgagtatctcagctccttcaaggtggcacagtacgtcgtgcgggaagaagacaaggtgagaggctttgggggccagacattatctatcccaggccatctccaaaaggcagtatcctttactcagccttgaagtaggagggtctgtcccccttaaaacagtagtggacctcaaacaacttcttcgtctaatagctgagaccatcgtgcactcgaa

SEQ ID NO: 517893 - DNA, 327 bp, Homo sapiens
ggcgatgtcggtgcatgttggcacacagaagcagcattggcatgaccagtgtgggtcctggttaggggaagagaactgggtttgacaacaacagggtatctctgaggttataaaaagttgggttctgatcatttggagatgaggtccctatggatagggcaccatatctaaaggttcaccatttacattgcaaatatacattcagttctctgagagtgagcagagaaggcagaggttctcagtcttctgacaaggtcctggagcatcaggggagagcccattcttacaaaactccacaccagcatgcaagcccttacatggcacgcg

SEQ ID NO: 517894 - DNA, 4490 bp, Homo sapiens
gtttttcagggttctcaatggttacaagatagatcataagttgctgctgacaggaaccccattgcagaataatctggaggagctcttccatctcctgaacttcctcaccccagagagatttaacaacttggagggcttcctggaggagtttgctgacatatccaaagaggaccagatcaagaaactgcatgatttgctggggccacacatgctgcggagactcaaggcagatgtctttaagaacatgccagccaagacagagctcatcgttcgggtggagctaagccccatgcagaagaaatactacaaatacatcctgactcgaaattttgaggccttgaattcacgaggtggtgggaaccaggtgtcgctgcttaatatcatgatggatcttaagaagtgctgcaaccatccatacctttttcccgtggctgctatggagtcccccaaactccccagtggggcttatgagggtggggcacttattaagtcgtctgggaagctcatgctgctccagaagatgctgcgaaagctgaaggagcaaggacaccgagtgctcatcttctcgcagatgaccaaaatgttagacttgcttgaggacttcttagactatgaaggctacaagtatgagcgcatcgatggtggtatcacgggtgccctgaggcaggaggccatcgatcggtttaatgctcctggggcccaacaattctgcttcctcctgtccacccgagctgggggcctgggcatcaatctggccactgctgacactgtcatcatctttgattctgactggaacccccataatgacatccaggcctttagccgggctcatcggattggccaggccaacaaagtgatgatttaccggtttgtgactcgcgcgtcagtggaagagcgaatcacacaagtggccaagagaaagatgatgctgacacacctggttgtgcggcctgggctgggctccaaggcaggctccatgtccaagcaggagcttgacgacattctcaaatttggcactgaagagctattcaaggatgaaaacgagggggagaacaaggaggaggacagcagtgtgattcattatgacaatgaggccatcgctcggctgttggaccggaaccaggatgcaactgaggacactgacgtgcagaacatgaatgagtatctcagctccttcaaggtggcacagtacgtcgtgcgggaagaagacaagattgaggaaattgagcgagagatcatcaagcaggaggagaatgtggaccctgactactgggagaagctgctgaggcatcactatgagcaacagcaggaagacctagcccggaatctaggcaagggcaagcgggttcgcaagcaagttaactacaatgatgctgctcaggaagaccaagacaaccagtcagagtactcggtgggttcagaggaggaggatgaagacttcgatgaacgtcctgaagggcgtagacagtcaaagaggcagctccggaatgagaaagataagccactgcctccactgctggcccgagtcgggggcaacattgaggtgctgggcttcaacacccgtcagcggaaggctttcctcaatgctgtgatgcgctgggggatgccaccacaggatgccttcaccacacagtggctggtgcgggacctgaggggcaagactgagaaggagtttaaggcctatgtgtctttgttcatgcgccatctgtgtgagcctggggcagacggctctgaaacctttgccgatggggtccctcgggagggactgagtcgccagcaggtgttgacccgcattggagtcatgtctctcgtcaaaaagaaggtgcaggagtttgagcacatcaatgggcgttggtcaatgccggaactgatgcctgaccccagcgccgattctaagcgctcctccagagcctcctctcctaccaaaacgtctcccaccactcctgaggcttctgctaccaacagtccctgcacctctaaacctgctactccagctccaagtgagaaaggagaaggcataaggacacctcttgagaaggaggaagctgaaaaccaggaggaaaagccagagaagaacagcagaattggggagaagatggagacagaggctgatgcccccagcccagccccatcacttggggagcggctggagccaaggaagattcctctagaggatgaggtgccaggggtgcctggagagatggagcctgaacctgggtaccgtggggacagagagaagtcagccacagagtcgacgccaggagaaaggggggaggagaagccgttggatggacaggaacacagggagaggccggagggggaaacaggggatttgggcaagagagaagatgtaaaaggtgaccgggagcttcgaccagggcctcgagatgagccacggtccaatgggcgacgagaggaaaagacagagaagccccggttcatgttcaatatcgccgatggtggcttcacagagcttcacacactgtggcagaatgaggaacgggcagctatttcctcggggaaactcaatgagatctggcacagaagacatgactattggcttctggctgggattgtcctccatggctatgcacggtggcaggacatccagaatgatgctcaatttgccattatcaacgagccatttaaaactgaagccaataaggggaactttctggagatgaaaaataagttcctggcccggaggttcaagctcctggagcaggcgctggtgattgaggagcagctgcggcgggcggcctacctgaacctgtcgcaggagccggcgcaccccgccatggccctccacgcccgcttcgccgaggccgagtgcctggccgagagccaccagcacctctccaaggagtcgctggcggggaacaagccggccaacgccgtcctgcacaaggttctgaaccagctggaggagttgctgagcgacatgaaggcggacgtgacccgcctgccagccacgctgtcccgaataccccccatcgcagcccgccttcagatgtccgagcgcagcatcctcagccggctggccagcaagggcacggagcctcaccccacaccggcctacccgccgggtccctacgctacacctccggggtacggggcggccttcagcgccgcacccgtaggggccctggccgccgcaggcgccaattacagccagatgcctgcagggtccttcatcacagccgccaccaacggccctccagtgcttgtgaagaaggagaaggaaatggtgggggcattggtgtcagacgggctggatcggaaggagccccgagccggggaggtgatctgtatagacgactgactggatcccaggcctgcccttcacccaggccccgtccccgaggccgacccccagctcaagcgctggggcctgctgccagccctccaccttccccaccccttgggccatcactgggctaggaacccctttgcccctctctgcagctcctctcttcaagaagggccctttgtctttctccactcccacacacctttcccaccaagccttgaagactgtgctggtgagaagaagtctgggtgggagatggctggcagggtcttccaagtaccttcctcccacactgccaagtatacacaacttcccagtaaatggttgtggggaggaaagaggtggagcctccccagccgtttccctgcagaatcagctctgtctcatgtggaagtggagaatcagccttgcctggcctttaggaacttttgtggggaagagagctttgaagagaggagggggactttagagagggatgaaaatgagccctgggagggaggaagggacgaggaggggtggctgcatgttaccgtcccctacctctccccacgtggagggtggagcagttatgagggaggaagtcaactgctgttcagcctcagaataaaggtgccgttcactggctcagttacctcctgtgtaccggcatcttgtgttgggaatgttcccccctccctagggaccaaggaccacccctacaaaaagagtaatggttgggtgatactccctcaagccaaagaggagctccccaacctgttctagggacccaggtaacctagaagggtgggagagaatacaatgggccagatgtggtggaagcccagctctggggctcaggttcctggaagacttctactaccctccctcctcaaggcctggatacagactaaatttgtataagtcaggcaggggacctagtcagggtcttgggagctaccttgtcgttgggaccagagcaaaatagtggagggcaggctagggaaatgtgggcacatcccccctcccaggaggggccggggagagtggcagtttgcatggcgaaccccccacttcctctttgctgccccttcactttcttgctgcccctttcccagtctctcttcacacccactcctggtctgtcctgatcccctcttctgtatcaggtttattggttgtacatataaattatactttcctt

SEQ ID NO: 517895 - DNA, 4536 bp, Homo sapiens
gtttttcagggttctcaatggttacaagatagatcataagttgctgctgacaggaaccccattgcagaataatctggaggagctcttccatctcctgaacttcctcaccccagagagatttaacaacttggagggcttcctggaggagtttgctgacatatccaaagaggaccagatcaagaaactgcatgatttgctggggccacacatgctgcggagactcaaggcagatgtctttaagaacatgccagccaagacagagctcatcgttcgggtggagctaagccccatgcagaagaaatactacaaatacatcctgactcgaaattttgaggccttgaattcacgaggtggtgggaaccaggtgtcgctgcttaatatcatgatggatcttaagaagtgctgcaaccatccatacctttttcccgtggctgctatggagtcccccaaactccccagtggggcttatgagggtggggcacttattaagtcgtctgggaagctcatgctgctccagaagatgctgcgaaagctgaaggagcaaggacaccgagtgctcatcttctcgcagatgaccaaaatgttagacttgcttgaggacttcttagactatgaaggctacaagtatgagcgcatcgatggtggtatcacgggtgccctgaggcaggaggccatcgatcggtttaatgctcctggggcccaacaattctgcttcctcctgtccacccgagctgggggcctgggcatcaatctggccactgctgacactgtcatcatctttgattctgactggaacccccataatgacatccaggcctttagccgggctcatcggattggccaggccaacaaagtgatgatttaccggtttgtgactcgcgcgtcagtggaagagcgaatcacacaagtggccaagagaaagatgatgctgacacacctggttgtgcggcctgggctgggctccaaggcaggctccatgtccaagcaggagcttgacgacattctcaaatttggcactgaagagctattcaaggatgaaaacgagggggagaacaaggaggaggacagcagtgtgattcattatgacaatgaggccatcgctcggctgttggaccggaaccaggatgcaactgaggacactgacgtgcagaacatgaatgagtatctcagctccttcaaggtggcacagtacgtcgtgcgggaagaagacaagattgaggaaattgagcgagagatcatcaagcaggaggagaatgtggaccctgactactgggagaagctgctgaggcatcactatgagcaacagcaggaagacctagcccggaatctaggcaagggcaagcgggttcgcaagcaagttaactacaatgatgctgctcaggaagaccaagacaaccagtcagagtactcggtgggttcagaggaggaggatgaagacttcgatgaacgtcctgaagggcgtagacagtcaaagaggcagctccggaatgagaaagataagccactgcctccactgctggcccgagtcgggggcaacattgaggtgctgggcttcaacacccgtcagcggaaggctttcctcaatgctgtgatgcgctgggggatgccaccacaggatgccttcaccacacagtggctggtgcgggacctgaggggcaagactgagaaggagtttaaggcctatgtgtctttgttcatgcgccatctgtgtgagcctggggcagacggctctgaaacctttgccgatggggtccctcgggagggactgagtcgccagcaggtgttgacccgcattggagtcatgtctctcgtcaaaaagaaggtgcaggagtttgagcacatcaatgggcgttggtcaatgccggaactgatgcctgaccccagcgccgattctaagcgctcctccagagcctcctctcctaccaaaacgtctcccaccactcctgaggcttctgctaccaacagtccctgcacctctaaacctgctactccagctccaagtgagaaaggagaaggcataaggacacctcttgagaaggaggaagctgaaaaccaggaggaaaagccagagaagaacagcagaattggggagaagatggagacagaggctgatgcccccagcccagccccatcacttggggagcggctggagccaaggaagattcctctagaggatgaggtgccaggggtgcctggagagatggagcctgaacctgggtaccgtggggacagagagaagtcagccacagagtcgacgccaggagaaaggggggaggagaagccgttggatggacaggaacacagggagaggccggagggggaaacaggggatttgggcaagagagaagatgtaaaaggtgaccgggagcttcgaccagggcctcgagatgagccacggtccaatgggcgacgagaggaaaagacagagaagccccggttcatgttcaatatcgccgatggtggcttcacagagcttcacacactgtggcagaatgaggaacgggcagctatttcctcggggaaactcaatgagatctggcacagaagacatgactattggcttctggctgggattgtcctccatggctatgcacggtggcaggacatccagaatgatgctcaatttgccattatcaacgagccatttaaaactgaagccaataaggggaactttctggagatgaaaaataagttcctggcccggaggttcaagctcctggagcaggcgctggtgattgaggagcagctgcggcgggcggcctacctgaacctgtcgcaggagccggcgcaccccgccatggccctccacgcccgcttcgccgaggccgagtgcctggccgagagccaccagcacctctccaaggagtcgctggcggggaacaagccggccaacgccgtcctgcacaagggtaagggccgcggcggccccgcgcgggggagggcccacaacgctgcttctgaaccagctggaggagttgctgagcgacatgaaggcggacgtgacccgcctgccagccacgctgtcccgaataccccccatcgcagcccgccttcagatgtccgagcgcagcatcctcagccggctggccagcaagggcacggagcctcaccccacaccggcctacccgccgggtccctacgctacacctccggggtacggggcggccttcagcgccgcacccgtaggggccctggccgccgcaggcgccaattacagccagatgcctgcagggtccttcatcacagccgccaccaacggccctccagtgcttgtgaagaaggagaaggaaatggtgggggcattggtgtcagacgggctggatcggaaggagccccgagccggggaggtgatctgtatagacgactgactggatcccaggcctgcccttcacccaggccccgtccccgaggccgacccccagctcaagcgctggggcctgctgccagccctccaccttccccaccccttgggccatcactgggctaggaacccctttgcccctctctgcagctcctctcttcaagaagggccctttgtctttctccactcccacacacctttcccaccaagccttgaagactgtgctggtgagaagaagtctgggtgggagatggctggcagggtcttccaagtaccttcctcccacactgccaagtatacacaacttcccagtaaatggttgtggggaggaaagaggtggagcctccccagccgtttccctgcagaatcagctctgtctcatgtggaagtggagaatcagccttgcctggcctttaggaacttttgtggggaagagagctttgaagagaggagggggactttagagagggatgaaaatgagccctgggagggaggaagggacgaggaggggtggctgcatgttaccgtcccctacctctccccacgtggagggtggagcagttatgagggaggaagtcaactgctgttcagcctcagaataaaggtgccgttcactggctcagttacctcctgtgtaccggcatcttgtgttgggaatgttcccccctccctagggaccaaggaccacccctacaaaaagagtaatggttgggtgatactccctcaagccaaagaggagctccccaacctgttctagggacccaggtaacctagaagggtgggagagaatacaatgggccagatgtggtggaagcccagctctggggctcaggttcctggaagacttctactaccctccctcctcaaggcctggatacagactaaatttgtataagtcaggcaggggacctagtcagggtcttgggagctaccttgtcgttgggaccagagcaaaatagtggagggcaggctagggaaatgtgggcacatcccccctcccaggaggggccggggagagtggcagtttgcatggcgaaccccccacttcctctttgctgccccttcactttcttgctgcccctttcccagtctctcttcacacccactcctggtctgtcctgatcccctcttctgtatcaggtttattggttgtacatataaattatactttcctt

SEQ ID NO: 517896 - DNA, 236 bp, Homo sapiens
cgagtgcagtaccctcgataaggccaatgatgatgagcattcttcatgtgttttgtggctgcataaatgtcttcttttgagaagtgtctgttcatgtccttcgcccactttttgatggggttgtttgtttttttcttgtaaatttgtttgagttcattgtagattctggatatagtgtcacaggtctttgaggctctgttcattaaattttatgattctgtgtggcccttatcgag

SEQ ID NO: 517897 - DNA, 224 bp, Homo sapiens
  misc_feature (42)..(42): n is a, c, g, or t
  misc_feature (100)..(100): n is a, c, g, or t
cattgatggtgctgactgcttagggtggtggtgctgaaggtngggtgacagtggtaatttcagtgattttggttttgtttggtttctttaagagacaggntctcattctgtcactcaggttggagtgcagtggtacgatcatagttcactgcagccttgacttcccgggctcaagcaatccttctgcctcagtctttccagtagctaggaatatcaagagggtc

SEQ ID NO: 517898 - DNA, 1314 bp, Homo sapiens
  misc_feature (349)..(349): n is a, c, g, or t
  misc_feature (378)..(378): n is a, c, g, or t
ggagggacccagggctgaagggggtcggggcgccagcggtgcaaggatagtccttatactagcggaaaatttttcccggtcagtcaagatcaccttcaaagtgacatctgcgagtgcacacaggtcggagcggtgcataaaagtgtcgcgcgactggcggactgacgtgcgggacacacgagtgtccgggctcgcgtcaagttatcacagtacaggggccagctactcggcgagacagaaggcagtcgagggtccgagcccaccgaggtccaaccctcggtacaccatgcgctcgtcctgtcccaggcggagggcttcgggcacccggcaatctcgtggtaagaccaangtgacgtactcgcgagcagctgctgacgnaacctgtggcgtctggtacgggaggcgcacgtgcaaagcgtgcccgcggctgcttcctatacttaggcgagctgctcacggcgccgcggcgcgtacaccaggtcgggggaaatgcacacgcgcccatgcgcccattagggcgcaacgcgtacccccatagccgccaaactgaaggcgaaactggccgtgtcgaagggcacctgaagaccgcccttagtggacactctggtcaacttagctggacggcaaagagagtgccgccggggggtaagagtccggaatgtggccactggtagagcccccttggtggggaggattaggcaacccaatacgcgaagccgggctatagacgccgtaccgtatgcaattggacgcctcccgatttagagggcacgccacattggagtggaaggccccccgccaatgaggaagccactcccaattggcggccacctttgtgtggtctaaccccgtttttcctaagaggagatgggcaaaaccaaaatacaaaggtgtctcagggccccgagagggggacacttagaggggggagcgcaaagaagcggtggagccgccagacgacaagcgggaaaagggggccgttggaaagaagacagatacaccgcccctggtacctccgtaaaaagtcgggcccccaagacaggataaaacgcccaaacaatcccgaggagcgggcaatagacatggaagccgccacaccgattaccccgccaaatgaggttatccccatttataccggaccacaatggacggaagacacgggcgggggcgcaacacgcggaatcagggggagcttccacactgggggaggggccgtagggtcaccccaaacagaacacccgcctagatgggaacggaacgggagcccgaagggggggccttgggggggcggacgggggggcccacactggaaag

SEQ ID NO: 517899 - DNA, 4388 bp, Homo sapiens
gtttttcagggttctcaatggttacaagatagatcataagttgctgctgacaggaaccccattgcagaataatctggaggagctcttccatctcctgaacttcctcaccccagagagatttaacaacttggagggcttcctggaggagtttgctgacatatccaaagaggaccagatcaagaaactgcatgatttgctggggccacacatgctgcggagactcaaggcagatgtctttaagaacatgccagccaagacagagctcatcgttcgggtggagctaagccccatgcagaagaaatactacaaatacatcctgactcgaaattttgaggccttgaattcacgaggtggtgggaaccaggtgtcgctgcttaatatcatgatggatcttaagaagtgctgcaaccatccatacctttttcccgtggctgctatggagtcccccaaactccccagtggggcttatgagggtggggcacttattaagtcgtctgggaagctcatgctgctccagaagatgctgcgaaagctgaaggagcaaggacaccgagtgctcatcttctcgcagatgaccaaaatgttagacttgcttgaggacttcttagactatgaaggctacaagtatgagcgcatcgatggtggtatcacgggtgccctgaggcaggaggccatcgatcggtttaatgctcctggggcccaacaattctgcttcctcctgtccacccgagctgggggcctgggcatcaatctggccactgctgacactgtcatcatctttgattctgactggaacccccataatgacatccaggcctttagccgggctcatcggattggccaggccaacaaagtgatgatttaccggtttgtgactcgcgcgtcagtggaagagcgaatcacacaagtggccaagagaaagatgatgctgacacacctggttgtgcggcctgggctgggctccaaggcaggctccatgtccaagcaggagcttgacgacattctcaaatttggcactgaagagctattcaaggatgaaaacgagggggagaacaaggaggaggacagcagtgtgattcattatgacaatgaggccatcgctcggctgttggaccggaaccaggatgcaactgaggacactgacgtgcagaacatgaatgagtatctcagctccttcaaggtggcacagtacgtcgtgcgggaagaagacaagattgaggaaattgagcgagagatcatcaagcaggaggagaatgtggaccctgactactgggagaagctgctgaggcatcactatgagcaacagcaggaagacctagcccggaatctaggcaagggcaagcgggttcgcaagcaagttaactacaatgatgctgctcaggaagaccaagacaaccagtcagagtactcggtgggttcagaggaggaggatgaagacttcgatgaacgtcctgaagggcgtagacagtcaaagaggcagctccggaatgagaaagataagccactgcctccactgctggcccgagtcgggggcaacattgaggtgctgggcttcaacacccgtcagcggaaggctttcctcaatgctgtgatgcgctgggggatgccaccacaggatgccttcaccacacagtggctggtgcgggacctgaggggcaagactgagaaggagtttaaggcctatgtgtctttgttcatgcgccatctgtgtgagcctggggcagacggctctgaaacctttgccgatggggtccctcgggagggactgagtcgccagcaggtgttgacccgcattggagtcatgtctctcgtcaaaaagaaggtgcaggagtttgagcacatcaatgggcgttggtcaatgccggaactgatgcctgaccccagcgccgattctaagcgctcctccagagcctcctctcctaccaaaacgtctcccaccactcctgaggcttctgctaccaacagtccctgcacctctaaacctgctactccagctccaagtgagaaaggagaaggcataaggacacctcttgagaaggaggaagctgaaaaccaggaggaaaagccagagaagaacagcagaattggggagaagatggagacagaggctgatgcccccagcccagccccatcacttggggagcggctggagccaaggaagattcctctagaggatgaggtgccaggggtgcctggagagatggagcctgaacctgggtaccgtggggacagagagaagtcagaagatgtaaaaggtgaccgggagcttcgaccagggcctcgagatgagccacggtccaatgggcgacgagaggaaaagacagagaagccccggttcatgttcaatatcgccgatggtggcttcacagagcttcacacactgtggcagaatgaggaacgggcagctatttcctcggggaaactcaatgagatctggcacagaagacatgactattggcttctggctgggattgtcctccatggctatgcacggtggcaggacatccagaatgatgctcaatttgccattatcaacgagccatttaaaactgaagccaataaggggaactttctggagatgaaaaataagttcctggcccggaggttcaagctcctggagcaggcgctggtgattgaggagcagctgcggcgggcggcctacctgaacctgtcgcaggagccggcgcaccccgccatggccctccacgcccgcttcgccgaggccgagtgcctggccgagagccaccagcacctctccaaggagtcgctggcggggaacaagccggccaacgccgtcctgcacaaggttctgaaccagctggaggagttgctgagcgacatgaaggcggacgtgacccgcctgccagccacgctgtcccgaataccccccatcgcagcccgccttcagatgtccgagcgcagcatcctcagccggctggccagcaagggcacggagcctcaccccacaccggcctacccgccgggtccctacgctacacctccggggtacggggcggccttcagcgccgcacccgtaggggccctggccgccgcaggcgccaattacagccagatgcctgcagggtccttcatcacagccgccaccaacggccctccagtgcttgtgaagaaggagaaggaaatggtgggggcattggtgtcagacgggctggatcggaaggagccccgagccggggaggtgatctgtatagacgactgactggatcccaggcctgcccttcacccaggccccgtccccgaggccgacccccagctcaagcgctggggcctgctgccagccctccaccttccccaccccttgggccatcactgggctaggaacccctttgcccctctctgcagctcctctcttcaagaagggccctttgtctttctccactcccacacacctttcccaccaagccttgaagactgtgctggtgagaagaagtctgggtgggagatggctggcagggtcttccaagtaccttcctcccacactgccaagtatacacaacttcccagtaaatggttgtggggaggaaagaggtggagcctccccagccgtttccctgcagaatcagctctgtctcatgtggaagtggagaatcagccttgcctggcctttaggaacttttgtggggaagagagctttgaagagaggagggggactttagagagggatgaaaatgagccctgggagggaggaagggacgaggaggggtggctgcatgttaccgtcccctacctctccccacgtggagggtggagcagttatgagggaggaagtcaactgctgttcagcctcagaataaaggtgccgttcactggctcagttacctcctgtgtaccggcatcttgtgttgggaatgttcccccctccctagggaccaaggaccacccctacaaaaagagtaatggttgggtgatactccctcaagccaaagaggagctccccaacctgttctagggacccaggtaacctagaagggtgggagagaatacaatgggccagatgtggtggaagcccagctctggggctcaggttcctggaagacttctactaccctccctcctcaaggcctggatacagactaaatttgtataagtcaggcaggggacctagtcagggtcttgggagctaccttgtcgttgggaccagagcaaaatagtggagggcaggctagggaaatgtgggcacatcccccctcccaggaggggccggggagagtggcagtttgcatggcgaaccccccacttcctctttgctgccccttcactttcttgctgcccctttcccagtctctcttcacacccactcctggtctgtcctgatcccctcttctgtatcaggtttattggttgtacatataaattatactttcctt

SEQ ID NO: 517900 - DNA, 4605 bp, Homo sapiens
gtttttcagggttctcaatggttacaagatagatcataagttgctgctgacaggaaccccattgcagaataatctggaggagctcttccatctcctgaacttcctcaccccagagagatttaacaacttggagggcttcctggaggagtttgctgacatatccaaagaggaccagatcaagaaactgcatgatttgctggggccacacatgctgcggagactcaaggcagatgtctttaagaacatgccagccaagacagagctcatcgttcgggtggagctaagccccatgcagaagaaatactacaaatacatcctgactcgaaattttgaggccttgaattcacgaggtggtgggaaccaggtgtcgctgcttaatatcatgatggatcttaagaagtgctgcaaccatccatacctttttcccgtggctgctatggagtcccccaaactccccagtggggcttatgagggtggggcacttattaagtcgtctgggaagctcatgctgctccagaagatgctgcgaaagctgaaggagcaaggacaccgagtgctcatcttctcgcagatgaccaaaatgttagacttgcttgaggacttcttagactatgaaggctacaagtatgagcgcatcgatggtggtatcacgggtgccctgaggcaggaggccatcgatcggtttaatgctcctggggcccaacaattctgcttcctcctgtccacccgagctgggggcctgggcatcaatctggccactgctgacactgtcatcatctttgattctgactggaacccccataatgacatccaggcctttagccgggctcatcggattggccaggccaacaaagtgatgatttaccggtttgtgactcgcgcgtcagtggaagagcgaatcacacaagtggccaagagaaagatgatgctgacacacctggttgtgcggcctgggctgggctccaaggcaggctccatgtccaagcaggagcttgacgacattctcaaatttggcactgaagagctattcaaggatgaaaacgagggggagaacaaggaggaggacagcagtgtgattcattatgacaatgaggccatcgctcggctgttggaccggaaccaggatgcaactgaggacactgacgtgcagaacatgaatgagtatctcagctccttcaaggtggcacagtacgtcgtgcgggaagaagacaagattgaggaaattgagcgagagatcatcaagcaggaggagaatgtggaccctgactactgggagaagctgctgaggcatcactatgagcaacagcaggaagacctagcccggaatctaggcaagggcaagcgggttcgcaagcaagttaactacaatgatgctgctcaggaagaccaagacaaccagtcagagtactcggtgggttcagaggaggaggatgaagacttcgatgaacgtcctgaagggcgtagacagtcaaagaggcagctccggaatgagaaagataagccactgcctccactgctggcccgagtcgggggcaacattgaggtgctgggcttcaacacccgtcagcggaaggctttcctcaatgctgtgatgcgctgggggatgccaccacaggatgccttcaccacacagtggctggtgcgggacctgaggggcaagactgagaaggagtttaaggcctatgtgtctttgttcatgcgccatctgtgtgagcctggggcagacggctctgaaacctttgccgatggggtccctcgggagggactgagtcgccagcaggtgttgacccgcattggagtcatgtctctcgtcaaaaagaaggtgcaggagtttgagcacatcaatgggcgttggtcaatgccggaactgatgcctgaccccagcgccgattctaagcgctcctccagagcctcctctcctaccaaaacgtctcccaccactcctgaggcttctgctaccaacagtccctgcacctctaaacctgctactccagctccaagtgagaaaggagaaggcataaggacacctcttgagaaggaggaagctgaaaaccaggaggaaaagccagagaagaacagcagaattggggagaagatggagacagaggctgatgcccccagcccagccccatcacttggggagcggctggagccaaggaagattcctctagaggatgaggtgccaggggtgcctggagagatggagcctgaacctgggtaccgtggggacagagagaagtcagcaggtgggtgcatggccttaggagtgatgggggattagaatttgggatttccctcttctggggtcaggggatgagggtaacatcctcccttcctatcccctaccccctcccacagccacagagtcgacgccaggagaaaggggggaggagaagccgttggatggacaggaacacagggagaggccggagggggaaacaggggatttgggcaagagagaagatgtaaaaggtgaccgggagcttcgaccagggcctcgagatgagccacggtccaatgggcgacgagaggaaaagacagagaagccccggttcatgttcaatatcgccgatggtggcttcacagagcttcacacactgtggcagaatgaggaacgggcagctatttcctcggggaaactcaatgagatctggcacagaagacatgactattggcttctggctgggattgtcctccatggctatgcacggtggcaggacatccagaatgatgctcaatttgccattatcaacgagccatttaaaactgaagccaataaggggaactttctggagatgaaaaataagttcctggcccggaggttcaagctcctggagcaggcgctggtgattgaggagcagctgcggcgggcggcctacctgaacctgtcgcaggagccggcgcaccccgccatggccctccacgcccgcttcgccgaggccgagtgcctggccgagagccaccagcacctctccaaggagtcgctggcggggaacaagccggccaacgccgtcctgcacaaggttctgaaccagctggaggagttgctgagcgacatgaaggcggacgtgacccgcctgccagccacgctgtcccgaataccccccatcgcagcccgccttcagatgtccgagcgcagcatcctcagccggctggccagcaagggcacggagcctcaccccacaccggcctacccgccgggtccctacgctacacctccggggtacggggcggccttcagcgccgcacccgtaggggccctggccgccgcaggcgccaattacagccagatgcctgcagggtccttcatcacagccgccaccaacggccctccagtgcttgtgaagaaggagaaggaaatggtgggggcattggtgtcagacgggctggatcggaaggagccccgagccggggaggtgatctgtatagacgactgactggatcccaggcctgcccttcacccaggccccgtccccgaggccgacccccagctcaagcgctggggcctgctgccagccctccaccttccccaccccttgggccatcactgggctaggaacccctttgcccctctctgcagctcctctcttcaagaagggccctttgtctttctccactcccacacacctttcccaccaagccttgaagactgtgctggtgagaagaagtctgggtgggagatggctggcagggtcttccaagtaccttcctcccacactgccaagtatacacaacttcccagtaaatggttgtggggaggaaagaggtggagcctccccagccgtttccctgcagaatcagctctgtctcatgtggaagtggagaatcagccttgcctggcctttaggaacttttgtggggaagagagctttgaagagaggagggggactttagagagggatgaaaatgagccctgggagggaggaagggacgaggaggggtggctgcatgttaccgtcccctacctctccccacgtggagggtggagcagttatgagggaggaagtcaactgctgttcagcctcagaataaaggtgccgttcactggctcagttacctcctgtgtaccggcatcttgtgttgggaatgttcccccctccctagggaccaaggaccacccctacaaaaagagtaatggttgggtgatactccctcaagccaaagaggagctccccaacctgttctagggacccaggtaacctagaagggtgggagagaatacaatgggccagatgtggtggaagcccagctctggggctcaggttcctggaagacttctactaccctccctcctcaaggcctggatacagactaaatttgtataagtcaggcaggggacctagtcagggtcttgggagctaccttgtcgttgggaccagagcaaaatagtggagggcaggctagggaaatgtgggcacatcccccctcccaggaggggccggggagagtggcagtttgcatggcgaaccccccacttcctctttgctgccccttcactttcttgctgcccctttcccagtctctcttcacacccactcctggtctgtcctgatcccctcttctgtatcaggtttattggttgtacatataaattatactttcctt

SEQ ID NO: 517901 - DNA, 4089 bp, Homo sapiens
agctggctcagctcccgccatgctcagcactggctcccttttctggcacaggagacaaaggggcatccagggacgaaaccccttttaagtcgtctgggaagctcatgctgctccagaagatgctgcgaaagctgaaggagcaaggacaccgagtgctcatcttctcgcagatgaccaaaatgttagacttgcttgaggacttcttagactatgaaggctacaagtatgagcgcatcgatggtggtatcacgggtgccctgaggcaggaggccatcgatcggtttaatgctcctggggcccaacaattctgcttcctcctgtccacccgagctgggggcctgggcatcaatctggccactgctgacactgtcatcatctttgattctgactggaacccccataatgacatccaggcctttagccgggctcatcggattggccaggccaacaaagtgatgatttaccggtttgtgactcgcgcgtcagtggaagagcgaatcacacaagtggccaagagaaagatgatgctgacacacctggttgtgcggcctgggctgggctccaaggcaggctccatgtccaagcaggagcttgacgacattctcaaatttggcactgaagagctattcaaggatgaaaacgagggggagaacaaggaggaggacagcagtgtgattcattatgacaatgaggccatcgctcggctgttggaccggaaccaggatgcaactgaggacactgacgtgcagaacatgaatgagtatctcagctccttcaaggtggcacagtacgtcgtgcgggaagaagacaagattgaggaaattgagcgagagatcatcaagcaggaggagaatgtggaccctgactactgggagaagctgctgaggcatcactatgagcaacagcaggaagacctagcccggaatctaggcaagggcaagcgggttcgcaagcaagttaactacaatgatgctgctcaggaagaccaagacaaccagtcagagtactcggtgggttcagaggaggaggatgaagacttcgatgaacgtcctgaagggcgtagacagtcaaagaggcagctccggaatgagaaagataagccactgcctccactgctggcccgagtcgggggcaacattgaggtgctgggcttcaacacccgtcagcggaaggctttcctcaatgctgtgatgcgctgggggatgccaccacaggatgccttcaccacacagtggctggtgcgggacctgaggggcaagactgagaaggagtttaaggcctatgtgtctttgttcatgcgccatctgtgtgagcctggggcagacggctctgaaacctttgccgatggggtccctcgggagggactgagtcgccagcaggtgttgacccgcattggagtcatgtctctcgtcaaaaagaaggtgcaggagtttgagcacatcaatgggcgttggtcaatgccggaactgatgcctgaccccagcgccgattctaagcgctcctccagagcctcctctcctaccaaaacgtctcccaccactcctgaggcttctgctaccaacagtccctgcacctctaaacctgctactccagctccaagtgagaaaggagaaggcataaggacacctcttgagaaggaggaagctgaaaaccaggaggaaaagccagagaagaacagcagaattggggagaagatggagacagaggctgatgcccccagcccagccccatcacttggggagcggctggagccaaggaagattcctctagaggatgaggtgccaggggtgcctggagagatggagcctgaacctgggtaccgtggggacagagagaagtcagccacagagtcgacgccaggagaaaggggggaggagaagccgttggatggacaggaacacagggagaggccggagggggaaacaggggatttgggcaagagagaagatgtaaaaggtgaccgggagcttcgaccagggcctcgagatgagccacggtccaatgggcgacgagaggaaaagacagagaagccccggttcatgttcaatatcgccgatggtggcttcacagagcttcacacactgtggcagaatgaggaacgggcagctatttcctcggggaaactcaatgagatctggcacagaagacatgactattggcttctggctgggattgtcctccatggctatgcacggtggcaggacatccagaatgatgctcaatttgccattatcaacgagccatttaaaactgaagccaataaggggaactttctggagatgaaaaataagttcctggcccggaggttcaagctcctggagcaggcgctggtgattgaggagcagctgcggcgggcggcctacctgaacctgtcgcaggagccggcgcaccccgccatggccctccacgcccgcttcgccgaggccgagtgcctggccgagagccaccagcacctctccaaggagtcgctggcggggaacaagccggccaacgccgtcctgcacaaggttctgaaccagctggaggagttgctgagcgacatgaaggcggacgtgacccgcctgccagccacgctgtcccgaataccccccatcgcagcccgccttcagatgtccgagcgcagcatcctcagccggctggccagcaagggcacggagcctcaccccacaccggcctacccgccgggtccctacgctacacctccggggtacggggcggccttcagcgccgcacccgtaggggccctggccgccgcaggcgccaattacagccagatgcctgcagggtccttcatcacagccgccaccaacggccctccagtgcttgtgaagaaggagaaggaaatggtgggggcattggtgtcagacgggctggatcggaaggagccccgagccggggaggtgatctgtatagacgactgactggatcccaggcctgcccttcacccaggccccgtccccgaggccgacccccagctcaagcgctggggcctgctgccagccctccaccttccccaccccttgggccatcactgggctaggaacccctttgcccctctctgcagctcctctcttcaagaagggccctttgtctttctccactcccacacacctttcccaccaagccttgaagactgtgctggtgagaagaagtctgggtgggagatggctggcagggtcttccaagtaccttcctcccacactgccaagtatacacaacttcccagtaaatggttgtggggaggaaagaggtggagcctccccagccgtttccctgcagaatcagctctgtctcatgtggaagtggagaatcagccttgcctggcctttaggaacttttgtggggaagagagctttgaagagaggagggggactttagagagggatgaaaatgagccctgggagggaggaagggacgaggaggggtggctgcatgttaccgtcccctacctctccccacgtggagggtggagcagttatgagggaggaagtcaactgctgttcagcctcagaataaaggtgccgttcactggctcagttacctcctgtgtaccggcatcttgtgttgggaatgttcccccctccctagggaccaaggaccacccctacaaaaagagtaatggttgggtgatactccctcaagccaaagaggagctccccaacctgttctagggacccaggtaacctagaagggtgggagagaatacaatgggccagatgtggtggaagcccagctctggggctcaggttcctggaagacttctactaccctccctcctcaaggcctggatacagactaaatttgtataagtcaggcaggggacctagtcagggtcttgggagctaccttgtcgttgggaccagagcaaaatagtggagggcaggctagggaaatgtgggcacatcccccctcccaggaggggccggggagagtggcagtttgcatggcgaaccccccacttcctctttgctgccccttcactttcttgctgcccctttcccagtctctcttcacacccactcctggtctgtcctgatcccctcttctgtatcaggtttattggttgtacatataaattatactttcctt

SEQ ID NO: 517902 - DNA, 4872 bp, Homo sapiens
gtttttcagggttctcaatggttacaagatagatcataagttgctgctgacaggaaccccattgcagaataatctggaggagctcttccatctcctgaacttcctcaccccagagagatttaacaacttggagggcttcctggaggagtttgctgacatatccaaagaggaccagatcaagaaactgcatgatttgctggggccacacatgctgcggagactcaaggcagatgtctttaagaacatgccagccaagacagagctcatcgttcgggtggagctaagccccatgcagaagaaatactacaaatacatcctgactcgaaattttgaggccttgaattcacgaggtggtgggaaccaggtgtcgctgcttaatatcatgatggatcttaagaagtgctgcaaccatccatacctttttcccgtggctgctatggagtcccccaaactccccagtggggcttatgagggtggggcacttattaagtcgtctgggaagctcatgctgctccagaagatgctgcgaaagctgaaggagcaaggacaccgagtgctcatcttctcgcagatgaccaaaatgttagacttgcttgaggacttcttagactatgaaggctacaagtatgagcgcatcgatggtggtatcacgggtgccctgaggcaggaggccatcgatcggtttaatgctcctggggcccaacaattctgcttcctcctgtccacccgagctgggggcctgggcatcaatctggccactgctgacactgtcatcatctttgattctgactggaacccccataatgacatccaggcctttagccgggctcatcggattggccaggccaacaaagtgatgatttaccggtttgtgactcgcgcgtcagtggaagagcgaatcacacaagtggccaagagaaagatgatgctgacacacctggttgtgcggcctgggctgggctccaaggcaggctccatgtccaagcaggagcttgacgacattctcaaatttggcactgaagagctattcaaggatgaaaacgagggggagaacaaggaggaggacagcagtgtgattcattatgacaatgaggccatcgctcggctgttggaccggaaccaggatgcaactgaggacactgacgtgcagaacatgaatgagtatctcagctccttcaaggtggcacagtacgtcgtgcgggaagaagacaagattgaggaaattgagcgagagatcatcaagcaggaggagaatgtggaccctgactactgggagaagctgctgaggcatcactatgagcaacagcaggaagacctagcccggaatctaggcaagggcaagcgggttcgcaagcaagttaactacaatgatgctgctcaggaagaccaagacaaccagtcagagtactcggtgggttcagaggaggaggatgaagacttcgatgaacgtcctgaagggcgtagacagtcaaagaggcagctccggaatgagaaagataagccactgcctccactgctggcccgagtcgggggcaacattgaggtgctgggcttcaacacccgtcagcggaaggctttcctcaatgctgtgatgcgctgggggatgccaccacaggatgccttcaccacacagtggctggtgcgggacctgaggggcaagactgagaaggagtttaaggcctatgtgtctttgttcatgcgccatctgtgtgagcctggggcagacggctctgaaacctttgccgatggggtccctcgggagggactgagtcgccagcaggtgttgacccgcattggagtcatgtctctcgtcaaaaagaaggtgcaggagtttgagcacatcaatgggcgttggtcaatgccggaactgatgcctgaccccagcgccgattctaagcgctcctccagagcctcctctcctaccaaaacgtctcccaccactcctgaggcttctgctaccaacagtccctgcacctctaaacctgctactccagctccaagtgagaaaggagaaggcataaggacacctcttgagaaggaggaagctgaaaaccaggaggaaaagccagagaagaacagcagaattggggagaagatggagacagaggctgatgcccccagcccagccccatcacttggggagcggctggagccaaggaagattcctctagaggatgaggtgccaggggtgcctggagagatggagcctgaacctgggtaccgtggggacagagagaagtcagccacagagtcgacgccaggagaaaggggggaggagaagccgttggatggacaggaacacagggagaggccggagggggaaacaggggatttgggcaagagagaagatgtaaaaggtgaccgggagcttcgaccagggcctcgagatgagccacggtccaatgggcgacgagaggaaaagacagagaagccccggttcatgttcaatatcgccgatggtggcttcacaggttggggagactctcgctgctttctgctcctcaaggggatctgctcatcctcatggggtttctcgttttgcctgaggcttcctgctacctttaattccaagtaacttccaatgaagtatgttgcatgctgactccgatccttgctctaaatctttcttaagtatccctcttaactccaaagctggccctaatcccacctttattcttaattctaacgaacctggttagaactgagtttgttccaaacctaacctttacccattcctcttcaggagcccttagttccctttcattattcagtttctccatctctacctgtctgttggactgagtgcagtctgcaaaaccctgttacctcttctgtctgctgccttctttgcagagcttcacacactgtggcagaatgaggaacgggcagctatttcctcggggaaactcaatgagatctggcacagaagacatgactattggcttctggctgggattgtcctccatggctatgcacggtggcaggacatccagaatgatgctcaatttgccattatcaacgagccatttaaaactgaagccaataaggggaactttctggagatgaaaaataagttcctggcccggaggttcaagctcctggagcaggcgctggtgattgaggagcagctgcggcgggcggcctacctgaacctgtcgcaggagccggcgcaccccgccatggccctccacgcccgcttcgccgaggccgagtgcctggccgagagccaccagcacctctccaaggagtcgctggcggggaacaagccggccaacgccgtcctgcacaaggttctgaaccagctggaggagttgctgagcgacatgaaggcggacgtgacccgcctgccagccacgctgtcccgaataccccccatcgcagcccgccttcagatgtccgagcgcagcatcctcagccggctggccagcaagggcacggagcctcaccccacaccggcctacccgccgggtccctacgctacacctccggggtacggggcggccttcagcgccgcacccgtaggggccctggccgccgcaggcgccaattacagccagatgcctgcagggtccttcatcacagccgccaccaacggccctccagtgcttgtgaagaaggagaaggaaatggtgggggcattggtgtcagacgggctggatcggaaggagccccgagccggggaggtgatctgtatagacgactgactggatcccaggcctgcccttcacccaggccccgtccccgaggccgacccccagctcaagcgctggggcctgctgccagccctccaccttccccaccccttgggccatcactgggctaggaacccctttgcccctctctgcagctcctctcttcaagaagggccctttgtctttctccactcccacacacctttcccaccaagccttgaagactgtgctggtgagaagaagtctgggtgggagatggctggcagggtcttccaagtaccttcctcccacactgccaagtatacacaacttcccagtaaatggttgtggggaggaaagaggtggagcctccccagccgtttccctgcagaatcagctctgtctcatgtggaagtggagaatcagccttgcctggcctttaggaacttttgtggggaagagagctttgaagagaggagggggactttagagagggatgaaaatgagccctgggagggaggaagggacgaggaggggtggctgcatgttaccgtcccctacctctccccacgtggagggtggagcagttatgagggaggaagtcaactgctgttcagcctcagaataaaggtgccgttcactggctcagttacctcctgtgtaccggcatcttgtgttgggaatgttcccccctccctagggaccaaggaccacccctacaaaaagagtaatggttgggtgatactccctcaagccaaagaggagctccccaacctgttctagggacccaggtaacctagaagggtgggagagaatacaatgggccagatgtggtggaagcccagctctggggctcaggttcctggaagacttctactaccctccctcctcaaggcctggatacagactaaatttgtataagtcaggcaggggacctagtcagggtcttgggagctaccttgtcgttgggaccagagcaaaatagtggagggcaggctagggaaatgtgggcacatcccccctcccaggaggggccggggagagtggcagtttgcatggcgaaccccccacttcctctttgctgccccttcactttcttgctgcccctttcccagtctctcttcacacccactcctggtctgtcctgatcccctcttctgtatcaggtttattggttgtacatataaattatactttcctt

SEQ ID NO: 517903 - DNA, 4326 bp, Homo sapiens
gtttttcagggttctcaatggttacaagatagatcataagttgctgctgacaggaaccccattgcagaataatctggaggagctcttccatctcctgaacttcctcaccccagagagatttaacaacttggagggcttcctggaggagtttgctgacatatccaaagaggaccagatcaagaaactgcatgatttgctggggccacacatgctgcggagactcaaggcagatgtctttaagaacatgccagccaagacagagctcatcgttcgggtggagctaagccccatgcagaagaaatactacaaatacatcctgactcgaaattttgaggccttgaattcacgaggtggtgggaaccaggtgtcgctgcttaatatcatgatggatcttaagaagtgctgcaaccatccatacctttttcccgtggctgctatggagtcccccaaactccccagtggggcttatgagggtggggcacttattaagtcgtctgggaagctcatgctgctccagaagatgctgcgaaagctgaaggagcaaggacaccgagtgctcatcttctcgcagatgaccaaaatgttagacttgcttgaggacttcttagactatgaaggctacaagtatgagcgcatcgatggtggtatcacgggtgccctgaggcaggaggccatcgatcggtttaatgctcctggggcccaacaattctgcttcctcctgtccacccgagctgggggcctgggcatcaatctggccactgctgacactgtcatcatctttgattctgactggaacccccataatgacatccaggcctttagccgggctcatcggattggccaggccaacaaagtgatgatttaccggtttgtgactcgcgcgtcagtggaagagcgaatcacacaagtggccaagagaaagatgatgctgacacacctggttgtgcggcctgggctgggctccaaggcaggctccatgtccaagcaggagcttgacgacattctcaaatttggcactgaagagctattcaaggatgaaaacgagggggagaacaaggaggaggacagcagtgtgattcattatgacaatgaggccatcgctcggctgttggaccggaaccaggatgcaactgaggacactgacgtgcagaacatgaatgagtatctcagctccttcaaggtggcacagtacgtcgtgcgggaagaagacaagattgaggaaattgagcgagagatcatcaagcaggaggagaatgtggaccctgactactgggagaagctgctgaggcatcactatgagcaacagcaggaagacctagcccggaatctaggcaagggcaagcgggttcgcaagcaagttaactacaatgatgctgctcaggaagaccaagacaaccagtcagagtactcggtgggttcagaggaggaggatgaagacttcgatgaacgtcctgaagggcgtagacagtcaaagaggcagctccggaatgagaaagataagccactgcctccactgctggcccgagtcgggggcaacattgaggtgctgggcttcaacacccgtcagcggaaggctttcctcaatgctgtgatgcgctgggggatgccaccacaggatgccttcaccacacagtggctggtgcgggacctgaggggcaagactgagaaggagtttaaggcctatgtgtctttgttcatgcgccatctgtgtgagcctggggcagacggctctgaaacctttgccgatggggtccctcgggagggactgagtcgccagcaggtgttgacccgcattggagtcatgtctctcgtcaaaaagaaggtgcaggagtttgagcacatcaatgggcgttggtcaatgccggaactgatgcctgaccccagcgccgattctaagcgctcctccagagcctcctctcctaccaaaacgtctcccaccactcctgaggcttctgctaccaacagtccctgcacctctaaacctgctactccagctccaagtgagaaaggagaaggcataaggacacctcttgagaaggaggaagctgaaaaccaggaggaaaagccagagaagaacagcagaattggggagaagatggagacagaggctgatgcccccagcccagccccatcacttggggagcggctggagccaaggaagattcctctagaggatgaggtgccaggggtgcctggagagatggagcctgaacctgggtaccgtggggacagagagaagtcagccacagagtcgacgccaggagaaaggggggaggagaagccgttggatggacaggaacacagggagaggccggagggggaaacaggggatttgggcaagagagaagatgtaaaaggtgaccgggagcttcgaccagggcctcgagatgagccacggtccaatgggcgacgagaggaaaagacagagaagccccggttcatgttcaatatcgccgatggtggcttcacagagcttcacacactgtggcagaatgaggaacgggcagctatttcctcggggaaactcaatgagatctggcacagaagacatgactattggcttctggctgggattgtcctccatggctatgcacggtggcaggacatccagaatgatgctcaatttgccattatcaacgagccatttaaaactgaagccaataaggggaactttctggagatgaaaaataagttcctggcccggaggttcaagctcctggagcaggcgctggtgattgaggagcagctgcggcgggcggcctacctgaacctgtcgcaggagccggcgcaccccgccatggccctccacgcccgcttcgccgaggccgagtgcctggccgagagccaccagcacctctccaaggagtcgctggcggggaacaagccggccaacgccgtcctgcacaagggcctacccgccgggtccctacgctacacctccggggtacggggcggccttcagcgccgcacccgtaggggccctggccgccgcaggcgccaattacagccagatgcctgcagggtccttcatcacagccgccaccaacggccctccagtgcttgtgaagaaggagaaggaaatggtgggggcattggtgtcagacgggctggatcggaaggagccccgagccggggaggtgatctgtatagacgactgactggatcccaggcctgcccttcacccaggccccgtccccgaggccgacccccagctcaagcgctggggcctgctgccagccctccaccttccccaccccttgggccatcactgggctaggaacccctttgcccctctctgcagctcctctcttcaagaagggccctttgtctttctccactcccacacacctttcccaccaagccttgaagactgtgctggtgagaagaagtctgggtgggagatggctggcagggtcttccaagtaccttcctcccacactgccaagtatacacaacttcccagtaaatggttgtggggaggaaagaggtggagcctccccagccgtttccctgcagaatcagctctgtctcatgtggaagtggagaatcagccttgcctggcctttaggaacttttgtggggaagagagctttgaagagaggagggggactttagagagggatgaaaatgagccctgggagggaggaagggacgaggaggggtggctgcatgttaccgtcccctacctctccccacgtggagggtggagcagttatgagggaggaagtcaactgctgttcagcctcagaataaaggtgccgttcactggctcagttacctcctgtgtaccggcatcttgtgttgggaatgttcccccctccctagggaccaaggaccacccctacaaaaagagtaatggttgggtgatactccctcaagccaaagaggagctccccaacctgttctagggacccaggtaacctagaagggtgggagagaatacaatgggccagatgtggtggaagcccagctctggggctcaggttcctggaagacttctactaccctccctcctcaaggcctggatacagactaaatttgtataagtcaggcaggggacctagtcagggtcttgggagctaccttgtcgttgggaccagagcaaaatagtggagggcaggctagggaaatgtgggcacatcccccctcccaggaggggccggggagagtggcagtttgcatggcgaaccccccacttcctctttgctgccccttcactttcttgctgcccctttcccagtctctcttcacacccactcctggtctgtcctgatcccctcttctgtatcaggtttattggttgtacatataaattatactttcctt

SEQ ID NO: 517904 - DNA, 715 bp, Homo sapiens
gctcattctcctgaggctgacaatccgtatgccaaggtagatgtgtcagtggccacgtggaagaagacattccattctcaacaaattgaactacggagtcatgctacgcacagaatccatagaatgctgttggcggaaccatgctgtggcagtactgaggagcatgcaatggttaataccccggttcgtaggatctaccgataaaacaaatgttgaccaaagatccagaagctacccagttctcaatgcaccttgatgtctccggaagtgcattggggttcttctctcgtcatatctcttgttggtcgcctgagctgatctgtacattccgacaattgcgccgtgcagtcccgtgtaccgtggggttgacagtacagaagaaattatgggaaatagaacagggggcctccttgcgtgtggcatgtaagccgacatatgctgaccatgctgtagtcggggaggcctgacgactggggttaattctgtaattgagcatccttgtatgttcacttcgtagttaccctcgttaatgcagtacgccaagaaggtttgtgtaccgtcattgccagtgcatcacataaatagtgcgtagagaccttgtggactacacagtatcagccgctgttaacagtgtaactgaaaggtacgaccttggtcccattgcttggctcgtgaagacggggacgggaagaccgcacccgccaagttggtgaca

SEQ ID NO: 517905 - DNA, 134 bp, Homo sapiens
cttgctgatcttgtgcattatattcaaaatgaaatttaaaattggtatctttctaaaattctgacagtactatgtagtgattttgaggccttggactgtcatacaaaaatcagtatatagttttatagggagta

SEQ ID NO: 517906 - DNA, 149 bp, Homo sapiens
cggtcccctccaacatctcatacctccttccaacatctcatgacgaatcagtggaagaagagggcattgaggaaggcatccagcaagatgaggacatctatgaggaaggaagctatgagatgttggaagggggatgagatgttggaagg

SEQ ID NO: 517907 - DNA, 3561 bp, Homo sapiens
ggatccccatggtcctcagctgcatcctgggctccaaggcaggctccatgtccaagcaggagcttgacgacattctcaaatttggcactgaagagctattcaaggatgaaaacgagggggagaacaaggaggaggacagcagtgtgattcattatgacaatgaggccatcgctcggctgttggaccggaaccaggatgcaactgaggacactgacgtgcagaacatgaatgagtatctcagctccttcaaggtggcacagtacgtcgtgcgggaagaagacaagattgaggaaattgagcgagagatcatcaagcaggaggagaatgtggaccctgactactgggagaagctgctgaggcatcactatgagcaacagcaggaagacctagcccggaatctaggcaagggcaagcgggttcgcaagcaagttaactacaatgatgctgctcaggaagaccaagacaaccagtcagagtactcggtgggttcagaggaggaggatgaagacttcgatgaacgtcctgaagggcgtagacagtcaaagaggcagctccggaatgagaaagataagccactgcctccactgctggcccgagtcgggggcaacattgaggtgctgggcttcaacacccgtcagcggaaggctttcctcaatgctgtgatgcgctgggggatgccaccacaggatgccttcaccacacagtggctggtgcgggacctgaggggcaagactgagaaggagtttaaggcctatgtgtctttgttcatgcgccatctgtgtgagcctggggcagacggctctgaaacctttgccgatggggtccctcgggagggactgagtcgccagcaggtgttgacccgcattggagtcatgtctctcgtcaaaaagaaggtgcaggagtttgagcacatcaatgggcgttggtcaatgccggaactgatgcctgaccccagcgccgattctaagcgctcctccagagcctcctctcctaccaaaacgtctcccaccactcctgaggcttctgctaccaacagtccctgcacctctaaacctgctactccagctccaagtgagaaaggagaaggcataaggacacctcttgagaaggaggaagctgaaaaccaggaggaaaagccagagaagaacagcagaattggggagaagatggagacagaggctgatgcccccagcccagccccatcacttggggagcggctggagccaaggaagattcctctagaggatgaggtgccaggggtgcctggagagatggagcctgaacctgggtaccgtggggacagagagaagtcagccacagagtcgacgccaggagaaaggggggaggagaagccgttggatggacaggaacacagggagaggccggagggggaaacaggggatttgggcaagagagaagatgtaaaaggtgaccgggagcttcgaccagggcctcgagatgagccacggtccaatgggcgacgagaggaaaagacagagaagccccggttcatgttcaatatcgccgatggtggcttcacagagcttcacacactgtggcagaatgaggaacgggcagctatttcctcggggaaactcaatgagatctggcacagaagacatgactattggcttctggctgggattgtcctccatggctatgcacggtggcaggacatccagaatgatgctcaatttgccattatcaacgagccatttaaaactgaagccaataaggggaactttctggagatgaaaaataagttcctggcccggaggttcaagctcctggagcaggcgctggtgattgaggagcagctgcggcgggcggcctacctgaacctgtcgcaggagccggcgcaccccgccatggccctccacgcccgcttcgccgaggccgagtgcctggccgagagccaccagcacctctccaaggagtcgctggcggggaacaagccggccaacgccgtcctgcacaaggttctgaaccagctggaggagttgctgagcgacatgaaggcggacgtgacccgcctgccagccacgctgtcccgaataccccccatcgcagcccgccttcagatgtccgagcgcagcatcctcagccggctggccagcaagggcacggagcctcaccccacaccggcctacccgccgggtccctacgctacacctccggggtacggggcggccttcagcgccgcacccgtaggggccctggccgccgcaggcgccaattacagccagatgcctgcagggtccttcatcacagccgccaccaacggccctccagtgcttgtgaagaaggagaaggaaatggtgggggcattggtgtcagacgggctggatcggaaggagccccgagccggggaggtgatctgtatagacgactgactggatcccaggcctgcccttcacccaggccccgtccccgaggccgacccccagctcaagcgctggggcctgctgccagccctccaccttccccaccccttgggccatcactgggctaggaacccctttgcccctctctgcagctcctctcttcaagaagggccctttgtctttctccactcccacacacctttcccaccaagccttgaagactgtgctggtgagaagaagtctgggtgggagatggctggcagggtcttccaagtaccttcctcccacactgccaagtatacacaacttcccagtaaatggttgtggggaggaaagaggtggagcctccccagccgtttccctgcagaatcagctctgtctcatgtggaagtggagaatcagccttgcctggcctttaggaacttttgtggggaagagagctttgaagagaggagggggactttagagagggatgaaaatgagccctgggagggaggaagggacgaggaggggtggctgcatgttaccgtcccctacctctccccacgtggagggtggagcagttatgagggaggaagtcaactgctgttcagcctcagaataaaggtgccgttcactggctcagttacctcctgtgtaccggcatcttgtgttgggaatgttcccccctccctagggaccaaggaccacccctacaaaaagagtaatggttgggtgatactccctcaagccaaagaggagctccccaacctgttctagggacccaggtaacctagaagggtgggagagaatacaatgggccagatgtggtggaagcccagctctggggctcaggttcctggaagacttctactaccctccctcctcaaggcctggatacagactaaatttgtataagtcaggcaggggacctagtcagggtcttgggagctaccttgtcgttgggaccagagcaaaatagtggagggcaggctagggaaatgtgggcacatcccccctcccaggaggggccggggagagtggcagtttgcatggcgaaccccccacttcctctttgctgccccttcactttcttgctgcccctttcccagtctctcttcacacccactcctggtctgtcctgatcccctcttctgtatcaggtttattggttgtacatataaattatactttcctt

SEQ ID NO: 517908 - DNA, 923 bp, Homo sapiens
  misc_feature (646)..(646): n is a, c, g, or t
acagactggtctgactcctgatgctccactactggatccctgcttgcctctggacattaaagatgagatccagcaaaacgggcagaccctgtaccttcaggggacaggagactttgacctgtgtcgagagaccctgcagcctttcatgaacaaaaccaatgagacccagacttccctcaatggcgtctaccagcctccaatccacttccagaacagtgaattctacggcttctctgagttctactactgcaccgaggatgtcttgcgaatggggggagactacaatgctgctagattcactcaagctgccaaggattactgtgcaacaaagtggtcgatcctgcgggaacgctttgaccgaggactctatgcctctcatgccgacctccatcgactgaagtatcagtgtttcaaatcagcctggatgttcgaggtgttccacaaaggcttctcctttcctgtcacctacaaaaacctgaagacggccttgcaggtgtatgacaaggaagtacagtggaccctgggggccatcctttaccggaccgcttcctgcccttgagagacatccggcaggaggtgttccgagctggccacgcgcactggcggggcgtgtcttcgtctacaaccactatctgttcttccggtngcttcctggtcgtccttctgtccatcccttctcttcctgcttgggtggggccatcaccgaggggccccgaactggtctctgtgggatggaggaaggctgcctcccaaggcctgggcccttgtggacgcacttgggttgcctgaagaaacttcgaaagcctttaccccggtttggttcccccgtcgttgccctccttgttaaaacctgttgtccctgtgcggcgcctgggccctccggcggaagagtctccccgtatctatgggagggccgggtctat

SEQ ID NO: 517909 - DNA, 430 bp, Homo sapiens
cctgttgtccttcccagtttctccccaacctccccttttccctagtttataagacaggagaaaagggagaaagcaaaaagttggaaagaaacagaagaaagataaatagctagacgaccttggcgccaccacctggccctggtggttagaatgataataatattaacccctgaccaaaactactggtgttatctgtaaattccagacattgtgtgagaaagcactgtaaaactttttgtactgttagctgatgtaggtagcccacagtcacattcctcacacttacttgatctattatgactctttcacgtagaccccttagagttgtaagcccttcaaagggctaggaatttctttttcggggagctcggctcttaagatgcgagtctgctgatgctcccggccaaataaaccccctcttccttcttta

SEQ ID NO: 517910 - DNA, 407 bp, Homo sapiens
tgaggagctgaggcagagattgtgaaccaggaggcggaggttgcagtgagctgagattgcaccaccccgctccagcctgggtgacagtgagactccgtcataaaaaaaaaaaaagggaatgtttcctagccctctgaagcctttcgatcaatgattgggaccaggcaaatttccggtaatatttggtagtgattttcaattccatttttatctccagagttttttcaaattaatgttcaatggcattcctccttgagggacatagggccattacacttctctttcattttacaaacgtttgcttgccattggccggtggtttgctctctttttatccacaattccaaccccttatgtggctcctttggtggtgacgtcgtgtccctcacgcaggcttgcaaaccagg

SEQ ID NO: 517911 - DNA, 152 bp, Homo sapiens
cgattagacttattttgtagtggctgcatcacatatttttcactagaattattttggaaatagctgaatgtaatagcaggtaggaagaagcaagcaaagtgagagcttatcttcatccagtcattgcccatctgggactccatttggataac

SEQ ID NO: 517912 - DNA, 1013 bp, Homo sapiens
tgagctctcctatttcaccctgttggccctttccctccttcccctatcagccagaacatctctggctcacgggccattctactagagtcactcgcaagtcccaagagcttcctgtctcctgggccacaccttaaaggacttagccgtacgacaatagccctttatgagtgaagactacctctgttgcagacgtctcacggaacgaacttagcctagaagtccattgtccgaagccccccatcgcaggggtccagtagaacctcccgccaagtacgtctagacaactgaggacggcacgactggcattagatacgcctcacactcattctcgaccgcctgacgacactacagtagcgctaccccttcctgtgtacttatccctactgaggcataattataacaagctccatctgccatacgacaaacgagaccgtaaaatcgctcatgtgcatactcttcaatcgagcacacatagccctcgtagtaacagaccattctcatcctataccccctgaagcgttcaccggcgcagtcattcctcatacatcgcccacggacttacagtcctcaattactagttctgcctagcaagagctccagagagctacagaacagcagctcagcagtcggcatcataatcctctcgtcaaggacgttcaaacgtctactccgcactaatagctttaggagtgactctttagcaagcctcgcgcaaccttgcgccttaccgcccgccacttattaacctactgggagaactctctgtgctagtaaccacggtctcctgatcaaatatcactctcctacttacaggactcaacatactagtgcacagccctatactcccttctacatatttaccacaacacaatggggctcactcacccaccacattaacaacataaaccctcattcacacgagaacaccaacatctatacacctatcccccatgtcagctacccctcaaccccagtcatcgtcctcgcttcgtttcttgtctttgttttcttgc

SEQ ID NO: 517913 - DNA, 1713 bp, Homo sapiens
  misc_feature (107)..(107): n is a, c, g, or t
  misc_feature (1530)..(1530): n is a, c, g, or t
tctacacggccggtttaatcgggttcttatattcaaaagaaagcgtgctccaaaagtgattgcgaccttttagtggcacataactcaaattataagaagttttatgncagcgaggctttctttctccctcgtgtagtgaggtttcttctcgtgcgaggctttttttctcaagggggccgtggttatatcatgtggagataagccgtgcctgtgcctttatttctctcccaccgagagaggcttatcatctcgtgcttctctttacaccaccaacacagagcgacgccttttctttctcctttctcttatcaaccttcacccacaagctctttttttgtgacactgtgacaaacaccgcgccgccctttcttcctacaactcgtgaatgtgtggggcgtgtggaaagtagtgccccggcgtgtgctgttgtccagacaagctggtggcccttttatatcccaacccgcgggaaaaaaccatgtgggatgaaatacccccgtggggcccgtggggcccgaacaaaaacaagtgggggtgtttctcccggggagcgcactatgtgcggctccataatgggcaaatatattgtggggggaatataaaaggctttatacaaaacacatgtggtatatctctctccaaagagttttttctactacaacggggagagacatttaccattctactatttaagaaggggcagcccttcttttggcgacgatgtggggaactatcttctcctattgtggacgagaagagagggtgctcctccaacaaaaggggggggcctccttatgatgggggagaaacatcatctcatgtaggaggcgcttatttacacaacagaagaaaatcatcctgtcgacatataaaagaccatctcccggtggttatctacaacaaatccgaacttcctgataggggctgccattgttgcgacgcaaacagatgtcgtggcaaccggataacaacccatccgttgtgcaaacggggagcaacaacgacccggcgcaaatataaacccagcgccacaaaaagtgtgggcaccgggcgaaaccaaagcgtgacacacactgtcagatcagaacaatccgacccggagaaaagaaacgcaacgaacacatagtaatacgacggggcgccacaaacaagaggcgcgcacaagaaacaacaagcgggtcgccccccacaacaagttggcgcccccaagcccacagcgggaacgacccaagcagcgctttgacaaacagaattgtgcttatcaaccaacccgctgaggtacttatatacccagtttcataaaggtcaagagaagattatatactatcccgcagcggagcaatttactttctccgttagaaagcacgagccctgtagtaaaactgaaaatcgactcgataataatacaccgtcacacaatgtatagcagacactgagtaatagtcacaaacggggctgtcccctccgtgtaggactaggtacaatatcggcgcgaacaacagcgatatctacatacaactcattggagcnccttttagcgcagagaagactcatacaatacgctaagaaaaaagagcgtgtccatccatcttttgtgtactatactatactcaccacgggaataacaaggattactatgaagcggagcgcaacaaacaaccgctcatgagaggattcattctagtcaagccaacccacaaacgacttagtata

SEQ ID NO: 517914 - DNA, 174 bp, Homo sapiens
gccggtaccgatagtgtcatgcaattttttttgctgtttacaatgaattcgcccgtgtggcttgggggatcagaaggattcctaaactgtcatttcatttattggtaggtcatgattgctgagggttatgctttggatttttcatacctataaagtcaatcttgagttgatcag

SEQ ID NO: 517915 - DNA, 136 bp, Homo sapiens
ttataaggttatgaatctatttaattgctccgactgggctagagaatacggaccctgaaatacatatatttcataagggtcagttaccaaatggattgtttcaaatggcaattttttaccctaacctggttatgga

SEQ ID NO: 517916 - DNA, 1064 bp, Homo sapiens
  misc_feature (2)..(2): n is a, c, g, or t
  misc_feature (74)..(74): n is a, c, g, or t
  misc_feature (81)..(81): n is a, c, g, or t
  misc_feature (83)..(83): n is a, c, g, or t
  misc_feature (88)..(88): n is a, c, g, or t
  misc_feature (90)..(90): n is a, c, g, or t
  misc_feature (104)..(107): n is a, c, g, or t
  misc_feature (115)..(115): n is a, c, g, or t
  misc_feature (128)..(129): n is a, c, g, or t
  misc_feature (132)..(132): n is a, c, g, or t
  misc_feature (154)..(154): n is a, c, g, or t
  misc_feature (157)..(157): n is a, c, g, or t
  misc_feature (171)..(171): n is a, c, g, or t
  misc_feature (174)..(174): n is a, c, g, or t
  misc_feature (181)..(181): n is a, c, g, or t
  misc_feature (187)..(187): n is a, c, g, or t
  misc_feature (194)..(194): n is a, c, g, or t
  misc_feature (215)..(215): n is a, c, g, or t
  misc_feature (233)..(233): n is a, c, g, or t
  misc_feature (236)..(236): n is a, c, g, or t
  misc_feature (238)..(238): n is a, c, g, or t
  misc_feature (254)..(255): n is a, c, g, or t
  misc_feature (265)..(265): n is a, c, g, or t
  misc_feature (271)..(271): n is a, c, g, or t
  misc_feature (274)..(274): n is a, c, g, or t
  misc_feature (278)..(278): n is a, c, g, or t
  misc_feature (281)..(281): n is a, c, g, or t
  misc_feature (290)..(290): n is a, c, g, or t
  misc_feature (293)..(293): n is a, c, g, or t
  misc_feature (409)..(409): n is a, c, g, or t
  misc_feature (416)..(416): n is a, c, g, or t
  misc_feature (457)..(457): n is a, c, g, or t
  misc_feature (487)..(487): n is a, c, g, or t
  misc_feature (496)..(496): n is a, c, g, or t
  misc_feature (1041)..(1041): n is a, c, g, or t
tntatagcatttaaaatatcatccaacaaaggacaatgaagtttacatctgggggggtatacataacttggggnatttggngngcgtngngcccactgagtaannnntttggtgntggaagtttcttnnaanttaccaaactaaaacaaaaggntgnatgatacaaaaggnggngtatttnggtgtnatctgtnaattggcttttaaaaaaaggnaacacatcctgtttcccnggncngtgggtgggcgggggnngggtgcggcngtgtgngtnttanggnatttctcangtnttctcaaatgggtgcagggtgggggtggggtggggggaaattgatagaaaaactttgctatagacaccacaacaaacaataaatttagataatttaaaatttaaaaaaaaaaaggngaggggnggcatttcggcggcaaagtgctcaataaaaagtatattgtngggggtaatacaagaaaattggggtaggangggggcggnaaaatgggtcagcggggtgggcggaggcctcaaagggaatatggcgttgtcgttctgggggggataacacgttctggatctggaactgcccggaataactttggttctcttgtatttacatctttgaagaccatgatcgaagcaatatttccacaacgatagcagtaattaggagcagaccatactgtcaccagcttctcatcaaacataaatttatagccttcgtgcactagttgatgtgctctgcagatgagttttaagttgttgatatgaacaaactcatttgtgacctttgctccaaaaagccaacctgctcctcggggactgatagcccaggtatccacatcttcaggatctgaccaaaccagatcacaaaatgctcctttatgaggaatttcctgattccgttcgatggttcgaatttgatccagttttttgatatcaggagataaaccaccatggacacacaaaatctgctcatctattaaagctgctactgtgagcatgttaaaactttggtacagtatctccaggcattagcattncatatttggtttggcactcatca

SEQ ID NO: 517917 - DNA, 453 bp, Homo sapiens
tggtcacacgaaattttacaatgccaaacccaggccttgctgactcctaagaaaggttaccgtgaacaccatatcccctgcatgttaacacggctcacgagacagggcacggaacttagcttcagggtcatgcacgctacggaaacgggcaggcactagagccgtgtaaatgagagcccactgtggctcctcctaccgcacaaggactgccccagtgcctgtgcacaagtaccatggccgtggctgaagggccgggcagtcactgaggctggactttgagtctttccctgttgtgattgcatggtactgcagggtagaaggccttcctaatagctgtgggtcgcgagccacatccccagcggcttgggtcaccaattgggaaagggttgcctggctttagggcgcccacgagtcggggccccgtcttggctgcttacagaagcggtccttcct

SEQ ID NO: 517918 - DNA, 887 bp, Homo sapiens
ggccgcggggctggcggtggctgattggacttggtgggtcccgggcctaggtgctggggctgccgccatggagtaacctgttctgtgccgcaagaatgcagagcctgctgtcacggagcagtgacaaggccatcctgcaactgaagcagcagcgggacaacgctgagtgcagtaccaggaagaggatctgcccagcagctggagctgcgagctgcgccctggccctggcatgtctgcttgcggtgactggcagggaatggaactgggccaagctgctgctcaatgaatgaatgcgataccaggagcagctcctggacatggactggagaaccagatcagcaggcctggaggccatggttcagagtattgatgttcacccaggatctgaacatgaaagtgatggaggggctcgcaggttttggaaatgagttgtcttgaacaacggatgcaaccagtgtgattgtcccattgcaagaggtggacgagtggatcctgtgcaccgaggactgccagggatggccttgttggcagtaccatgccggccaatagacgagctcctggcatggaagcttcactccaggagtgatggcaatgacgccatcctggcaggagcctgatgcgcagtcacactcacggaaaccaaaatcggaagctgccagaaggggttcgcttcccgagccccctttcctgacggaccgatccccagaaaaacggtacccttgtcaacgggcccaaggccgcaggggcagcgccggcagcttggatggcatgacttcgctataacgtggtgccagtcgacctatgctggggaccttcacgtggggaatgccccctgtggacttgatggacccaacaagaggagctttgcagtcaacgaggcaggccca

SEQ ID NO: 517919 - DNA, 399 bp, Homo sapiens
cgcagctttatcccaacgattttccccttctctttttggtaaaaccgccacagctatcattattactagcataaaaggtggcctcttttggtttttaaattaattgagcaaggcaattgcaggctgtgcagcctttgattgccagttggtgatccaacttcatggttcttagcccttattcaaaatggagtcgctctggttagaatgcttcccacgtatctcccctttcccttttacaagaggacccttaatcctaggggtttcaggatgaaggtccatgctgaatgggggcaatgatactcctgcctaactattagggtctcttgtattcagggtagagaggcactcagtcagaaagcattggtccgttaagcatctgtaggtaaaacactcagcctc

SEQ ID NO: 517920 - DNA, 181 bp, Homo sapiens
cacgagcgccccagtgtcattggaatttatattttacggaataggctttgcatgttaaaattcacaagttgttgaaactggtactcaacagatctgcatttcttacacgagaggcattaaggaattggcaggacttaacttggggtgggaggagataacatagggagaatgggagagttgg

SEQ ID NO: 517921 - DNA, 83 bp, Homo sapiens
gcacgaggctctattccatgaacctgggctaatgggatactgtaaaaaaaatgaaaaaacttccgggggaggccgtctcgcat

SEQ ID NO: 517922 - DNA, 646 bp, Homo sapiens
caacgcgttggtcccgatgtgctggatccgaatctgacgccggagtggtgaaagaacgattattgtcgccgcgctttcgtaaccgtcagtttgctggattactgctcgatcaggcgtttctggctgggcttggcaattatttgcgggtggagatcctctggcaggttgggttgactggaaatcataaagcgaaagatctcaatgcggcgcaactggatgcactcgcacacgcgttactggagattcctcgattttcctacgctacgcggaggcaggtggatgagaataagcatcatggggcgctgtttcgctttaaggtttttcatcgagatggcgaaccgtgcgaacgttgtggcagcatcattgagaaaaccacgctgtcatctcgcccgttttactggtgccctggctgccagcactaggccgaccgcttcggcgcataggttgaaataaaccgcgcaatggcaggccctgtcagcaaaatactgaacaggcgtagggtttgcatcgccataatgagcgccatatcggcattgctcctgcggcgatgaccgcaacgtaatcaagcccgccgggtggttggccaagtaagcagtcataaatcatgggataaccggttagccccaagccataccgacaatagccg

SEQ ID NO: 517923 - DNA, 169 bp, Homo sapiens
aaaataagctgagaatgaacatcatcatcaaacacagcattccaatgaagtctggcaatgaattgtgacacaaactgaactttaatttgctctgtgtccacatgatcttctgagcctaaaagttcctgtttcctgttaatgatggtgatgtatctgtctcttgatataa

SEQ ID NO: 517924 - DNA, 393 bp, Homo sapiens
  misc_feature (279)..(280): n is a, c, g, or t
ttttctttttgagatggagtcttgctccgtctgtcgcccaggctagagtgcagtggcgcattcttggctcactgcaagctccacctcccgggttcacagcattctgcctcagcctcccaagtagctgggactacaggcgcccaccaccacgcctggctaattttttgtatttttagtagagacgcggtttcactgtgttagccaggatggtcttgatctcctgacctcgtgatctgcccgccttggcctctcaaagtgctgggattacaggcgtgacanncagtgcctggccctaaaatgtgctttaagtgccaaggtatacatctgatttcaactacttagtatgaaaaaagaatgtaaactatcttattaagattttaaaataatttttac

SEQ ID NO: 517925 - DNA, 782 bp, Homo sapiens
taaatagagacagggtcttactatgttgcccaggatggtcttcagctctggcgccttaaaccccctgcctctaccttcattccaaacccctctcggccgggtgctggctatgcttgtaatcccagatttggaggccaaggcaggaggatcgttggaggccaggaggtcaataccagccgtgggcaacatagtaagaccctgtctctattaaaaaaaaaaaataaacccttttttcccacacaaaacaacccaaattcctctaaaatcataatccttataatccctcgtgatctcgtggtataataacctctagtggggaattgcgggatcatccgtatccctccttgtcgtcgtccaaatcatgaaaatgttggggccataagtcaatgtcaatgcccgtcacataaaaagccgaggaccgaggtcccacaggggaagcacgctggaagctgggaaaccggtgtctctggacttcaacaccgggtttctaacaggtggtagactgggggatgggtggaggggccaacaggatagagctgaggcgacctatgccaaatgaggaaagtacagacaaggggggggcttaggagcaaggggacccatatccaaacgggcaaaaaagacaggccaaggtggacctggggacacataacgcaaagggagggacggcaaaaaggcggccaggtacgcagcgcgggaagaattgaagcaggcccgtgggaaggaggcgccaggccgcgctgaattggcgactgggtgcccattaaaagtctaggaagaaa

SEQ ID NO: 517926 - DNA, 174 bp, Homo sapiens
tcgttgttccaccgacagaccgttgtaacgctggagcacgcctgcgcagcgggtgcagagggtcttctgatgtttggcgagcgtgacttttacatacacgcaatcgcagtgttcgcagatatcaatgggctgagggtcgccataagtcccactccatgcgctatacgttacgcg

SEQ ID NO: 517927 - DNA, 845 bp, Homo sapiens
tgtaccctacatgtgtctgagtgaatggctttgaatctggactcaagccatgactcagcccgtggccagtgagggctcagacatgtgtgctctgacaagagtcttgaaggtgggtgtgaacgtgcctttgatgctgaaacagactctgtgaaatgaatagccagtgagtccctgatcatgacttgtgaagatattggatgtgaatgatgtgatgtggtgacactggtcaccgaacccatgtgatgccccctctgtggtgcagatcatgagtgctccactgattcaccgcaattggcaccacttgggccacccagttgagtgctatgcatttgccatgcaatctacaatgccaatgtaccacaccatgagttgttaccatgaacataaatgctgctgactatcctgaccttgtgaccccagccattataggcaagacagtgaatccatccaagaacacacacaacaaaaacacatcattacccatctgtgaacaagcccgaaatgtggccattttgctgtcaacatgcggagaatgtatgaacaactgctctttcacagaagcccaatgccgcttcttgaagcgaagcgtgccttactgaacacttcctgcggcagtaatgagacagctctagatcttacccacaggtttgggaacctgcaatcacgatggtcctggtgaaatttgcagtccatgcatcggaattcccagagtttaagcacatgccttaccacacgggtcccgttgcactttgtgccctcgaactaggatcatatggacatccccgtggcatttcttgcaaaacgaccataccatagcaaacatggagagtccgacaccaaatctg

SEQ ID NO: 517928 - DNA, 186 bp, Homo sapiens
  misc_feature (121)..(121): n is a, c, g, or t
tatcgggggcactgtccattgtgtgggtgggcaatcacggggttcttcttcaaaaggttacatttaagcttcaaaaggttacatttaaacataaaagaggaaccaagcataagagccaggnagacaaaaagacggtccaggcagaaagaaaagcacttccaaaggccctgaggcaggacagcatgt

SEQ ID NO: 517929 - DNA, 480 bp, Homo sapiens
cacattctgggtacggaaaaggagaattcaagtgtgacccctcatgagggcaacgtgttactgatgatggagaatgacactaccacgtaagtagaacagtggcagaaggaatatctcggtgccttttgctcctgcgctatgctttggacgccagcgtggctgtcgctgtgacaacggcctgcagacctggtgggtgaagcccggtctccgaaggcgctactggccgtcgcttcacacagtattctcagagataccatcagagaacaaacactaatgttaattgcccaattgagtgcttcatgcctttagatgtacaggctgacagagaagattcccgagagtaaatcatctttccaatccagaggaacaagcatgtcttctctgccaggatccatctaaactggagtgatgttagcagacccagcttagagttcttctttctttcttaagccctttgctctggaggaagttctccagctt

SEQ ID NO: 517930 - DNA, 132 bp, Homo sapiens
tgtggctcatgtgatcctctgttaggatttaaagtggactcattccaattacatggccctccagaagaagctgaaggggacagaggatgaggtggaaaagtattctgaatcctgtgaatgtgagtgcccagt

SEQ ID NO: 517931 - DNA, 147 bp, Homo sapiens
ctcgagctctagcttgtttaacagtggaacggcgctctgtgctggcagtgtgggctcactagtggcctgtctgcacatgtaaccacgatgctgtgatgtatgcactgacttggtactccttgtgaagaccaggtcttgatgttctgg

SEQ ID NO: 517932 - DNA, 494 bp, Homo sapiens
gtcatatttattctcttttgtaactgctgtctttacaataaagaaatcatctgcctttctaaaaaaaaaaaaaaaaaaaaaaaaaaaaaaaaaaaaaaaaaaaaaaaaaaaaaaaaaaaaaaaaaaaaaaaaaaaaaaaaaaaaaaaaaaaaaaacaaaaaaaaaaaacaaaaaaaaacaacaaaacaaaataaaaaaaccataaaaataacccaacataataagccttaaaagaacatgctactaaagccatcctaccactaaagagtataggcaccaaaccaaatagccctatccaacatgcagcccagaattgaaaagcgaaagctcaaatagcaaccttttaatccaaaagtaaacgtcaaaaaaaactttaaataaattaagctatcatctaaatacattgtgccgaactcgataaaaatgcacaaaaaatcaatactatctaaaaaaattaggctaaaacggcagcccaagatttaaacaccaacaca

SEQ ID NO: 517933 - DNA, 245 bp, Homo sapiens
cttctagaaaacgaccacatctacaacgttatcgtaacagaccatgcatttgtaataatcttcttcatagtaatacccatcataatcgtgtctcagtaactcactatttcctctaataatcgtagaccatgatttggcgtatcgccgcataaacatcatatgctactgactattacctccctctctcctactcctgctcacatatgctatagtgcagtcctggacagaaacaggttgaacagtct

SEQ ID NO: 517934 - DNA, 369 bp, Homo sapiens
ctcattaaaattcagatatatttcctctgttattgacttataatccacttaggttaataactctggcaataaaaaggaagtttagcttatttggcagttaatctgagctggttcctagagactaccactcattaatgtcttgggtgataagagctctgtttaattaattatacagagttatctagaaaattcagaaacatgataaatttacaacttatcagcttcaagttcagaagtccttttttctgtttccctagtagcataaatcattttttaaaaatccatacaaaatgttaagaatggcctcatatcatatgaaaaaattaactcgagtggatcaaagacctaagcctaagagtgaaaactata

SEQ ID NO: 517935 - DNA, 121 bp, Homo sapiens
gggggggggttttttaaggttttttttccccggggggttttcccccaaagcttggccctttgaaaattaaagggggggggggttggggtttttccccaaaaaaaggtttttttccctttta

SEQ ID NO: 517936 - DNA, 850 bp, Homo sapiens
aataacatacgattcgcacgtaagaatatggtagaacggtctacaatactagcaaccatgtggaaggcatataatatcccccaggagggactccagtggaagtaagcatggatgatcctggtgaagtaatgcagctcaaaagctcacctgaccagctgtacagttcctgttgctggtttaacataatgtaattgcacattgggggaacaaaaaaaaatcaaaactctggtctcgcttggcctcagaaggaggagctctcggtgcctgattccctttcattgacggttaatccatagaccctccgctcactgactccctgccactctttttttttctctgccgccgactggtatcaatcatactcatacgtgatgagagaggccctcctcataatcaggtatataacctctcaaaaaaaacatagaaacaacatgtccttttataggcgttgttccaaaaaaacgccaagttcacgattttcaacccatatttcttccaccttctcactaacagcttttattttacccttttttcacaacgtgggtatgccgcttgtactgtaacgatatcatgtgtccaccccaacgccgaactgtggaacgctcaacctatattatccacgtgaaactcaattgcacacttttaccacgtttcagaactgcatcactttcctttacaaccacttacctataccaaccgtatacatagtactttcttataactcgtatgatccaccaactttcccaccaataacatatagacgtttcccacctacgcaaccaacagttggattattaactagtacctataaatccttcgccatagttaccattccgtgcctacactctac

SEQ ID NO: 517937 - DNA, 163 bp, Homo sapiens
  misc_feature (106)..(106): n is a, c, g, or t
cacaagttttggaggcgctgtggactggcccaggaggtacgaggcccactcatcctcaacccccatggaggcaacgttggcaggcagcctgcgcctgggagggtcntggggcagcccgtggcacttacccttgggtagggttttcagggaggctcacggtgta

SEQ ID NO: 517938 - DNA, 138 bp, Homo sapiens
cgagctggtggggttgtattgaatctgtagatcaatttggggagtattgctgtcttaacaatattaagtcttccggctgggtgccatggctcatgcttatagtcccaaccgatcgcctacagatcgccaaccagatcg

SEQ ID NO: 517939 - DNA, 793 bp, Homo sapiens
  misc_feature (98)..(98): n is a, c, g, or t
ctgtaaaaaaagacagtctgaaaaaaaaaggctgtccccgaaaacagattgtttgcaaaaaaaagttttgccgcccaacccccccttgttttcaaaanaaagccgggctctaccaccacacaatgtgcccccccagcttgtcccccgcccgccccccacactgtgggaaaacaaacacgcgtgtttttagtaaaaaaaagagaggtcctcccaaagaagtgatgaatttttgcccgcattattacacctcggcggcgcattatattgccaagaacaaatttatgcccccctaatatcgccactgcgacataacaacggaagattttctctataatttctgcggtgccactcaagcataattttctacacaatattccactcataattatgttcctcagccgccccacagatccaccgacactactcgggcattcttgcggagaaacaagggtagatcttttatattgcaacactcactgtcagtgtatacctacacccacgtccccacacacatcgtatttctatacaaagaacaactttcccaatggcgcttcccaacaattgaaggataatgttacaactgttatgatgtttgtcattaaaccagttgccacctttacaaatatttgtcccccctgaaatatttctacccgcactctattttctattattgagcatttaaattgagtacacctaagagccccggcagtacctcttctcccgcggcgccgctgttctattattcgaacccactaaaaatttatattgttgtccccaaccaatcaataaacaa

SEQ ID NO: 517940 - DNA, 821 bp, Homo sapiens
gcaaggccattgctagaaaaggtcgtccacttgatcagcatctggaaagcaggctgccgataaccacttgtccttgcttgtagactcagctcacctgtatataaaaactgttctgtggcattctgggaaacagctatttactactcaggtacttcatggtcctgttgatctgagttcacctttctgatacctgtttcaaccagttgtcccccgaagggggcaactgttaagcttaacctctgagtaatttgagacagatcaatatttgaatggttgccccatttgttttacctgtactgtatctgggtcatctcaaatggggtctaaacaccagctacttgggcatacccagaatgttgccattccctccaattccacctagtttattcattcctgtcctagtaaaggggctctttctttcagtgtctgatactctgtgctatggggagcttaaaacagaattttacaaagagctaattgtgggtccttcctttggaagccatagttaccctgccaaagaaagagtagaacaaatcgggttcaactcccgtgtgtcggctcaggcaaaagacctcttgtggaggtctccatacattcgaggtggagcggatgatagcccttaagagggtgggttaagccaatgggaacttttccctagaagtaagggcccctcgtggccagggtttcactcagggccattcttccagggagcgaattatggatctatggcttaaaagaggcccagtaaatattggggggaggcgggcacccagaatttatatggctattggttatttttcccctataataggagaggccca

SEQ ID NO: 517941 - DNA, 133 bp, Homo sapiens
ggaccggaagaatcctggatggtgattatagtctcggctctccttgtactcaactgattttgcaaacgcttctgttttctgtaacagttcctgcttttctgtctgtagtttggtgatcaccacaggatcttcc

SEQ ID NO: 517942 - DNA, 1288 bp, Homo sapiens
agcggagatgcgtcctggcaaggagacggcggagttgctgcggggttagttgcccttgatgactgcttcttctcgtacatgaggcatagtctacctcccacctccagctctcgaaaggagcttgtcctgagggacagtgatcagaggctccttttcttatctgatcagcgatatcagcccgagattcgtgaagacactgtgactccagattatcaaagagatagataatgactatcacggtgtcaaatgaaagactaataatcgagttatgtagcgtgctagtgaagacatgggaccgacgttcatgtaatggaagaagcttgggtcactgccagaatatgtcagtcacttatagtctaattgaccatccatggatgcgccatggatgagtatgtatgcgtgccccgagagtggattgcaacgaggtgtcaacatgaacctgagacatgcgcttaataagtgctcttgtcgatgtataagaaagacccattgtaagaagtgataccatgaggcaatgacgaaggcatgtcagcttatctggatttctcacacccaggttcaatcaagagctgcgttcccatggtaaactattgcgcatggagaaagagttgacggccgaaacgtagtcgtaaaggttataatgaacgcataggatcgtttcgataactatggagagcgtgtataacttcagatgctctgagtatgaccggactctgagggcatgaggctaaaaagcaaagaacctggagtttgttatatcatttccccgcgccaggtaaagtgtgaccccaggcaatgtaaactgacggatcacggcaattactcaaaaggaaaccacttatttctctgttggaagcactgtgctgagtcattaacacgtaaagggcacaacctggagtctcgtaaaaaccgacgtggaggttaaacgctttggtgggacaaggtgcaactatgaacgtcaccatttgcagggaacgaaatatctaatgttacgggaaagtcttaccagaatggcatgcgatttaccccgttcttagttgaattgtgcttagacaagaaacgtacatgatggaactttctgggatcgccgcccaaattaaaggctacaaggtgggacaccacgaaatgtgcttaccagatggtttctataggatggggccggtatagttgtgaatagctatagcgcgcttcacccacatatattcatctgtgttaccacgtaataaccacacgttgtcgagcaggaaatgtgtgggggctctcgaaagtgtagatctccccagaacta

SEQ ID NO: 517943 - DNA, 451 bp, Homo sapiens
  misc_feature (304)..(304): n is a, c, g, or t
atgttccaaccagtccatggtttctagcacactaacagtggtttcatgtacttgctgtctctgattctggtctggtccgattctctatgagaatttctcaacgatggctcatgccggtcagtatcagtgcttccatcgtgccatcttggattcacttctctttcctttctatttactcccaaaagggagtcattcatcctgatgtcctcaatggctgtgatatggctgggtgattcccaaatacatagctccaacccccaaatttccccaagattttagatctggtatggtataacctaatggnacatctctagggacagttccgtatagagtcaattcatcggcccaaccaagtatgtccctccggaattcctctccgggttacttcatcacaatctacataggctcaccagctagaaacatttatgagcttacattccttcttcccagg

SEQ ID NO: 517944 - DNA, 329 bp, Homo sapiens
  misc_feature (15)..(15): n is a, c, g, or t
  misc_feature (39)..(39): n is a, c, g, or t
  misc_feature (60)..(60): n is a, c, g, or t
  misc_feature (85)..(85): n is a, c, g, or t
  misc_feature (124)..(124): n is a, c, g, or t
  misc_feature (138)..(142): n is a, c, g, or t
  misc_feature (154)..(154): n is a, c, g, or t
  misc_feature (180)..(180): n is a, c, g, or t
  misc_feature (184)..(184): n is a, c, g, or t
  misc_feature (197)..(197): n is a, c, g, or t
  misc_feature (199)..(199): n is a, c, g, or t
  misc_feature (213)..(213): n is a, c, g, or t
  misc_feature (227)..(227): n is a, c, g, or t
  misc_feature (231)..(231): n is a, c, g, or t
  misc_feature (238)..(238): n is a, c, g, or t
  misc_feature (249)..(249): n is a, c, g, or t
  misc_feature (261)..(261): n is a, c, g, or t
  misc_feature (271)..(271): n is a, c, g, or t
  misc_feature (275)..(275): n is a, c, g, or t
  misc_feature (288)..(288): n is a, c, g, or t
  misc_feature (299)..(299): n is a, c, g, or t
  misc_feature (301)..(301): n is a, c, g, or t
tgacctcagacactnctctggctaatattttaataagcncacagcagataattctgagancatgggtgaggggtggtgcatgttnagatttaaattggcataaagctgcatactttttgtctanctgtttgatttcannnnntaatatagtatnccaattttgtgactgttaccatgtgnaagncctgttgaaatgnanaattgtctgccccncaatcaagaatgtntgtntaaagtntgaataaatcncatatcaaatgncaaacttttncatntgaatgattttcncaaagaacatngnaaagtcaataaatcctcttaatttccac

SEQ ID NO: 517945 - DNA, 1184 bp, Homo sapiens
ggcgacgactttgtcaagaacctggatgtagtctgcaggtgggagtatcaccttatcaagatggaagcaagggttatgtccgatcgcttgcagaagtatagggatgatggatactactcacactggtaatacctagccaaggcagctaggaagcgaatctaagccatcgagtttgcattcggcctctcccgtatcgagacttgtaccactggacttgtctagtcgcccacgagaaggcttcttcgacatagtccttgtagctgtcactccagcctatcgtggggaactcgcacatcgtatcagtcctgaatgggaaaaccacgggtctcgagctgtgcatcactcacgtccgtctggcttggcgtgcgatgttacatctgtcctggattctcggggaagcgaagctcagtgtagggatgatggggagacccgttcagcgtggccgatcataagtgactcggcgtgccatggcgagggcgtcctacacgcgctagtgcaacatgtgaggtgattctaggtgcgaggaattcacttgacagtaatgtgcacaagcgagatcgttgtcgcagagagaacgatcaagatagggctaatagcacgcgagggcttgggcaaagcgatgggctcgcgactggtatcggaaggagaaaggaaagggcccatcgcccgggagaacgcattgtctgtcgcctctgggcttctcgcggtgagacgagcgcaagtatcgagattaacccttgttattggggagaactcgcgaaggcacctcggaagggggagagagggccattcgaaggggaattctggggccccctgatagaactctccattgggcccaaattggcgccgaaccatgggttggggacactatgctttggtggacgcaggttggatccactttttgctttggcaccgacctaagagcccctaggcatacccgccgaacaccgtggctccctttggtcaatcttccttggaggcgcattctttttttggaccccataggggattacctttggaaggggacgggggacatggcgatgcgatcaggggaaacgtttgatccccgtttccctggtggggggctgggggcccggagtgtacatgggccaactggggacagtgcctcggtcaaaggggtcccgccgtcactcgtggcccttgggatgtcttggcccgtcacc

SEQ ID NO: 517946 - DNA, 222 bp, Homo sapiens
gcgagtgccatcacttcttaagaagtctggatggacgaagttgttgcgcaacacttcgtccacccggatttgacttcaagaagtgtgtggtcattatggcaacaacttcgtccatacagaccttccattcggatctcatagtagtttggaccctcggcgtgtgcaacaacttcgtccattgtgatctgatttgaagaagtgtgtggagcctcggcgtgtgca

SEQ ID NO: 517947 - DNA, 245 bp, Homo sapiens
gtgaattctggtacaggtataggatctgagtctgtcactgtctgaggaagtaggatctgaccctggtgtgggtatctgggatctgtccatgtctgaagaggtaggatctggcccattaggactatgaggctctgggtctgtcagtatcttaggaggtaggatccgggtgcaggtacaaggatctggatctgtcagtgtcttaggaggtaagatgtggccctggtatgaggatctgagtctgtcca

SEQ ID NO: 517948 - DNA, 568 bp, Homo sapiens
gcagcaccgggacatataagacgtcagtatctagatagtgaataattaagtaagtgaaaaatttggtaagtttaccttggtaccctttgaactgaccaatgctcataatgtagacagcggaaagtgttttcattcaggcaaatcatacctgcatccaatgtatggaagtactttatactgtaacaacaatgccgagtgagaaggtgattgaattttcttgttttggggaccattaaactgatgaggaacatgttgatgattgcagcataaacacctctcagtctgtcttccttcagtttgctcaaggaagtacttacatcgtgatttggaaatcaatacgtttgggaaatgtcaaagctgatgcctttaaaaatgcattgaaacactatgggaatatcaaactatgaaaaagacaagattttccaatctatatgttttccactttgaagaatacatatatatatagctgattataaaggttacagatatgcattgtcaagcattcaggaggtacagagaaattcttacacgattctcattgttgacagcacttgctgagaatgctgac

SEQ ID NO: 517949 - DNA, 294 bp, Homo sapiens
ctaaggatcccggcgttgcgtgtattcggtgaaagcgcttgtgaaggtcgcctttattctcttgtctttcgtacaggtaggaatggaagtaattaaagccgacctgaattactcccggtctgaactcagatcacgtacgacttcagtcgttcaacaaacgaccctttgagcggctgcaccatcgggatgtcctgatccaacatcgagtccggtaattgcaatagctctgctggactctagaataggattgcgctgttatccctagggtaacttgttccgttggtcaagttattg

SEQ ID NO: 517950 - DNA, 906 bp, Homo sapiens
ttgtgactggggagtatgggcggcactccctctacaaaatgcttggggtacttcagcctggtcgggcttctcctggctgcactccctgttaaggagattactaccaggccatcaacgtgctggagaacatcgaactgaacaagaagagtatgtattcccgtgtgccagagtgccaggtcaaccacatactataatgtagggttagcatatttgatgattgcgtcgtgtaccaggatgccatccgggtcttcgccaaacatcctcctctacatccaggggaccaagagcatgttccagaggaccacgtacaagtatgagatgattaacaagcagaatgagcagatgcatgcgctcgtggcattgccctcacgatgtaccccatgcgtattggatgagagcattcaacctccagactgcgggagcaaaatatggggacaaagatgttgcggcatgcaggaaatggtgacccacaagtctatggagaacttttcaggtaactcctgacccaagttcctgttgccggtagttgcccaaattatgattatgtgcaacccaactaggcaaaaagagcctttcctggacgcagctgaaggtgttcttgctgagtaacagcaagcggccagctttcaaccatccgcaggtccctgaagctctaacagcatgctttggcaagcttggtgctcctggacctccagagcagagtacggaaccggtctgtctcaagagagatgagaactcgttgaacacgaggattcagcctgatgggaatacgcgctcgagtgatcactgatagactgacagcatggacacaggccggaagggattaaccgcgacaaatgggatacccaaatagtgcactgtacactgactggttcgaggattgacaaacagtataatagggtgatc

SEQ ID NO: 517951 - DNA, 374 bp, Homo sapiens
  misc_feature (21)..(22): n is a, c, g, or t
  misc_feature (30)..(30): n is a, c, g, or t
  misc_feature (32)..(33): n is a, c, g, or t
  misc_feature (35)..(35): n is a, c, g, or t
  misc_feature (37)..(37): n is a, c, g, or t
  misc_feature (43)..(43): n is a, c, g, or t
  misc_feature (45)..(45): n is a, c, g, or t
  misc_feature (48)..(48): n is a, c, g, or t
  misc_feature (53)..(53): n is a, c, g, or t
  misc_feature (60)..(60): n is a, c, g, or t
  misc_feature (83)..(83): n is a, c, g, or t
  misc_feature (86)..(86): n is a, c, g, or t
  misc_feature (90)..(90): n is a, c, g, or t
  misc_feature (143)..(143): n is a, c, g, or t
  misc_feature (165)..(165): n is a, c, g, or t
tctcgtgacatggttccttanncgcacccnannananggggcnangantgagntgaatangtgagtcatgtatacgaggtgtngtnaatngaagtagttatctaatcccaacgctgcagcaagagatgagacatgattctgtnattaaggctaaaatactgcatntctagcaattattctcctttctgatatccccttacactcaagtgtgcagtacttaaaatagagcctggattgcctataattgtggctttttacaccctttcttggctatgaaatagttcatttcatacctcttggctttatacaacgatgtattgaatttagagaaggggcatgtgctatcttgcccacttacaaatgtagttctcggc

SEQ ID NO: 517952 - DNA, 536 bp, Homo sapiens
  misc_feature (185)..(185): n is a, c, g, or t
  misc_feature (201)..(201): n is a, c, g, or t
  misc_feature (210)..(210): n is a, c, g, or t
  misc_feature (218)..(218): n is a, c, g, or t
  misc_feature (231)..(231): n is a, c, g, or t
  misc_feature (244)..(244): n is a, c, g, or t
  misc_feature (324)..(325): n is a, c, g, or t
  misc_feature (356)..(356): n is a, c, g, or t
  misc_feature (414)..(414): n is a, c, g, or t
  misc_feature (524)..(526): n is a, c, g, or t
atgagaacctgccccctgagagtccctatctgtatggcctgcaccccaacgcagagattggctttctgacggtcacctcagagaagctgttccgcactgtcctggaaatgcagccaaaagagacggactcgggggcaggcacgggagtgtcccgcgaggagaaggtgaaggccagtgctggacgnacatcctggagaaganttccggagnactttcanacatggctgagantcatggcaaaggncagcggaaaagacacccactatgtggtagtcgccctttcaagagatgtgaaagagatgaactatccttgaccaacgaaanntgcagcctgttcgctcataggaatgctgaancctgggagctgaaggagagaacatgaccattcacagaccgacagtggaagatctgatnacagcgagctcttcttactatagacaccgtgccatagatacgtaggagtgggcccgaggaccatacccactaccatcgacggcgccaggcgagcctggggtacgcagacnnntgatagactc

SEQ ID NO: 517953 - DNA, 191 bp, Homo sapiens
acagtgtagccaaatcatgccattgcactccagcctaggcgacagagcaagatccaccctgccacccaaaaaaagattataccaatgagtaaggtaaacagagatgtcagagactgtactgtataagggggagttttcagtggcttgatcccatgcatttctttccagacaacaatccctattaagtatgt

SEQ ID NO: 517954 - DNA, 480 bp, Homo sapiens
  misc_feature (18)..(18): n is a, c, g, or t
  misc_feature (48)..(49): n is a, c, g, or t
  misc_feature (184)..(184): n is a, c, g, or t
  misc_feature (201)..(201): n is a, c, g, or t
  misc_feature (248)..(248): n is a, c, g, or t
  misc_feature (255)..(255): n is a, c, g, or t
  misc_feature (258)..(258): n is a, c, g, or t
  misc_feature (270)..(270): n is a, c, g, or t
  misc_feature (272)..(272): n is a, c, g, or t
  misc_feature (274)..(274): n is a, c, g, or t
  misc_feature (283)..(283): n is a, c, g, or t
  misc_feature (293)..(293): n is a, c, g, or t
  misc_feature (298)..(298): n is a, c, g, or t
  misc_feature (301)..(301): n is a, c, g, or t
  misc_feature (305)..(305): n is a, c, g, or t
  misc_feature (312)..(312): n is a, c, g, or t
  misc_feature (316)..(318): n is a, c, g, or t
  misc_feature (320)..(320): n is a, c, g, or t
  misc_feature (323)..(323): n is a, c, g, or t
  misc_feature (326)..(327): n is a, c, g, or t
  misc_feature (361)..(361): n is a, c, g, or t
  misc_feature (377)..(377): n is a, c, g, or t
  misc_feature (407)..(407): n is a, c, g, or t
  misc_feature (421)..(421): n is a, c, g, or t
ttttttttctgccgctcnagatcctttctttttcttgctttctttctnnctccatttctctttgtttttcctgctccttctccagctctttctccttttcctgctgtctctctctgtctttttccctctccttctctcgctcctgttcttgttctttttcaagttctttctcacgctcccgttntttttctcgctcccttnccctaatttcctctggagatggttgtttttccaggatgccaagcttntcatccnatngtttcagtttcncngncaagcgccntcctttggtnttccnttnttcntcttccncttnnngncgnttnncagcacgtctactgctgcagaaattctgaatggnggcttcgctttgcttncatattcatcttcataagtactttgctgcnttggaagggggggnctgggctttcaaggactgctggcaactggaaggtggatgcttctgtgcgccacttttgg

SEQ ID NO: 517955 - DNA, 544 bp, Homo sapiens
ttttgatgtgaccctacctggttcctggagacctacacacaacaaacaggactttgctgatgcctatggagtatccgtcacctgctccgtagcaatgtgggagccctggtcggcagtattgtaaggatattgccatcgtccataggggaatcatccacttctggtattagtttggctacctctctgtcaactggaaccatcccccatccactgatctgcgtttacagatcgccgtgatgagctatggaaatccccatcaccatccagtgcgatttgtgtctgacatggagaatcctccccttccatgctgagttctgtggaaaaacgattaccctgacacctgggtttgctccatgaaccctgatcctgaacaggaccggtgtgaggcttctgaacaaaacgcagaaggttcccctgggaacattcagaaaggacatgaagacgcaggaagagaagcagaaacaactgacagagaaaattcgccagcagcaggagaagctggaggcccttcagaaaatcacacccatccgctcccaagcagacc

SEQ ID NO: 517956 - DNA, 828 bp, Homo sapiens
aaggtcttcctgctacgtcataagcagcttagagctcctggatggctgaggactacatgatcgtgtacctgaacggtgccacgccccgtgcggagtgatgcctggaatcggctggactgaagaagtgctaccagatgatcgaccgtggagtgttgcaggaaaaacctgaagtccttgatcatcgtccacccctcgatggttcattcggactgtgctggccatctctcgaccctttcatcagcgatcaagttcatcaaacaagatccagtacagtgcacagctatggaagacctggagcaactcatcccatatggaacacgatccagatcccagactgcgtcctgcaatacagaagaggaaagactgaaggccaggagggagagcgcagaggccccagaccggagtaagagcatgcaccaggactgaagagaagccagaggtggacaccagttggaaaacaggtctgctctggtctcaagaagatcaggaaccaaagccattccagcccctgacacagatcaagctgatgcacacagaggaaccaacgaaacacaaaccactaagggtcacgataatgtccatagaagcgcgaagatagagacataacaaacggacatgggcgaacacatgcaagaagcccagaagaacccgcaggcaaaacgggcgctggggcccccagaatcataatcctgcaccaactgaagacccaacgaccaggggtgaagaccaaccgaacactctgaaaacccaaaacacaaacaagggagaacagcaagaagagaacaacaagacaaataagaaccaaaaagggccaactaaacgcaaact

SEQ ID NO: 517957 - DNA, 315 bp, Homo sapiens
  misc_feature (18)..(18): n is a, c, g, or t
  misc_feature (48)..(49): n is a, c, g, or t
ttttttttctgccgctcnagatcctttctttttcttgctttctttctnnctccatttctctttgtttttcctgctccttctccagctctttctccttttcctgctgtctctctctgtctttttccctctccttctctcgctcctctaatttttccctttccttctccagctcacattccttttcttgtcctttcatcttttgtagttctttctccttttctttctgccgctctagctctttatctttttcctgctctctttcattctccaattcctcttggatctccccgcccctcctccagctctttctccttt

SEQ ID NO: 517958 - DNA, 352 bp, Homo sapiens
tagagacagagttttgctctgtcgcccaggctggagtagagtggcacgatcttggctcactgcaacttctgccttccaggttcaagtgattctcctgcctcagcctcccgagtagctggattgcagtactacaccaccacacctggctaatttttgtatttttagtggagacaggggtttcgtcatgttggccaggctggcctcaaactcctgacctcaagggatctacccaccttgggctcctaaagtgctgggattacaggcatgagccatcacacctggcccgattccccaaactcttattcattctgcagtacccatctctgggaacccctcccccagagagtctctc

SEQ ID NO: 517959 - DNA, 441 bp, Homo sapiens
cggcacgaggccaaaccatatacccacatatagtgtatgcgatagagatagagacctgtcgcactagatatagtaccgcaaggggaaagatgaaaaattataaccaagcataatatatcaaggactaacccctataccttctgcataatgagattaactagaaataactttgcaaggagagcgcaaagctatagacaccccgaaaccagacgagctacctatagaacacggtaaaagagcacacaccggtatgtagcaaaatagtgggaagaattataggtagaggcgacaaacctacacgagcctgtggatagctggttgtgcaagatagaatcttagatcaactttaaatttggccacagaaccctctaaatacccttgtgaatttaactgtgagagcgaggaacaggtctttggacactatgccttgtatagagagtg

SEQ ID NO: 517960 - DNA, 502 bp, Homo sapiens
taacccctctttagctttttgcgctcaaaaaccaatttaaaccccccccccttgtaaacagggggggcaggtgacaaaaggcaaaaccgcacagaagcaagcctgtggagaccaccacgtctcctgtgccccccgccattttactcgcccgtgatggaggatgttttgttttacattctgctccctgtgtggctggggtgagagttcgagggttgagacgccctcgctggggggagacacggggccagctagagccccacctgttgagaagaacgctacaaacagcgggagacttgcgaaacaaggacccacagagactcggcgcgcccgcgagcgcaacattcacggggagacaacaccacgagggcacgagggcacacccaagaaaagtctgacgcaggggagcgaaaggcgggagggagtgaagaacagggaatacaacaaagagcggtaacagacgaacgcggcgcacgaacaacacacacaagagagggggggccac

SEQ ID NO: 517961 - DNA, 1062 bp, Homo sapiens
gaggtgtcaccatcacacgactataattattactcaggatccttgagactttgaggtcgctagttttgtgcagtgctcactgaagagcttcttactggatgtcatgagtgcctcgcatcaagttcgtagttgcttgctacagtgttgtaagctcgtactgcaacctctatcggttcgacgagattaccaatatgtcgctaattagaaagtccttggatccctatctgttctgagttgctggtggacatcgctggtttacgtgaactcgtacgatcaataggggcgaaagaagagcaatcttcctcagattagagtagttcgctcctgtgtcgatatggatagtgatcgtcaaagagtaataagcacttactaggtgggcacgtctgctttggctgactcggaagccgtcagtgcttgcgtgtcattggtctatgtgacttttgatgcttatgatatgagaactttcccagcgactatacccactacgtaaacgatatgtgtagacgcgtttacgtacgcttcgatggtctgactacgctcctttgcacatggacaaaccagcactggagggcatgcatgtttgcttggctgctttgatacgcccctatggaggatggaacttacggggtagacgttgtccctctgtgaaaagcggacgggcggtggctccccatcactctttcttgtttcctcatgcgcgccaacacatgctgctttaatcgttggttacctactagtgggtattttaaattagccgcgtagaaagcgctgccgggagttcaggctcttcgtcataaacgttctcgtggttatatagcgctcttggttccatgccatcgtgtggacacatacggtagtggggagcttgtgtgcccaatgagccccccttttgtggaagggtctcctagcgtggtcctgaagtggtttttccttcccctttaatggggctggttcctgtgcgagaccctttggggcgttccttttagacgaagggccttcctgttccccttctcaatggggccttgcccccgtttcttcccggcttgggtcccccatttcctg

SEQ ID NO: 517962 - DNA, 993 bp, Homo sapiens
atcccaactgagctgaccaggctcctgtagcactcccaggacccccgtgctcatggggctgtctcctactaacgcccaaagagatgaccaggaggaacccctgtccgagagcagggggccctgtgttgacctgtggtgtcaagttcaaggtgctcactggagcagcttctgcaggtcctacaacaaggaccacgccctcactacattcgctgtatcaattcccaacagccagggccagagcagcagaccttgtgctcccaagaggagtgtcctgtagccacgtctggaggcctgtggcctcgtggagaccatccatattccagtgctgtgtggcttccccattccgggtctctcaccgaaactttgtataactgatacaagttactaataaggcttcatccttgcacatgctctgtccccgacagcccagtatctgtgcaaagggctccctgaatggtgtccacacagcgaggaagccatgcttgaagctctcatccaggatcagttctccacattctgggcggtcctaactcaggcagtagccataactggtgactcgtctgaggccatgccagtccccatgcactgtggcaggaccaaggtgttcatgactgacactatgctggagcttctggaatgtgggcgtgccggtgctggagcatgtgcccgctgatccacggtggcgtggagggcgacaccggaccgagagcacgagccgagtgggggccgtcatgtcattcagggcaggcattcgtccttgttaactcggaaccattcctgaggtggtgggcttgcccagtcataagcgtgctgccgaactgagattgaatggcgctgcctgaacaccgactggctgccaaacccttctccacaccgttcgataccccggaacagcgctgagggaaaacctgctcgcgatctcagcagaatttcggccacaacacgagctcaccccggccgcatacaaagagtgtcacccgggaataaaatgta

SEQ ID NO: 517963 - DNA, 530 bp, Homo sapiens
gcatgaacacgtgccaggcacctgccacgccttcttgagtgggaaagtgttttcctattcttgagttttaagagttctttatatatttttgttaacagtcctttatcaaatgtgtcttttgcaaatattttttccttgtttgtgacttttcattctcttgacagtatcttttgcaaagcagtttttaattttaatgaagtctggcctatcaattatttctttcatggatcatgcttttgatgctgtatctaaaagtaatctggctgggcgcggtggcttatgcctgtaattccagcacttggggaggacaagatgggtggatcacctgaggtcaggagtttgataccagcctgtacaacatggtgaaaccctgtctctactaaaaacacaaaattagccgggcgtattgacacatgcctgtaatcccagctacttgggaggctgaggcagaagaatcacttgagaccggggtgtggggggtttcagtgagccaagatcgcgccactacactccaggctgggtgacagagt

SEQ ID NO: 517964 - DNA, 614 bp, Homo sapiens
  misc_feature (116)..(117): n is a, c, g, or t
aagacaaacagaccacccacacatgtagacacaacccgaacaggttataggaggacacactccctagttaaagcggctatacgagctaccatcctgctagggagagcctgaaagcnnaatgctgacttgactagctctggtcaatgaaagaaatcaccagtggaaaggctaccagggggctttctcaaaagagagggacagtaaactgcaagatgaacaactcaatgccatccaggtctggatgagaaagaacagtcgagagactgagtttcaggagtggaaacactcaaagcatcatcttccactttcttctccggctgctaggaagaagggaaaaacacagaccttctgaggacctgcggagcaaaccactggcttcagaaaagcaaacagggacttccctctgcgcagcaggaagcagttagcctagtcggaggcttgactgaagaaacaaatgtatccactgataatgggcaagagcctgaggctctggagccaagggggaaccctaaaaagctgattcaagtaagagaaccaaggatcatgcaattccacatggccacctcgaagcaggaatccgttaatgatagtaaaggactgatgaaaatccaaaa

SEQ ID NO: 517965 - DNA, 194 bp, Homo sapiens
ggatgatcgagccgtccgtctttggctattatgaatatgcgtggttaacttgagttatacaagtctctcttccagatgctactttaggttcttttgtggtatattgtcgaggagtacaagtggctagatcatatgatagttctatttgtcatttttgtagagaagccgccatactgtttgccgaagcttgatca

SEQ ID NO: 517966 - DNA, 430 bp, Homo sapiens
gaaacgatactgatacatttttatattaatactagaatacatagtttgcattagggttcatactttgtggtgtacattctgcgggttttgacgaaggtatggtggcatatattcattgttactgtatcatgtagaatagttttagtgccctaaaaatcccctttgcgtcacctctttcattttcccctctccctgaacaccaggcaatcactaatctttttctgtgtccacatttttgccttttccagaatgtcatgtagttagaatcatctagtgtgcggtcttttcagagtggcttctttcacttagtaatatccttttaagattcctcaagtctttccatggcttgatagctaatttctttttattactgaatgatattcctttgtatgacgtaccacaattcatttatccattctcctgctgaagg

SEQ ID NO: 517967 - DNA, 877 bp, Homo sapiens
  misc_feature (116)..(117): n is a, c, g, or t
  misc_feature (847)..(847): n is a, c, g, or t
aagacaaacagaccacccacacatgtagacacaacccgaacaggttataggaggacacactccctagttaaagcggctatacgagctaccatcctgctagggagagcctgaaagcnnaatgctgacttgactagctctggtcaatgaaagaaatcaccagtggaaaggctaccagggggctttctcaaaagagagggacagtaaactgcaagatgaacaactcaatgccatccaggtctggatgagaaagaacagtcgagagactgagtttcaggagtggaaacactcaaagcatcatcttccactttcttctccggctgctaggaagaagggaaaaacacagaccttctgaggacctgcacgaccacaaccaccgcccccacaaaagcccccagggaccctgcgtgtcgcacagacggaacccagcaacgccagaccggaagctccgaatgaaccaaacacatgccatcaactgaaagcggggcagcacacaccaacttacacccccccacgtataaccgccacccttccgattataacgataccaccccaacgacccacgcacatccacaacccagcgtcctacacagcagcggcccgaggagtatatccctgactacgccatgcagtcttaacacaaagcgccccccacgccgtaatacgcccaagaacgcattgacgtcagcacacaccgcactagcctacaatatacatgcacgcccaatcaccgctgacacacaccagactcaacaccacacccctccgccaagcacgacacacgaaaccggaccgcccgtatatgcaacgtcccaccgcccacacctccgtcctgccacctcgagccacnccacacgaatcaccacgatgtctcagagat

SEQ ID NO: 517968 - DNA, 135 bp, Homo sapiens
tccggtccaataattcattcttcggtctatctgacgtgcatagcttcggtaactattatttccattcctgaattgagtgcaaaccttttcctgacactgacagctgtctaatttattttcttcaaagttgacaaa

SEQ ID NO: 517969 - DNA, 649 bp, Homo sapiens
ataaaaaaaggtaagttaatttgctaaaactgtggcaaactttaaaattaacatccttggtgttaaaataaaactccgtttcttcagggcaagaccaaaaattcatgcattcctttctttcacttcccctcaaagcaacaggggaagcaacctctgttggtgtgagttttggcagtacaaagagtgttttcatataaacccatgaatttcacgtattagaaaatggatctggcaaactcacattgtaatctcctccaaacactctccagtgctgattagcttttgaattctgtcacaactgctagtagacatagcacaatttcaattttttggccatctatgtaattactaaaaatgtttgttgaggcagtacagtaccatggtagatatgtgattttgagtgaagtaacttgaaatatgactctccttatggtgaaacaagttatttctgtctttctgtgtctcagattcctaatgtgtaaaatggaagtaatattgcgtggcttagagcttgggctatactagatgctaaaataatgttagttgttcctatgcccctagttattctaagagctatcagtaagacccctgcccaaagtccatatattcctacctcaatatgtcccccctaagcacaggaactagcagc

SEQ ID NO: 517970 - DNA, 125 bp, Homo sapiens
gcctcttccacgcgggctgcgccctgggatgccatgcatgctgggtccccctgggggcggggccggtgtttcccagctagcggttgctccctacctgggagctcctctcacgtagccctgacgga

SEQ ID NO: 517971 - DNA, 699 bp, Homo sapiens
  misc_feature (23)..(23): n is a, c, g, or t
  misc_feature (68)..(68): n is a, c, g, or t
  misc_feature (98)..(98): n is a, c, g, or t
  misc_feature (107)..(107): n is a, c, g, or t
  misc_feature (114)..(114): n is a, c, g, or t
  misc_feature (127)..(127): n is a, c, g, or t
  misc_feature (162)..(162): n is a, c, g, or t
  misc_feature (293)..(293): n is a, c, g, or t
  misc_feature (357)..(358): n is a, c, g, or t
  misc_feature (429)..(429): n is a, c, g, or t
  misc_feature (434)..(434): n is a, c, g, or t
  misc_feature (608)..(608): n is a, c, g, or t
  misc_feature (673)..(673): n is a, c, g, or t
  misc_feature (680)..(680): n is a, c, g, or t
gtcgccttagtaccatggcccantctctccgacaccctgtacgagcggttcgggaatcctgcacgggnaccgcgcagcgcccccagttcctggagacngtggattcncagatcngcttgaagaactntgatcccccgaaggaccagcgcttttcgggcaccntcaggcttaagtcccctccccgccctaagttctctgtgtgtgtcctgggggacccagcagccactgtgacgaggctaaggccctggatatcccccacatggacatcgaggcgctggaaaaactccaccagnattaaaaactggtccagaagctggcccagaagtatgatgcgtttttggcctcagagtctctganncagcacgattccccgatcctcggccccggtttaaataaggcacggaaagttcccttccctgctcacacacncacgnaaacactggtggcccaagtggatgaggtgaagtccaccatccagttcccaatgaagaaaggtgttatgtctggctgtagctgttggtcacgtgaagatgacagacgatgagcttgtgtataacattcacctggctgtcaacttcttggtgtccttgctccagaaaaactggccngaatgtccgggccttatatatccagagcaccctgggccagcccccgcgcctatattaaggcaccnttgaatnaattctattacccagttta

SEQ ID NO: 517972 - DNA, 505 bp, Homo sapiens
cagaccaagtttgagaccctccaggcccatgcttgccagcctggacctggactgcgtcatcgctgaggtcaaatcacagataatgagcgccatggcctcatgcggccgggctgagggctgaaccctggtaccacgaccaagtttgagaccctccaggcccactgcgtgcgaagcatgggcgacgacctccggaatacccggaaggagattatccggagatgaagccgggcagtacagacggctgcgcggctgagatctgccaacaatcaatgaaccatgcgtgcaatcgtcttggaggccgcactcgccgaggccagcgggcgcgtgcggtcggctcgcgctcaaagactgccccgagccaacgcgacagaggagctagcaaagcgcggcctggcaggcgggcgccaagccgggatctgcgcacgggcaccctggcgtgcacgtacccagtgcacctccatgacgacctgacgcccgggcctggaacctcgacacctatcgccag

SEQ ID NO: 517973 - DNA, 121 bp, Homo sapiens
atcaattgtgctcgattttgttgatgattgaatcactagtgtataggagcaaggattaatatcaggcctgggataataccaggctgcttgagaataaactcagtctcctataataccagtc

SEQ ID NO: 517974 - DNA, 200 bp, Homo sapiens
aacagagtgtcctcactaagagagggacctgcatcaccctctgccaggcttgtgactctcttagctggggaggtgggagggcaggcgaagctgactctgttgatctaccatgcctggcctccctcagagccatgtaacgaaccctagaaaggagagaacgggcgtcaggggtgcacagtccacagctgaagagcaaggtt

SEQ ID NO: 517975 - DNA, 373 bp, Homo sapiens
atcagagttgttgcacaggtatccatggatatgaaccacacgctaggcgcagtggtcagatatatcatcacacataaacatatccaagaaatctatgtaggacaatttctccaccatgacaaggatacttacaggtagaaatcttacttttaaggcaattagcccattgacaaaaggtttactgtcttaaagctgtctttctgagatctaattccaaggacttctccacagctacgtgagatgcctcacaccattaggtgatgctttggacagaacagagtattatcatcttgtgtataaagcaattccttggattcggctcctcaccactttctatgccagtctcccatttatgtccctagtaatgcctatg

SEQ ID NO: 517976 - DNA, 418 bp, Homo sapiens
taaatctacttccagctgaacaacacaggcaaccataagcaagggaacgaactgcctatcacactgtctcctcttcattccctcctatggccaatatgtttttgggatgagcagcgagcattcagacattcgcatagctacgagccccgtgccctctgtcctgccatatgtgggttatatatttcatctctatttttatggaggcggagtctcgatctgtagcccaggatagagtgcagcgtcacgatcctggctcactgcaacctctgcctcccggattcaaatgattctcctgctcagccttccaagatgctgggataacaggcgtgagccacccggtgcccggacgagaaggaaacactaactcattctatgaggacagcattgccttgtaacaagggccagacaaagggcaaca

SEQ ID NO: 517977 - DNA, 469 bp, Homo sapiens
  misc_feature (3)..(3): n is a, c, g, or t
  misc_feature (6)..(6): n is a, c, g, or t
  misc_feature (24)..(24): n is a, c, g, or t
  misc_feature (49)..(49): n is a, c, g, or t
  misc_feature (151)..(151): n is a, c, g, or t
  misc_feature (224)..(224): n is a, c, g, or t
  misc_feature (279)..(279): n is a, c, g, or t
  misc_feature (294)..(294): n is a, c, g, or t
  misc_feature (307)..(307): n is a, c, g, or t
  misc_feature (361)..(361): n is a, c, g, or t
  misc_feature (388)..(388): n is a, c, g, or t
  misc_feature (420)..(420): n is a, c, g, or t
  misc_feature (459)..(459): n is a, c, g, or t
agnctncagacgctgaaggaccgnagtgaccacctcacttgaagctttnccacaggacagtgctgacagacaagagtgggcgacagtggaagctgaagtccttccagaccagggacaaccagggcattctctatgaagctgcacccacctncaccctcacctgtgactcaggaccacagaagcaaaagttctcactcaaactggatgccaaggatgggcgcttnttcaatgagcagaacttcttccagcgggccgcaagcctctgcaagtcaacaagtngaagaagctgtactngaccccactgctngccatccctacctgcatgggtttcggtgttcaccagggcaaatacaggttcttnggtgttacccagcctgggggagggagncttcagtcggccctgggtttcagcccaaagcntgtgttgtcagagaggtttgtgttgcaggttgccttccngttgctggat

SEQ ID NO: 517978 - DNA, 388 bp, Homo sapiens
  misc_feature (15)..(15): n is a, c, g, or t
  misc_feature (26)..(26): n is a, c, g, or t
  misc_feature (63)..(63): n is a, c, g, or t
  misc_feature (79)..(79): n is a, c, g, or t
  misc_feature (302)..(302): n is a, c, g, or t
  misc_feature (329)..(329): n is a, c, g, or t
  misc_feature (354)..(355): n is a, c, g, or t
tacccagcttgttanccctttaaaantttcctgttaattaggaacttttgaaaatttagacancctgagcaaacatggnaaaaaccttatctctacccaaatacaaaaattgtctggtccattgggtctcacgcctgtaatccccagtactttgggaggcccagggtggatggatggcttgagtctaggagttcaagactagcctgggcaacatagcgagatcccatctctagaaaaaaaaaagaacacaaaaattagctggacgtggtggtacatgtctgtggtcccagctcctccagggntgaggtggagtgtcccttgagccttgnaggcgaatgttgctataagcctagnncgtgccacgtgccttccagcctgggtgacagag

SEQ ID NO: 517979 - DNA, 3605 bp, Homo sapiens
aggagttcgagaccagcctgaccaacatggtgaaaccccgtctctactaaaaatacaaaaattagctgggcgtggtggcgcatgcctgtaatcccagctactcaggagactgaggcaggagaattgcttaaacctgggaagcagaggttgcagtgagactagatcatgccactgcactccactgccactgcctgggcaacagagcaagactccatctcaaaaacaaacaaaaaaaatcacagactcattttaaaggagcagcaacctaaccaaatacaaacttcatttgattttaggtttagaaattctagttttattttggagaatcactcagtttttaatatcaattaaaatagtcctcaaaggaatgaagaggaagtctaaataaatgaataaaactcatttttcattttatggtagtatagaaagcattgatgtgtgtagagaaattaaaagacaagagtggtttactgtctatgcacaaatgagtgcctatatttaaggctgcctataccattacagtggcgtaattggtgatttcatagcatacagagaaacaatgaaatcaaagattaaatcattaggttatgatggtcatttgtaagattggaaagtagtcaaaaacccatgtgcaactttttttcagcactctaccattaggctccttaggcaagctgcttaacttccgtcagaagcaaaggtgtgggagaacaccattcacctcagtagtaacttataaaaaccgtttaaagaaggaaaatgggccccagcccctaggatccctgacttcctgatattctaaacatgagagttctgtgactttaactgagctctttaccagaagtaacgtgttgatgtatattatctttccaccatgctttgaccaaagtacattcacagtaactagagaaagcagatcatccatttctggataggtgaactacggcaaggtaagaacagaaaaaagtaaagtagtattgagtcatgcaggtatcagattaacagacattcattgaagataagtgaaataactttggagatagcagagaagagcaagaagatgttggacgttggcagtaagccgcagcaaggcagttaggaaagtacgtgagcctgatgacgcgaaggtgatgcctccatctgtccgcttagtggttattaaattgctgggaaagacctgcctttattttcctatcatcttttccccattactttgcattattcaggaaataattatttattcccaaatgcagttttctaagcagtgaccacaaaaatttcttattctaaggaaaataattaagaaaataaccctatctgtggcattgttttaaaatgtgggatacaaatctggtaagcagatttcaggtcattattgttttcttttaatggtttacatgaaattttcctctcaaaaaacaagtacctcttactgtataacatttgagtttttaaaattgagatagcaggccgggcgcggtggctcacgcctgtaatcccagcactttgggaggccgaggcgggcggatcacgaggtcaggagatcgagaccatcccggctaaaacggtgaaaccccgtctctactaaaaatacaaaaaattagccgggcgtagtggcgggcgcctgtagtcccagctacttgggaggctgaggcaggagaatggcgtgaacccgggaggcagagcttgcagtgagccgagatcccgccactgcactccagcctgggcgacagagcgagactccgtctcaaaaaaaaataaaataaaataaaataaaattgagatagcttctgagagaaaaaaagaaagttgaatttgtagctctctcaactacaaaatcaccacacttttctcaaatctaataggaattcagtgtcattacagatacggtctctagtgaccaggtgaagacaattgaagctttggtagaacttctgcaaaagttaggtaaagaagaataaatccaatttatcagctttgttcatattctttttctgagtgatctaaatttttcttgcttgtgatcattagctaagacaaggagtgttaaaggttttctaaatgcaaacacatacgtttctgcatttcagaagtcagtcttgatagtaaatcctacaaactctcaactttctgcattgtattttaagtctatacaatgttagagcacatggtaatgtgggacagagttgattatatgatagcatgagaaatttgcactggttggtgttacaaaccaatgatctaaccagcatactctccaaatatgaaaaagtaaaaacatctcattaggtttggaagagcctaaggtagtccatacaggaagtttgcctgagaacagagaggagcctgttgattggcatggctcatgatgcctttcttgtatgaattatcaaaactgatactgagttgcccctagaaaacagccttccagaatatgtttgcttatttatggtggaagaggaagtgagaacaagatgagagtttcccttaaagtgaggagaatcattatacaactttgcaactgaagtatgtttccttgtagcaaacctttggtttattttatcgtcaaatcaaagccaccctcagttttttgtatggtgccatcaacctaaggaggacaatcaaataacctattgtttgccttggattcagtatatctactaagtacacagtctcgtataccttcaaaccagtcacttgactaaacttccaccatattaccttagttcttcctatgccctttcctctgtgccaccacaaatcagagggaaagactgcagtacttctagaaagttgtggacttctaagaaagagccaggcttccatctcactatcccttgatcattatctctgaagtccctacctgcacttccctgattgccctgtagcaacaccagcatggtgggaattggagggaaagattgtggaaaatccctaaagggtcattgttcatgacgttactttgaattgtaaaattgtgagccactcacatttcaattacaaaaagaacagaactcttaatcacgttgtgaagattaatttcttgccattttctggattagcacagaagcttgtatcaatgaagagtatttaggaggggaatagggggaaaattgtatttttctgttcaaactctctccttctatttgtgtttccttcacccctctccctccaccacactgtgttggtcaaatgatactattctatgaaaccctgagctatagttgtcaaaagtaactatggattgtgattagtcctctgtgggtgcttccttccctcttttttctccctcactctctttctcagtctccactctggtaaatggaaaaggtgatgtcgaagaattgatgcttgcttggactcatgttgtatctgtgactatgctattagctgtctcctttttccttcctatatgggtagaattcttatgacttatgaagttcccttcttgataagtaggttaaatgcacaatgtggtactgttttatagtttctagatggttgtataaagcaaaaagttaatgtggttatgtgtttttaaagaaaataagtgattggtcactaaactctgtccttttttcattattacaagttctctctgtttt

SEQ ID NO: 517980 - DNA, 955 bp, Homo sapiens
  misc_feature (23)..(23): n is a, c, g, or t
  misc_feature (47)..(47): n is a, c, g, or t
  misc_feature (955)..(955): n is a, c, g, or t
taaaaaaaaaaaaatataataanaaaactcaccaactctaaaaagantagtcaaagaaacccaacgagagctggcagaaccacctcctggcatcaaagcccaaccagatgagagcaacgcccgttattttcatgtggtcattgctgaccctcaggattccccctttgagggagggacttttaaacttgaactattccttctagaataatacccactggcagcccataacgcacactccatgacctaaatttatcatccctaatgcacgacaatgccggcacgactccgccgatatctcgggaaacatgccccggcctcaatatctgcagatccccccccttgtagtatccgtcctagcccaagagaagctgctaccaatacagatgacccattagttgtattagtccacgttgcactctcatatgcacgagatctcatagcataaaagaagtcaagagttcgcacctactccatccgccctcgcaatcctttccattcacttcgcattctcattggtgtattatcttatgttgtgatctgatgtaatcacctcataccttacgcgagagtggtctacgccacacagctctcgcctccttctctcccgagcggccgccccgttctcggacagccccgcccgcacgcccgctagatctctcgtctctgcttatctttgcgtcatcgcttccccttaccgcctctcgcccgtcctctaacattctgtccgctttattgcgactttatacatacattgagtgcggactcgttgatatttatctccctcttcacgcgtccatatacagtgcgtattgtcatgatcttcagccatttagttatcgcaagccgcgatgttattctacttgcccacgcgccgccacattctaatttcatatgatctacaccctatcgccgctctattactcatccaccacagattgtattatgatgtgtccan

SEQ ID NO: 517981 - DNA, 890 bp, Homo sapiens
  misc_feature (242)..(242): n is a, c, g, or t
ccctttccaatgtggtggtggcccggtgccgtgcccctccccatccgcccccggaatgataattgccgtggggcgcgtgcccccgtcgccgccccagcctgtcccctgtaagggctcgtgcagggtgggataccgtcgcttccttatggtggatgaacgacccgggcgggacaggtgtgtgtgtcttatgtgagaggcatgtaagtcgcgcacggaagtgtcttgtatttgaagcgagaggngcgtcagacggtccgctcgacgtaatgctcctccgccccagcagaaggaaagatatgtcagcatctttcttttaacaaagaacaaatagacctccgcgggaagctctgggagggcaacttccttcttgcatatatcccccccccgtagggaattggttctcaccctccccttagataacacctccactatgggtgggcgaacacaccagccccctgcgtcttgaaaggaagaagtatattctttcttaaacagaagaggggagaattatgtgagatcagggtgagatacatatagacagatgcgtcatctatttcttgatatgatatggcttatggataacgtgtagatatagatatatacacccccatttctataggtgcatgccacataaaagatcgtcgccacaccgccgcaacattatatcatatagaggagtacttctcgcacgccgcacatggacacatccttatgtacggtgcgccatgtgaccatcatgttgatgtctaagagcatataccctcgacgaggcaccgctacccaatagagcaaagatgataattgctagaccgatgttactatgggaagatgatctaaacgaggtacaatcgccggaagaattggggttttcccaaacacaacaaaacaca

SEQ ID NO: 517982 - DNA, 536 bp, Homo sapiens
  misc_feature (50)..(51): n is a, c, g, or t
  misc_feature (53)..(54): n is a, c, g, or t
  misc_feature (280)..(280): n is a, c, g, or t
  misc_feature (380)..(380): n is a, c, g, or t
  misc_feature (390)..(390): n is a, c, g, or t
  misc_feature (403)..(403): n is a, c, g, or t
  misc_feature (414)..(414): n is a, c, g, or t
  misc_feature (417)..(417): n is a, c, g, or t
  misc_feature (432)..(432): n is a, c, g, or t
atacccgaccatgcctgcaccagatcctacctcctcagacatgaacaganntnnatcctcatactcatgccagatcttacctggagacatgacagacccagatcctcataccaaggccagagcctaccttcgcagacattaaaagacccagatgcttatatctgcgccaaatcctacttccccagacatggacagagccagatcctcatactcatgccagatcctacctcctcagacatgaagagacccagatccttataccagggccaggttctacctncttagatgtgggcagaccaagaaactagtatgtgtaccaaatcctacctccgtagacatgagcggacccagatcctcacacctgtgccagattccacctncttagacatntacagactcagancctcataccanggncagatcctacctccnagatactgactgcccgatacttgtactggcacgcagatactatctcatcagatactgagagacccatatgttccgaattctgatataacagtcagatcctacct

SEQ ID NO: 517983 - DNA, 135 bp, Homo sapiens
ggagggccgctgataagcttccaaatgatgcccacaaccattatcctattgaaagaggggactgatagctccaaggcatccccaagcttgtgagtacatcagtgcctgccagtgattgctgagctgtagactacc

SEQ ID NO: 517984 - DNA, 1075 bp, Homo sapiens
aatcaatcaggtaattaggatattcatcacatattgtggggcacatgtgatatttgatacatgaatacaagcataataatcaaatcaaggcaattaggatattcatctcaaacgtttatcatttctttgtgttgggaacattccaaatcttctagctattttgaaatatacaataaattatcattaactatcatcaccctatgctgctattaaacactagaacttatttattctctctgactgtatttttgtacctattatccaccctctcttcatccccaccccctactctttcttgactctagtaaccatcattctactctgtctccttgtttttagctcacacatatggaggagaacatgcaatatttgtctttctgtgcctggcttatttcacttatcatgatggcctccagttccatccatgttgctgcaaatgacagaatttcattatattttttatggctgaataatattccatggtgtatatatactacactatatccatttatctgctgatggacacttaggttgcattcatattttggctgttggaagtgctgcaataaacatgggaatacagatatctcttcagtatatggatatcctttctttaggatatatacccagcagtgggatcgttggatcatattggtagatctagttaagatagagggacctccatactggtttccatagtcactgtacctatttgaaatggcgcataatttgaaaataaccatccatcgttcgggaatcccacttcccacggtcccaggtcctgcagcaaacggacaaagcgcgaatccaacggggggtcaacaccacaccatcacaggctaactctgtaaacacacctggcctggaatacggggccatggccacgcaaagcttgtcccaagaaagcactaagagctcttctaatgctaagacggggtatacagacacacaagacgagaagagcattacccaagtcatcacagatcacaggccaaaacagcgcgcacaatagcacaccccacgagggcacccacacgtggtgtcacaaagcggcacccgtgataggacacacaga

SEQ ID NO: 517985 - DNA, 671 bp, Homo sapiens
  misc_feature (32)..(32): n is a, c, g, or t
  misc_feature (53)..(53): n is a, c, g, or t
  misc_feature (60)..(60): n is a, c, g, or t
  misc_feature (66)..(66): n is a, c, g, or t
  misc_feature (84)..(84): n is a, c, g, or t
  misc_feature (100)..(100): n is a, c, g, or t
  misc_feature (103)..(104): n is a, c, g, or t
  misc_feature (113)..(113): n is a, c, g, or t
  misc_feature (194)..(194): n is a, c, g, or t
  misc_feature (415)..(415): n is a, c, g, or t
  misc_feature (515)..(515): n is a, c, g, or t
  misc_feature (525)..(525): n is a, c, g, or t
  misc_feature (538)..(538): n is a, c, g, or t
  misc_feature (549)..(549): n is a, c, g, or t
  misc_feature (552)..(552): n is a, c, g, or t
  misc_feature (567)..(567): n is a, c, g, or t
acgagatactactgttagatactgacagaccngatctcaaaatcctaatgggncagatcntacatncagacatggatagacccngatcctcaaaacaggnccnnatcctaccncctcagacactgacagacccagatcctcatacctgtaccacagccaaccttctcagacatggagagacccagatcctcatncctgtactagattcattcctcctcagatattgacagacccagatcctcataccaaggccagagcctaccttcgcagacattaaaagacccagatgcttatatctgcgccaaatcctacttccccagacatggacagagccagatcctcatactcatgccagatcctacctcctcagacatgaagagacccagatccttataccagggccaggttctacctncttagatgtgggcagaccaagaaactagtatgtgtaccaaatcctacctccgtagacatgagcggacccagatcctcacacctgtgccagattccacctncttagacatntacagactcagancctcataccanggncagatcctacctccnagatactgactgcccgatacttgtactggcacgcagatactatctcatcagatactgagagacccatatgttccgaattctgatataacagtcagatcctacct

SEQ ID NO: 517986 - DNA, 403 bp, Homo sapiens
  misc_feature (82)..(82): n is a, c, g, or t
  misc_feature (92)..(92): n is a, c, g, or t
  misc_feature (328)..(328): n is a, c, g, or t
cttcttggtacacctgtctgcgtctcctttgacctcctctgccatgttgcgacacagaacaaaatcctttgctaggaatcgnggccatgctntgaacttctaagtctgtggaactgtgagctgaataaaccctttttctttataagttatctagtttcagataggcttttatagcagcagaaaatggactaagatcccagtcctctgcgcaaattattgttctaactcttcttaaccgttggttacacctagagtaccaactctttgatttaaaagcaatttgagagtatctataattcttagtttgaaaattaacttattttctttntcttatatggagactgaaattagcaggcgaagtcacgtctctgttcttctatgttgattctgcaccaccagacag

SEQ ID NO: 517987 - DNA, 1201 bp, Homo sapiens
gccgtcatctactctaccatctttgcaggcacgactcatcacgagcgctaagctcgcacttgattttttacctgagtaggcctagaaataaacatgctagcttttattccagttctaagcaagaaaaataaactcctcgttcctacagaagctgcctatcaagtatttcctccgacggcaagactaactcgtaatcctatagatccttctaatcagctatcctcttcgacacatatactctccggacgaaggaacgcatagcgcaattgactgaccaaagtcgaatactcattgcatttaaataatcataatggctatcacgctagatgaaacactagcgaatagcgcccctttcacttctggagtcccagaggtttacccaaggcgaccccgtctgagatccaggtcctggctgtctatactcacgatgaccaaaaatctaggcccgccatctcaattgcatataccaggatctctccctcactaaagcggtaatgccttcttccttcacttctcgtcaagtctttagtcgcatccgatagcgaggcacgtctgacggtgggattgaagacataagcccaagggttagcaaaaattcgtttaggctattacgtccgttccaatttaccgcagataagggcattggacttacattagacagttccttaaccgtcacaaaccctctgtaaacaatttaaacgcaatttcctattgaattgttacaccttgatgctaactacttgaatcgcttagaaggttgaattaagccgagaaattgcccttcaacttaaattccaaatctaaaaagcgtcccatggcaaccccaacagaaagcctttactataactataatctcgcgcaacctcttgaaagaccacaggcttaagccactgggagctcttaaagaggacgccctttaaaaatttccccattaaccacgcacgttaccgttacttggcccttaaaggaagggcgccctgcccccggggttaaaccgcgcggctttttggggccccaaaagtgggggccacatctattccgagcagaaatttccccaaaagaaacagagatacgcgtgcgcaaaatgatccccacagcaatttgaattaggccacacaaattggcacgtttacaccacgggagatagtgtccgacacactatagttcccgcctttttagtaccataaacaacggttatata

SEQ ID NO: 517988 - DNA, 249 bp, Homo sapiens
gaagaaatatcaggcggaggcgcactacccgcctgtcctcgccgatcttacaacatcagcttcgtggcgctcgccctctacggcttcatcggcggggccttcagccgcgtgggctacggccgacgcatcgccttcgtcggcgcgggcgcagcggtgacgcgtatcgtcggcttcgcggtgcaggcggcctgcggcaatgcgccggcgctgaacctgctccagtacctcattcccatcatccccatcgtc

SEQ ID NO: 517989 - DNA, 328 bp, Homo sapiens
gcatagaaattgaaacctggcgcgatagatatagtaccgcaagggaaagatgacaaattataaccaagctatatatagcaaggattatcccctataccttctgcataatgaattaactataattcactttgctaggagagccaaagctaagacccccgaaaccatacgagctacctaggaacagctaaaatagcacacccgtctatgtagcaaaatagtgcgaagatttataggtagaggcgacgaacctaccgagcctggtcatagcttgttcccctgcataaaatctaagttcaactttagatttgcccacagaaccctctaaatc

SEQ ID NO: 517990 - DNA, 774 bp, Homo sapiens
gcaccatcttcagatctgttcctctggagcttgacttgggggtggggatggcaagtccatggtgtgtgttagtggacccaggcattgggggaagggaggcgaaggcctgaggtttccatcttcattctctttgttattaggagaaggtgaggcatgggccaattcccatttcctgcccttccagtgccacaacacgcctttcctgaatcctttcagggggggttcggggacatgggggttccactccattggggttcccactttttggaggttccaggaacattatctagtcccgttaccaaatccccctataaaggttaaacgttttccgcccctttttaaaacccctttggtgcccgctttgggaagcccccacaggggcggggggccccatattggcgggggcaacacccctttaggggaggcggttcaaccattgtcctatcccccccttactataaaaggcacggtttcttcggggcaaacaggtgcgggaaatccgggccctcttacgggtgcggggggcacacaaccaaaacacggggggcgttattcgtgggggagtagacagcgcagggtaattcggcacgtcgcgcgttcttttacgatgggggagaccccccattattttggcggcgggcggaagaccagcggcgaccgccgtattctattcaaacagcggttcaaatgttatccgcaacagagcgtactagcactagctgcaccgcactcgacaacagcgcacgccagcgtatgtaccccctatcgtataca

SEQ ID NO: 517991 - DNA, 233 bp, Homo sapiens
  misc_feature (39)..(39): n is a, c, g, or t
  misc_feature (71)..(71): n is a, c, g, or t
  misc_feature (74)..(74): n is a, c, g, or t
  misc_feature (139)..(139): n is a, c, g, or t
  misc_feature (211)..(211): n is a, c, g, or t
  misc_feature (219)..(219): n is a, c, g, or t
cccgtgagcaccgagcccccttctccttgcccttttctntccgttcaccctaaacaccaccggcgaggcgngcnttttggaccttccgtagcttccctagcaaggcgtttctctgggcgcgctctgtagccaacctcanattcggtgcccggaaaatcgagcctttggccaacggctacttcacgggaccaaccttccggggcggtaaacnaggttgantccgccggcaagaa

SEQ ID NO: 517992 - DNA, 420 bp, Homo sapiens
aaatccagtgaatcgactcgtgtacctgcttggttgggagggacatgtctgagcttggggtctctggggccatctggagaggagaaaccctccaggaaaggcctccagtattttaaaaacactcgcaaagaaggcaaatgtggccaggagtggtggctcacacctataatcccagcactttgaaaggccaaggtgggcagatcacaaggtcaggagttcgagaccagcctgaccaacatggaaccctgtctgtactaaaaatacaaaaattagctgggcgtggtggcacgtgcctgtaatcccagctactcaggaggctgaggcaggagactcacttgaacctgggaggtggagattgcagtgagctgagatcacaccactgcactccagcctgggcaacagagcaagcaagactgtctc

SEQ ID NO: 517993 - DNA, 360 bp, Homo sapiens
tccacacagtcttgctgtcacctaggctggtgtgcagtggcacgatctcggctcaccgcaacttctgcctcccggttcaagtgattctcctgcctcagcctcccaagtagctggggctacaggcgtccaccaccacgatcgaatgatttttgtattttttggtagagacggggtttcgccatgctggccaggctggtctcgaactcctgacctcaagtgatccacttgcctcggcctcccaaagtgctgggattacaggtgtgagccaccacgcccagcctttttcttaattttttaaaattctaggctacatggttcatcgtcgacgcggccgcgaatttattagtagtcgacccgtga

SEQ ID NO: 517994 - DNA, 454 bp, Homo sapiens
aagaggatccccacagtgggaggaaagtgatatcgagatgggcctctcgcttgggacacttacctgaccatgagttacgtacagaatccactggtttactatcattaactccgttgtatgtaggtcttcttacctgtcaggtatactgagcatgattatcattcggaccctccggaaggacattgccaaatacaacaaggaggatgacattgaagacaccatggaggagtctgggtggaagttgctgcacggtgagatcttacaggcacccccagtaccccatgatcctcagctcactgctaggaactcaggcattcagtctgattctcgtatgatcctcatcgtcatccttgtagccatgcttgggatgctgtcgccctccatccgggtagctctcatgaccacaggctgcttcctcttcatgttcatgggggtgtttggaggattttctgct

SEQ ID NO: 517995 - DNA, 932 bp, Homo sapiens
accaaggggcgcagagccccctccgtgcgggcgaggatccgcgcgcggccgactcctctccccaggggttcgccccgcgtaagcgggggcaagacagacgaaagggaagggtcgcgcacgagcagcaacagccactgggggaaagaaaacggccgacaccgggggggtagacgctgcgcgaaagcccgctgaaagttcctcgggccaagacgcgccgtccgaacaccggtcggggagccggcgtgcagacgcgtccgtcgcctcgcacgcccgggagacacttgcgggggcagcatcaatcatcccgggggccacgtgtggataaaagccggcctggcagccgccccaacagcggggacaaaagagggggggttttctcctcgaaaacgcaggcgggaggcatgggggcccaacaccacgagtgggccagggacgcagtgagtcccccacagcaaggagggtgccgccttgtcgcgcgaggacccccgcgcccgcgaggatggggtccggtcgcccctctcgaaccgccagatcggagagccactcgccgccgagggccgaaattcccccccgaaaacgttcttgtccgaaaggcggtgcacttcctccacagagcagaagtacttccgtggagggccccagcccccatgagagggatacatttccttgagctcccacgaagtacagagacaaaatatagtaagtacgagggaaaacaggcgccaacagagttgctcactagaaactttcgggggtttcctcccacatgtttccgccaaagaccgaatagcaattctcttcacgtctcccgaggcgaagcatcgaagcgaagtcgttgttttctgggtcgcgatatgaaaatattactcctcgagccctaatctggggttttcaaattcttaaaacccattaaaacgcaggcccacataaca

SEQ ID NO: 517996 - DNA, 143 bp, Homo sapiens
ctatccctattaatcattacggcggtcctagaaaccaacaaaatagaaccgcacgtcctattcaattattccatgctaatgtatccgagcaaaggcctgctttgaacactctaattttttcaaagtaaaagtcctggatcccc

SEQ ID NO: 517997 - DNA, 589 bp, Homo sapiens
ctgataggacctgaagtaagtttttttttattatggcgaattataaacaaagctggacaaaacatcctctgctcactgggacatctccccccacaggatacattgaatgggaaatggactcatatgatgacaggcaatagcattgatagatattgccaaggtaaacctgcccacctcccaaagagtttaactagtatccactcacaacacctgattacagaatacctgtcctcttctccttggaggacaactaaaatgatcatgtatattcttttatcccagcctgatgtgcggaaaatacgatatataatggccactctgatcatcagtgagacagctatttctggtcagagcttattgaccttttagaatttctgtactgagagaacatcaacactcatcccaaccaatccgtcgtccacacttactaccagtgttacagcaacgctggtgagacacaaagccaaaatccaatatcggggcaccaggcagcataggaatgaacagaacgaattataaatataagtaaacctcaagttgtatgccaaaaataacattcctaaagggaccccaggcaaacgtgatgaga

SEQ ID NO: 517998 - DNA, 663 bp, Homo sapiens
  misc_feature (29)..(29): n is a, c, g, or t
ggtgttccccccacacgttgggggggcgncaactatcagcgccgcccatcaagttggtatgtaggggcattaatcgtggggccgccgtagtaataagggtgtccaataactctttcttcgtctctctgttggtgtgtccatcataagaagacaccacttcgtggcaccagccgtgcgtcataaatctcagttgtgttctgctcctacacaatacacatcgcgactcgtctggtcttgtagacaaaaaggcgccgcgcccggcgtctgctctcttcaaaagatcgcaccagacagagagatgacagatgagctgcacgacacccgccccgcgacacacgcgtctcacatcacagcagtgcgacgacgccccccgagagacacactctctctcgtcactgcgactgcggactagacgtgtgtgcgatgagacagaagattagtctctcacactattgtttgtgcggtgtgtgtctttggggagagaggtcggagataaatacagcgcgcctctcggagagagagaaacagcggctttcgacgccgtgttgcgactctctcttctatttgctttcttttgctcgctctcgagagggtaattaaacgctatttttctcacttcatgtcccacaaataacaacaaacacacaagaacaaaaagaaaac

SEQ ID NO: 517999 - DNA, 190 bp, Homo sapiens
cgcaggaaggcgtgctgagatcggcgtgaaggcgattgatcaggggcgcttctccggcttcgtcaacgcatgctgaaagtcgggagcgctggaggtgatggtgccgcaggggcgcttcggctaccagccgcaggcagagcgccacggcaactacctggcgatcgcggccggctcgggcatcacgccgatg

SEQ ID NO: 518000 - DNA, 378 bp, Homo sapiens
  misc_feature (89)..(89): n is a, c, g, or t
  misc_feature (94)..(94): n is a, c, g, or t
  misc_feature (162)..(162): n is a, c, g, or t
  misc_feature (189)..(189): n is a, c, g, or t
  misc_feature (215)..(215): n is a, c, g, or t
  misc_feature (309)..(309): n is a, c, g, or t
  misc_feature (359)..(359): n is a, c, g, or t
tccaagctaaggaacggtttggggcagtgtcgttcccggagtcggccgccgttacccgctcaccagctacgcgacgctcaaggtccgcngaggncggcatcggggcgctgcgggacggtgaggccctgctgaggactccggcaagtgtgggtcgcggcgacngcggggctaaggccatgggtccgcgcncgtcttgaccacggccggggcttggnatttcctggccttcctgttgagccgtgtaaacgcggggtgatgacggcgccgacctctttggcactgttgtgagagcgaagttgagcgcgaganagaacgccagcttacagtttttttttgggttatgttcgtcatgaagcccngcgcttttcagttgttgca

SEQ ID NO: 518001 - DNA, 397 bp, Homo sapiens
  misc_feature (280)..(280): n is a, c, g, or t
  misc_feature (335)..(335): n is a, c, g, or t
ccgcacattttacaggcatgagcaccgcgcccagcgagctaatcattattacagtagccctatgctgatagtcttggcttctgtcctttgttacaacagacccaatcggtagggtctctgggctctgtgtgtcgcataccttcagatctgtgtggtggctcattggcccttgacgtgtgggaaggcatttgctccttgctgctcagaccctctggtgactccccttctccccgcttctcccaaactcctgaggcccagggacctgggaattcagtggccntgtggttggggtttggacccgggccctgccaccggctggcacgcctgaccttganacacatttcctaaacgtagcctgagtttccggttttctacttctgtaaaattggtgcggccg

SEQ ID NO: 518002 - DNA, 995 bp, Homo sapiens
ccagacgtcggcgtgactgagatgggtcgcctcggcttcctgactcggaagcgcagtaggaggcggatcgtgggaaggtgaagagttaccctaaggatgagccgtacatgacggtccacctgacagacttcctgggatagaaggatgtcatgagtcacatcgtgcgggaagtaagacagggcgggatccaaggtgaagaagaaggaggtggtggaggctgagaccatagtaagagatggtagccgaagtggtggttggtgggacattggtgggctatgtggaaatcccgtcagaggcctcgagtagtcttcagcgacatgtctttgcttgatcgacttccagtgatggaatgctatgaggagtttgctataaagaataggaataaaggcttagaacgaaggacttgtaccaaagtaagtgcaaagaaatgggagggatgaggatgggaaagaaggagttggagaaggagttcaggcgagcatgaaagaagtactggaagtcaatccaggtcatggtccacactcgcagatgcgcgctgcttcctcctgggccagatgaaggaccatcctggatgaagatacaggtgaacggaggcacctgtggacgggaagctggacgggccgcgagaggcttggaggagcaaggtacctgtgaagcaaggagtaggggcacgatgagatggatcgaggcaatggggtgacaagggcgagggtctccaagggggcaccagcaggagggctgcccaggaagacgcacgaggaccaccgagggcgcgcaggggctgtatggggcatgggatctgtctgtggctcctggggcacagtgacatacggaacaacgagggatataagaaagacggcagcggactacagcagagtgctcaagcgtctgttaagctaccggacctggtgtgacacgcaaacagctaatcggggagacgagaaagagccgaggaggaagaagaaaaaccggacacgaaacaaggaagaaacagg

SEQ ID NO: 518003 - DNA, 183 bp, Homo sapiens
  misc_feature (128)..(128): n is a, c, g, or t
tacgatcaggagttaccttaatgcgttactaaccaaactccattcattgtaattctgcagcgtgctgccacacgacattctgagggctcgtcataactatcctctgtgtgatttttttccccaaaaangataagaaagctgaggatatcaggaattaccagcagcagtttggggctatttcca

SEQ ID NO: 518004 - DNA, 99 bp, Homo sapiens
gggtgcggccgggacaggctcagtgccacatgcactcttcccgaaagcacttacagtgtgacaatgcctcctgggcaatgctggtgcctccagctcttg

SEQ ID NO: 518005 - DNA, 110 bp, Homo sapiens
cggagagacttgctcactctgaaaaacttgactaacattgatatccgtaagactagttttccattctatgcctgaaacttgtcagtggcccgacaagatgacatatttga

SEQ ID NO: 518006 - DNA, 371 bp, Homo sapiens
gcgtttgagcaaaggacttagcataaaggccatattagtggattattcaaaacgacgacgtgcattggcttctacgcgcgttgcgctgtttctaccgataccacgcgacgaccaaccggccatagtgcaatagcggcaattttaaagttcgcaatgccgacaggaatgccaatgattgaaatacattgtgcgatgcccgttgcaatgtgcatcaggcataaccaccagccaaagaaaatcagccagaaaatattcaataccgtaccgccagtattcagcagcacatttttgccagccgggttcagttcatcgacatgaatagcttcattgccataaggcaccagagacagtttagtgatctcccagcagga

SEQ ID NO: 518007 - DNA, 569 bp, Homo sapiens
  misc_feature (127)..(127): n is a, c, g, or t
aaaacagcaactggccccccaccccccaaaaaaaagacttgaaagggaacttcaacatatatacgcaaatatatctgaaggtcaataagcatatgaaaaggtgcttcatcaattttactcaccaggnaacttccattttttttttaaaatttcttttctctctcttttaattgagacagaatctcgctctgtcacccaggctggagcgcagtgatgcaatcttggctcactgcaacctccgccgcccaggttcaagcaattctcctgcctcagcctccagagtagcttgggttacaggagtgcactaccatgcccagctgttgttcatttaacaactgggttgtttgtcgttttattatgattatttggtagtgttctttatgggatacatagagacataaatatatgtttttatgattagtacctttatgtctaagaagcctttgcctgctcagaagtcatgaagatattcttctatattttcttttagatgctttattgtttgagcttgcaaatttatgtctgtgattcatcttttactaatgtttgagtgtgatctggccgggtac

SEQ ID NO: 518008 - DNA, 153 bp, Homo sapiens
cagacaggcaatctgatttagtgctaccccttttcctagtctgagttctagcttggtgacattctttatggagagaggctaaggtacaggttatccacttccttctcttttgtacttgctgcgttggagtgggagccacgaacggaaaaccgg

SEQ ID NO: 518009 - DNA, 393 bp, Homo sapiens
  misc_feature (4)..(4): n is a, c, g, or t
  misc_feature (332)..(332): n is a, c, g, or t
  misc_feature (334)..(334): n is a, c, g, or t
gcgngccctccttgcagaaaaaaaaaattttttttttgagatggagtttcatttttgttgcccaggctggatctcagctcactgcgggctccgcttcctaggttcaagtgattctcctgcctcagcctttttagtagctgggattacaggcacccacctacgagtgaggacatgtggggtttaactttgtttctggcttgttttaattaaccaaatgtcttccagttccatccatgttgctaccaatgacaggatttcattactttatggctaaatatttaatagtattccatttgtatatatatatatacacacacacacacacacacacnanattttctttattcagtcagtaattgatgagcatctgggctgtttacatatttttggact

SEQ ID NO: 518010 - DNA, 786 bp, Homo sapiens
  misc_feature (237)..(237): n is a, c, g, or t
actgagcatcgtgagaagcttgtgctagcataagagtccatcggagtcgacgaaacctgatgactacacccaatgatgtctgtgagctctttactgacatcaggacggtggaaggtcccaatggttccctcgtgcatttgggtctccaattgtggacagagatgtcttgtgttccagtatagctccaactgatgcaagccagtttcggtgttccttcccaattgtgggagtcctccngttcatccctagatgcaagaatatgccaacatccgctaatccgggtcgagcttgcatactcgaggcatggtgtgcgagtatgtataaccgagcatgcaatccctaatagataggctggtgtaccagcataggtagattgcatgagtggtattcgcacaacgaccatacacgcctgtccagggcagcacatatggacaatgtattctcttgttaccagcgaagcggttacaatggagacacgagttaatcccaataggattctctgtgacctggggaataccactcttctagtggtgtcaagttgcctgggtggccccacgggtttccagggcaggagcacactgccggccagtgatgtgcatttgcagcaggagcaccttcagacaccttcagggaaaccctattctgctagcaactagaccccactttacagagtgctggggccagaaataccgactcaggagaggtgcagtttaccagaaagcctccagagagtgacactgagagtttcaaagtcagcagaagaaaaaagtcaagccagatgtccaa

SEQ ID NO: 518011 - DNA, 374 bp, Homo sapiens
gacgatctccagcaaattcataccggcatcatgctctcaacacgcttgctgaatgatgttaatcagcctgaagaagcgctgcgcaagaaaagggcctgatcatgagtgaaaaaagcattgttcaggaagcgcgggatattcagctggcaatggaattgatcaccctgggcgctcgtttgcagatgctggaaagcgaaacacagttaagtcgcggacgcctgataaaactttataaagaactgcgcggaagcccaccgccgaaaggcatgctgccattctcaaccgactggtttatgacctgggaacaaaacgttcatgcttcgatgttctgtaatgcatggcagtttttactgaaaaccggtttgtgtagtggc

SEQ ID NO: 518012 - DNA, 411 bp, Homo sapiens
cgctcgtatctatggtttcgctttccacagtttgttacctcagtcaactgccagttcaaaaatattaaatggaaaattccagaaataaagaattttaagtctcaaatggtgtgcccttctgagtagcgtgatgaaatctctcgctgtccggctccagccggccggggatgtgagtcatcccttggtccagcacatccacgctgtatacgccacccaccctgctagtgacttagtagccgtcttggtgatcagatcaactatcccagcatcacagtgcctgtgcccaagcagtcctcactttgcttaacagtggccccagagagcaggagtagtgatgctggtgattcggatatgccaaagagaagccacaaagtgcttccttttaaatgaaaaggtgaaagttctcaactt

SEQ ID NO: 518013 - DNA, 313 bp, Homo sapiens
  misc_feature (178)..(178): n is a, c, g, or t
  misc_feature (196)..(196): n is a, c, g, or t
agatcctggtatgtgtctcgattctgcagaagtccaggatcactgaacaggtacataataagaaaattaagaataaacaatgatgtacaaaagattagatgtttatcattatctgaaataacttcatacactttatcgaatatatttagttatgatattattctcagtgactcacagncattctcatttaacaggncattgatggagaagaggccaggggggaaaaaaaagcaaattcacaggatggccagggttgttatttcatatggaataaaggtcaacatcttgttaatgggcggagtatgccttcttc

SEQ ID NO: 518014 - DNA, 205 bp, Homo sapiens
ttacatgatcaatcgagctcggtacctgaacattcgtgtccctccgacagctcggcagtccctcctgggctcccgccgtggccgctcactccttgtatttagccaagagtgtttctaccaccaacattgctggacatttcaatgatgagtctcccctggggctacgccggatcctctaacagtccacagactccctcaacatgcg

SEQ ID NO: 518015 - DNA, 275 bp, Homo sapiens
tgagagtgactgagaccatcacacagtgataatgcttggtggggctggctgccatgccaaatccctgtatatttatacaagatatacatgtgatgttcagggtgtgacccgaggcccactccaccctccatgccccagtgagtgtggcacaagaaatgccgtctctcaccatgggctgaccccatggggcgcttgggcagggttgccctcaggcaggtgttgggcaatccactggcctaggaaagcctatggttaagtgtactagggaaagccaa

SEQ ID NO: 518016 - DNA, 396 bp, Homo sapiens
  misc_feature (140)..(140): n is a, c, g, or t
  misc_feature (252)..(252): n is a, c, g, or t
  misc_feature (309)..(309): n is a, c, g, or t
  misc_feature (330)..(330): n is a, c, g, or t
gccccccccccccccccccccaagccccagagagagaaaggcagaggtttaaattctctttctggcccagggtaagtaaaaaattaagaggttaaagccaggggccttgtaaaacccccccccttttttgcttcaatatnctaattccctgtgtagcttttgttcattgccatttatttaaaccaaaaatgttgtataaccccaatactaaatgtactacttgagcttcgctgagttaagttatgaaacttncaaatccttcatcatgtcagttccaatgaggtggggatggagaagacaattgttgcntatgaaagaaagctttagctntctctgttttgtaagctttaagcgcaacatttcttggttccaataaagcattttccaagaaaaaaa

SEQ ID NO: 518017 - DNA, 232 bp, Homo sapiens
ttaaaaagctacccgcgtacttaaattatgggtaaatagcgttggtgtccgtatttacagacttgaaatgtatcaagtcctgagcagtcccgatgtaaatccgagaccagctgactgggagtcttggtctcagtttttaaaagggaggtcccatgacggcaggctggctgctatgaacttgagttgttttcattctttcccacatgtactatttgctgcgggtcgcttttaa

SEQ ID NO: 518018 - DNA, 686 bp, Homo sapiens
tgtgctcgatgtgctggactggggcctgcgtgtgcgcccagtgcgctctgtgcgcatgccgtgtgctgccggtgttttttgtctgttggctgtgctgtgccgtgctgtgctgtgctgtgcagctgtgctgtgaagcacgcatgtgtccctgcatgtagtgctatgtggtctgagatgacctggagacttgtgtgagctccatgcgttgccgaccactccatgaatgtgcccaacactcacacgagacagaacttagccagcctactactaacctaacacttaatgcaatccacctgagacacattgctgagaagagacctagtgggttccccaagagggcacattgttagcctatgccattgggtatccacttagcaaagtgaacaacaacgtcgttggacgccacttttgcaccgtgaatatattcgagccatgcacaattaattgagcctcgcgctcgctgctctcttgggaaaacaccgatatgggccaagcgcacctagtctgacccatataatattacttaaaaacccttcaaggcaggcacaatagtacaccactttgtggaaacccccttggtggccctccaccgctttaactccttccaaaacttatgggtttggccatataaccccttggatcccgggttaccgcaaccctagggatacatttggccatgactacca

SEQ ID NO: 518019 - DNA, 197 bp, Homo sapiens
  misc_feature (29)..(29): n is a, c, g, or t
  misc_feature (140)..(140): n is a, c, g, or t
  misc_feature (177)..(177): n is a, c, g, or t
cattattcgtctactctcttaataaactnggctttcactgcggacttgccctgaattctttcttgcgcgagatccaagaacactctcttggggtctggatcgggaccgcctttttttttttttttttttttttttttganacagcgtctcattctgttgccccggctagagtgcagnggcgcgatcttggctcactg

SEQ ID NO: 518020 - DNA, 493 bp, Homo sapiens
  misc_feature (187)..(187): n is a, c, g, or t
tctatattaaagtggtttttttttctccccccccctagggcccccttgtttttttaaaaaatagggaagaaagaaccctttttgggacccggcggtggccccctccaaacttcattatttttgtggggttttcttcctggggggggcagccccttgggtcccctttgaacccctttgcctttgaaanttaatttccccccaaaaaaaggccccttgtttgttggtttttggcccgttggggaaaatgcctgtttttttatgccccgggacccccaatgtcccatataaattggcttttttttttaaaaaattttaaaagttggggaaagggtttttttttggcccgcttaaaaattgaaaaaggttttttcccccccctttaataaatgtttaggccgatgtaagggaatttttgggtttttttagaaaatgtccaaatcctgaatttttccaaataaactggggggtttttaaaatccccccaggggtttta

SEQ ID NO: 518021 - DNA, 306 bp, Homo sapiens
caacacaaaagcggacaaaagcgggggaagaccgcttagagctgctgaagctttccacctttgccctcattatcactcctggggaccctcacttggttatctcctctgggtgtgcgacgcggctctttgaagccctggaggtcggggccgtcccggtcgtgctgggggagcaagtgcagcttccttaccaagacatgctgcagtggagcgaggctgccctggtggtgcccaagccgcgagtgaccgaggtccacttcctgttacgaagtctctcggacagcgacctcctagctccgcttttgtgtt

SEQ ID NO: 518022 - DNA, 427 bp, Homo sapiens
  misc_feature (9)..(9): n is a, c, g, or t
  misc_feature (45)..(45): n is a, c, g, or t
  misc_feature (210)..(210): n is a, c, g, or t
  misc_feature (229)..(229): n is a, c, g, or t
  misc_feature (413)..(413): n is a, c, g, or t
ttatagtgnccttcccttacagctttgttgttatagatcaaatangataatgaagtgtaccctgctttgtaaatccatgaaagcagtaatttttaaatacccttttttcaagaaccttccttaagaatctgatgaaaggcccaggcatgaatggcttatgccctgtgatcccagcactttgggaggccaaggcaggtggatcacttgagncccaggagttcaagactancctgggcaacatggtaaaactccgtctctacaacaacaacaaaaaaattagccgggcatggtggtatgcacctgtaatcccagctactcaggaggctgaggcagaaaaatcgtttgaacccagaaggcagaggttgcagtggaacccaggttatgccactgcactccatcgtgggcgacagagntagactctgtctca

SEQ ID NO: 518023 - DNA, 317 bp, Homo sapiens
aactgtttcggatgagggtggcttggactaaggtggtggccacggaagacaaaaggatgtggacatgaaaatatctaggaggtgaaaatacccactgggatttattggacaggctgactgctgacttttggcttgagcacctggaccacaacctgtaaaaggagcattatttaagaggtggagtgttccgagatttgggcatgttgaatgtggcaatgcttatgaaatggctaatgggtctgtgaagtaagcaggtgggtctatacaggcctctttccttatgcttcaaacccattagccatcccaagcaattgccg

SEQ ID NO: 518024 - DNA, 349 bp, Homo sapiens
  misc_feature (30)..(30): n is a, c, g, or t
  misc_feature (59)..(59): n is a, c, g, or t
  misc_feature (123)..(123): n is a, c, g, or t
  misc_feature (294)..(294): n is a, c, g, or t
gtcgacgcaggacctgaccaccaccaggancccagaactgtggagtcagtggcagcatnagcgcccccttggaaagctttaggcaccagctgcaacccattcgagcagccacgtaggctaacnccagcaaagccacaggaacggggctacctgaggccttgggggccaatccctgctccagtgtgtccgtgagcaggcacacgaagtcaaaagagattattcttttcccacagataccttttctttcccatggacccttttaacagcatctgctttcatttcccttcacctttnccagggttgatcttgaggttaaatttttgaagttaaaattaaaagctgtgttttg

SEQ ID NO: 518025 - DNA, 572 bp, Homo sapiens
  misc_feature (530)..(530): n is a, c, g, or t
  misc_feature (549)..(550): n is a, c, g, or t
  misc_feature (553)..(553): n is a, c, g, or t
  misc_feature (562)..(562): n is a, c, g, or t
  misc_feature (570)..(570): n is a, c, g, or t
cctccccccccccccccaaaaaaaaaagcttctttcttttttttttaataaaaaaaaaaaaaggagaaaaaacccccccccgggagggtagagagaggcccccctccccaaaaaaaaaaaaaaaaaaggaagtgagcggggggggcgcccgtttttttttttttctgtggggggagggggggtgtgtttcccccccgggggggccccccccccccccccctttgggggggggggggaattttttttttttaaaaaaaaaaagggggggggggggccccccttaaaaaaaaaaaaaaaaaaaatctccccccgcccccccgggggggggggtggagaaaccccccccaaaggggattccccccccccccggggggaattttgtggggggggaacccccccccccctttaaaacccctttttccaaatttttgggaggcggccccctttggtttctttgtggcaaaaaaacctcccttttaccccaagtctcccgactttggcacaaggcagcagcttttccccagctggcnacatctgtaaacagcttannccnttagcaagnaagagtcngg

SEQ ID NO: 518026 - DNA, 217 bp, Homo sapiens
  misc_feature (213)..(213): n is a, c, g, or t
gtactttttctatgtgtgaaattttctgattccatcagaaatatacagtcattgaagagggccttcataatgctacaaagggagtagacagaagataggtttaaagaaggagaaattcatcatctactacatctaggcattataactggtaatgctgtatgatctaagagcacagctaccgtaagtctccagtcctattttctggtactcagntcag

SEQ ID NO: 518027 - DNA, 498 bp, Homo sapiens
  misc_feature (9)..(9): n is a, c, g, or t
  misc_feature (16)..(16): n is a, c, g, or t
  misc_feature (51)..(51): n is a, c, g, or t
  misc_feature (63)..(63): n is a, c, g, or t
  misc_feature (105)..(105): n is a, c, g, or t
  misc_feature (123)..(123): n is a, c, g, or t
  misc_feature (172)..(172): n is a, c, g, or t
  misc_feature (468)..(468): n is a, c, g, or t
  misc_feature (489)..(490): n is a, c, g, or t
  misc_feature (498)..(498): n is a, c, g, or t
aaaagtgtnaaaattncccccattggaaagctattttcccaaggaccttanaaggcatgcctnaatctttccttaactcatttttccttttgtctccctccttanctgtgtgttttcaaaaanagccctatccttcaggctcaactaattcctttccctctgcttgatcaantctgttgttcaagtgactgaacagactgggggtggtggctcatgccctacaatccctagcattttgggaggccaaagcatgaggatcacttgagccccaggagtttgagaccagtttgagaccagcttgggcaacgtagtgagactaccatctctacaaaaacattaaaaacttagttaggtatggtggcatgcacctgtggtccctgctctttgggaggctgaggtaggaggatcacttgagcctggcaggtcgaggctgcagtgagccatgatcacaccactgcattccagccnggattacaggagactctgtcnnaccaaaan

SEQ ID NO: 518028 - DNA, 401 bp, Homo sapiens
cttttggggtctttgctcacgggggcgatccattctaagctaataaacatgtagagcgagcagtggatgtagcaaaaacagaggagatgcagttgctactaaaaagagaggagcctttatctgatgatgatgcaagttacacagattccgaagaggctcattctgttaatccttctagcgttgatgaaaatattgactctgaaccagagacagactctctcatatgagaaagcacacagatacttcccatcaaacacctattccatctgcccttgatgagtataacttcaaagatcattatgatgaacaatattaataggacgactgatgatatgtcatattctgaggaaagaacaacgaaaagataatgaacctgaggcagacaatactcatttatttgc

SEQ ID NO: 518029 - DNA, 639 bp, Homo sapiens
agcggagaaagactgagaggagggaaagccgcgtaggtgggagtaccagcggcgcgaagggtcgagggggaaccctcgtcggtgcagatgaggagggtgggctttcagaactagtcccccctcgcacccgcccgccctcccggctggggtctcggtgcctgctcgagcggctccagcacgcccggaagagggagccttctggacgtcggctggctcagggcgggccggttggctgtaaccaggctccctggcccgagtgcgggaccagagcgcggggcggtgcggagtccgcggaccgacggcaggggctgcgagcgaacacggcgcggcgcggcacggcggacgagttagggccggggcgaaggcgagcgccgtgggctcccgaacagcaacacagggcgagctaggtgttcgggctgacggcggagctgttgcctggacggcagcagcaacacggagctcggcacacaacgccacagccgttcgttcggggacaatacatatcaggttctccggaaactccgcacacgctgtcacattggacgcaagcagaatttacgtgaataactgacgaactaggtcctccatcctcacgctactacgcacttttggaacttgtctttccacataaggaatctg

SEQ ID NO: 518030 - DNA, 104 bp, Homo sapiens
gtcctggggatcttagtaagggcaggagttagcggtacaaagttgacagccctcatcaggtcttcaatgtaacctggggggttaccaacttaatgtcaggacaa

SEQ ID NO: 518031 - DNA, 769 bp, Homo sapiens
gtgatgatgccggcaggttagcggtggtagctggcattatggtgatgtggtcaaggctgtgcacaggccctgcggtgttttcgcagcccagtgtcattccatcaccgagattgtaccccatcaacgcactgcaggtcgtgccatggagggcatatgaggtgaccaccatggatgaggcctgtctaagcgagggcgacatctttgtcaacaccacaggctgtattgacgatctaatccttggccggactttgagcagatgacggatgatgccattgtgtgtaacattggacactttgacgtggcaagatcgagtgtcgcagtggctcaacgagaacgccgtggagaaggtgaacatcacgccgcaggtggaccggtatcggtgggaagtaatgggctgccgccatcatcctgctggccgagggtcggctggtcaagctgggttgtgccatgggccaccccaggttcgtgatgagtaactccgttcagccaaccaggtgatggcgccaggatcgaggctgtggactccatccagacaaggtagtcccgtatggggcttcagttttccgtgcccaagacagcgtggatgaggcagtgtgctgaagcccacctgggcaatcctgaggtgtgacgtttgagcaagtctaactgagaagcaaggccagctacctgggcatgtcctgtgaatggcccccttcaagccggatcactaccgctactgagaggcaggtctgcgttttcaacgcctccagatggtgtcttgtccaagccc

SEQ ID NO: 518032 - DNA, 491 bp, Homo sapiens
gaacccagtaacaccaatggtagggaggaggcacctctcagggaacaaaagtgggtgagggcagccaggggctttctctggactcaggagagaaacatcagcaactgccttcccatggggtgcaggtctcctgtggccctctgtacctagccactcctcgggccaacggtagcaaatgcagcctccaccctcatcccggctcaggcctctctggttccctccctgactctccaatactcactgtgtgcccttgagtaaattcctcctcctcttagacctcagtttccccacccattggcttagagaggggaactagatgatcttcaaacccccctgctccagcgcttgtttcctaaactccgccaggggctcctgggtcacagcctctgtctcctgggagggagtgaggactgggagacttggggcttgaaatctttgggagaagacagctcccttgttcattcagaataattctttcaaaggtcaaaaaa

SEQ ID NO: 518033 - DNA, 399 bp, Homo sapiens
  misc_feature (322)..(322): n is a, c, g, or t
  misc_feature (389)..(389): n is a, c, g, or t
agcaaagcattgcttataaaaatgaaagattaaaaatgtagatgtctaacactggacccccatttgcaaagaaacaggctgccatagaaacactgtagagctttttagtttgtgcaagatatgaaaatgtgtttttttttttgggtaacctgagaaaattaaaggagaccattttgaattgcagaggtggtatgacttggtgagattggaacagggcttatacttgctttgcctctgacctgggataaattactttgctcagtttaccttatctgtaaaatggaggcattttaatacttgccccccattagatgccttaganatgtgaacaagcattttgaattcttatggaaggaaggcagttgtgggaaatttcaccagtgttgatnaaattaaatt

SEQ ID NO: 518034 - DNA, 906 bp, Homo sapiens
  misc_feature (649)..(649): n is a, c, g, or t
  misc_feature (906)..(906): n is a, c, g, or t
ggaacgcgcccaccgagcctatctgggctgcgtcttctcgccgctgctcttcgtggccaacgccccaatccttgcgtgtccttgcaagtcccaccccaactcagccttgtgtccctcgatccagtctccgatttccatttcccacctaaacggctacccggtgtctgttccccgccggtgtgtcctcgccccttgtgcgctgagtgtccccctgttagcctcgacccatggcgctgcaagacgctgcaagagctcgtgggtgacttccgaagatcctgtctcattccccgaggagctgagtctggctttcgtctacggctcggggtgtcccgccagggacagggcccagttcaaggaccagaacgaaatgctattgcgggccttttgtgttcacaggtacgatgaccgctgtctgcatggctttcaaagcacctgaagcaaacacctgggaggtcccctactctttcccttaaaagtttgagggccccagacttatcacgtccatccagagtaacttaatggcgctggagttcactaccatcatggatcatgtgtaccatggtcggctctctcacctctggagttattaggcactaagtctgatggagatctctcaaagtggaattacttataatggctgacgattcanaaaccggtgaaattattcagtgacgggctgtattcttgataaggctgggtgaattgagagtgtgtgccggttctcatgcccgaaaggttttgaaaggctttaaagtgggtctctataggattcgaggtggtggagatccacatggtttggggcatagactctgggcttggtcaggacacggggtgacaggggataaccgagtcagaatgagacaatagcgaaggaatggccggggggctatttttctggttgtattn

SEQ ID NO: 518035 - DNA, 320 bp, Homo sapiens
tcttgaagtcctgacctcaaggtctccacccgccttggcctcccaaaatgctgggattacaggcatgggccatcacacccagcctgatgttactactataactgttttggggtaccacgaaccatgcccatataagatggcaaacttaacaaatgttgtctgtgttctgactaccctaccaacaagcttccctgtctctgtctctctcctcaggcctccctattcattccttgagacataaaagtattgtaattaggtcaattaataaccctcttaagtatccaaatgaaaggaagagtcatagtcgacgcggccgcgaa

SEQ ID NO: 518036 - DNA, 163 bp, Homo sapiens
gagtgatgaggtcggtacccaagaagacactctgggctcccaaagtctggattccagcctccaggttcctatttgggcatatttacataatttcacatttttatgctaaagtttttttttttcggtctgtcgcccaggttggagtgcagtggtgcgatctcgg

SEQ ID NO: 518037 - DNA, 161 bp, Homo sapiens
tatgctgatggagagagctcctcggttatgtggacatgcttaggtgtagctatgaagccccttcgctggccacgggttatggtagcatacttgagctcagcctctgactgcgagcaagttctaggcacaagcagccagtgctaaagccagaaccgaggccc

SEQ ID NO: 518038 - DNA, 593 bp, Homo sapiens
catggtggctcgtgcctgtaatcccagcactttgggaggctaaagcaggtggatcacctgaggtcaggagttcaagaccagcctggccaacatgacgaaaccccatcactaactaaaaaatagaaaaattaggccgggcgtggtggtgggcacctgtgatcacagctacttgagaggctgaggcaggagaatcgcttgaacctgcgaggcgtaggttgcagtgagccaagatcgccccgattgcactccagtctgggcgacaagaacgaaactgtctcgaggaaaacaaaaaagaaatacaaaacttagcatggtggcatgcacctgtagtcccagctacttgggaggctaaggcaggaggatcgcttgagcctgggaagtagaggctgcagtgagccaagaccgtgccactgtactctagcctggttgagaccctgtcccaaaaaaaagagtgggccaaagcactcaacagatcccttacgaaaccagatacacagatggcaaacaagcatatgaaaagatactccacatcatatgtcagcagggaaatgcaaactagaacaatgagatgccacacacacctatcagaatgg

SEQ ID NO: 518039 - DNA, 116 bp, Homo sapiens
ggaggtgctctgaggatcccttgggagccttaccctgtaccgagctctaaccctaaccagtgctcttttcacagccatcatctttccctggcaggtggtgaaaagaggcactggtt

SEQ ID NO: 518040 - DNA, 927 bp, Homo sapiens
tggtggtttcataggcgtgtttttcccgggtgcgaagcgtgtggctacctgttttgatccccccccgggggagcaacacactcgcccacctctttctgctctggctgtactccccatttttggagatttctttgagggtcacacgtgcgccccccttctcgtcccgtttgctttgcccccccctttttgtgtcctgtgtttgcgtcgcttttccgcctcactcgaagaggtgggtccactcatgtgtacgcacaacgggcgggtgtttgtacgaaaaatggctgcggctccatgtagacgaaagggcgcttttttctctccttggtgttgtctctccctttctcttccacatcatgtgcgatcgccaccgcccgtatttgtgtccccctccctacaacccttgtgaagcccccggtccacggagagtgacctcgtggggctcacaatgcctcacccaaacccttttccttctcctcctggcccttgggtgtctcttctcaaggccctctctttgcgttttatatctgtgagatccctccctctgttgactctcacgcggcgctctgtttgtctatatgccctctctgtgtgcgctctcctgaaatcttttcagcgcggctcgtctccgcgcggtgtcctcgtgcttatgagagccctgtttctcccacagcctctttctgtccctgcacgcccctcgtgaaagggcggtttctcgcaccctggccttctcgtgtgtgttggctgagctgtacttctgtgccgtgctaggctggagggagggacagggatcgggaggcacatggtgtttcccgctcccccgccctttcgttgaggccccaccaccctgcccccttttactttgcattgaacggcctgctcccaagatcctctttattagggcacccgagagcctttttgcacctttta

SEQ ID NO: 518041 - DNA, 974 bp, Homo sapiens
cgtgtcccccggggataagaattggcttctcaaatagcccacatttgggaagtggtgcctccataacgttccacagtgataaattggctcccgtaaataaggtaactttgaccccccccccaaatggggaaaaccctgatatattaggattgtaccccgagtgagggcccccaaatatgggggtgccaccaacctgggtaacccttttggccaaagatagaaagggtgtatataccacccactctgtgagaaatttttcgcgcgaagggctccccagggatgccccccaagagtcccctcttcctgtgtcacagggatctctggaaactcgtagactatagattgtgttttctggagaaaccggaacctttttgtctcccacgtccccccctgtctcctaaataagttcccccagagtcctggaacttggggccaccacgtggtcacagtgtagatttgtttccccgcccctgggccacaagatattttagtgaaagcctaaatggtagagggcctcggagagaaggtgaagatcccccagagtcccccgacactgtataagaaggttttttgtttataggcggcctataaagggggagagaaacactgagaaagtggtgttgtacacttcttttttcttataaaggggttgggtctctgttctctaaagtgtaagcctaattgtgttctctgtggttgccaatcacttgttgttacattccagagaccacctgtgggtgtacactgtgggttatatggcgctatggtacctggtatattggcgtcttgggtgaaacaaatatatttgtgtgtgaaagaggtaatggtatagtggcgcttctttttgtaacctgttagatagctgaattaatctgttctcacactttccaatctccccttcttgtctccccattttacccacgatagctactggaccttgaaatttattaaactgcccccgggccgtggtggat

SEQ ID NO: 518042 - DNA, 644 bp, Homo sapiens
  misc_feature (220)..(220): n is a, c, g, or t
tgcgaacgtaagccagatagtgtaatctgggctttgacgcacgagagcccgttcagagcggagtttgtaggcggccccagaccgccgcctgtcctagcgagggaacacagcacgccttcgtagatgtattttacagggtaaagagccgttttgggtgagccctttactttccttgaacttctttgcgggtatcctcatgggcgcatgtgtatgtccccgncgcgccgaagtgttggtgtcacctgaacgagttgtcacaacagatagcagtttctcctctccagcaggcatcacggtaaaagctgtactgttaggagcaaagtgacaaacaatacatggtggtgataaatccagcaacgggcccaattgggctggtaattcagtattacagagcctgatggagattatattatgggctgggtgcgctggtaggagcagtatttttggggcatacggtctgttttgaagctatatatagtgagccggaaggagaggccctctttgtgttatgtcctctcgctgcagcaacccgactgcgattattccacggcggctggctaaataacgtttttatcaaaaatttgattcgaggcagatcctataaaaataaaaaaacaacaacaagcaaaaacacgacataaata

SEQ ID NO: 518043 - DNA, 101 bp, Homo sapiens
gcccaaaggtatacaggcataaggttgagggtggttggaggagaggagctttcaactaggggtgaatagtaaatatagacactgaagaaaagagtgcttgg

SEQ ID NO: 518044 - DNA, 874 bp, Homo sapiens
gcgtgtaaaagcttcttggattcatttcattgatatacagccactatttatattttagatcagtggccttatgggccactgttcagggtactgaccatcagtgtcagcattagggtacaggatttttgtaacttatagggtataacttttatggacacatgtgaatcttgttcgtgtaaaattgaaattactttctcttgtactctgatgatgggtgttaaaagttaaaagagcatccggattaaggtatggggactgatccacggattatgtaagtgaaattgatagcatataaagataactatgtggcttaaacataaaatgaataataaggaaaaatttatagaaaagggagaaaaaataatacaaaaagaaaaagcggtaacgaacaatgtacagcaaaaccaccacaatgtctgggacaccacagggaacacacaggtggcaccagggaaaaaaacaccacaaacatcccccccagtgggcgcaagaaacacaacgttcgaccacagagataaaaaaaacggagaggcgacaatatcccccacagtagaggaaaccacagtggctgccacacagccacaacaaacgcacaggaggaagttgcacaaacaacgcagctcaaaaacaaaagccggatcccacaacagagatgaaccaacaagacaaaacaggggacgcgacacacaaaaaaaaagcgcccaagagtaaggcacacaactaaccaaaacagcagacaaacaaaaatcaacagaaaaacacaacaaaaaaacaaaccccacagagcaacctgagcgcgcaccatcagacaccaaacaaagagcctccaacaaacaacaacagaagctgcccgcgcgcccacagacaacgaaag

SEQ ID NO: 518045 - DNA, 292 bp, Homo sapiens
acagatgggctcagatagattaattaggttaatttagcaaatgctctgatatgttgcacaagtcttctcccctgagactactcgatttgaagcacagacacaagagatgcgcgtgtgtcagactatgtcttatagagatgcaggccactctcctcccacagggccttgggactggcaggacaaacactgctacatgccctcccaatggctggagtcacggtcaggagcgactggggtggaaaatatggaacaaagccacaactactacttcatttttggcatttgtccatgt

SEQ ID NO: 518046 - DNA, 999 bp, Homo sapiens
tgctttgggtttgtactcgtgctgctcgtgtgttctctgtaacaccgtcattggattgtctgaacttgtatctttcatacgtacagtgcttgcctgcaaacccgtgtggtagattcgaataggataatgatctgtgacactccgtgttgcctaaaaatatatcttatttcggttcatgagcttaaaggccggacgatctattcatgcaccttgaaaggtaggtgtatgtagtgtgagtcctgatactgtattcttttcatatatacgtatcggcccagtgcaggagcgtatgcccgagatcggaatctgtagttcgactcattgggtagttgctcagtggcaaatacaccttatagaccgtacaagttaaatctccttgtacctctgtccacgttccgtatcatgtctagccatgctcacctgttgcacacgattaggctcgactatgtaaatcaagtgctaccaagaagatgactttgtgtatgcagttgtcgggccctgaacgaggctgcactctgtattgtctataacgatacgtcagcttgttaggtagacatgtacagttagcagttgaatgtgaaggagcgatagcgaaaacgtgtaagaatcctgtggaaggaggactgacccttgtaggtcgcttggcaaggtaccacctagctgtggtatacctaggtggcgatgcctgatgagtggcctgataggtgatctaggtgtgatgatgactactggtgcagcttcgccttcgattttgccgacctgctaaatgtggctgttcataacctaatcgtattttctgtcaaaatctcttctcctgtcacacttgtgcttatttaaactgtttcctgctggaacaaggctctaatcccctggtcgcacacactcttcgcaggggatttgtcaaattaaagtaagcagactcatcgtttgtccaccagaaataatatagaagcgtctcggcacaaaaaacaacgggcggccacagaaaaaggggtgaaa

SEQ ID NO: 518047 - DNA, 145 bp, Homo sapiens
cgacggcgaattctttcacgcgttgtcggatccgacgcggttgaagctgcgggagttcatcctggccgccgaacgcacctccggggagtgtgtcgagcacgccggcatctcccagccgcgggtgtcggtgcacctgtcctgcctg

SEQ ID NO: 518048 - DNA, 489 bp, Homo sapiens
  misc_feature (117)..(117): n is a, c, g, or t
aacaaggaatgagcttacatcgttaacatgcaaataaatgacccttgtagcacagcggggcaccctcccagtgtgaggcgaggctgctgaggggagggcgtgtgagggtgaatgcgnacggtgcaggcgcagctctcggtccagcgccaggacatgggacagcatttacccaagtcagcactgctcctcttggcacctgaaacaactcaactcaccatttactggagctcagagaaagttcattgagaggctggcttcaaacgcagttaaaagacccgagagatttctttaggccagtaataacaagttaggaaaatacagcaggaaaaactcttcatcagcacaaaacgtgctggaataagataactgacgatcggtcagagctgatgcagggaacgccccggctccaggatggctccaggaccaggctcggggtccgggatgcagaggcccaggtggcagatgccgcgctaacctgacgcggccgca

SEQ ID NO: 518049 - DNA, 338 bp, Homo sapiens
  misc_feature (7)..(7): n is a, c, g, or t
  misc_feature (9)..(9): n is a, c, g, or t
  misc_feature (53)..(53): n is a, c, g, or t
  misc_feature (64)..(64): n is a, c, g, or t
  misc_feature (111)..(111): n is a, c, g, or t
  misc_feature (139)..(139): n is a, c, g, or t
  misc_feature (163)..(163): n is a, c, g, or t
  misc_feature (170)..(170): n is a, c, g, or t
  misc_feature (184)..(184): n is a, c, g, or t
  misc_feature (210)..(210): n is a, c, g, or t
  misc_feature (220)..(220): n is a, c, g, or t
  misc_feature (227)..(227): n is a, c, g, or t
  misc_feature (230)..(230): n is a, c, g, or t
  misc_feature (288)..(288): n is a, c, g, or t
  misc_feature (293)..(293): n is a, c, g, or t
tgtattncngtcatattgccaactggaaagtcaaaattttctaacaactttangtaagtttttngacgacttagtgctgtttttaatccagtttagaaagtaacttaattntaataccgctactaaaaattcgaaaatntcttctttaatcacattcaatacngttaaangaacaacactaatngacattgcgcgggctttttctccctncgtttaaaangtcattngtngagcaagagttgtatagtattatctacttactcgcggctgttaatttttcattacagngtttngtaaatgtatccacgagaccatgatgcattgttttgtgctcaact

SEQ ID NO: 518050 - DNA, 709 bp, Homo sapiens
gtcggcggacgtgctgccgagtagtccggaagcgaagcagcgatggcggagagtcgactgaggaggcggcaacggcgggcgccggggcgggggccccggggcgagcagcgtgctggtgtagtggcgttagcggcagcggcggcgggttcgggccgcctttcctgccggatgtgtgggcggcggcaggcggctagctgggctggggcccgggggccgcggggagcggcctggctccagatgcccagggctcccgcccgtcagccggctgcccaacggggccgctgcatgcttagccaacgtgggaaccccaactgctcaagctcacgacgtgggaacgggcgagacgcaaccggcagccggcaagtggtctaactccgggattcaagggcgggaattatcagtgttccactttgatacatcggacgccctccttccaaggcgaactggtccgtatgttacccgtgaattaccttgttggaccatggagctaaaggattccattgccatgtgatcaaccagtgccccattgtgacgacgtcgcgttatgaaacggcgggtatatcgttccagttgtatcggatgtcatcagggtgtccaggcccggacgtaatcccaatccaagccgaccttcaggggtccaaaccttgcatggaccaaccggggcgccaaaaattttaaaccgaacctaaaggcgtttgggaaaagaggg

SEQ ID NO: 518051 - DNA, 234 bp, Homo sapiens
cactgtgcagaggatacgcacgttgggctgtgaagtgctgggcgttacggtggactctcagttcacccactggcttggatcaacaccccccggaaagagggaggctatgggcccctgacacatccccctgctcgctgactgtgaccagacgctatgtcatgaggattactggcgtgcttgaaacacgcgatgcaagtggatggcactggggatcctactacgatgtcgaccctg

SEQ ID NO: 518052 - DNA, 174 bp, Homo sapiens
tgtggtgttacgtgatacagtgagtaaaagagcccatctttcatcattcagaaggtgcatgggttttgctacttggttaactgtcagtccttggagcccattacaaacctcctgcacttagagctcagctgaaaaatgtgttctgcaagagaaacccggttgaaatagagagag

SEQ ID NO: 518053 - DNA, 413 bp, Homo sapiens
ggtcttcctttgtctagagtgaaatagtatccaaaatttctctcttcatgtgctgccttttctctaatactttggctagagagagaaggcttttattggggattttatttttctgtactcatgggcatttctgcattgccggactgtcttcttctctccacattgcagagcattcttttcttctttttctttctttttttttaagatggtgtttccctttgtctcccaggctggagtgcagtggtgtgatatcggctcactgcaacctctgcctcccaggttcaagtgattcttcgcctcagcctcctgagtagctgggatttcagggatgcgccaccatgcccttctaatttttgtatttttagtagagacggggttttaccatgctggccaggctgctctcaaactcctgg

SEQ ID NO: 518054 - DNA, 323 bp, Homo sapiens
gcacacctgtggctggaaagtggtctattccggggacaccatgccctgcaaggctctgggccggatggggaaagatgccaccctcctgatacatgaagccaccctgaaagatggttcggaagaggaagcagtggaaaagacacacagcacatcgtcccaagccatcagcatggggatgcggatgaacacggagttcattatgctgaaccacttcatccatcgctatgccaaggtcccatctcttcagcctcaacttcagcgagaaagcgggagtcgcctttgaccacatgaaggtatgctctggagactttccatcactgccc

SEQ ID NO: 518055 - DNA, 107 bp, Homo sapiens
cgagcgccctggtggtgggtgagtgagccccattgtgttgtggtaaatatgtagagggagtatagggctgtgtacggagggctcgttacggaagggctcgttacgga

SEQ ID NO: 518056 - DNA, 518 bp, Homo sapiens
ccgagatcacaccactgcactccagcctgggcaacggagcgagacaacgtcgagagatagatatgtatatatctccaagaggtattttctgtaacacatgtgggaaaaaagagaaaaaaaaaaattcaaagaaaaatgattttggaagtaaaaaaataatgaacataaaagtccaagaggtcagctgaaaacgatgggaaggtccggggaggggggcagccgagggagggctgggaaactccataggcggtccccccgacacctggtaccgggctggccctcatctgtattctgggcaattatcctttacaaggggtctgcaaccctggggcagtacgggtccggggcctggttaggaaccaggcgtgacatcaggacgcaagcagcaggcgaacaagcatccccacaaagctctgccccgacagatcagggggagcatacgattctcacagaagcgtgaaccccagtgtgaacggcacacgcgagggatggagggtgaagcccctcctgagactcta

SEQ ID NO: 518057 - DNA, 430 bp, Homo sapiens
  misc_feature (18)..(18): n is a, c, g, or t
  misc_feature (34)..(34): n is a, c, g, or t
  misc_feature (49)..(49): n is a, c, g, or t
  misc_feature (88)..(88): n is a, c, g, or t
tacctcctcttctggacnagagaggacttgaggnccgagatcatggagnatcatggaggcccaggcattttccaaccttcagaagaanaaatgatgtgcactagctgcctataggagtcttcctttttacactaaaaaaacaagtctcgggccaggcacagtgctcatgcctgtaatcccagcactttgggaggccgaggtgggtggatccacctgaggtcaggagttcgagaccagtctggtcaacatggcggaaccccatctctactgaaaatacaaaaattagccgggtgtggtggcgcgtgcctgtagtcccagttactcggaggctaaggcgggagaatcgcttgaaccctggaggcagacattgcagtgagccgagatcatgctactgcataccagcctgggcaacagacaagattccctctta

SEQ ID NO: 518058 - DNA, 132 bp, Homo sapiens
agcggggaacagtcactttggctaggaacctagcaaaagtgaacaaataggattacatgagaggtgaaaaagcttatgtacagcaaaggaaacaatcaacaaagggatggttcgccgctggggtacggagct

SEQ ID NO: 518059 - DNA, 235 bp, Homo sapiens
  misc_feature (40)..(40): n is a, c, g, or t
aggatcctgagcgggagttgtgacgtacaggtggctaaantgcacaaagattatgtcccaggacacttccccaccaaaactcctgatgatgaaggccaggccctcacggggcacttcttcggttcaggaagaacttcaggccctcaaaaagcttcttgtgcttctcctgcgcctccagctccttcctgcggtcttcctcctgcgctgacatctccccatcggtgggaaactcatc

SEQ ID NO: 518060 - DNA, 112 bp, Homo sapiens
  misc_feature (42)..(42): n is a, c, g, or t
  misc_feature (84)..(84): n is a, c, g, or t
  misc_feature (88)..(89): n is a, c, g, or t
  misc_feature (99)..(99): n is a, c, g, or t
attttattcaatctttcctagaatttataatgaacatttgtnttttaatatggtagttatattacagttttaccttacgagcgntagnncatttggtgnataagattaacat

SEQ ID NO: 518061 - DNA, 702 bp, Homo sapiens
gggacccaggggaggtaataaatcatgggggtggttacgcccacactgctgttctcatgatactgagttctcacaagatcctgtgtgtttgataaggggcttatgccccctttagctcaacacttcttccgtgccatcatgtgaagaaggacgtgttacgtttccccgttctgccacgattgtaagtttcctgaggccttcccagcgtatgtggaactgtgagttaattaaacctctttcctttataaattacccagtcatgggcagtccgtttacagcagcatgagaatggactaatacactcctcaaagtgttgtggacagattgttgcaccgttggaactaccagctgatgcacacaaatcgtggcgtcaatgtagtatattggcccagcaaggcaacagaactgaagcttccaggatggaaagaaccatgtgattcgtccgtcagtaacgtagtataagaactacattcaaagatagggcaccgaaggacagcagataacactgagagagcatgggacaggcacaaaggaaggaaatgccaaaagatcgagggaagatctaaccaaggacgtaagtagaggataacacaagaaggaagctggaacagggacctgatgccaggcaatgcccgatggagaacctcggagaccccaacagaatgaggggaaatactccacacagcccacccgggtgcatat

SEQ ID NO: 518062 - DNA, 136 bp, Homo sapiens
agcgtccacatcacagaagcatgcactgcatcagcctagattgtataaaaaaaacaaaaccagtgcaggaccaggtatgcagacagcctgctcactcgagagcgagtccaggctcttaacttctgacatgctgagt

SEQ ID NO: 518063 - DNA, 149 bp, Homo sapiens
tccccacaatcccacctcaggctctcttactagaatgccaagaagagtattatgagatctagcgaagtaaagttcatgtttaaaaaaacgagagcaagaacaactgagcactaccggtgtacccacaattccctggacacgaatgttca

SEQ ID NO: 518064 - DNA, 383 bp, Homo sapiens
aggagggtacaatggagcggcattaaatgtgtaatgcacagtgctactccgcttgatgcaaataacacgagtgtgtttataagtggcacttatagggtatatagcgcggttagcctgttgagagtcagtaccctcgtatttgccgtgtaggtgctagactggagtgttaaaggctcaagaaatgtcatgcagagaaaaaaccttatgaggatatacatgggctcacccagtatcggaggcctctttgcacaggtggtgtgcgggcgccttgctaagagcgttctcgtgttaccgcgcgccagccttggtataagtttagtgtttgatatagtcggcagagtatgacacgctttatgatgtcacagtatattcactctcgtgcc

SEQ ID NO: 518065 - DNA, 219 bp, Homo sapiens
taggctcggaccgtgttggctcccaggtggctgggattacaggtgctgtgcacacgcccagctaattttttgtatttttagtagaaatggggtttgttagccggtatggtactcaatctcctgagacttcgtgatccagccgcctcggcctcccaaagttctgggattacaggcttgagccactgcacctgggaggccatcacacctgggaggccatcc

SEQ ID NO: 518066 - DNA, 187 bp, Homo sapiens
acagtatacccagaatggcagaaactaggtttcccagagtggaaagagagaggagactattcaacaaacggagtatttattgagcgcctactatgtgccaggcactgttctagaccccccccagaagaaaaaacaaaaaacaagatagaggcagcaaacacaaacttctgaggagagaggaaagggg

SEQ ID NO: 518067 - DNA, 142 bp, Homo sapiens
ggccagtgtcatggctgcccagtgcacataggataatagatagatactcccccacaggtacgaacctactagacatgggtaggctatagctactatgccatgactatcactagaggctagtcatatgctagcctatgcgccc

SEQ ID NO: 518068 - DNA, 1409 bp, Homo sapiens
  misc_feature (795)..(795): n is a, c, g, or t
  misc_feature (809)..(810): n is a, c, g, or t
  misc_feature (827)..(827): n is a, c, g, or t
  misc_feature (830)..(831): n is a, c, g, or t
  misc_feature (834)..(834): n is a, c, g, or t
ctgagaactgctttttacacagatctggaagaggcattaatgagatggtatcgaatgctcagtgtctaaatgtaccagttaatggtccgatgttacgtctaaaagctaatgattttgcccagaaactgggccataatgattttaagtgcagtaatggttggctggatcgttttaaatccaggtatggtttagtattcagagctcaacctgtagaagctacaggtgtaccagtagacccttcgactgtctggtaccaaaatgtacttccttattatttaaatgattatcatcctaaaaatgtttttaatataaaagagactgggctgctttatcgaatgttacctaccaatacatttgcatttaaaggcgaaacatgttcagttggaaagttatgcaaagacagaataactctggtggttggcacaaacatggatggctcagagaaacttcctttgcttgtcattggaaaaaagagaactccacattgtttcaaaggtttaaaatcattgcctgtgtgttatgaagctaacagaatggcatggatgacctccgatgtatttgaacaatggatgcgaaagcttgatgaggaatttcaagcccagcaacgaagagtggtgattttgttgagtcttttccagcacatccagaggtaaagaacctaaaatccattgagttagcattctttccatcatgtttatcttccaaatgtatagctatgaaacaaggtgttattaaaagccttaaaatcaatatcgacactgtcttatcaagaaattttaagctctgttgaaggtngcaaagaatttacnntttcactactagatgcngtnnatncattgctcttgctggagggctgtaaccccagagactattgttaaaagctatgaagaggcaggattcaaatctcaaaagggagaaagtgacataacaaatgcagagaaggatactggtctggatttggttgctgatgctctgggggcaggagtagaatttcctgaaggtttatctatagaagaatatgctgccctggatgatgatttggagacatgtgaagcagcaccaaatggtgattccgtatgcaccaaagaaagtaaatcggatgaaactggattttacacttctgatgaagaggatgatgatggatctccaggaactgaactccctttaccatcaaaatctgaggcaataactgctttagatactctgaaaaaatttctcagaagtcaagatatgaatgacggacttcaaaattctttagcagaccttgaaaattttattaactctttatcacctaagtaactatgtattgtacatctaaagagtaatagcttttcctgatacattttattatataaggtatgtaaaggagttgtaccacaccacttaaacataaaaaatggaaaactgct

SEQ ID NO: 518069 - DNA, 733 bp, Homo sapiens
  misc_feature (378)..(378): n is a, c, g, or t
  misc_feature (380)..(380): n is a, c, g, or t
  misc_feature (427)..(427): n is a, c, g, or t
  misc_feature (440)..(440): n is a, c, g, or t
  misc_feature (448)..(449): n is a, c, g, or t
  misc_feature (493)..(493): n is a, c, g, or t
  misc_feature (501)..(502): n is a, c, g, or t
  misc_feature (504)..(505): n is a, c, g, or t
  misc_feature (520)..(520): n is a, c, g, or t
  misc_feature (537)..(537): n is a, c, g, or t
  misc_feature (551)..(551): n is a, c, g, or t
  misc_feature (554)..(554): n is a, c, g, or t
  misc_feature (562)..(562): n is a, c, g, or t
  misc_feature (575)..(575): n is a, c, g, or t
  misc_feature (595)..(595): n is a, c, g, or t
  misc_feature (607)..(607): n is a, c, g, or t
  misc_feature (615)..(615): n is a, c, g, or t
  misc_feature (622)..(622): n is a, c, g, or t
  misc_feature (628)..(628): n is a, c, g, or t
  misc_feature (631)..(631): n is a, c, g, or t
  misc_feature (634)..(634): n is a, c, g, or t
  misc_feature (637)..(637): n is a, c, g, or t
  misc_feature (643)..(643): n is a, c, g, or t
  misc_feature (649)..(649): n is a, c, g, or t
  misc_feature (653)..(653): n is a, c, g, or t
gatcccagcatctcagagtgcagtcaagttccctcctgcagcctgccccctaggcagctcgagcatgccctgagctctctgaaagttgtcgccctggaatagggtcctgcagggtagaataaaaaggcccctgtggtcacttgtcctgacatccccattttcaagtgatacaactgagtctcgagggacgtgtgttccccagctgatcgtgtcagcctcatgccccaggcctcatctttcatggaccaggccttgttccaggagtgggcgttgggtcctctgcttcctgtgctgtcccctggggaaggtcccaaggatgctgtcaggagatggaagagtcatgtggggtgggaacctggggtgtggttccagaaatgntnttggcaacaggagagacaggattgggccaacaaggactcagacgagntttattgactcanttctctgnntgatacggagccatgtcatgtgccacgacctggggtgggcacanggaggctnnannttcctgctgaacctngctgggcctatttgctnctagccacagaganagntgcccctnctgaacggccatncccagtgctccgtgcagganaggaacacccgnttgagagngtcccanccgacngcnttnttncatggntttatnaggnaaagacacccacccctcctggggtgtgaagacaaaacattgtccccctgaagggggaacccttggatattcccggggggg

SEQ ID NO: 518070 - DNA, 1173 bp, Homo sapiens
tggtttcagagggccagtagtgttgactatacattagtgggctgagatgaggagcctccaaggaagctttaggtctgggtgtttgctacacaaggaatgcatagctggacccaccttggtcatgctcttggtgcctatgaggccaagctctggccagcccagcctaggatctcacgtcaccctcctcttctaggttgggtgggtgacgtagacgactactcgctgcacgggggctgcctggtcacgcgcggcaccaagtggattgccaacaactggattaatgtggaccccagccgagcgcggcaagcgctgttccaacaggagatggcccgccttgcccgagaagggggcaccgactcacagcccgagtgggctctggaccgggcctaccgcgatgcgcgcgtggaactctgagggaagagttagccccggttcccagccgcgggtcgccagttgcccaagatcaggggtccggctgtccttctgtcctgctgcagactaaaggtctggccaatgtcttgccccaccccgccagccgcgatacggcgcagttcctatattcatgttatttattgtgtactgactccatctgccccgtcaaataaaaaaccacaaggttcgagccgccgggccgacaaaaacaaaaaacaaagaaataaaaagtatggaaaaaagtaataagacaaaaaccaagcaaagaaagttaaaaaagaaaaagaatcacaaatgcacaatagaaaacaaaaagggggggggcggggccctagataaaatattcccccggggggggccacaatgtatcggcccccgttattgttgaaagaggggcccaatagaagttgtataaaaaaaaaagcgcgcgggtgttaaacacaagtgcgtgggagaaaaccggtatttatgttattgtggaaggagaacccacactgtggggtgtggcatatgagcgcacaccctacagatgttatcgcgggggcacaaacacaagtggttggttggggcaaccccgttcattcgcggaaattgttcggttttttttattagccgtcgcttctactgacaacgacgacggagatgacaacgcgcggtacagcatgacgaccgattgaagacagacgtagactcaacaaacaaaagtaccaccgaaggcgagagagactacagtacatcaac

SEQ ID NO: 518071 - DNA, 711 bp, Homo sapiens
  misc_feature (324)..(324): n is a, c, g, or t
  misc_feature (326)..(326): n is a, c, g, or t
  misc_feature (373)..(373): n is a, c, g, or t
  misc_feature (386)..(386): n is a, c, g, or t
  misc_feature (394)..(395): n is a, c, g, or t
  misc_feature (439)..(439): n is a, c, g, or t
  misc_feature (447)..(448): n is a, c, g, or t
  misc_feature (450)..(451): n is a, c, g, or t
  misc_feature (466)..(466): n is a, c, g, or t
  misc_feature (483)..(483): n is a, c, g, or t
  misc_feature (497)..(497): n is a, c, g, or t
  misc_feature (500)..(500): n is a, c, g, or t
  misc_feature (508)..(508): n is a, c, g, or t
  misc_feature (521)..(521): n is a, c, g, or t
  misc_feature (541)..(541): n is a, c, g, or t
  misc_feature (553)..(553): n is a, c, g, or t
  misc_feature (561)..(561): n is a, c, g, or t
  misc_feature (568)..(568): n is a, c, g, or t
  misc_feature (574)..(574): n is a, c, g, or t
  misc_feature (577)..(577): n is a, c, g, or t
  misc_feature (580)..(580): n is a, c, g, or t
  misc_feature (583)..(583): n is a, c, g, or t
  misc_feature (589)..(589): n is a, c, g, or t
  misc_feature (595)..(595): n is a, c, g, or t
  misc_feature (599)..(599): n is a, c, g, or t
gatcccagcatctcagagtgcagtcaagttccctcctgcagcctgccccctaggcagctcgagcatgccctgagctctctgaaagttgtcgccctggaatagggtcctgcagggtagaatagagtctcgagggacgtgtgttccccagctgatcgtgtcagcctcatgccccaggcctcatctttcatggaccaggccttgttccaggagtgggcgttgggtcctctgcttcctgtgctgtcccctggggaaggtcccaaggatgctgtcaggagatggaagagtcatgtggggtgggaacctggggtgtggttccagaaatgntnttggcaacaggagagacaggattgggccaacaaggactcagacgagntttattgactcanttctctgnntgatacggagccatgtcatgtgccacgacctggggtgggcacanggaggctnnannttcctgctgaacctngctgggcctatttgctnctagccacagaganagntgcccctnctgaacggccatncccagtgctccgtgcagganaggaacacccgnttgagagngtcccanccgacngcnttnttncatggntttatnaggnaaagatcacagcaggcacctcctggtggttgttaagatcagagccttttgtccccttgaaggggaaatccttatgcatcattccacgtggtcagtaaaccagaacccctgcc

SEQ ID NO: 518072 - DNA, 897 bp, Homo sapiens
cgatgttacctcctcaggccggagagtggccaccactctatatgccaggctggaagccaggtcctggccatatggctcaagcttcctttggagaaccttctctggccactctaatagggggtgggcctctttcttcttagggccaaattagggcttaaactgagaaaaggaactgctctgggtcttcctgtaaggcctgatgtgacagaaaccaggttcatctgacccaaaagtccaggtgggggacaagtgtacaaggcccctcagtgcctgaggtcagggctgctgctgcctttggggtaggtagggaagtgcagcctgccactgttgcctcccaatatgggcttggtgggcattgatggtgggtgccctgtgcaggagtgctgagtctgcaggagttctccaacatggaccttcgggacttccacaagtacatgaggagccacaaggcagagtccagtgagctggtgcggaacagccaccatacctggctctaccagggtgagggtgcccaccacatcatgcgtgccatccgccagaggtgagcacctgaagctgttctcactggagcagggggagaagactgggcagggcctccacagaagtccttgtctggggccaagaggacagaatggattaacccatttgggattaagttccatttgttagaccaggattgggacccactgaaagacaggcaattaacaaaggcaaattagccctccttgcaggcacacaatgggcaactggggttagatagagattgagcacttctttctgattagataaatgacctcttatctttgaccccttatctgaccccgtcacagcaggaaaagggtttttaaataaacaactttcttccagggaggaggacctcacgactccccgacccct

SEQ ID NO: 518073 - DNA, 429 bp, Homo sapiens
gtccagcaagttgggcagacgcatctgtgtagccaatgtcgtggcatagggccatggcttggggaatgggcatgcacctcatgcagccccagggagcccctgaccctgctgtcatcccacagcatcaccagtgtcaccagcagccacagcccctgctccatcactgccttctgtgccttggccttaatgaactgaggttgagggttttatagggctgttcctgcacccagggagccaacagaggagatcctgcaggggtttgcacagctccgaggtgcccggacccacctggtgaggccccaacatgctgactgggctgtttgtttttgattagcacacagcaggggactgtagaggctggaggcacctccactgggcttgcagattactggcacctaataaactgaagaaacctggaaaaaagaacaa

SEQ ID NO: 518074 - DNA, 608 bp, Homo sapiens
  misc_feature (324)..(329): n is a, c, g, or t
  misc_feature (331)..(331): n is a, c, g, or t
  misc_feature (585)..(585): n is a, c, g, or t
catactgatgatatctttgtaaaagaacactgacatctcacgtaattctcattgtatcacacttccttcaatcccgcccatgtttaattggtcgggaccaaatattcctcgagccttccattagggcatatatacttattcatgatgctgttaccactcccagcctgctgttaccactcccagttacattattttaccgtacggtgattccttctgaaccccactcttatttgttggcctactacatgccactcaagagggattcaaagatgagtgcgtggtcccggaagatgcagatgtggggtaccacagagaaagtgattnnnnnncnctagcggggaacaatcacttagttcaagtgattgttcaagtgattgttcaagtgattgttcaagtgattgttcaagtgattgttcaagtgattgttcaagtgattgttcaagtgatggttcaagtgatggttcaagtgattgttcaagtgattgttcaagtgattgttcaagtgattgttcaagtgattgttcaagtgattgttcaagtgattgttcaagtgattgttcaagtgattgttcaagtgattgttcnggatcctcagagtcaccgcagca

SEQ ID NO: 518075 - DNA, 427 bp, Homo sapiens
aatgcagcggactcggcacgtctcctcttcctgctccaatctgtagttctcgagctcctgaagaaatctcatccattaattcctgggagttctgttatgtaagacacagcttatcaaattgcatcattgatgagcttcacaacattggtaccatcagcagccgagacgaattacaggggccgggagaacttcttggcacatttgaatctttttttgggtcacgtttatgtctgcatcaattttattggccaccacgtatgcatgggatctctggcctgaactccctaatctctgtctaccatgtgctcaggttcctataggtgactttcctctgtacatcaaacaccatgatgcatgcgtgggccttgtggtactaggaggcatgcttgctctggaaccgctcctggcctgccgattccgctgcatt

SEQ ID NO: 518076 - DNA, 2878 bp, Homo sapiens
  misc_feature (1)..(1): n is a, c, g, or t
nagcaggctggtaccggccccaagtcttatgatcacccccgctcctggagcacgaagatgcagacgatacttttcccggaggcaagagggcgtcttcacgcaggcaccgagaagctcccactagtgtatgccttaatggtgccgctcttgtccgcgtctacgcttgggaccttggcttctgacttggagagtgtacagctctgcccgacggcaacccagcttgggaagagaagccccagcgtgggctggggctcaaggcgcaggaaggccgagcccggcgcggacgcaggcggctccgggcgggctcagcacccccaggcaccgtctcctagtgaccgcggcgctcgcgggcctggcggccgttgtccgggcgactgcgcacgcgggcacccccgcggcccctcccctgggcgcgcgcgcgacctgggtgccatggcggcagcggcggtgacaggccagcggctgagaccgcggcggccgaggaggcctcgaggccgcagtgggcgccgccagaccactgccaggctcaggcggcggccgggctgggcgacggcgaggacgcaccggtgcgtccgctgtgcaagccccgcggcatctgctcgcgcgcctacttcctggtgctgatggtgttcgtgcacctgtacctgggtaacgtgctggcgctgctgctcttcgtgcactacagcaacggcgacgaaagcagcgatcccgggccccaacaccgtgcccagggccccgggcccgagcccaccttaggtcccctcacccggctggagggcatcaaggtggggcacgagcgtaaggtccagctggtcaccgacagggatcacttcatccgaaccctcagcctcaagccgctgctcttcgaaatccccggcttcctgactgatgaagagtgtcggctcatcatccatctggcgcagatgaaggggttacagcgcagccagatcctgcctactgaagagtatgaagaggcaatgagcactatgcaggtcagccagctggacctcttccggctgctggaccagaaccgtgatgggcaccttcagctccgtgaggttctggcccagactcgcctgggaaatggatggtggatgactccagagagcattcaggagatgtacgccgcgatcaaggctgaccctgatggtgacggagtgctgagtctgcaggagttctccaacatggaccttcgggacttccacaagtacatgaggagccacaaggcagagtccagtgagctggtgcggaacagccaccatacctggctctaccagggtgagggtgcccaccacatcatgcgtgccatccgccagagggtgctgcgcctcactcgcctgtcgcctgagatcgtggagctcagcgagccgctgcaggttgttcgatatggtgaggggggccactaccatgcccacgtggacagtgggcctgtgtacccagagaccatctgctcccataccaagctggtagccaacgagtctgtacccttcgagacctcctgccggcaagtatctcccaactgggggctgccttcaatcctcagaccaggaacacccatgacacaggcacagccctgcactgtgggcgtgccccttggcatggggccaggagatcactgggttatcccggttagtgatgccctcacctctccccacaagttgtttacccaatggctggaaaggggtggctactggtcatcgtgaccactggagtcaacacagactgatgtacccacagacaccaaaacttgccccctgagttctgaagcaaggggcaaggctgggcccctagcttgtcctgcccattcctccaggtgttgatcttgattccacttagagaagctgaagctgtgcctccctcccctgtcaagccagttctttcctcttcaggtggctgttctggcccagccccttcccatccccaaggagcccttcagcgcgccctgttgcttctgctagcctacctttccctgccaggcccttgctcagggccatggcatttaactaagtgcacctgtgatcttggccaaaaaaccattgcaactcacagtaagagactgggtttcggggaaggaggggctagggacattttggcactggcctgccctattgtctcccatcctagtctgtcctggtccctggcaacaggaacctgggcagcttatcctgcccacaggtaagcccctgggagcatccacaactggggacctgctcagtgccccccctgccttacagctacatgacagtgctgttttatttgaacaacgtcactggtgggggcgagactgttttccctgtagcagataacagaacctacgatgaaatgagtctgattcaggatgacgtggacctccgtgacacacggaggcactgtgacaagggaaacctgcgtgtcaagccccaacagggcacagcagtcttctggtacaactacctgcctgatgggcaaggttgggtgggtgacgtagacgactactcgctgcacgggggctgcctggtcacgcgcggcaccaagtggattgccaacaactggattaatgtggaccccagccgagcgcggcaagcgctgttccaacaggagatggcccgccttgcccgagaagggggcaccgactcacagcccgagtgggctctggaccgggcctaccgcgatgcgcgcgtggaactctgagggaagagttagccccggttcccagccgcgggtcgccagttgcccaagatcaggggtccggctgtccttctgtcctgctgcagactaaaggtctggccaatgtcttgccccaccccgccagccgcgatacggcgcagttcctatattcatgttatttattgtgtactgactccatctgccccgtcaaataaaaaaccacaaggttcga

SEQ ID NO: 518077 - DNA, 168 bp, Homo sapiens
  misc_feature (145)..(145): n is a, c, g, or t
tacagaattgcgagcacaggtacccagcggggaacaatcacttagttcaagtgattgttcaagtgattgttcaagtgattgttcaagtgattgttcaagtgattgttcaagtgattgttcaagtgattgttcaagtgattgttcnggatcctcagagtcaccgcagca

SEQ ID NO: 518078 - DNA, 2148 bp, Homo sapiens
  misc_feature (1)..(1): n is a, c, g, or t
nagcaggctggtaccggccccaagtcttatgatcacccccgctcctggagcacgaagatgcagacgatacttttcccggaggcaagagggcgtcttcacgcaggcaccgagaagctcccactagtgtatgccttaatggtgccgctcttgtccgcgtctacgcttgggaccttggcttctgacttggagagtgtacagctctgcccgacggcaacccagcttgggaagagaagccccagcgtgggctggggctcaaggcgcaggaaggccgagcccggcgcggacgcaggcggctccgggcgggctcagcacccccaggcaccgtctcctagtgaccgcggcgctcgcgggcctggcggccgttgtccgggcgactgcgcacgcgggcacccccgcggcccctcccctgggcgcgcgcgcgacctgggtgccatggcggcagcggcggtgacaggccagcggctgagaccgcggcggccgaggaggcctcgaggccgcagtgggcgccgccagaccactgccaggctcaggcggcggccgggctgggcgacggcgaggacgcaccggtgcgtccgctgtgcaagccccgcggcatctgctcgcgcgcctacttcctggtgctgatggtgttcgtgcacctgtacctgggtaacgtgctggcgctgctgctcttcgtgcactacagcaacggcgacgaaagcagcgatcccgggccccaacaccgtgcccagggccccgggcccgagcccaccttaggtcccctcacccggctggagggcatcaaggtggggcacgagcgtaaggtccagctggtcaccgacagggatcacttcatccgaaccctcagcctcaagccgctgctcttcgaaatccccggcttcctgactgatgaagagtgtcggctcatcatccatctggcgcagatgaaggggttacagcgcagccagatcctgcctactgaagagtatgaagaggcaatgagcactatgcaggtcagccagctggacctcttccggctgctggaccagaaccgtgatgggcaccttcagctccgtgaggttctggcccagactcgcctgggaaatggatggtggatgactccagagagcattcaggagatgtacgccgcgatcaaggctgaccctgatggtgacggagtgctgagtctgcaggagttctccaacatggaccttcgggacttccacaagtacatgaggagccacaaggcagagtccagtgagctggtgcggaacagccaccatacctggctctaccagggtgagggtgcccaccacatcatgcgtgccatccgccagagggtgctgcgcctcactcgcctgtcgcctgagatcgtggagctcagcgagccgctgcaggttgttcgatatggtgaggggggccactaccatgcccacgtggacagtgggcctgtgtacccagagaccatctgctcccataccaagctggtagccaacgagtctgtacccttcgagacctcctgccgctacatgacagtgctgttttatttgaacaacgtcactggtgggggcgagactgttttccctgtagcagataacagaacctacgatgaaatgagtctgattcaggatgacgtggacctccgtgacacacggaggcactgtgacaagggaaacctgcgtgtcaagccccaacagggcacagcagtcttctggtacaactacctgcctgatgggcaaggttgggtgggtgacgtagacgactactcgctgcacgggggctgcctggtcacgcgcggcaccaagtggattgccaacaactggattaatgtggaccccagccgagcgcggcaagcgctgttccaacaggagatggcccgccttgcccgagaagggggcaccgactcacagcccgagtgggctctggaccgggcctaccgcgatgcgcgcgtggaactctgagggaagagttagccccggttcccagccgcgggtcgccagttgcccaagatcaggggtccggctgtccttctgtcctgctgcagactaaaggtctggccaatgtcttgccccaccccgccagccgcgatacggcgcagttcctatattcatgttatttattgtgtactgactccatctgccccgtcaaataaaaaaccacaaggttcga

SEQ ID NO: 518079 - DNA, 524 bp, Homo sapiens
  misc_feature (324)..(329): n is a, c, g, or t
  misc_feature (331)..(331): n is a, c, g, or t
  misc_feature (492)..(492): n is a, c, g, or t
  misc_feature (512)..(512): n is a, c, g, or t
catactgatgatatctttgtaaaagaacactgacatctcacgtaattctcattgtatcacacttccttcaatcccgcccatgtttaattggtcgggaccaaatattcctcgagccttccattagggcatatatacttattcatgatgctgttaccactcccagcctgctgttaccactcccagttacattattttaccgtacggtgattccttctgaaccccactcttatttgttggcctactacatgccactcaagagggattcaaagatgagtgcgtggtcccggaagatgcagatgtggggtaccacagagaaagtgattnnnnnncnctagcggggaacaatcacttagttcaagtgattgttcaagtgattgttcaagtgattgttcaagtgattgttcaagtgattgttcaagtgattgttcaagtgattgttcaagtgatggttcaagtgatggttcaagtgattgttcaagtgattgttccccnctgggatccttagatcaccncagcacagcatg

SEQ ID NO: 518080 - DNA, 2331 bp, Homo sapiens
  misc_feature (1)..(1): n is a, c, g, or t
nagcaggctggtaccggccccaagtcttatgatcacccccgctcctggagcacgaagatgcagacgatacttttcccggaggcaagagggcgtcttcacgcaggcaccgagaagctcccactagtgtatgccttaatggtgccgctcttgtccgcgtctacgcttgggaccttggcttctgacttggagagtgtacagctctgcccgacggcaacccagcttgggaagagaagccccagcgtgggctggggctcaaggcgcaggaaggccgagcccggcgcggacgcaggcggctccgggcgggctcagcacccccaggcaccgtctcctagtgaccgcggcgctcgcgggcctggcggccgttgtccgggcgactgcgcacgcgggcacccccgcggcccctcccctgggcgcgcgcgcgacctgggtgccatggcggcagcggcggtgacaggccagcggctgagaccgcggcggccgaggaggcctcgaggccgcagtgggcgccgccagaccactgccaggctcaggcggcggccgggctgggcgacggcgaggacgcaccggtgcgtccgctgtgcaagccccgcggcatctgctcgcgcgcctacttcctggtgctgatggtgttcgtgcacctgtacctgggtaacgtgctggcgctgctgctcttcgtgcactacagcaacggcgacgaaagcagcgatcccgggccccaacaccgtgcccagggccccgggcccgagcccaccttaggtcccctcacccggctggagggcatcaaggtggggcacgagcgtaaggtccagctggtcaccgacagggatcacttcatccgaaccctcagcctcaagccgctgctcttcgaaatccccggcttcctgactgatgaagagtgtcggctcatcatccatctggcgcagatgaaggggttacagcgcagccagatcctgcctactgaagagtatgaagaggcaatgagcactatgcaggtcagccagctggacctcttccggctgctggaccagaaccgtgatgggcaccttcagctccgtgaggttctggcccagactcgcctgggaaatggatggtggatgactccagagagcattcaggagatgtacgccgcgatcaaggctgaccctgatggtgacggagtgctgagtctgcaggagttctccaacatggaccttcgggacttccacaagtacatgaggagccacaaggcagagtccagtgagctggtgcggaacagccaccatacctggctctaccagggtgagggtgcccaccacatcatgcgtgccatccgccagagggtgctgcgcctcactcgcctgtcgcctgagatcgtggagctcagcgagccgctgcaggttgttcgatatggtgaggggggccactaccatgcccacgtggacagtgggcctgtgtacccagagaccatctgctcccataccaagctggtagccaacgagtctgtacccttcgagacctcctgccggcaagtatctcccaactgggggctgccttcaatcctcagaccaggaacacccatgacacaggcacagccctgcactgtgggcgtgccccttggcatggggccaggagatcactgggttatcccggtaagcccctgggagcatccacaactggggacctgctcagtgccccccctgccttacagctacatgacagtgctgttttatttgaacaacgtcactggtgggggcgagactgttttccctgtagcagataacagaacctacgatgaaatgagtctgattcaggatgacgtggacctccgtgacacacggaggcactgtgacaagggaaacctgcgtgtcaagccccaacagggcacagcagtcttctggtacaactacctgcctgatgggcaaggttgggtgggtgacgtagacgactactcgctgcacgggggctgcctggtcacgcgcggcaccaagtggattgccaacaactggattaatgtggaccccagccgagcgcggcaagcgctgttccaacaggagatggcccgccttgcccgagaagggggcaccgactcacagcccgagtgggctctggaccgggcctaccgcgatgcgcgcgtggaactctgagggaagagttagccccggttcccagccgcgggtcgccagttgcccaagatcaggggtccggctgtccttctgtcctgctgcagactaaaggtctggccaatgtcttgccccaccccgccagccgcgatacggcgcagttcctatattcatgttatttattgtgtactgactccatctgccccgtcaaataaaaaaccacaaggttcga

SEQ ID NO: 518081 - DNA, 204 bp, Homo sapiens
tgactcaagtcaggaggaagtaagtgcatagcaggggtgaacacctctcccccattcactcccagcttttcaagggtgggcagtggggaagtcgggaatgtggaccacatgccattatgcaactggtgttcagttttaatgcatatttaaacagaataaaatccccactcaatagcacttgaaaggaaagagtgacttgtaaac

SEQ ID NO: 518082 - DNA, 2191 bp, Homo sapiens
  misc_feature (1)..(1): n is a, c, g, or t
nagcaggctggtaccggccccaagtcttatgatcacccccgctcctggagcacgaagatgcagacgatacttttcccggaggcaagagggcgtcttcacgcaggcaccgagaagctcccactagtgtatgccttaatggtgccgctcttgtccgcgtctacgcttgggaccttggcttctgacttggagagtgtacagctctgcccgacggcaacccagcttgggaagagaagccccagcgtgggctggggctcaaggcgcaggaaggccgagcccggcgcggacgcaggcggctccgggcgggctcagcacccccaggcaccgtctcctagtgaccgcggcgctcgcgggcctggcggccgttgtccgggcgactgcgcacgcgggcacccccgcggcccctcccctgggcgcgcgcgcgacctgggtgccatggcggcagcggcggtgacaggccagcggctgagaccgcggcggccgaggaggcctcgaggccgcagtgggcgccgccagaccactgccaggctcaggcggcggccgggctgggcgacggcgaggacgcaccggtgcgtccgctgtgcaagccccgcggcatctgctcgcgcgcctacttcctggtgctgatggtgttcgtgcacctgtacctgggtaacgtgctggcgctgctgctcttcgtgcactacagcaacggcgacgaaagcagcgatcccgggccccaacaccgtgcccagggccccgggcccgagcccaccttaggtcccctcacccggctggagggcatcaaggtggggcacgagcgtaaggtccagctggtcaccgacagggatcacttcatccgaaccctcagcctcaagccgctgctcttcgaaatccccggcttcctgactgatgaagagtgtcggctcatcatccatctggcgcagatgaaggggttacagcgcagccagatcctgcctactgaagagtatgaagaggcaatgagcactatgcaggtcagccagctggacctcttccggctgctggaccagaaccgtgatgggcaccttcagctccgtgaggttctggcccagactcgcctgggaaatggatggtggatgactccagagagcattcaggagatgtacgccgcgatcaaggctgaccctgatggtgacggagtgctgagtctgcaggagttctccaacatggaccttcgggacttccacaagtacatgaggagccacaaggcagagtccagtgagctggtgcggaacagccaccatacctggctctaccagggtgagggtgcccaccacatcatgcgtgccatccgccagagggtgctgcgcctcactcgcctgtcgcctgagatcgtggagctcagcgagccgctgcaggttgttcgatatggtgaggggggccactaccatgcccacgtggacagtgggcctgtgtacccagagaccatctgctcccataccaagctggtagccaacgagtctgtacccttcgagacctcctgccgctacatgacagtgctgttttatttgaacaacgtcactggtgggggcgagactgttttccctgtagcagataacagaacctacgatgaaatgagtctgattcaggatgacgtggacctccgtgacacacggaggcactgtgacaagggaaacctgcgtgtcaagccccaacagggcacagcagtcttctggtacaactacctgcctgatgggcaaggttgggtgggtgacgtagacgactactcgctgcacgggggctgcctggtcacgcgcggcaccaagtggattgccaacaactggattaatgtggaccccagccgagcgcggcaagcgctgttccaacaggagatggcccgccttgcccgagaagggggcaccgactcacagcccgagtgggctctggaccgggcctaccgcgatgcgcgcgtggaactctgagggaagagttagccccggttcccagccgcgggtcgccagttgcccaagatcaggggtccggctgtccttctgtcctgctgcagactaaaggtctggccaatgtcttgccccaccccgccagccgcgatacggcgcagttcctatattcatgttatttattgtgtactgactccatctgccccgtcaaataaaaaaccacaaggttcgagccgccgggcccgacaaactccgggtcggcgaaacagagaaaa

SEQ ID NO: 518083 - DNA, 153 bp, Homo sapiens
ccccttcgctgtggactcagagtacactgcttggagaagctgacaaaatccacacagtctgttctctgaactttcctcccctggggcagcctcactacccatgtgacccattgtcctacattacgcctgaggaacacctggtagtatggagaa

SEQ ID NO: 518084 - DNA, 3074 bp, Homo sapiens
  misc_feature (1)..(1): n is a, c, g, or t
nagcaggctggtaccggccccaagtcttatgatcacccccgctcctggagcacgaagatgcagacgatacttttcccggaggcaagagggcgtcttcacgcaggcaccgagaagctcccactagtgtatgccttaatggtgccgctcttgtccgcgtctacgcttgggaccttggcttctgacttggagagtgtacagctctgcccgacggcaacccagcttgggaagagaagccccagcgtgggctggggctcaaggcgcaggaaggccgagcccggcgcggacgcaggcggctccgggcgggctcagcacccccaggcaccgtctcctagtgaccgcggcgctcgcgggcctggcggccgttgtccgggcgactgcgcacgcgggcacccccgcggcccctcccctgggcgcgcgcgcgacctgggtgccatggcggcagcggcggtgacaggccagcggctgagaccgcggcggccgaggaggcctcgaggccgcagtgggcgccgccagaccactgccaggctcaggcggcggccgggctgggcgacggcgaggacgcaccggtgcgtccgctgtgcaagccccgcggcatctgctcgcgcgcctacttcctggtgctgatggtgttcgtgcacctgtacctgggtaacgtgctggcgctgctgctcttcgtgcactacagcaacggcgacgaaagcagcgatcccgggccccaacaccgtgcccagggccccgggcccgagcccaccttaggtcccctcacccggctggagggcatcaaggtggggcacgagcgtaaggtccagctggtcaccgacagggatcacttcatccgaaccctcagcctcaagccgctgctcttcgaaatccccggcttcctgactgatgaagagtgtcggctcatcatccatctggcgcagatgaaggggttacagcgcagccagatcctgcctactgaagagtatgaagaggcaatgagcactatgcaggtcagccagctggacctcttccggctgctggaccagaaccgtgatgggcaccttcagctccgtgaggttctggcccagactcgcctgggaaatggatggtggatgactccagagagcattcaggagatgtacgccgcgatcaaggctgaccctgatggtgacggagtgctgagtctgcaggagttctccaacatggaccttcgggacttccacaagtacatgaggagccacaaggcagagtccagtgagctggtgcggaacagccaccatacctggctctaccagggtgagggtgcccaccacatcatgcgtgccatccgccagagggtgctgcgcctcactcgcctgtcgcctgagatcgtggagctcagcgagccgctgcaggttgttcgatatggtgaggggggccactaccatgcccacgtggacagtgggcctgtgtacccagagaccatctgctcccataccaagctggtagccaacgagtctgtacccttcgagacctcctgccggcaagtatctcccaactgggggctgccttcaatcctcagaccaggaacacccatgacacaggcacagccctgcactgtgggcgtgccccttggcatggggccaggagatcactgggttatcccggttagtgatgccctcacctctccccacaagttgtttacccaatggctggaaaggggtggctactggtcatcgtgaccactggagtcaacacagactgatgtacccacagacaccaaaacttgccccctgagttctgaagcaaggggcaaggctgggcccctagcttgtcctgcccattcctccaggtgttgatcttgattccacttagagaagctgaagctgtgcctccctcccctgtcaagccagttctttcctcttcaggtggctgttctggcccagccccttcccatccccaaggagcccttcagcgcgccctgttgcttctgctagcctacctttccctgccaggcccttgctcagggccatggcatttaactaagtgcacctgtgatcttggccaaaaaaccattgcaactcacagtaagagactgggtttcggggaaggaggggctagggacattttggcactggcctgccctattgtctcccatcctagtctgtcctggtccctggcaacaggaacctgggcagcttatcctgcccacaggtaagcccctgggagcatccacaactggggacctgctcagtgccccccctgccttacagctacatgacagtgctgttttatttgaacaacgtcactggtgggggcgagactgttttccctgtagcagataacagaacctacgatgaaatggtaagggtcaactgggctattactcttgtgggctggcaggggcttagacaagtgaagtacacacctctccaggtctaaggatgtgggcccaaattattccttgggcatatctggttggtttccctttggtcacccttggctggcctggccatagagtggggacaggttgaacaccccaccaccctgctgcccacagagtctgattcaggatgacgtggacctccgtgacacacggaggcactgtgacaagggaaacctgcgtgtcaagccccaacagggcacagcagtcttctggtacaactacctgcctgatgggcaaggttgggtgggtgacgtagacgactactcgctgcacgggggctgcctggtcacgcgcggcaccaagtggattgccaacaactggattaatgtggaccccagccgagcgcggcaagcgctgttccaacaggagatggcccgccttgcccgagaagggggcaccgactcacagcccgagtgggctctggaccgggcctaccgcgatgcgcgcgtggaactctgagggaagagttagccccggttcccagccgcgggtcgccagttgcccaagatcaggggtccggctgtccttctgtcctgctgcagactaaaggtctggccaatgtcttgccccaccccgccagccgcgatacggcgcagttcctatattcatgttatttattgtgtactgactccatctgccccgtcaaataaaaaaccacaaggttcga

SEQ ID NO: 518085 - DNA, 132 bp, Homo sapiens
gatttgaaaagccttcgctttgaagcgaaaagtcctaatagtaaaagaaccctccataaacctggagtggctatatggatgcccccccccctaccccccatttgaagaacccgtatacataaaatttagaca

SEQ ID NO: 518086 - DNA, 2699 bp, Homo sapiens
  misc_feature (1)..(1): n is a, c, g, or t
nagcaggctggtaccggccccaagtcttatgatcacccccgctcctggagcacgaagatgcagacgatacttttcccggaggcaagagggcgtcttcacgcaggcaccgagaagctcccactagtgtatgccttaatggtgccgctcttgtccgcgtctacgcttgggaccttggcttctgacttggagagtgtacagctctgcccgacggcaacccagcttgggaagagaagccccagcgtgggctggggctcaaggcgcaggaaggccgagcccggcgcggacgcaggcggctccgggcgggctcagcacccccaggcaccgtctcctagtgaccgcggcgctcgcgggcctggcggccgttgtccgggcgactgcgcacgcgggcacccccgcggcccctcccctgggcgcgcgcgcgacctgggtgccatggcggcagcggcggtgacaggccagcggctgagaccgcggcggccgaggaggcctcgaggccgcagtgggcgccgccagaccactgccaggctcaggcggcggccgggctgggcgacggcgaggacgcaccggtgcgtccgctgtgcaagccccgcggcatctgctcgcgcgcctacttcctggtgctgatggtgttcgtgcacctgtacctgggtaacgtgctggcgctgctgctcttcgtgcactacagcaacggcgacgaaagcagcgatcccgggccccaacaccgtgcccagggccccgggcccgagcccaccttaggtcccctcacccggctggagggcatcaaggtggggcacgagcgtaaggtccagctggtcaccgacagggatcacttcatccgaaccctcagcctcaagccgctgctcttcgaaatccccggcttcctgactgatgaagagtgtcggctcatcatccatctggcgcagatgaaggggttacagcgcagccagatcctgcctactgaagagtatgaagaggcaatgagcactatgcaggtcagccagctggacctcttccggctgctggaccagaaccgtgatgggcaccttcagctccgtgaggttctggcccagactcgcctgggaaatggatggtggatgactccagagagcattcaggagatgtacgccgcgatcaaggctgaccctgatggtgacggagtgctgagtctgcaggagttctccaacatggaccttcgggacttccacaagtacatgaggagccacaaggcagagtccagtgagctggtgcggaacagccaccatacctggctctaccagggtgagggtgcccaccacatcatgcgtgccatccgccagagggtgctgcgcctcactcgcctgtcgcctgagatcgtggagctcagcgagccgctgcaggttgttcgatatggtgaggggggccactaccatgcccacgtggacagtgggcctgtgtacccagagaccatctgctcccataccaagctggtagccaacgagtctgtacccttcgagacctcctgccgctacatgacagtgctgttttatttgaacaacgtcactggtgggggcgagactgttttccctgtagcagataacagaacctacgatgaaatgagtctgattcaggatgacgtggacctccgtgacacacggaggcactgtgacaagggaaacctgcgtgtcaagccccaacagggcacagcagtcttctggtacaactacctgcctgatgggcaaggttgggtgggtgacgtagacgactactcgctgcacgggggctgcctggtcacgcgcggcaccaagtggattgccaacaactggattaatgtggaccccagccgagcgcggcaagcgctgttccaacaggagatggcccgccttgcccgagaagggggcaccgactcacagcccgagtgggctctggaccgggcctaccgcgatgcgcgcgtggaactctgagggaagagttagccccggttcccagccgcgggtcgccagttgcccaagatcaggggtccggctgtccttctgtcctgctgcagactaaaggtctggccaatgtcttgccccaccccgccagccgcgatacggcgcagttcctatattcatgttatttattgtgtactgactccatctgccccgtcaaataaaaaaccacaaggttcgagccgccgggccgacaaaaacaaaaaacaaagaaataaaaagtatggaaaaaagtaataagacaaaaaccaagcaaagaaagttaaaaaagaaaaagaatcacaaatgcacaatagaaaacaaaaagggggggggcggggccctagataaaatattcccccggggggggccacaatgtatcggcccccgttattgttgaaagaggggcccaatagaagttgtataaaaaaaaaagcgcgcgggtgttaaacacaagtgcgtgggagaaaaccggtatttatgttattgtggaaggagaacccacactgtggggtgtggcatatgagcgcacaccctacagatgttatcgcgggggcacaaacacaagtggttggttggggcaaccccgttcattcgcggaaattgttcggttttttttattagccgtcgcttctactgacaacgacgacggagatgacaacgcgcggtacagcatgacgaccgattgaagacagacgtagactcaacaaacaaaagtaccaccgaaggcgagagagactacagtacatcaac

SEQ ID NO: 518087 - DNA, 2556 bp, Homo sapiens
  misc_feature (1)..(1): n is a, c, g, or t
nagcaggctggtaccggccccaagtcttatgatcacccccgctcctggagcacgaagatgcagacgatacttttcccggaggcaagagggcgtcttcacgcaggcaccgagaagctcccactagtgtatgccttaatggtgccgctcttgtccgcgtctacgcttgggaccttggcttctgacttggagagtgtacagctctgcccgacggcaacccagcttgggaagagaagccccagcgtgggctggggctcaaggcgcaggaaggccgagcccggcgcggacgcaggcggctccgggcgggctcagcacccccaggcaccgtctcctagtgaccgcggcgctcgcgggcctggcggccgttgtccgggcgactgcgcacgcgggcacccccgcggcccctcccctgggcgcgcgcgcgacctgggtgccatggcggcagcggcggtgacaggccagcggctgagaccgcggcggccgaggaggcctcgaggccgcagtgggcgccgccagaccactgccaggctcaggcggcggccgggctgggcgacggcgaggacgcaccggtgcgtccgctgtgcaagccccgcggcatctgctcgcgcgcctacttcctggtgctgatggtgttcgtgcacctgtacctgggtaacgtgctggcgctgctgctcttcgtgcactacagcaacggcgacgaaagcagcgatcccgggccccaacaccgtgcccagggccccgggcccgagcccaccttaggtcccctcacccggctggagggcatcaaggtggggcacgagcgtaaggtccagctggtcaccgacagggatcacttcatccgaaccctcagcctcaagccgctgctcttcgaaatccccggcttcctgactgatgaagagtgtcggctcatcatccatctggcgcagatgaaggggttacagcgcagccagatcctgcctactgaagagtatgaagaggcaatgagcactatgcaggtcagccagctggacctcttccggctgctggaccagaaccgtgatgggcaccttcagctccgtgaggttctggcccagactcgcctgggaaatggatggtggatgactccagagagcattcaggagatgtacgccgcgatcaaggctgaccctgatggtgacggagtgctgagtctgcaggagttctccaacatggaccttcgggacttccacaagtacatgaggagccacaaggcagagtccagtgagctggtgcggaacagccaccatacctggctctaccagggtgagggtgcccaccacatcatgcgtgccatccgccagagggtgctgcgcctcactcgcctgtcgcctgagatcgtggagctcagcgagccgctgcaggttgttcgatatggtgaggggggccactaccatgcccacgtggacagtgggcctgtgtacccagagaccatctgctcccataccaagctggtagccaacgagtctgtacccttcgagacctcctgccgctacatgacagtgctgttttatttgaacaacgtcactggtgggggcgagactgttttccctgtagcagataacagaacctacgatgaaatgagtctgattcaggatgacgtggacctccgtgacacacggaggcactgtgacaagggaaacctgcgtgtcaagccccaacagggcacagcagtcttctggtacaactacctgcctgatgggcaaggttgggtgggtgacgtagacgactactcgctgcacgggggctgcctggtcacgcgcggcaccaagtggattgccaacaactggattaatgtggaccccagccgagcgcggcaagcgctgttccaacaggagatggcccgccttgcccgagaagggggcaccgactcacagcccgagtgggctctggaccgggcctaccgcgatgcgcgcgtggaactctgagggaagagttagccccggttcccagccgcgggtcgccagttgcccaagatcaggggtccggctgtccttctgtcctgctgcagactaaaggtctggccaatgtcttgccccaccccgccagccgcgatacggcgcagttcctatattcatgttatttattgtgtactgactccatctgccccgtcaaataaaaaaccacaaggttcgaaaaaaaaaaaagaaagcaacaaaaaaaaaaaaaaaaaaaaagaagagggggggcggcgccggcgccaaacccccccggggggcggcgcctccccccccccccttaaaaggggggccgccccggggggtatccacactatatactagagcaagcagcacgccgcggcggttctaacacaacacgcggcggggcagaggaacaccaaacacttctagtcggggcgtgccatgcgagcagaaggcccccccccccccggggcgggagataaaacgacgcgaggcgccaacacccaacaagaattgcggccccggggggaaaaacaccctactccgcggggcggtgactgataacaacagcccactcactgtctcgaacaaaaactctccggcaacatagacacaaatattg

SEQ ID NO: 518088 - DNA, 103 bp, Homo sapiens
cataatgcccctcatccaggtgcccactctaggcactcactcaaacttgcacttcaactctgtatagaagcagaatgcaataaaccaatctgtcaatcataaa

SEQ ID NO: 518089 - DNA, 489 bp, Homo sapiens
  misc_feature (354)..(354): n is a, c, g, or t
tggcatcactgtcagtgtatgactggatgatggatagggatacataatcaggatgtcaatactgtgctcttacacatgaatcacatgaaactttttgtttctaaacatgaaaacacggctaagtcccctggcggggggaaaaaaacagccccacagaccagctgtgctaactttcgatagctgttgacttgtaattatccagactcacaaaattttcgtctttctcaaatttattttaacaatagtctcaccaccaaaatgttgcttttccatcatattcataacagagatactgtagaacgagaattttagcaggttaaggtgtaacatatatatcacgcacacatacaaccnctcacattttattaaaacgttttctcaaccattctgtcagtgtatgcccggaccgagggggcagagggaacacaaacacgggggtctcatacagtgcgcctcacacatgagtcacacgtgacccctttgtgtctc

SEQ ID NO: 518090 - DNA, 254 bp, Homo sapiens
tcgctcacttcgggaggctagaggtgtatggatcacttagtccaggagttcaagaccacgcctgggctacataggtgagacccccccatagtctactgagaaagtaacgaggactaaccattagccatggcatgcgtgagcatgcacctgatagtacccaggctactagtgggaggctagacggcaggcagtgatcgcttaaggcctggcgcagtacgaggactgcagtagaggttcgaccgctggctaagtag

SEQ ID NO: 518091 - DNA, 545 bp, Homo sapiens
  misc_feature (507)..(507): n is a, c, g, or t
  misc_feature (545)..(545): n is a, c, g, or t
ggacgcgtgggttaatttaaggacaaagatgaagtcactgtaaactaacctttgctcttgagagcagaagagggatagacaggtgaacatcatagcaatgatggtgaaacggatgcaccgaggagcaccgtcggtcttgtcccgtcgttcgtgatcttcaatgagtcaactggttgagcttgtaaaggcacaacacgtatgcacacgtcgacatgtagaagcataaatcctgttcagtatgctgctttacccgtatcacttatgtccttgtatgtacagtagcatgaaaaattatcaataagtcatacgtatactaaagagacagcgggtgaatatagagagaagtagtatgtgtgttagcggtagttgtcaagagaaatccaacctgggttaagaggtgttctcgggctggaatgaaacgaagttcactttacgcgcctatgcgagcgtatagtagaaggaagaggcgactctttgaagcggcgtgttaaaggaagaatataagcnctgtagaggacaacaggtacagtctaggaggattatan

SEQ ID NO: 518092 - DNA, 258 bp, Homo sapiens
cgtagagtatcacataggtggatagaagtaggtggtaggattaacaccttggtatcagagacataacgccagtaataattatataccatacatcatcctagtgacaagcactggcaagtctaggcagcggtgaaatgatgaaggcaatctggccacacatcttccttctggctcctgctcttcagggcatgcatctcccatgctgaaggctaacaatgggggtcattcgccaacaaattagagagtccgcttctccct

SEQ ID NO: 518093 - DNA, 418 bp, Homo sapiens
ttgagtcagcagtttttaggaactgaaactacatttaattagtagaagttggaatgataaaatatttacaggccgggcgggtggttcaagcccttatcccagcactggacaggccgaggggagcagattacttgaggtcaggagttggggaccagcgtggccaacacggagaaaccccctctctgctagaaatacaaaattagctgggtgggggtgcctgtagtcccagctactcgggaggctgaggcgggaaaatcaccctgaacgcagaaggcggaggttgcgatgagctgagaagcgccattcactccagcatgggtgacagagcgagactcctctcaaaaaaaaaatttccaacggggtgaatttcaggaaaaaaattaaaatctgtgtctgacattccacttgttaaacaatc

SEQ ID NO: 518094 - DNA, 1497 bp, Homo sapiens
  misc_feature (1)..(1): n is a, c, g, or t
  misc_feature (509)..(509): n is a, c, g, or t
  misc_feature (1210)..(1210): n is a, c, g, or t
  misc_feature (1443)..(1443): n is a, c, g, or t
ngcacccccctcccttctgctgtggttggcgtgtgcgtgctaataccaaagggacgttctttttttgttgagcgcccctctctcagagtttgctccctcctgctgtgcggagcccccgccactcgtctccccacgcccgctggtgtttggtgacgccgccccccctatttgagagtgaaccaccccccggtgggtcgctgtgtgtttcctacgcccttctcccggaggcttttttaagccccttattgggcccccccgctcggccgttcccgggtgatttataaccacaaggtggtggtcgccgcgccccccacccgcgggtaccacacgcggctgtgtgtggtgcgcccccactccttatggggccccccctcatattatttaatgggtgggggacaccccacctctttttgggggacccaccaagctggtgttgttgagcacaccacaacagtacgctcacgcgcgctcgggggtgagaccccgcgcttccccgcggcggaaatttntcccccgcggggaaggatttttctcgctccgatgaccccccacccgccccgcttctcctcgccgcttttgtgtggtcttctaataagctggatgattatagagagaagcctctctcttctccgcggcggagaggagagagatccccccacaggagtgcccctcacaaagagagtagaagaagagagagagatgatgagggtagtgcccgcgcggcgagatcttctctcgtatagtagaaaagaagagtaaagagacgtcattgccccccccgtggtctcctctccctccccagcgcggctctctagagagggacgcctctcatcgcgcggctcttcacggggagttctctcgagtgggagggtgatggaagcccccccgcgagaggagaagagtgtctctctcttttgcgcgcgcttcgcctttctctctcacacacacccccccgcgagctctctctccacacccacacaaatttgtgtgggagaccacacgtgttctctctctctcacactctgaaatctcccgctcccccctgtgaagttctctgtgcgccacactctctgtgaacacatgcgctcttccctgctgtgtgtggtgttgagaatgtgtcaccatatggcgcacacgggggagagacctctttaactttgtcgtgcgttctccacacaggagatgtgccgttttatataaatattgtggngagagaagaataaggggtgggagaggcacaggcgcacacatccacggagatcccacaatctcctcactatcttgaatactttctccgacgcctctaaaggagattaagctgctgctttgtgcctcgtgttcacacatttgctggagacacacaggggtgtcacagtgagggccacgcgcctcgttaagctctcctcaacctcggggcctcatttttatctctttcctttttgnattttttggtgtcttgtgtggaaaagattttataaaggggaccgacctttggga

SEQ ID NO: 518095 - DNA, 128 bp, Homo sapiens
gccctggcaggaggaggagagagaaaggagagacataattatatttccatgaggtgtcagccttggatcaggagattattgaagtagatcctgacactaaggaaatgctgaagcttttaaggacttgc

SEQ ID NO: 518096 - DNA, 1591 bp, Homo sapiens
  misc_feature (1551)..(1551): n is a, c, g, or t
  misc_feature (1554)..(1554): n is a, c, g, or t
  misc_feature (1573)..(1573): n is a, c, g, or t
cctgttcgtccgtggtggtgggtgttgttgttgtgttgttcttggtgtcctttgggcgattctctcattgctacctgtctgctttggggtggtgtggcggggtgtgggctggttggtgttgcctactgcgtctcgtggtggagtgtgctcctgtgcgggactttgcttgggacgctgtgtgtgagttgtctcgtcttggtgccaacgttggggtgttgtcggtaaacccgttggtttctggcgaccacgtgtggggtacgttgtgtttgtggcccctgtcgggtttgggccctggtgccttttcttttgtggtgccgtccctcgtggtgtgctggggcgcgcaccgcggttgctgggggcgagtgtcgtctgcgacgatcgtgtccttgtgtggggaggtgtccatcggtgccttgttgttcctccctgtggcggtgtttatgtttgcactggggccgggccgctgggggttggggggcgcgttcgttggtgcgccaccctctcttgtggtgatactgctctcccgtcgcgttctctgcggtccgtgcgcttgttgtggtttgctcggtggctgggtcgccggcgggggcccaacgcgcctcgctcgtttgtgggtgttgtccctttgtggtatcgtctgttggccctgctcattggcctcagtggaggtggcccttcttccctctggtgttggggtggtgcccccactctctcgctgggagggatccccccacaagaaaggcgggataaagttaatattttttggtccacccaaaaggcgccccttggggccccacgtttgtatgtggggcgttgggcgatcacacgccacgactgcgctaccgtggtgtgtgttgtttctgggtgtgtgtgtgaatagggtgggtacaagaatatagtgtgagcacccacatgggcaccacactctggtgtttgcgcgaccacctcaccggagggtcgcccagttgagaggggcacacacaggagagggtagatagagagggagaggggtcgtgggcgagcgccacttctgggatagtgacctttgtgcgcaaaaacacttgtcgtgtgcaacgacatgcggagcatgtgggcgtcgcgcacacttgtctgcgcatcgttgtgtgtgtgtctgtctcgttgtaagagagagccccacacgtccccacgaggtcacacgtctcacaacacacactgtgtcgcaccagaacacgtgggttgggcacaccctatctagaagagcgtagagggtctggcacacactgtgttctgtctcttgtctacatgtgtctagttttgtcactgtcgtggtgtagacccatgtggggtgtggtcaaatgtggtagaggtgggtgagagtaggtgagtttgaagggttctcccgtgtcttgttctccctgtccaccagatctgttgtgcggcagtgtgaaagagaggaatagaagaagtacgtagagttgaagaaatttttaaaaaatggtataaatataaaatattacgcttctcccagaaaacaagaagaattaaatattaaaaattcgttcggatggncangtcgtactcgtcaggggtncgtagatatgaggtagtg

SEQ ID NO: 518097 - DNA, 504 bp, Homo sapiens
tgttctagagatctcggattggcgacatttcaaaacaaacaaaacaaacaaagggactgcaggccccatgcaagtctaaaatccaatagggcagtcattaaacctcagagttcacgaaatgatctcctttgactccatgtctcatatccaagacatgctgatgcaagaggtgggtttccacaaccttgggcagctttgcccctgtggctttgcagggtgcagcctccctgctgattgctttcacaagttggtgttgcgtgtttgtggcttttccaggtgcatggtgcaagccatcagtagatctgtcattctggggtctggaggatggtggccctcttctcacagctccactaggcaatgccccagtggggactctgtgtgggggctccaaccccacatttcccttctgcactgccctagcagagattctccataagggctccacccctgcagcaaacttctgcctggacatccaggcgttttcatacatcctctaaaatccag

SEQ ID NO: 518098 - DNA, 94 bp, Homo sapiens
  misc_feature (40)..(40): n is a, c, g, or t
catggatttgctggtgcagtacaactaggcttaatagggnaaaaaaaaaaacgttagaagcttgaattcgagaaaccatttacccaaaaaaaaa

SEQ ID NO: 518099 - DNA, 108 bp, Homo sapiens
ccacagcagactacaaacctgagtcagtgttcatagttttcattggaatagaatagagacactcatatgttagcaaactttacctaaagtgtgagacgctagtaaaaa

SEQ ID NO: 518100 - DNA, 1008 bp, Homo sapiens
gggcttttttttttttaatagtattggtggtggaagtaatcgaaaagacaacatatttattggatccgggataccaaacatttgagcaagaattgaataaaatactggcgaagttgggaaccaagcatacttccagatggtaatgctattttcactaaaggtgtggctctcttgatataaggatggtcattttcacagagtatgttcggacacaatattataattaagtcacttaaattagataacattttctgaacacttactcgagctcatcggcctttcatctctggtggaattcagaacacaaatgtggcttcaataaactagtggtttatcgaacgacacttggtacacgcacaaggtacatctaactttctctgggagtacgagactgggattgtccatggtcttaaagccttccagtgggagcttctggattgtaaatttctcttaaaaccactggtttctcagctccggtggaaggaaacagtggtgctactgctactggtggcagctcactcaagttctttctcccaggcacattcacatttcctggaactttctaacttttcacacagcggcatttacacgggttgtctggaccacgtggttggctgtggtccctacgtgaaagaacaagaaagcaaaacattccagtccccttaattccatagataaagtcagttccataagtaagcctccgtgtattgggtcaaacgaagctgcaatagggaagtctctagaaattcatcctaaggttggactctacttagtggcaacagggcccgacatggggggacctaccgaatttgggtcccccttagacaattcaaccgtgggatccgtggtaacaagacgtggtctttaccctgcaacacccttgttgattcacgttcgaaaactgcctgttttacaccaagagaaggtcctttccctcatttagaggggctccccgtatctccttcgcagattgtgcagccaaaagccctactctcgggcgcgggctac

SEQ ID NO: 518101 - DNA, 662 bp, Homo sapiens
  misc_feature (662)..(662): n is a, c, g, or t
gtcttggccttactacggtttaaccattggatccggtgtttgcagaggaatcatcacactaggctgatattctccgtctgctgcctgaaatctactgtggcatttaaaggtctcaattctacggtgttttttgggagggcatctacgggtaggaaaccgtatagagaggagcgccccattgtaggagatttcaagagcatatgctgaacttgccactttaaccttcatgcatgccaagtcgtataggttcagaggcaatctacaccttgaacaagattgtgtgaaaaatacttcggatttctgatgtgaattggacagtttatatatgctaaaccggttatcgatccctaggatgccattaaaagcaaaaagggtttagtttagagcaagcgaatgatcgtaaaacatactaactgggcggacgcctgggactaaaaatgtgtagatttgagcagcttatgtatgcggccgaattttgggctaacttgggcatttcgcccttagtggagtcgtttaccacttcactggccgtactttgacaacgccgtgactgttccagttggcaacattaagaaggaggacggcactgtatgccttttccaacaattttgtccagcctgtagggctaaatggaacttgaacacgttataatgtgggtaaan

SEQ ID NO: 518102 - DNA, 771 bp, Homo sapiens
  misc_feature (47)..(47): n is a, c, g, or t
  misc_feature (80)..(81): n is a, c, g, or t
  misc_feature (163)..(163): n is a, c, g, or t
  misc_feature (225)..(225): n is a, c, g, or t
  misc_feature (229)..(229): n is a, c, g, or t
  misc_feature (233)..(233): n is a, c, g, or t
  misc_feature (289)..(290): n is a, c, g, or t
  misc_feature (324)..(324): n is a, c, g, or t
  misc_feature (328)..(328): n is a, c, g, or t
  misc_feature (505)..(505): n is a, c, g, or t
  misc_feature (520)..(520): n is a, c, g, or t
  misc_feature (535)..(535): n is a, c, g, or t
  misc_feature (543)..(543): n is a, c, g, or t
  misc_feature (553)..(554): n is a, c, g, or t
  misc_feature (601)..(601): n is a, c, g, or t
  misc_feature (632)..(632): n is a, c, g, or t
  misc_feature (651)..(651): n is a, c, g, or t
  misc_feature (683)..(683): n is a, c, g, or t
  misc_feature (746)..(746): n is a, c, g, or t
aaacaaaataaaaaaataataaaagtatgaaaataatgataaggtanaccccgccgcatgtaccctcctttttacagtannctccttctaatctaacaaataaccccctaaaaccctaattttactcaaacaccccttccttcttctccaccacatttcccancttctcttccagctgcagatcaggttctgctgggcagtgggctcagtgcggtgcatcaacantgtntgtnttggctggtccagggaggccatcagctcctcattaatcatcattttcctgatgatnnactgcacaatgggcagatccagctcaaacatgtntganagcgtctccatgctgatggagttatagacactgctgtaggtgaagacctacgtcctcacttactcttcctccatcttcctaaccagcatggtgcggactttgtcagcctcggggaaaaggtcccacactttcccattcatcttctcatttatgataaaacttttacaggtcttccantcacccatctttatngcctttgaggcagcnaccacatnttcccgcatnnactcagggggacccagcaggggctgtcgctcgcccacgcgcactggntggtggaactgcttgctgatcatgcgtcggngggcatcgctctcatgggnggccatgtaggggatctccaggagcatggcanacaccaggtagacacactccagcagctccaggttgatgtgcaggtggaaggggacctgacggngccgctccaccttctcctgctcctg

SEQ ID NO: 518103 - DNA, 1334 bp, Homo sapiens
gccagcggcacgagcctcctgttcctcacgacaatggtggtggtacgatgacggccaagaccgagaggtgccatgaagagaacaaacctccatccagacacgcgggcgtgaaaggctccagtgtgtccagtggccagatgtgcgccggctctgaccgactcagaaagatgagacacaagagccggagccagggagaggttggcgaagacggctggacagtgcccaggccttggagcgaggcgggtgatcttcctgtaagatccccagcaaacggttcccacgatatccgacaagtggttcaacagccaagcgtagtcccaagacgcttgtatagaggcgacgggaccctttgcggtgccacgcgtatcaccatgggtgcccattgcgttcgcatccgggagaccccaagagtcacagatggcttgttcgttggaggaccaggcaaagcaaaaccggggccttgtgtgctgcaggttgcgggtttggactgcgacgttgagcacacatgacgggccccaaacatgaggtctggcggaaatcctagagaacccgttgctgcaagagctggcacactcgcccagacggcctctggcgacgccgacgcaacgcatggtgaggcccgagatgcgacagcacgccacagcaaatggggaatctgacacgcgatgagaaaccaccaggccgagtgacgtaggagcgtctaagaagagcgcagtgaccagacttcctatgacggccatggcctcgtgaggacagcagagcaccaggagagggtcagacaaggggagacacgcctctgcgcagacttgagccacagacccaacggcggacctccgtctgtcgccatgagagcccaacggcattacgcgcgatccagcctattggtcactcgtaggcacatccccggtagggttaatgtggcacaagaggtcgcagcaggcccgaaggaccagcagaaccgacgtagcactgagccctgtagtagactagtcacgtgcgcggccacgaggtagcacgattaagccctgctggacgttggtaacaccaccggtgcccacgctcagttagtagagctcacaaaagcggtgtactcaacagcactcaatctacttggaaacacgattccaccgacgatacagccagaagtataaaacagcagaaagaaaccccaacgcgactcgacacaagggaccttggactagtgcgtcgcgaactgaaatgcacgatatccagcacgcattgcggcggattcgtcaacgacagctcagccatccacacaggtaaagagagtggaaacggacacagcgacacagtagtgtagaacgcgcctataa

SEQ ID NO: 518104 - DNA, 1207 bp, Homo sapiens
ctttcattgccaacgtccttctatgacctcagtgccatcagcctggcatggggcagaaggtagcatttcaatacgtcccggggcagggccgtgctgatcgagactgtggcttcgctctgaggcacaaccacccgggcacttcacccagtctcaaccagctgcaatgccgcctttcccaggcgccctggtgcgtccttgcgctctccccttgccttccaactttcggcacactcagcagccagtgccgcagaccccgaacgctagccaacacgcctcctcttcgacgcatgtccctcgcagctcccagcaggctacctccagtcgctcagcgcccgactcctccttcagcccttacgtctaagctctgcctgcgcaggcgacgctctcctccccgtacccacggcacgccaaccgcatgcccactctgtgtactcgaacgagagcctcgcaacgctcctcgccacgggcttatccgtctggtcctcatcgacttctactcgttttccctaacgtcgccttctcgcgcgcccgcgcgtacacggcccgacactctgctcacgcaccctgacgccgccgacttccctttgacctcccgggtccgtccacgcgcttcactggcttccccggtcccccatgcgcggccgctctgcggcactaagcgcaagtgccgcttagccttttcagtcccgttttggttccctgatgtacttgttggttgaggcgtgggaacgtgggggctccgaatactcgagcgtttcccttgctcgttcttcggcccctaacgcgcccgtgacgcgggcccaactggccttcgcctgccgtagacccccttctcattcgcagtctgcatgccccccacatctctctcccccctccggttggattcccggattcccccagatggtgctccctcccggttttggcgcaccgcccctccgtgtctgcccggccgcgcctccagtacgtgcttgcgccccctcggggccagccctctttcgacggacgtgctttcccctcagactagtggggggcccgcgtcaccgcgcggtatgctatgccgctcgtgtgtccgggtagcgggcactacagtagtgccgcggacgctccttcttttgtcgcgtgctcgtcacttctcacctccgcttctgctagcccaccgcgagctcctcttgagccgcggcggccctcccttctatagacaccttgg

SEQ ID NO: 518105 - DNA, 292 bp, Homo sapiens
acccgctggtgtaatggacgtacagagacatatgggattttgtgcgtaagctgtttgtcccatcctgtatcctgtatcacataggatatatatcactgggtagtccggagaataccgtgtgcattccggcccttaagtgcctgagctcaggaggacaccccacatcccgttcagcctattggtggagaacgaagaagacggagcggagtttcgcacatacctcccacctaggaggtagggaaggaccccgtcttagggtataacctggcaataccccgtgcctttctgtgtg

SEQ ID NO: 518106 - DNA, 1354 bp, Homo sapiens
ctccgtgagccgcacaaaccagtgcctcgccatgaagccaggattcagtccccgtgggggtggcttatggcagtgccgacggggtgctttgagtgacctgtggtgagtcagtgagagtgcctgacgggagtgattttggcagtggggcctgagggtcagacggctgtgagggcttttagaaaggctcggtggaccggaaggaaggacggatggacgtgcgcgacgcgcgagacacggttggcagagagggacgcgaccgacgcgtgggacggacattccacttacttggatggccaacccggcgggatcgatggatccggggacacggacacaaccagcgtgcaaacccagttcagaggagaagaagatgatgaatgggtgggaggcacgcaattcgtggaaattgaagggagttgtcttctcaattatatggtaggaaggagaaagggacagcatgccacattgggtccacccaaagcacaccccagtggggatccccccatggagcgcagaccacctccacggcaatgacctgggcaccgcagaacaggcagccacgatcaatcagaacttcatcatcgcgcaaccacgccggcagctggagcacaaaccgctccgaaagattacccggacacgcccgtgtgagacaacacccaccgcagattcttaccgcaggacggatactccaaaacggacattaagcaccagacgaccaagagcccaaacttaccaccctcgagtgagtatgagggaatgggactggggaaacgccaaaaggcaagttgtcccaaaacgacagttcatcacaccaccccatgacacgagacagacattaaaactgggcgctagtagtttcgttaaaccacaattcggaagggagaacacgtgttgcacccgttctaggcgcgggcgaactccgcaagcggacgatccaatctcacacccaactgtggaatcctctcctgtggacccacctatcgcggacatcactgcgctaaccccgggcgcaaaaggttgcgggtagcactacagacagtcactaaagttgttcaccacgacacacgagaatagcttatccggtccccacaaacgccggccacctccgtttgggccccccgttgagcaaccccacgtacgaattgctaccccgcctgtgtgcaccccatcagggaaaactgccacaggcggaagcacagaaaacacaagatcgcaaaattccacccaatggcagtggcaaacctccgcaacggggacactaggcacgcacgagacaccacagcccctacgccaccggataaacgattgacaccggacaaaagttgcccacaccaattagcggccgcacatgttgggt

SEQ ID NO: 518107 - DNA, 919 bp, Homo sapiens
  misc_feature (406)..(406): n is a, c, g, or t
agagcagcgccagtttccgggctcgggctgctctcggagccatgatctgcggacgccccctcccgacgtgcacggggtgatcaccctcacagggtggacgaacccgttgactctagcccgcagcctctccctgagaggcttgatggccgcgtgttcgaggacagtcgcggcgcgctgttgtggcgttcgtcgtccagtccccgcgcgggatggcccccataaccaattggcgtccccggggccttcgcgattctccgtcacggcattatccttccgacccccgggccgctgaggccacagttgaccggccgaatgtgcgctgtccattgggtccggggggcgggagcgtgttcatcggactgcgacgcctgccggtgttcgccgtgtgttcgcgctgtcgctgagngtggccctggccgggtgatctgcgacgccagtagtgttggccggggggagaagtccagcgccgtgattggtttccctagtacgcgccgtgctggttcacgcgaccgcgtggggttgccagccctggctcaacggttgcccggcggggccccccgccctgtccctaaagtgcggctcgcgcccacccgcctccgtaccttgaatccgcgtggacgccacccgatgggcgttggcccgcaggggtctccgcgctagggacgagaatcgttcgccatgttcgcgtggctcccctttcaggcctcactttatccaagggtccgcccccttgagtaaggccgcattgtgtcgtcttccctaggccccggttgcggacgcttagtatgggccggcttcctcccgcttagcagagcaaggattggtctgtggtaccacggtgacctcctccgctaaacggagaggggtctttccacttccccggttcctcccagggtcacaggctactttccgctaggca

SEQ ID NO: 518108 - DNA, 101 bp, Homo sapiens
cagaacggactggagactgaaaggagtctggggctaggcaaaccaagaagaggtggagggaatcctcctgctgggctgtggccttgtcactcccagagtca

SEQ ID NO: 518109 - DNA, 1212 bp, Homo sapiens
gggacaaatgccctgcagcagcagctgcggaagcgcgaggtcctgcttcgagctgagctgagcagtgccctgctgcctgtgttcatgccatgtggccccactaccctgcttgcctgcttgtcccctgatggtgcactggcatgcctgatgtggctgctcccatgtgcatgtgaaacacttgtgtgttgcccatgcatgtgtcccctgcatgtgtgcctgtgtgcacatatgcaccgcctcccatgcatgcccctgtgctgtgaccttgctgtgtgctccctgactgtgacttgatgtgactgtcgtgtcaatgtgcttgcgtgccctttgtgacgaacgaatgctgtgcttggaccattcctggtgtggcaaacttttagcctgtgcccacccatcgaccaccgtgtgtgtggaaccctgccctttcctgactgtgatcttgctaaggctgccttccggcggctggattgttgacattgtggacgatgatggcccgtcatgcgaccaaaccttggctgcaggggcccacgattgctccgcagtggtgcccatagctcaatactgccaaccagctgtgcaggacgatcttttgggcgtccagcctgtgagggcgctcttccaccgaccacacattgaccaacgttgtgcccgacgctgcttgaggcctgcaacctgttggagggtgggactcatgtgggacactcaagcgtcgtgctgcccccagtctgaccatcgtgtacaagcaagggtgtgggtgcttgtgccctcattgaattcgctccaccaaggttccagcagaatcgtccgtggcatgaaccagggtgctggattgttgccgttgactgtgaagatccgcacagggctgtccaggagctgtgtgaactttgggagcgactgctgccgagcatgcggacttggcgcgttgggactcggtcagcttcacggtcggctttgggaagcagggacaaaccaaagtcctagacttaactgtgcagcttcacttccgctgcagcttgcttgcacggccctgcctacccccaatgccccttgttcgggaaacgtggcgaacctctggcacctgaggagttcacagcgcgcacgtagaatgtatgcaacgggaacagacttcgccgtgtccagccaacaccatgaccttcggacacccgcccgtcgctggaccctccgcccgcctgcacgcggaccacaaggcgg

SEQ ID NO: 518110 - DNA, 840 bp, Homo sapiens
taggtcaaggccattggcaacctgtacggccccctgatggcgctgagccacatggtgcagtcaggactatttccccaaggtccttgcagcccgtgctgctggcgtcgtgaccaagtcccaagagtcgccctggaatcctgctccttcgaaccgccacagtctgttgcagacgctgtacaaggtctagactcaaagcctctacccaatcgccttggcttggacacagtgaagctggggagggactcggatgacacttgatggctgcagcctacgccattgcacttgagacagtgactctggccacaggtcagggcggtgtctgtgtcccatgtgtcctgtccagtcccctgagtatgtgtgtgggtgtggcgcatgtgcaaggatacatgctagcacctccctgtcgagatttaaagggttttgtaaaccgtcttacttgctggcccagcccctgctcttgtttgtcgtggccgtgaagttgagcccccaggggaaacgggctgtagatgctagcattccctccatttaatactccaaccttcacaccatgaagggcagctctgcttgatctacctggctgggaccctgataggtccagtacctccatacgcaacgtgacctttccggaccgtgactccccttgggcgggtatgccagtaacccagtggcagattgtcccggccgtagcttgtccctttctccctctctgtgttgtgatatggggatagtcacctgccccagcctgggtgttgcttccttcgtaacaaatacctgtgtcctgcgggggctgtcaaccccttacatcatagcactgtgctgccgtcatctgaaagcgagatc

SEQ ID NO: 518111 - DNA, 291 bp, Homo sapiens
tgtgatgggtcatcagccacgatgagatgtctcggacatctacaagatcggggagatcgcggcggggtggtgcctgggaggtggaggggaagagggtcagtaggacagagggtaacatggatgactcgctcatggggggaaatgcctccgttgaaggccccgagggcgagggtcccgaaagcacagtattcacgggggtcgatatggtcatgaaccattcaccggcgggaaacaggttttcacaaaagaagcctacaagaggtacttcatagattacatgaaaccaatcag

SEQ ID NO: 518112 - DNA, 1001 bp, Homo sapiens
ccaggctggtactggtccgggatgtatggcattgaaaagctcgtggtctgacgggtgctggtgaggagcaggacccacgtctggacttgccgaggtgctggtgctttgagagtggcgggaattgaggagccgcgctgtggtggcgacatgctggcggtggcgtgcgtgtggtcggccgaacccggttgccccccatgagccgcagggccctggcagggggctccctcgcctagcagctcggtggcctaagtcgcacagcttcttctcgctgctgaagaagaacgggcgctcggaaaacggcaagggagagcctgtggacgcgagcaaggccggcggcaaacaaaagctggtgggcttgcgtgtgtgctgttcagctggcatgctgctggcacagtgaaagacaatgctgttgccaattgcgtgagtgcctgtggattggggcgctgcgccctgtgggtgcggcttgaatcctacccctgtgctcgctcaacctgtcagccttgtgagtgcgtcaaggacggagacgcccagagccgcgcgcgtagccggaggagccacagtcaggacgcccccgggagacccaggcaggctgtgggagaatattattgcgagaccaaagaaggaaggaggcaggggtcccagactgttgacaaggcattgttccccgtggaccatgccaatgcctgggcgtctgttctaaagacaagtaaccccggaccgtggttggcctacccaagtgtagtgccggtgtcaagagatgtgaccaggtcccgtgaccggaagtgttgggaccggaccaagcatttattcttaacaagggaaggttccgtagggagaacaattgcattctttcccccaataaaccgggagggaagccagtgggaaccccagagtgaccccaaggtggaggtggcatcgggatataaaagggtttggacaagtcattggtatacccttgagaaagacccaatatggtttggtataccccgaagaaaccccta

SEQ ID NO: 518113 - DNA, 1224 bp, Homo sapiens
  misc_feature (341)..(341): n is a, c, g, or t
  misc_feature (1215)..(1215): n is a, c, g, or t
ggtcagcctgttgcacgcgccgtgggtccgggatctctccgtactttgcagcgtagtccgagtcggtcagtaccgcgaggatcatcaggcatgccattggtcgaagacccagtagtagaagtcagggacttgcctgttcagttcatgactccaatcatgttgactactgcaggactacgtggcatgacagcagtgtccgtgtgcatgcatcagtgtccgcgacgtgtgacatttgagttcatgctacgcgtcgatcacgtagctcgcgggtacgacgactgggcagattccattcgtgatagccgaattaggaaacgctacgtcgctgtcgcccggactcnagtggtgtgaacgacggccttgttaatggggagtcaatgagtgtgagcgttcctgggcagagtgccaacttggttagggcagtcctagttcgctccgagaagcaggtgccataacattcggacatggtgctagaagcctgcccattgggaatcgttaagcacgagattgggcgcggcggctagtggaaaccccgaagttgcctactacgacaaggaattttggctttgtctggaccgataccgtacggacgtcgtacgcaagggaaatagagacgcgccgtatgtagaggttcctctcgatcggaaatcgccagcgacttaggcttcctacgtttccaactgaagtacaagaagcgtgccccagttcgtcatgacacgtttggtttcgacggccatttcggtttaagagaatgcgagccttttaagagatagacgcaggcacccaccattgggagaagaaggttcggcagtgaaagaccaggtgggcgtgcactttccgagtttgcatagaagtgtggagagctagcggtagacagaggtcgcttagccgcgtaggcacaaaacggatacggaggatttgttggacacgccccttgggcactaagaccaaagaagggttcgcaagaatgggtcgcctaccaggtgcggattccgatgaagaggactttgctgtagtcatgaccttatggggtaaatttaggaggccctggcacaccggatatatgccccaatttggggagcacgagaatttcccaatgtgctacggcttcgtaagcccagggtaagggacaaaaagaccagcgggtatacaccggattagggatttagtcggtcgcgtttagcagcgcgagcctcttaattgctcacagagcgntatataccg

SEQ ID NO: 518114 - DNA, 189 bp, Homo sapiens
ggtatggcatctgcggaacacgagacaccttcaactccatcatgaagtgtgacgtggacatccgcaaagagctgtacgccaacacggtgctgtcgggcggcaccaccatgtatcgcagggcatagccgacaggatgcagaaggagatcaccggcctgagcgcccatgcaccatagaagatcaagatcat

SEQ ID NO: 518115 - DNA, 301 bp, Homo sapiens
cgagtgaaggtcagcttgatggcaattaacaatgattaaagatactagtataagagatcaggttcgtcctttagctgttgtgtatggttatcatttgttttgaggttagttggattagtcgttgtagtggtggtgattagtcagttgttgataagatattttgtgagctcaggtgatttatactcctgatgcgagtcatacggatgtgtttaggagtgggacttctaagccatttatgcggggtgatgcctgttgcgggccagtgccttcctaattaggggggtaggggctaggctggagt

SEQ ID NO: 518116 - DNA, 306 bp, Homo sapiens
gatcgtgtccggcccgcgagcacagagcctcgacctttggcccgatccgccgcccgtccacacgcgcgccggcagctcaccatggatgatgatatcgcgcgcgctcgtcgtctgacaagcggctccggcatgtgcaaggccgggcttcgctgggcagacgatgccccccggggacgtcttcccctccatcgtggggcgctccaggcaccaagtgctgtgatggttgcggcatgggtcagaaaggattcctatgtgggcgactgaggtccagagcaagagaggcatcctcagccgtgaaggtacccc

SEQ ID NO: 518117 - DNA, 740 bp, Homo sapiens
tggctcggtaattgagaggagcggccgctccagagcttcctcccggggcgcccccctcagtccgtccgcgcttctcagtcgccagtctcctgtgccgcgctagtccccgcggtacgtgccgggccgcggagaccctcgctagaatgaggcgctgccggtggtgaggactggccgtcggttttccagaggcgcgctgcccatagctcgaaacctctgctagccctccatgccagctcgtattcctgctggccgccgccattgtcctccttcctcttcctcccccagggagacgtacgaggaggaccgggagtacgagagccaggccaaggcgtctcaagaccgaggagggggagatcgactacttcggccgaggaaggcgagaaccggccgggaagcgacgccccggggcgggcgcggatgtgcggcggtaggcggccggagcttctctcagccggaggcaggtggaagtcatcataaagttttctgttcacccgtcgtccatgtcgaggactctgtgaatctggtggtggaagcagacctcgttggaagcgctggaaaaatttgggacaatatgctatgtgatgatgatgccatttaaacgacaggctctagtgcacttttgcaaccttgattgtgcccaagaatgtgtgacattgctgcaataaaccgcgtttacttgcgggtcacaggctttttaactttttataaggcaaaggatatctccgggcaggaaaatgtgt

SEQ ID NO: 518118 - DNA, 707 bp, Homo sapiens
aggagaatagcttgaacccgggaggcagaggttgcagtgagccgagatcacaccactgcactccagcctgggtgacagagcgaggctccgtctcaaaaaaaaaaaaaaaaaaaaatggttttagcgctgggtttcccaaggggggaaaaacagacccagccgttgagctggccccgtggcctgtgttgctgacttctgggggtcctcaaaccactggtattttttctgttgagcctgttactgtggggagagatcagtagcattttgaggaagtaagagaacagaaatcagggtacctcagggtttctttcccttttactcgctggcagccattggtctggtgggccacctcatgtttttccacactctactggggccgtggaggtaacgatcacccaggccagtctcctcctgccgggggatgcgccctctgagaggaggcctagcagggcaggctccctctggggcttcccgggatgcagcctctggacacatgcctcctttaacagtgtccgggttgcagctcacggttgacttggacgcgtagcaaggacgaacccgacttgtttaccacgcgtttccaaagctcctgatctttcccaagatggtcctgaaactgcggtctctggttggtcccgcccgggcgtggtggtgctgctggccatgcttgtgacgtgatgtgtgtctctgattacggattcctgtgc

SEQ ID NO: 518119 - DNA, 169 bp, Homo sapiens
  misc_feature (9)..(9): n is a, c, g, or t
  misc_feature (28)..(28): n is a, c, g, or t
ggttttacnaaattggtcaggctggttntgaactcctgacctcaggtgatccgcccacttcggcctcctaaagtactgggattacaagcatgagccaccatgcctggcctctacctgtgttttaacgtggactatgtttatgccttggattagaacactggagtagctg

SEQ ID NO: 518120 - DNA, 1011 bp, Homo sapiens
gtgtcgtcttaacagtgcgcggaagaagaacgggaatagccagtatgatggtatgaacaggatgtggtagcaccgactctttgtggattacgactgaaaggaggaagagcggccagggcatccgtcaagagtagctacaccagctccccctaaagaaagcacatcaagggatccatacgtgtccaatccactagcgtctggcttccgggactttctgctgaagaccggagctcctgctgggccatcgtggactgtggcttagagcatccttctgaggtccagcatgagtgcattccccaggccatcctgggcaattggacgtcctgtgaccaggccaagtccgggatgggcaagacagcggtcttcgtgctggcaccctacagcaagattgagcctgtcaacggacaggtgacggtcctggtcatgtgccacacgagggagctggccttccagatcagcacaggaatatgagcgcttttccaagtacatgcccagcgtcaaggtgtctgtgttctttccggatggtctctccatcaagacggatgacagaagtgttgaagactcaactgtccccatgtcgtggtgggggaccccgagcgcatcctggtgctcgtgccggaataggagcttcggctaaagaatgtgaagcactttgtgctgcacgagtgtgaacaagatgctgacgcagcttcgcacctgcgggcggatctgacggagatccctccgcctgacacaccaggaacggcaggcatgatgtccagcgcaccctgagcaggacatcgacctgttgacggacggtcctgcagaatcccacggcaggtgttggtggacggcgaaaccagatcaactgcggcatgaagagaatagtaaacaaaacggaacaaggaagcttaaccctgaaagaactacaaggaaacaacacaaaacacgggagcagcacccaagagaagagcgcaccacgggccccggagagacacatcacatatcatcaaggggacaaaaatcaaatca

SEQ ID NO: 518121 - DNA, 1082 bp, Homo sapiens
atgtttaggcaaaagtgagttatttaagaatttataggctgggcgcagtggctcacgcctgtaatcccagcactttgggaggccaaggctggcggatcatgaggtcaggagatcgagaccagcctggccaacatggtgaaaccccatctctactaaaaatccaagaaattggccgggtgtggtggcatgtgcctgtggtcccggctacttcggaggctgaggcaacagaattgcttgagcccgggaggcggaggttgcagtgggccgggatcgcgccactgcactctagcctgagcgacagagtgagactccatctccaaaaaaaaaaaaaaaaaaaggatttaccagattttcggggcaaaccgtttgtctctggagaaccatttacatactttttcattaccacctttgggccgttttggaagactctacacggtttaacaattcccgaagagtaaatggacaaattagggactggggcacgaaggaactcattcctttcctgggggtcaccgtgtaacccccacaggcttaattgcttgactcccgggggaggtgcttgtgttcttggccaaaaagggtcacacaggctgagataggagaatctgggacatttctgacttccaacggggtgttaaaagttaattaaaacacagggttaacgtccaggtgctaaagttttcccccccattttaatccaccttttccacaatatgttggtttttgggggggattacacggcatttttctaacctctaacacaacttggtggtgttgaagtgggctacaccattttgtggcaaaaacacatttttttttcgtgaaagaaagggggccccattcgggaaaatttgtacgtggtgggttaaaaagagggattgccgtggaaaccaagacataaagctgtggggggtcaaactgtaactctgaggcggttatgtagagcacccccggctataattctgtgatgactgtgtgctctatgaaaatgtgtgcctataacatacgggggggaacgattggtaaagataatgtcgggttggaacaaagggcccacgagaaggtagatgtatacatacatg

SEQ ID NO: 518122 - DNA, 300 bp, Homo sapiens
catttagtatacgccagcttgaggaggtccctggtctgcattcaatgactgagttgaggcttgctgtgcggactcagctaatgttagcgcaacattcgggcaagatttttcggaggcggtggtggtgggataagagagactgaactgacaggaagggaatcctgaggggggtcatgggtaagctgctcctaggtgggaaacttgggacgagacaatgacgacgtgaccaaggtacgcttacgtaatcctacaatggacagccagacatctccccatgtgatcagaccaggtaaagccgag

SEQ ID NO: 518123 - DNA, 106 bp, Homo sapiens
aattcaagcttctaacgatgtacggggacatgccctatcacaaatacctcttttatctgtccacccctcacagactaggaccctcaaataaagctgttttatatca

SEQ ID NO: 518124 - DNA, 261 bp, Homo sapiens
ataggcttgatgggaaattgaaggtaggctgagtattgggaatcccaattgaattttgattttccttggcagtgaactacttttaaaaagtggtcaatggggtgttgctgccatgagcatggacaacctttggaggtaaaagctcctcaggaaaaccagttttccaagtttttaacctgtggccctgaaaggaatgttgagttaccttttcatgttttagacagccaaccctatcccttaaaggacttgttagaaccctga

SEQ ID NO: 518125 - DNA, 848 bp, Homo sapiens
tgatgcttttggttgaaacatatacctttaattaaaaacatgaggttttttattttaaaaaaatctccattgggtctaaaacacatagtaaatctgtagcttgaattttattctaggcataaacatcatatgttatgtctctttaaaaccacatactttaattcctcgttcaaaccatctgggctttttttatggcagtagatattacatactactttcatttcttcctgaaatttgaagcaggcaagaatggtctagagtgataagtgtcaggaaggccagcattgatttttaaaaattgggttctgaattttacaacaatcgctgaataagatcctctgcatagtgtgtgtgtgtgtgtgtgtgtgtgtgtgtatcattactagagatgtacagtgaaggatgccctgacggacactatatatggctaatgggtacttacttcccgtgatatagactactgctctctccctaggaattttcagacgcaataagtgtcatgcacaatatatgtgagccacatcgtgtgcataggatccgtcctctagttatcatcttgagtggaataaactaagctgaaagtagtctgtccttcccatccgagctttaatatacttctagtgttcgggtcttcgccctgagaatcttttagaacagtcgtgggttcgtgtcccatctagtacgtcactttgtgttttgtgcgtatctagcgatctttgggtgttgctattctgcagggctccgcccgtacattatcgcccggctgtactcgctgtgtttgcacttccgtgtatttgggttcatcgtgttatccactagcgtcacggttcgttttttccctgcgcgga

SEQ ID NO: 518126 - DNA, 102 bp, Homo sapiens
gggggtctggctctgtccccggggtggggggcggggggccattttcccctcccgggaaccccggcctcccggggtcagggggctttccttcctcccccccca

SEQ ID NO: 518127 - DNA, 386 bp, Homo sapiens
ctaagtatgcgtagatatttgggaacaatcacagtgagtttagagaggtgacttgagttgatactgatctcagcgatcccctcattacccttaattcatctgctatctgcaatatgtcaaattcaccaactaatgcggcttgcactcagaacactatgaaaacactggagtcttttacaagttatggccgcgtttgccacttaaagtactataaactgcttgttccatgcaattacatcctatgtgcttgttcttgttagacttttcgacttatttcttgacttcctttttttcattccagttatcacctgactgatctgggctcttactgctctgtagtcaaatgtgacattgccgtaattcctgctgtgccctttctgttgtct

SEQ ID NO: 518128 - DNA, 434 bp, Homo sapiens
gacaaatgtactaggaatcacacagacacgacagacacacacagatgtgaggtgtagaggcgtgaggctgtatcccagctactatgggaggctgaggcgggaggatcacagcctcccgggaggtacccgtgagccaagatcataccactgcactccagcctggctactgtctcaaaaacaaaaacacacacaaacacaaaaaagcccatgcttaaaccaatccctggctatgcaggcatttccagcatttccttgaaacgtttgtgcaaatacagatttgaacataactgattacagttcctgtccccaaaacttttggttccttccttccttttgtacgtggcacaatggtgagagtaggtactctggagtcagaatctatcagggtatgaggactggttctgtcgtctatgagctgtatgacttcggccgag

SEQ ID NO: 518129 - DNA, 147 bp, Homo sapiens
gccatactgtgtctggtgcatctgtctcactgagagcattgtcagataatttccttcatccctcccaccagctgactgagacaccagcactcgcctggaacactgaactgatgtgtcagcagcgaactgtcatctatcaagggtcct

SEQ ID NO: 518130 - DNA, 379 bp, Homo sapiens
  misc_feature (68)..(68): n is a, c, g, or t
cgagacgcgccatgcacagcccgggcgacagtgagagatcgtcaccaaataaataaaaaaaataaaanatcctctagcccaatccctccaacacagaagcagtcggagagcttgaaaggttagatgataggccctgtagcttgtctgtggaagagctaggctgcaagacacctctgatccgttgagtgcctcttactctcctttcccgatttaagacattaaatcatttaagacattaaatcatttaagacagtgtcatttggtcgggcgcggtggtaacgcttgaaatcccagcaccttgggaggccgagatgggcggatcacctgaggtcaggaattcgagaccaacgtggccaacatggcaaaacctcgactccac

SEQ ID NO: 518131 - DNA, 213 bp, Homo sapiens
  misc_feature (125)..(125): n is a, c, g, or t
gagagagagaactaggagatggagtctcgctctcgctctgtggcccaggctggagtgcagtggcacgatctcagctcactgtgctccagtctgggtgacagagcgagacccagtctcaaaaaaanggaaaattacagtgctcagatgagagggaaggctataaattggcgcattatcggcacatattatttaagtccatcgagcatcacatga

SEQ ID NO: 518132 - DNA, 288 bp, Homo sapiens
ttctgaggtcgctctagaggtcccctgctgcttctctcctcgttcagtgacatgtgatgcaactgctattgacgagcagtaaacagtccgtcttacggctatagcagtttcaactccactctgtaggtgaagattccatttacattcgatcacttaagttctttcaacttttttcctattcaataagttcctgtagtccagttatttacagattttacaagtactagcgagatcaagtgtctacaactcatacttgtcttctgctgtatcctctttcaccagattggg

SEQ ID NO: 518133 - DNA, 180 bp, Homo sapiens
ccactgcttgtgggacacgacagttcttgagcagtaacagagttcattttcacgggcgagcggtgcgttctgacagtacttttttaccagagagtacgtcgttgcagcgacgtggggagtaccggcgtacgagcttggcgcctgatgcgagtactggacagccagaggactctggagaga

SEQ ID NO: 518134 - DNA, 366 bp, Homo sapiens
  misc_feature (78)..(78): n is a, c, g, or t
  misc_feature (207)..(207): n is a, c, g, or t
  misc_feature (316)..(316): n is a, c, g, or t
gcatttaggaactcgctcctcgggagaatgtgtgccgacgggatgcagaggaaaggcctgaagttcaatttcacctcnatcccgggggtcacacgggcctagcacaccacttctttccagcaggcggtacgcacgcaagacaggacgcatgcatggtacacacctcggcatagccatatgtcagcggggttcccagcggagtcaatncatccagatctctggcaacactccacagatggaaggtgacttgttctgctgcagtactctgagccctgggattcatctggctacgcaccgggggtagactgtgtggcanggggtgaggatcttcaccacttgctatcgggctacacagcacgtgctccg

SEQ ID NO: 518135 - DNA, 143 bp, Homo sapiens
tcgctctagaggatcttcttggacgagacgacctgttgaaatacaacgtttggtgatttggtgtggtccaaagtgtcgggttacccttggtgtgcttgcatggtttctagcagatcccactcctttcaacagctattaccaaa

SEQ ID NO: 518136 - DNA, 356 bp, Homo sapiens
  misc_feature (58)..(58): n is a, c, g, or t
aacttgctttctctgccatctgctccgcgggcgccgtcagcatgggtccctggacacntccttgcgcgccgtcctgctgctggtgcttttgggagtctgcaccgtgcgctccgacactcctgccaactgcacctaccctgatctgctgggcacctgggtgttccaggtgggccctagaagttcccgaagcgacattaactgctcgggtgatggaagcaacagaagaaaaggtagtggtacaccttaagaagttggatactgcctacgacgagctgggcaattccgggcattttaccctcattttacaaccaaggcttcgagattgtgttgaatgactacaaaatggtttggcgttt

SEQ ID NO: 518137 - DNA, 738 bp, Homo sapiens
  misc_feature (79)..(79): n is a, c, g, or t
  misc_feature (227)..(227): n is a, c, g, or t
  misc_feature (273)..(273): n is a, c, g, or t
  misc_feature (320)..(320): n is a, c, g, or t
  misc_feature (563)..(563): n is a, c, g, or t
  misc_feature (613)..(614): n is a, c, g, or t
tgctgagattacaggcgtgagccactgcacctgccagtaactcttctgtgtgattcactggcttgtactaaagatgaanttcagcatttatgcatatttatcttttgaggcttatttggtattggaggttttcctctctcactttttgctaatgaggaaaacaaatggataattgaaaagattaactcagagtaatgagtaaaattactggaattcaattgaatacnatagtcttcaacactgggctctaaaatgttcaggttaggtcacccnacgttccaacttatgggttttggaaaaagcagatggctttaacaggngaatatcattcactttaggtaggtattcttgtgtatctatttggcagacaagtagagaaacatttcaggcataaatacagttgttaacatttgggattatagtcttaacctttcctcactgattagaattccgtagtgacacatttgagattagctttttaacaaagtcacttcttgttagaagtgacttttttaaagaaaataagttagctttactcacttgtgtagtaattccacattaanataaagtttcagctatttttggggtgtaagaatagttggtgagtatgatnnagttatttttttctagatttagtcggtatatattgatcaatagggttctttgtatgtttgagatactataccagttgaaggtgtgggacttaaacaagtggaggaagggagtgccttgtatatc

SEQ ID NO: 518138 - DNA, 372 bp, Homo sapiens
acctagaggacccctgaatcgacggtttctccatgttgtcaggctgtctcaaactcccgactcaggtgatctgctgctcggctcccaagtgctggatacaggcgtagccacggctggcttccataagtttttgtggtaagcttgggtttccctttaattctaaaatgagagaattgaaattaaagtacagcagattgccatttttaaaaaacctatttacatttgtttgaaaattaaacctttagcaaatttgttagcctggaatgggggagattaggtactttgaaatttttgtcgtgggaattgtaaaatttagggacatcgtctttattggacggactaatttttataagaattccatcgaggatttat

SEQ ID NO: 518139 - DNA, 874 bp, Homo sapiens
  misc_feature (16)..(16): n is a, c, g, or t
  misc_feature (24)..(24): n is a, c, g, or t
  misc_feature (27)..(28): n is a, c, g, or t
  misc_feature (31)..(31): n is a, c, g, or t
  misc_feature (34)..(36): n is a, c, g, or t
  misc_feature (38)..(38): n is a, c, g, or t
  misc_feature (42)..(42): n is a, c, g, or t
  misc_feature (733)..(733): n is a, c, g, or t
  misc_feature (737)..(738): n is a, c, g, or t
  misc_feature (747)..(747): n is a, c, g, or t
  misc_feature (769)..(769): n is a, c, g, or t
  misc_feature (771)..(771): n is a, c, g, or t
cccccccgaagacggnaactttanttnngtngannnangccntcggccgcgctggtgaacaggacccgtcgccatgggccgtgtgatccgtggacagaggaagggcgccgggtctgtgttccgcgcgcacgtgaagcaccgtaaaggcgctgcgcgcctgcgcgccgtggatttcgctgagcggcacggctacatcaagggcatcgtcaaggacatcatccacgacccgggccgcggcgcgcccctcgccaaggtggtcttccgggatccgtatcggtttaagaagcggacggagctgttcattgccgccgagggcattcacacgggccagtttgtgtattgcggcaagaaggcccagctcaacattggcaatgtgctccctgtgggcaccatgcctgagggtacaatcgtgtgctgcctggaggagaagcctggagaccgtggcaagctggcccgggcatcagggaactatgccaccgttatctcccacaaccctgagaccaagaagacccgtgtgaagctgccctccggctccaagaaggttatctcctcagccaacagagctgtggttggtgtggtggctggaggtggccgaattgacaaacccatcttgaaggctggccgggcgtaccacaaatataaggcaaagaggaactgctggccacgagtacggggtgtggccatgaatcctgtggagcatccttttggaggtggcaaccaccagcaattgaanctcnncatcggaantgcctgtgccgaaggggtccangngccgcggaatggagcccgagaccacaactggggcaagaaacagcgcggccactggtggctccgagcacaaaaaaaaaatagcggcccgaaaaaacacaggcgc

SEQ ID NO: 518140 - DNA, 1212 bp, Homo sapiens
  misc_feature (16)..(16): n is a, c, g, or t
  misc_feature (24)..(24): n is a, c, g, or t
  misc_feature (27)..(28): n is a, c, g, or t
  misc_feature (31)..(31): n is a, c, g, or t
  misc_feature (34)..(36): n is a, c, g, or t
  misc_feature (38)..(38): n is a, c, g, or t
  misc_feature (42)..(42): n is a, c, g, or t
cccccccgaagacggnaactttanttnngtngannnangccntcggccgcgctggtgaacaggacccttggcaatgtgctccctgtgggcaccatgcctgagggtacaatcgtgtgctgcctggaggagaagcctggagaccgtggcaagctggcccgggcatcagggaactatgccaccgttatctcccacaaccctgagaccaagaagacccgtgtgaagctgccctccggctccaagaaggttatctcctcagccaacagagctgtggttggtgtggtggctggaggtggccgaattgacaaacccatcttgaaggctggccgggcgtaccacaaatataaggcaaagaggaactgctggccacgagtacggggtgtggccatgaatcctgtggagcatccttttggaggtggcaaccaccagcacatcggcaagccctccaccatccgcagagatgcccctgctggccgcaaagtgggtctcattgctgcccgccggactggacgtctccggggaaccaagactgtgcaggaaaagagaactagtgctgagggcctcaataaagtttgtgtttatgccaaaaaaaaataaaaaacaaaagaaaacaaaaaaaaaaaaaaaaaaaaaggcagaaaaaaaaaaagaaaaaccaaagcaaaaggaagaaaaaagaaaaaaagaaaaagaagaagaagaggcagagaggagaacaagagggcgcaccacacacagccagcggggccaaacaccaccccacggcgacaacaaccgacagagagagagaccaaccctcacccaggcggagagggaggggcgcgcggagaagaaaaaaccacaaaaaacagccgaacacgcgcaacgaagcgaccacacacaaagcagaagaaaacaccgaaaagcctaagaaggaagaggcacgccaccccgccaccgggggcgacaacggcgcaccgaccacgcacgacagagcatagcaccaagcagcagaaggcggagcaaccatagacagccatcagacccacagccgaggaacacgacagacgcaccacccccaggcgcgccgaagcatagacgaacacacgagataaacaccacagtgacggcggcgcagaggaagcacacgacacatccaacgaaggaaagaacgaaacacaaagcaaaacaggccaccgccagaaacaatcagtcacgccagccccacacaccagc

SEQ ID NO: 518141 - DNA, 769 bp, Homo sapiens
  misc_feature (24)..(24): n is a, c, g, or t
tagtgctgagggcctcaatactanttctctttccctgcacagtcttggttccccggagacgtccagtccggcgggcagcaagactgtgcaggaaaagagaactagtgctgagggcctcaataaagtttgtgtttatgccaaaaaaaaataaaaaacaaaagaaaacaaaaaaaaaaaaaaaaaaaaaggcagaaaaaaaaaaagaaaaaccaaagcaaaaggaagaaaaaagaaaaaaagaaaaagaagaagaagaggcagagaggagaacaagagggcgcaccacacacagccagcggggccaaacaccaccccacggcgacaacaaccgacagagagagagaccaaccctcacccaggcggagagggaggggcgcgcggagaagaaaaaaccacaaaaaacagccgaacacgcgcaacgaagcgaccacacacaaagcagaagaaaacaccgaaaagcctaagaaggaagaggcacgccaccccgccaccgggggcgacaacggcgcaccgaccacgcacgacagagcatagcaccaagcagcagaaggcggagcaaccatagacagccatcagacccacagccgaggaacacgacagacgcaccacccccaggcgcgccgaagcatagacgaacacacgagataaacaccacagtgacggcggcgcagaggaagcacacgacacatccaacgaaggaaagaacgaaacacaaagcaaaacaggccaccgccagaaacaatcagtcacgccagccccacacaccagc

SEQ ID NO: 518142 - DNA, 203 bp, Homo sapiens
agcgacgtatgtagaacgatcggtctctgggtcataaacaaggtaaagaaaaaggtgctgtgctattgatgtgcacatatgtaaacacctcaatgccttaaagagcagtattgccgccagcatgtctcacctccagccctaaggcggttttctcctatctcagtagatggaatatacaatcaggttttacactgagacattcc

SEQ ID NO: 518143 - DNA, 149 bp, Homo sapiens
agaatgttacttggtgagtattaagaggggccgcacattggaagccctcatgagtgcaggcccgcctacttagtcagaggggcacgacgtgggatgtacttgaccccgatcagtccatcgtgggatgagcgcgcttttctagccactca

SEQ ID NO: 518144 - DNA, 338 bp, Homo sapiens
tctgatatgctgtccttgtgtctttcatctgatgaccttaaggggtgggactgttttatcttaagttacaggtgttcaagtccagcccaaggacagcaactatgagggtcaagcttcataggttaattggatagatgttctctgatttgccacccagtggagcccgacgtgccccactaatttatatttcccctggtgtcattttgtactttttatttataattcacccgtaaagtgtatgtgtctatgataagctgccgcggatgtttcatggtatgaggtggtgacctaagtaaagaaggagatgtggcctttctttttttgttaaaaaaaaaaaa

SEQ ID NO: 518145 - DNA, 798 bp, Homo sapiens
  misc_feature (24)..(24): n is a, c, g, or t
  misc_feature (97)..(98): n is a, c, g, or t
  misc_feature (122)..(125): n is a, c, g, or t
  misc_feature (145)..(146): n is a, c, g, or t
  misc_feature (148)..(148): n is a, c, g, or t
  misc_feature (152)..(152): n is a, c, g, or t
  misc_feature (166)..(166): n is a, c, g, or t
  misc_feature (205)..(205): n is a, c, g, or t
  misc_feature (212)..(212): n is a, c, g, or t
  misc_feature (222)..(222): n is a, c, g, or t
  misc_feature (233)..(233): n is a, c, g, or t
  misc_feature (235)..(235): n is a, c, g, or t
  misc_feature (389)..(389): n is a, c, g, or t
  misc_feature (412)..(413): n is a, c, g, or t
  misc_feature (427)..(427): n is a, c, g, or t
  misc_feature (448)..(449): n is a, c, g, or t
  misc_feature (458)..(458): n is a, c, g, or t
  misc_feature (462)..(462): n is a, c, g, or t
  misc_feature (471)..(471): n is a, c, g, or t
  misc_feature (538)..(538): n is a, c, g, or t
  misc_feature (543)..(543): n is a, c, g, or t
  misc_feature (557)..(557): n is a, c, g, or t
  misc_feature (560)..(560): n is a, c, g, or t
  misc_feature (576)..(576): n is a, c, g, or t
  misc_feature (580)..(580): n is a, c, g, or t
  misc_feature (586)..(586): n is a, c, g, or t
  misc_feature (592)..(592): n is a, c, g, or t
  misc_feature (634)..(635): n is a, c, g, or t
  misc_feature (639)..(639): n is a, c, g, or t
  misc_feature (766)..(766): n is a, c, g, or t
tagtgctgagggcctcaatactanttctctttccctgcacagtcttggttccccggagacgtccagtccggcgggcagcaatgacacccactttgcnnccagcaggggcatctctgcggatnnnngagggcttgccgatgtgctnntngttnccacctccaaaacnatcctccacaggatttatggccacaccccgtactcgtgnccagcantccctctttnccttatatttntngtacgcccggccagccttcaagatgggtttgtcaattcggccacctccagccaccacaccaaccacagctctgttggctgaggagataaccttcttggagccggagggcagcttcacacgggtcttcttggtctcagggttgtgggaaaaaacngtggcatagttccctgatgcccnngccagcttgccacngtctccaggcttctcctccanncaccacacnattntcccctcangcatggtgcccacagggagcacattgccaatgttgagctgggccttcttgccgcaatacacaaactngcccntgtcaatcccctcngcngcaatcaacacctccntccncttctnaaaccnatacggatcccggaagaccaccttggcgaggggcgcgccgcnncccnggtcgtggatgaagttcttgacgatgcccttgatgtagccgtgccgctcagcgaaatccacggcgcgcaggccgcagctttttacgggtgcttcacgtgcgcgcggaacacagacccggcgcccttnctctgttcacggatcacacggcccatggcgac

SEQ ID NO: 518146 - DNA, 727 bp, Homo sapiens
cacgtttgacccagttcggttccccaacgctattcccttttagactggtttccctcgcctccgtatacctaacctccccgtttaacgtaactcgcaggatcattctccaaaaggcacgccatcaccctaatgggctctgaccgcttgtaagcacacaatttcaggttctatttcactcccctccaggggttctttgcacctttcccctcacggtactatgcgctatcggttagtaagagtatttagccttatgagatatggtcctcactgattcacacagaattcctcgtgttccatgttacttgggagcaaagttatatgtgtaaggatttacttatacaggactctcaccttctgcggtttatctttccatacaattctaattcatcaatacactatattgaatatcttacagttcttcactactttgtccctcaaccccttaaatacaacggctgtatccttgacatatttaaggtttaggcttgacccagttcgctcgccgctactttgggtatcgtttttactttcttttcctcacgttacttagatgtttcagttcacgtggttccctctttcgtattaagactccatcttaatagattgctccattcggaaatcctagactcttacgttcgattgcaacttatctaggcttatcgcagcttaccacgtccttcatcggctcttactacctagcgcctatagggatcctctagatcgctcg

SEQ ID NO: 518147 - DNA, 586 bp, Homo sapiens
  misc_feature (5)..(5): n is a, c, g, or t
  misc_feature (12)..(13): n is a, c, g, or t
  misc_feature (15)..(15): n is a, c, g, or t
  misc_feature (21)..(21): n is a, c, g, or t
  misc_feature (24)..(24): n is a, c, g, or t
  misc_feature (27)..(29): n is a, c, g, or t
  misc_feature (68)..(68): n is a, c, g, or t
  misc_feature (106)..(106): n is a, c, g, or t
  misc_feature (109)..(109): n is a, c, g, or t
  misc_feature (258)..(258): n is a, c, g, or t
  misc_feature (439)..(439): n is a, c, g, or t
  misc_feature (442)..(442): n is a, c, g, or t
  misc_feature (445)..(446): n is a, c, g, or t
  misc_feature (448)..(451): n is a, c, g, or t
  misc_feature (454)..(454): n is a, c, g, or t
gcggntgactcnnangacccnaanacnnnccaaacccccggttttgctggacggcgcaaaagttggcncgcaccctgctatatgcttagtacaaaaacaataacangcnttgtacaagacaataaaaataagacgaatcgactcacgcataacaaaaacaacacggcggaggcgcagctaactgattcttttggagaggcgttgcatttggggcttgccccgcaaccaggccgagaacaacaaaaactgccctaaggnagagcctgaactggttggatcgtagatcagcaacacagcgaccaaagcaatccgtttgctcttggctcccgattgggagtgtcatgaaggaagcttcgtggcgagggcgatcaacaaaaacaagaagcccgacatcaataataaaaatagagcacgcaactacttctgggggagcttcggntcnttnnannnnccngatttgaccttcaaacgcttatggcgcaatgcctttagctttgttcctacaaccatcccctgactaaatgctagaatccccggccatcatgcggtcattcttcggtatggccgaacatccttcaaacagtgc

SEQ ID NO: 518148 - DNA, 808 bp, Homo sapiens
  misc_feature (800)..(800): n is a, c, g, or t
cacgtttgacccagttcggttccccaacgctattcccttttagactggtttccctcgcctccgtatacctaacctccccgtttaacgtaactcgcaggatcattctccaaaaggcacgccatcaccctaatgggctctgaccgcttgtaagcacacaatttcaggttctatttcactcccctccaggggttctttgcacctttcccctcacggtactatgcgctatcggttagtaagagtatttagccttatgagatatggtcctcactgattcacacagaattcctcgtgttccatgttacttgggagcaaagttatatgtgtaaggatttacttatacaggactctcaccttctgcggtttatctttccatacaattctaattcatcaatacactatattgaatatcttacagttcttcactactttgtccctcaaccccttaaatacaacggctgtatccttgacatatttaaggtttaggcttgacccagttcgctcgccgctactttgggtatcgtttttactttcttttcctcacgttacttagatgtttcagttcacgtggttccctctttcgtattaagactccatcttaatagattgctccattcggaaatcctagactcttacgttcgattgcaacttatctaggcttatcgcagcttaccacgtccttcatcggctcttactacctaggcatcctttgtgtgcccttaattattttaatctattttttgacagctaactctaagaaattgttagagttaattcttttcttgtttgttctactatatagnagcaaaga

SEQ ID NO: 518149 - DNA, 887 bp, Homo sapiens
  misc_feature (16)..(16): n is a, c, g, or t
  misc_feature (24)..(24): n is a, c, g, or t
  misc_feature (27)..(28): n is a, c, g, or t
  misc_feature (31)..(31): n is a, c, g, or t
  misc_feature (34)..(36): n is a, c, g, or t
  misc_feature (38)..(38): n is a, c, g, or t
  misc_feature (42)..(42): n is a, c, g, or t
cccccccgaagacggnaactttanttnngtngannnangccntcggccgcgctggtgaacaggacccgtcgccatgggccgtgtgatccgtggacagaggaagggcgccgggtctgtgttccgcgcgcacgtgaagcaccgtaaaggcgctgcgcgcctgcgcgccgtggatttcgctgagcggcacggctacatcaagggcatcgtcaaggacatcatccacgacccgggccgcggcgcgcccctcgccaaggtggtcttccgggatccgtatcggtttaagaagcggacggagctgttcattgccgccgagggcattcacacgggccagtttgtgtattgcggcaagaaggcccagctcaacattggcaatgtgctccctgtgggcaccatgcctgagggtacaatcgtgtgctgcctggaggagaagcctggagaccgtggcaagctggcccgggcatcagggaactatgccaccgttatctcccacaaccctgagaccaagaagacccgtgtgaagctgccctccggctccaagaaggttatctcctcagccaacagagctgtggttggtgtggtggctggaggtggccgaattgacaaacccatcttgaaggctggccgggcgtaccacaaatataaggcaaagaggaactgctggccacgagtacggggtgtggccatgaatcctgtggagcatccttttggaggtggcaaccaccagcacatcggcaagccctccaccatccgcagagatgcccctgctggccgcaaagtgggtctcattgctgcccgccggactggacgtctccggggaaccaagactgtgcaggaaaagagaactagtgctgagggcctcaataaagtttgtgtttatgccaaaaaaa

SEQ ID NO: 518150 - DNA, 1510 bp, Homo sapiens
  misc_feature (16)..(16): n is a, c, g, or t
  misc_feature (24)..(24): n is a, c, g, or t
  misc_feature (27)..(28): n is a, c, g, or t
  misc_feature (31)..(31): n is a, c, g, or t
  misc_feature (34)..(36): n is a, c, g, or t
  misc_feature (38)..(38): n is a, c, g, or t
  misc_feature (42)..(42): n is a, c, g, or t
cccccccgaagacggnaactttanttnngtngannnangccntcggccgcgctggtgaacaggacccgtcgccatgggccgtgtgatccgtggacagaggaagggcgccgggtctgtgttccgcgcgcacgtgaagcaccgtaaaggcgctgcgcgcctgcgcgccgtggatttcgctgagcggcacggctacatcaagggcatcgtcaaggacatcatccacgacccgggccgcggcgcgcccctcgccaaggtggtcttccgggatccgtatcggtttaagaagcggacggagctgttcattgccgccgagggcattcacacgggccagtttgtgtattgcggcaagaaggcccagctcaacattggcaatgtgctccctgtgggcaccatgcctgagggtacaatcgtgtgctgcctggaggagaagcctggagaccgtggcaagctggcccgggcatcagggaactatgccaccgttatctcccacaaccctgagaccaagaagacccgtgtgaagctgccctccggctccaagaaggttatctcctcagccaacagagctgtggttggtgtggtggctggaggtggccgaattgacaaacccatcttgaaggctggccgggcgtaccacaaatataaggcaaagaggaactgctggccacgagtacggggtgtggccatgaatcctgtggagcatccttttggaggtggcaaccaccagcacatcggcaagccctccaccatccgcagagatgcccctgctggccgcaaagtgggtctcattgctgcccgccggactggacgtctccggggaaccaagactgtgcaggaaaagagaactagtgctgagggcctcaataaagtttgtgtttatgccaaaaaaaaataaaaaacaaaagaaaacaaaaaaaaaaaaaaaaaaaaaggcagaaaaaaaaaaagaaaaaccaaagcaaaaggaagaaaaaagaaaaaaagaaaaagaagaagaagaggcagagaggagaacaagagggcgcaccacacacagccagcggggccaaacaccaccccacggcgacaacaaccgacagagagagagaccaaccctcacccaggcggagagggaggggcgcgcggagaagaaaaaaccacaaaaaacagccgaacacgcgcaacgaagcgaccacacacaaagcagaagaaaacaccgaaaagcctaagaaggaagaggcacgccaccccgccaccgggggcgacaacggcgcaccgaccacgcacgacagagcatagcaccaagcagcagaaggcggagcaaccatagacagccatcagacccacagccgaggaacacgacagacgcaccacccccaggcgcgccgaagcatagacgaacacacgagataaacaccacagtgacggcggcgcagaggaagcacacgacacatccaacgaaggaaagaacgaaacacaaagcaaaacaggccaccgccagaaacaatcagtcacgccagccccacacaccagc

SEQ ID NO: 518151 - DNA, 460 bp, Homo sapiens
aaaaaaaaaaaaaaaaaaaaaaaaaaaaatttttggggccgcccggcccccaaaaatttttaaacccttctttgggggggggggcccctggagcaacttgggccccggttcccagaaaactcccggtgcactaggaacgcgctgggggctcttctccccaatatataaaaaacgcgcgcggggggaggggcaccgcgacggggtgtttgtgggaacaacaactcccaagagttgggtcgctacgggcgagcaactaaagcgtgggcccatatattaacaaaggtcaagcgctccaaaacgaggaagcgccgaaatactaaaaaatttaacgggcccgccacgggggggggactaataataatagcaccaacattgcagtagagaggaaagcatagcaacagcaaaaagagaaacatcgactcacacgacatgcagtatacttacataaatacacacaatg

SEQ ID NO: 518152 - DNA, 929 bp, Homo sapiens
ggcattggcagtatctgccgccatcctcttcctgtgaggcgctgctgagaccctggaccggccctcctgagagtgatgccggtgcgggctgcccgcggagagggaccctgtcgccatgggccgtgtgatccgtggacagaggaagggcgccgggtctgtgttccgcgcgcacgtgaagcaccgtaaaggcgctgcgcgcctgcgcgccgtggatttcgctgagcggcacggctacatcaagggcatcgtcaaggacatcatccacgacccgggccgcggcgcgcccctcgccaaggtggtcttccgggatccgtatcggtttaagaagcggacggagctgttcattgccgccgagggcattcacacgggccagtttgtgtattgcggcaagaaggcccagctcaacattggcaatgtgctccctgtgggcaccatgcctgagggtacaatcgtgtgctgcctggaggagaagcctggagaccgtggcaagctggcccgggcatcagggaactatgccaccgttatctcccacaaccctgagaccaagaagacccgtgtgaagctgccctccggctccaagaaggttatctcctcagccaacagagctgtggttggtgtggtggctggaggtggccgaattgacaaacccatcttgaaggctggccgggcgtaccacaaatataaggcaaagaggaactgctggccacgagtacggggtgtggccatgaatcctgtggagcatccttttggaggtggcaaccaccagcacatcggcaagccctccaccatccgcagagatgcccctgctggccgcaaagtgggtctcattgctgcccgccggactggacgtctccggggaaccaagactgtgcaggaaaagagaactagtgctgagggcctcaataaagtttgtgtttatgccaaaaaaa

SEQ ID NO: 518153 - DNA, 941 bp, Homo sapiens
  misc_feature (20)..(20): n is a, c, g, or t
gcgcccgcggagagggtatnggagtggtgggcgcggcggctcgggggcggggtcccggaaagccgggctggcgggggtaccgggccgcccgcgcgctaatcgtgagtcgcccccaggacccgtcgccatgggccgtgtgatccgtggacagaggaagggcgccgggtctgtgttccgcgcgcacgtgaagcaccgtaaaggcgctgcgcgcctgcgcgccgtggatttcgctgagcggcacggctacatcaagggcatcgtcaaggacatcatccacgacccgggccgcggcgcgcccctcgccaaggtggtcttccgggatccgtatcggtttaagaagcggacggagctgttcattgccgccgagggcattcacacgggccagtttgtgtattgcggcaagaaggcccagctcaacattggcaatgtgctccctgtgggcaccatgcctgagggtacaatcgtgtgctgcctggaggagaagcctggagaccgtggcaagctggcccgggcatcagggaactatgccaccgttatctcccacaaccctgagaccaagaagacccgtgtgaagctgccctccggctccaagaaggttatctcctcagccaacagagctgtggttggtgtggtggctggaggtggccgaattgacaaacccatcttgaaggctggccgggcgtaccacaaatataaggcaaagaggaactgctggccacgagtacggggtgtggccatgaatcctgtggagcatccttttggaggtggcaaccaccagcacatcggcaagccctccaccatccgcagagatgcccctgctggccgcaaagtgggtctcattgctgcccgccggactggacgtctccggggaaccaagactgtgcaggaaaagagaactagtgctgagggcctcaataaagtttgtgtttatgccaaaaaaa

SEQ ID NO: 518154 - DNA, 328 bp, Homo sapiens
tgccgtgggacattcacgtccattcaagggctcggattacatgtgtgacctaccttgcctggcctgtttgacttcttctttacacaaaaaacaacagtgtgcgttggtccatttttttttctgtgtgtatttgtgtgtgtgtatatttttcatgtattagtagtatgtaaaagagtaacacaaacaaaccccatacataataaagtagaatcacaacaaaatgaaacaagacaatattagtgggatgtaaaagaccctccctggtacaagaacacctttctcagcattataaaaaaggtgttcctacagcctttctttgacccccagt

SEQ ID NO: 518155 - DNA, 974 bp, Homo sapiens
  misc_feature (16)..(16): n is a, c, g, or t
  misc_feature (24)..(24): n is a, c, g, or t
  misc_feature (27)..(28): n is a, c, g, or t
  misc_feature (31)..(31): n is a, c, g, or t
  misc_feature (34)..(36): n is a, c, g, or t
  misc_feature (38)..(38): n is a, c, g, or t
  misc_feature (42)..(42): n is a, c, g, or t
  misc_feature (234)..(234): n is a, c, g, or t
cccccccgaagacggnaactttanttnngtngannnangccntcggccgcgctggtgaacaggacccgtcgccatgggccgtgtgatccgtggacagaggaagggcgccgggtctgtgttccgcgcgcacgtgaagcaccgtaaaggcgctgcgcgcctgcgcgccgtggatttcgctgagcggcacggctacatcaagggcatcgtcaaggacatcatccacgacccgggccngcgggcggcgccgccttcgggccaaaaggggtttggggtttcccttttccccgggggatttcacggtaattccgggtatctaaaggaaaaagacgggatacgggaggactgttttcactttggtccgccggaagggggcaaattttgcaacatcggggccaaagtcttagttgctaatgtgacagggccaaagaaaaggtctccaaggcgtcaactagttggcaatgtgctccctgtgggcaccatgcctgagggtacaatcgtgtgctgcctggaggagaagcctggagaccgtggcaagctggcccgggcatcagggaactatgccaccgttatctcccacaaccctgagaccaagaagacccgtgtgaagctgccctccggctccaagaaggttatctcctcagccaacagagctgtggttggtgtggtggctggaggtggccgaattgacaaacccatcttgaaggctggccgggcgtaccacaaatataaggcaaagaggaactgctggccacgagtacggggtgtggccatgaatcctgtggagcatccttttggaggtggcaaccaccagcacatcggcaagccctccaccatccgcagagatgcccctgctggccgcaaagtgggtctcattgctgcccgccggactggacgtctccggggaaccaagactgtgcaggaaaagagaactagtgctgagggcctcaataaagtttgtgtttatgccaaaaaaa

SEQ ID NO: 518156 - DNA, 374 bp, Homo sapiens
  misc_feature (216)..(216): n is a, c, g, or t
  misc_feature (231)..(231): n is a, c, g, or t
agcgagcagcgagctggctggatcgccgagcggcgagtgagggagccgagccgcccgccgccgcagccctgtccctcgcgcttcgaggacgagagaggtagcgcgcgcagaccgaccgaccggggacgggaccagcgacgcgagcgctcggggcaggcaggacggtcagggaccgcgacgcgaggcagacccgaacgcgtggatggcagtagcagngagccgaagccggcngttgcacgcggaggcggcacggaaccagtatgcgggctgcctcgcgccgtgttggcagttgagggcggaagccggctttggcccctgagctatgttggacgaacgaaaagaacaaaagaatctaaagtttgagacacaagaaa

SEQ ID NO: 518157 - DNA, 1288 bp, Homo sapiens
catgcggagctagatagataaccgtgcatgagtatcatcctactattgataagaatagagatcaaatacaactattaataataatatatagctctattagagttaactaatattataagactatcagcgcttaagttttttaaggtatgaatatagattagtctttaagatttgaggacgaggaattatgaagcacgtaggaacgcagtaccgagtgaggcaagggagaagagatacatagggtttcctcacagaacgactgtagcgggcaccgctcagaggaatgcaaaggccttccttcagtggcagataaccaccctggtagtagttaatagaggaaataagtcgaggcaggtagacagccgaactaccagcacggcgcgccgtaaatttagagtaactcaatcagaaacgggtcaaatgacttgtgaagtactctaacacgttgattagggtagagcgtgtaagagctacgtcggttgaaaatgctcttgaagtcatagcgaatggttagctaaggctgagtttatacagatcaatcccgaaaggggccgagtctatttaacagaagaggggtagttgacaaaccgagagggctcgagtgtataaaagatccttagagggagttccaatagatcgcagggacagaaaataaggggggtcaattccaaaaggcactttacgttaacagctggttataactttaaaaacggctaggtactgaaaaacctgggatagagtagtgtacaccttggtgagaagttgggtcagaggaattgaaaaacgaaattaggcgagttaaatgagtaggcaacgatggacgaaaggtggggagaaaaacgagggtaattgagctaggaacacgtcaccagtgaggaaaacgaggcggaaaagcaacaagacgcaccatacggaaggaagaagaagtagcgcgcaaaaaaaatccatggcaccgtggatttcaattggaatacccaaataaacgtgggtaacagggaaaagcgatatcgtaggagatggggaacttcaacagaagtgtgtgacccaacacatggagaactaagggcctcccggaagaaggctcagcaaatgtcaacaccagggaacgaaagagagcggggataagagaaaaacacggaacaacacagctcgtaaaaaggcgcgcccaagagaaaaaacccaatgaggacccacacagagaacacacaaaaggaaccgtaccaaactccatgtggcagggcggacgtgcggcccccgcacgcccacacggcagtgtgcagaacaccag

SEQ ID NO: 518158 - DNA, 901 bp, Homo sapiens
ccaccctcggactttaccccagtgtgcaccacagagctggagagctgcaagggtggcaccagaattggcaagaggaatgtacgtgatggccctttcaatagacagtgtgtgaggaccatctttgccttggagcaaggcatcatcaatgcttacaattgtgaagagcccacagaaaagttaccttttcccatcatcgcaggattaggaatcgggagctgtgccaatccctggtgtgggccatgcctggtattcccagccagagcaaggctgacaaaggggcatgccttgtcgcacaggctccgcgtgggtggtacgtctctcgggtccctgaattacacgcaaggcttggaagctggttcttatcccttcttacccagtttacccatcttgcaaggggaaacctctggactggcaggactcccctcaaggggggctacgctcaatcattcttccttccacaaggcgttgtaccacagccaggcacaaaacacaaggggtttctgccaacacccccaggtgtggactgtggaccgcggactgggggcatacggtggctggatagggctcccctttccaataccaattccccctggacatccaaacgaaacggcccacataaaaaaccttttttcccccggaaacgacggacgctcttcaacccaacaaggaggcctcaccaattctgttgcgcaacggacatactaccttccggctaacacgaccgccagaggcctataagtctctgttgggcgacaccctgggtcgcttcgtcgaagcccaagcacgcgattggtcacgctgccacaattgtcgtccctccatcgcacgccattttccattataccaccattccttgggtggtcatccacagccaagcggcttcatcaagggttggtcatac

SEQ ID NO: 518159 - DNA, 789 bp, Homo sapiens
taaattcccatatgggctaaaaaatccaaattttttaaaaatctgtctctctttcttctctcataaagtgaattatccctttttttggttttatgtaagtgtatatattcttagtttttcttggaaatcattgtaatgttacactttgttgttctcaaatatctggcgtgatggctctcattatctcttcaacaaaaaaacacctttaatttgtcgccatgtgaacactgtaaacacttatgccagagtgcttttatatttgagaaaacccgcagtgtgctcttcgttggtgtgcttttaccaacacaacacaaaaggaaaaacaagtgggggtggtttaaccattttgaagaacaaccaaatttgtgggggcgacaaaggtttggttggtgggggccaactttaaaattttttacatccaccccctcgtgggtgttactttctgttggtgtatcacgccaacaaagccaccaagtaattttttttcttttctctaacaacccagagggcttcactcctcgttggggcaagcttaacaactctgtggcccacacgacagggggggacaacaaatgttttggctcccccaaaggttcgtttttttatttacacaacaaaaccaaaaccatttcttttgttttttttgctcaaccacgctctcttaacaaggttggtttttgagaaaacacttgggagggacatattaatcgttggcgcggggggaacacaacacaattcttttataagaaacggcgctctttttttttttaaaaaagaccaaacaatgtg

SEQ ID NO: 518160 - DNA, 148 bp, Homo sapiens
ggacgcccctacgtgatcatcagtgccgccaagggttgcgcctacataagtcggaggaccgctgttcgtgctggacgaaagcttgccattgacacgcagaattacctggagcagcagttggccaagcccctcctgcgcatcttcgagc

SEQ ID NO: 518161 - DNA, 299 bp, Homo sapiens
  misc_feature (266)..(266): n is a, c, g, or t
ccccctgaatcccagcactttgggaggtttctaggtgggtggatcacaaggtcagggggagcgagagcatcctggctaacacggggaaaccctgtctctactaaaaatacaaaaaattaaccgggcgtggtggcgggcgtccgtaatcccagctactcgggaggctgaggcaggagaatggcgtgaaccccggaggtggaggttgcagtgagccgagattgcgccactgcactccagcctgggcgacagagcgagacctgtccccnctcaaaaactaaatcaaactacaaaagcttgtt

SEQ ID NO: 518162 - DNA, 243 bp, Homo sapiens
tacacagtgaggtctcatgcccaaacatgaggcacatgtgtcagaggcatttgaaccagagtcactccatcttgaatgggggctgggtaaaataaggttgagacctactgggctgcattcctgagagattaggcattcttactcacaggatgagacaggaagtcggcactaagtacaggtcacaaagaccttgctgataaaaagaagtggtaaagaagccggccaaaaccagccaaaacccac

SEQ ID NO: 518163 - DNA, 1253 bp, Homo sapiens
agtgcccacctgtctgctgcatgctgcatagtgaacattggaatatatgaggatggaagagatgagaagaattacctcgtcactatagcataacatgagtacacgaagattatttactcgtcatgagagatagcgatgggaacagcttagtatagtatataacaaataagcagatgggatgcagttagcagacaaaaggatcagaattattacacatcagctcagtcatcggaagtatttaggatgctaagttgagcagatttgacatcaagttctagccatatgctatagacacagaggacatggaagagggaatagagatataggagatgaatatacagtagaagatacatcaatgtagataagataagcatcaagacgacgacatagagatatgacgtagataactgcagaagaaagcagtcgttactaaggctaggatattttagtagatgagagagtatagaggaaagtagaaggaaggcagaatcggtatgcaatgagaagggagagagcagaggattgaggtagatacaagacgatacagtcagaaatacgagatactgatctagtagctgcaagaacaggcgccgcagacggagagaagagaatactcgtaccaataagtataagcaacttatagtacagagatggtaaggaacgatagcacagtctgcacagctatggatacggatgtcgagtagaacttactggatgtgagatcagcagagacagcttagtgatagattacgctagatacggtctgccgtccagtgtgtatgtgtatgatagactaaatgagagtctagggtatagagaactgatagattatctcaacagtgatctactctgcacgttcagagaactagcgagatagacgagaggatgatgtacaacatgtataactgtcatgtattgctatcatagccgtgtatgaagcaggatacgtctcctcaacaaataacggaatgcgaaatcagagatagaataataagcgacagacacaagattactctaaagtataacgaaacgacaactacaagaagtaaaagacataagagaaaaaatataagaaaagtacatgaatgaaaagcaaaagaggaaaaggaaaagagatagcaaagaaggagatctaatacatcaatagaacagcaaagatagaagtaatgaatacaaacatagaaggaataagagtctaggactaacgtgaacgatcgacactgacagaaaaaataaaacaacagtataattca

SEQ ID NO: 518164 - DNA, 424 bp, Homo sapiens
tccttcgagaaatgtctcactgtgttgcctaggccgaagtgcagatggcacaatcacggctcactgcagcctcaatctcctaggctccagaaatcctcccatctcagcctcccaagtagctgggactacaggcaaacaccatcgtgcctggcttttttttttttttttttgggaaaattgaggtctcattttgttgcccaggctagtctcgaactccgggattcaagcactcctgcctcaacctcccaaagtgatgggtttaccctgtactcactttatacctcactttctatagactccagaatagctatccactatttcagcgatcccagatctaaatctctaattactcagctacctcctgagctctataccatttattacaaactacacatctgcaccttcccaatccttccaaccagaa

SEQ ID NO: 518165 - DNA, 981 bp, Homo sapiens
atggcacatgcgcgcgcaagtaggtctacaagtacgctacttcgcccgtagtcatagaacgagaccttatcagcctttcatgatcacgccctcataatcattttcctttagtctgctttccgtagctctcctgtagtgcctcttttcgctaacgaactcagcaaggaataaactaatcgtaagtactaataattctcagacgcgtcgaggaaactggaaaatcggtctgtaacgtatgcgcgtggcccggccgatgcaatcctagttccctcaatcaatccatcccagtcccgtaacggcatccctttagcataaaacagcatcgcaggatcatacgaatccctcgcctataccactcaaagtcaatttgggctgccaatggatagctgaaacctagcgagtacggccgagctaacggacgggactaaatcctttcgaaactgcgctatcgataacttacacgcaccattgattgcctagatatccgaggacgaacctgacgatcttccgttggacggtatgaacaatgcggagtagtaagcatcaccgattggaatgctcaccacaatatcggtgaatactgtaacttaacatcaacaaggagtgtactttggcacgtcaatgagcctgtccccataatttaggcctatgagcatacaggattcgccattccgctggacggtctaaaaccaaactctacaatttcaactcgtttacaacgaagcgggagggtaatatgtactgcgtgcaattggctactgcatagatccgtattggagtagcgatagccaacgagtttacatggcgccaatcggtcctagaagttaatttccccctatacaagtctttgggacataatggccacgtatttgacccatattagcacctccttcataccacgtcttagaaagacataaaaaagaacaattcacatgtaaacacacttttgttcggatccactgaccctgaaacatttattga

SEQ ID NO: 518166 - DNA, 501 bp, Homo sapiens
  misc_feature (207)..(207): n is a, c, g, or t
ggcaacaacaaagggccccccaggccggcaagacaggttaggggcgacccggcaagatcacagttagagggagaaggggaagccctgagccgggccctcccccaggtcctggggtacagccatcccgttaagccggcctcacccaaacccgggtgggaccttaagccctggccaagttttaaggttttgtcattaagcaaagggaantgcaccgggggaggtcctccctgggcccccagcctaagcccaattttttacccgaaagaatcattgccttggcccctccctccggggggcccccatcacctttaatgtttccccccctgggttaaacaggggaaaaacgggctgggggaaacctggatgggggccaagtcccctgtcccccttgggggcaaaagcccattgaaaaaaaaccagcccagccggccccctattttgtccgggaaaatttttgggggggggacccaaaaaaaaaaaaaaaaaaacccattttttcca

SEQ ID NO: 518167 - DNA, 206 bp, Homo sapiens
gatgcagcatatccccagtaagtaaagacaggcagccccccacgaaatcggagaagcctcttcaccaggtcagccccttcctcactccccttgttccctggcgacactgtgcagagggacactttccagtctttccccgccatcgctggacctttggacataccggccagattttcacctcttaaataaaaatgcagtgggtgtca

SEQ ID NO: 518168 - DNA, 611 bp, Homo sapiens
gatctctgcagggctgaggacgaggaggagaccacgttcagaatggagtccaacctataccaggaccagagtgaagacaagagagagaagaaagaggccaaggagaaagaagagaagaggacgaaggacgaaacagacagcaaaggaaggagagagcaacttgtggacctggcatctggaggacaaaagagcccggagaccatgagagagcaaagagcacagtcatgtggacagattccgtgtgtgcctcttccaggcagtcccccagaagatgcctcttctgccccctaaaagcagttgccttggactttgaagcccgtgcaaaatgactccatctggggattcagaatacagtgtatctcaagtgaagaacggcttgggaacccagcccacctccctcactggggggctctctgggcaaaactatggttttacatgcacccctcttcctgagcttggtcccttgcctggtgattcttcttaatactcggagagccatcccttggtttgaggaagacacccgcaatcctcccatgatctcatggcatccaccctggcttctccccaatggcctgaattttcattatttacacttctggcctgaatggtct

SEQ ID NO: 518169 - DNA, 222 bp, Homo sapiens
cttgcgtacctcataacactgggaaagaagtaacagttgagtgcaggattgatggatcagccaacctaaaaagtcagtgatgatcgtgacaagttatatgggacgagttatgtacaaaatcacagcacgtgcaatagtactgagtaggatatctccgacagagtcaaatggtagtgttgtctagtcgttcatttgtgtaaccagcctgaccattcacattcg

SEQ ID NO: 518170 - DNA, 796 bp, Homo sapiens
gcctgaggtacagcggcggtttctgaggttcttcactcgacgactgacggagctgcgcgcggcgtctccacacgcaaccatgcaacgtcgcacaggacacaaaactcaaggccaaagcagctcaagcatgctgcgcaaatttcagacaaagggaatcaaacgttgctgggacaaatgcgacggaccctgaacgattgacccacatatgctatatgcacgcatggacacgactggactgaactatgagtgtgcctctccgacggacaattgaccacgacttacccagattgcgctctcaccctgacccaaggaactccccctccaggctcctctttcctcacacacggacagccacccaaacagagcacaagggcccacacagcctggctcccacgacagaacacgacggcagcgcacgcgacgcgcacggcgccccgcccctcagacctcaacccaaacaccccacccaaagcactcaaacgcactcgcacaccccaaaacaaggtcaccaccacactggctacaacaacccaccggaaccgcgacaaccccaccaccccccccaagcaccccgccaacctcagcgaaaccgcgcgcaacccaagcacctaccatgcaaccccccgcgaaaggcacaccacagaccgcacaagcaccaggaaccaatggcgccaacaccgaaccgacatcgaacacaccgacccaacgagacctgccacgccgcaagccctcgaacaccaacatcaaaagcaaacaaacacccacgacgacacaccacacaacacgcccccaccca

SEQ ID NO: 518171 - DNA, 514 bp, Homo sapiens
agaagagatgaagaggaataatcttccagaaacagcagttattggatctatctgtggacattataatgagcgctgttgagtagaacaatgaaggaagaacttgttgcatgagcaggctctgacagcacctgaagcaatatgctcccctgcatggccgtgtacagctcccaaggccagtcatagctgatcctcctccagaaggttcaggaatactgctacgactacatccatttcatgaaagcctttcagaagattcgtggttctcttttataaagctgatgttctgagccactaagcactactgaaatggtataaggaagcacatgttgctaaaggcaaaagtgtttttcttgaccagataaagaaattagttgagtggttacaaaatgcataagaagaatccgaatcgtaaaggtgaggaaaatcaaatagctcaaccatagcactatagctaggttaccacacaccactttttgattgggaatgctgaaccatttgagaagagcaacttggc

SEQ ID NO: 518172 - DNA, 165 bp, Homo sapiens
tggccaaaaaaaatttgggtcccggaaaagcttgcaaaatgattcctggcactggggggggattgtttgaaaaaaggagaagaaaaattttacccctttttacataaaggaaaaagggtgaaaaaaagggaattgcccaaaaaaaataaagaacttaaacctccc

SEQ ID NO: 518173 - DNA, 846 bp, Homo sapiens
ctggagataatgtgttcatcctttctcggttacagctgtgctaattaaagcacccagcacattagcagggctcatcactggtagatgtaatgatgggtctctatgccccaggtactgggagaaacctacagtacgttttaccaactcattaaggagattttttttggcgaacagattgtttggacgattcggtaaagaatgacaaagaatgattacagcatcataatcgaagtgattaatatgctgtcgtcgtttgctcccgtgcgctgactgttccacattgcagcgattcagtacaggagggattcaacgtgtgcatacttgaaacaattcagccacctctgatgttcaccattctgcatgagtaaactggtgtgagtgagcggatgaacttgcaaagaagcatgacctgggccccgcgactgagccctgacccagtgtacagaatgacctgagttatctggtacactgaggctctgggctcagacttccatttgaggtgtagagctggatgggggtgtgctcgagctccctggagagaggaagatagacatgcccttcctgtgggcatgccccagggtctaggggatccaacacttgaatggtgatagagagcataggcctcccgatagtaatgttctcctcaatgtctagcggcaatggtccaggtcaaagcccgaatcctggtctggatcattacaatgtcttcgaagttgctgtgcttgctgctcaggcgccaagcctccaaggcatctgtaattctgaattcactttggtcattcttcccagctaggcttgatgcatgctcccatgtcctatggggaagtcccattctttaggggcacg

SEQ ID NO: 518174 - DNA, 396 bp, Homo sapiens
cctatacacacacgacggcctctagccggaaggcacacacccgagacaagcgaaggaacagaattcccacgggaacacacgcccaacaatgcctgggctccagacagccattctgattccacaagacagggtaggactcatgaagtgctgggtggcggtctttttaagagatttagaaccagagatccaccccatcccagtctactcaacacaaaaactcacaaatctctcctttcccaccaaaccccagccagaatggggctcctttccctctgagttcctgtagtgttagatttatggtttctttcggctctctagtcaagaatcagactctgttcccagagttcccacctcctcctgcaggccatgcacctagtactaagtgagcagtcagta

SEQ ID NO: 518175 - DNA, 933 bp, Homo sapiens
ctacggtcccgacccgcgggcgatggcggggtacctgggctgggatccgtgagcaagcgggcgagggcagcgccctaatcaggcccggagcgatggcagccttgatgaccccgggaaccggggccccacccgcgcctggtgacttctccggggaagggagccaggacttcccgacccttcgctcagagcccatagcagctcccggtagctgatcctgcatgaagcgagacggaggccgccttgagcgaagcggacatcaggggcttcgtggccgctgtggtgaatgggatgctgcgctagggcgctaccgtatcggggccttgctgtatggtcatccgacttcggggtcagtggcactctggagtgagacctcgtgtgctgacccatggtccctgggctcacgtcgggcacagtcgcgctggccgtggtccagtaggcctggctgctcgagcgacgcgttgtgtgacacagcattccgacagggtgggtgtgtggtagacgacaggtctacggctgggtgcctcgcgaccctgcccttgggcgtgcattgtggcctgcagaggtgccgaatgatcacgcggacgtggtctgggagcacacaagtgaggcacccttggagtaagctgggagtcatattccgtggattcaactgtcgagtccagagcccagagcagtatgcagagtgctgctggacctatgcgggctgctgtatcgtgggtcggagtgagcagctggttcctgcggacggaatcctatatgctggccagagatgtgacagccatccgtggcacggcctgccacgtctgtcacagactccattctcagtacagaaacgtcggtggaggggcctgtccggtctggtggtggacgttaagttcggagggggccgccggattccccaacgaggagctggcccgggagctgggaaagacg

SEQ ID NO: 518176 - DNA, 104 bp, Homo sapiens
taccacttaaagaggaccagagcttctgccctactgtcaaccttcacaaattgtggactttgctccaagaaacagacatgggtgaatgcgtccgtcgaacttgc

SEQ ID NO: 518177 - DNA, 152 bp, Homo sapiens
tgtttacatggctgaatagtacacctattgtgttacaagaccatattttctccacccactcatccgctgacagacgacaggggttagttgacctatcttggttatatgtgtgactcatggctgcacgtgaaccattaaaggtgcagggtatc

SEQ ID NO: 518178 - DNA, 783 bp, Homo sapiens
gtctgggcaccttcctgggctggcaagctggctgcctcctgcatcagccactgcccttcctgtgttcccgagccaccagacacagctctgagaagctcctggcatgcttctgtgtgccactggctcgaatctgggcaggaaggcaaggccgcagaagtatctggtgacaagaaggaaaccccagagcctcagagaccatcttctcagtggacaaaattaagggccgaggaggggaggggcgtgctggaagtctatgggactgcatctttctgaggcccaggagcagccattccccacacctgtaagcccgaaaatgagccacagtaggcatagctgtaccccagcgaacactagtgcccccagccctactgtatttccgttcctatcaataacaatgggatgactcggagacaggtttcaatctgaaagtcgtcctggtcagtttcaagcgagtgtctcgatgagaaggaagaggtcttgctggatcgccctactttgccagctgggaagggcctggtcaggtttctggtaacagctctggggcaccgatcttctcattcatctccgaaggacgtggtctccaagctgcaggagtcatggagcgcctctaggggctggccccgcatgagcgagcgactaccgcagtcctgcaatgccagtggtggcccgacgagctgagcaaccggcgtggtggacctggagcgccgttccaccacccggagtctggctgccggaggtgctgcgccctgaccggcctgcactggctgagctgttcctggaggg

SEQ ID NO: 518179 - DNA, 89 bp, Homo sapiens
cgcgccacaacagcacaggtattttgaaagcgaaaataaggttttcttgttttccccgtttctggtacataaatggataagaattccgc

SEQ ID NO: 518180 - DNA, 120 bp, Homo sapiens
gagccaggagtagatgctgcagtgagcatcgtaccactgcactccggcctggacaacagagtgagaccctgtcccccaaccccacaagagatgggatcctactctagggactattctgta

SEQ ID NO: 518181 - DNA, 715 bp, Homo sapiens
  misc_feature (9)..(9): n is a, c, g, or t
  misc_feature (125)..(125): n is a, c, g, or t
  misc_feature (211)..(211): n is a, c, g, or t
  misc_feature (218)..(218): n is a, c, g, or t
  misc_feature (287)..(287): n is a, c, g, or t
attggactngggaggcgcggtgaggagtcaggcttaaaacttgttggaggggagtaaccagcctgctcctctcgctctcctcctcgtctgcgccgcgttcagaggtgcccatcagcctgtgattnattttatatctgctttttataaagagagaaatatatatatatatatatttttttttttttcttcttaagagaaaattcctgtccangagaaantaaggcaacatcaatgagggagagaagagccagccagaaattatccagcaaatctatcagggatcctantcagaacgtgaaatgcaagatagtggtggggggaagacaggccgggggggaaaactcgggcgcgtgccccgtgtctgcgccagggagtgctccccgagaatacgttcctacagggtggagaatacacggcagtttggaaatcgacacacaaagaatagagtggagcctgtgggacactccgggttctccttactatgacaatgtccgccccctcttttaccctgattcggatgctggctgatgggctgtgacatcagttagaccagagaccctggacggggtcctccaaaagtggacaggggaaatccgggaattgggcccaaataccaaaaggctctgggcggctgcaagtctgatcgggggacagatggttacgtacatagtagagtcctacaaatcacaggaagaacccagggtcctaggaccgg

SEQ ID NO: 518182 - DNA, 767 bp, Homo sapiens
  misc_feature (521)..(521): n is a, c, g, or t
  misc_feature (683)..(683): n is a, c, g, or t
gaatagtatccgtagtccttgcagttgcgagcttcgtcacgggggtgtgccttcaaaaagcggcgaaccgaaacactcgcggcgtcccatcggcgcctctctccggtggatctgggtaaggggacggttccctctgggacgccaagagtattgtagtgttccttgctatgtattgatcctagggagggcccatcacaggtcatgcattgcctcatatgtgccactctggctgcgcttcgttgtacgtagggctgggcccttggcgtagcctcacacagccaggcggtgacgccgtagccgataggattgcaagccatctacacacgcgtggaactaatataatagtggagcgtcgctcgtgtactgtcagctttcacctcccaattcgcttggcagatcctgggacacccgtcgtggtcctctgccaatgcagagcagtgcaatccagagctcgttgagcagacttcgactgagaccggagtagaccagttgcaatatgcgtactgacgacaagacacagnctgaagtgacatagcacggcgcacatatcgtgacctgtacacagggatgtctatgtactgtagctatgttccccctaggagcacagaaagaaccctggcgggcattttatacaccctggggcatgtctacatatgcgttgtgaggtggattgcaaattcccntcctatttcatatgtaccaaatatcttctggaccatacagtgccggattgatccgcgcagggtggctcatggctgcaaagctaa

SEQ ID NO: 518183 - DNA, 1027 bp, Homo sapiens
gcaagatgtcgaagcgaggacgtggtgggtcctctggtgcgaagatcccggatttccattgggtcttccggtaggagctgtaagatcaatgtgtagctgacaagcacagggagccaaaagaacctgtatatcatctccgtgaaggggatcagagggactggctgacatcagacttcccgctgtctggtgtgcagtgaccatggtgagtggcccacagtcagagaaagggcaacaatcaggaggctcaggaaaaaaacagggtacatccatgcagctgggtcatttcgacaaccgacagggtcatactcggtggacaaatcactggccgctgtgtctttgacttcttgacacgagtaactgcagcgagtcaatagtggaagcagatagaagggagactgacgagggttgctggacattagcgggaccagtagtcaaaaggagtgtgcatgacctttgtcgtgcgctgcggacttgcactccaaatagctaggcaaggcagtcttgcaatcggacgttctcctaggtactatgttgtaagcacacatagaagaataaaacataaaagtgcagtgagcgaatggaaaacatcgacaaacctctcagggagtgcctgtggaggggttgggggagcaacacagggggcaagtggaagcgggagcaagggcgaagaaggggggccaccggtggcgcgacatggtgaggcaaaagcagctgggaaacactgcgccagagggcgcttaataagcgaccgggtattaaaccgtgcaataggaggcggggtactcctgcttggatgacttcggagacaccgccatgcgggaagacccaccgcaaaggagtcccggtcattgggttccatggaggacacgggtgtagccgtgggttcttggggacccggggacaagtggctcgtacttcgcaagcacactgacacgtgatcaagggagcgcgcgtggctgcggcgagccttggttaatcagggaaacgataggcacactgacacaagcaaaagaacacaggagaccaa

SEQ ID NO: 518184 - DNA, 845 bp, Homo sapiens
cgaaggacggaggcaccgaaggacggacgcccccggcacacgcagacgcacagagctcggcgcggcccccgtcgcatacacactggcacagacacaagcagggacacacgcagacacacgcacactcgcgcgcgcatcctcccgccagcctgcccgcctgctcgccggcgcccggagcccgctctggccgcgtggatgatctgaagctgccctctcgtccttcatttatatcaccagcttgctttattgctgagaaagcttcctgccctggaagatggcacccttccccatccagacaccgttggggaatgaattatgagggagccaggatgtgagagagagaaccacgctgctgatgactccgagggaggggccctggacatgtgctgcagtgagaggctaccgggtctcccccagccgatagtgatggaggcactggacgaggctgaagggctccaggactcacagagagagattgccgcacaccctcctccctacgccgagcctcagatccagctcagaagccaccaactcgaggcgcttgggagccactcgctcactgtcaaggagcaagcctgtgcctgttcgctgcctcacagtgtcctgcgttgcctgtggggtgctctggttcaggcggatatggccacatctgggtcgacagaactgccaactaactcgatctccatcttttgcctgacgctcctgaaacagctggaaaccccaaagcactggcttgaactctggagacgtggatatgtacccaggtactgatgctggctcttatcttgtaccttgtgccctggtcctcggtaccaccctggtgttgacccttcttgtgggacacc

SEQ ID NO: 518185 - DNA, 324 bp, Homo sapiens
cgccagcatgaatatgcatacagcagtctaacatacaggatcaaaaaggtaaggacagggtgacttggagtcagttggagtcagccccagtttattcatctataaaacaagattaaaagtaaggctgggccaagagcgactacaggccggtcagtcgctctgggctatatggtattttcccctttccaggacgggaatgattggtctaatgatctcgggtgtctggatgggacaggggtgtatagaagctcagtcgtggtgccagaatggctcattgtggccagggttccattgcttctaggccctccaagagcgacggacagg

SEQ ID NO: 518186 - DNA, 101 bp, Homo sapiens
agcccattgatagtactgtgtccaacagctgaaggaatttgaggggaaaactttagttgtcagtcaccaaagaaggcctggactttccgtatggatgcaaa

SEQ ID NO: 518187 - DNA, 262 bp, Homo sapiens
gaaccccgtgaaagcacaccccattgctcacggtcaccttctatcatcgtctctccagtcatttgggttgtgtggggaccattctctattagattcttcacaaagtgctcatataatcagtagcgcttgagttgtgtttataacagttgtttcgccacttgtatactttaaatttagtggttctgactggatataaagtccttgactcacattttcaatattgtttgcctaaaggccagatgcaattgtctcttcttttctt

SEQ ID NO: 518188 - DNA, 450 bp, Homo sapiens
gattaagtgactttttagatgttcttgtagttctttgtatagacctctctcaaaactgtcatatgacattaaattgtctattttatttgtgtgtttgcccctttacactgtgaacttcttaatggcagggaccattttttatttatttttgtgtcttcaaaacctggcacacactagatgctctataaagatttgttaaattatttctatagttatttattttaatcctacacagaatgtataaaaataatttactatattgttagtgaagaagattgtatcaaaatgcagtatacaatccttaaggtatgtgggatgcttgatagtaatacaaatgtatgaataattgttccagtcttctccaaacctgtaagagggaaataggaaaataaaaatgttttgttttattgttttgaactcttgaaaataaacttaacctcaaaaatatca

SEQ ID NO: 518189 - DNA, 821 bp, Homo sapiens
  misc_feature (430)..(430): n is a, c, g, or t
  misc_feature (476)..(476): n is a, c, g, or t
  misc_feature (485)..(485): n is a, c, g, or t
  misc_feature (622)..(622): n is a, c, g, or t
  misc_feature (683)..(683): n is a, c, g, or t
  misc_feature (690)..(690): n is a, c, g, or t
  misc_feature (703)..(703): n is a, c, g, or t
  misc_feature (757)..(757): n is a, c, g, or t
  misc_feature (795)..(795): n is a, c, g, or t
ggcggaactctgaggtggtccattatggttgacatgcacaatctggtaaaaagattggagagggcagtgtggccggcttggaggcagtatctcatactctctgacatgcaccgtgaggtatgcagacagtccttcaaaagcaggatgcagtctccaatatgtgtgaggcactttgagcgtcgcgtagacgttgtctggtccgtgatggcagagttacttgtaatgatcatgatatagtagattgggtggagcacgtgtcacgaccatcatgcggtatgatgtgtccaacactaggttttgacactttcggaggctgatgctcattttatgggttacagtccttcctcgaatgctcaaacgaggcgcagtgcagacatagagtaagtctatatatccagactatgtggattgagacactcactaatcatcncagtaagggccatcagtccatacaaggaaaaggtgtgaataacacntgtgttcgngtgcacgtaaggaaaacccaggaagactaagctgaatggttgtgcagtggagatcacctctgtcggagacgtgtccagtcgaacatagttatcactagtgtcgccttgtgtgccctggggattgggctaatagtgcnttcgccgcaaggctcgtcgagcctcgttcatcggatgaaaggcaaggagtgtatactaganttgccgngggcccattgctnttttactaacaaaagagcggctgacgtatctcctccgataggaggttaccaaanggaagtagtagtgactcaaagaaccggccactagtatngccatggggggtccaatatgcttata

SEQ ID NO: 518190 - DNA, 180 bp, Homo sapiens
atcgtcgggcacgtcgacgtcgtatccggcctttgcgagcgccccgagggtgcgatggagcgaggcaaagacggaaaggaacgcggcggtcccgacatttcccgagttcggcggaaaattgaacagcacgatggccaacttgcggttcttgcgctcgctccttcgtagctgaaccggctt

SEQ ID NO: 518191 - DNA, 315 bp, Homo sapiens
gctgcttgaggatccaacacatagcacatgcagtgagagaagagtagaatgttagtgagccggtgttgtgagtgtaattagtgcatagtaggggaagggagcactaggttgataggagatttgctggtcagggcgtctgctgttgctcatcgggtgatatagcaggtgggataagtgtgtttcgaagaagatataaaatatgattagttctgtggctgtgaattgttataattaaggagatttgtagggagattagtatagagaggtagagtttttttcgtgatagtggttcactggataagtggcgttggcttg

SEQ ID NO: 518192 - DNA, 493 bp, Homo sapiens
aggtgcaataataaaagcaataatgataatgtgggtagctattccttctcatatattcgccctttgccaggcctggttctaagtgacagtaaaaggccaggccagaattccagctcagatcttattccttactttttatcacctcacctgtaaggttttaacaggtgtaggatttcagcaataagaataatttgatgttaaacaaagaattcatgacatagaaggacaaaaaaaaaatcctatccttttcccctaggactaaggtgaccgccatgatgaaagaccagattctcatgaagaaaccgtttgtgaaggattttgatcaggcaacatgggcatgcaggtttaaacacagcccccagccttccatgcctggcaagccactttctcctatgttcatgcatgtctagatttctcaatgaaaaacgtagttgaactcatgaaagcctatctttaaaaaatattaaatagctaatcttataaacccctaaaa

SEQ ID NO: 518193 - DNA, 324 bp, Homo sapiens
atactgagtgtttttggaagagtccttgttcctgatgctgggcatttctggaagaggcctttttcactggggcctccctaagcatgggactaaggtgaccgccatgatgaaagaccagattctcatgaagaaaccgtttgtgaaggattttgatcaggcaacatgggcatgcaggtttaaacacagcccccagccttccatgcctggcaagccactttctcctatgttcatgcatgtctagatttctcaatgaaaaacgtagttgaactcatgaaagcctatctttaaaaaatattaaatagctaatcttataaacccctaaaa

SEQ ID NO: 518194 - DNA, 175 bp, Homo sapiens
gcacgagtagaaatggaaaggtgatctgcactgtatcttgggtcttgcggctatgcttcctttgatgacatatattatacagtatatatatacatatattccttttgctagagttctagccattttatttctccgcagggctcctttctcaaacattactgcatgctgtatatgg

SEQ ID NO: 518195 - DNA, 413 bp, Homo sapiens
agtacaggagtatgtgtctcccctgcatgcatcatgcttccagtaagaaatggagatcatctagtgctcttactttcatatcctttcactcatactcagttgggtatgggaggctaagaagagaagtagaaaggggaagtgatcatacttacaggggttcagtttcataatgggtagaagtccctatttttcctccatttctacaataacaaaatactatacatttcaacatctcacattgttgttctttgcccagcatgcaaaaaagctaaaaactcaatttgcaaggttaccatacttttaaaacccaggagggttctccccaaaattttgctgattaccatgtccccccacagtaagaaattgtgtcctcactccagaacaggctttccttacttatttgtttacatatt

SEQ ID NO: 518196 - DNA, 718 bp, Homo sapiens
agcggagtcttgacccatgaaccaaggatggccgccatcactcacagtctatgctgttatctggtgctgaaaaagctactggagaaaatgaagaggaatcagaaacagcaacaataattagatggaagtaagcagggaagattttctaagtgaagttgcaaatcgtaaatggattgcagaagtctcctagaatagtatttgtggggaggaaatctgaggatataaccacgtgtcattaccagaaatagcacctgataacgcaaatataatggactgcatggacgaactcaggcagttgtatacaaatgagtatggtggccagagataatgcgaagatctgggaggaggagagagaatgacaggattggaactaagagagggagttagaaagttcaggacatgcctgagatatgtcgaagaatcactctggaactattaagaagaaattctatgagggaatgtcagagaaggcaggtctgaatatgcaatttcatggaaagcgtacgttctgtcagaaagcatatgcttacgcagatgcacgatgccggacgcccatctaatgactgtgtgctcatactatgacatcgaaggtgtacggttcccctgctgactctgtgggtagttagtaacttcattgggagaagacctggatgaccgtcctaggataccctgggacctaaactctaagacgttggcagacatcagcctaggacaagac

SEQ ID NO: 518197 - DNA, 242 bp, Homo sapiens
  misc_feature (214)..(214): n is a, c, g, or t
ggaacagctattgccagaaatttccatttaagtgccaaatacattcaaatttcatggccttaaatatctggttctcatctgtaatcccaacactttgggaggctaaggcgggtggatcacctgaggtcaggagttcaagaccagccgaccaacgtaatgaaacccttcatctttctttataaaaaaatgtcaggccgggcacagtggctcacgnctgtaatcccagcactttgggaggccga

SEQ ID NO: 518198 - DNA, 327 bp, Homo sapiens
tttgtttttttagacgtacggacaatgtgtcaaccagtcaggagtgtagtggcataatcttggctcactgcaacttccgcctcccgggttcaagcaattctctgcctcagcctcccgagtagctgggaccacaggcacccgccaccagagctggccaatttttttgtttttcgtatttttattagaggcagggtatcaccatcttggccaggctagtcttgaactctggacctcctgatccacccgcctcagcctcccaaagtgctgggattacaggcgtgacgaccaattacctggcctgaaaagtttttaaccaaaacgtcgacg

SEQ ID NO: 518199 - DNA, 124 bp, Homo sapiens
taagggaataccgtgctaggtgctctcctggtatgtcacagcggttcagcaaagaccactggtcacttgtatcaactgccccgtgtttgagggtaggtgcaccctgacctgcgcttctacagca

SEQ ID NO: 518200 - DNA, 100 bp, Homo sapiens
aaattccttataatggctgcatccctcccttggttcaaagaggcttccacccccagcctttttttcttcttggaagatggtggcatttgaaggagtttgc

SEQ ID NO: 518201 - DNA, 1947 bp, Homo sapiens
  misc_feature (620)..(620): n is a, c, g, or t
  misc_feature (1160)..(1160): n is a, c, g, or t
actagttctagatcgcgagcggccgccctatttttttatgtgtttattttttattttttttccccaggagacattttaatacaatgggaaacacagaggtggggcgaatccgacatcaagtccgacaagaatgtgtggtacacaaatatccaagaggcgccgcggtggagagaggacctctggtgggaggagaaagcgggaggaaccacgcggtgggcccctgtcgggaacagagaggaagaggaaagacccccaccaccgcgcgtcattacaacagaagagacagagcgagacgctcgggtggcgacggggatatacaccgcgtgtgtgcacgcgcgtgggcacccacacaacctcccacactcaggtggggcgagacaaagaaagaggtctcttctaagagagacaactatgacacaaagacgtgagcaacacacagcggggagacgacaccacatcaagcgccccacccacaagagagacgcgagggtgtagcgccctagtcgcgacgagtgtgctatataagagggacgagcagcccacttgttgtgtagtgggacgccacaccgtgagatgatcagcacgcactacacacaggccactcactctctcgcacgaangctctcccatagcgccccaataaggggaggtggagggggagagaagagcgacaccagaagagggggcacacataaaaacaaccaacaagaaaacatcatacacacctctacaataaaaacaacaccccctataacacaacacaaccaccacaactcataacaaataaacaacgaagagagttgacaaaataaaaaaaacttcgcacaacaaaaaacaggagggaaaaatcaagtgtggagaacaaaacagatgtgtactcacagtgggggagaatgggcggacgacgcataggaacacacaccaactaaagatgttgaagaacaggggggcggaaaaaaaagaagggcggacgctctaccatcaaccacaccactagtacaggagggaggaatcaaacacacaaaaatatacacacaatcgttacagaggggaaacaacaaaaacaagaataaaagaacaaacaaaaacaacaaccacggtgttgcagcaccaattaaaacacaaaacatctactaatagcacatcgatcgggtgagcancataactctaccccagacaaagggtcgtcatcaacacacgacgcgatgaagacagcggaaaaaaaatcaatcaatatgcagcgcagaacaatgcatcagatgggtgggagacgccaactacaaccaaatatcaagaacacaaaacagatgcgtgaggacagccatcatatatcactcaagcatcctagtaaaaacaaaacgcagtaatcaataatagacagcacaacaagatacaaccacggcggtgacaaaaacaaagcagcgacgtgagcaactacagcaggaacacctaacacggagatacgacacacacgccccctctattagtggggcgcaccaaagcagagcgacgtatcaaacacaagacagacgaagcacatatcacaacacgaaagaaacaccatctcgcaacaagcagagagataaggaggacaacgaatcatatatgagaggaaaaaacactggctccctcagcggaacgaaccaggcgcacagtagaggatagtgtgcacgcaggaggcacaccacctaggagtgggagggaccagcgacctactaagaagaagacgagtagatgagagagaacccacctcaaaactagttagacacatgaggaagacaaagggcaaaccaaaatgatgaccacaaatagtagaagaagacacacccaataagtaagagagagaaagaagcaccgacggaggtaagatgaagcaaactcacaaactaagcaacagcataagagtaacagagaacgtagagcaaaaaaggacaatcaatacgcacg

SEQ ID NO: 518202 - DNA, 595 bp, Homo sapiens
  misc_feature (516)..(516): n is a, c, g, or t
ggacagtttcgactgttctagaaacctatggggtactggcacactggtgagctgctctagagcctgcgagccatgtaggcgatgtgcgatggattgatgtcgacgggaacctacccactttggtgaaaccaaaagtgactgccatgggcactccttgtcatgacagggattggacattattgagtacttatactcaatggcctgacaacatacgcacttttatgcccacggacttcttgtatgtgctgcaaagtgtcaagcagcgtttacaggatgcacccatgttggtgatactacttgcagtctgtcgctaacgatctgtgaacacacggacccaggtatttggttgcatgagctactgagacgcaagtgtgtcctgctgcagaaacttggggagagagattctgcactaagatgtgaatgcagtctgaacccaagattcctcccactagagttagcacatgcttgcaagttagcgacctagcttaccatagaccacaccagtatgctcacgtngtagagcagatcttatacgttgtggcacgagcaggcctttccttagactacactgtgggtaactgatggtgggaactcg

SEQ ID NO: 518203 - DNA, 384 bp, Homo sapiens
gcccaggtttgcagaacaatacggcggtctcagctcactgcaaactccacctcctaggttcaaccgattctccttcctcagcctctcaagtagccggattacaggcacccaccaccatgcccagctaattttggtattattagtagagacagggtttggccatgtgggccaggcgggtctcgaactcctgacgcccacctccacctccctgagatagctgggattacgggcacacgccaccatgcccggctaatttggtattttaagtagagatgcggtttctccatgtgggccaggctagtcttgaactactgacctcaagtgatctgcccgctcagcctcccaaagcgctgggataacaggcatgagccaccgaacccgatc

SEQ ID NO: 518204 - DNA, 136 bp, Homo sapiens
  misc_feature (72)..(72): n is a, c, g, or t
  misc_feature (74)..(74): n is a, c, g, or t
  misc_feature (92)..(92): n is a, c, g, or t
ggcgtaaagccgctttccctcaagagtaacttacaatctttccatgcacaagatgattaatacagatctttngnaggatcttgaaaagcccngagatctcaaagaggcccttcgagcaccacgcaaggagattcat

SEQ ID NO: 518205 - DNA, 126 bp, Homo sapiens
aacgtatctgtgtcgctgcaggtctgtcgccggcttgtgtgtgtgtgtgtgtgtgctgtgtgtgtgtgtgtgtgtcccagcgcgctccctcatgtgtctgtactctcttgtgtctttcgttgctct

SEQ ID NO: 518206 - DNA, 116 bp, Homo sapiens
gagcagattcctcatggtcatggggggccaccgttgttatgtacctgcatcacgttgggtggtttccatttagaccgaggccggttcagaacttcccaaatgatggtcctcctccc

SEQ ID NO: 518207 - DNA, 931 bp, Homo sapiens
  misc_feature (142)..(142): n is a, c, g, or t
ccagcctcggttcctcccccccgagttattccccaaggggtcgcatcttacagtggaccgaaaaccccgggtccgtcaaaatagggcccttcttcataatactacagccctcctttacaggctccttggtcccccccattanggagccccttctcccaaaacgctccaacccccgaggttttaaagaccgacgtccgctcaccttttaccaaatcaaaagcgccaggttgtggaaccaaaccctggacataatttttctagggggcaacagcggcctcgatagctccacacacagcacacaatggcgccccagagacttcaaagagcgatctccatctggctctttccaagattaatcgaaagtccaattcccctccatcatgaatcgcccctgtctcgctcattcaaatacgacgaattcccgccccctttctaaagattgatcagcaaattgtgggaccgttattgatcctccacatcgtacgaaccacgaacatctcgagtgaactcaccttctatccgcgccccgtgccttctaaatacttcgtcccaaccaaactccactcccacgaacttgggtatatacaccacgaaagacacaccgtcctcgcttttaccccaccacagcccaaattatcacgttcgtcacgaacgctcgttgtgccacgcaaaggtaagagccactaaatatccctagcaccagccacacgtacgggagaaccactgaccacgtatatccctatgccagttctaggaaaccacaccacgatttttgggggagaaataaaatatttacggatatcttgcgataaaggtcatcatatatgttttgtacagtatgctgcaattccctcttttcaagccccccatttttttttttgaacccacggctaacaaaaattacaaaaaaaaacccccttgttaatgtcgg

SEQ ID NO: 518208 - DNA, 979 bp, Homo sapiens
tgctgagcagtgtgtctctcctgtacacatatctgaagagcatgggatgcacgaatgcttggataaaggatgtgtgagcacatgtcaatcatgtgtcaggatagtcaaaaggaggattgagccaggatcacatcacgaatggaggcaagggtatgacctccaatgggctcataagtctaccagagtgaatacttggcagccgatagaacctgtgatcactgacacagtgcagtggggtctaaacaactagatctgatcatacaattattccttgaacaatcacttggcaagacgattggttattcatgttgtgcttttaatctacagatatgctttgcatttacatacctggggcaacatgtggcactaatgtatatcgcccattatgtgtgagcagaacttagttcttgctcccttccccccatcttgttgcaactaggggactaatgtggtggaagcaacttggcttattttgtcccagtgcttagtgtctcctgtcctaatgtgtggtcctgcctgtccgtgttgttcatgtcggcgtaccggcggtttccgattccgactggctggcgtattatatcgttgactgctaaccttctgcatgtcctctgtgtggactgtgggagcgtgcttatgtccctgtttttagagacaaatgattgctccattttcgagttcccggtgtttcggtgtaccctctctagctgggagtactcttaggttcgccttgcacttttatcactttctgggtcggtcctctgttacccgacgttatgccatttacttgcccatggaccgtgatttgtttacacctggggccggcctagtctaaacggcatttggccccgacgtgtggccgtcgcacaggggcgcccagcacgggcacaagttcccttctcgaagttactctacccactgtgggggagggcggaggacaccccccataggtcttggaagtggcgcgcacgtctcacagccc

SEQ ID NO: 518209 - DNA, 286 bp, Homo sapiens
ttcttggccagtctgttgtacacgggctctagctgcttgcagagcccgcaccatggcgcgcagaactcgatgaggacgcccttattggggggcatcacaatggagtcaaagcaatttcccaccacgaccttgacgcgacccttgttgatcttgggcactggctgagattagatgactgacttcagttgtcctgttttgaaagcagtgacaaactcgcggagggcgacagagacaaactactctggctccatggcgaacttcttaccactcccgtaccaagggtacc

SEQ ID NO: 518210 - DNA, 339 bp, Homo sapiens
acagaagggagggggcttacctaaaacaaaccctcagttacacaaacaaaaataagcggcgcttggtgctgcctagagacatacccacagcggcgtaagataaggggagatgtacagacagtcttggctggataagagacagttactcaagagtgctacagcagatgagaggagtttcttaaaaacagctttggaatgcactgtaaaaacgggcaatccactgtggactcccactctcgtgctgcagaagagctttcttctttcgcgttactaacactttggctccaagccaacctcacccgtgtgtccactacgtccttaacttttctggggttgtga

SEQ ID NO: 518211 - DNA, 250 bp, Homo sapiens
gggggtcccttttaaacccccccctccccccccccacccttttttttagaaacccctatagggtccccccccccaatggtctgtcttgggtcctgggacccccccgtttttttttttgtttagcccggcccccaagggcccgggggaaaatttttttgggccgggggttgatttttgggggaactttgttttaaggggacctccccccccccctgcccggttttgttttttttaaacctttgttttttta

SEQ ID NO: 518212 - DNA, 207 bp, Homo sapiens
tagaacctaccaggctagagccagaatttggacccctgtctgtttcaaaacctttgtcccagaacaccagtgttcttcaattccagataaaattgcttgcagagaccacacctatggaatcaggatctccaggaatcaggggtttttgtttgttttgtggttgttgttgttgttgttgttgttgttgttgttgttaggtctacctgg

SEQ ID NO: 518213 - DNA, 359 bp, Homo sapiens
  misc_feature (52)..(52): n is a, c, g, or t
ccagttcttcatcatgaagtcaagaagctggtagatggaagcatgtggtgtntggaagtctagagggcatggaggtggtgcggaaggtggagagcacaagaaagacagccgggataaaccccttgaaggatgtgatcatcggagactggggcaagatcgaggtggagaagccctttggcatctgcaaggagtagggcacagggacatctttctttgagtgaccgtctgtgcaggccctgtagtccggcacagggctctgagctgcactggccccggtgcttggcatcttggtggagcggacccactcccctcacattccacaggtccatgggactcacgttctgtaacaaactcctagc

SEQ ID NO: 518214 - DNA, 561 bp, Homo sapiens
  misc_feature (168)..(168): n is a, c, g, or t
  misc_feature (274)..(274): n is a, c, g, or t
  misc_feature (276)..(276): n is a, c, g, or t
  misc_feature (343)..(343): n is a, c, g, or t
  misc_feature (348)..(348): n is a, c, g, or t
  misc_feature (364)..(364): n is a, c, g, or t
  misc_feature (367)..(367): n is a, c, g, or t
  misc_feature (371)..(371): n is a, c, g, or t
  misc_feature (376)..(376): n is a, c, g, or t
  misc_feature (379)..(379): n is a, c, g, or t
  misc_feature (384)..(384): n is a, c, g, or t
  misc_feature (427)..(427): n is a, c, g, or t
  misc_feature (451)..(451): n is a, c, g, or t
  misc_feature (458)..(458): n is a, c, g, or t
  misc_feature (507)..(507): n is a, c, g, or t
  misc_feature (516)..(516): n is a, c, g, or t
  misc_feature (536)..(536): n is a, c, g, or t
attgcgatccgtgttgcctcacccaaactggttatggaagaggctcctgagtcctataagaatgtgacagatgtggtaaatacctgccatgatgctggaatcagcaagaaagccattaaactgagcccaattgctgtgatcaaaggatagacccttggacagcagggntgcctgaccccaccaaccctttttgaagtggaagtggactgacatgctcttttgacgtcagactcaaggcgggacaagttgcaaagtgtgcagctgtaactgctcncnccaaaatggctgatggggaggctgctgctttcaggggcccgggcttgtaaaatacccttccaggaanaggcncattgcccccctttgnaangggnggaanatnccttncccttggttgttccccagagttttaggaaaatctgttagggangggtagatgtcaaactcccttacncagtcanactgatctttagccatcagattgatttttttccccccaagctctgtttncattccganaggggtcatgaaaaaagttntgttcaataaggttttggaatgtta

SEQ ID NO: 518215 - DNA, 183 bp, Homo sapiens
  misc_feature (100)..(100): n is a, c, g, or t
  misc_feature (103)..(103): n is a, c, g, or t
  misc_feature (175)..(175): n is a, c, g, or t
  misc_feature (177)..(177): n is a, c, g, or t
atccgcctgcctcagcctcccaaagcgctgggattacagatgtgagccaccgtgcccggccacaagtgttatatcttaacgagtgatctttcttgtgatnatntagtaagtagctcaggcgacatttatgcatttaatgttctttaaaatctttgttaataatgtaggttgttgngnttttcc

SEQ ID NO: 518216 - DNA, 176 bp, Homo sapiens
cagccaacaggattgtcgcccgccatcaggattggctgctgttggtcaagagtctatggggttgtggttgtggtaaactttaatagttaggaagctgaataatttatgaaggagaggggtcaggattgattcgggaggatcctgttggctggcgacaatccttttggctggcgaca

SEQ ID NO: 518217 - DNA, 128 bp, Homo sapiens
gacccgatctctatggtcgtcttatgtgtgtatggttatcattgtttgaggttagttgattagtcatagtggggtggtgattagtcggttgctgatgagatatatggaggtggggatcaatagagggg

SEQ ID NO: 518218 - DNA, 991 bp, Homo sapiens
  misc_feature (453)..(453): n is a, c, g, or t
  misc_feature (516)..(516): n is a, c, g, or t
  misc_feature (529)..(529): n is a, c, g, or t
  misc_feature (567)..(567): n is a, c, g, or t
  misc_feature (611)..(611): n is a, c, g, or t
  misc_feature (621)..(621): n is a, c, g, or t
  misc_feature (655)..(655): n is a, c, g, or t
  misc_feature (683)..(683): n is a, c, g, or t
  misc_feature (697)..(697): n is a, c, g, or t
  misc_feature (701)..(701): n is a, c, g, or t
  misc_feature (738)..(738): n is a, c, g, or t
  misc_feature (764)..(764): n is a, c, g, or t
  misc_feature (770)..(770): n is a, c, g, or t
  misc_feature (774)..(774): n is a, c, g, or t
  misc_feature (777)..(777): n is a, c, g, or t
  misc_feature (798)..(798): n is a, c, g, or t
  misc_feature (815)..(815): n is a, c, g, or t
  misc_feature (823)..(823): n is a, c, g, or t
  misc_feature (873)..(873): n is a, c, g, or t
  misc_feature (885)..(885): n is a, c, g, or t
  misc_feature (888)..(888): n is a, c, g, or t
  misc_feature (890)..(890): n is a, c, g, or t
  misc_feature (892)..(892): n is a, c, g, or t
  misc_feature (903)..(903): n is a, c, g, or t
  misc_feature (936)..(936): n is a, c, g, or t
gttgggctggggaatgccagtgactggaggtgtcctggcctgtcacccctagatggagggctgtgctggggtgtctgtttttgcattgcgatgccaccctctctgtgcttgcatcctgcgtgtgttcccctgatccatgtgaatgaatgctggattggatgtattgtgattgacgaagcttatgatttacctgatgctgttcctctgtccatgtaaactgatgctctgacagttgggcgcccatgacccatgaacttgcgccccactgcgcttgtatgcacccatgtatgccacacgctaacttgcgtcacatgaatcctgatgcgaagcttgcattgttgtgacacacttgtccttcgcctgatactatgtgatgtccctcattgtacacttcccttgtggatgtcctcctgatggtatgtggtgtcttgtggtgtctgtgtgtccattacnctatcgtgactctcatgtcaatctttggcccacattactatcgtgtccacattgatggtattnacacatatgacanatgtggttgattacacacacctgatacaccattgtggnatatcgctcacattggtgtcacttgtttgacatatgtcgcatgnctcacattanctagacatgcctagtgactttgcacactctctgnctaactatatgaccatttgtttgtgacntcctggtgcccacnagcnttggatgtgatacacatagtgacattgtgttaacacncaatgacatacacatacctaatcagncacatntatnttncaaacataccatgtgcacacncgaatagtgtgtgcacnagttagcnaacaatgacccttgtgattgctatgaataagagcacatgcaccgaaaccnagataagtacanacntngnaatgactcttnggaatgtggacatattgacatgatggatctccntatacactaggcctatgcaatagagaccaacactgaacacatgtgcacggacaaa

SEQ ID NO: 518219 - DNA, 140 bp, Homo sapiens
agtatctgcaatttgctgaatattggagtcgaatagattattgtgtggaattttaggattttctacatacaaaatcatgtatcatctatgaacagagataataataactatcttatctttcgaatcttgggaggcagacg

SEQ ID NO: 518220 - DNA, 219 bp, Homo sapiens
gtctcagggggcccaggagggcgtcgttccctgctaagggcgggtagacggttcaacctgtacctgctccggactccactatagcagatgcgagcaggagtaggcgagcgggaggtacgacgtcgacacgctactgtcgtcactgcggggaaaccgccatatcgggggcaccgacttacttacggggaccctacgtccgttgaccacagcctccgactt

SEQ ID NO: 518221 - DNA, 441 bp, Homo sapiens
tattcttatgggtaggcttatatggggtgagtactaattctttatatgttatatatgtagcaaatatctctcccaatattagtttatttgaaccgtgtttatgtcttttagttaatcagaaactttaaatttggatatagtcaaattggtctatctttctataatatcatatagaagaaatcctctttcctactctaagacaaaaagatcaagccaagatcccctaatatttgagtctgattttgatactgtttctctgatcttattaactacccctgagccattatcacattaccttaattactaaaaattatatatgcatttatgtgtgcatataagcttatttctgtttggttttggtacgctcccttgtataatgaagcttcctgagaaagggtcatagggagtaaaatttgttatggtaaatatatttttattatt

SEQ ID NO: 518222 - DNA, 994 bp, Homo sapiens
cgcaggcggggagggcggggctgcgaagcctggggtgcgggggccacgcgtgggtgcagtgcggtgctcggctcgtgctgacgtcggcccgccggcgccccaccatgctccgcgcggtgcccgggttggccaccgcgcgggcccccggcccatccccctggcctgtgtccctggcctggaaccgatcgtggcatggtttgagctggtgcgtctccatggctgaccctgcgcggtgctataagtagggaagcggcagtgcctgtggggctttgtcagtccctcctgtagccgccgccgcgcggccagcgcacctctgccagcagatcccggcagccacctcgggcctggcgtctccgtgctgggcgtggagccagggtcggcttgacgggcggcggcggggggccgtgcctgagcgctccttgcgggcttgcgacctcatgtgctcctggcgtcttgcgctttccccactggggcttggccttgcaggcagcctgggacgcactgagataggtcagctgctagttcccaagggcaacacgcaggaagggactatgggaattcctttggagagtaagcctttggtgaggaacgctggaaatagttcattttcaaattccatcctcataagaatatacccagtagggaaccaatcagagaaaattcattgaaccaacctatgggtaaattgaacgaaggtaatgaagctggacactacctcagaatgagacggttagaccatgccaaagggacatttctgggcacccaggaaaagagtaacagtggaaaggtttacaacacgttctggaatggaataaggggcatgcactttactattggttgcgacaggaacctgggggaacaaaccatttctacaagaacaacacatctgaagggtggggtaagaagacgttctccccacgatgaatcacccgcctctatattgccagaacaaaaatgtaatgtgatatgaaaagtcaatcgggcaaagaagcag

SEQ ID NO: 518223 - DNA, 964 bp, Homo sapiens
atgagacgtgcctttcatcttccaccatgattgtgaggcctccccagccatgtggaactgtcttgctctgtggcccaggctggagagcagtggtgcaatcatagctcactgcagcttcaacctccaggtacaagtgatcctcctgcctcagcctcccaagtggctaagactacaggcctgcaccatcacacctggctatttcaaaaattttttgtagagatggggtattgttatgttgcccaggctggtttcaaactcctagactcaagcaatcctctcgccttggcctcccaaattgctgggattacaggcgtgagccactgtgcccgatcctacttctctttctttctatcatatagtcaggtagcaatgagggcactggaagccttggtaacaatgccctgggccagggccagccctacagctaaaatgtctagcctaagattgcatcgactgtcatcatcacgtgctcacaagaagaatacacttcctttagctaatagagggactcgtgcaacatgactatattgaactccatgacgagaagtcacgacatagtggttattctgcagggaacggaattactctgggaagggcttgcgggcactgagggggtggtgaggcgtagagtaaggttccctctctttccttttcttcagtcaatactgacacattccatagacgctagcgaggcaagttcctgaacccatcggctggaataaccgcgggcaattcccacaagacggtaccctgggagaatatcctggcacttagcagggcagtatatgtctacacttaccaaccaccatctagtgattccctccacttggcaggcctaggcgtggcaccggtactcggaaaaaaacgccgggacggcacacctgacacaaaccttggaggcagcggaggttatgcccgagacgacagcgtgatataacacgctgaaacaacatgagggccccta

SEQ ID NO: 518224 - DNA, 300 bp, Homo sapiens
tcacaatattttattagccactttcgtatcaattttgtgtctacactggagttttcaatcaactcaggtgacttctaacttgattggggacggggtgatctaaaacactctatacgccggcttctattgtcttgggttactcgtgtgaccgcagtggctggcacgaaattgaccaaccctggggttcgtataccttatttcaactttcgtttattgctcatggttattcacttgctgtttccctgtgtgggtgtggctaggctaagcgttttgagctgcctacaccgtgcttatctcaat

SEQ ID NO: 518225 - DNA, 435 bp, Homo sapiens
tacttttccacaggttaatgggaggaagggttctgaaaggacaacaaatgcatccagacagaatccatattctttcaagcactagtatagcatctagcataaacatacaaagtaagccaaaagcagcaggccaagtactgttaatcacattgctttaaagcccttggaagtatgctacaggcccaatatttacaatcttccacacaggtacaagcaccacaaagaaacgttgtgggctacactatatcgcttaataatatgttaatagctgtacatccagcagagttcttgtgaaataatgtgactcattagtactaattttaaggtggattatatttctgatctatacctgcattcccccccatcagcagggaaatgagtctagtattttagtagcagaacagggtgtactccttataggctgttggagggtgg

SEQ ID NO: 518226 - DNA, 452 bp, Homo sapiens
accggtagaagactctgacagctgaaaataccgtcgccacaccggccaaaaagttgccttcggaaattcaatccagccctgtgccggcgcctttagcaccggcacagccatcaccgttcgaactacctcagcattcctcgagcagtacagatgaatttgacgagctactggcgctccttggtaacatcaatgagccatcagaagacaccaaaaacaaagcggtctcagcggcacataccgcgcctccgaaactggatgaaatccagccttcccaaacctccaatcaaggaggtgcgcctttagcaataatcgaagaagtcactccgatgcctagcaataacaccgagatcggtcagggatttgttgaatggcttaagaaaggcatcgcatcccggaccatcattatcaacgataccaaagcgctggttcataccgtagcagggacccactcg

SEQ ID NO: 518227 - DNA, 169 bp, Homo sapiens
acttacaatcacttaacaatcatggttcagaagtgattgttgcccgctagtcggggaacaatcacttagtagatggttccgttggctgtacgataaggctttttcacttcatgtaatcgtattggttcactttggctaggtagcttagcaaaagtgattgtgccccgct

SEQ ID NO: 518228 - DNA, 111 bp, Homo sapiens
catcatgctattccgtttccatagagccttccagcagattcaatgctcaaacccagatttcctatagtctggccatcgaggccactgatccactttagcaggcttcttaag

SEQ ID NO: 518229 - DNA, 165 bp, Homo sapiens
gccgggttaggaaattatttattaatttccaagccaggttttaactcacccggggtgggaaatggggtccctgtcccccccaaagcccagggcccagaaatggggccgtttacatggggggtttccgggggggggtttaagtctttaaaaaaaaactcaaagaga

SEQ ID NO: 518230 - DNA, 467 bp, Homo sapiens
  misc_feature (46)..(46): n is a, c, g, or t
  misc_feature (79)..(79): n is a, c, g, or t
  misc_feature (186)..(186): n is a, c, g, or t
  misc_feature (189)..(189): n is a, c, g, or t
  misc_feature (191)..(191): n is a, c, g, or t
ggagcctggaaggtaagcccctcctggggtggatgccccagcaatntagtactttctgccagttcctgtgcacagcccntaagtcaacttagcattttctgcatctccacttggcatagttaaacctccgtgtcagattcagctagtggccagagatgtcgtgtccggatccttaaacgttgcgcngcntntcagctcatcttcatgcacctggatttgcatacttcttcaagatcccctttgaatttttagtgactaaaccttgtgcattctagagtgcatatatttatattttgcctgttaaaaagaaagtgagcagtgttagcttagttctcttttgatgtgggttattatgattagctttgtcactgtttcactactcagcatggaaacaagatgaaattccatttgtaggtagtgagacaaaattgatgatccattaagtaaacaataaaagtgtccattgc

SEQ ID NO: 518231 - DNA, 943 bp, Homo sapiens
gatctggatactgtgtgccggagcagccaacagaatcctgtgtcacaatgcgatgcagaacgaataacgccttcatcaccatggcaccatttatataaaaagatagagggagagatgtggctgggaagtcagggaccccgaatggagggactgactggaggaccgcggcagaggaacataaattgcgaatattgcattttaatatggacatttatcagttcccaaattattacttgttacagtttcttacgcctgtcttactttaatctcttaatcctgttatcttcataagctgaggatatatgtcacctcaaggaccactgtgataattgtgttaactgtacaaattgattgtaaagacgatgtgtgttgtgcacaagtatgaaatcagtgcaccttgaagaagaacagaatatcagtgatttttaggcaacaagaggcgacaaccagtaaggtctgactgcgtgcagggtgcaggcaataatagagccatatttttcttcttgccagggagcctataaatggacatggaagtagggaaggatattgctaaattcttttcctagcaaggaatattactattaatactctgggaaaggaatgcattcctggggggaggtctataaacggcactctgggaatgtctgtcctatgcagttgagacaaggactgaaagtacaccctggtctcctgcagtacccctcaggcttactagggtgggggaaaacctggccctgggcactctgtggtcagactgcttctctggtctgaacctgtgtccggtgtgtaagatgtttatccgaccactcgtgcctgtggtcttaacctgttaggagttcattgcctgtgcgttctcaaacagggttccgttcgctgttggccctaagttgtgtttccccggtaaccccctttgattaaaatggtggacgcggccgcttatttc

SEQ ID NO: 518232 - DNA, 503 bp, Homo sapiens
  misc_feature (55)..(55): n is a, c, g, or t
  misc_feature (57)..(58): n is a, c, g, or t
  misc_feature (61)..(61): n is a, c, g, or t
  misc_feature (65)..(65): n is a, c, g, or t
  misc_feature (67)..(68): n is a, c, g, or t
  misc_feature (70)..(70): n is a, c, g, or t
  misc_feature (81)..(81): n is a, c, g, or t
aatattgagtagttgggtggtggtggtctcccatcaaaacgcacgtacttacaangnnccngtgncnncnacctacccctnttagctccagtgcttataagaagaccaagtgctttcccttggcctgggttgctcaggtctccagtggaaagatattctttcagatactgtgtactgatgaaactgctgactcagctggtctgaaggaccccactggcactggctggtctgaaggaccctgctgatcacaacttgcctgaaggaccctactgacatcagctgttgtccaaaggacgccacaagaaactgactcaccaaaaaatgcatcctgatgatttcatcccccttaacccgaccaatcaacaaccccaaatctacacagcccctttccctccatgattcctacaaaactccagcccagaactcctcagggagatggatttgaaggtctcctcccttctacttgcttgatgccctattattattaaactctttgctacaaa

SEQ ID NO: 518233 - DNA, 275 bp, Homo sapiens
ggacgcgtgggtcaagcccactgcccaccctatcaaatgatcccttcctcgggcactttttaattcaccaaagtatttttttatcttgcgactggattggaccctagctgggaggcgagaggggcagagactgcttcttaccccacccttgggcctacctgttgcctgaggtggggtcccaggagcctcacccctaccacccctccatgtggaggaaagaggaaatctttagggcagcttccgtggcccagctggacttcccgcagagtgaagag

SEQ ID NO: 518234 - DNA, 520 bp, Homo sapiens
  misc_feature (35)..(35): n is a, c, g, or t
  misc_feature (40)..(40): n is a, c, g, or t
  misc_feature (54)..(54): n is a, c, g, or t
aaaatgtatactacaccgggcctcgaataagagtnataanaccttgtgccacanaaaaggccatgtgatgacctggtgagaaggtggcaatctgcaagccaagaagagggctttcaccggaaacaaactcttccagatcttaattgtggatttctagcctccagaatgatattactttcagatactgtgtactgatgaaactgctgactcagctggtctgaaggaccccactggcactggctggtctgaaggaccctgctgatcacaacttgcctgaaggaccctactgacatcagctgttgtccaaaggacgccacaagaaactgactcaccaaaaaatgcatcctgatgatttcatcccccttaacccgaccaatcaacaaccccaaatctacacagcccctttccctccatgattcctacaaaactccagcccagaactcctcagggagatggatttgaaggtctcctcccttctacttgcttgatgccctattattattaaactctttgctacaaa

SEQ ID NO: 518235 - DNA, 417 bp, Homo sapiens
cggatgatctacaggatcttcaaacaccgcaatctggcttctttcaagtgatatgcataagctccccaaggacaggtgccctgtttacttcactccagcagatacttcctggggtccagctgcgtgccagtggtgctctggaattttggctagtgggaagcggctataaggaagctgtcttggtcagacagcaggagcgaagaggcctgggtagagtgtgcaccctgtgaagtattggtgtgcagacatttactaagacttgtgcgtccaccttggatgcactgggagtagggtaggggtgggggagcccaagagcacctccaagtttctcccctggtctctgcctcctgacacagtctaggccagcactattcaacagaaatttctgtgacaatgggaatatcctagatctgtata

SEQ ID NO: 518236 - DNA, 402 bp, Homo sapiens
  misc_feature (50)..(50): n is a, c, g, or t
  misc_feature (53)..(53): n is a, c, g, or t
cttatattctcctcttcaactccatacgcccaccgaaatcctactattanctnacactttcagatactgtgtactgatgaaactgctgactcagctggtctgaaggaccccactggcactggctggtctgaaggaccctgctgatcacaacttgcctgaaggaccctactgacatcagctgttgtccaaaggacgccacaagaaactgactcaccaaaaaatgcatcctgatgatttcatcccccttaacccgaccaatcaacaaccccaaatctacacagcccctttccctccatgattcctacaaaactccagcccagaactcctcagggagatggatttgaaggtctcctcccttctacttgcttgatgccctattattattaaactctttgctacaaa

SEQ ID NO: 518237 - DNA, 925 bp, Homo sapiens
gcaacctctgacttattctgcagatgctctgtgtgtgtgtgtgtgtgtgtgtgtgtgtgtgtgtgtgtgtgtcggagagagggtggtagcacagggcttgggatatcggcagtgtgggaaatgcgaagcatctctcatcatcatcatctctgctacagtcatgtctctgcatgtcgagcgagcgacacgtgtccctgcctcagggttggagggttttatcacgacaagagtgtttttcacagtagtatcgtgcgtctccatatcatccactctgtgccttgtcagccttatgaaaggcttggtctgctcccaggctggtgcttctcagggaccttaaaagggacctggttacgtcttgggagcagagagtatctacttgggcactctctctccaagaaagaccttgtctccattcttcaattaagacaagtgcttcttgtgtgtgcttcgtgggaagatcttctaataggtggaagtgcttgtcgcatcctgcttccccagggcgatgtggcgtcgccaatgagacctgagggaccacatctttgggggcccaacatcagtgtccttcaccaagtgtgccattagaatccgcccctggacagagttcctgggcagaggggaaagcagcccccaggtcttactcaggctcatgtccatgggttgggcagccagtgtgggcccttctcaggatcctacatctccaatcactcatccttctttccttcacagtatatacgttggagctctgttgtgacacaccgtgtcagtcatgatgaatcggccaacagccagcccttgccagtgacgtcacagtctaaagatgggaaagtgtggtacagatagacatgaagagacctaacagagatgggggtgggacaaaatataccggctggaaaaacccctggcgtgtgttaaaaaaaaaaaa

SEQ ID NO: 518238 - DNA, 560 bp, Homo sapiens
  misc_feature (35)..(35): n is a, c, g, or t
  misc_feature (40)..(40): n is a, c, g, or t
  misc_feature (54)..(54): n is a, c, g, or t
aaaatgtatactacaccgggcctcgaataagagtnataanaccttgtgccacanaaaaggccatgtgatgacctggtgagaaggtggcaatctgcaagccaagaagagggctttcaccggaaacaaactcttccagatcttaattgtggatttctagcctccagaatgatattactttcagatactgtgtactgatgaaactgctgactcagctggtctgaaggaccccactggcactggctggtctgaaggaccctgctgatcacaacttgcctgaaggaccctactgacatcagctgttgtccaaaggacgccacaagaaactgactcaccaaaaaatgcatcctgatgatttcatcccccttaacccgaccaatcaacaaccccaaatctacacagcccctttccctccatgattcctacaaaactccagcccagaactcctcagggagatggatttgaaggtctcctcccttctacttgcttgatgccctattattattaaactctttgctacaaaaaaacaaaaaaaaaatggtctccccggtctcacccgtgca

SEQ ID NO: 518239 - DNA, 191 bp, Homo sapiens
gtcttaccgtgggcgtatgtgattcatgtggtcacaagatgagagaaattcttgttttaaggctgaagtagctatccattgcatatgtttactacattttctttatccattcagtcgcatcgatggacacaggattgattccatgtatctcagtcgattgtgcataatgctgaagatgaacatggcaagtg

SEQ ID NO: 518240 - DNA, 680 bp, Homo sapiens
cagcccacttgcacccaagtgaattaacagccttgtcgctcacacaaagcctgtctaggtggtcttctatacgcgacctgccttgacactcggctgcccaacaatctgggccagggcggactccttcgctgagaccggccccctgtcctggccctcattccgctgaagcagatccacctgcgacctcgggctcctcagaccacgcccaaggcaacatctcaccaactttcaaactcggcatctccctcggcccttagccgcgcctgacagactgactgcatgccccgactcgccctcagcaagccccctgcgaccactcacacgactgccgacgccttcgcggctacactcatctacgcgcgcgcacggactctcccacgccactactgacagcaccacccctagccctggcaccgactcacgctaccttgctcacacacacgctctcgaccaccctcacaacctcctacacgccctccaactggacccagaccccctaaccacggctcacccaactacgcacaaccaacctgaccgacccaatcctggcccggaccccatctcccactcggcgctcacccactccccacgaactcaccgccacggcccactccagaccagaccaagcccggattctcctcctccttcctccctcggacaccccaccaagaaccaccgcc

SEQ ID NO: 518241 - DNA, 307 bp, Homo sapiens
ttttttcctttttggtgggggggcctttttaattggggggggtgggcccccctttttttttcgggtttttgtttttcccaggccttttttttgtccctttgggaaaatttccctttcttggggtttttccctttccccctccctttaaccggggtggggatttttttttttgtttttgggtttttgaacccctttttccccccttttttgccatttggggggtttttttggggttaaaagtgggggcttttaatttttttgggaattcccctttttttttaaggagtaaaaggccctttttttttta

SEQ ID NO: 518242 - DNA, 543 bp, Homo sapiens
  misc_feature (55)..(55): n is a, c, g, or t
  misc_feature (57)..(58): n is a, c, g, or t
  misc_feature (61)..(61): n is a, c, g, or t
  misc_feature (65)..(65): n is a, c, g, or t
  misc_feature (67)..(68): n is a, c, g, or t
  misc_feature (70)..(70): n is a, c, g, or t
  misc_feature (81)..(81): n is a, c, g, or t
aatattgagtagttgggtggtggtggtctcccatcaaaacgcacgtacttacaangnnccngtgncnncnacctacccctnttagctccagtgcttataagaagaccaagtgctttcccttggcctgggttgctcaggtctccagtggaaagatattctttcagatactgtgtactgatgaaactgctgactcagctggtctgaaggaccccactggcactggctggtctgaaggaccctgctgatcacaacttgcctgaaggaccctactgacatcagctgttgtccaaaggacgccacaagaaactgactcaccaaaaaatgcatcctgatgatttcatcccccttaacccgaccaatcaacaaccccaaatctacacagcccctttccctccatgattcctacaaaactccagcccagaactcctcagggagatggatttgaaggtctcctcccttctacttgcttgatgccctattattattaaactctttgctacaaaaaaacaaaaaaaaaatggtctccccggtctcacccgtgca

SEQ ID NO: 518243 - DNA, 306 bp, Homo sapiens
cagattgggactcagtctcaaacaaaaataaataaataaataaataagttatctgttcatattgtgcctacttttatcagagcttacagttttatatctgtatgaagtgttcttatatttgggacaatgattttgctagcttatttacatttaaattttctttgtacttttactttacattcaagtatttgatgtttatattgagtcaaatctgtccatcctttcctttgtgatttttttcccattgctgtaatgcttagggtatatttttatagagcaataataaatattttagtgttaattata

SEQ ID NO: 518244 - DNA, 246 bp, Homo sapiens
  misc_feature (232)..(232): n is a, c, g, or t
gctcgacgatgacttttttgatggaatcctgcattggatagctggtgggacccccccctcagaattggggaactgaggagactccagggagggtgtccttccagggagagcagctatgaggggccccctagcttcctggggcgggggggtggggggggggagtaaagggccatacacacctgtacccaggggcgggggggggcgggggctttctttttttactaaataattntaaaatattattat

SEQ ID NO: 518245 - DNA, 693 bp, Homo sapiens
taaatttaaatttacatttttttccattttttggaaaggtttttttggtttggtttggtggtggtggtggtggttgttttggaaacagtctgttgctctggtcacccagggctgggtgatgtcgcaggtgggcatagattctctggcaaccttctacctccccagggttcaagcaatttctaggtggcctgcagccatcccaatgtaatctggggactacagtggggcacgctaccacacctgggctgatatttttatttggtggttatgtagagaagacagggtgtttcaaccatgtgttgccccagggtgtggctcctcaaactctcctgtgagcttcaggcaaatccaccccgcctatgtggcctccccaaaggtgctaggatttacggcgttgttgacgccacgcaaccacccagcttattttatctcatatctcgctttatataaagtttataaaggtgtggggggggtccctcaatttgtgttacccgtggccgtggttctcgaaactctccgcggactttaagacgactcctctgtggctctccaagcccaattaccgagctcctcgagggttctctttatacataaagagactcacttaccttttttttcctcttatatcgtgctgtgccatgtgttgtagagtggtggcttttcacctttccgccagtgatttggtgaggccct

SEQ ID NO: 518246 - DNA, 333 bp, Homo sapiens
tacaagatcaggttagggaggcggggcagtggtcatgctataatcccagcactttgggaggcgagggagtggatttcctaaggtcaggagtttgagaccagcctgagcaatgtggtgaacacccatctctactaaaaatacaaaaattatctgggcttggtggcgggcacctgtaatcccagccacttgggaggctgaggcaggagaattgcttgaacccgggaggtggaggctgcggtgagccaagatcatgccattgcactccagcctgggtgacagagtaacactctgtctcagaaaaaacaaaaacggaaaaaatatatggggaaaata

SEQ ID NO: 518247 - DNA, 104 bp, Homo sapiens
gtttcttcttcagagagtccttgaacagcacaaactcaacaatgaccatttggaggagcggattccaggtttgcataggacaacctggcatgttgaaggatgga

SEQ ID NO: 518248 - DNA, 124 bp, Homo sapiens
gcggtccactagacgcagatgatgacattaccccaacagcggaaagggagaggttgatcttggtagctatcttttaagtctctccccgttgtgcgccgggtctatggattgcggtccgctgcca

SEQ ID NO: 518249 - DNA, 1163 bp, Homo sapiens
  misc_feature (33)..(33): n is a, c, g, or t
  misc_feature (145)..(145): n is a, c, g, or t
  misc_feature (148)..(148): n is a, c, g, or t
  misc_feature (150)..(150): n is a, c, g, or t
  misc_feature (167)..(167): n is a, c, g, or t
  misc_feature (171)..(171): n is a, c, g, or t
  misc_feature (178)..(178): n is a, c, g, or t
  misc_feature (247)..(247): n is a, c, g, or t
  misc_feature (304)..(304): n is a, c, g, or t
  misc_feature (316)..(316): n is a, c, g, or t
  misc_feature (357)..(357): n is a, c, g, or t
  misc_feature (427)..(427): n is a, c, g, or t
  misc_feature (469)..(469): n is a, c, g, or t
  misc_feature (1047)..(1047): n is a, c, g, or t
  misc_feature (1067)..(1067): n is a, c, g, or t
  misc_feature (1085)..(1085): n is a, c, g, or t
  misc_feature (1087)..(1087): n is a, c, g, or t
  misc_feature (1091)..(1091): n is a, c, g, or t
  misc_feature (1102)..(1102): n is a, c, g, or t
  misc_feature (1120)..(1120): n is a, c, g, or t
ggtccggtccggccttcccgggctgtgcccggncggtgctcgcttgtccccgccgcgcgccccccgccccttgctgcccgtctgtcctctccggccgttcgtcccgccctccccccctgccccgggctcgccgccccgccccgtnccncngctccccggctggggtntgtnggccccntctgggcgggcctccctcttcccctttccccccggtgcccctcgccgcgcccggctggggccgcctctncgcgccccgcgcggggccctggctgctgcccccgccgcggcgccggggggccctgtncccccgcccgtngcccccggcggccccggcttgggcggtgctccgggggggcngcgggcgcccccgccgtccgccgtgcccgccgcctccccgttgtccccgccggtgctgggcctgggtgtncccggccccgtgctggcgtccttccctcggcgccctggcccnccgtgtgccctgccgctcctgtctgcccgccccccggcccggccagcggtcgccccatccctggccggcttctggcggcccccctcttgtctgcctcctggctgtgtctgcgcccctgccccctggcccgcgctgtctcctcctcctcctggcctgcctggccggtggtgcgttgttccgccggcttccggcgcgtggcgccccggctttccctgcgcgcgccgctgccgcgctcctgcgggctcttggccctgccctcccgtttctgccccgccctccccttgccccccgcgctgtcccgcctgcccccctcctctccccctctccggcgcccgccgcctgcttccgctccccgcttttggctttgctccggcgccccccccccctgccctgccgccccctgctctcctccctcttctgtggcccctgcggtcctgggtcccgcgcccgtctgccccgtcctgtgccctgtggtccctgggtgtcctcctgtccctcctcctttgtggcttcccccccttctcctcccccccgggcccggccctctccccggggctgccgcggcggcttcgcctggnccgtccggcttcccccctcntgcgtggtccgcgttttncngctncccgcgctgcnccgctcctgttgccgccnccccccgcgcggtgccctcctccgttctgccccccctggctcc

SEQ ID NO: 518250 - DNA, 326 bp, Homo sapiens
gctcggtacccgggcgaacgtgtatccctgcaggtgtacctgccaagggcgggcgaggttctccagaccagtttaagcgcgccaaggcttcttccaagaacttcttctgagccggaggtggtaacacgctgagccccgttccagttccacctgcagagttcggtctctctcagagctctctgaatgggcatggaacttcaccagactgctatagagctgtctctctgcttgtaaggcctcattgagccgactccgttcatctactagtccttctagcatcagcagcaactgtggtcttcggtttcctgaaatttcttgaccctggg

SEQ ID NO: 518251 - DNA, 232 bp, Homo sapiens
cagctttttgacagtgggttttagcatgctgtttgtaatcatacagacatgatttccatgaggatgtatctttctctgaaatcaatagaagtccagactttttttcttttttttggaggcagagtctcactctgtggcccaggctgaagtgcagtggtgtgatctcggctcaccgcaacctcggcctcccaagttcaagcgattctccgtgcctcagcctcccaagtagcta

SEQ ID NO: 518252 - DNA, 889 bp, Homo sapiens
  misc_feature (104)..(104): n is a, c, g, or t
ggcggggctccgctcagtccgggagcgcagtgggccggggctcgacctcggtttcccaccgcccgagtgaagcacatcccgagcccgggcggatccgatcgccngagtgtgccctctggcgccatgtcgcagaaacggagcgcccgggatgcaggaggagagcctgcagggctcctgggtagaactgacttcagcaataatggaacggggcagcgttccagcctcggttttctatttataatggagacatggaaaaaatactgtggacgcacagcatgagttctggacggagtagtccaagagctctcatgtgacagccactcgtgcgagaaaccagaagatacccaaagagtgtctgaaaaagatacccatagcatgggagagaaaaaacagtcacagttctggggacagatgatctggaacggaaggaaggaagtgtgaaagcatttttgaagaaaaatcagatgtggatatgggatgtggtcaagtgcggcggaaaatatgcccccccaggaagttctttctttaaaacacccgaagggcaaggcacctcagctgaggaacccgagcgtcatgagaagggcggcattttctctgcagactctgagaggtttccttccatcctggggtccccattggggccacgatggggccaattcggaagggttgagacctcccacgcgctttggtgagactgggctgccgggccgacggtatctggctggacatgcccgaacaggagctgggggccggcccggtatttgcggaagcgcgccatataaaaaaaaaccacgcggtggtccacgacacacccgccgaccggcggagcctgcaccacacacaccgcggcgcggcagcctagatcgccgaaagattggcttatttggga

SEQ ID NO: 518253 - DNA, 163 bp, Homo sapiens
ggacgcgtgggctactccggaaaaaaagaaccatttggatacataggtatggtctgagctgtgatctaattggttcctaggttatgtgtgaccccattttcgtaggtgactaccactttcctccgccttctgttcccggtaattactgtcgactagagcttgt

SEQ ID NO: 518254 - DNA, 388 bp, Homo sapiens
cccttcctgcttccccttcaggtcttggtttgttttgaagggacgttttatagtccctatccccatgccagtgtgaaatgggcatttataacgtggtcagggtgtcccttcctaatcatggggcagatgccccaagccttcaaaaggagttttgaaagggtggccccagccccccgtggtgtgccctggaggcttaggttggtttgaggttggccccccaatttaccccagagcccagggggtcccaaaggcaagtttcccagaattgtcaaatggtcccctttccctgagtctggtttttttttgtttttttttgtttttttttggcagagataatcgggtcttaaaagttgtttttaaatggcaataaaacaagccagaatgtcca

SEQ ID NO: 518255 - DNA, 279 bp, Homo sapiens
  misc_feature (5)..(5): n is a, c, g, or t
  misc_feature (28)..(28): n is a, c, g, or t
  misc_feature (47)..(47): n is a, c, g, or t
  misc_feature (52)..(52): n is a, c, g, or t
  misc_feature (91)..(93): n is a, c, g, or t
  misc_feature (95)..(95): n is a, c, g, or t
  misc_feature (100)..(101): n is a, c, g, or t
  misc_feature (109)..(109): n is a, c, g, or t
  misc_feature (117)..(117): n is a, c, g, or t
  misc_feature (169)..(170): n is a, c, g, or t
  misc_feature (172)..(173): n is a, c, g, or t
  misc_feature (180)..(180): n is a, c, g, or t
aaganacagataagtacactgctgcttntgttgcaactgttgcctcnaattnaggtgaatcttgaggtgtccaagttgcaacagaagcgannngnatacnnaccagttnccaaaganacagataagtacattaaagagtttggatctcgcccaccacccccagtgaacnncnncaaaggnaaatacagaaggatcgcttagtggcagagttcacaacatcactgacaaacttccagaaggtccagaggcaggctgctgagcgagagaaagagtttgttg

SEQ ID NO: 518256 - DNA, 124 bp, Homo sapiens
  misc_feature (59)..(59): n is a, c, g, or t
  misc_feature (65)..(65): n is a, c, g, or t
ccaggcgtcggtactcagcggtgttggaacttcgttgcttgcttgcctgtgcgcgcgtngatcantcggcctcaaacgattatacccaacaagcaacccaaagctatggggcctaccccaccca

SEQ ID NO: 518257 - DNA, 624 bp, Homo sapiens
agcggacgggcgctgcgtggcaggcccggcggccgggcgtgctgcctgccacgatgtcctgtgcgccgcggccggcgcgccggcgcgcgcggggacccggactctcctggctgctgtgctgcagcagcgctggtgtcccgcggaccgcagggctacgtgatcgttgagctccgtagtcttgggccgacaaccaagaggtggaccgaggagctggaagcagcctccacattgagagacggtaatagcccagaggctgctagaaggaatccgagggaaagccaactccgtggaccacgcgaaacaagagtataccccaggaacataccttgcacaccgaacacaaaagggggaagagaaaagacaggccaaaacaaattgacagaggaacacaccgggagggaaggagaaacaaaaccaagagcacacgggggagacccaaggggacccggaagcgacccccccaagacaacacaaagacaacgaggaaaaaagtgaataacgacaacaataacacacgaggacgagccaaaagaggggcaagaaaccacgaaaacaacaggagacaacaaacaacggaaaaacccaacgcaaggagagacaccaataaacaacaaatgaaacacg

SEQ ID NO: 518258 - DNA, 546 bp, Homo sapiens
agttacaggcctctctaggaacagctgggctgatggggacagccgatcacttgacaggcaatggagtgtgggaaggtgttgatggacatcagcgcagacgctatagaatacggaatacctaaactcagagggtgtatggatccatgatagggtttctataggcaagagtagctaagtcaggaggggtatctagatctagtgagggggtagctgagtccaaggaaggagaagctgagtgaggaagtagctgggtgggccatcagcaggtctttggttggaggagaagagcagctggaggcaggaatatttagatccaggaagggagcaattgatgggatctgagaagcaatctgatccaggggaagagtagctgggagagaagctagtgaagggggttaactgggcttaaaatagaagtaggtgggtagagatagagactggggtggccatcagtgggccctggcagaagcagctagattcagaggagtaattgagagtgtttgagaggagaagcaattgaacccagaatctaagggaatgaataga

SEQ ID NO: 518259 - DNA, 837 bp, Homo sapiens
ggaggcatggaggcagtcagcgcacgggactactgctgagggggcagagcggcgcttgagagaaaccgcggataagtaatgactctttgaaagatagacgattaatgaacaactactgtaaccaggagtatagtcaataggtatacgaagatatggccttagcgttgagttggaacgtaatttgaactcagcttaagattttgaagagagaaagtatgaagaacattgaggaagagtagcctgaggaatggaaccagatatacaaggtttctaaagacatgacggaggtgtgaggatgaagcttcttcagtggatctaacaatagatgtatttaagagaacattgagagaaaggactatagtagtcccgtaattaatacacaatagaagggcaattgcttttcagcattaacacatgaaggtgaacttagaatcggagctttagaaggttcaggtttagaagttgtaggtgatgagaagataatgagaaggcgatcttttaaaaaatgagattaacaccgaaaggtgattaaaatagagcgtgtgaaatcccatggactgcaggggagaactgtgtcactgttagtagccctagatatagggtcatttaacttaaaagcgcagtaacgaaccatggaccagatttatgggggagtttgggtagggatagaaaacaatttgtgacgtaaaatagaagttgtcgaaagctgggaccaacttggaagaaagaaggtcgcgcgaaagggcgaggaaggaacattcgcgacgcattgggtgattcacaaagataacaaacttcgctgtgtacacaagcacagaataagtttcacgcctggaa

SEQ ID NO: 518260 - DNA, 102 bp, Homo sapiens
tcagatcagtttctgcaggaagctagctccaagcacgcagtctggtagacatttttgcctctgcgcttgaaatgcttgcaaaatactttgttaacaaaagct

SEQ ID NO: 518261 - DNA, 100 bp, Homo sapiens
accccgtcctagccttacattgcccagcgcaaccctacctgctgcctctggctgccactcctccctcatcttcttaatgtcactcttgcatttctcaatc

SEQ ID NO: 518262 - DNA, 118 bp, Homo sapiens
ctttgctccagttcccagtaagttcctcatttccatcacctcctcagactagcccctaccccccaattaggagggcactggcccccaacaggcatcaccccgctaaatcccctagaag

SEQ ID NO: 518263 - DNA, 1007 bp, Homo sapiens
gatggtgccatggagcagagggacccacaagtgcctcccgagcctagatccttggctcggaccactgcaagggccgaggcaagggacagaccagagcatcctgggtacagtgcctgtgacatctaccatgagaacctgaggccatgattcaggtgcagactgaggacacatcctgaagggtcagagacgagcatctagccaaagacagaccccatctgagacttaccagcatgcagagatatcttagacagagccatagaagagagcaacaagacacaaggagtaggtacacgaaggccgagcggactaagaagagacagactaggaagcggagagcattatagcatagaacagagagacgaggtgcacaccagggcataccacacctagacagcttacgggcccttgcacctcctccctcgctacctactacctacacatgtcaccacgcccgcgcaccgggcaacagcgctaagcacatatagcatgagcttagaaccaggaggggttacaacgaaactaaacgtcgtaggcacaccagagagcgacatccctgagacaaactgcaacagacaaaagactaaccctgctgcgagccagttaacccacttagatacaggacaggaaacatagcagattgagcaggatgcagaaccatcataccgaaccgagcaccaagaatacccactatgaacacaaaatatcagcaaaccaccacatcagacccctcacacaaccacaagaacaaattgaaaacagacaaaacctctgaaagctagaaatcaaaaaacgcacacaaccagaggcgcaaaccaaaagagaaacaaagagagaacggaatgaacagcccataacaagacgcaatgccaccaatcacatcgagccatgcgaacaaggaaaaaacaagtaaagcagaaagctaccataattggtaaatacaaaaaataacacacaatgagccaaaagagacaaaagtagatgagagcgaagacagataaaaaaagcag

SEQ ID NO: 518264 - DNA, 360 bp, Homo sapiens
  misc_feature (34)..(34): n is a, c, g, or t
atcttgtctggagggcactagatatgagcctgtntctccattagtctaacgctcctagggccagacagtgtcacaatgactcaatcagccatttataatgagcacctactatgtaccccatgctgctcagaacacagcagttaacagggagacaaggagaggaccactgtataacaaagctgcgtctatattaaattcaaaataatgatgtcaccagcagggtgatgagacagatcagtgatcagcaaaatttctttttgttgagatagagtctcactctgttgcccaggcaagagtgcagtggcaatcatggctcatgcagcctaaacctcctgggctcaggcaactcctgactgggca

SEQ ID NO: 518265 - DNA, 796 bp, Homo sapiens
  misc_feature (98)..(98): n is a, c, g, or t
  misc_feature (109)..(109): n is a, c, g, or t
  misc_feature (141)..(141): n is a, c, g, or t
  misc_feature (148)..(148): n is a, c, g, or t
  misc_feature (216)..(216): n is a, c, g, or t
ccggggcctggcttcgcgtgggtcctggctcctctgaagtggagtggctggtgccgcctgtggccgcttggcctcgtggaggatgctggctgccctgncgcgtctccgncagggtttgcctgtcgcacctgaggtgcttcnagctcanacagggactcagcctcctgaggccctccgagtgccctcgcgatgccaggctctgctggcttctgctgngcactttgcccaaggtcgtctccctgtgcggggacgtgggtgagggggccccgtgactgtttctggagtctggcgaagtggtcctgctgcatgctgtgtggctgtgctggctgctggggcccgcggagatgcctcccccgagcgggacctctgggcggctgtcttcctgcatctccgccttctggcttcgcgcctggcgctctgttggtgaaattcttccccctcctactcctctaccccgctcaactacctggctccaagagtatccacctcttggatcaccttgcttctgaaagacaccgaggacctcagggcaccaaactacatcaaatctgtgccagtgggccagcacccggagaagatcctgtaacacggaaggctttcatgtgacccaattataccaagctgcatagtccgagtgacgcccaacccgttgacctcacactgagacggctcttaggaaaggatttggggattaatggggcagcatcatctctttgagaccggacctgtgagccaagatgatgccaagttacaagaatagccaactgctctggactcaagtcaaaatgtagccaaa

SEQ ID NO: 518266 - DNA, 933 bp, Homo sapiens
atgacaactaagtgaaatgtggaatctaggattagaacctgggacacaaaaggggatattacttggataatcggcttaatttcaagaaggtccatggcaattattgcaatagtattgattgttaatgtttctggtttatgatgattatgttaatgatttatacgatgactgtgaacatttggcggaaaactgcagtgaagcacacaactaggactctactattcttgtttgaaatgttttgacattgtaggcctggagcgcggtggctctacgccttgtaatcccaagcgacttctgggaggccagaggcgggctagagcacaaggtctaggagtttgagaccagcctggccaacatggtgaagccctgtctctactaaaaatactattaaattagccaggcatggtggcaggtgcctgtaatcccatctacatccgtgagcgcgtagaggcgaggagaatcgcttgaaacccgaggaggtggaagttgacagtgagccgaggatcacgccactgtcactccagcctgggtgacagagtcaagactccatctcagagaagataaatcaaaccatcggggtgcaagaagtatttttcctctaatctggagtaccccagtaaatgagtctgaaatgtgctggcactcccacagtgctgaatagcataggaatttgtattacaaagtgtaccattgcctcgtattgcggtagaggccactttgtttggtaaatttccaggaaagattataggggggtaaatgtccagaatgcacgaaaacgcctatttgagaagggataagaatgagttttctggggaagcaaaggggtttttgggaataatcattctggagtaacaagcaataaattgtattagctgagagcggcattgaatggagagttggaagggaatgaaccgttttggtattcagaatggt

SEQ ID NO: 518267 - DNA, 374 bp, Homo sapiens
tcgatctagaggatcccgagctctctcggtgagggggactatgactgattcttggggcatctgaaggggggaacaggggcgctccacacaccggggttcgggcccatcccacgggcggtttccttgacaagtaagcttatcacggccttctagtctggtacccttcatcacaggcaaccaaacatgtggtcttatataacatttccctggtagaacagctgatgtggccaggtttcggcgggcggagatgaggacatgttcttactcggcagtagctctcggaaccggaccacaaaccatggggtagacataagaggatgcggcttcccacaagatcaaatccaggtggacatcggaccccacagagagagcgt

SEQ ID NO: 518268 - DNA, 832 bp, Homo sapiens
  misc_feature (134)..(134): n is a, c, g, or t
  misc_feature (145)..(145): n is a, c, g, or t
  misc_feature (177)..(177): n is a, c, g, or t
  misc_feature (184)..(184): n is a, c, g, or t
  misc_feature (252)..(252): n is a, c, g, or t
ccagaagtacaaataatctccgcggcgtcagggccgggcttcggctacaccgcagcctcaccatgagcgacgcctctgaagcggagggcggaccgcctgagccgagggcctcattatgtatggaggcgccctgncgcgtctccgncagggtttgcctgtcgcacctgaggtgcttcnagctcanacagggactcagcctcctgaggccctccgagtgccctcgcgatgccaggctctgctggcttctgctgngcactttgcccaaggtcgtctccctgtgcggggacgtgggtgagggggccccgtgactgtttctggagtctggcgaagtggtcctgctgcatgctgtgtggctgtgctggctgctggggcccgcggagatgcctcccccgagcgggacctctgggcggctgtcttcctgcatctccgccttctggcttcgcgcctggcgctctgttggtgaaattcttccccctcctactcctctaccccgctcaactacctggctccaagagtatccacctcttggatcaccttgcttctgaaagacaccgaggacctcagggcaccaaactacatcaaatctgtgccagtgggccagcacccggagaagatcctgtaacacggaaggctttcatgtgacccaattataccaagctgcatagtccgagtgacgcccaacccgttgacctcacactgagacggctcttaggaaaggatttggggattaatggggcagcatcatctctttgagaccggacctgtgagccaagatgatgccaagttacaagaatagccaactgctctggactcaagtcaaaatgtagccaaa

SEQ ID NO: 518269 - DNA, 313 bp, Homo sapiens
ggcttctgttcctgctttgtgtagcgaagatcagggcttcaagtgccatccatgtccctgcaagggacatgatctcattcgttattatggctgcatgatattccatggtgtacgtgtaccacaatttgtttatccagcctgtcaaaagacatgggcttttcagttgattccatgtctttgctgttgtgagtagtgctgcaatgaacacatacatgcatgtatctttgtgatagaatgatttatattcctttggtgtatgcccagtaatggaactgctgggtcaaatggtatttctggttctaggtctttgagg

SEQ ID NO: 518270 - DNA, 393 bp, Homo sapiens
tgtaaacctgtgtatttgtaatatcccgtttctgcgatagataaaacaaatgcagcaagtgaacaggttttgtagatgacaatgcctttggttactttgggcgaaaccaaagtaactcgaaccgaaggttattcctaatattggattacactaagcaagacaccgcctcgccaataactgagttacggttcaactcataaaatatgcggattcatatctgttaacgtagcttattccacaaagcacatgaaaatcgagtattaacaatacagattatggaatttgactttgctctaaactgagtaaaatctgcttcttatccaatccaccagcgaaaccaactaatgccccagctgatccaatcactcgatgacacggcgcaataatcgaaat

SEQ ID NO: 518271 - DNA, 1349 bp, Homo sapiens
ggacgcgtgggtcgaaccacgcgttcgggggaccgcagaggaagaattctggctttgggcgtggacaacctgaacaaagatcagagcccaggggccagtatcggagctccgggctggtatgctgctggtgaccaatgggtgagacagtcctttgcttgctctatgacaagtttcagcgttgggatgatgccaaggtactcgtctacaagctgaatggtggaggggtactagctgggactaggccatggtcgacttcctattggccttacgcaacaagtggcgcaagaatctctttcgtccaccatttagacagaggcgacacgagattcaagccgagtcgactcaaacttggtgctcgtggtccttgacaaacatgggggctttctttggtaggaggggaaattatgttcgaccagttgtcaaaccatagatcggggacgaatatggtggactaaataaattcgacaagttgcgatggggcggttaaactttggttccaacttggtgaaggggcactagagagactagatcaaaattccgaagttgtgctgaagatgataggctgagggaagcaaaggcaacgtgtcagataaatctttgaaggggcacggcgcgaaattcgggggcgatttgaaattccgaggggaacgcaccgtgagggtgacgacgatgtgaactaaaggggcacagaagcagcaggcacaagggactattttcaccacagaatgccatcaacattagcaaaccaagtcgcaagacaatctgggtccgattagacttgggggcatcctgggtgcggacgttcaagagcttgagcatgggatcccctggggcccatgtgtgataaccaggtattggggggccttcaccattccatctggatgaactttctaatcttgtggacatcaaaaggaccattcagggattccaaagcaatggttacctggccatgggaggaagcggactgccaggcaaaaaatttacccaaggtggacaagcgattaggcacaataggaaagggaagaacctcctaagagagggagcccgggcggaaaagggaggacaaggggcaaacgacggtcaccaggggacaacatgggattatgaaaaaccgccggggatattaaacagtaagaccaggataacacatccaggcgcaacaatactgggccagcccacaacaacagggcgtacctgggaaaacaacacacatatgaacaacagataaacagagaacccgccacagacacatggtgatcccaaaaacagcagtcgacaaacacaacaaacaagacgagagacatacccaacacaatgtagaaacggagagccacaagacgcgacagcaa

SEQ ID NO: 518272 - DNA, 319 bp, Homo sapiens
gggtatcgttccgactggaacctgggggcttgatcaggaaacacactcagcgtatcgggcgtggagagtcgacgagctgagtgtagttgactacggtcttgcctcactgggaggccacgtatggtgacgatgcacacgaagccccggctacttgtccagtgttaaccaatgtgcccagtcgaatgtccttgtgcggaaaactcagtgcatatgagcgcgcacagcgaccagtcgtcccggtgacgcggcacattgtcccgtgccagtgccagtgcgcatgccgtagccacatctgctctagacacctatgggaaaaggg

SEQ ID NO: 518273 - DNA, 371 bp, Homo sapiens
gtcgacccaggctccacattgggcgctaaattttgggggctggccagaggctctcatgtccaggtttgagcttgggaggcatcttggagctgaaagaaaaggaaactaggcagaagagagtgttcagtggcacgggtgatagatgggagggggagccctgagacttagggcttctgtcaatcacactgaagtaattatgataccacatggaaacatgcaactctgcaagctaactaaaaagaaagaactgattttcccgaagagacagaagtcccctttgcaccatgtgagtcagcttctcttcttggctcctggggagtcacatgacttcagcccacactgcttgttgccttccttttcagtcgacgcgg

SEQ ID NO: 518274 - DNA, 229 bp, Homo sapiens
  misc_feature (183)..(183): n is a, c, g, or t
cctgctccgtcgcgcctacgagccacgcagtgagtttgatccgataccatcctgtatacatctggaactcgggcctggactcgtgaggacatgagcttacctgcgtgcttacgtacgagtcagctgctgctagcctactagcggggtcttgtactggtctcaatcgtacatctcacatgtggntctctatcactatctaattcacgcaatccattacctatccccatat

SEQ ID NO: 518275 - DNA, 509 bp, Homo sapiens
cttatactgaccccacttctttaacgatgctgtaacccagccagtgacgctaatcctacaagtgcaaagggagttttgcatctcatgtccaagtcagaattagggccatttactagacttcaaattggtgtttgctaatatttttgtggccaagtatgtaaacttgtagtgggtaaattcaatacttttgtcatattaatttactgtatctgtcttatcttttgcatgcttcaacctggctaatatatttaaatccaccgcatctctcctccctccccccattattacttttctctctctccaaagactctgttcatagttttataacaatattgtaaagttcaattgtatcaataaaaaaaaaaaacaagtttggacagtatttaaatattgcaaatatatttaattatataaattaaaatataagccataatgtctttctttggcccacttagaattgctcttgacttgctgtaaaccaaccttcagaataaaggacttttgttaag

SEQ ID NO: 518276 - DNA, 234 bp, Homo sapiens
tagaattagagagctggagtcattgtagggagagaagataaaacggtcgatccagatttggctgctgcagaagctgaaaaaccggcgtggtggaacgcttcactctgcgccggctcattggcatttattggggtctgtacggtagtccgtcgtttccactcagcaaagctctttaggtcacatcatctcctattgctcccccacatactgtccccccgttttttaaacagagaa

SEQ ID NO: 518277 - DNA, 274 bp, Homo sapiens
gctaccacaacctctctctactacaaatacaaaatttagtcaggtcatggtgttgacacaccgtaatctcagcctacttgtggaagccgaggcataaggataccttaagcccgggaggctggaggctgcaggtgggaggatcgcttgagctcaggagttctgggctgtagtgcgctatgccgatcgggtgtgcgcactaagttcggcatcaatattgtgacctcccgggatcgggggaccaccaggttgcctaaggagggggttttgtgggtga

SEQ ID NO: 518278 - DNA, 524 bp, Homo sapiens
ccatgcccctcaaaggacatatgtccacaattcctatgtcctgtgatcgtgccacgtactgatattgtcactctacgcaagctttcctgaacaaaatctcgctgaaagagctatatcgcggactccatcatctccttgttactgcatagtgcatagcttcccactgtttgaccggtgagtaatggacacacccactttctctctgacaagcctataaagtgactctttgtctttgagacagagtcttgctctgtcaaccaggctggagtgcagaggctggatctcgggtcactgcaatctctgcctcccgggttcacggccattctcctgcctcaggctcccgaatagctgggactaccggcccccgccatccacgtcccgctatgttcatgtatttggagtagagatggggttacaccatgatatccagagatggtctcaatctctctgacctcatgatctgccctcctcggcctccccaaagtgctgggattacaggcgtgaaccacggcgcccgggcgtgc

SEQ ID NO: 518279 - DNA, 240 bp, Homo sapiens
cgctacccaggtccggcctgctactattcacccatagatgtggcacccgcttactaactccacctgttagacgctctgtgtttgccggaatgactccgtgcagtctccactccccttctttagtcaaggcagcaagcattcaatcctaggttagcatgcattatttttcaaacacacacactactacaaccattgcatcacgcaaaacagtggcatgaacagcaaatgttcccagcattg

SEQ ID NO: 518280 - DNA, 166 bp, Homo sapiens
agccgttggccactgtcccttagcctgactcagccctagcacaggcggctgcggacgcctgcacagtaccaggtggtgctgtccgagagctgcaggccctggtgaacagtctgtgtgcggggcagtccccctagagactcggagcggggctgactggaaaacaaca

SEQ ID NO: 518281 - DNA, 141 bp, Homo sapiens
gggcccaccacttatcacacaggtacggcttctctccagtgtgaatgatgatgtgcttggacaggtcccccacgtacacgcaaggcttgctgcacacgcttgcacttgtgtgggcggctgtcgtcgtgctggcgcaatatg

SEQ ID NO: 518282 - DNA, 114 bp, Homo sapiens
tggttcatccacgttcttctgggaggggggatgtcagtaatagtctaaaaccttcagggcttacaggagtcccttctccagatgtcatgagtgcggggttgaattcttgatgta

SEQ ID NO: 518283 - DNA, 657 bp, Homo sapiens
  misc_feature (555)..(555): n is a, c, g, or t
  misc_feature (657)..(657): n is a, c, g, or t
cagaaagtgaggaaatttggaaggctcatgagactcaatgataaatgcataaaattactttgtaaattgtaaattattattgccatattaaattttccattttcttattgctattgctattactactatcacggctactacagttaatattgaggttccatagaccgtgaatctgaaaagtcctatttgttcatgagggtgtagtactgtgtccggaattggtgggttcttggtatcactgagttaaagaaggaagccgcagaccctccaggagagtgttaacagttcttaaaggcggcacgtcccgagtttgttccttctgatgttcggatgtgttcgaagtttcttccttctgatgggttcttggtctggctagctcaggagtgaagctgcagaccttcgtggtgagtgttacagctcataaaggcagtgcggacccaaagagtgagcagcagcaagatttattacaaacagcgaaagaacaaagcttccacactgcggggcgatcccagtgagttgccactgctggctcctgcagcctgcttttattccttnatctgtccccacccacacccttctgatcggcccattttacagagagctgattggtctgttttacgagctgattgttccattttgacagggtgctgttggtgn

SEQ ID NO: 518284 - DNA, 159 bp, Homo sapiens
gctcaaataactttactcactgttgcttcttatgattaaactagctctgaatgttgttggttgggcctcttgtctttcctggttaactattagccttttattattacattttcaacctttccctgtaatggggtttgtgtaccaagggtctctaagaga

SEQ ID NO: 518285 - DNA, 1249 bp, Homo sapiens
gtcggagccgagccggactggtcaggatgatcacggacgtgcagctcgccatcttcgccaacatgctggcgcgtgtcgctcttcttgcttgctcgttctccctccctccttgcccccccccacctcccccccaccgcacggacactgcacgctgcgctgcttctctcctgccccagcggttccacggccacataagctcctgcagcgcaagactgcgcacgcggctatgcacgcgcgcgcgccttccacacatctccacctatcccactacccctctcctactccgatccaaccacaccataccaacagccaaacctaaccacccccttgggactcatactatctcaaaaaccaaacccttcttcacctatataccttccacccacgctcttcccccctctaacactccctactcgcgacaccaaccaggaaacgccttgcccacccttgacactaaggagagccccatcctaacttaatcgagtagcgccttcttgtcctactatcacacattaaccttccaccacttctcctcactcgcaacaattacttaaacacaccacacttactaaacgaaacccatctagctaggaaccatcccaccaccaccacaccaccacatcaccaaacaacaccgcatcactacctacacacacacagcacgaccgccgtgtcgcagctcacgacaccaacccgaaacaacaaacgaccgcccgcacctcacgagaggaccaagacgacgcgcagcagcagatggagaataggacgacgcaacgtgatgaaacaaaaagaaggagcacagacgagcagtgaggtagtatcacaggaagagagaacgaaccaaaagagaggcgtcagactaagactacgggagcaacacagatggggaggaggcgaatcagcctcacccaacagcggcagacacacaaacacagtaggagcccaatatcacacaacaatgaccaggcagacgaggaggaaaccctccagcaacacacacactaaacataaacacataagtcgctcctcatctcttttacaaccttctaccccgcttcgcccctctctaatgcaccacaacacatcacctcttctcccgccttacgtacatatctacctctctcacacgcgtctacacatactcctattaactgttctcatcataaataccacaaccctaatcaccctctcccacacaacctcactactctcttctatcacctcctacctcacacattctaccttcacc

SEQ ID NO: 518286 - DNA, 373 bp, Homo sapiens
  misc_feature (67)..(67): n is a, c, g, or t
  misc_feature (90)..(90): n is a, c, g, or t
  misc_feature (251)..(251): n is a, c, g, or t
  misc_feature (290)..(290): n is a, c, g, or t
  misc_feature (339)..(339): n is a, c, g, or t
ggtaaataaattgaaagtaagggctgagaaatttttgtagcaatttgacattgctataatgtccaanatttctaatattttatttttatngtatctgacgaaatatccatatgcaatggattcgaaataaagaaaaatctggtccttcatcagaactaggaatgcactgatttaaacatttggtcagacattctacattgagttagtatgctgtgtgggctggtctactgctgaagagctgtatccatgtngtgatggtcaccagttagtgaagtggtccttgttaaccngtgaacaaactcaagtagtaacgcttcctgctggtaatttaccctattnggtttttcctggttcccaaaaagttttgggtgta

SEQ ID NO: 518287 - DNA, 129 bp, Homo sapiens
gtcctcctcctgctgctgccctcatccctccatccctatgccatgttcccaccttggtatgctatgcttgggcgcctggctcacgaggttggctggaagtaccaggcagtgacagcagcaggaggagga

SEQ ID NO: 518288 - DNA, 175 bp, Homo sapiens
gaattcactagtaattagcatgcttcctaggtagtggatctgaggctacctatagaacttcctttgcagtcataattcgctcagaaactacaaaagtgcttgctcttgaaaatggagtctgtctttgtccatttcatgcttctataaaagaataccacagactgcataatttatg

SEQ ID NO: 518289 - DNA, 340 bp, Homo sapiens
gtgaaccctggaccaccagcctctctgagtgggttcacaggataccataaaacatttcggaagcagatagaatgaatcttggtttctttgtgaccagcacatactatagtcactgtaacttgcttagagggaaatacacatttaaaaacaaggggctggcgagatggctcagtgggtaagagcacccgactgctcttccgaaggtccagagttcaaatcccagcaaccacatggtggctcacaaccatccgtaatgagatctgactccctcttctggagtgtctgaagacagctacagtgtacttacaataatcaataaataaatctttaaaaaaaaaaa

SEQ ID NO: 518290 - DNA, 175 bp, Homo sapiens
  misc_feature (138)..(138): n is a, c, g, or t
gagcaagactctgtctcagggggaaaaaaaagaaaaggttaaaatttaggccgggagcgtgtggctcatgtctgtaatcccagcatttggggaggctgaggcaggtggatcacttgaagtcaggagttcaagaccagnctgaccaacatggcgaaaacccatctctactacaaat

SEQ ID NO: 518291 - DNA, 273 bp, Homo sapiens
gtcctatagtcctagctacttgggaggctgaggcaagaggatctcttgagcccaagagttcaagcctgcagtgagctataatcacgccactgcacttcagtctggtcacaaagcaagaccctatctctagaagagaaaaaaaagacatatacttcagttcatctaaaatataggtagagtaaaatcagaagcacctagtctagatgttctagattcagtagagacctcctctctttgtctctacactttctcagatctagcagtattagggct

SEQ ID NO: 518292 - DNA, 242 bp, Homo sapiens
  misc_feature (17)..(17): n is a, c, g, or t
  misc_feature (37)..(37): n is a, c, g, or t
  misc_feature (118)..(119): n is a, c, g, or t
  misc_feature (121)..(122): n is a, c, g, or t
tatgcatagataatctnctccattcccgtgaacgttnttcctgttcttaagacgtgattttgctgtagaagatggcatttctataccactttgggctttggttataagtgccatcttnntnncacaaaaatccaagtggtatagaaatgctggtttttcagttttcaggagtgggttgatttcagcacctacagtgtacagtcttgtattaagttgttaataaaagtacatgttaaacttaa

SEQ ID NO: 518293 - DNA, 227 bp, Homo sapiens
cggcacgaggctgaaattcaaatttcagtcatgtgatttgaaagggggtcatgtttctgtttgtcatgtgtaacagtggccaaatatcctatgagttcctaggggctctgggttccaaagttactgtgttacatttaccttcaaacctctatcattttatctgtcattctgaaagaatcgctttattttgatcttcttgattaagaacatgaaacatgaccattgca

SEQ ID NO: 518294 - DNA, 145 bp, Homo sapiens
ctgtctagaggatccggctagttgtgctcagtgagatagtcagctcgagtggctccgtgtcgtaacagcaggagcatggcgcaacttcccaggccgaggaagggccccggctcggcctcttgagagccccacccctgacaacggc

SEQ ID NO: 518295 - DNA, 436 bp, Homo sapiens
  misc_feature (42)..(42): n is a, c, g, or t
cagagttgccttccttcctaaggtcccacttgcacgcacaanaatagttcctaccatcaaggcagagtggctgctctcagagcactggtctgtgagctgctgtgagcctctacgttggcagtgtctgtccttacaacaaagcacaaggcaggcattttccttcttgctaccttctcttcacagatgagtaaactgaggctcagacacagcaagcagaactggctggtattagaatccaagtctgcctgagcccaaaggcttattctatcttccacatcaaggatactcttgggcagaccgttcatcagtctcaaggtcattgctatcatcaacagccaatatctattaagtacctagtgatggtgagagagatcagaccaggtactcaatgcagattggcggcccagggctgcgctaagggcaggcacagagtggc

SEQ ID NO: 518296 - DNA, 175 bp, Homo sapiens
  misc_feature (141)..(141): n is a, c, g, or t
tcagcagcacatttccaggccacgggagcccatcccggccccagagcccagaaaaacgcatcgtctgccggccaaaagttgtcgtcatcgagaggccagaatgctgtcggcgcttcgcggatagtactcgcatccgcacantccgagccttcgaccgtccctttccaggcgacag

SEQ ID NO: 518297 - DNA, 1273 bp, Homo sapiens
aggctggtggtcccccgcggggatatcgtcgctgctcgccgcccactgtgctcccgtgggttttctcttcttccgcagagtgtccccgccccagcggtggcgccaccttcggaatgttgtgggcgtctggtcccctctcgtgtgggagtgccccccgccgctccctggcctcatcgcccggggggctccgcgattgttatgaccgcctttttccgccgccccgctggtgggtccatcgggcggtggtgtttctttgttatccgccgcgtgggtgtgttttcggggcagagatggtgtttccgcacttggtatgaagggggaagggcgctttcctgaagtatggagtggcccacagagtatgtgtgctctttataaatcgcttgtgcaactggttagtcccacaggtgtggagcccacagcgcacgggctagtaacgtctttggtgtggggagatattgtgggagatttccctgcccgccctccaccacattgtgtctctcagcgaagacacaccccccgctgtcttcgtggaggaccactttgttctccacacccctctcgtgtgggggcccttctcccacgagtttggcgcacagctggtcacccccctgtttcacattttggtggcccacctcataatgggccgcccacggccccgcacttgctctccccgccgagggggctcctctttttcacaaagggcgcgccacaatctctctgggagagccacgggttttctcaccctgtcccacatgtgttctctcgccccgcgggagagagcgccccttttctccctctcacacttgtggtaacacccacgcggcgcacaggggccacatgtgagacgcaaagagatgtgagaatgtctcacccgagagggctcgagagagggcacaacacatcgagaacgagacctctcgtgtctctctgagagtgaattcacccccgctatccccacgcgagagggccccaccgccacagagaagaaggagaggagaggagattttcgcgttgagaggaagggcccgcagaagaaggagaggcgcctataaggcacgagagcccccacttaccctccacaggctgtttgcacagtgttcccctaagcccttttatactcacagctgcccctcttccttctccctccacgaaatttgtggtgttgctgccttctatttcttgtgtttttgtgttttttttttctggggggggtttatggacacgtgcctggcacacacatagtaaggcgccccactaataacttgtttgttga

SEQ ID NO: 518298 - DNA, 271 bp, Homo sapiens
cagcaggtaatcagactcaatcttatcagaaagcttatccataccacatgaacccaaattttatctcatgctcaacaaataaaatcagctgggcatggtagatcaggctggtaatcccaacacttagggaagccaaggcagggggattgcttgacgccaggttggagaccaccctggccaacaaagcaagactccgctttgaaaaatataattcgggtgggcacagtggctcacgcctgtaaatcccaacactttggaaggccacggcggg

SEQ ID NO: 518299 - DNA, 1551 bp, Homo sapiens
  misc_feature (13)..(13): n is a, c, g, or t
  misc_feature (18)..(18): n is a, c, g, or t
  misc_feature (34)..(34): n is a, c, g, or t
  misc_feature (101)..(101): n is a, c, g, or t
  misc_feature (104)..(104): n is a, c, g, or t
  misc_feature (153)..(153): n is a, c, g, or t
  misc_feature (176)..(176): n is a, c, g, or t
  misc_feature (205)..(205): n is a, c, g, or t
  misc_feature (209)..(209): n is a, c, g, or t
  misc_feature (222)..(222): n is a, c, g, or t
  misc_feature (227)..(227): n is a, c, g, or t
  misc_feature (255)..(255): n is a, c, g, or t
  misc_feature (307)..(307): n is a, c, g, or t
  misc_feature (309)..(309): n is a, c, g, or t
  misc_feature (319)..(319): n is a, c, g, or t
  misc_feature (333)..(333): n is a, c, g, or t
  misc_feature (384)..(384): n is a, c, g, or t
  misc_feature (436)..(436): n is a, c, g, or t
  misc_feature (445)..(445): n is a, c, g, or t
  misc_feature (455)..(455): n is a, c, g, or t
  misc_feature (470)..(470): n is a, c, g, or t
  misc_feature (538)..(538): n is a, c, g, or t
  misc_feature (568)..(568): n is a, c, g, or t
  misc_feature (637)..(637): n is a, c, g, or t
  misc_feature (767)..(767): n is a, c, g, or t
  misc_feature (779)..(779): n is a, c, g, or t
  misc_feature (871)..(871): n is a, c, g, or t
  misc_feature (879)..(879): n is a, c, g, or t
  misc_feature (889)..(889): n is a, c, g, or t
  misc_feature (903)..(903): n is a, c, g, or t
  misc_feature (1015)..(1015): n is a, c, g, or t
  misc_feature (1059)..(1059): n is a, c, g, or t
  misc_feature (1129)..(1129): n is a, c, g, or t
  misc_feature (1149)..(1149): n is a, c, g, or t
  misc_feature (1332)..(1332): n is a, c, g, or t
  misc_feature (1365)..(1365): n is a, c, g, or t
  misc_feature (1537)..(1537): n is a, c, g, or t
atgatgaaataanaatanatatgtaaaaaggaanagaatagagagagaagagatgtagtatgatggaggcgaaacgtagagagagagagtaagtagtgagnagnaaggagatgtggatatgagggtttatgtgtgttggtatagtacccatgngcgagtgtgctgtgtgagatgtntggagagtgaggtgtagatgaatacccanaatnatataatgaatanagagnaagttacatagagacgaaggagaggganagatgttatgaataaatctacgtaaaaatacatgaaagaagatagtagagancnagtgattacncatatgacgtatgnagatgtagtgacatactcgtagcagagtgagggaggagtcggtgagtgatngtagatgtattcttgagatagatcactacgatcgtagtgctagagtactacncagatgatngtatgggacncgctaagacggagcnagagagagtggatgcgcgagagcgagagagtgctagaagaagcgtgcgtatgagggcatgagtacacnaatgagtacgtcagcacggcgaggtacganccaatgtatcactggacagcgatacgagctcgtgtgctcgagacgttaatatacggacgcagagtggangatgaggagagatgaggagcagtgtggtgataggattatacagagaaaatctgagacgatgataagacatatatagattaacataatatcacgcgattagtatagattaagtatatagaactaacaaganatcactagacantcaagacagtaatactctcaggagctcaatatagtaagatagagtagatagagggaccatgcgcgtgatgtaacgtatcgtagatgtacgangaattatngagagtgatntcgatggtcatgcngcggttatcgattgatgtgtatcacgcatacacgcgagtaacgaagagaagtatgagataatagtaagtattacgcagagcgtgagatacgcaatgaatagatgagagaatngataatcagctagaatctacagcgacgactatcgccgggacgantaacagaagctgcgagcaagaaccagaattgagcgaacaaagcaataaattataatagatagtagagagntagtgatagagatataagangctatatagtagaagtagataatgggatgaatgagaggagaagaatggggtaagggaggatgatggttaatgtcatagagatcggcaagatgtaaccatacgcatggagacgtaatgaacgcagccagccacgctggcgcgtacgagaatgctacgaaacggatgtgacgagtacggcacagngatgggacagcgagcgttagagaaaagtaagcncaagactcgacataaactaacgacgtcgagcacacttcaagataacattatattagcgtatacacacaataatatatgatgcgtagttgagtcgagatagagagtagaagaaatatactagaacaatatcgaaaaagtgataagcaattcacataaatgcattgaattgcanaacaacaaataatg

SEQ ID NO: 518300 - DNA, 481 bp, Homo sapiens
ggtttgcagatctggtgacttatataaagcttttgtgattcctactaagctttaagatttaaaaaatgttcaattgttgaaatttcgttgtggggctctattttggcttgtggcgttcgtggtgagagagtgaggaagcattctttccttcactaaaggttgggtccttttccgttgttgttcggttatcctgggggaattgaggcacattttgcgggaatttagtttgtacacaacgggaaaggcaactttaaagaggggggaaatttttgacggaaaaatgttaagagagccattttttcagtccattcgtggcggtgggcaaacaggcagcatttttacaggactgggttatagggggctgtggcgcgggtgacgtcacatctggtaatcccagcacttgggggaaggccaaggcacgggcaggaaccactttgaagggacgtttcaagaaccaagcgttggcccaaacggtgggtgg

SEQ ID NO: 518301 - DNA, 1094 bp, Homo sapiens
  misc_feature (555)..(555): n is a, c, g, or t
actaccatgcccactatgtgtgaacgttctgagaatgatcgtgggttgtagctgggtctctactcatagtttgcgtgagcgtgaccgcgtacgatatagcgcgcgtgcaatactctgaggcttgcgtgctataacggtgagtccctttacctggtacgaacagtacgcgtgtggctcacttgtcgacaccgagtgacaaagtagtcctcacacctatcaggactagatagagacgacaatgactcgcgtgtggtgaatctaactgagtcatgaacgaaataggaatgttagttcacttcgttacgtcttcgtctatgctcttgtggcacgaggtttgcaatacctcgtgtccatggaccaggtctttctgtgtctcttgacctggacttagtctctggaatcccatagggtttccccataaacatatgtgcctaccttcgtgtagatacgcaccttagtatatttgcagagcggatacggttgccgtacggttgcgtcgactctgtgggcaggaacgctggcaagaagagatccgacgaaggaggaaagcacaantggtagccaattaggattcgcactggttatgcaatcgcactatgtgtaggagcccatcgcgatggtacgtgacactgtattcacccgatggcgtaccgtataatcagtacgagtgtctatgtaccttccgggcatcaaatgcgccagaggaatcaacaaaaaaatgcgacagagcacgaacccgcgacgtaatgtcgccctggctgatagaaggaagactgcctaacagagtgtgtatttccacaacacgtaagtcaatacttaaaaacctggtagtctatgtcgtatcgtctcggttcactacgtgtaatacctgtcaatgccgggagcctacaagtgctttactggcctcctacgcgcacgtaagcgccgagacatcttggtgatactagtgagcgggagttgagtcaataccgtcgtgtttctgtgtgtcacgttcgaacagagacgtattgacacattgaaagtcttggtagtcaactagtatacacacataatgcacagtaagttgttgccagtgcaccaccatacatatgagg

SEQ ID NO: 518302 - DNA, 209 bp, Homo sapiens
ggcccacctgccccataacgtgctgctggtctgggcagttgttctgtttgtgctgtgtgtgcgtgtgctgtgcgttggtgtgctgtgtgctcgtgtgtgtgctcgtgtgtgcgtgtatgctgtgcgtaagtgtgtgctgtgcgtcagtgtgtgtgctgtgtgtgcatgtgtgtgcgtatgtgtgccgcgctatctgatagagcaggtgg

SEQ ID NO: 518303 - DNA, 587 bp, Homo sapiens
ctcaacgctttatacttcatcatgtttttggacacaaacattcagaccatagcagaggccttggagaatggctgggaaagacagtattggaggagggttgttggatctataggctgggaattcagggcagggatctgggccaggaatgtatgtagaagatcattgttgtatagatgattgttgaaaacatgggctggatgaggtctctcaaggagagaggatgcagagggaagaaaagaggacgtaaggctgatgtttgagggacaaaaacatgatgaagactgaagaggagagaccaaacaagtaggaagaaaaccagcatttatgctgccaagaggacaaataagataaagacagaagcacttcggtggttttagaagcaaggaggcccttgggaatcagtaagccttgttccagtggagtgaagcatctcccagccagattgcattctatagagaagaccagggtaaggaatacgaacaggaatacttgaatataaacgttctttttgagaaatttaattctgaagaagaggagaaaattatgttaatagctggagaagtataaagcgtggaggggtaccgagc

SEQ ID NO: 518304 - DNA, 2129 bp, Homo sapiens
gtaagacatgacttgttcctctttgctttccaccatgattgtgaggcctcctcagccacagagaactgtgagttcattaaacctctttcctttataaattacgcagtttcgtgtatgtctttattagcagcacgagaacaaactaatacagtaaattggtaccggtagagttgggctgtaaagatacccaaaaatgtggaagtgactttggaactgggtaacaggcagaggttggaacagtttggagggctcagaagaagacaggaaaatgggggaaagtttggaacttcctagagacttgttgaatggctttgaccaaaatgctgataatgatgtggtcaatgaaatccaggctgaggtggtctcagatggagatgaggaacttgttgggaactgaagtaaaggtgattcttgctatgttttagcaaagagactggcagaattttgcccctgccctagagatttgtgaaactttgaacttgagggagatgattttgggtacctggcagaagaaatttctaagcaacaaagcatcaagaggtgacttgggtgctgttaagaccattcagttttaaaaggaaaacagagcataaaaattcagaaaatttgcagcctgacaatgagacaggaaagaaaaccccattctctgaggaaaaattcaagccagcggcagaaatttgcataagtaacaaggagccaagtgttaatcaccaaaacaatggggaaaatgtctccagggcatgtcagaggtcttcatggcaggccctcccatcacaggcctggaggcctaggaggaaaaaatggtttcgtgggctggccccagggcccccctcctctatgtagcttagggacttggtgccctgtgtctaagctgctccacccatggctaaagggggccaaggtatgtacagctcaggctgttgcttcagagggttcaagccccaagctttggcagcttccatgtgctgttgagcctgcagatgcacggaaaacaagaattgaggtttgggaacctccgcctagattacagaggatgtatggaaacgcctggatgcccaggcagaagtttgctgcaggggtggggctcttatggagaacctctgctagggcagtgcagaagggaaatgtgggtttgcagcccccatacagagtccctactaaatgctagtccatggaagcatccaggagggaggctgtaccctgcaaagccacaggtggggagctgcccaaggccatgggagcctacccctggcatcagcatcacctgggtgtgagacatggagtcaaaggagatcattttggagctttcagatttgactgccctgctggattctagacttgcatggggcctttagcccctttgttttggccaatttctcccatttggaatgggtgtatttatccaatgcctgtactctcattgtatccaggaagtaactcacttgtttttgattttacaggctcataggcggaagggacttgccttgtttcagatgagactttggactgtggacttttgagttaatgctgaaatgagttaagactgtgggggactgtcaggaaggcatgattggttttgagatgtgaggacatgaaatttgggaggggccatgggtagaatgatatggtttagctgtgtccccatgcaaatttcatcttgaactgtagctcccacaattcccctgtgtcatgggagggacccagtgggaggtaattgaatcgtgggggcgggtccttcccatgctggtcttgtgataatgaataagtctcacgagatctgatggttttataaagaggagttcctctgcacaagttctctctctttgccttctgccatccatataagatgtgacttgctcctccttgccttctgccatccatataagatgtgacttgctcctccttgccttctgccatccatataagacgtgacttgctcctccgtgccttctgccatgattgtgaggcctccccagccatgtggaactgtgaatccattaaacctctttcctttataaattacccactctcggatatatctttattagcagtgtgacagcagactaatagagggattaaagataaaaattttggctggatgcaatggctcacgcctgctatcccgctat

SEQ ID NO: 518305 - DNA, 109 bp, Homo sapiens
gcggccgcctactactactactgctcgaattcaagcttctaacgatgtacggggacatgctactacactcctgatcggcgacagagtgagactgtatcaaaaaaaaaaa

SEQ ID NO: 518306 - DNA, 87 bp, Homo sapiens
ccagagagccctgagcagcctgccggcgagctacagaaggtcatcgctaccgcaggttttgggtacagtaaaatggttcaatataag

SEQ ID NO: 518307 - DNA, 332 bp, Homo sapiens
ggggggttctctctctgtgggcgggggggggcgcgggagaaattttgttgaatgttttttaattggggggggaaaaaagggtttcccccccccccccccaaattttttttttaccccccctttttttgttttttgggtttggggggggcccggcccaaaaccccccggggaaaatttttttttaaaaaaaaaaccccctttttttgggggggggcctgggggggggttttttttcccctttcccggggggggggcaaaaaagttttttttgggggccgtttttttgggttttttttttccccccccctttttattttggggggggggtttta

SEQ ID NO: 518308 - DNA, 181 bp, Homo sapiens
taacagaagaaaggaatgtaggttttgggacagacgctgctgggggtgcgatgagaagccctagccccctgattggtgttgtgtatcggaaaagaagggtcacttgttaaactcatgctcctgctcgtccttcttgatgacagtcttgtatgctttctcgaagtccttggcccttatcgag

SEQ ID NO: 518309 - DNA, 375 bp, Homo sapiens
ttcattttgctccctagctcaaaaataacccagtgttacatacctggattcgtatcacaaactcaatgggttacagtcaacattgctggggtgggaagtgtgtgtgtattcattttgttccctaaaagagctgcagggcatgcattctaacgaatttgctaaatggccaggagtccatagagtttgggaaagttagaaggtggcctcaagaacacccagggaccggagacacacacataagaaaggggagttctaggcaggccctggtgactcatgcctataatcccagcaccttgggaggctaaggcgggagaattgcttgagcacaggagttcgagaccagcctgggcaacatgacaaaaccctgtccctaca

SEQ ID NO: 518310 - DNA, 420 bp, Homo sapiens
  misc_feature (31)..(31): n is a, c, g, or t
  misc_feature (46)..(46): n is a, c, g, or t
  misc_feature (202)..(202): n is a, c, g, or t
  misc_feature (233)..(233): n is a, c, g, or t
  misc_feature (242)..(243): n is a, c, g, or t
  misc_feature (246)..(246): n is a, c, g, or t
  misc_feature (264)..(264): n is a, c, g, or t
  misc_feature (302)..(302): n is a, c, g, or t
aaacccccccccggggggcccgccccccaangtgcaaccaacgggncaaccgcggcttcgtttaaaaactttttgtgaaaaatgagtgcgtttgtacgggaatgataaactttttatttaattcacaagaagcgtgtttgattgccgctgtgggttcgtggctggacctgcccagagccctgtgcccgggggacacgtaggnccgcgcgtgaatgggacgggttcccacacgnacaccctcnngcncttgccgttcccgacccngcctgggttccggggcctgcgtctgtggaaagggtccntgtgcgcacaacggtgaccggcggctcccgggcgcctcagtcctggacaggagcctccaccacaggctgtgtgaatgttttgtgtaaacgtacaaaaccgtttctggcgatcacgaaa

SEQ ID NO: 518311 - DNA, 264 bp, Homo sapiens
tctggccaccgaggccggtagatcgcttgagcccaggagttcgaagactagcctggcaacaaagtgagattccccctcctctctctgaaaagtaaaaaaaaattagccggtcatggtggcacatgcctgtggtcccagctaaatgaaaatctgaaggaggtggatctcttgagcccaggagctcaaggttgcagtgagccatgttcgcgccaccacactccagcttgtgcaacagagaccctgtctcaaaaaaaagtcatctga

SEQ ID NO: 518312 - DNA, 137 bp, Homo sapiens
gaatgggatcttccagcagtccgcaggtgcgcaactgagcgaggtgtagggacactattaggtatggtagataccgtcgagcgcccagatcaattcgcagacacatagctacgcccagtaagaccaaaacctgcggt

SEQ ID NO: 518313 - DNA, 536 bp, Homo sapiens
  misc_feature (110)..(110): n is a, c, g, or t
  misc_feature (203)..(203): n is a, c, g, or t
  misc_feature (225)..(225): n is a, c, g, or t
  misc_feature (240)..(245): n is a, c, g, or t
  misc_feature (261)..(261): n is a, c, g, or t
  misc_feature (265)..(265): n is a, c, g, or t
  misc_feature (446)..(446): n is a, c, g, or t
  misc_feature (516)..(516): n is a, c, g, or t
  misc_feature (528)..(528): n is a, c, g, or t
tgagcctggagaaagttcttgtggattcagtcacaggagttgtttgatgtctataacaagctagagactatacaagcacaggggggggcccttacatgatgttttcgaanactgtttttttcatcacgctcctgccacctcattattttgcattgaagatacattgccaggttgtgttttctgaaggattcagtgacttgctntctgtaaattatatggcttatnacttcttagacaaannnnnnccatagagatcattgntaanaatactgaggttctaatatactttctttagttctgtgagccaacagtaattattaagaacactttccctttaaaggaaacaaaagtgaagaccagattgttttaactgtcatagtgttgctttcttgcctgtcctgcttagttttaacccccccccccaccccaaaaagaacaaggagggngattggaaacaagataagatgtgacttagttagaatacagagctttggtaattacatcaataaaattaanaaaaaccccaanaaaaggga

SEQ ID NO: 518314 - DNA, 928 bp, Homo sapiens
agtgccgcgggactcttgggggtgaaggtgtgtgtcagctttggcgtcactcgagccctgggcgctgttgtaaaggagccgagcacgcgggtctgtcatcatgtcgcgatacgggcggtacggagagagaaccagaggtgtatgtgtggtaaccgtgggaacgtggcgctggcaaaagggagagttagaaggggcttcatcttataatgggtcctttaaagaatgtatggaattgggagaaaatcctccaggatttgggcctttgtgtggaattcggaaagatcctaaggagatgcagaaagatgcaggtacgaggacgtgatggaccaaggtgattgtgttggcttcccgagtgagcggttgactctatcgacaggcaatgcctcgggaagatcactgtgtgtgatagaccacttgccctgagtgtctcttttgattccaaattgatagatgctatgagtgtggcgaaaaaagggacatctatgcttaatgatggtcatctgttacagcctgggggaaaaaaacaggcaggtcccgggtctagatccacattctcgatccagaggaagggatactctcgcttcacgcaagagggagccagcggacgaagctcagggtccaggcatctcctcgaagatcaagatctatctctcttcgagatcaaggtcacgttcactcagaaaaatctaggggtgggccatcaaagggcagggtgatttccaacccgggagtgaagtccaatcccggttatttagggcaagaagaggggaaagccaattccatttcaaaaagtgggccctagagagttccgaagagagctgggaagttgtacaacctccgtgagaagttgggttccatcacgcgggtgggcgccaaaataccatgggttgagcaccggaatgtgtctccgggcgcagccagtgtgcac

SEQ ID NO: 518315 - DNA, 216 bp, Homo sapiens
gctttcctttccctgacacagccccagaccccccaaagccttttgggcctggaaagcctggggaaggacttccaaacccccggaccagccctggggctcagggcaccccccccgggccgctgaccgattgacctctcctcccgggggcccagccccaaagccccagggctggcccgtttggggcacctgccccataaaccctgatggtgtgtttta

SEQ ID NO: 518316 - DNA, 830 bp, Homo sapiens
  misc_feature (16)..(17): n is a, c, g, or t
  misc_feature (23)..(23): n is a, c, g, or t
  misc_feature (27)..(27): n is a, c, g, or t
  misc_feature (32)..(32): n is a, c, g, or t
  misc_feature (34)..(35): n is a, c, g, or t
  misc_feature (246)..(246): n is a, c, g, or t
  misc_feature (275)..(275): n is a, c, g, or t
  misc_feature (315)..(315): n is a, c, g, or t
  misc_feature (379)..(380): n is a, c, g, or t
  misc_feature (391)..(392): n is a, c, g, or t
  misc_feature (406)..(406): n is a, c, g, or t
  misc_feature (413)..(413): n is a, c, g, or t
  misc_feature (461)..(462): n is a, c, g, or t
  misc_feature (520)..(520): n is a, c, g, or t
  misc_feature (536)..(537): n is a, c, g, or t
  misc_feature (558)..(558): n is a, c, g, or t
  misc_feature (561)..(561): n is a, c, g, or t
  misc_feature (564)..(564): n is a, c, g, or t
  misc_feature (569)..(569): n is a, c, g, or t
  misc_feature (575)..(575): n is a, c, g, or t
tcggcacgagggcggnntgtccngcgncttgntnnagtggactccgcgggccttcggcagatgcaggcctggggtagtctcctttctggactgagaagagaagaatggagaagcccctcttcccattagtgcctttgcattggtttggctttggctacacagcactggttttctggtgggatcgttggctatgtaaaaacaggcagcgtgccgtccctggctgcaggctgctcttcggcagtctanccggctgggtgcttaccagctgtatcagnatccaaggaacgttggggtttcctagccgctacatctgtnacttttgtggtgtatgggaatgagatcctactactatggaaaattcatgcctgtaggtttaatnngcaggtgccanntttgctgatggcgncaaagtnggagtcgtatgtggatgacatctgattagcagaagtcatgttccagcnntggactcatgaaggattaaaaatctgcatcttccactattttcaatgtattacgaganataagtgcagcatttnntgcatctgacattttacctanaanaanaaaangacccnaaatttggggggggtgtggaaaaatcagtggtgttaccattaataaccctaacaggaaggtggtgagcatgtaatatgagctttttggagaccatcatagagatcgatcttgattatgatatctcttcggaacctaagggaactctcaagggtaacaggtcggtggtggcttggaaactgaaaccattcctggtcgaggaatgtggaaaaattttgggattgaatttttttggtttgaaccaggggtgaatttgg

SEQ ID NO: 518317 - DNA, 1004 bp, Homo sapiens
cagtgcccgccaaaatttgttgcccccctatgataaactacaccgcgttgttgttaaatgaatagcgccccctttggaatttgttatatcagccgccccctcctcgtaaggggtgtgcccgttctccccgctcctgaaaagatgtatgtttgaaccctccgttgtgtgaatggctcgaccacttgtcaccacaaaagcgaggggtggtcccccatctctctagaaggcttcttcgtagaacccgggtcttataacttacaagaatatattaatcgcgcggtcaattgcagaaatctctcgattataatccctggggcgggagattgctctctcccccgccttgtggtacccaccgccacgagagttcacccccgtgctattttgcctgctcacaaggtacataaaggcccctccctgagaacgccaacggggttctgtcaataaaaaaagggttgcccccgacgtctaatatatgtttggggcccccccattatgctcccacatcgttagttaattgatctgccgccgcggtagtcaaaaaagggtttcttgtgggtagtatacctgttacaagcggacccaccttatctgtgtgtgggcttataaagtctggttgatatcttaaagaggctagtctcaaccccctctcgcacactttttcacacaggtctataaagagtgacaccaactacgccctgtttacagaagatccgtggtccacgctgtacctccgcacgctctctcatagttatttctttcgacacacctttagtgccccacacctcagacactgtcacactaattttagggcgggttgttgttcttttagcacacagccaccttcccatgaatccacaaatccgtgtggtgagcccgtgttatctttgcagattcggggggaattaggtggatttgctgcccacactcacaacagaaaggtcaacaatcgaaccagggaaaaacccccatcgtaaaataacagggggcaccaggacccacataaa

SEQ ID NO: 518318 - DNA, 164 bp, Homo sapiens
tgccttctccttttggcaaccatggttatcaatcctttttctgttttagtgtcttatttcggctttcaagtgatgggctagccaaagatgacatctctgagattaggagactggggagagcttgctgcttattctgactgtgctgattttaaatgtctggatat

SEQ ID NO: 518319 - DNA, 863 bp, Homo sapiens
  misc_feature (108)..(108): n is a, c, g, or t
  misc_feature (143)..(143): n is a, c, g, or t
  misc_feature (200)..(200): n is a, c, g, or t
  misc_feature (202)..(202): n is a, c, g, or t
  misc_feature (208)..(208): n is a, c, g, or t
  misc_feature (222)..(222): n is a, c, g, or t
  misc_feature (226)..(226): n is a, c, g, or t
  misc_feature (301)..(301): n is a, c, g, or t
  misc_feature (327)..(327): n is a, c, g, or t
  misc_feature (331)..(331): n is a, c, g, or t
  misc_feature (335)..(335): n is a, c, g, or t
  misc_feature (340)..(340): n is a, c, g, or t
  misc_feature (348)..(348): n is a, c, g, or t
  misc_feature (362)..(362): n is a, c, g, or t
  misc_feature (377)..(378): n is a, c, g, or t
  misc_feature (381)..(381): n is a, c, g, or t
  misc_feature (385)..(385): n is a, c, g, or t
  misc_feature (387)..(387): n is a, c, g, or t
  misc_feature (392)..(392): n is a, c, g, or t
  misc_feature (414)..(414): n is a, c, g, or t
  misc_feature (421)..(421): n is a, c, g, or t
  misc_feature (426)..(426): n is a, c, g, or t
  misc_feature (446)..(446): n is a, c, g, or t
  misc_feature (448)..(448): n is a, c, g, or t
  misc_feature (451)..(451): n is a, c, g, or t
  misc_feature (501)..(502): n is a, c, g, or t
  misc_feature (510)..(510): n is a, c, g, or t
  misc_feature (559)..(559): n is a, c, g, or t
  misc_feature (573)..(573): n is a, c, g, or t
  misc_feature (599)..(599): n is a, c, g, or t
  misc_feature (611)..(611): n is a, c, g, or t
  misc_feature (626)..(626): n is a, c, g, or t
  misc_feature (629)..(629): n is a, c, g, or t
  misc_feature (663)..(663): n is a, c, g, or t
  misc_feature (683)..(683): n is a, c, g, or t
  misc_feature (699)..(699): n is a, c, g, or t
  misc_feature (715)..(715): n is a, c, g, or t
  misc_feature (741)..(741): n is a, c, g, or t
  misc_feature (765)..(765): n is a, c, g, or t
  misc_feature (780)..(780): n is a, c, g, or t
  misc_feature (785)..(785): n is a, c, g, or t
  misc_feature (789)..(789): n is a, c, g, or t
  misc_feature (855)..(855): n is a, c, g, or t
caagaaagatggcagtggcctgatccgggcccgttggcggcgtcactgacgcttcgctccggtcctcggatcccgagcgcggggaggcagacacgactgtgaagctgnttgttccccatcctgcggccgtcctggggacacanagccctccgtggtgacccggggattggattggagcaagaacatcacattcttcttcntnttcctntctcatgtcctccntccnagacacctgggccaaaaccactgcacgcccgccccaatgggtatggcccatgggttggctgatggcgttccaggntggggtcccctcaattggccttggcntcgntgcntgccntttgtgcntccttgtggggcantccttctgaatgganngcngtcntngatcnggccttgccaaaccaccaccgnccaccancgaanagaagagatagcccaaccangnganggagaactgagactcctgccccccacgaccaccctgaaaccgggggtganncctggganactggaccgggcaccctcaactcggcgggcttccacacaaggaaggtcnttccctagagcaanggaccctggggtggcctttgaatganggaccgccgganccgcgggcgggaacnganaggacacgcgtgaatcggtcactctttttccaangggtggaatggtgaaacacntgacccggaaagaatnagatgccaagggagantgcagcgcctggaatcaatggagaancacggccggagcgacttcccaggnaggcccatgggaggnagagncaancacacactttccgcggccgtgggaccctgcacgggggacggtcacgtgttcttggggacgagtatnaaggtgaa

SEQ ID NO: 518320 - DNA, 364 bp, Homo sapiens
aacatggcaaaaccccatctctacactaaataaaaatatacatgcagaacattagctgggcacggtggtgcggctatagtctgagctactcacgaggctgatgtatgaggatcacctgagtccaggaggtcgaggctgcagcgagccaagatggcgccactgcactccagcctgggtgagagagtgagacactgtcccaaggaaaaaacaaagtgatggggggaacgttcttaagcgctgaagatttcctttttggaaagtatttaaaggtagaaatattactaatttttcctaaaacatctcgctaagaagtcactgatcattatacccaggtcttgattcttacactacttgatttcatttg

SEQ ID NO: 518321 - DNA, 538 bp, Homo sapiens
  misc_feature (20)..(20): n is a, c, g, or t
  misc_feature (24)..(24): n is a, c, g, or t
  misc_feature (39)..(39): n is a, c, g, or t
  misc_feature (47)..(47): n is a, c, g, or t
  misc_feature (55)..(55): n is a, c, g, or t
  misc_feature (58)..(58): n is a, c, g, or t
  misc_feature (63)..(63): n is a, c, g, or t
  misc_feature (82)..(82): n is a, c, g, or t
  misc_feature (107)..(107): n is a, c, g, or t
  misc_feature (118)..(118): n is a, c, g, or t
  misc_feature (134)..(134): n is a, c, g, or t
  misc_feature (158)..(158): n is a, c, g, or t
  misc_feature (168)..(168): n is a, c, g, or t
  misc_feature (197)..(197): n is a, c, g, or t
  misc_feature (203)..(203): n is a, c, g, or t
  misc_feature (225)..(225): n is a, c, g, or t
  misc_feature (274)..(274): n is a, c, g, or t
  misc_feature (304)..(304): n is a, c, g, or t
  misc_feature (313)..(313): n is a, c, g, or t
  misc_feature (327)..(327): n is a, c, g, or t
  misc_feature (330)..(330): n is a, c, g, or t
  misc_feature (334)..(334): n is a, c, g, or t
  misc_feature (347)..(347): n is a, c, g, or t
  misc_feature (349)..(349): n is a, c, g, or t
  misc_feature (356)..(356): n is a, c, g, or t
  misc_feature (362)..(362): n is a, c, g, or t
  misc_feature (368)..(369): n is a, c, g, or t
  misc_feature (374)..(374): n is a, c, g, or t
  misc_feature (379)..(379): n is a, c, g, or t
  misc_feature (384)..(385): n is a, c, g, or t
  misc_feature (387)..(387): n is a, c, g, or t
  misc_feature (391)..(392): n is a, c, g, or t
  misc_feature (395)..(395): n is a, c, g, or t
  misc_feature (413)..(413): n is a, c, g, or t
  misc_feature (435)..(435): n is a, c, g, or t
  misc_feature (467)..(467): n is a, c, g, or t
  misc_feature (534)..(534): n is a, c, g, or t
gggggtggaatccttgggcngctnggcaagcggcgaganctggccanggccagcnagnagtangacagagggcgcgcggagngccgggacgcagccccggccgcttncagaccccgcnatggacccgttcctgngtgctgttgcacttgtgtgtcgtntagctctgtntagcagcgagctgaccgatctcaagttcntatgcntcgggcgcgttggcaatgcganattggtatcgtgtgcagatcggcctagaactttttttcattttgttggngtagaacgaattgtagttcgggtaaaactngtgctggtntgaattgtgcgtanccntgcngcgcaaagaactntngttgctntttaanaattcnnggttnggggngtgtnngngttnngtnttgtaaaaaaaattgttngtagtatttaaagtaatatttnataatgtgtggaaatatttgagaagcgcttgnttgctaagtttaaattattatacaccaacatccacaccattcaccatacatattcccccaatctcanacac

SEQ ID NO: 518322 - DNA, 494 bp, Homo sapiens
  misc_feature (61)..(61): n is a, c, g, or t
  misc_feature (132)..(132): n is a, c, g, or t
  misc_feature (150)..(150): n is a, c, g, or t
  misc_feature (152)..(153): n is a, c, g, or t
  misc_feature (164)..(165): n is a, c, g, or t
  misc_feature (167)..(167): n is a, c, g, or t
  misc_feature (173)..(174): n is a, c, g, or t
  misc_feature (177)..(177): n is a, c, g, or t
  misc_feature (181)..(181): n is a, c, g, or t
  misc_feature (185)..(186): n is a, c, g, or t
  misc_feature (199)..(200): n is a, c, g, or t
gatgaaatgaagcatttatatctcttaaagggcatccacatctgctttatccctagcggangagtgagggggcttcacacgtgcactcacactgtggagagagttggatttcccagacccctgagggcaccngtcagggtcatccccatngnnctgcttgaggnncntggggnntgnggcnctgnncgtggctgtgcanngtgtgtgtcacctgagtacattctgttgctagcagacagtggatgagggcccttcctcttcctcagcaagccgggggctgtgccagcctgtcttaggcgatgggccttggcaggaaggcgctccaggctgtggatagcatgtgggtaaaggcgtgctgctcgattgcgccttgcgtgaccaggcgcaggcggcgcgggccggctcgatgtcccgttggaccagcgatgtgcgtgggatagtataacctggctaggcgctttctggtctcagcgtatgactctcctagccctggg

SEQ ID NO: 518323 - DNA, 152 bp, Homo sapiens
tgtcctccatcttctttttcatgtcggccacctgtgcatggagggtggcgatctgcttctccaggttgtgcttgggcttcttcttcttcttcagctggttccggaaggaattcttctcgtcctccacctgcttgagcttggtgctcaagctc

SEQ ID NO: 518324 - DNA, 359 bp, Homo sapiens
  misc_feature (61)..(61): n is a, c, g, or t
  misc_feature (132)..(132): n is a, c, g, or t
  misc_feature (150)..(150): n is a, c, g, or t
  misc_feature (152)..(153): n is a, c, g, or t
  misc_feature (164)..(165): n is a, c, g, or t
  misc_feature (167)..(167): n is a, c, g, or t
  misc_feature (173)..(174): n is a, c, g, or t
  misc_feature (177)..(177): n is a, c, g, or t
  misc_feature (181)..(181): n is a, c, g, or t
  misc_feature (185)..(186): n is a, c, g, or t
  misc_feature (199)..(200): n is a, c, g, or t
gatgaaatgaagcatttatatctcttaaagggcatccacatctgctttatccctagcggangagtgagggggcttcacacgtgcactcacactgtggagagagttggatttcccagacccctgagggcaccngtcagggtcatccccatngnnctgcttgaggnncntggggnntgnggcnctgnncgtggctgtgcanngtgtgtgtcatgagggcattctcggacagcacacagtgaaggagcccccttcctaatcctctccgagcgtgggtatgtggcagcctgttttaggacagggccttgcaaaaggcgatccaggagtgggagcaccgggtaaaggtgtattgatcactgccc

SEQ ID NO: 518325 - DNA, 235 bp, Homo sapiens
tcccacgtgctgctagaagtggattcacttgtccatcccatatactatatgccagcactgggaaacttagagacagaacttgttctcaagggaatcttcagcttaggtggctctttgaataacaaaaaaatcctttccttctaaagtaacatcctctcaaggccaggaattccattagtagaaagccttcctaaaaaacaaaattcctggccaggcatgggttcacgtctgtaat

SEQ ID NO: 518326 - DNA, 547 bp, Homo sapiens
  misc_feature (467)..(467): n is a, c, g, or t
ctcaatacgggtgctctgttggattctggagtgcacagctgctgcatggcttcggtgttgtgctctgctctgctgtactgtatatgatcagttggaagcaagctgtcacgagtactggttaactgcaacctccatcagcagcagacatcgcagagacagacggggactctgcaggctcagaattcattcccctgttggcagaacccaccacaggtgttgtattttgtgtcactttggcagtctctaatccatgtcatccaggtggtcatcggctacttcatcatgctggccgtaattgtctacaacacctggattttccttggtgtggtcttgggctctgctgtgggctactacctagcttacccacttctcagcacagcttagctggtgaaggaacgttgcagtgcacttgaaggcttgggaggtgaccatgtgaggcccccccttcttcccaagacaacttattncgtttcccaaacttggcgcccttttcttcttgaatgggctaatatccctcccagcgtttatattccgcatgccgccctgg

SEQ ID NO: 518327 - DNA, 1067 bp, Homo sapiens
taagatgataaaaaggaaagtacccaatgggaccaccccctcctttcatgcgggctccaggaccaatccactatccttctcaggaccctcagaggatgggagctcatgctggaaaacacagcagcccctagcaccttgtcaccactctggggctctgtggaagaaagggcacttaaaactcccagtaaatcttggaataaatattttttctccttcccttggtagttttccagtgggtagcgtgaagtgttgctcagaattgttgagcagctcagagaacgtgacagccagtgctttcctatactgtggttcaaaggattcgagtggaccggtaaattaagcgtgccatttaacacattcttgggttacgtgcgtgttaacattgtacttaattataacaccgaacgcctgtgtttcccctttacccgtgtgttgggggacacgcagaattgaggtgaattgtggaatgttgtccaagcaagagttaccctccccaatttattattgttacatatttggtagatatattttttgggtacagggggaacaatattggacctgcagataaaaaaacctttggaccattttatatggcccattgggatactttcctttttatcatcttaaaaaaagataactagtactaatcatggaaggggcctaaggtgtgattcaactcttgaagtcacaccctccgaaaagatgcgtaaaaaccagcacccgaaaaggcccaagatcttcgtctttacatgtacttttcctccatatattcctaaagggatctgaccctttacgcgctctacaggccaaaaagaacagcacatagaaatccatataatcccgtgcacacgggttgagaacccaaattttagggacggtgatcacatcgaaaaagaccgtgggttgtggcagaaaaaatgggttaaaaactctgttaaaccgtcttttcacctgacatcaaaatctgagtgcatgaaaaagcccccatggactctgtgtcaaaccctccgtgttaggtatagacctaatgagtaacgagaataacacccacaaacagacttatttaa

SEQ ID NO: 518328 - DNA, 673 bp, Homo sapiens
gggcttgctccgtccacccccagtgcgtgggggagtgcgcgccaacaggtgccaggcgtttagagcagacaagggcgctcgtcgagtcgctgggatgccccctaaagggagcaaggttctcctatttgccagaaccccgttggcgggattgttactgaacctgtgattcagacgccaggagtgagggctgcggaggtacctaacgggagcctcagtctgacattccacgccggggatggcgtggtgggcatgagcggtgggaacgtgaggctgccaggacaccccttcactatgatgccccggttcagtcaccccagtttaactattctacgcaggaacctctaacctctatcgtcaccttgcgtattcattgctgtaatttattgacctctaagaaatgctgcgattggagagaacccttcagtggggacagggaggattcccgagaggttcccgagcacgtccaacttggaaggttggccctgatggggcccaggtgctgatggggaccctctcatagcccaggacatcgagtaggttcactctgactctcgttccaagcccggaggagacccaggttgagcacttggtcattgctggaaatacctcgaaggagagggctaacgagaatgggggacaagcggtcaggtagagcgaaatagtcaggagcacg

SEQ ID NO: 518329 - DNA, 142 bp, Homo sapiens
  misc_feature (70)..(70): n is a, c, g, or t
tcctgcaacactaccttagaagaactggactctgtgtccttcagtgggaagccaccttggacacacgcangtcattcaggtggacataaggccactcttctcgcccttgaccttaggaactcagccatgcgtggattgccag

SEQ ID NO: 518330 - DNA, 870 bp, Homo sapiens
  misc_feature (36)..(36): n is a, c, g, or t
  misc_feature (154)..(154): n is a, c, g, or t
  misc_feature (267)..(267): n is a, c, g, or t
  misc_feature (303)..(303): n is a, c, g, or t
  misc_feature (344)..(344): n is a, c, g, or t
  misc_feature (346)..(346): n is a, c, g, or t
  misc_feature (414)..(414): n is a, c, g, or t
  misc_feature (425)..(425): n is a, c, g, or t
  misc_feature (445)..(445): n is a, c, g, or t
  misc_feature (470)..(471): n is a, c, g, or t
  misc_feature (485)..(485): n is a, c, g, or t
  misc_feature (488)..(488): n is a, c, g, or t
  misc_feature (506)..(506): n is a, c, g, or t
  misc_feature (512)..(512): n is a, c, g, or t
  misc_feature (547)..(547): n is a, c, g, or t
gaaccaagttgtgtcctgtcagccgctgtccccttngccgcgatgccgctggagaacctggaggaggagggtctgcccaagaaccccgacttgcgtatcgcgcagtgcgcttcctgctcagcctgcccgagcaccgggagacgctgcgtgcgcnagagctgatggcggcgtccgcgataacaacatggctccttactatgaagccttgtgcaaaatccctcgagtggcagatagacgtggacctactcaataaaatgaagaaggcanatgaagatgagttgaagcgttgatgaggagctgganatgccagagaagaatctaggagagagcgaattcgcgatgcnantgatggcaaaggccgagtacctctgccggataggtgacaaagagggagctctgaagctttcgcaagantatgacaaaangtggccctgggtcaccgatngatatgtatctatctccttaggatnngttatttatatggntantgatctcataacgaaaanagaaanggcaaaagcttatagaagaaggaggagactgggcnggagaaccgctaaaggtatccagggtcttaattgtgtggctatcgtgattcaaagaggcagtgactcttcctggaatgtttaaacatttactctatgatatggttataagattggactatatggtagcagatggtggctgaaagacaaattcaggaaaggcttaagcgcgagtttgagggtgcagtcccgaacgggggaatgttaattaaggacggtttacaaacgtggaagaggaagggtgggcatcgatagaagaacgaggagaagaacgaaaaggggacaaacgggcaataattctcttttttatatattttttgtgggg

SEQ ID NO: 518331 - DNA, 801 bp, Homo sapiens
tgcgatggctccacatcctgtgtccctggccctggctgctggggagcccctgcttcatctgcctgtgtggctactgtgtgactgacactgcagtatctgtgcagtgttctgacaatgctgactgcctgcagatgccagcagtgatgtgacgcctgctgtgtgctgcctgttggcatagatgcagtgatggtgtgcctgtgatgtatatgcggacgacggcgacagtggcacaagttgaatgtgcccacatcacgagactcgaccctgagcagaaccatgctggatctgctgcttcctgcatactaacaaccaatgagctgatggcctgtgttctacacacgcctccgagatcgattgttttggctagccgaaacagttagcggcgatcctgtgactgtggtgtcgctaatcccttccctgctgtgggataacccaacccatgatactgcacttatctggaaccgtcgcacacaggtgaattatcaactagtactggacgccattggcacagcagacgtgcaaccattgaacagactccttttggcgaaacctcgccatgatgaccgctgcacgccacttgggcccggctggccgttcaaggcacttcaatcacgaacgggccgacaacatgattgtgtgcacgtggaccggggcccacaaattgagtttgacgccgagaggaatgacccatgactgacggacagacatgccccatcaccccagttggagaatggtgtcgaccacacagggatgggcaggtatggcgaacgtttgaggcattcccctgcgcaacggacaatc

SEQ ID NO: 518332 - DNA, 913 bp, Homo sapiens
caaaggccgggaggcgggcaacacagggtcaccgcgctcgcgctgtctaagccgcggaggggtcctcaaaaagcggccatgcagaggcgctgctatggcgctcccgccggtgatcaccgcgccggtagctgtcgctaggagtcccgacgcgcgggcgaaactttggccggccgcaggcggcaagggtgcccgacagaggttcgcgcggccacgtgaccttttgagccccaacgcaagaatgcgcacaggcggcgcaacatggagtccgcaacgcacatgggcgccacacaagggacgaggcggtgcccgcggccgcgcgcaatgacctgccgacgagcctgggcggggtcatcttgtttaagggaagaaacaactaaccgggaaacagttgcagtcaggtcaaaatgggcagaagacgcgagcatccgggcagccacccgagtgagaggtcttgccacagagaagagcagtgggaaatacgccgggtgctatgaaaaagagaaactggggtgtggataagacgatatagacacagacgccctctgcgggagacaccgctgcgaggatccgccaacaagcgttgttagcagagggtttggcaggcaacctgaatctggcccatgacccgcaggatggacacagtctgccgagaatggttatcctgaagacggcaactatttggggggaacacccggtatttcaggggcatctgtgtcgtcaaagttttgttggagacaagtccaggacaatgcgacgggcggttatccctggggacactctcttagcaaaccgcctagggttttgtacatcctcattgggtgagacataaagggtcaatgcccagcagccaatgttaaagatggagatatgggggccgttaagctaagaataaataaggaaaacccaaaataca

SEQ ID NO: 518333 - DNA, 1292 bp, Homo sapiens
caacagtgcttggacggaacccggcgctcgttccccaccccggacggccgcccatagccagccctccgtcacctcattcaccgcacccatcggacatgccccaaggaccccgacacgccgctccagacgccgacgacagacaccgacgaacgaccgaccgccatcatcctatagatcgaccagacatgacggcaccgcgataccacctcgacaggatgcgccagaagctaccacccaggactcagaggccgcacatccaaccgacacagatcaaccatggagcatcatacgcctccatacgatataccatgtcacaatgatcataacatacataaagacccgcgcatgccatgtggcctcagcacagcaacgtaacggccaacatcacgtaacaataccaccacaactcgtccatgcaggccagcagcggcaaccagtgcctgcagccacacactgcatgcaagcatgcgcagcacacccaacgcacggtggcccagacatcatatccataccaggcatcatcacagcacaaccaagccactgtggcatgccactgcgtgacagcacagcgcggcctgcacatgcgccactgacagtagtgcatacaccaatctgcaacaaaccacatgtgcaatccacgcagccaacaaactgcgaaactagcgacccaaactgggacacacctgcacaacacacaatgacgcccacacatacgcaggtgcaccatgaccgtagacgaacacccctaacgcatgcacacatgacgccacgcgtgaacaggccaatcacaaaccacatcgggtgaaccccaacgatgaccccacaaattggcagccacgacatgaggaacgacgaccccgacaaccctgcccgcttgcggcggaacagtacgtctactagagaccacgcacgacccatggaggacaacacgcggactaaaggtgacacacataacagacctacggcccacacactaacgcgccaataagccgcagagagggaggacaaccccagtggcttcaaccacagggcagcgtgtccactgaccagcaaggggaggcactcccgtatacaccctcatacgacaaagatgggaaccacgacaatccaattacaagacaaagaagcggaacccaacactacagaagcagacaatgtgaaacagcagaaaaacacaacacaaaaatagagctggagcgcaacaagctcccaacgaggccacgaacgaagaccaccgcgagtaacaaggccaacagcacgctaaacacacacgccaccacaaacgaggcgaa

SEQ ID NO: 518334 - DNA, 573 bp, Homo sapiens
aaggatctcaccgtaatagtaacaagacagagatcagaagatgtgtataaatgtgtaattcataatgtacattttaatattctaaagtgacattgattaatggacattggagtccagtagattggttaattccaccaaggagagagagaggcattcaagtcaacagaaaacaagtagattttacttctccactgggggtgttaggacattaattatgtacttggtcttacttgtttagtagtagatctatattgagtgtcttactgtgcccaaacttaggatctttgtatatttctaaaaggatgaaactgtataataaaaacactttccaattttggtagattgtagacagatcagagtattcaaaagtatacacatcttctctattgtgaaagaccaaaaaatggaaatgtgttgtgaaattagaaaagctgtatactagtatgtctgatgttgtgagaagctggatttttgaaaccagagttgtctgttcagccttttatcagtctgtactaagtttgatgtccataggtacataatataggggaatacataaaggataaaattaagtga

SEQ ID NO: 518335 - DNA, 418 bp, Homo sapiens
  misc_feature (307)..(307): n is a, c, g, or t
  misc_feature (337)..(337): n is a, c, g, or t
  misc_feature (368)..(368): n is a, c, g, or t
  misc_feature (404)..(404): n is a, c, g, or t
ctcttctgaaactacctttgcaaaaattatagcagtgagaaaattatgacagtgaaagaaatctgacctaattgactccatcttgcttctaacctcccagctgcccttgttcattcctgggcatagggagcactaactttgggaggatttagtttatagtttaactttgaaacaaagatgataacagcccctccctgagaccaacccactccttgccgggggaccagaaaagcctttgtaaaactaacacattggccacaagattagaaatgacggctcaggagtcatgcagccaaaggcttcgagntcatgaaccttcccaattgctcctgtaggntattttatttattgtaaaacctaacatgggngttttgagggtattttttcagaccctggccttttgngggttcagttgggc

SEQ ID NO: 518336 - DNA, 220 bp, Homo sapiens
  misc_feature (181)..(181): n is a, c, g, or t
  misc_feature (205)..(205): n is a, c, g, or t
tatccgggacgggagggatttgagtagatagaaaccgactgtatactccggtctgaactcagatcacgtatgactttaatcgttgaacaaacgaacctttaatagcgactgcaccatctggatgttcctgatccaacatcgaggtcgtaaccctattgttgatatgtgactctatgaatanggatttggcgctgtttataccctnaggggtaaactttgt

SEQ ID NO: 518337 - DNA, 479 bp, Homo sapiens
ctcagtattcatatggtgggggatggagtgtctcccaggttcttgggggaaaaaaatttgtagcatatttaagggaggcaataacctttccccccccccttttccctgcccaaatttgtttcctaaaattttatgtgctgtgaataataggccttccctgccccccccgtttttataaacctgaggttccagtgttttctgggaactggaacctttccttagggggaattctggtgctcaaatttccctcccaaaacaagtagccaaaaccgttgcccaaccccccccattaatcaatgggccctttttttttggcggcttttttttttttaatatgattttaaaggatttaaaaaaattgggtcgtctgcttcccctggattttttttcccttttttgtaatatttaaaacgccgatataatttttttaagtaggctataatattttttgttatatattttttttcctttaaagtcca

SEQ ID NO: 518338 - DNA, 495 bp, Homo sapiens
cttcattatcctgaccttgacttccattggatttcttctggatcaaagacccaaggcagctattatggaaactctccgttgcttgatgttcttaatgctgtaccgatttggtcacctgaagcctcttgtcccttcattgtcatctgcttttgagtcatattctgttataagtgaaattgggctccaggccaaggagaactttggagaacttttaagtttgagtgactgtctcacagctggaaaccaccccaaagtgcattgattgcagaagaatatgtttcctattatccagttctctacccaactatttttttgtagcttgaaaataataaagattttgtaagccccaaggggtctttttgatccatgaatgaagttaccctggattcatataactaaaatctgacttcctttcagccattgaaattcaaaaccctttccatttattagtatgaaataaaaaaagaccttcaaaaatgtcaaaaagaaaaaaaa

SEQ ID NO: 518339 - DNA, 178 bp, Homo sapiens
ggcatgacttcaggcactgcagcatgactacaattgtagtcatgctgcagtggcattcaccgaatgaggccctcatgacatccgcacaccggttctgccgcatcttcgtgctggcgctgctgatcccgctgactgcccttgcaacccccaccaacgatgcgcttcgcacgatcgagcg

SEQ ID NO: 518340 - DNA, 451 bp, Homo sapiens
  misc_feature (305)..(305): n is a, c, g, or t
  misc_feature (324)..(324): n is a, c, g, or t
  misc_feature (332)..(332): n is a, c, g, or t
  misc_feature (349)..(349): n is a, c, g, or t
  misc_feature (361)..(361): n is a, c, g, or t
agtatatccatacaactatttgcggtggctaaggctcttgagttcactttccttaatactttgctgaatattgaagattgtaggcaatgacaaagtctactaaatgaggaaaaccttgaataattaggtatcctaggcaagagcccctaaacatgaagcaatctgtgagtcatgtaagaaataaatattgtttggatgattcttatctaattccacccctgatggaagatgatttctttgttctttgcacctatggaagctgtgtattctctgcaatggttggtacgaatgttaataaatgtagnatattctctgagatgattntgcaaagnactattttaaatatcanatcaaccaatanatcacatttgtgttaggaaccgactcgggccgaatcgatataaagcttatagaaaccggggaccccgcgccggggttttttttttatttt

SEQ ID NO: 518341 - DNA, 116 bp, Homo sapiens
gcggccgcctactactactactgctcgaattcaagcttctaacgatgtacggggacatgtcagatctttgtacgtaattaaaaatattgtggcaggattaatagcaaaaaaaaaaa

SEQ ID NO: 518342 - DNA, 542 bp, Homo sapiens
  misc_feature (525)..(525): n is a, c, g, or t
tacgtcagagtggggataagatctgctatgcggccttgtggactggaggtggaaaggttcatggaattatatcctagcttggggatgtgcaaactgaggctcagagagtttaagacacatagtcactttcaccaattaaatgatgaagctgccatgtaaacgtatttcatcacactcccgagaccttcttctccagtagtgttttcaagctttttgagcatgcagacactaccatcaaaaaattatgtagagacatacttgagagttacagtttaaagaaaaacaaggtgtaattatttggttattagtagcatttacatatgcttgaaaacttctgctatatatacagtaagattaatttattctaacaatgatcttgataatccccctgattcccagactccttggaatagctccacagctatcagtggttctgccacaggttcagagccttcccagtactggcttcttatttgagaggtgtgctaagagctataaagcagaggcttcaattgtacacagttnggaagtttaggcaaaag

SEQ ID NO: 518343 - DNA, 975 bp, Homo sapiens
ctgccggagggaaaacgcggtcctacaccaaggactacaccgagggatgggtggagttccgtgacaagcgcatagccaagcgcgtggcgggcagtctacacaacacgcctatgggttgcccgcaggcgtcagccccttccgttatgatctttggaacctcaagtacttgcaccggtttcacctggttcccacctcagcgagcaacctcgcctttgagcggccaggtgcgcaggcagcgcttgaagagcggaggttgctcaaagccaagcgtgatgaccgacttctatcttcaaagtggtggacccgggggcacctagcgctttctttgcggccgatggggacccttgctcggccccagatggcgtccgtggaccattttggcccaggcgtcctacctgacgcaagagacacctgagtggccccggtacaaggcaagcatcgggccaagcggtgggaccggtgaaaccggggcctcgccctggagcaaactggcccgagcgaccaagggccccggttcccaagcaaagggagctccatgggcccagggactcgtttgggacgcccccgttcatcccttcaagaacgtagcattgcgacaggggaccttatacccttgtgttccagcggaactcccttgacggcggccctggggtgggccccctttttccattttcccctggggcccttgcttccgtgggcttccctggtcgtacccttcattacctaggcaatgggctccggtgacttaccccgggggcaaggaccattttcacctggggggtcgactcgaggaacccacaggtggtcttacgtggattgggcgcaaacacactcgcgagctcaggtggggggcttccaagtggtccgcgcattccggaactcccgtggcgttgttgccttgggctggaggcacccttatttcattcgtggtgcatacttagcgattcattcattggccttcttgcgcatttgctg

SEQ ID NO: 518344 - DNA, 475 bp, Homo sapiens
ctacgagtatcccctctacacccctcgatcaccgtcacggtgcccaggcgggccaggcgcgccagccagcatggtgtgcgtacaggtcagatggttaggactcgatcacctggaaggccttcagttggtcatacgcagtgccgtagatggcggtagctggcacagtcctcaccaggattgcggggaggccgctccagagggtcctggtgccctcgttgcctcacgatcttcacggaacgcctccatcgtgcccgctgaatgcgtggtcgggtcttgaaaccaggtgcgcacagcgggcaccatttggtgcgcacgtgcagaggctccaggacaccattgcggtacaggaggcacttccatttggtataggagaggctccacagtctggaggaaggcgtccgctcgctcgccatggtagggccgctcatactgccggctaaccttctccatgtccagggcgtgtcttgaacagaga

SEQ ID NO: 518345 - DNA, 747 bp, Homo sapiens
  misc_feature (608)..(608): n is a, c, g, or t
tgataaaggacccaatgcaggtaatcctgttgttcggactcacgtaatgtacgaatgcaaagtatagtgattatttaatctgggcctaagctacgtgagagtatggaacaatggcccataatggactcctaagcgccgaacgccaaggagcctccttcccttcctggttcaccccgcccaaggagacctgcccccattccatgtggacccatggggcccagctctccaatagtgtcagaaagcaacttgtggcttcgcctctgggttgtgagatgggtacattccaaaggagcagcctgggggagggggcaggctcagcccgcccttggaggctcacagccatggctggcccaggctccagctcgcctccagtgtggacgcccgagtcgccctcagagacgatccctggccagtgtcagcgctcatgccgacggcggtgtggtcccggctaatgtgatgtctcttcccgtgggcgccctatcctctggactctgcagtgccagcttggacggattgaggtctcgttgtggcgtttggtgaccctggttaagtcataccctaccgtgatcccgagtctactgctctaaggactgcctcccactgcgtgnccctcacctgacttccgggtatggggagggagggagccggtgcttccatgcctaggggcttggctctgagaatgtcggcctccggggcctcaggtggacctgtgggtcacttctggcccagtccgcagagtccctttgg

SEQ ID NO: 518346 - DNA, 414 bp, Homo sapiens
ggtttaatatattgataaaaaatcaaagcaaagcctggtatcatttatttcagaagacaaatcatttcagtacttcttccttgaaatgcctgcaatttctccctctggcctcagagacgggcattggctccatgctttacaatgtcaggataaaaatccaggagggagaaatcttgttgtaatgggtagctgttttcatctaacacaaaaaggctctgaatctttaatacacaaggttctgcgctgactgccaacaaggagtggaacaggcctgccacgaccatcccaaaggtgatctctgaggaaggaactatcactctgttgaggcagtctgcagaattgttgagaagaatcttctctatcagctttgattctacacggatacaaacatcatgtcttccaaagaagagcacc

SEQ ID NO: 518347 - DNA, 1067 bp, Homo sapiens
  misc_feature (421)..(421): n is a, c, g, or t
  misc_feature (471)..(471): n is a, c, g, or t
  misc_feature (505)..(505): n is a, c, g, or t
gctaaagctagccccaaacccactcctagcttactaccagacgaatcttaagtccgaaagccatttacccaaataaagtgataggcgagtagaacattgaaagctggcgccaatagatcatagtcaccggcaagcggaacagcatgatccagattataacgcgaatggcataatagtagactaagggtactagatcgcacctgagtaaccgtgtctgtcgagtaagtgaacttgaagctagcaagatacactgtgtgccaaggcaggagctcaaaaggctatagagcgcacaccgagagatcgctagatcgaggcctaagcatagaagaacaggtcgtacaaacgtaggcagcgatcacgttcatatgctacgcacacagatcagactggagagaggaatcttgaatagcgctagccaggngcagacgaaatcggctaacgcggagaaccgtgcgatgcactaagcctggntatgggtcccaagcaattaggaactgccgttagntctcaaaacattgttagacactgttgggcccctacaggagagccgctccctaaagtctccgctatggttacccattgtttagaccttgtgtgagaatcccaataggaggtgaaacaaagctactgtattgggaaccgactgagcgacgaatagagagtcatgtgctcacgcatgaagcacgtcaaacacacacagtgttcataacagccgccaataagatacgggccctgaacggagtcaagacgcaagtcaatatctacaggagaacagccggttacgagagacttcgaatcaaggcgcagttacgcgtaaaagagcatattcgccacatacagttattaactgggaacttccgtcagcaccccagattggggacccaaattcttgatcaccccgtaatagaaaagaaagctaaactggttgagggaataaggctaggacatgggaagacacgattgcttaccttcatcgggattaaggcccttgacgttcaagaatttgaacgacaagctggaacggtggacaaatttagataacgggagccaagtagtcattacaaggc

SEQ ID NO: 518348 - DNA, 198 bp, Homo sapiens
  misc_feature (3)..(3): n is a, c, g, or t
  misc_feature (11)..(11): n is a, c, g, or t
  misc_feature (129)..(129): n is a, c, g, or t
  misc_feature (135)..(135): n is a, c, g, or t
  misc_feature (161)..(162): n is a, c, g, or t
  misc_feature (173)..(173): n is a, c, g, or t
  misc_feature (187)..(187): n is a, c, g, or t
ttntagagggntccccgggtggcattacccgacgacgaccaccaagaagaaggctcgaggccaggaaggccagcaccccgatggcactgccatagcggcaggcatcctcgttgcggggtgagcacgcantacatntgcttagactcgtgggcattgctgtnnccctcaccatntatgcaggagaacnctgatcaaggc

SEQ ID NO: 518349 - DNA, 859 bp, Homo sapiens
  misc_feature (548)..(548): n is a, c, g, or t
tggaccttagtaaccagaagaacgatgagtcccccgcttttaggggccactggagtacgagctcgagcgttcacaccaggcgggctgggtcgccggcccacctgcctccctgcctccctgtgacggagggggacaagcaagccccacagaggccgtgtactactggacagacggatagacatacggaagcgaggcctggaccaagagaggcccaggctactggaggacgctagaaggatgtgacccctgtggggtcccgcactgaccctcggtacgaggggggcccaatgacctctggcagtgtcaagggggccctgggcacaagcgcacgatctgcgagtctgctgactgccctagctgcggtagatccgcgtgaggctttcgctgttgacacaagtctcctataaaggaactcggctcgatgaggagcaggatggtcccaggccctggagctctacgggctcctctctagagcggccatgtggagcttgacagcttcagaccccacacgtcttgagatgtttagttgtatcttaaatagtagtatnggactgcttggcacggtcgtccatgtaatagggaaacccgttgccgtcagtcagattttcaatgagttacaagctgcaatattattagcacaagtgtccttgggagaagcttgccaatgcaataggtggacaaccattcgtccagcttacaggggatatgctcgtcccgggcaccggtggcaggcagctggccattctggactaaaggcagcctggggccacaactgcagtctggcaacacacagagatctggcacccactgggtggagtgtccctcgggggctttgaaacagcatgggaccctcagacca

SEQ ID NO: 518350 - DNA, 1587 bp, Homo sapiens
  misc_feature (690)..(690): n is a, c, g, or t
  misc_feature (768)..(768): n is a, c, g, or t
gatctgatgactgctgatatcagcttaacacgggaatgtgcccataacatgtattcatggtgaaagcagatgacagtggagagtatcagggcagcataataccattttgacacatgcatggtggggatggtgagagcatgtcacgcgcaggttccacggtttcggtgagtgtcgttcagatctcgcttcataaactacgttcactagcgaagtgccaggaaggaaaagatgatctagccacgaggtatggatacagagcactgtaaaatatgaggcaacggacttgtggacttcacgatgtacttgtgctcggaccaacgacccttattcatggatgagtgctggataaccatgacgagaacgagtcgcaggccgtgtcatgagctcccgttgcaacttggtagcctgaggtgagatgaggcgaaggtgtggccaggagtgcttaggatgactggacctttaaataaccgcgtaagatatgcgatccggggctggttgcagtgggtatactttcgagcctagaaaattttcgcccgaacacaatcttgggaggagggtacatcgacggatcgggacacagacaatactggcgtaatggagcggcctgagagaatgctctactaacccagtctaggcctggtcgtagggaccaggccaggtgggttatgtccctaattaggggccattatncccgaaaacctttgcgcgaggcaacattccagaaaagggtaacaatgaaacacccttcgttgaaatccgttcgtgtgnttaagagagcaccaaaccagctaaggaaacagccgctgtaaaaaccaatttggtgggttattcgccgttaaagtaggtccgcggttgtgtgcacgttccaacacttatcacttgaagcgccatttttgtgcggctgattcgacactgggaggtggcccaaatccacaagaaaagagggtgtgtgagcagacattatactggcgcacggaccaacagacaattgtgttattgtgcggtacaaaacccttatttttgaccccaagaggcgtgtgatactggtactgttgtgcgcacccacggcgttgtgcacaacaaggagagtgaaaaaagtcccgtcgttaataagggagaattgtgcccaaaacactggcgtaaactcagaggtagcgctttgggaagacattccttcctggatcccttttcagtgtgggtagagagacaccgcacgggcatttagtaacgggagggccaaagtgatattgtccacgcacgtgtacatagagccgttgtatagaaaaatagggctgtgggaaggaaaaaaacgcccgagttggaatgggtttccaagaaacacacagtggtggcgtttagtgaaacacccccacaagagtgtgcgtattaaaccttacaggattcccttaattccaacgactgttataacagcccatggttgacaactatgtgatgggccacccatgggtgtgtcacacgggaagtttgcgtggtgaaaatgcccacacgcgggtagttcaatcacttcgcgcggcgtacggcagtttgtgacgagtgttaacgcgagacgtacatttagtagcgacg

SEQ ID NO: 518351 - DNA, 664 bp, Homo sapiens
acaggatcccgtatgtctcgatctgttaagacaagtagacccatcacactcagctacccagggacattttatttatatcaagggtagacctgatcatcgtttcctcaaacaattacataagatgctggtctagtgatgccctgtggggacctacaaacccaaaggcaactagcctcttcaggcaataacatacaggacataggaatgggcaaagaccttcatgacctacgaaacaccaaaagcaacaggaacaaaacggccaaatggagcaaatgggactctacttaaactaaagagattctgcgcagcaaaggaaactatcatcagagtgcacaggcaccctacagaatgggagaaaattgggcaatctatccatgtgacaaagggcctaactatccagagatctataaagaacttaaatttacaagaaaaaaacaaccccatcaaaaagcgggcgaaggatatgaacagacacttctccaaagaagacatttatgcagccaacaaacatgaagaaatagcggatcatcactggtcattatagaaatgcaaatcaaaaccacagtaaagatactaactcatgccagttagaatggcgatcattacaaagtcaggaaacaacagatgctggagaggatgtgcagaaataggaatgcttttatac

SEQ ID NO: 518352 - DNA, 284 bp, Homo sapiens
agtactattagcctctcctacaaaggtcctgaacccattaaaacaccaaaaactttaacaaagatgattggacaaaacctgggtagtagtacatctacacattataaggtacacatacacaaagtaacgctatttacgtacatacagatggcagcacttgaccctaaatgtacccaactcctaaactggtacataatcagctggggcaattttttcacccagcatcaccacgtatttttataacaacaaaccagtgcttggcatcttcccaccccacctgcaat

SEQ ID NO: 518353 - DNA, 377 bp, Homo sapiens
caaagatctttgagcatcacctggaagcttgttagaaacacaaattctcgacagggcacggtggctcacgcctgcaatcccagcactctgggaggccgaggtgggcggatcactggaggtcaggagttcaagacaagcctgaccaacatggagaaaccccatctatactaaaaatacaaaaattagccggatgtggtggcagatgcctgtaatcccagctactcaggaggctgaggcaggagaatcgcttgaacctgggaggcggaggttgcggtgagccaagatcacgccattgcaccccagcctgggcaacaagagtgaaactctgtctcaataaataaataaataaataagcgagctcggctgggcgcactggc

SEQ ID NO: 518354 - DNA, 324 bp, Homo sapiens
tccaggatgtcaccatttttcccttcagaatttctcagcatccctttttggtcatagctcagctccatgagggctgacattgtcatttgattgtctggtctggataatgggtatatgttaatatttaaacacctgaatattaaatagtacaggaaggcaaaaattattaagacaatcacaaatactataaggaatatttggccaggcgcagtcgcacgcctgtaatctcaacattttgggaggccgaggtgggcagatcacttgaggtcaggagttcaagatcagcctggccaacatggataaaccctgtctctactaatcata

SEQ ID NO: 518355 - DNA, 241 bp, Homo sapiens
tgtggtgttgggccacttctggggtcacaaggggtgtgtcctcgctgcggtagtatgtctgccggttctgacagtggcattaccgtgcccatcatgctgctggtcctagctcccgtgcctgggggctcctgattgccaggcggcgtgatgcgcgcaccgtgcacgaatgatccagtaagcgcaggttgggagagccgtggagtaggcggcccatggaccatggcttccctagcctagagga

SEQ ID NO: 518356 - DNA, 290 bp, Homo sapiens
atactatctgtgacttgggattatcgtgtgaccgagggctggcacgaaattgaccaaccctggggttagtatagcttagttaaactttcgcttatattgctaaacggctaactcactgctgtttcccgtgtgtggatgtggctaggctaagcgttttgagctgcattgctgcgtgcttgatgcttgtcccctttgatcgtggtgatttagagggtgaactcactggaacggggatgcttgcatgtgtaatcttactaagagctaatagaaaggctaggaccaaacctatt

SEQ ID NO: 518357 - DNA, 776 bp, Homo sapiens
  misc_feature (316)..(316): n is a, c, g, or t
  misc_feature (410)..(410): n is a, c, g, or t
  misc_feature (548)..(548): n is a, c, g, or t
  misc_feature (562)..(563): n is a, c, g, or t
  misc_feature (586)..(586): n is a, c, g, or t
  misc_feature (592)..(592): n is a, c, g, or t
  misc_feature (606)..(606): n is a, c, g, or t
  misc_feature (613)..(613): n is a, c, g, or t
  misc_feature (619)..(619): n is a, c, g, or t
  misc_feature (635)..(635): n is a, c, g, or t
  misc_feature (657)..(657): n is a, c, g, or t
  misc_feature (660)..(660): n is a, c, g, or t
  misc_feature (662)..(662): n is a, c, g, or t
gttatgaataagaaaggcaaacataggtctgggcattaaattatacaaactgaaaatgtgttacaagaaaaatatgagagtttaactagatgtttttcaaggtaagttcaccttttgtactttactatttatttcagaaatgttgacaatacaacatagcatatgtcttcatctcactaagaaaagagcagttgtaactcaatgaaatttaattaaacatgctacttttgatttcatttacttggctgatagaaactctgggaaacagaacctagatattttgtgttcaattgttagaaaaggtgccaaacagatnatgaaatttgtgcctaatttaacttaacatgtttaattaaatggaaccactacttatatacagatttacatgcaatccagatctttaattttgncttcacaaaagcctaatgtctgtaattaacctttaatttttatttctgtatgagacaaaagttgaggacttggtgaaaggaaatagcagttacagcaaaacctcagtgattacaatgaggaaaaagtcaaattataanatacctttaaaganntgcacttccatattttcaagtcnattttnactctaagatatgnttcctantgatgntggttgactgacgggntgattattttagctgtctttgnacntnaactagtagaaaatagcagttttaaaagttttctatttcagtttgtttacactcctaattgctttaagcacttttttgtgtgtgtaaactgtaaagtctagcccagcccttgtg

SEQ ID NO: 518358 - DNA, 623 bp, Homo sapiens
ggaatgaaagtatagccaaaacataaaaaaaaaaaaaatcctcagtatagctggcaattaagacctaaaatcacagtattacaagtgttggcggttatatacaatgaggtcagtgctacagccacctagcattgaactaacccagtttccacctccataaagttacctagagttgtctgagtgggaatatgttcggggcatttacctgaccggccaattattagggagaggcaacaaggtaattcagcctttcctcctatcagcacaaagaaactcaaagctggtttttcaccctttcgtgttccaaagcagtcttatcctgacaggagcggtctatactagtgcagatttcaacactttttttaaacggtttaattaactatagggtatggtacgagacttggattggagcacgctaagggtttctggaactttactttactaattttccagggtgcctaaaggggttctgtagtgttatcaaaggcaaaaaggaaaatggtgcttaaaaataccaaattcagaactgttaatagtcagatcatatacctcttaataaatagcatcttatgctaattagcctgtaaattatgtcagaggaaacgtgtcaagtatgggattgg

SEQ ID NO: 518359 - DNA, 486 bp, Homo sapiens
  misc_feature (199)..(199): n is a, c, g, or t
  misc_feature (333)..(333): n is a, c, g, or t
  misc_feature (335)..(335): n is a, c, g, or t
  misc_feature (397)..(397): n is a, c, g, or t
  misc_feature (439)..(439): n is a, c, g, or t
  misc_feature (486)..(486): n is a, c, g, or t
ctctttagaaagaaacagaacccattaagaggtggagcttaggctggaagtggtggctcatgctgtaatcctagcagtttgggaggccagggtgggaggatcacttgaggtcaggagttcaagacctgcctggccaacatggtgaaactctgtcactactaaaaatacaaaaattattcaggcatgatggcgcatctgntaatcccagctactcgggaggctgaggctggagaatcgcttgaacctgggaggctgaggttgcagtgagccaagatcgcgccattgcattccatcctgaggcatgagagggaaaccctgtctcaaaaaaaagananaaaaaaaaaggagattataaggcaaatacattagatttgccaaattttccttccccctttgnacaccacttgagcaagaacatttgctaccagatcccagggangttctcatatcctttcacccagcccatgggagcccttgtcttctctn

SEQ ID NO: 518360 - DNA, 221 bp, Homo sapiens
tcttcgccaccatgccgccctacaccgtggtctattacccagttcgaggacgctgcgccgacgcatagctgctggcagatcagggccagagctggaaggaggaggtgtgaccgtagagacgtggcaggaggactcactcaaagcctcctgcctatacgggcagctcccaagatccaggacggagacctcaccctgtaccagtacaatacatctgcgtacct

SEQ ID NO: 518361 - DNA, 392 bp, Homo sapiens
gactttgaatgcaattgcaaaggacgtcctagtttagttaaacttgtcggagagacatgggcatcaacagtgtgaagggagaagttggactgacaatacctgacgaagctctaacctttcacatggccatagatgtttgtaagaagaaaaagacattggaacagcaatgcaattactttctttagtagtcattggtgtctgtcatcatggataaatttagtctgtacttcttacaagaagagaggcgtagtcattctcagtgggcttaactgatgaactggcaaagttcagctgcaaagtatgaaatcagagtttgtttcagggtcaatttagtgccacttttttgccttttggttttgtaaaataaaaattctcattctattgtgaaaaaa

SEQ ID NO: 518362 - DNA, 205 bp, Homo sapiens
cagggtggtctcaaccttttggcctcaggtgatcctcctgccttagcctccaaagttttgggattacaggcatgagcccccacacctggcaaaggtccccctcttttatttcctgggtgttttttcagactcctttttttcagctccatagaaaagctgcctgccgcctcatcctttaggtgctcccatccccccataaacacca

SEQ ID NO: 518363 - DNA, 742 bp, Homo sapiens
gctaacgttactcgtgttcaggatgccatagggatcgtggcttgctgagtggctatcaagtgctgttggatagcttacgcatcccatcatttcgtccgtacttcggactatcctaccctatgtacgcatctcgtcttctcgtggataaattcaggcgatacatagtgatgaatgagaatgatgactcatgataatactggtactctctgattgttgaggtaccgagaggtacggggtattgcacgcattatgctcagcgaggacctcatgggaaccactacgttcaagagcgataaggtcattgcgtgtgtcgtaacgaagttagcgtagcggacttgactggccttctacgtctttcgaatgacgcgccgcgagctccaaggggccaatacttcacccatatggatccacatcggatagataatacttaccaaaaacgtctacgtagcagcaattcctctggtggcgtatttgtcacaagaatattacacccttagaattacacaatagggacgagcccttcggaagaatcctttggctcataggagggattgaccaacgggaaagacgatattgcccctagctcacattcttgccatttgccatttgaccttcgagtggcatagtgcttagtccttgactcgtggctgggcatacgcacgacgatttgactcggccataccgacgagcaatttctccgtagaacccagagatggacttgcaccaaatctttctgcatttg

SEQ ID NO: 518364 - DNA, 544 bp, Homo sapiens
gtgtgttagttcatgtatcaatgttaggtagaatctactgagtgaagccatggttccagatttttatcttgacatcagattttggatactgattcaatcttcttagtattcatagcatattcagatgtttgatttgtggttaggtctgggtgcatttagtgtttcttgaaaattgcgctgtcatctgggttatcgaatttttggccacacacttgctcatagtactctctaaaatcttagtaattgtctgtagaatcgttagtaatgcccctactttaatgtaggtgatttgtagtgtgattttctctgtgggtttccatctgtggctatggctatgttgagataagtttacttctattcccagtttgttgaatatttttcttatgaaaggatatagaatttggtcagatgctttgctgtgtcaattgagaagatacattgtttaccattctgttaatataatatatgaccttgatatgtcggtagagtatccgttcgttacgataagtgatttgacttgggcatgatatatcagacttgtaat

SEQ ID NO: 518365 - DNA, 397 bp, Homo sapiens
aatataacaaatcataaacatattactcacagtcaagtaagagagaaataatgtgtatgggtgactagagggaaagcagagagaacgatttatcttagataatatccagaagtgaagagagaggaaaggataagggtaaataaagaacagaaacaaatatccattggctgccctctgtgggccgagtcttctgctgtgtacttttgaataattttacatcaaagacaaggttgggctatcccggaaggctctgcagatgtgaactggatgtcttgcagctgaatcagatttgaacatttttatgtgaatatggcttaagggtacagacttttgagataagcaaggatttgaattcttccttgacattggacaaattattttaaggagggatgagcag

SEQ ID NO: 518366 - DNA, 831 bp, Homo sapiens
tggggttcgccttgtggcgcattgtaccaacgtggggccccccagtggtggcgccctgattttaagggcccgtccccccaaagtgagaccctccgcgttggtaaaacatttccccgccccccgggggttccgcgcccgcccctggggtccgcgacttttgcgagtgttcccccaaactcgttccgaaatcgcggcgcgcagctttggtagcgcgttcgtgcgcctctagtggtccaaaaagattgctgcaacatatgtgtcggcggcaccacctaaagagcccccccactccttgtttgttccctgaaaacgtctataaactcccggaaacccccgcctttttctaaaagcaacttcctcaccaaggaggttgcaccctccttcccttgcaggcaagaccaactgttcccccaatacccccccatagacgctcccctttttatgtagtcatcccacaggcagccccacaactgccttccgccgcacctctcttccgtggaaagaaaacatcttcccccgccacttctttttttttctcaacgacaataaatattctcggaatttcctcccccagttgtcagtttcacaataattgtcttacccgatatcggtgcagagaacgattcttggtgcttctagcaacacaatagaagcgattccaattttttattctgcgcacgtcgaaataacggagagcacttgggaacagggttcgcggagccaacatggtatacaaaacaggtagactggggaacgcatggggttgtcaagagaagacaggcccggtatataactgcggcatgctcccaatatcttccttgcgaatagata

SEQ ID NO: 518367 - DNA, 716 bp, Homo sapiens
tgcgaaggctcacgcctgtaatcccagcactttgggaggctgaggcagggggatcacttgaggtcaggagttccagaccagcctggccaacatgatgaaaccccatctctactaaaaatacaaaaattcacagggcatgatggcgtgtgcctgtaatcccagctacctgggaggctgaggcaggtttctggaacccagagggcagacagaggttcaagtgattctccttcctcagcctccctagctgtgactacaggcgtgcgccaccacatttggctaatcctcgtattttcagcacacacggggcttcaccatcttgtgtaggcttcactgcacctcctgaccttgactgccacccccctcggtctcccaatactcgctgccatcacacgatcgactcattcgtcctaccttgcccacccataatatctctaccacctcctttcacgccctaaccactgctgtctacaccctaactcctcccacacgctccatgcattacaatactctcactctctctcactcatcaatctcaagccacctctcaccactagccgcaactctacactctgcattcccacatctgcccgcttatctctatcgcctgtcacccgcccaccctctcactccccttactcatcttccttacctccccactcactaatcctccttctactccatcttcactgcacacctactactcctccctttttccc

SEQ ID NO: 518368 - DNA, 869 bp, Homo sapiens
atcatattgaccagttccttttcagaaatttattttgttgtcgctatgcgtaaatcattgcacatctgatcaattcttatatgttaaagagtctctactctcgtctatgtaagggtaccaatgtggtatctagtggctgagaaatgaagtaattctaagagtatgagagttacctatctgaagaatgtacttcaacgagagatactcgatatatgtaacatatagggatgtcgttcttttcaagaatatttttgtaactcttctcatcacatatcatagtgttaatatatagaattctattgtagtagtttctatttaaataaaattagtaggaatttcgccttagaaaattgttggtgttcgtatcgttgacctttatattctttaattgtcgatttaagtgggttactgcccagaatattgagaaatggttcaagatatggagtgtgtttcaatatattatctggcttattctcagcatgagtaagatgaggcagaacataaagttacaacctgcgtctgagtcaattgtcctcatgactcagaactaaaacagtaacatggtggacagtattaagcctcagataatcatctccaaactcctgtctaacgagctttctaaaatcatgattggaacgacgagtggacgaactcacggtacactgtgttgccatcttctatgtccttatgccgaataatccaaggatcatcacatatggtagatattcaacatgggagtttcaaaattcagaatagaattaccatgaactttcctgaccttacacaatcctacatccttatttaacagttctaattttgggagttccgttgctggaagttaaaaatcaggcgcgaagggtcataacggc

SEQ ID NO: 518369 - DNA, 776 bp, Homo sapiens
tccttaataattttaaatggatcaaaacaaagcatctaaaaccgcagttccgggaaaaaccactggtcctggccggtctggtatctctcttcaaatttgacctggtggccccccgtgggccctggcgttaaaaagcaggatctctgaagacatccttattggacgacagtttggcccagggggataatccacagagtacctggggggcataaggtagatggtagtttatcacccacttccacaaaagatttaatcttgtggatctctgggcgatcttcttctggcccatggcagctgtcacttggcgggggtagcggccaaatcccagccaccagaagcagtggcttgaaggggcgactcggtggagggtgccactcatcaagtgtcctctcagcgaagtaacagcttggcgtctccggaagatagcgctccagccgaggacaagccaccaccctccccaagcttccatgaactggccccatttcggcagcaaccacccgggcctacagcaaaaaaaaaaaaaacaaaaacccccaagggcaactataaatgcggggcgcgcggaaacagaggggtaaatgtcaaaggttgcgcccattggtcagattacgacgtgtcccatgaaccacagcttttctttggcacaggcgtgccacactcgccacggcccccaataggaagcgagaaaaaatttcgaaaacccgggtacccggctagcaacgtccgacaagacaccaactccaaacatcaacaactcaaaaacaaggcccacacgt

SEQ ID NO: 518370 - DNA, 1347 bp, Homo sapiens
agcgggagcgctgacttccgggcccactgatcggtgtcctgcatccgattacagctaggtagtggagcgccgctgcttacctgcgtgcaggagaccgccggtgtcgctggtggagctccgcgccgccggacgcccgtgagcattgtggaggctgctggctcgtgctagtgtcgcctgctcctgtcgggtgtccttgtcagacttccttgggcagctcctcaccctgctcagtgctggtcgtttacagtacgaactgcttccaccaagttaccacggtttttgaacgaatgatcttccatttcgcttggaatagaatcctcgatatgcctttaggaattttaatatggaacacacgtggacacgcgacggtatgctgacgcaaatacattgatataggacatgagtcaaccttaaataatgttagacgtttgacgcattaacgcgggggaacccttgttctcaccgtgaaaagacctagcgtgacaggttctctatccagcaaagggggcaactttattgccatagtactttgagaaccactttggtgagtgagtggcgggctaaccccttgccattttgtgtggtcccaccttttggaaacacttggaattggcggcccctttgacgaaggttcgaaagcccggtcttgcttacttgtgtaccccgcgcaaaaaggaaatccactgatttatagcccaagttactgggccaggaggtttaaccccaatgggcacccctttttttcgaaaggctcccaaattcgaacattcggagcaaaagacacgggtggtaaaggtggccacttcagacaattgggtgggcgatgaaacggtgcccacaccacggcggttggcctgtaaatttttggaatgcacagcccttcaaccggttgaaaacaaacgcccttgatatgataaaagtgtggcatgggggacgcaggtcacctttgggtttgcgtcagcaaacgcaattggggcacttggggagccccgtcctttagctcggaaagactttatggacaacgcgcacaaacggttgtgccaacaacgaggggttaaccgccgtgttttgtaaacccctaggggcagatagggacaccgcccaaccaaaaaggagtttttgggaccccccttttttccggacacaatggccccacaatagaggaggcagtcttaggttagtaaatagcccacaggactgcgatgggcaccatttccatatacggcaaggcaacacagagaaatttgcgcggaaagacagagacggcgagttccacgagcgcaggtggagaccacagaggacaggcagaccggtgtaacaccagaagctccagaggaaaaggccctc

SEQ ID NO: 518371 - DNA, 181 bp, Homo sapiens
tctagaggatccctgccccaggcaataagaccagtcacttggctgctcttctcaagaaccaagggtgagtgctgtagtcacacaggtgagtggggtggggtctgagcctccactttgtaagaacgaagaggaactcttgttcctagtaggtcacgaagggcatgaaggcactggatatgaa

SEQ ID NO: 518372 - DNA, 794 bp, Homo sapiens
gcaacagaagcaaaaattcacaaatgggatctaattaaactaaagagctgcacagcaaaagaaactatcaagagagtaaacagacagcttacagaatgggagaaaatgttgcaaactatgcatctgagaaaggtctgaaatccagcatctatacgtaatttaaacaaatttagaagaaaaaaccaccccattaaaaagtgggcaaaggacatgaacagacacttttcaaaagaagacatctgtggccaacaatcctatggaaaaaagcccagcatcactgatcattagagaaatgcaaatcgaaacaacaacgagataccatctcacaccagtccaaatggctattataaaaatgtcagaaaataacagatgctggtgaggttgtggagaaaaagatatgcttatacactgttggtggaaatgtaaattaaattagttcagccattgtggaagacagtgtggggataaagacagagataccattcaacccagcaatctcattactgggtatatacccaaaggaatagaaatcatgtgttataaagacacatgcacgcgtatgttcgttgcagcactgggccatcagtgacagactggattaaaaaaatgtggtacatacacaccagggaatactatacaggcataaaaagggaacaagactgactgggcgtggtggtcatgcctgtgatcctagactttgggagccaggtgggtggaattgcccggtcaaggaagtaagaccaagctggggaaacgtgaaacccatcttattaaatttaaaaatttgggctggg

SEQ ID NO: 518373 - DNA, 464 bp, Homo sapiens
ggtcaggcactgaaagcctggtcaggcactgaagcctgaaacacgcccggggcagggggtcttggcgaacaaggtcagtttggaccaacttcagctgtgggggtccagctgcatctcctttatcttctggtggtgacggtagatctggcaggcgatctgcacgttcacgggacaacaacttcccggcttcttgaacaccggccggtacgggtcagacaccttaagctgaaaagcgccctgcagggacccgaaggggccggggtgtgggagcagggtgggcagtcccgggatggcaggagggaaggacgggaagaaactcacgctggaatgtcggaagtaggggctgtccagcttgggcgcatacttgtaaaacgggcgggggtgcggcggggcggcgtcggggggcagcccctgcggggaagggggcgaatgtgtgtaggtgctggagtgtgtaggtgcgtgtg

SEQ ID NO: 518374 - DNA, 1049 bp, Homo sapiens
cgagctgagatcgcgccactgcactccagcctgggtgatagagtgagattcagtctcaaaaaaaaaaaaaaaaaaaaacttgtgcaaaaattttggttttcctctggggccttttctttcttttcttttaaaaactatcccaaaaaattttacttcccagttttaatacaaggggggaccttccatacttttggttttatatttacccttcataaagccccatttcccctttaaagttctgtagtcctagactataaattcattcacccaccattattaacattgttgttacagcctttggtcttacaacggttgagttctatcaataaaactggctgttccccctccgagttcacaccctttcctaggaccttctactgtgatttacatccccctctcctcttacgtgctaataacccagcagaagcacattacttccattacgaactatctgcacttatttttataaacggaccaagggttgacggacggctgcagggcacgagagcaatgtggttgtgaacccctgggcagaaactgggacggcttgcagctgacgctgcagaactcatcgcccagtgttgaacctccagcccttggcgttgaccaacgaacgtttagaacagacttccggtctcaaacaccttacaattgaccttgcatctgcactcaattcacattggacacgaaaccgaaacacaaagggctgcgcttctaaagtgctacgagcaaacacccatccacgttaaaagccaatttttggacctcccccacaaaacccattatcaaagtgtatcctccaaagcaaagccccttataactttcaccctttaaccgcccgtcggaccaatcatgcaacttcaacattggttcgcttcttactaccagacaaacaagctatctccatcttatcgcgtgttcacttgtcccccacaacgtacaacaacataggtcacagcaactccattcgggaccaacggactatctgctccacccaagaagaaaccgggctattaacctcaacgacactacacccagtcaacaacagg

SEQ ID NO: 518375 - DNA, 261 bp, Homo sapiens
gcggggtgcatgcatgcagactatgggcaggaggcccccgccgttgtcttggaagcgctgattgacggccagcgggcgcatctggttggacatgttgcgcagtttcctgcccagggactgctcgctgccgtgcaccatgctgacgtccacgatggaagtgtgcgcgttgatctggttgcggatggtgatgttgctcccggggcaagccgagcaggagcggaagaacgggatgcagccgtgttgtctcttgaagcgggggtc

SEQ ID NO: 518376 - DNA, 347 bp, Homo sapiens
tgggcagatcacctgaggtcgggagtttgagatcagccttgcaacacagtgaaacctcatctctactgaaaatacaaaaaattagccaggcatggtggggggcacctgtaatcccagctactcgggagactgaggcggaagaaccacttgaacctgggaggcggaggttgcagtgagctgagatcgcaccactgcactccagcccgggcgacagtgcgagactctgtctcaaaaaaaaaaaaagccttccccttgtacacgggctaatttacccttgtacccggtatttgcagatgtgtgtctggaaacctataaaagttggctgaaagaacttccagaagacttaa

SEQ ID NO: 518377 - DNA, 257 bp, Homo sapiens
  misc_feature (127)..(127): n is a, c, g, or t
  misc_feature (140)..(140): n is a, c, g, or t
  misc_feature (144)..(144): n is a, c, g, or t
cctagaggatcccggagtagtccacatgagtgttggagggacattcaaccacagcagtatgaaaacaatattcactccaggtatatggtccagattacaggtggtaaggataggctagagaataggnataggctaaattngctngagatgtgctgtggaattatctgtatttctagctaatcttagcttcctcaagtccatttcattgccagaatatgaacaattaaattgagatcccggttctttttttatttttt

SEQ ID NO: 518378 - DNA, 442 bp, Homo sapiens
  misc_feature (330)..(330): n is a, c, g, or t
  misc_feature (388)..(388): n is a, c, g, or t
tcccctcacagagatgtacaggatgagatgtagtaacttatagcagcgtcatttggaaaagttgaatttggccctacaagggcatggttctccattcaaggggtctggtggtaaacggttggagacacagggtggcagcttggagaactcacctctgggctctggtggcttttatggttgggacagctggctaaattaggaactctagaactggttattgggttcccaactggttgggccgcaatgaattcttcgcaaaaatataggtgggtttccaggggaatttggaatgattggtattttggtggtcccatgggaacggtttatagnacatgggagggccgggccataaattcctctcaattaaaacaattacacattcactggnccggcggttttaccacggtcggtggactggggccctgtgcggttacccactttc

SEQ ID NO: 518379 - DNA, 204 bp, Homo sapiens
  misc_feature (16)..(16): n is a, c, g, or t
  misc_feature (96)..(96): n is a, c, g, or t
  misc_feature (129)..(129): n is a, c, g, or t
  misc_feature (174)..(174): n is a, c, g, or t
tccagctaatgttttncgttttggtagagatggggtttcaccatgtagtccaggctggtcttgaactgctttcctaggctctgctctcagctcctnagctcaagcagtccgcctgccttggcctcccanagtgctgggattacaggcgtgagcactgcgcctggtccttaagtnaacagtttttaaaagcagtgagaaccattt

SEQ ID NO: 518380 - DNA, 254 bp, Homo sapiens
ttttcagcataaagctctacaccgacctccggaaagccaaaccttttctgaactacagcagtcagttcccgaatccgccggtccttctcaccaagaacattctgtgttcttgtggctaagataatggatttctgtcctggtagctgtaactcgcaactcaactccacagtagccatcttcagacagctcccgagtaagaaacactcataccagttcaagctttgaagatgccatcagcgacgaacttcctcttc

SEQ ID NO: 518381 - DNA, 448 bp, Homo sapiens
gtggtaagtcgcggtgagtttactaaacatagacagtggaagtatgtaatactctgtgcatcccagtgattcagatgactctggttcttatggtaaaagcagaatgaaaattgctggtggaggattgggcgcggtgactcatgcctgtaatcccagcactttgggaggccaaggtaggtggatctcgatgtcaggagttcgagaccagcctggccaatatggtgaaaccctgcctctactaaaaatacaaaaattagccgagcatggtggcacgcgcctgtaattccagctgttcaggaggctgaggcaagaggatcactggagcctgggaggtcaaggctacagtgagcagggattatgcccctgcactccagtttgggcaacagagggaaactgagaaacaaacaacagaaaaccaagaagccaaaccaacaaacaaacacagaca

SEQ ID NO: 518382 - DNA, 166 bp, Homo sapiens
gcagaggtatacaccataggactggggcgtggacctggtcactgtctcctcagcgggaagacttggggctggtcggggatgctgaggagacgatgaccaggtgcctggccccagtgcttgggcccccaaaatatttcgcacagtaatatacggcaggtgtctggcc

SEQ ID NO: 518383 - DNA, 285 bp, Homo sapiens
gacttagaggatcccccatcgcccaacacaaagccctgccttctggggcttcagctaagttttttttaaaaaatgtgggttttttttggtccatttcattaaggcttttcccttggcctcctcctgtgggtggttcagagttaaatccgaggtgaataagagagggaaatatacaacactgaatttgcaggagaaaatgaaggttctaagtagaattgaagctggacgatcacttaaaagtgtaatggatgaatttggaaccagtaagtcaacattttatgacat

SEQ ID NO: 518384 - DNA, 763 bp, Homo sapiens
gactagttctaggggccaggcacagtggctcacacctgtaatcccagcatttgggacgccaaggcaggcaaatgcttgagctcaggagtttaagaccagcctgggaaacgtggtgaaaccctgtctctacaaaaaatacacagcttagccgggtgtggtggtacgcgcctatggtcccaactacttgggaggctgaggcaggaggataagttgatcctgggaggtcaaggctgctaagagcccgagatcgcaccactgcactctagcctgggtgacagagcgagaccttgtctcaaaaacaaaaatctatgccaggtgcagtggctcatgtctgtaatcccagcactttgggaggccgatacaggaggattgtctgagctcaggagttcaagaccagcctgggcaacatagtgaaaccccgtctctacaaaaaatacaaaaattagctgggcgtggtggggcacacctgtagtcccaactactccagaggctaaagtgggaggatggcttgagcctgggaatcagaggttgcagtgaagcaagactgtgtccactgggactccagcctggacaatagaatgagaccctgtttcaaaacacaacaatttttttttttcacacaatcgggactagttcttccatattgaaggggtattgggtgagggattccacggatgagtgccagagactcttaactctggagtcttccagcttttcccaataaagtcctattcctattgcagtcttccttgttctttctact

SEQ ID NO: 518385 - DNA, 313 bp, Homo sapiens
ccatataggttggacgagagactgattcagtagtttctcttgataagagaccactggccgtgggcgggttctggacagtttacagaagctatgcacttgattgcctttgtgtccctgcttcaccttttgaagcatagggcctaattataatgtatttaaatgttgcctccaccccaaagtgaacatgggttgcatgtaacaggcatgtttactcagcatgcatgcagcaggatcccttcacaaatattcagagctccccctattccctgttgaatatgtatatgtggccagccagatcaacgtaaatcactat

SEQ ID NO: 518386 - DNA, 299 bp, Homo sapiens
gtcgacgaaatatctgcaatccaacttaggtttgcaaagtatccacaccaaggaataccaaaggtttctaaattagttatttcgtaagtcgaataattttgaatagtaacaatatcatttgttgtacccaataaaatattttcgctcagttgtttgatgtcgggaattgcatcaatactttcttttaaagtacaaaatgaaattattctgtttacaccacgtccagtgtttggatttcgtttttaagctatcaaaaatgtagttactacatctgcattatcaaaccattttccttttcc

SEQ ID NO: 518387 - DNA, 323 bp, Homo sapiens
cgtttggaaatgtttcctgcagcattaggtatgacttgttctgagtactgcttccggtgctaaaatgaacaaagaatttgtacttaatggcatggactctggagaatctatgcgaatcaacctttctaccttaatatctccccaaaaatgtatagtgccttgtttttatgtacagtttatatacagaaaagtttgctctgcatttttgatgtacagtttatatacagaaaagtttgctctgcatttttgatgatggtttggaacattatctacaattttactctcaaatagtcaaaataaaaacatctcaatttctaaaaaaa

SEQ ID NO: 518388 - DNA, 277 bp, Homo sapiens
  misc_feature (18)..(18): n is a, c, g, or t
agaccgtaatatagtatnccatctttaatatggtgggactaacagcagtgtagatggtaccttaatatttttggctgggaccttctacctgccttacactacacttaggaaaaagtattacatatggttaatttggaaacttcaagtataatggccttaaggtctcttaacccggttacacgcggctggtagacttgttaatatagtaatacctttatgatatatggagtttaaggactactcttttccggtttaatcaggtatgctcagcgctggg

SEQ ID NO: 518389 - DNA, 537 bp, Homo sapiens
cttttacaagaaaagtcttttctttttacaacttaagccaaacttaagggtggttttttaccgtgtggtgtccccaccttttatcctttactcgggactcttcagcccagacacggttcaaaaacaagcaacaacaaggcttgtgacatcatagaaaccaatttcattgcatgtttccatggtattaaagagttactttaaataaacgtagtcaagaatgtaaatgacccccatttttatcccaaaaatagcaggctggccaggcacagtggctcatgccgataatccctgtaatcactttgggaggccaagatcgggggattgcttgaccctaggagttcaagaccagcctgggcaacatggtgagaccctgtctctacaaatttttttctttttttaattagccaggcatggtggtggacccctgtacatccagctactcaggaggctaaggcaggaggatcacttaagcccaggaggtcaaggttacagtgaacagtgtttgtgccattgcactccaggctgggcaatagagca

SEQ ID NO: 518390 - DNA, 800 bp, Homo sapiens
  misc_feature (689)..(689): n is a, c, g, or t
  misc_feature (691)..(691): n is a, c, g, or t
caagcttttacttcatctgtacaatgataaaactacaagataaatattaaggcttttttttaagtaattttaaacatcagactaagcatagcaattgttacattgccaagtttatgttgattcctattaaagaaatcttctggttgtagactggcttatcttactcatgttacttacacccggtagagttcttgaattttttatcacaatgcctagttatttagtctagctgctttaagaaaaataggtacgtatgagtcctttagtagtacatttaacaaaaagctcattgttttttaaatatagaaacttaatattttaatgtaaaggcactaatatgtaaacgaagttttcccttgttaatactaaagaaatccacattttaaggataatgtgaactatttgcccctgtcatccttctaggataggcagtactttgtgaaccagctacaacagaatcagctgcagtgcttgttaaaagtctggattctcaagttcactccaaacttattcaatcagtttgtgagagtatgtcccaggaatgtatatttttaaagaagttccttgtgtgattctaatgcatgcaactaattatattgttatagttaattgtctaatcaaccaaagcatcctattcatcattactttatctgctgttaatgtcatattttatctttacttttcagacntnttgaaatcctttgagtataactgactttgaccatttcattatatccctagtgggttcgggctaatagtcctatcagtgctctaatccaccttcccgggttgtttcaccc

SEQ ID NO: 518391 - DNA, 87 bp, Homo sapiens
atttaaagactaatgttaattgttcttaaaactgggatttttttccttaaagcaatttttttcttttcgatttaatgaagtattgct

SEQ ID NO: 518392 - DNA, 129 bp, Homo sapiens
ggacaggtcagctgttactgaatcatcggttacagatcatgtggaacaaatcatacatgtagaagattatgtaagaaattcattgttaggtaaggagtagagagtcaggaagaaacagctggggatctc

SEQ ID NO: 518393 - DNA, 387 bp, Homo sapiens
tttttttttgaaacggagtctcgctctgttgccaggctgaagtgcagtggcacaatctcggctcactgcaacctctgaattcctgttcaagctattctcctgcttcagcctcccgagtagctgggattacaggtatgcaccaccacgcccagctaattttttgtatttttagtagacagggtttcaccacgttgaccaggatggtctcgatctcctgacctcatgatgcacccgccttggcctcccaaagtgctgagattacaggcacgagtcaccgcgcccagctcaatgtgaatactttctacatatttactgtatattatctcctgctactcttccatgcaccaggtaatgaaagttaacaaattagtgaggagcccgccatac

SEQ ID NO: 518394 - DNA, 1123 bp, Homo sapiens
  misc_feature (383)..(383): n is a, c, g, or t
ggtcggatcctttcgctaaaatctcaagaattgctgctttgagtttatactaatgtgtggctctcaaaatctgaggtgtcctggccattctcagcgatttcctcagtggcgcctcccacgctctgcacaacctgcgagtgtcttatggctagagttacactacccttgatgctatagaagcttgatatgctagtagattcatgagactcatgtttattatattctcacatctctagtaagctaatttgatcaccaattctattacttcgcgaagtgtctcactgtgtgaacacttgtatcttatgtctcacactgttatatgagaacatcgttgcacacacacatttactattgaggcgcctttcctaccgtttcttagaacntatcaataagctcacttcttcacatcgtaggacgcatcgcaccttactctcctaactgtatcatggcttcgcctttctgactatctcctgtcctaattaaggtcgttacaagtgtccggtgattgccctgtggacggcgaagtgatcttgtacaacgatcgctgcataaacacacaatacgcgctttttagacacttagttgccagcatattttacctcaaatctcacaatgtggatgctcatccccgttttaagtagctcataacattcttcgatttgctttaccaacttctataagcataaacgctaagggcctgagaatttctttaaggctttttcgtatctttcctactcatggggggagcctcaagaggccttgtgtttggcgttcccccattaatcattatcaagagtacctatttgtagaatttgcctactctcccttgtgaacttcattatgggctttatccgaaccacagaagctggctcgtggcttaggcaatattccgttggggggtaattcccgattttcccctaacaatccagaccacgtgcaccgattcctttaatcttaagcgattctctcaattcctttcttggcacaacaagcggtatctggtttagacagtggcaactgggagggtctccccacctaaagttttttatagaacaaaacccggggattattcgggtcaccattgctaaacgagagatcatcctagcgcctttctaagacgcca

SEQ ID NO: 518395 - DNA, 438 bp, Homo sapiens
catctcttcaacagacactggtatctatcatatagtatctactttacggaagcgggagagatcttcgatagataagaagctcgtggtatgatagttaattgtccatacctcttcctgactctgggccatacttgagaataccgtggcagccgtgtgtccctaggctcaggctcgtagcttcttctcgcagattgtcatcggtgtaacactcttagcagacccatgttgcttcaggcacaagaggtacctcattctagccttagagatgtcatgggcttataacatacttgtcttgctttgtgcagtttcttctgtctctcatataatcattttgtctgtctacacagaaatctctacactccaagtagagttaaatgtctaaatctaagttaaacattatttcccatgaagccttccccatttccacgaggtaatttg

SEQ ID NO: 518396 - DNA, 157 bp, Homo sapiens
gtggacgctaatgctttctgtccccttttaggtgctgctccaaatgtggggccctcccaaagggccttggaaacaccataagggaacaaggaaaggggctcggtccctgggcctgacacagccctgctgctcaataaataaatgcaggtggccttta

SEQ ID NO: 518397 - DNA, 850 bp, Homo sapiens
ccacttttcgtgccccggggtcctttaattccccccccccgacctcttctgtcggctctccgctcccacccccacactggggcaccacatgtgatgccccgccccttcttggaagcccactccaatcgtgttgtctcagtattacaatagccaagcactcgcgtctcggaaaaacacactttgttcctccccgctcgcaatatagccgcctgcgctctcacacagctactaatacacacccgggtgacacctgtccacacacagtttaacacgcccccacatacatttctgccacccagcttacgcccaccccatcatgcactatattgtattccactccctcactctatggcatagacgcctccacactcacgacggcacagcatgtctcacacaaagaggaaagaaggtttttactacaaagacatactcttatatatagcgatactctcgcgcgcacacactttctgtctctctcacccgcccgccacgtgtttcaccgctcacatacaaacacttcgcaaccctcgctgtagcagctctcacactcccacttctcatcctttataagtggcccccccccccctcctcgttgcgcaccagcgcgtagacgacacacacgtgttttaacgcgcccccgcgcggatcgcccttaacctccgacccaaacagcgacggcacacaacagcaccgatggtgtctcaccataacatatgggagcccgctatctgtgacaggcccctccgcagaggaggatcacaccgagtcgtctttgcctttcttacaccccggtgaaggatgaccccgccccccttgaaaggggccgggcccaaccccgccccacaatgac

SEQ ID NO: 518398 - DNA, 130 bp, Homo sapiens
cgccggaagtttcgcaagccccgcagccttgaattttttgaattccgaaggggaagcccgccgggtttaaacccgggaccggggcctttggggtctctaatttgggttccggtttccccggggggccccc

SEQ ID NO: 518399 - DNA, 154 bp, Homo sapiens
ttgggagctaaggcagcggacacctgaggtcaggagtcgagaccagcctgccaatatgtgaaccctgtctctactaaaaagcaaaagtagctgggtgggtgcgcatgcatatagcccagctactcagagctgagcagaatgcttgacccaggag

SEQ ID NO: 518400 - DNA, 169 bp, Homo sapiens
taggttggaaatgcagtgttatgggagatagataacctaattttcatcagtagggtgtgtgtgtgtgtgtgtgtgtgtgtgtgtgtgtgtgtgtgtgtgtgtgatctccttgtggctggacagtgatgatgttagctagatctaattttccttaatgtgcagagggatt

SEQ ID NO: 518401 - DNA, 497 bp, Homo sapiens
ccttaaatcatagatggccttacagatgaattcttaccctgcagaatgggttaaactgtgcttaacagctttaattcgtgtgagattgacagattgtgaagtataaacttagcccaatctcatgttaggataagaaaaagcgatgtcccacaaaactcaatgtgacactaaagatctaaacaattttttgtaacttttaagtttcttatcaaatttcaccacccagtatataataagcactgttaatattggcttaatataacgtagctggtgaatttgtgcccgcatttaggcggacgggaaaattaacgccagaatatcccgaaagtctgatctggtcatctcacagttacgaagttacgtttatagattctcacgtctcttagtgtttttcttacgcgccttttgggaatctccagttacctcgtggtttccgtcatcaggttcttggcatagatttctatacattcgttttagaactattttaactaggtctt

SEQ ID NO: 518402 - DNA, 1694 bp, Homo sapiens
tagcgaggcctgggtggagcaggcgcctgtgcctcctcctacgtcccttcgccgcgtccgcgacagcctggtagccgtgcgggtagccccgcgctacgccatgtctgggcgagctcagcaacaggttccaaggagggaaggcgttcggcttgctcaaagcccggccaggcagcaggcaggctggccgcagatcaaccgggagttactgctgtgcaccagcacagtcacagtgatgcaccgcagaaccttccagacaacagctcaccagccttccaaagagcaagtacatggcgttcgcacctgcaacaatgcaaggcgcagcattgcacctgcatgctctttcaacagcaggcatgcatggcgcaagcttgcgtgtaccccaagcacccaacctggcagcatgacagcaagcatgcatctccagcaggtccaccagagacgggcagtccagccgcagcaatcaataaatcctcacccggcagcactaacagccgcaacccatgaatcccctagccgagcaacaaccgcgaccgagcctggcccctcccaagatacaggtcccatcgcaacgtcagcaccgcgcaccaccgccccaacgcggccaccaagacaagagacacagaaaagcgcccacgaaatggggaacacaccaccctacacgacggcatgcacaggcaagcagaccaattagactcacacaccgaggccaccgatgcgaatgagaacaccacccgcagaccaatcaagcgaacacataccagccccaacacgcacactccacacccgaaaacaacaaccaccaccaccaacataccacatccgccagacagaccaccgacaagagacacaccacagcacgcgaaccaacagaccacaagaaagcaaaaccacacacaacaacacacacctcccaccactaccacagccccaaagacagacaacgacaagacgcaagcagaccaagaacagatcgacagaacaacaacccacacacgccacacgcacgcaaccagcacccacgcacgaccgacacccacacacgcaacaccaacacacacacaagagcgagcacaccaagacagcaccaagccgaacaacaccagacacacacaactaaacgtaataacgcgcacaccaaccgccacttcatcccaacagcacgaatcagacaatcacaccagacgaaaaactccacacgcaacagccagacaacacaacctgacaatgctagcaaacatcagccaacgtacacgcacagcaaaacgagcgcgcaccgtgctaaatcgtgccacgtggacatgccatccaatcagcaccaccaattcctacactacatacgtagatacgcagaaacaccagacaaataaatcgaaactacataacggcaacaagctacatacgtacacaaataatgagaagacatgacactcacctactacaacatacctcagacaactataaacaaaacgcacactaatacacgcacaaaccaactataagcaatcgcatactgaacaacaacaccatcggcccaaccagaacaacataaataactcacacgcacactccactaccaacttacatcaatacacagaacaccagcaaacatacagaccagaacacacagccgacgaaagaaactacaagcaacgctccgaccccacactaaccagtactacccacacatcaagacc

SEQ ID NO: 518403 - DNA, 428 bp, Homo sapiens
ctatcatgcagctgcagtagatggtgcgtccggatcagtccacaaacagctcacacgcatctgatcgagcctcagactcgccgtctcgtagcctcagattcgccaagagtaaccattatctgccccgctggagggtgccaaggactcacccgtacgtcgtgctgtgaaagacacccttgccaagccacagtccccacagccatcagcttacaactcccctaaagcaatacacaaagtcacatagtagcttcgagccacccggcttgggacatgagtggatagcgccaaacggccggcccttcttcattgatcataacgaagagactacaacctgggaagatccacgtttgaactttccagtacatatgcggtcacagagcatctttaccccccaagacttgtcagtcaccctcactcctattataata

SEQ ID NO: 518404 - DNA, 265 bp, Homo sapiens
gctgttcttaaggatggtgcataagtgaaccatggactgactgggatattgtcccccaataatggccttaagacatttgctctcgggaagtataaagatcattccatggttccagtttaaaagaactacgtgtgtatccaagcagagaatttaagagcttgcttggaacaagtgagaaagtattcagaattctatactctccacgaggttcccatgctgaatgggattcttcccattcagagtagagatgggattacagttagaa

SEQ ID NO: 518405 - DNA, 443 bp, Homo sapiens
cgatgagtatggcaatgcataattaggtgtttttaaatgagatattatgtaaaattgattgcaataactgtcacacacctctatggccattgtagggtttatctctttctctgatactttttatgtgtgtgtttattcaatcatttatcaagtaagaattttacgtgctttcactaatgagccaagcaccgacacatcctgatatgcttccatctaggacttatagctgcttatttttacatttaacatgcttcttttcctccagcaaactcttttaaaaaaaaaaatgaaactctttccttcaatggagattatttcagaagttgccagtcatcttggaacccagaactcagtaataagcaactgcggcaccacaagtggaaacctttggatgatgggcccagttggtttcatggaatacacgggtttactgctataaccca

SEQ ID NO: 518406 - DNA, 2044 bp, Homo sapiens
  misc_feature (1527)..(1527): n is a, c, g, or t
cgtagatccagtctagggaataaagtcggaggctggcttggctgcgaaaagagaaaaaagaaaagagaagagaaggaagaaaaaggaagaacaaagaaggaaactagaagaaatgaagccaaaaataaagagaactttgaactccaagctgctcaagaaaaagaaaagcttaaagttgaagatgagcctgaagtcttgacagaacctccaagtgccacaaccactactaccataggtatatctgcaacctggacaactttggcaggttctcatggtaaaagaaataataccataactacaaccagttcaaagaggaaaaacaggaaaaataaaattactccagaaaacgttcaaattatatttgatgatccactaccaatttcatacagtcagccagagaaggtgaatggagagtccaagagcagcagtaccagcgagagtggggacagtgataacatgaggatttccagctgcagcgatgaaagtagtaacagcaacagcagtcgtaagagtgacaatcattcaccagctgtggtcactaccactgtgagcagcaaaaagcagccatcagttcttgttacatttccaaaggaagagagaaaatctgtttctggcaaggcttcaataaaattgtcagaaactatcagtgaagggaccagtaattctctatctacttgtacaaaatctggtccatctcccctttcttctccaaatgggaagttaacagtagcaagtcctaagcgtgggcaaaagagggaagaaggatggaaagaagttgtaagaaggtcaaagaaagtatctgttccatcaactgtgatatccagagtgattggaagaggaggctgtaatatcaatgctattcgggagtttactggtgcacacatagatattgataaacagaaagacaagactggagaccggataatcactataaggggtggcactgaatcaacaagacaagcaactcaattgattaatgctttgatcaaggatccagacaaagaaattgatgaacttattccaaagaatcgtttgaaaagctcctcagcaaattccaaaatagggtcatcagcacctaccaccactgctgctaacacttccttaatgggaattaaaatgacaactgtagctctgtcatcaacatctcaaactgccacagcactcactgtgcctgcaatttcttctgcatccactcacaaaaccattaagaacccagtgaataatgtgaggcctggttttccagtttctcttccattagcatatcctcctccacagtttgcacatgctttgcttgctgctcagactttccagcagatccgtccaccaaggttgcccatgacccactttggaggtacttttccaccagctcaatccacttggggtccgtttcctgtcaggcctttgagccctgccagagctactaactcgcctaagcctcacatggtgcctcgccatagcaatcagaatagcagtggttctcaggtgaattcagcaggttctttaacttcaagcccacaaatacaacanttcatcagcttcaacggtgctggtacatctacaaatggcagtccagttcaccttctgtccgaaggcagtttttgtcacagttgttaaagacttccatgccacacaaacaacggtacaaacacggtaggaaaacaacactgggcccaaaatgcccatataccatggccttggccaaggacacctttccgtttatacgccatattccataaacagaccacagagggggtttctaaaaacgcccttgtttgcgatgaccaccatcgcagaaaaaggggtgatatacgacacacagaaacgggtgtaccccatgtgtgaaaaagacatgcaaccacaacacagacgtctggtgacaaagcacaatctataagacacaggacgatatgtaagaaacaacatactaagtgtcaccaagcaacattgaactaacataagcaagcgtgcgagccaatacaagccagctcgacgacaactgacaccaacgtatctctactatgtacctactatctagtgaatcgaa

SEQ ID NO: 518407 - DNA, 1251 bp, Homo sapiens
  misc_feature (734)..(734): n is a, c, g, or t
gctcgcggcgtatctagaggatcccattatgcacgtggacggatctgctggaaagtctgagcagcaagcaaagcatgtgcaaactgtggaggaggatatgctaacagaaagacaagactggagaccggataatcactataaggggtggcactgaatcaacaagacaagcaactcaattgattaatgctttgatcaaggatccagacaaagaaattgatgaacttattccaaagaatcgtttgaaaagctcctcagcaaattccaaaatagggtcatcagcacctaccaccactgctgctaacacttccttaatgggaattaaaatgacaactgtagctctgtcatcaacatctcaaactgccacagcactcactgtgcctgcaatttcttctgcatccactcacaaaaccattaagaacccagtgaataatgtgaggcctggttttccagtttctcttccattagcatatcctcctccacagtttgcacatgctttgcttgctgctcagactttccagcagatccgtccaccaaggttgcccatgacccactttggaggtacttttccaccagctcaatccacttggggtccgtttcctgtcaggcctttgagccctgccagagctactaactcgcctaagcctcacatggtgcctcgccatagcaatcagaatagcagtggttctcaggtgaattcagcaggttctttaacttcaagcccacaaatacaacanttcatcagcttcaacggtgctggtacatctacaaatggcagtccagttcaccttctgtccgaaggcagtttttgtcacagttgttaaagacttccatgccacacaaacaacggtacaaacacggtaggaaaacaacactgggcccaaaatgcccatataccatggccttggccaaggacacctttccgtttatacgccatattccataaacagaccacagagggggtttctaaaaacgcccttgtttgcgatgaccaccatcgcagaaaaaggggtgatatacgacacacagaaacgggtgtaccccatgtgtgaaaaagacatgcaaccacaacacagacgtctggtgacaaagcacaatctataagacacaggacgatatgtaagaaacaacatactaagtgtcaccaagcaacattgaactaacataagcaagcgtgcgagccaatacaagccagctcgacgacaactgacaccaacgtatctctactatgtacctactatctagtgaatcgaa

SEQ ID NO: 518408 - DNA, 157 bp, Homo sapiens
attcgcggccgcgtcgaccttggctgatccatttgcctccgtggctgttgcccctgtggctgctgccaccacagctgctcctgctgctgctgcagcctcagctaatgttgaagccaagaaggccttgaccttatcagcaagtgggaaggtgtaatcc

SEQ ID NO: 518409 - DNA, 220 bp, Homo sapiens
gggctacagcatcagctcacttgcagctgtcaggctttcccaccaggaatctgccccacagccatgggcaatgtctgtctctttggctggcagacagaacagtttttatgggcatttggtgcctaagatggtgcaaaagaaacatgtctaaatgcagcctatctctgcactgtggcagtacccgtttatccactcatttcacagacccaggtggccactt

SEQ ID NO: 518410 - DNA, 297 bp, Homo sapiens
ttgtggactcatgcgacggcggacgtttgcgagctgctgtgccaccatataccccattctctcaggatataattcgcccagtctggtgctgtgttgtcttttgtgccagctacttgaaggctgcacggtagcgcggattgctttagctcgggaggttgaggctgctgagagtggtgatcatgcctctgcgttccagccttggtgatcagatcaagaccctggtctcaaacaacaacaacaacaaggatcaagatctatgccaaattgataccctgtcttgcgctagccttatgggaa

SEQ ID NO: 518411 - DNA, 101 bp, Homo sapiens
  misc_feature (1)..(1): n is a, c, g, or t
nggactatagagcatccccgactacatacttccgcaacttcaacaccaccttcttcgactcccgccggaggaggagaccccactctatgccacgacctatt

SEQ ID NO: 518412 - DNA, 430 bp, Homo sapiens
ggggagtgatcttgagtatcctcgaatatgcatactagccaggtacgttatgactgtctccttctagtgttgctggatacttgcagttctgccatcagctccactgtagcaagtagttgctgggaagtaagctggatgatccaggctgctggagatccaatgcctagttgtctccagagtcttttatgagcgcgaatctctgccaggggctccggcataccagtgattccccttctgtgctatagacaagtctacagtctgcaactaatgggaaagggcaccattctcctcaggcacattattggggcccccacagcaagactgctagggtctcaaggaaaatcgagcttaatgaatgcgagcaaaccctcttcatttggccaagtcagctttgtcaggaagggtccatcaatcaggcaccacatgttca

SEQ ID NO: 518413 - DNA, 125 bp, Homo sapiens
ccgtcagctggtgagtggataaactgttgtagattaatgcaatagaattattatttcagcccagaaaaggagtgacgtactgatccatgctttgacatgatgcaccttgaaaacatcgttaaccc

SEQ ID NO: 518414 - DNA, 260 bp, Homo sapiens
cggcgtccggctgtgggtatggctgtgtactgtgtcttggcttcacgagcagcctctgacggtcttgtagaggaggctgaagtgctaggacagccacgtaggccatgccgagttaggcagcaatgcaaacagccaggagcaggtcaaagacggccggcttgactctgtacgcatacatcacttgcttcagctggtcgtagaagacaaactctgggtcccgccgtacatcagggggttaccgacgctcgcattttcgtaac

SEQ ID NO: 518415 - DNA, 897 bp, Homo sapiens
gcaaaataggtcttatgatgtctatcgtgcggacaggaaaactgagatttagggaagttaagaaaggttcccaataattatacagtcagtaattattggatccagacctgatggactccaaagccccatgtttttccactgcctctcttggggagctttcaaaaacttctagaagacatgaattttggttccgtgatgcataaaaagaaacgaagcctgcaatagaaaccagttcagccctcttttgctttataaagagtccctgggactgggtccttggaatctgaatgtttcccaagggttgttagccagattcctgatttgtttattgtacttatcacaagtcagagatagctgaatatttgcatttctgaataggatctttttgtacatttcacttagtttttgaatggcttgtcagaagaaactcaaatttggactgggtcacccagcaacctcaggccagagctttgagatggatcagtttccccctggacttttacagcatcctaaaatgatgagaattagtacatttgtaaggaaaggtcctactgagctaagaaaattggtctttctggacaaggctgatctcatattgggtacacagtactctccataggagttagacttcggggggactggctgtgaagagttgcaggagggtgggtatgatttcattctatcaaatcctttaccaatctgtgctcgggatgatagaatccgggatcctaactgaaaagcaggtttccaatgaagcaactttaagaactggcggttccggacctgtgtggacacgtgatccttttggtagttcgcaagaactcggaacctgttgtttggtggcatttactggccggactatgggacaacgagtgaatgctcctactttctcaatat

SEQ ID NO: 518416 - DNA, 290 bp, Homo sapiens
  misc_feature (174)..(174): n is a, c, g, or t
ggcagctatcggttcatgtggtggactgcactccattgcagaagaacggaactacttgtgtgtgaagtagataggactcgaaaggcacccaggtgttgtcacaaatttttgaatttccgaatgagggagaacaggtacctgtggatgtggtcgagatgaaagagaccatcatangcctttgctgggaaccaaatggaagtaagtttgctgtgctgcacggagaggctccgcggatatctgtgtctttctaccacgtcaaaaacaacgggaagattgaaccggatagcttg

SEQ ID NO: 518417 - DNA, 1488 bp, Homo sapiens
  misc_feature (326)..(326): n is a, c, g, or t
  misc_feature (937)..(937): n is a, c, g, or t
  misc_feature (1174)..(1174): n is a, c, g, or t
  misc_feature (1188)..(1188): n is a, c, g, or t
  misc_feature (1488)..(1488): n is a, c, g, or t
ggccctggtacgtcggatcgcatctaagggtccgtctatccgtcccccacagcaccatgctaaccgccctgcagacgcgagctggtcctacggaggtggcgatccccccgcgggcaagtgcgtgcctcgcacttgcgcctgcgtctggtcgcttgctcacgcgggttccctcagcgcgagtagtactcttgcgtttcgcggattatcgcctggtggagcccactcctcgccgaggctctcctcgcccattacatgctgagtctagccttggtgcagagacagctctgggaaactggtccacgccatacttgtcggcgccccgagangctttacattgcggtagagacgcacacggtgccatgatattagcattgtagaggtgtatcaacttgtcgccaggatttagtcctagcggaccacatgcgtgtgccaccccgaaccttagcccttacctacgagcttgcctcaactagaggcaacgattggtcccttggacatgggatggcgatgcttaccagtacgtctcctagcgttcgcgtatgcaccaccatctgtgatccttgggtattgtacttctcaatacgtcgaacgagttccaaatatgtcgtatcatttatccgcaatgcgtgtataccctagtgcaacacctgttcactacgcatgtgtgggcatggctcctcttgcggtgtccggttactccgatcgaggagccaggtttccgttggtgcccgtttaccctcgtggtcaaaaccctagtggaatcttcttctatccctccctccctcgtggtacgcaattacccttctccgagtaggcgctatctttccgcaactccctaaacgcattcgtggactggtgccctgtccgggcgcgaattcctatttggcacgagacacgccttttgatttcccttttgcgaattgacctcccctagggnactctcgggggcggagaggtccggggcacggacctccgagtcctacctcgaaagtctccatcctaagcttattggtctttcagaccgcgtgaacgagacctgttttttccccccggcgagcctggtcgttcctcagttccttccttgtgcggaaagcttgggggcgttctccggggcaggcttatcgccacttttttcccgaccgcggggggcctttggcttttttttgagggcccnttctcaacctctcntggccgcaaagtttcgcgctcgttgtttaacagaggcggccccttggggagtccgcaggccaaccagagcgtccccggcggtaacaaatggagggagaaagagatataacaatatctaatagaaccagtccgcgatatataaatatataacccccaacaaaagagttgcctccacaaaaaagcggggcggagccgacgaacaagttggcgaaggctttaagctcgcgcggcggagtaaataagtacccccgacgaggaagcagcactacacactacaagccactacgtgcatacccgacn

SEQ ID NO: 518418 - DNA, 248 bp, Homo sapiens
gcaacagtggctttaactatctaatcagtgtcctagggaacctatgtcaaaacaatttttgtcttactccaaacagaaaaaatggtacacactttaacaaaagccaaaacttaattgtaagatctgtactgtaaagctactagctatagcccatatatacagtctgttcaacaatctcactcatgacagaaaaagtcagcaaataagaactggaacaaaattattttctatcagtctccacatggaaa

SEQ ID NO: 518419 - DNA, 173 bp, Homo sapiens
atcatgagaaggaggctaggaatacatgccaggcaatgtgctacatgaacctattgagactgagacatgagcccatggttgaggactgtatggacgtgtgttaatggacgtgtgagggagaggacgggtgtgagggagaagatggcatgtgaagaagaggatggggtgtgaag

SEQ ID NO: 518420 - DNA, 627 bp, Homo sapiens
  misc_feature (149)..(149): n is a, c, g, or t
  misc_feature (174)..(174): n is a, c, g, or t
  misc_feature (213)..(213): n is a, c, g, or t
  misc_feature (277)..(277): n is a, c, g, or t
caaaaaacccgtttttttccccggcccttcgtttgaaaccgggcctttgtggtttaatgggggcgggcacccccagggtaccggctccgttccagaatataaatttccccaaaaggatcagtttaatttaagaagttcccaccaatccnttctcttttaaattttcttggaaangcattttttatgaatagaatcaggctagagtgggagagnaatgcaccagctactgggaagggggagctcagtctgaacctgggggatcagggcagtagggacntctcgccttgtccactgatggggggtctggctgttactcctctccgttcagcacagaaagaacttggtcagtaaacatgcctgtgtaagtgctcatgcctgctgtgcttttgctgtacaagtccttgagtttctcatctacagcggcatggtatgtcttctcgtacaggttctgggcggctgtctttgctgactcccagtaactggagagagattctttcacttgggtgagtaaaggtcgtggctaggcatctcttctgcttggggctgttgggtcccttggacctcaaatcccaataccagtaggacaagaacaaaagctgggagcagtcgtgggcccatagtgtccag

SEQ ID NO: 518421 - DNA, 357 bp, Homo sapiens
  misc_feature (22)..(22): n is a, c, g, or t
atacagacatcctctcttctcngaagccctggctccatgtgataaccaagcccttttccatatctttgtaaataaaaattatgatgacaagtcaacaaaatattcttcacctgatttttaaaaaattcctaaactatcccatgccacagtttctttttaatgatattcgatacggtttggctctgtgtcctcaccaaggtgggtggatcacttgaggtcaggagttcgagactagcctggccaacatggtgaaaccccatatctactaaacataaaagaattagccaggcatggtggcacacatctgtaatcccagctactcaagagtctgaggcagaagaatcacttgaacctcgg

SEQ ID NO: 518422 - DNA, 107 bp, Homo sapiens
gtgagaggaactggattcactgataaatcaagagatacatcaagaagactcgacggttccagtccgggcccccggaccacgtccaaacttactcgcacagtgacaca

SEQ ID NO: 518423 - DNA, 101 bp, Homo sapiens
  misc_feature (95)..(95): n is a, c, g, or t
gaactagagaatccccggggttccgactgtgtgactgcaggtattccacgtacccggtctccaggagcccttataacagcagtgcgtgtgcacgncagggt

SEQ ID NO: 518424 - DNA, 936 bp, Homo sapiens
ggagtctaaagaatttgcacccactgaagtcaatgacatatggaagtatgaagatgataaaaaagaatgggctgggatgttgaaggaaatacgttatgcttcaggagctagttgcctagcaacacgtttaaatctcttcaaactgtctaacactgtgaacaaggtgacaaaacataatagattgggaggtggttgcttggtgaatggggctttaatttattctgttttttaaaagcttgtacagacactcatgtagaacattattcacggcaggtcatggcctaggaagttgaccgagaatgggtagagaaacacctcagtctattgactcttcagtgtagtgatcagagtttaaaaccattttctaatacataaattacatcttcagttgaacaaattatttgtgaatctgtttcactcaatggattgtcaagaaggctcctaaattgagtgttgctaatcatttcatttgcatcattagggtatccttaaactgattttctattacaatggaagtggacgatatgtgcatctacactaaaaaatgtttagatatcaaaaggctctcctcgtgcttcaaaatggacagggaatccctgtggccatattactaaggaatttacatggccattaggaaggacttcagaaatcctacttccggaaggttatacccgggcggcgactcggttgaggggggaaagccctcgggtaagtcacaggtggtccatcccaaacaaacaagagaaacaacaaggtggcgccgcgcgccccgaaagttcaacacacgtggggcggggccccaaggatcggacgagaacggcccagaaacgcgcggcagcggggtctcaacaaaccggggagaggtaaaccagggtgactggcacaggcggcacacgccccacagggcgagaagccgaagacgagcgcacaccacat

SEQ ID NO: 518425 - DNA, 213 bp, Homo sapiens
tattttccacagggcctcggatcttcttaaacacgttgggatacttcttataaacccagggggttaagtctcccccatcatccaggatcatgtgggccggccacccatccaggttcacacagcgggtcaatacaccaccagaaagtcatcttctggactcgcccttccaagcggaacactggcaatctccagcctcaagccaagtggctggca

SEQ ID NO: 518426 - DNA, 101 bp, Homo sapiens
tgttaccactataggaacggtgcagagggtagaccgtcgtgagaaggttagtttaccctactgatgatgtgttgttgccatggtaatcctgctcacgacgg

SEQ ID NO: 518427 - DNA, 225 bp, Homo sapiens
tgtatccccaactgacctctgaatgaggctaaaggaggagcagcatccagtaaggaccgaatgaacgctgaggtcactttctgggaagccagaacaggaagtatccatatgctgaggaagaaaaatcagtttctggaactgatgtcccagaagagtgcagagcaaaaaggaggctcaggagaagcagggagacggtagtttgtgagcatagtattacatagtgtg

SEQ ID NO: 518428 - DNA, 359 bp, Homo sapiens
  misc_feature (77)..(77): n is a, c, g, or t
  misc_feature (83)..(83): n is a, c, g, or t
  misc_feature (174)..(174): n is a, c, g, or t
  misc_feature (311)..(311): n is a, c, g, or t
  misc_feature (316)..(316): n is a, c, g, or t
  misc_feature (335)..(335): n is a, c, g, or t
  misc_feature (350)..(350): n is a, c, g, or t
tcctatggcacatacctaacccacaaatatatccataatttcattattattatttcctaatataggaattgccttanacgtanttttcgttttttgagacagtcttgctctgttgcccaggctggagtgcagtagtgcgatctcggctcactgcagcctctgcctcatgggttnccagcgattctcctgcctcagcctcccgagtagctgggattacaggcgcatgccactacacccagctaatttttgtatttttagtagagacggggttttgccatgttggacaggctggtctcgaactcctgacctcnggttntccactgcactccagcctntgtgacagagtgagnccttgtctc

SEQ ID NO: 518429 - DNA, 896 bp, Homo sapiens
  misc_feature (820)..(820): n is a, c, g, or t
tacccctccttagttttatgcgctcaaaaaccaatttaaaccccccccccaatgtaacgggggggcgggacaaaagcaaaaacgcaaaagccgccgggaaaccaccagttctggcccccgcgaattaatcgccctgatggtgttttgggttttcatctggtcccggtggctgggtgtagagttggaggggttggacgcctccgggggggcacgggccattgagccccttgggagaatgtcagaggggatgtggaagaaggccattgtccgggcctgggtctcctgggggacagtgcttgtgtcccaagaatgtcctgacggccggacggggggggtgcgccagggtctccccagtgtgtcagagaggggtgctcgggaggccacgaggaggggggccccgtgggagtgaacctgagggtgttggccgaaggggcagcggggtataccagcggtggtgttcacaccaggcgggtcccatcaggtgggggcaagggtgggacgcctctccgaacaactttgaggaaaccctccctctcccttcggggaaattttgggcacgcgcccctcaggaaccctgtgacttgggttctcacaggagggtcagaacctcgtggggggaccccttgcggcaacggctggggttcaagccggaaaaaagagaagcagggcaggattgaacccaaaaaagacagaaagcagcaggttcgccatcacacagtttgtttgggcccgagaccagggcttggagtgcataaaacacaaggggggaaagggtgaaaggaatggccggaagtaacacgcccatgtgcccggctaaccngtgacacgaaaacatagaaaaatgccgagcagggaacccaggcaagaacaccaaagtcaacacgatgtcataatac

SEQ ID NO: 518430 - DNA, 304 bp, Homo sapiens
  misc_feature (107)..(107): n is a, c, g, or t
cgatatcagcatctctagaatataatcagaaaatgaaaacagtcaataagaattggacacaaaagtcatagtagcattattcatggtagccaaaaagtacaaacaanccaaatgtccatcagctgatgaatggatacataaaatgggacatatccatatgatagaatattgtttggcaataaaaaggaatgagatgctgattcatgccacaggtgggatgcaccttgaaaatatactcagtgaaaaagaccacatgtatgattccatttatatgaaatgtctagcatgggcaaatctatagaga

SEQ ID NO: 518431 - DNA, 115 bp, Homo sapiens
gtgtcggggtccacggtgtatctgaggcgagcgaaccgcaggacagcagtcaatcatgagcgagaatgcggagcttcccctccccctctctcccgggaaccggatttggcggccg

SEQ ID NO: 518432 - DNA, 570 bp, Homo sapiens
tgggtgtttcatatcattggaggtttgtcagagagaggtgatctggctggagaaaggttcatctgatggctatggacagatgacttgaagaagtggggaacgagggaaggaggtcagtgtgaaaatgataacaagggtccagactctgtgatgcagctgtgaccatgacaacagagcagctgtccggttagaagctggagacatgaactggggcagctctggtggatagtaagccgggtggaacagatgatgtcaggtttatacctagaggacacatgatccattcacaaagccagggaaacctaaagagaaaacacttagaatttgaggagaagaggctagggctgggcctgagacatgggctggcctccaggtggaggggtccagcaggcaggtacaagccggatgagagttcagggcagagggcagagccggaaacagaccaaaagctgccatggagtggcgagggtggaagcagcggcacaggccgagggccatctcgccggggaagggtgggtacagcacaaccctgtgggccacgtttcctcacacaggaaattcccacagaac

SEQ ID NO: 518433 - DNA, 435 bp, Homo sapiens
tctcagtaatagaaaccaaatcaattaaaatggggaaatgattttaatagatgcttcactaaagaagacacacaaatggatgactgtacctgtttttttcctttttatggcaaaatacaacatgaattttactgacaaatacgacatgaatgggtctcaaaagcattgcactaagtgagagcagccagttaggcacactaaactctgcattattccattcatatgaaattccagaaaaggggaaactatagtgaccaaaaacaaatctgtgattgtcaagagctagagataagggttggatggggctgttctatatggtgactgtggttatgattacataactgtaaatttgttaaaactcattgaattgactgcttaaaatgggtggattttatcatatgtaaattatacctcaataaagcttatttttacaaa

SEQ ID NO: 518434 - DNA, 113 bp, Homo sapiens
gggtttgcccccccccccctttttttttggggttttttggaaagatttttttttttgggttttgggaaaacccccccccgggggcggggaaaaaaaaccgggaatttttttta

SEQ ID NO: 518435 - DNA, 339 bp, Homo sapiens
gatggaaaagtagccaggcatggtggtgtgtacctatggtcccagctacatgggaggctgaggtgggaggatgacttgagccctggagattgagtctatagtgagctgtgatcatgtcactgcattccagctggggcaacagagcgagaccccatctccaccaaaaaaaaaacaaacaggaaaaggatttaggctaggtgtagtggctcgtgcccgtaaccccagtgattttggaggccaaggtgggagaatcacttgaggccaggaattcaagaccagccccagcaacataccaagatcccatttcaacaaattaaaaaaacaagcaaaaaaaaaaac

SEQ ID NO: 518436 - DNA, 259 bp, Homo sapiens
  misc_feature (96)..(97): n is a, c, g, or t
  misc_feature (107)..(107): n is a, c, g, or t
  misc_feature (150)..(150): n is a, c, g, or t
  misc_feature (171)..(171): n is a, c, g, or t
  misc_feature (223)..(223): n is a, c, g, or t
tggtaccgtggttgcatgcaaagctcggagggtgaggcaggcgtggtctgcgtgctgagacaggctggtgcacaggagggtcagcacagaagcccnntggctggtgntcctgggcccaaagggggctggggctccatgggagagagacgnggccaagtgctgtgcaccccnatgtgtggggctccacaagctggaggggcccctggacccaccgaggaagcgngcaaaaaacagggtctgcagttcccagccatgccgg

SEQ ID NO: 518437 - DNA, 258 bp, Homo sapiens
ctccttggtaccggatctgatagcaattagaaataagacatttgcggccaggcacggtggctcacgcctgtcaatcccagcactttgggaggccgagacaggcggatcacgagttcaggagatctaagaccatcctggctaacacgataaaaccccgtctctaccataaatacgataaaaattagctgggcgtggtggtgggcacctgcagtcccagccactcgggaggctgaggcaggagaacgcgtctaatactcg

SEQ ID NO: 518438 - DNA, 685 bp, Homo sapiens
ctgccgctcctggtgctgcttgtgtgctcgttttggtgcggcacctggtcacctctttctgtgaagcggcagctgaggagactccggacggctcgtcaatggccgaccgaaaagcccaaggaaggagtcacagactgagaacaacgatcatattactttgaaggtggcggcgcaggaatggtccctgtggttgcagcttatcaacgattacggacgggcatactaccaaactatagtacaactaatgacaccagcctatttgtgaacagacaggggatttgtcaacatgagcgcagatcatgattccgatttgaccgggcaacccagatcaattgacaaaccaagacaacaccctgcaccagttcgcgcccaattgcgacgggatgacagcattccaagcttgactgtgctccaacgagtccgacggccgcggttgtctactgacaaagcggaaccctgtttcttaactccgcgaacctctgttcttttgacagacccataggattacgttctcacttcgagacactgcatgtttggggttcagccagcattcctggactacttaccgtatagtcttctctattcgtttccatttcccctttcccattcttcatcgtccctcacgtcactggtattgtgcacacagcctattgcactcttctttcttttcctcaaccggccatgt

SEQ ID NO: 518439 - DNA, 151 bp, Homo sapiens
aacatacacaagacaatactatatctctaactggtctccctgatatcaacatctcaggtccaattcggactacacactgatgccagataattttcttatttaaaaacaacaacagaaacactgctacagactgcttcttagccatgccatt

SEQ ID NO: 518440 - DNA, 886 bp, Homo sapiens
  misc_feature (13)..(13): n is a, c, g, or t
  misc_feature (101)..(101): n is a, c, g, or t
  misc_feature (226)..(226): n is a, c, g, or t
tatcatccacacnacgactccccattagtattatgccttattaccgtcaatttttgtcaaaggagtgttgtgaactctagtatgatctccccttgaatgtnacccgtcgagactcttcagcaacataaactgcttaaggtgattaggaagaagctgttcgtaaaacgctggacatgatcaagaagattgctgatgataaatacaatgatacttttggaaagaattnggtaccaacatcaagcttggtgtgattgaagaccactcgaatcgaacacgtcttgctaaacttcttaggttccagtcttctcatcatccaactgacattactagcctagaccagtatgtggaaagaatgaaggaaaaacaagacaaaatctacttcatggctgggtccagcagaaaagaggctgaatcttctccatttgttgagcgacttctgaaaaagggctatgaagttatttacctcacagaacctgtggatgaatactgtattcaggcccttcccgaatttgatgggaagaggttccagaatgttgccaaggaaggagtgaagttcgatgaacagtgagaaaactaaggagagtcgtgaagcacgttgagcacagaatttgagcctctgctgacattggatgaatagataaagcccttaaggacaagattgaaaaaggctgtggtgtctcagacgcctgacagaatctccgtgtgctttggtggccagccagtacggatggtctggcaattatggagagaatcatgaaagcacatagcgtaccatacgggcaaggagatcttctatctaattacgtatgcgagtccgtaacgaaaacatttgcatattaatcccagattagccgctgcatcagagcacatgcttgacgcaattaag

SEQ ID NO: 518441 - DNA, 125 bp, Homo sapiens
agcggagtggagaagccgggccgggcggaggcagcagcagcgcgcagtccctccggcctgcgccctgagtgcggacggcagcctggaggaggtatgcgactccggatgcctgtatggaaagggga

SEQ ID NO: 518442 - DNA, 868 bp, Homo sapiens
  misc_feature (72)..(72): n is a, c, g, or t
gataatgctggctacattatctcaaatgagtaaacgggtgtggtggagtcagatgatctccccttgaatgtnacccgtcgagactcttcagcaacataaactgcttaaggtgattggaagaatcttgtgcgtagaggctggtcatgattaagaatgtattggtgataataacaatacgtatgagtagggttttgggataagtaactttggtaccaacatcaagcttggtgtgattgaagaccactcgaatcgaacacgtcttgctaaacttcttaggttccagtcttctcatcatccaactgacattactagcctagaccagtatgtggaaagaatgaaggaaaaacaagacaaaatctacttcatggctgggtccagcagaaaagaggctgaatcttctccatttgttgagcgacttctgaaaaagggctatgaagttatttacctcacagaacctgtggatgaatactgtattcaggcccttcccgaatttgatgggaagaggttccagaatgttgccaaggaaggagtgaagttcgatgaacagtgagaaaactaaggagagtcgtgaagcacgttgagcacagaatttgagcctctgctgacattggatgaatagataaagcccttaaggacaagattgaaaaaggctgtggtgtctcagacgcctgacagaatctccgtgtgctttggtggccagccagtacggatggtctggcaattatggagagaatcatgaaagcacatagcgtaccatacgggcaaggagatcttctatctaattacgtatgcgagtccgtaacgaaaacatttgcatattaatcccagattagccgctgcatcagagcacatgcttgacgcaattaag

SEQ ID NO: 518443 - DNA, 333 bp, Homo sapiens
  misc_feature (83)..(83): n is a, c, g, or t
ggagggcgtaggtgcaaaggaccctagggccactcctgtctctccccctccccggggaagtggactgtggtggccacctttantgcaagactccatggatcagaaaacacctgttcgtggtgggctgtccagtggcacgaccccttggagcccagtgccaggcacatgctcaccatctgggctgctaaccagtcagaagctgtttcgtggaaagagtcgtgatgtgggtcaaacagtcccctgaaaagacatgtccaagccccagtggccacgtattagtctgttctcatggtgctaataaagacctacccgagactgggtaatttgtaaaga

SEQ ID NO: 518444 - DNA, 982 bp, Homo sapiens
ggagagagagagagagagagagagagagagagagagagagagagagagagagagagagagagagagagagagagagagagagagagagcgcgcggagcgcgcgcctgtggcgctctcgcgcctatgagtgattggggttttgtgtgtgtgtgtgtgcccgcccttgttgctcgccctctctctctctggtggtgtggtgttgtcgtgttgcagcctagtgttgtgtcgtcggcaggctcatctcgccggtgtgtgattatcgtgtgtcgtcgtgagagatagaagatagtagtaatagtagttgttcgtggagagagatgttgtgtattatgtgggtgggggtgctgatgatgaagaagagtcccccccgtgtgtggtggtgaagtaccagcgcaggcgtcgtcgtgttgcgcttataatcgtcgtcgacggagagcacgacaccacatatagtagttggtagcgtgtagtataggcagagtatcgttaaccgacgcgcggtcggcgtctcgatcaagcacgaggcagagaagcagagtagttgtgtgtgggcagggcgcgcgcgagggcctcatctactattatgtgatgtgtagttgtgttgaagtagagaatcgcgggggtgatgatgtgtgcgcgaggggctgtgtggttcgagggacggccactgaggtgtcagaagaatctattctgcgcggcgtgccaagcggggttgttcgtgctgccggtggtagaagatggcaacttttacagacaagcagaggagcagcatacatttttatagtgcgcggcgcgcctcttctgtggtgtgtggcgccaatagtagtcgtaggcgccgcctgtttaaaaagaccaaaagaatccgggcgtctttttgtcgggggaaaaacagaagtaccaacgacgcagttgaggtggccagcacccttttattaaagggaagtgcaggcctccagtggaggtataaccgacgggctcttaa

SEQ ID NO: 518445 - DNA, 106 bp, Homo sapiens
aattcatagccaaagccaaagaagattttcttacaaaaatgggaaagtcccgcatcagaacacagaccacattggatcagtttgaacgaatcaagacccatcggcg

SEQ ID NO: 518446 - DNA, 795 bp, Homo sapiens
cctcagtgtcatgctcaggcatgatgcatgtatctgtcctgtaataatgcaatattactatactatcttccaaatgatcaaacaagataagcaagatgataaaatacaatggataaattaaagaaaaagaataaaggtaccaacatcaagcttggtgtgattgaagaccactcgaatcgaacacgtcttgctaaacttcttaggttccagtcttctcatcatccaactgacattactagcctagaccagtatgtggaaagaatgaaggaaaaacaagacaaaatctacttcatggctgggtccagcagaaaagaggctgaatcttctccatttgttgagcgacttctgaaaaagggctatgaagttatttacctcacagaacctgtggatgaatactgtattcaggcccttcccgaatttgatgggaagaggttccagaatgttgccaaggaaggagtgaagttcgatgaacagtgagaaaactaaggagagtcgtgaagcacgttgagcacagaatttgagcctctgctgacattggatgaatagataaagcccttaaggacaagattgaaaaaggctgtggtgtctcagacgcctgacagaatctccgtgtgctttggtggccagccagtacggatggtctggcaattatggagagaatcatgaaagcacatagcgtaccatacgggcaaggagatcttctatctaattacgtatgcgagtccgtaacgaaaacatttgcatattaatcccagattagccgctgcatcagagcacatgcttgacgcaattaag

SEQ ID NO: 518447 - DNA, 304 bp, Homo sapiens
cctagatctacccttgagagccaacctcaggcaaatacccagcagagggacgttctacagtatccctgaccagtactgctcaaaactgctaagaattatcccaaataggtaaagtctgagaaactgtcacagacaagcaggcagcctacggagacctgacaacgaaatgtaatgtaggatcctggatgggattctggaatagaataaggacactaggtccaaaactaagataacatgggctgggtgcagcggttcacacctgttatcccagcactttgggaaggccaagcagttcgtcgctaat

SEQ ID NO: 518448 - DNA, 251 bp, Homo sapiens
gttagtcatcactgaatttgaagtttgtttccagctttgttcaaattctctgtttttttacttttgcattttttaattatacttcagtttggggtacatgtgcacacgtcaggtttgtacatatgtataatgtgccatgtgggtgtgctgcaccattaactcgtcatttaacatgagggttatctctaatgctatgcgacccgctgccccaacccacacagtcccagagtaagacatatgcatatactgct

SEQ ID NO: 518449 - DNA, 756 bp, Homo sapiens
ggccattatggccgggcacgttggttcatgcctgtaatcccagcactttgggaggccgaggtgggtggatcacctgaggtcaggagttcgagaccagcctggccaacactggtgaaaccccgtctctaccaatacattagctgggcgtggtggcgcacgcctgtaatcccagctactccggaggctgaggaagaactgcttgaacctggggggtggaggctgcatgcagctgtaatcatgcctgtgcactccagtccttggtcccaagcacgaacctctggctcacacttatactcctctatccgttatgctttactccttgtccttcactgatacccatctaatacacatgtcctgacccctgcctccacttgactctccagcttctactacatgtcctcctaccattatcttcccacctcctcactcagccccttttcttcacaattctacccattctcacttttactcctccgcacagacctacccatctttaacctctctcttccatcgtttctctctgcctctctcctctctttcaccacgcctagctctacttcccctctctcgacttgtctcgccttcatcccgttcctatctttcgccctctcgccctcccaccatcccccttcacctcttcctcatttccacgcttctacacccttacctacttaccccctttctctctcctttcatcctactcccgcactctattcccgtccccatccttcgtcctccttcactcctcctcccccc

SEQ ID NO: 518450 - DNA, 434 bp, Homo sapiens
  misc_feature (14)..(14): n is a, c, g, or t
  misc_feature (167)..(167): n is a, c, g, or t
  misc_feature (234)..(234): n is a, c, g, or t
  misc_feature (424)..(424): n is a, c, g, or t
agatgggtcccccnatgaaaatggctgtgtgtttcaagaacaagccccattgcaaggttaatgaacattggatcaagttttccccaggcctgctgtaaacaaagtaacccacaactagggaccctcatgacaaaaggaattatttctccctctccccagctctgganaccagaagattgagatcaagatgtctcagggctctgctccatccggaggttctagggagggatcaantcctgcctctcttagttcctaggggctccgggcatccctttgacttgtggttgcatgactccagtgtcacatgcgtgtaatcccagctacttgggaggctgagacaggagaattgcttgaacccaggaggtggaggttgcggtgagccgagatcgcgccattgcaatccagcctgggaaacgagtgaaantccgtctcaa

SEQ ID NO: 518451 - DNA, 246 bp, Homo sapiens
gtcgactaaaagcgatgctggcaaaacacggcattcgccatgacaccacggtcattctgtatgggcgtgacgtatacgctgcagcgcgtgtggccgagattatgctttatgctggcgtgaaagatgtgcgcctgctggatggcggctggcaaacctggtccgacgcgggactgcctgttgagcgcggaacccaccgaaagtgaaagcggaaccggatttcggcgtgaagatcccgggtcgacgcgg

SEQ ID NO: 518452 - DNA, 1133 bp, Homo sapiens
gccgactgaggcacgagcgggtgacgctggtgcctccagcgcgtgagtcagaatagctacgaacccgcagagtcctccctgctgctgatgtggatcggacacgtggtgcacaggcagaagtgggaccctggtgaaccagctggactggattctcgtggaagggaagctaccagtgatctggcggtgatgggctcagtgctgtatcaaaggtcaccagatactttctcttcctcttcaacttgatcttctttagtcctggcgcgcagtgatcctgggctatcggggtgtggatcctggccgacaagagcagtttcatctctgtcctgcaaagctcctccagctcgcttaggatgggggcctatgtcttcatcgtgcgtgggggcagtcactatgctcatgggcttcctgggtctgcatcggactgccgtctaagcgaggctccgtagccctgctgtgggctgtactttgctttcctgtctcctgatcctcattgaccaggtgacggtcggggacctctactagttcaacatgggcaagctgaagcaggagcatgggccgggcatcgctgacctgagcttcattcggagatctacacatacgcagctcgccgagcgacagtctgcatgatgcctggggactaacgatgcagggctcagcggtgaagtgctgcggacctgggtcagcgttctacaaacgtggacaggacgcgacgcatgagctcatggcactcgccctgaaggtacaactacccctggtaccctgccaatcggtcacatgcgggatcgaagaacaagcagctcttctctgcgcaggaatgggttcttcggcattgccctgggagcgcgggatcccgaatcgcgaccaactgtatggaaacatgttgccgtgtgttacccaagtcgcgatcctgtgggaacttgtccctgtgttctacactggtctaatgacggcgatcaagataatatcgtaaactcataatgaggctctccacactttttcatacaactactaaccacaattccgttctgcgacccataatatgataccacaggattggtgagaccacctagatgcgcacgcagtagacatcttgtaccactatacaagattggtatggacaaccattgctctag

SEQ ID NO: 518453 - DNA, 198 bp, Homo sapiens
aaaatactcaccacagcatcatcacatgagtttgagacaccgggttttgccatattgccgaggctggtctcagactcctgagctcaaacgatcagctggcctgagcctcccaaagtgctgggattacaggcatgcaccactacgcccagcctgtattagcttttaggatgtgaaacggtctgctcctcatgtctatgg

SEQ ID NO: 518454 - DNA, 252 bp, Homo sapiens
cagtccaacatccggggtgacagggcgagactccatctcaaaaaaaaaagaaaaaaaataaaataaagggagaagtgttttggtatatggacccacaaaattactggcatgtagaaacttttaatttttttaatggattggggaggacatgtccatgtagtctcggaggccggagttcccggtttcgggggatcagtcacggtaaactagctcacctggttcccccaacctcacccaggaggtgggacgggg

SEQ ID NO: 518455 - DNA, 629 bp, Homo sapiens
  misc_feature (75)..(75): n is a, c, g, or t
  misc_feature (118)..(118): n is a, c, g, or t
  misc_feature (268)..(268): n is a, c, g, or t
  misc_feature (299)..(299): n is a, c, g, or t
  misc_feature (314)..(314): n is a, c, g, or t
  misc_feature (319)..(319): n is a, c, g, or t
  misc_feature (328)..(328): n is a, c, g, or t
  misc_feature (331)..(331): n is a, c, g, or t
  misc_feature (337)..(337): n is a, c, g, or t
  misc_feature (341)..(341): n is a, c, g, or t
  misc_feature (347)..(348): n is a, c, g, or t
  misc_feature (356)..(356): n is a, c, g, or t
  misc_feature (384)..(384): n is a, c, g, or t
  misc_feature (389)..(389): n is a, c, g, or t
  misc_feature (392)..(392): n is a, c, g, or t
  misc_feature (397)..(397): n is a, c, g, or t
  misc_feature (416)..(416): n is a, c, g, or t
  misc_feature (421)..(422): n is a, c, g, or t
  misc_feature (428)..(428): n is a, c, g, or t
  misc_feature (432)..(432): n is a, c, g, or t
  misc_feature (435)..(435): n is a, c, g, or t
  misc_feature (438)..(438): n is a, c, g, or t
  misc_feature (440)..(441): n is a, c, g, or t
  misc_feature (446)..(446): n is a, c, g, or t
  misc_feature (451)..(451): n is a, c, g, or t
  misc_feature (457)..(457): n is a, c, g, or t
  misc_feature (465)..(465): n is a, c, g, or t
  misc_feature (470)..(470): n is a, c, g, or t
  misc_feature (473)..(473): n is a, c, g, or t
  misc_feature (475)..(475): n is a, c, g, or t
  misc_feature (478)..(478): n is a, c, g, or t
  misc_feature (495)..(495): n is a, c, g, or t
  misc_feature (497)..(497): n is a, c, g, or t
  misc_feature (503)..(505): n is a, c, g, or t
  misc_feature (510)..(510): n is a, c, g, or t
  misc_feature (526)..(526): n is a, c, g, or t
  misc_feature (529)..(529): n is a, c, g, or t
  misc_feature (533)..(533): n is a, c, g, or t
  misc_feature (540)..(541): n is a, c, g, or t
  misc_feature (544)..(544): n is a, c, g, or t
  misc_feature (546)..(546): n is a, c, g, or t
  misc_feature (551)..(551): n is a, c, g, or t
  misc_feature (554)..(554): n is a, c, g, or t
  misc_feature (557)..(558): n is a, c, g, or t
  misc_feature (563)..(563): n is a, c, g, or t
  misc_feature (571)..(572): n is a, c, g, or t
  misc_feature (577)..(580): n is a, c, g, or t
  misc_feature (582)..(582): n is a, c, g, or t
  misc_feature (584)..(584): n is a, c, g, or t
  misc_feature (593)..(593): n is a, c, g, or t
  misc_feature (599)..(599): n is a, c, g, or t
  misc_feature (603)..(603): n is a, c, g, or t
atggcagtgtttcatgcgatggtggaaatcgaggacttccaatatgacgaggactcggagacgtatttctatccntgcccatgtggagataacttctccatcaccaaggaagatttgnagaatggggaagacgtggcaacgtgtcctagctgctctctcattataaaagtgatttatgacaaagatcagtttgtgtgtggagaaacagtcccagccccttcagccaacaaagaattagttaaatgctgaagaagccttcaggaatccnaatcctgaacatttggaatgagcccagatanaaatatcgaatgcanagctnctggcttcncanagacanccanttatgnntcgtgttntgtaagagtgtggattctttctatcaantgctnatntcatnttcaggaagcaagtccatnacatnncatatntggnttntgngnntaganccttnaattgnaagcattnttaantangnatntaaatttaaaagaaganantttcannncagtnctttctttcccttggnttnatcnttttcanntcntnaaccnaantanntcggnatttgacnncagcnnnntntncctcagtcnttaggntttnttaataaaaccccgattgtatttttg

SEQ ID NO: 518456 - DNA, 131 bp, Homo sapiens
ccgtccgtctcggtgcattgaattcgttctcgtggctactattccattctcatgaatcactgccagtatccctcttggagtgaacgggcgtgtcaatcctgcgttcatttttacccctatctttcggactt

SEQ ID NO: 518457 - DNA, 350 bp, Homo sapiens
  misc_feature (185)..(185): n is a, c, g, or t
cttgcttttaagggggggtggccccccctgtttaaaatgacccttgggaacagtgaacgtagagaattgtttttaacagagtttgtgcccaaagtcaaagtggatcatggtggtttggcaccagggaatttgttttgttggagcctggtttgggctcccccccccatttttttgtccctctgccntgggctattgggaagtggggatgcaaatggccaagctccccccctgggtatttaaaaacggcagacacaacatgtttctccccgggggtcacttgatgcctgcaggccccagggggggcctcaactgattttgacttcaggaaaagtaacccaaaggggccttta

SEQ ID NO: 518458 - DNA, 974 bp, Homo sapiens
gtcatatggttgtgaagcaatgtgttttggtgggttcacacttacgccccaccagagggggtgtgttggtaaggccactacgccccaacatggctcaacaacagcttgggggcggggagattccatacatacaacgcctggtctgatacacgagcgatggcggcgaaccccaatcatgataggcgttgtcgacacaagagtgtgagacacctgtttgcgccgagcgcgggatggagatatccaacgcgggatgacacgactgtactcggcgtttatgtagtaacccactcgtgggttgagtatactctggcatatcttgtcatcttgtgatatataatcttatatatagaggtgttgcttgatatctgtataccacaactgtggccccacaacacttgtgcgaggacaacattcatcatttttcctcgcgccacagactgtgcccctcgaagacacgtaggccgagctctcctctgtaaatggggtgccactgtcgagactcgtgaggatacgtgattctccacgcgcgattataccacatagagggccactgcaatagtatagacaaaacactctttgtgataagaagttctttagtaaacttcttgtggccacactgagaaatgggcctcgtggtttaacactgtccgcgccgcaaatgtgggctgacacttctcctcgcagggtgattaattctgagcgtggaaggacacatatttttcgccctattgacccagccctctttagagcgcttttgacacaagagttatccgattctcagtttattggtgaaaggatgtggatcccttatgtgtggagttaacataccctctccccaaagagaacaatccagagagtttttaattctgtaaaaagaaattgttaaaaccaggaaaatgtttatagggattaaaaaaatatttttttatatttgccaaaattttttctatccaatataaaattatcccttgtga

SEQ ID NO: 518459 - DNA, 585 bp, Homo sapiens
cgctgatatacaaccgcatatgagacccgctttcggtcaaggcgagatattgtttactcctaagagatgtcaaggtgctgtcgttacagggatccgcaagagtcagacgttccatgacacaggagaagttgatcaacctgccaacattgtggttactgtcctagctctcatgccgggacagtttatgcaaccaacggagcctcttcacctgtcgtcggcattgaggtctaacttgttacacacccaggttcatacttattctcacggactcttgttcctcagaagtgaatgcagaccgcctgtattgacacaaagggccattctacacatacctgtgtccctgttcaggagtatactgtaatgtttatgcgaatggaccacattcgcgaatacactatgtctatgcactagaggcgcttaaataaccacttgcgtatcaaagctaacgccgtatgactagcgtgactcgggaggctcaagacttatcacacacattgctatagggtacggagctattgctgagtgtgcccgtattagaagcactgtatcccctgtggcggtactccgagaccctatatgtgtccc

SEQ ID NO: 518460 - DNA, 422 bp, Homo sapiens
ctagggaagcttatgagcctgggagcctactgggtggttatgcttcctccagaatgtagcctggccagccagctgctggggaccctttcagcatcacctttcagttatcaaaggatcagaaagagaacgcaaggcccagaggtggcctcaggaagtagagaaggactgggcctgtgatttgaatgtttgagggctctgctaggagaatgtgagaggaagcccagttaatcctcccaggactccaggagcagggcattatcccaagttgggaaggggattcagaagaactaggcatctaggagtagaggtgacagggtgatttgaaaggaagactttttagatgcaaggaccagcacaagagaaggcgagactcttacacaggggcagttagagaggcaggccagccccaaccaggaagaagt

SEQ ID NO: 518461 - DNA, 413 bp, Homo sapiens
  misc_feature (373)..(373): n is a, c, g, or t
  misc_feature (376)..(376): n is a, c, g, or t
aggatcacgatgtccgtatttcggaggcttgtttgtttctttttattctttttctctaaacttctcttctcgcttcatttcgttcgtttgatcttccatcaccgataccttttcttccagttgatcaaatcagctactgaagcttgtgcattcgtcacgtagttctcatgccatggttttcagctccatcaggtcctttaaggacttctttgcatgggttattctagttatccattcgtctaatctgttttcaaggtttttaacttctttgccatgggttcaaacttcctcctttagctcagagaagtttgattgtctgaagccttcttctctcagctcgtcaaagtcattatccgtccagctttcttccatngtnggtgaggagctggacggacatcgtgatcctcgggtac

SEQ ID NO: 518462 - DNA, 232 bp, Homo sapiens
atttaatttagtatttaaagccaagagaaaggtgttgatcttttggatttttgatagagtgttttttagttgtgttttcccacggctaaatttaagagcttaaatttgataactgtctatttaatcatatgttttcgcctttttttttcgttccagaacagggtctccccatcgttgcccaggctgcgagtgcagaggtgtgatctcggctcactgcaacctcgttaagctt

SEQ ID NO: 518463 - DNA, 115 bp, Homo sapiens
  misc_feature (92)..(92): n is a, c, g, or t
ggcttccctttccagtcacccttggtgccctgtacttcactgtggtcctgaactgaagagctgtgtttttcaggaagacttgtttcttccgngttccgtgtctctggattcaagt

SEQ ID NO: 518464 - DNA, 378 bp, Homo sapiens
ccctcagattacctcaacaacatcagttattttttgtctttttgataaaaagcaattgtaacttgggtgagataatattttattgtggttatcatgcacatttccctgatgattagtgatgtcatgggttttttttttatatacccattaaacacttccgtgtcttcttttgagaaatgtctattgagagcttttgcccattttaattctttttttttttgctatggagttgtttaaattttctatatattctggttattaatctctttgcagatggatagtttgtgaaagagttctctcattctgtaggttattcagaggttattcattctcttcactttgttgattgtttcctttgtggtgcagaggctttttagc

SEQ ID NO: 518465 - DNA, 387 bp, Homo sapiens
cgtcgactgtagagatgtagaagttttgcaccaggaaaagagcccaggagaggctattggtgaaactacagcctgggtacacattggtttgcacgtgtgtgcacttgctatagcatgtgtgtagaaatcagagggcaaccaatgggaatcagtcctcgagtttatgggcaagacaatttggactcagtgcagtataagaaagaagaaagaggaaaggatggaagggagggagggagagagggagagagaaagggagagagagagaaaaaggaaaaaaaaagaaagtttgggaggcaatagcagagacgatggtgaatctgggaggagttagaaggtgtggtcacgccacactaaggtgtatataagcagcgcctttttggtcgacgc

SEQ ID NO: 518466 - DNA, 433 bp, Homo sapiens
gacaagcatgacttctattaaacctataggtaagattattttctacttttaatgcagtatgtttgtttttatcctgacttttgattcattaggccatgtggtttaagtctaaactaagttactctgatattcggaatttcacctttaataattgtctggaaattttcttttaaaggtgatattagaaatctccatttcagtctcagcatttcactagcattgcatgatgctcttgtcttttgcgatttaatattcaaattacatagatattttttattactgcatgtgaagtccttcctcaacttataaagcagttagaacatactaatactttaatacttctataagtgacgagctggcaactgaaaaatgttcatctattatacatatataagcataagtgtgtgtatgcctaaatgtatgtatgtataca

SEQ ID NO: 518467 - DNA, 336 bp, Homo sapiens
aagaaccccccccctccccgggtatgcaaccacaagtggaacccatttgaattccagagagtcccttttgccttcaaacaggggagcacttagtgaatgctgagctaaggagaactgccagggaatcttcaaactttccaacggaactggtttgctctttgattgggttaaaacctgagctggttgtggagcctggaaaaggtggaagagagagaggtcctgagggccccagggctgcgggctggcgaaggaaatggtcacaccccccgcccaccccaggcgaggatcctggagacatgctcctctccctggctccggggaggggtaccgagctcg

SEQ ID NO: 518468 - DNA, 735 bp, Homo sapiens
cacgcgtcgctttttctttaatctccctgtttcttgggctgggggaggggtggggggaacaactggctattcagtaccaaggggccagagtggagggtaggagtgccactctctcttaggtttaggtttttgaccttattcttccttagtttttataaaaggtttatgacagcttggctccccgcgaacactcgcgcagcaatccccagtaccagaagatccatatgagttggctggagaaggtccttaaagccccctaacatcccacagtcttcacgtttcctttccaccttatcattctcgtgtacttaccacagtattattgcacttagattacatatccattcaatctcttactcttcatcccatcagccacctaaataggtcaggtgagggaggcatgggaagaggtgggaggaggggcagaagtgaaggaagaataggaaggatattacctcttctgtcatttttataaagaaacattgtatggtggcagaaatctccctgtaccctatcactgtgagaggcctaattaaatatctatatatatattcaaaaagcaagtgcaaacataggatgtatacaaggtaaaattataagtcaaaagtataaataagctactatataactctgaaatgcaaaaaaaagggacttaagaagtgaacaaagagtaaatgggtgtggaagtgacaacatgggagataagttaaactcagaagaatgatcactagagaa

SEQ ID NO: 518469 - DNA, 160 bp, Homo sapiens
aggactccgtactgtggtgtaccggctgcagatacggaaaggacagtattacatggtagaagctctacaaacaggaactttgaatttacaaccaattaatagacacaacaaaaatgtttattcatcaggtgaataaacaaatatatatcccaccacagta

SEQ ID NO: 518470 - DNA, 121 bp, Homo sapiens
ataagttcttttattagcaatcccttatgcatagactaccttgtgcaaaagagcatacgagtgacattgaaatgctcttatgcaaggtagtctatgcataagtggattgctgggtaccgag

SEQ ID NO: 518471 - DNA, 704 bp, Homo sapiens
gcagaccatatccctatcatgttgttggctcaactgtttttttttttcccctaatagagatggagtatcgctcatgttgctcaggctggtcttgaactcctggggctcaagctatcctcctgcctcagcctcccaaagtacggggattataggtgtgagctactgtacccagccttaaccgtgtttcacagttgattatacttcagtgctgtttcccagcagtggtattattaagggatttaaagttggggttgcatgcctgtaatcccagcatttggggaggccgaggggggcggatcacgaggtcaggagatcgagaccatcgttgactaacacaggtgaaaccccgtctctaataaaaatacgaaaaattagccaggcgtggtggcgggcgccttgtaatcccagctactcgggaagctgaggcaggagaatggtgtgaacccagtgagccgagatcgtgccactgcactccagcctggggcaacagagtgagacttcgtctcaaaaaaaaaaaaaggttgggctggcaagaatcaatgcgggaatatctctatttctagtctttaacattcgaaggctagtgcggacgccaattaaatttcctttttttgccaaaaaaaaacaaacaacaacagaaaagaaaaacaatgtcgcgctctgtttcgggggggacacaagttatataagcacagggtaaacat

SEQ ID NO: 518472 - DNA, 1011 bp, Homo sapiens
tgaagggtgcctgtaatcccagatactcaggaggctgaggcaggagaatcgcttgaacccggaaagtggaggttgcatatgagctgagattgagccattgcactccagcctgggcaacaagagcaaaactccatctcaaaaaaaaaaaaacaaaaaaccgaaagattgcctgagactgggtaattataaaccaaaagaggtttaatggactcacagttatgcacggctggggagaccccaggaaacttacagtcatggcggatggggaaacaaacatatccttctacccatggtggcaggtaggagaagaatgagagctgagtgaagtggatgccccttataaaaacatcagatctcgtgagaacttactatcactacaatacgcatgggggaaccacccaatgattcagttacctgccccaaggtctctgcacaccaacaaatggggattatggcgaccctacaaacacaaggatgagattggggtgggcgacacacggccatattatatcagcctgtaggagctcatagttggtatatcatccttggatccttaacactataacggccaggattgagtctagcaacacgaaaccattcagcatgacagctagactattactgtcatgacccttatgcacaagtagactgctctctggactagcacagtatgcaagaaacgaaacaccctaatgaccgggcccctgggctcagcctgaaagctccaagcattgggaagacgaggcaggccaatcaagtcggtaggagacgagccaacacggcaccaggtgaaaccgactgcatcacaataacagtagcggcaagaggaggggccaaaccgaaacgggagagcgcacagacggagacacagagtgggcactcgtggcaacaccccagctcacgtggacgcaaacacgcacaaaaaaacacgcgcgactacatccgcgccgcacgccacctcacaggaactagcatactctggcatgcgcacatgacgaacagcacatacat

SEQ ID NO: 518473 - DNA, 1038 bp, Homo sapiens
  misc_feature (1038)..(1038): n is a, c, g, or t
cacattcagtgtagcaactacacgcttttcgtatgcattctaaacgtgtcactagctagtgtcagatctaagatctgaatcttataccttagaccatctacgtgtgaccatatggtgattgaatgcaagtggaatcaccatggagattgtctacaaacttttgatgtggtcacgttcagttgagaaaagggagtctgtccagagtcagggccagaactgtgcccaggaccgaaggagacaactaactaaagtagtgagatagattctaagggcaagagcatttttccaagtctgggccatatttcacagccaagaggtgcccaggcctgaggtactcacataaatgcttggttttgctggtgatattaaccagtgcttggaaaaatcttgcataggctatgtctgcatcatttcttaaggctgcttctctctctgagtacgttgccctctgtgctatcaatcatcttatcatcaattattagacaaatcccactggcctacagtcttgcttctgcagcacccactttgtctcctcaggtagtgatgaattagtggctgtcacaaaaggagggaagtagcacccaaattaaattgttcagagaggacatgtacatcttgtataaacttagggagcgaagaaaatgtcggcgcgaaagtgacaagtgaggcagctagttcttcctattccattctcgaccaaccggcccttctaatatgactagggggctggacgctcagaagtcaactaaacccaggtgctgggattagcagcagaataggaggaaccgtggaaacagattcggctgccgagtcatgcgccaagaacatttacccccacgccacgctcgcggcgtcagagcaagcaggcgccccaaaactgacaacgccgaaacctccccccagcacacaagagaagacaggccggaacgaccgccacacacccacatctacatgacggcacagcccggaaaccgaccacggcaagcacaacacacgcacagaaccacaacccaaggcggtgtcgcagctctgcgcccn

SEQ ID NO: 518474 - DNA, 774 bp, Homo sapiens
ctcccggtctgcgatggggttgcgactgggggaacaatccccaagaggcatgaatctggtgaaggggccgaagaaaggttgagaaggtcgacaaagatgctgatatgagtggactcaatggaactatgtactctaagtcaggaaatattaagacgaacaatagttgcctgttgaactgtagcagactttataacaaagatgccgtctgttgaattgtcgtcttggacaaatctgcagaaaaggctctgtgggaaggcagtcactctcaacagttgaaaaagacacttaacgaatgtgacagaggcgtgaagcatttctgtatagtcctgtcctgggaaggggcagtaaaaggataactactaaaggtgacaagcgaacgactgaccgtccagcgggcgcgtttcatctgccccgatggatgggcctggtagatgaacggtcgacacaggttctgcattccattcggtgcgtgcggcctgtgtgttgactgaagcgagccttgaacagagataaaagcggaagcttggccacacgtgtgcgggcgtgccttccaggaggcactgatgtcatcagtggctcaagggcatccacaggaggcatgtggacgtgcgtgcatgacagaggatgcgaggagaagaacggctgagagctgaacgcgggaagaagataactgaaggaatagccgaaggcagcagagtctgcttcgaaacctagatgtcacggaggaaagccccagggcccactcaaacagttaagacagggaagcctgaagat

SEQ ID NO: 518475 - DNA, 629 bp, Homo sapiens
  misc_feature (14)..(14): n is a, c, g, or t
  misc_feature (32)..(32): n is a, c, g, or t
  misc_feature (36)..(36): n is a, c, g, or t
  misc_feature (45)..(45): n is a, c, g, or t
  misc_feature (49)..(50): n is a, c, g, or t
  misc_feature (63)..(63): n is a, c, g, or t
  misc_feature (69)..(69): n is a, c, g, or t
  misc_feature (75)..(75): n is a, c, g, or t
  misc_feature (78)..(78): n is a, c, g, or t
  misc_feature (106)..(106): n is a, c, g, or t
  misc_feature (135)..(135): n is a, c, g, or t
  misc_feature (148)..(148): n is a, c, g, or t
  misc_feature (165)..(165): n is a, c, g, or t
  misc_feature (185)..(185): n is a, c, g, or t
  misc_feature (188)..(188): n is a, c, g, or t
  misc_feature (194)..(194): n is a, c, g, or t
  misc_feature (203)..(203): n is a, c, g, or t
  misc_feature (210)..(210): n is a, c, g, or t
  misc_feature (221)..(221): n is a, c, g, or t
  misc_feature (224)..(224): n is a, c, g, or t
  misc_feature (228)..(228): n is a, c, g, or t
  misc_feature (230)..(230): n is a, c, g, or t
  misc_feature (236)..(236): n is a, c, g, or t
  misc_feature (240)..(240): n is a, c, g, or t
  misc_feature (243)..(243): n is a, c, g, or t
  misc_feature (247)..(247): n is a, c, g, or t
  misc_feature (251)..(251): n is a, c, g, or t
  misc_feature (265)..(265): n is a, c, g, or t
  misc_feature (268)..(268): n is a, c, g, or t
  misc_feature (280)..(280): n is a, c, g, or t
  misc_feature (283)..(283): n is a, c, g, or t
  misc_feature (285)..(285): n is a, c, g, or t
  misc_feature (295)..(295): n is a, c, g, or t
  misc_feature (301)..(301): n is a, c, g, or t
  misc_feature (304)..(304): n is a, c, g, or t
  misc_feature (319)..(320): n is a, c, g, or t
  misc_feature (325)..(325): n is a, c, g, or t
  misc_feature (331)..(331): n is a, c, g, or t
  misc_feature (340)..(340): n is a, c, g, or t
  misc_feature (350)..(350): n is a, c, g, or t
  misc_feature (371)..(371): n is a, c, g, or t
  misc_feature (386)..(386): n is a, c, g, or t
  misc_feature (389)..(389): n is a, c, g, or t
  misc_feature (436)..(436): n is a, c, g, or t
  misc_feature (449)..(449): n is a, c, g, or t
  misc_feature (457)..(457): n is a, c, g, or t
  misc_feature (460)..(460): n is a, c, g, or t
  misc_feature (484)..(484): n is a, c, g, or t
  misc_feature (490)..(490): n is a, c, g, or t
  misc_feature (511)..(511): n is a, c, g, or t
  misc_feature (517)..(517): n is a, c, g, or t
  misc_feature (523)..(523): n is a, c, g, or t
  misc_feature (626)..(626): n is a, c, g, or t
tggggccaattttnaatagttttttttaaganattncattttccncttnnaatacagtgtttntaaagngcaatnttntttccttcccctgtgcatttgttccatnttcaagttttgggaatgcccagtaacttnctatagcagcttnactttttaaaactgccncagaatttgctacgaatttnggnccttcnaatgttttnaatgtgngggacaatgcnacntctncncttggntggnttnatcnaccncttcaatggggggnccngggggagccccnccngnggggggggcncccccnccngggaatccccccggnnttccncctggnatgcctccngccctctggnacagcttgggggtggtggggntgcaaactttctccngcnctttctgttggtgttcaaattcttccttctcagcagtttgattcttntcaagccagttgntaatttcnttncacttgtccagaatcttctgtttntcctcntcgttaatcttgccttggagnttctcntcttcnacagttgctttcatgttgaagggatagggctcaagtgaattcttgggtgacaccttgtccctctgcttctcatcttcagctttgtacttctcagcttcctggncca

SEQ ID NO: 518476 - DNA, 114 bp, Homo sapiens
gcagatgcaaggcaaccccactatggtgtccctgccacacgagggtccagccgcctctgccgcctggggccctcacgtgcgctgctcagcgctggttcgcgggatggatcgtcg

SEQ ID NO: 518477 - DNA, 192 bp, Homo sapiens
gggccaagccccgagggcccctgcaagcccttttcttcctgttcctccccagcctttaccccaaagccctcctgccccccaaaaaagccccttaggctggccgagcccccctgtttccccaggggggttgacctggcccagttgggtccccagggcccgcccatggaattaaatagcccgggcccccctcca

SEQ ID NO: 518478 - DNA, 682 bp, Homo sapiens
  misc_feature (19)..(19): n is a, c, g, or t
  misc_feature (61)..(61): n is a, c, g, or t
  misc_feature (73)..(74): n is a, c, g, or t
  misc_feature (86)..(86): n is a, c, g, or t
  misc_feature (88)..(88): n is a, c, g, or t
  misc_feature (91)..(91): n is a, c, g, or t
  misc_feature (93)..(93): n is a, c, g, or t
  misc_feature (97)..(97): n is a, c, g, or t
  misc_feature (101)..(101): n is a, c, g, or t
  misc_feature (106)..(106): n is a, c, g, or t
  misc_feature (112)..(112): n is a, c, g, or t
  misc_feature (133)..(134): n is a, c, g, or t
  misc_feature (147)..(148): n is a, c, g, or t
  misc_feature (154)..(154): n is a, c, g, or t
  misc_feature (166)..(166): n is a, c, g, or t
  misc_feature (204)..(204): n is a, c, g, or t
  misc_feature (208)..(208): n is a, c, g, or t
  misc_feature (210)..(210): n is a, c, g, or t
  misc_feature (227)..(227): n is a, c, g, or t
  misc_feature (232)..(232): n is a, c, g, or t
  misc_feature (235)..(235): n is a, c, g, or t
  misc_feature (281)..(281): n is a, c, g, or t
  misc_feature (313)..(313): n is a, c, g, or t
  misc_feature (332)..(332): n is a, c, g, or t
  misc_feature (336)..(336): n is a, c, g, or t
  misc_feature (392)..(392): n is a, c, g, or t
  misc_feature (463)..(463): n is a, c, g, or t
  misc_feature (502)..(502): n is a, c, g, or t
  misc_feature (523)..(523): n is a, c, g, or t
  misc_feature (578)..(578): n is a, c, g, or t
  misc_feature (585)..(585): n is a, c, g, or t
  misc_feature (607)..(607): n is a, c, g, or t
  misc_feature (682)..(682): n is a, c, g, or t
cttaagtgccgtgtaaccngggccaggaactcgctcggagtcttcttcacagctggaactnaattatacatanntttgtagtgttntntananaatntttnatcancttctnatgctgttctttctgttattnnatataaatatttnntttttngttattatttgngtttttttttgcggaggatgaggaaatgtacagttttntttntntttaatatttttatatncagcncangtaaaaagcagtatctattggaagctaactaggctatttctatttntcccatgatattattgtggttacgtaggatanttggcaccataaaacagtnacanaatgatagagaaacggtttacaaaattcttaaaagtgtacacccaggctagctatnaacttcacattcagttcttaatattacacagaagaacggcatgggagttacggcccgctggtgcagacgtnctgtggggccgattttacccacgatggcgaggccatgtnttttttttacgaatttgtgtnttgatggacacacagctgaactcctagactccaatgccgcgtgcggatgggactntcctgtncgttcatactggaaagtatatntagcataagtcttggtaagatttataaattatttttaaaaagtatatatttatatatatttatatatatataaan

SEQ ID NO: 518479 - DNA, 901 bp, Homo sapiens
  misc_feature (136)..(136): n is a, c, g, or t
  misc_feature (234)..(234): n is a, c, g, or t
  misc_feature (242)..(242): n is a, c, g, or t
  misc_feature (291)..(291): n is a, c, g, or t
tgggcagttaagatccagctcagtctggggattgatgagaactcgtgcatgttctgaggactcagagtggttcatagggtggctaagaggatctctacatctaagtaggctagctccgaggcctcactatgtgacnggaggtgttccacatgttgcaagagagatgtaagtcccatatggtaccaaactattttcaagggcctccaacatgtgtcactattgtggctattgtcnccatgtgncaaaggaaaatcaccatggccaaacccttaaacctaacaagtgggcaanagtcaccaatggcagaggggtatactagtaccaggaggcattgaacaaatgtgttttgttatttattaaataccattcaacacttgtaacttaggtttcctccttctgtagaaaaatgatttacccatcttatgtggctaatataacacacaagtttgttgtgcagcttttgtgggcaaattacaaagcgtaattaatggtataggtgtgtcgtgtgaacacatacggttttctggcctaggtcattgtgctagagtttataattagctttatagtaaactgcaaatttacttaccaaagtggttgaactgttttacgttcccatatatgagttcagttgctccacatcttcaccagcacttgatattgtcaggcttgttgaagcgcattgggcaaagggtgtgttaatggcgatctaaataagcagttacatgtttcccatgtggtgtaaattcaatgcatgacaatgtgtggggcctttcgggcttttaccaccgttttcttggcgaggcgggcgagggctgcggctttaaaaaaggggcgggcagggggatatattaagccgggatagtagaaaaaaccgggggggttaaagcagcacagcttttgc

SEQ ID NO: 518480 - DNA, 187 bp, Homo sapiens
  misc_feature (132)..(132): n is a, c, g, or t
  misc_feature (141)..(141): n is a, c, g, or t
ccagggcaacctccaccttcaagggcaacttctactctgagaaatatcccttggatgtttatggagatgagtaacccaccattccatctagtttacctggaccctctcaacctcgtgcttctttccatacgngaaatcctnattgaacgaacgacgaagactagacagtttagagaagagagacaaa

SEQ ID NO: 518481 - DNA, 158 bp, Homo sapiens
tccacccaccccagtctcccaagtatctggaattacaggcttgacgcaccacacccagctaagggaagtcttagtgtaatgacagaatgagctcagaagcagcagtcatcaagtgctacagaaaagagatacataaagcatgggtgggtggagagcgg

SEQ ID NO: 518482 - DNA, 336 bp, Homo sapiens
ccccatccatccttcccccccttttcccccccaggtaaagggccaattttagcccccattgagtcccccaataagtttccccagggggggggtttgctaaaattgtccaccggttgaccagtttggtttccccccccccgctagttgagcccaaaaaaagacaaaaaactttttcatggtttttgaaacaaaaagcttatttcggggccaagggctttaaaaaaatttgttttttgtttttttcaccaaaccccctagttttcccctaaaagaaattgtaaaaattaaagtaattttgaaaatgttttgccaaaagtaaaattaaagggccctcca

SEQ ID NO: 518483 - DNA, 973 bp, Homo sapiens
aggctgttccggcatgaggcgagtgacgctggccgccaacgagggtatactgtagctgggactctcgccctcagtctcgctctccgtgctgcgtgttacctgccccggttttccctgtgagttgacctgctcctgggccgcgggccgcacaatggcaggggccgctccgaccacggtcttcgtggcaggcggtgatctggcccgccggagttcatgggaagaccacagtacttgcctgtggcatgatgtgagttcctgcgctgcgctggtgcctggcagctgtggccggtggtgaaacctggaacccaggaccaacgcagagggctagcctgtcacgcagtgtagccagtgagcactgtgggcagcagactggatggggcttggtgcgcaagatgattggcacgctgctgacgcaatggggcccaacaggacgggcacctgactcttacctgcaatggcagtaaccatgggaaagccaaaccttggaacatgggcctgacgttgccaaaggactcggaagccacacatccggacgtgcacaacataacatataccatctctccgaacctggccactaggggcccaagggatgtggcatgctccatggacaacggacagtcaaacgggcagaccatttggcacgccaaagcaaatcttatctaccgcacaaattgggcagcaatgatggggaacacattcagcggccttggtcatggcacaggaacaacgcttccgatgggaacttacttccacagtaacgtttgcaacagggaatccccgtgaggacaaaagggttgcacattattcaaagataccaatgggataggaaacccaatccaccatggaggaccaacaccaatttggaatagcaccacgttgaggcaccattggcccccacacaactacaacaccatcacattaatacccatagattggagacatacgatagagagcacataaatggggaacagcg

SEQ ID NO: 518484 - DNA, 125 bp, Homo sapiens
  misc_feature (118)..(118): n is a, c, g, or t
aattggctccaagtagacaggccagaccctcaggctgcccgctcctctagtgttcacttgccgacagaactgctgagcgcccagtggtctagacaagcccagtctccattcccaccgnctcccgg

SEQ ID NO: 518485 - DNA, 149 bp, Homo sapiens
tcactccagtgtgcgcagctgctcactcagtgtggcgagctgctaaactcagtgtgcgagctgcaccctgatgcgggcgtgctgctactacttgtgggaggagtctccgagggtctctgcgggccgccgccggaggttggggggcgggg

SEQ ID NO: 518486 - DNA, 136 bp, Homo sapiens
taggttgggaatgagtgtcactgacaagtgttcgcccattccggtaatcatatctacgccctcctaacagagggcctcagtgagggctctacccacccgacgggggccattctaggggttgccacagtgatgggag

SEQ ID NO: 518487 - DNA, 598 bp, Homo sapiens
cgactggaaagccacttgaggtgtcatgcacactgagtaggttagcagatgagaactttaaggaatatactgagtctcctccttcagaatagataaggttattcagttggacactatctgttccggttcgcttaacccctactgggcgtcgcatgaaaaatctgcagccgcatgtaatagctctacgaagaaattatcttccagcattaaaagtggaatataacacatctgcacatcaatcatcatttagaattcagatttacagaatacagatccaaaatcagatacatggtgctgtatttccctttgtgttttatcctgttaaacctccaaagtcggtcaccatggattcagcaccaaagccctttacagatgtcagtattgtcatgagatctgcaggacattcccagatatcacgtattaagtatttcaaagtattgattcaagaaatggatctcaggttagatcttgggttaatctatgctttaacagaccttatgacagaagctgaggtgactgaaaatacagaggttgagctttttcataaagatatagaagctttcaaagaagcatataaaacaggctcattagtagatca

SEQ ID NO: 518488 - DNA, 164 bp, Homo sapiens
gctattactctcactctctctctctctttcttttgtggagacagggctcgctctgttgcccaggctggaatgagtgcagtggtgtgatcatagctcattgcagccttgaactgctggactcaagtgatcctcctaccttggactcccaaagcactgggaatacg

SEQ ID NO: 518489 - DNA, 1526 bp, Homo sapiens
  misc_feature (7)..(7): n is a, c, g, or t
  misc_feature (1168)..(1168): n is a, c, g, or t
  misc_feature (1188)..(1188): n is a, c, g, or t
  misc_feature (1196)..(1196): n is a, c, g, or t
  misc_feature (1202)..(1202): n is a, c, g, or t
  misc_feature (1231)..(1231): n is a, c, g, or t
  misc_feature (1266)..(1266): n is a, c, g, or t
  misc_feature (1273)..(1273): n is a, c, g, or t
  misc_feature (1281)..(1281): n is a, c, g, or t
  misc_feature (1296)..(1296): n is a, c, g, or t
  misc_feature (1311)..(1311): n is a, c, g, or t
  misc_feature (1347)..(1347): n is a, c, g, or t
  misc_feature (1356)..(1356): n is a, c, g, or t
  misc_feature (1381)..(1381): n is a, c, g, or t
  misc_feature (1410)..(1410): n is a, c, g, or t
  misc_feature (1421)..(1421): n is a, c, g, or t
  misc_feature (1491)..(1491): n is a, c, g, or t
  misc_feature (1502)..(1502): n is a, c, g, or t
gcacggngctttcttcaacctcaccatagccttctcactatcacttctagggacacttatatttcgctctcacctaatatccacattactatgcctggaaggcatagtattatccttatttattataacttcagtaacttccctaaactccaactccataagctccataccaatccccatcaccatcttagttttcgcagcctgcgaagcagctgtaggactagccctactagtaaaagtttcaaacacgtacggaacagattacgtccaaaatctcaacctactacaatgctaaaaattattcttccctcactaatgctactaccactaacctgactatcaagccctaaaaaaacctgaacaaacgtaacctcatatagttttctaattagtttaaccagcctaacacttctatgacaaaccgacgaaaattataaaaacttttcaaatatattctcctcagaccccctatccacaccattaattattttaacagcctgattactgccactaatattaatagctagccaaaaccacctaaaaaaagataataacgtactacaaaaactctacatctcaatactaatcagcttacaaattctcctaatcataaccttttcagcaactgaactaattatattttatattttatttgaagcaaccttaatcccaacacttattattattacccgatgagggaaccaaactgaacgcctaaacgcagggatttatttcctattttataccctaatcggttctattccactgctaattgccctcatcttaatccaaaaccatgtaggaaccctaaacctcataattttatcattcacaacacacaccttagacgcttcatgatctaacaacttactatggttggcatgcataatagcatttcttattaaaataccattatatggagttcacctatgactaccaaaagcccatgttgaagctccaattgctgggtcaataattctagcagctattcttctaaaattaggtagttacggaataattcgcatctccattattctagacccactaacaaaatatatagcataccccttcatccttctctccctatgaggaataattataactagctcaatctgcttacgccaaacagatttaaaatcactaatcgcctactcctcagttaggccanataagcacttggtaattggnatcaatcntaatcnaaactccatggaaggcttcatagggaggnaaccattcctaattaatcggcacatgggcctccanattcatnaactcccnaattctggcctaggnaaactcccaactaangaacgggattccaaggccggaacaataattcatggnccgaggacnttcaaaatgggctttcccacttatngcccaatggatgactggatagcaagtctngctaatctagntctaccccttcaatcaatctaataggggaattattcattaccatatcattatttctggatcaactttacnattatcttatnggattacattattattccgggata

SEQ ID NO: 518490 - DNA, 137 bp, Homo sapiens
  misc_feature (54)..(54): n is a, c, g, or t
ggagagaaaagttcctgagtgacagagaaaaagaacaaaaagctgcagaaggcntcagcagaggccactgctggccctgaggctgcaccaagtgacgaagaaccggctccaagcattcgtcacagcactaatttaaa

SEQ ID NO: 518491 - DNA, 112 bp, Homo sapiens
tgcctcgagtgccggaatcagcaggacgaatcgggtcccagatgtgggcagactgttccgagggtcgcaactctggttcagcgataagattagcaggtatatcaccagagtc

SEQ ID NO: 518492 - DNA, 607 bp, Homo sapiens
  misc_feature (255)..(255): n is a, c, g, or t
  misc_feature (468)..(468): n is a, c, g, or t
ctcctagcgcaggggggggggttttgtgaaaggccccccgcggccgcacaaggtttgttattcaagggcgccccctcttgggcaaaacggtgaaaggcgcccggcgcttttgcccgcacatcctttttgggctttttcttgtgcggggcattcgggttatgactcccccttcccagggggaggcggtttttgccggccccaaaaggggggggaaaagggttttctcccggggtttttccctttcccccccccccnccgccaaagggggttttttttggccccaaaaaaacgggggcttttcaaaatttggttaaaccccccccccctttccccaaaaagggggggggggggggggggggggggttttttaaaaaaaagcttttttttttaccccccggtttgccggggggccccccccccccttttttttcccccctaaaaaaacccgggggggttcccccccccggnttttttaatttgggcggggggggggaaacttttttcccccggaaaccccttttccccttgggccctttttgggggcccttttaaacaatttttttcaaaaaaaagggggggggcggggcggggttttccggggttttta

SEQ ID NO: 518493 - DNA, 141 bp, Homo sapiens
tgattactcaaacccggctgaggcacggagaatcttgaatccaggaggcagaggtatgcagtgagccaagaacctcctagagaatcatggtgcaggcaataacatgagatagcatattctcaaagctggttttagccagca

SEQ ID NO: 518494 - DNA, 565 bp, Homo sapiens
gggccccgggggtttggtgcccccaattttcttttacccgaaaaaatcaggggaagggggggccccccccccccccctcccttttatattgtttttcccccccaggggggtggggggagagaattttcctctcctttttttttccccccccaaaagagggtttgtgggtgtgggggggggcgggcccctaaaccccccccgcccccttttggcccctttttataaagtatggtgctcccgggggggggggggggatgggggggccctggaaaataaaaccttccccccgccctttggggttttgtaaggagtttttccaaaccaaatccgggggcccggggggggttggggaaaaaaacaaatttaggggtagggctttgttttcccccccggggcggggggaaaaaacccggaccggtgtctttttttttttttttataaaaaaaaaaaatgggggccggggggggccccccccccccccccttttttaacaagggtttcttgggccggggaaaatttgccgtttttggaatttttaaccttttaaattaattgggaaagggga

SEQ ID NO: 518495 - DNA, 135 bp, Homo sapiens
  misc_feature (57)..(57): n is a, c, g, or t
ctatccccactgcctgtggtgtcactgcctgtctccaccgcctgaggaatctccctntgtcccacctgctgaggagtctcccacgtcccctttatttttttgagatctagggctggagtgcagttgagcggtctg

SEQ ID NO: 518496 - DNA, 426 bp, Homo sapiens
ggagaattgcttgaacctgggaggtggaggctgcagtgagccaagacggcaccactgcactccagccaggcgaccgagcaagactctgtctgaaaaaaaaaaaaaaaattatgaaagagggtgggtgcggtggctcatgtctggaatcccagcgttttgagaggcaaaggagcgaggatcactttagttcaggagtgctagaccaacctgggcaacatagtgagaccctgtctctaccaaaaattaaattatttgggcatgatggcacatgtctgtagtcccggctgcttaggaggctgaggtgggaggatcacttgaggttttagtcatggaagtctcttgccctggaggtcgaggctgcagtgacccatggtcgtgccactgcactctagcctgggcagcaaagccagacactgtctcaaatta

SEQ ID NO: 518497 - DNA, 300 bp, Homo sapiens
  misc_feature (182)..(182): n is a, c, g, or t
ttggagggtaggattttgggaggaccaccaggggatccccccttttatcccatattggctcaccagcccaagagtgttcaaagcttggaggactgctatcgggaagccgggcaactccttcccaaaacagggtttgggtccaaagggagtgctcacgggggtcctgcctgcagcaccagagntagcccatatggcatttccatttgagttggaaaaaaggacccctttccctatcactttacctccctttggtggatggtaaacaccccagcctgggtgacagagcaaaattccgtttca

SEQ ID NO: 518498 - DNA, 216 bp, Homo sapiens
atcccccagtcaagaatggcatatcagcaccaataatagcatccaaacaattgactctacccggctctgttccttccaattaggagcatctagtctctcttatatagtaatgttcttcttctttgactcagttcaagtagttattacaatatgtacagcagttcttgcaacgatagcttttgcttttcttctcctcctgatatgccattcttgctg

SEQ ID NO: 518499 - DNA, 930 bp, Homo sapiens
tcttccggtaccgatcgggtgcgggtcgcctccagagatcctgtgccttaaacgtagagtccatattagccaaggtgagaaggtaaggctcacgtctctgagtgaggcgtccatgtcggcaaaggtggagtgggagttttgaaaagatcccaatagtttacttgcttgggaaactctttccataccagggcgtatgttgacagttgtttggtatatattataatgtgattaatgagttgtgtgattgacatttgccaaataaaggtgggttcgcctgatcttaggcatggtggaatgttggaagtagtgtagagatctggaatagtggcaaatggttggcgtaggcgaggggtatgttgtggtgagtcgctggaacattaggatttgagggactgcgttggggataaattattctaatgacggaattgcagaagacgtccgtgtgtggagggttcatgcaaaatatttggactggttcactgtgctcgatgtgtggcgaaatagatctactcagatagtgttcctatgtacattcgatgacgtacattattggatcctctcttgtgttacgcaccacctcatataggggccgctttggctggtcctaaaagacctgcttttggaaaatggcaagaacaggtgtatattttcccttaacaaaatcctcaaattagagaacattgttccaaaagaaagggtggcggcaatggaaatccagatagatttataggagaacttgatatgacgtggcagcatcattcaagttccccacacagaattcaggggccttgaggtggacctaattcggttgccttttaaaaggccggaggaaaaggtgttgaactatttagcggatacaattgtttacccagaagaaaaaaaaatatggggggcgcaagattaaaaaatatggggggggaagaaataatt

SEQ ID NO: 518500 - DNA, 447 bp, Homo sapiens
  misc_feature (328)..(328): n is a, c, g, or t
  misc_feature (382)..(382): n is a, c, g, or t
caatgggtgtaggggtaggagattttgcatttgattccagccaagttatgtccctactgaaataaaacccaaaaatattaatgctgttcagattataacagaatccagagtgtttacaacatatccctaatgtcctgtgttcaatacaaaattacttgacctcccaaagtgctgcaattacaggtgtcggccaccgcgcctggccatgttgttagtataagtggatttgaatccctgctttattacatataagcttgaacatgcccccttatagcgctatgtcttagtttcctcaactgggaaatgatgttcatcatatgttagactnggcctggcgtgtagtagccatctaacaaactcattcatttattgaataaatgantcaaccccagtggggcactaacagaaacagggaaaacaatcatgaacaaaaaatcaaagaaaaaa

SEQ ID NO: 518501 - DNA, 883 bp, Homo sapiens
  misc_feature (530)..(530): n is a, c, g, or t
  misc_feature (552)..(552): n is a, c, g, or t
  misc_feature (554)..(554): n is a, c, g, or t
  misc_feature (578)..(578): n is a, c, g, or t
catatagtgaggagttactaggacacaatgtgatcacttattttgaaaaaaaaatcagtgaaagacttcgacatttgtgttcactgtgtaaacactacccagaccaacagataggacattaggatacgattttaggttgatgtgtcttagtagataggctaatgctgggggggaaaaagttacaaagatgaggtgcgagaaagaatgagcctttctgaagagttggtggtaggcagggtgtaatgtagccgcgttgggaggccaggtaaatattttgtatttaacttgccccgtagtcgttagtagttacttttctttcttgtcttctggtggcagtgttgctttaaaatgctgactgcagcttcccatggatgaagtgattcttcttagtaacatattctcatgatccagcgaataggctgtactttgaaaccttttattcaaaaagagaagaaagacaaactctagaattatgacgcagatttaatggtaaagcccagatgagttttggaaaggttagactttttacnaggacaataaagtttgagagtnanccacgtcgatgcttcattacatancatctcttgattattatttttaaaacgtttggggaaaaggtaatttaataatatatcattaccatttgggagattatttctttggaagaaacaagctaaatttactctgtaagaaaggcatatacatattcacactcaagatagttgattttatgctacagcatagactgttgtagaaagacagcgctttggtaatgtttgcaccccttccgaagttaagattggtgtgccatcttctacacgggctgttgtgaattggctctgccatttcacctcctcagatgtacctcaggcatgacagctga

SEQ ID NO: 518502 - DNA, 109 bp, Homo sapiens
agagttcatgagcctgcagtgagctatgattgcaccactgcactgtagcctgggtgacagaccctgaccctgtctggaaagaaagaaagacagagaggggcggagcagg

SEQ ID NO: 518503 - DNA, 695 bp, Homo sapiens
tgtataaagggcaaaaagtcgtgaacccttgttttctgaaatctaatcagttatgtatggtttctgaagggtaattttattttggcaataggtaagaggaaacctgtgttgttctgtttttcctgagggctagatgcatttcttgtctcacactcttaatgacttgttaacatttatactgagcatccatagatatattcctagaacgtactgacgaacgaattattgcttgattggaccattaatgtcatgtccacttttaatgtaatataagttgagatgacctgttctctggttggaacagatactctactttgtttgttcttgcaactctttaagaatacatagatctagaaattcattagcttgacccctcaaagtaacttttaagtagacagattacagcttgttcttctcaggtgaatatatctgctagaaggaaatagctgggaacgaatgtgactggatcagggaaattcattatttctatatgtggaaacttttcgcttcgaagtatggtatctttttaaatctaaagtgttcatatttgttcctgaagaaaccactgtgtaaaactcagatttaaattctgaatggaatactttcaaagaactatgaagatgattgaagctctaatttatattagtcacctataagatgtgcttcatatgtgtccataagtaaattgatactga

SEQ ID NO: 518504 - DNA, 165 bp, Homo sapiens
gctcggtaccggtcaagcatctcctgcctcagcctcccggctaattttttttgtatttttagtagaggtggggtttcaccatggtctcgatctcctgaccttgtgagccaccgcacctggctgctaacacttatttagtgcctactgtgaaccagtcagcattaa

SEQ ID NO: 518505 - DNA, 285 bp, Homo sapiens
  misc_feature (8)..(8): n is a, c, g, or t
  misc_feature (23)..(23): n is a, c, g, or t
  misc_feature (30)..(30): n is a, c, g, or t
  misc_feature (37)..(37): n is a, c, g, or t
  misc_feature (40)..(41): n is a, c, g, or t
  misc_feature (45)..(45): n is a, c, g, or t
  misc_feature (50)..(52): n is a, c, g, or t
  misc_feature (87)..(87): n is a, c, g, or t
  misc_feature (123)..(123): n is a, c, g, or t
  misc_feature (125)..(125): n is a, c, g, or t
  misc_feature (131)..(131): n is a, c, g, or t
  misc_feature (135)..(135): n is a, c, g, or t
  misc_feature (141)..(141): n is a, c, g, or t
  misc_feature (143)..(143): n is a, c, g, or t
  misc_feature (161)..(161): n is a, c, g, or t
  misc_feature (165)..(165): n is a, c, g, or t
  misc_feature (171)..(171): n is a, c, g, or t
  misc_feature (188)..(188): n is a, c, g, or t
  misc_feature (198)..(198): n is a, c, g, or t
  misc_feature (228)..(228): n is a, c, g, or t
  misc_feature (238)..(238): n is a, c, g, or t
  misc_feature (242)..(242): n is a, c, g, or t
  misc_feature (247)..(247): n is a, c, g, or t
  misc_feature (264)..(265): n is a, c, g, or t
  misc_feature (284)..(284): n is a, c, g, or t
ggcagttngagggggcggaagtnggagcgnacgtctnganntcantcttnnnggagggggaaggaaagggaggcggggcaggtctcnccgcgagcccccaccccatcaccccgccgcccccancncacganctcncgcganancagcaagccacccggccnccgncagcgnaggggtctcacacctcntgtctctctnctcaaggacgacgccatcgtgtgcgcgcgnctgccggccnctgncaccngcagtagtcaaggcagnnctcccggagctgcccagcng

SEQ ID NO: 518506 - DNA, 362 bp, Homo sapiens
aatttttttttttcccctggggggcccccccccgcccccaaattgggggacgggggatttttccggggggggttttttttcccccccaaaaaaaacccctttccggggggtgggggcccccccttttcccccccccccgggtgtttccctttcccaggcccttttttggggggggggggggtttttttccccctcccccctttggcccggaaggggggtaccccttttttaataggggggtttttgggtttttttttttttttaaaaaaaaaatttttttttcggggcccctttttttttttttttttttttttcccgggggtttttttctaaaaagtttcccccggggggccccaggccca

SEQ ID NO: 518507 - DNA, 139 bp, Homo sapiens
gtacaactacgcaaaggccccaacgattgtggcccctatgtggctactacaacccttcgctgacgccataaaactcttcaccaaagagcccctaaaacccgccacatccactcattcagcctctggacacgaatgttca

SEQ ID NO: 518508 - DNA, 440 bp, Homo sapiens
agcggtgttgtctgttcgacacaggcttggggccgacgggggagacggagccccaggagtgttgaagcctggaaatcccctccctccgggtgtggatctccatgacgcagaacatagagccaggctggtgtgtagcaagcatgagggggatggcatagcacgacacaccaaggtatggacgctacgcacaaagagcctaagaacataagcattccagtcgccagtaccccgcgtcagacgacacaacacccatacggttaacacgcacaacatgagacccgatgggctcccaaggggcgtgcacataccgtggagcaggcttccgaatacatggacgagcaattagggacacgcttacagggccagaacaaaagacacaggcacgccttgtcggccacctggacgcgtagtatgcccgctaccgtctgggggctttgggg

SEQ ID NO: 518509 - DNA, 699 bp, Homo sapiens
taaccgatagagagacttagctaaaatataagatcaggctctgccaaatactgttatacatgatttattgtgtgttacatagttttattcggttgattttgctatacccctgttgcactttttctcttccacttccaacttatgagaagagaagaatgagttggtgtcagggattgtccccccggcgccctccggtcactgctaatatagtttacctcctcttacaagactgctttggctctcattaataacagactgtccttttgagaaggtctgatgaaggatattgaaggaagaagagaatgactctgtctagttcaaaggtggcagtggagactgtggagggaatattttttaaagcactactcatatcctttaaactaaattttgccaaagcccgagacaacattaaggagaaattgtaccttaagttagtaattccaaatctatctgagttgtatacccatcaaagacaatacagttattaacatagatgaaggtatgctataggcactcattcattatctctatattgaataggttgaaagataactgtagtcaggtgaaaggcattcattatttttaagctgaaaggggatcttgaaaacccagtgaaaacctctacaacaatcttcaggaagcctgtatcttgggattcactaataataggccagaacaagggcagcttcattcctcatc

SEQ ID NO: 518510 - DNA, 789 bp, Homo sapiens
tattgttcgcaagcgggtttgcgccaggaacacaggtgtcgtgaaaatacccctaaaagccaaaatggaaaggaaaagatcatatcaacattgtcgtcatgtggacacgtagatcgggcagtccaccattactgccatctgatctataaatgcggtgcttcgacaaaagaaccattgaaaaacttcgcgaaggaggctgctgagatgggaaagggctccttcaagtatgcctgggtctgtgataacctgaacactgagcgtgaccgtgtatcaccatgatatctccttgtggaaatttgagaccagcaagtactatgtgcctatcattgatgccccaggacacagagatttatcaaaaactatgataacagggacatctcaggctgactgtgctgtcctgatggtgtgctagctggtgtgggactggaagctggtatctccaagaatgggcagacccgagaagcatgccctttctggttaacacactgggtggtgcaaccacactaaattggtcgggtgttacccacacagttgggattccccacttggaggccaaccctaacaggccaggacaagatgatactgagggcaacgtggtccacggacagtccagcacttaccttaaggacaacatgtgggtacaaacccccggaacgaaagtaggccattttgtgcccaattttctgggtgggcactggttgccaaccttggctggccgccagtggcaaccatgccttggttcacaggctggacacgtctcccgaaggttgcactccgggcacacggtgg

SEQ ID NO: 518511 - DNA, 331 bp, Homo sapiens
gagtatcgcccgaccaggacttattgggagcccgagctctgccggacccgtccagaggctgtccgcctagtcagtgacttccttcccagcactctgacgctttccatcaccaggtgcatgatgaccatcttttgtctccttctgaagagtacttcaaggatagggaacgccccatgtactgccgggacagagcctaccaatagctatctcgcactaccgccctgtttcagcctccaggagctcccttgacctgtcctattgtcctacttcctcctccagctcttttatgtcctcctcctcatcttcctcttcctggctcaccccccggggt

SEQ ID NO: 518512 - DNA, 825 bp, Homo sapiens
ggaacagcaggtgcgactcatgctaccaaggcagctgcctaggcgacgacaccgcagacctctggcagcctttcaccctccctcccaactgcgttctgccactgcgacgtgtccaacgagagtcggtcccccaaaatcgcccctgcaccacacggggtccgagccccggcccactccgggcttggtaattcgtgcagtcctgctgctgccccttgcctgctcctgtcgtgcttgctgctgtctctggtaactgccagatccagtaccggcccttctttcccctgaccgccaacttctgggccctggccggcttcaccctgcttcctcagtctctctggcctttttgccatgtaccgcccgtagtgcctccgcgggcagcttggcagcgtagccggcccctccggaccttgctccccgcgccgcggcagggagctgctgcctgcccaggccacgcctctccaggcactgcctcttcccgcatgccactggagcccagcccactagcgcacagcagaggactcccgggactaggccggaggccccgcccctgcgaccgcacggggcatcggggccacctccacggggctgctgaccctcagcccgcactgggagtgggctcctcggggtcgggcatctgctgtcgctgcctcggccccgggcagagccgggccgccaccgggggcccgtcttagtgttctgccggaggacccagccgcctccaatccctgacagctccttgggctgagttgggacgccaggtcggtgggaggctagattgaagggagcgggaggcagagagtttaccgaacccgtgcaataatactt

SEQ ID NO: 518513 - DNA, 381 bp, Homo sapiens
  misc_feature (64)..(64): n is a, c, g, or t
  misc_feature (92)..(92): n is a, c, g, or t
  misc_feature (127)..(127): n is a, c, g, or t
  misc_feature (168)..(168): n is a, c, g, or t
  misc_feature (301)..(301): n is a, c, g, or t
  misc_feature (341)..(341): n is a, c, g, or t
  misc_feature (348)..(348): n is a, c, g, or t
  misc_feature (373)..(373): n is a, c, g, or t
caggcctcatgcctcggtcaggcagggcccaaaccccaactgccggcaggggtggttttccaanaaaggggggtttagatttatcagagtancgagaagccaaactccggccctgggtttgctcccngattaaagggccttcagccaagaccatttttccctcctggngaagggggacttcgaattagtttgcacttcctgttggaaggtaaagccccctgctcattgtataagccccgaggcctaaagtggcagccaaaagccatttgaagccccctttttgcctgttcctcccaaaaanccagggtggccaggggtggtgagggcagttttgcccccanccaaacncataacaataaaaaccaaactttgngtcggcca

SEQ ID NO: 518514 - DNA, 197 bp, Homo sapiens
gaaatgacaaacatgtagaaacacactggtgtgaggaaagctcaagaggactgggtaggaatcctagacatggtctaatctccattatgaaaagcttctgctttagtgtcatattttgatgctgcctatagtccttgtggcagtttggcacaatgaaccacagttaatcatgacccgatgtgattttagcgtcccta

SEQ ID NO: 518515 - DNA, 183 bp, Homo sapiens
aaagacaaaacagaatatggtatatagatacacgtaacatacaaaataggcgaagcaggcatcacacctataatcatagcactttaggagactgaggcggatgggatagcttgaagcccaggagtaagagaccagcctcataaatgattatctgtctatacattatgctaatagatatagatg

SEQ ID NO: 518516 - DNA, 1351 bp, Homo sapiens
gctgctgctgcacctaccgaggtctgcgggcgctgccagatgtgctcccagcccaagcctgagcctgatgccctgcccctgatgtgtccgcctggctccctgtctctgcgctgctgctctcttctggcctgctggcagcgctgccagatgacttggtggtgagcagagaacaggattgtaccatgggatctcatccgcaacgacaacgacactagtggctccggtgtgaggctgctcgtgtgatcgctggtgcagctgactcgtcacagtacagctgcactgctgtgcgtagcttgacgctgtagacacctgaatgcaatgctcaccgttgcgcacacgcagcgctcttgcgccgcgccacgactatccatgcggacgatgcacctctgctcgctgcccttggggctctctgcacacacaactccgtcctaggacgccctaagcgccctcactccctcttgtgctctctgagcgctcttgtgtgcctctacgccctcgtccgtctacgctccgccttctccagccctatcaggcaatgccccccgagagcgcttgggtgttcgacactgctgctcccgacgcgcgctcccgcctcatatctctgcgcgcgcagccctctcactctctcctccctctgctctgctgctcgccgcctcctcgcgtgccgccttcacttctcctccctcggctctctccccatccgccgctccccttcacccggcggtaactccccacctcggcgtgtcggtgccccctccctccaattccgctacacaggacggctgcctcctcccttcgcgtttctgctcttccaataccatacgctcacgcccatcgtcgagctcacatcctcgactgcactctgggccactgcccctctgcgtcgcccctggacctcctcctacagccaatcggcgcctaggggcctctcccttcctccgttagcctcgaccgccgcgtaggatcgccgtgccacacctcacacgccccccccacaggctgcagcttccatctttgcagccgtgttcctcctcctccaatcggtacctccacctcggcgtgtggcccccttacctggcgcctggactgtgccgctattggtcggttcgcaaatctccaccggtgtagcacttacgcggcctggggcgcccctcggcactctcgccccacttccgatagacaacttccgcggcaccccgtagctccgactgccgggaccgcgtctgcccgggcgcccggtcgactctgcactttggcgcgacacgcccccaggcgctccctgacggttcatccgcgaccgcgcgcgcttcatctcgctcgcgaccaccgttggcccaggcgcccccacgct

SEQ ID NO: 518517 - DNA, 359 bp, Homo sapiens
  misc_feature (1)..(1): n is a, c, g, or t
ntgcagagcatacttctatgccatcttaaaaactttacttgtatctaggttcagaactactgcctttttggcagaacatccaaataaaatgccactgattagaaaacattatcactctgaacatacagaggcacaatccatgacactcttacagtgaagaccattctaggtatgtgcaatatgggctgcgaaggtgtctagacaacagcaaggtcatctgggacagcaaactcgaacacaagcatacagtgctgtggcaggtccctccaatttgcattaaaatgacttggagctgctggaatgtctggctacatatcaggtgagggcagagatatggctctggaggtagcagacaagga

SEQ ID NO: 518518 - DNA, 642 bp, Homo sapiens
ccacgcgtcggagagtcgtcgtgggtttctgcttcaagcagtgcttggacggaacccggcgctcgttccccaccccggtcggacgaccatagccagccctccgtcacctcttcaccgcaccctcggactgccccaaggcccccgacccgccggctcgcgagcgccggcgacgagaccgaccgggcacgaccagcccgccgccatcctccgttagctcggcgctgacccattggacagactcagtcgatcacaatcccctacgcccaatgggctgcagaccgatggagatccataacacaaccaagggcaccgtacacgtagggacacgggccgaattccaaaatccgggccccacgaattccaatccccactgttgaggccacaggcctatcctattaatcctgggccccccttctaccgctaaacccggtgttttatttagcgcccgtttggggagttccacctaaaatggggtttcggatttttaacttcagcccttattttgggaacccaccgggggggcgggtgaatttggcaaatttggttttggcgccttttttggaacaggcaacattttgccaaaacgtacctttcttcacgcaatctcatgaggagcagggacgatgctgagcaccctgagat

SEQ ID NO: 518519 - DNA, 185 bp, Homo sapiens
tgcaaaaacagctaaagccgtgtggaacaccttttcccaaatgacgttggagcccaaagagacgaagctttctcagtcatgtttgcccatgtgtcttgcccatcgacaacaccatacgccaaaaacatgcgtgaagccttcgatggatactataaacttgttgcagactacaggaaggatcacgg

SEQ ID NO: 518520 - DNA, 1305 bp, Homo sapiens
cctgatgcccctgggggcgggggctgggggcgggggcgtccccggaaagcctccctcgcagttcgtatatgtcttcaccacccacctggccaacacggctgcagaggcagtgctgcagggccgggccgactccatcctcgcctaccaccagcagaacgtgccccgggccaagcttgaccaggccgctaaagtggcccgccaaccgcagaacgcgctaccacgctgagcacgccgtcagcaggcacccgcgacagtcccagacaactccactgacgccgcacgccagcgaaaggacaccatgagcaaaagagcgcgaagcgcgaagcaaccacgcacagacgcggcgacaccacacccaagacggaccacgccagaccacgcacgacagcgaacacacacgcaaacccaaaccagggcacaacgcaccccggacaacgaaagaaccgagaaacagccgagacaccacacaccacaaaaacacacacaacagaccacagccaccgcgagcaacacacacacagcacggcaccacagagaccagagacgaagcacccacgagaagagaagcaccgagcgacagccaacgacacacgcacagcagacccacagcacagaaaaagccaacagacccagagagcggcgccgcagagaaacacaagcagagacggccacagggaacgtgcgagaagacgacccagaagcaagccacgaccgcctaggaaacgcgcccagaccacgaacccacacaacacacaagcaaccgaacagaccagagagcgacagagaccgccaagccgccacagcgccaagcggacgaccccacacgcgaccgacccaccgcgaaagagggaacaaacggaggcagccgccacccggcagaacgagcgcagcaccgaacccacgaaagaaccagagggcagcacaaagacaacagacggagcaaaagagcagccgagcacagacacccaacaacgcagcagagagcgcccccagcggcggacaaggacagagcgacacacgcacgcaatccgacccacgcaggcaaaacaaggcgccaacaaccacgcaacgccagagcgcaaccgcgaccacgaggagaaaggacgcccagagaaaggaaaaaggacgcggacagcagacgcggacaacgaacaggcacaacaacggcgaaaaagaccaacacgcagacaaaagcccaaccgaggaagccgaccgacagagaaagaacgaaacacgaaggcagccagccgacaagaaagaacaacagcagcgaagaacgaaaaggacgcgcgggcgagcaacaaa

SEQ ID NO: 518521 - DNA, 324 bp, Homo sapiens
  misc_feature (10)..(10): n is a, c, g, or t
  misc_feature (100)..(100): n is a, c, g, or t
  misc_feature (103)..(103): n is a, c, g, or t
  misc_feature (129)..(129): n is a, c, g, or t
  misc_feature (135)..(135): n is a, c, g, or t
  misc_feature (143)..(143): n is a, c, g, or t
  misc_feature (238)..(238): n is a, c, g, or t
  misc_feature (257)..(257): n is a, c, g, or t
  misc_feature (279)..(279): n is a, c, g, or t
tacagtgggntcacatcacttcttcgaggggtcttttaatttttaagtaaagtaaaacctgggtgtgtaaaagaatgacagagacagaaataacactagnagnctgaagtaaataatatttacatcagntccagnaaaacagncatgccttttctgttcaaacccattcgtgtgtgtgtgtgtgtgtgtgtgtgtgtgtgtgtgtgtgtgtggagtttagtatttatagttggaaccnggcctggggctgtattgcnggcttaagttaggattcaagancctcacaaatatccaaattaattgaaggtggggattataacccct

SEQ ID NO: 518522 - DNA, 644 bp, Homo sapiens
ggagatagttagattgcagaaagacctgcgaactgttgagaaaggagcatcagctgagaactggtagaatactaaacgaagagaatatgatcaagaaagggaagagaaaatcaaacaggagcaggaagatcttgaactgaagcacaattccacattaaaacagctgatgagggagtctaatacacagctggcacaagaaggaacaagagctggaaactgaccataaaatagaaactatcaataacggcccagggaggtggaggctgagacttgttagaaaggccagtcaagaagacgacaaatcaggttaggttagagaaagattggtgagaaagatgagtgatctagaaagcgaatcagacaagaagatatgaagaaatccttgatgctcgtgaagaagaagatgactgcaaaagtaacgggagctgcagactcaactggaggagcagcagaagaaatagcagcaacaagctagagcaggaggagaaccctggcgatgataatgtaacaataatggagctacagaaacagataggaacagaagacgacatttaatcaggtgattcgaaattgaaagagcaagagttcagaagaacagattcacaatatagaagaccgtttgagaaatatgaaaagaatgtata

SEQ ID NO: 518523 - DNA, 432 bp, Homo sapiens
cctcgggatcagttgtactcgtatcagtgtagaacgttaccatggtgctagttgccatcaagtactggcaatggtgtagctacactgtacaaatggatctacgcatagatggtcctactgctaagtccgaggtataccctcattacgcctgtagctagtgtccactagtgttcatgccaccattagttcaacaagtcatcctgttcacgaagtgtgcactcaggtatggatggtagaatcagcggactacatcggcgtatgcctttgaatcttttaaaaaggaggcatatggtggcattaggaggcatcatattggtcatctcgttggcaaagttcatcaaattattaaccctgtcgcagacaaggtcaagcttcatcattgaatggatattgagtgctgaaaacagtccatcgaacagggtcgtatagtag

SEQ ID NO: 518524 - DNA, 109 bp, Homo sapiens
tgcttccgggggggctttttttttgttggcgggcccaaactgggttcaaatgggctttgtgacagggttggatgttttttatccctgaataaaactttcccctttggga

SEQ ID NO: 518525 - DNA, 119 bp, Homo sapiens
ggggcacgggggggcagcgctgagcgtggtgagcacgtacatgtcacgtcgctgcccaaggccagcacggtgggtaccacgtactgcttgcgcaatggagtgcgccgacctcatgcaga

SEQ ID NO: 518526 - DNA, 772 bp, Homo sapiens
  misc_feature (45)..(45): n is a, c, g, or t
ggcgcggggggtgcaggcaggcccgagcagctcggtttcccgcgnacttggttggctgtcccaccgcagtaccgcctcctggaacggaagcattttccccttttttgatactacgggttgaacatttgttgatttttcctttaaattacacacatgggcaaacaaaaaacacaacaacaaaaactacaaacacacaaaaaaacctgtgtgtgcggcgggcgcctctgtgggccccctcttgggaagaacaacgctttttataaagagagcccaattccgcggggagtggggcgccacgcggggggggccccaaaagtgtggcgtacacagctgaggaccatgtgtggcggcaaaaaacgcgggagggaggcccccacaagagggagaaagcctcccggggggggccaaatgaaggcacacaaagggggcgcgcaggaggaagacttcccctcccacaccccaatgatataacaaaacagaaaccagcggccgcccgacgggaggagggggcaacacaacccccacgaggaaaacgcgggatggttcctcttgtggcggaacccaccaaaactactctctcccaaacgaagctgatgcaagggaggagagtcgttctcaccaaggagacgaggggccgcccatcaatacaaaccgggggggggaagcattctattatactcacaaacacacacggggaggaaggcgttgtccaccaagaagcgggggagagacttcctccgagcagtatcttctcctagatgttgttaaacgg

SEQ ID NO: 518527 - DNA, 1312 bp, Homo sapiens
ggaaaagaggaaaaaaaaaacagaggcccgcgcctaccccactcctgcccctccggtttcttggctgaagtgagtagtgtgatcctggaggccccccggcctggacccgacccctgccagaccgcccccgattagcgtcataaagtccagcattgtctccctcgatccaaaggccagtttactcgatggggatgggcacggccacgagcctggagtggagtgctagtagagatgctatgtctatgacccatggcacactccatgaggacggggggacaagagcactatgtattgcccagtgggttgaagtgccagtgcacacacagggacataccccgaaaaacaccaacagggtgagaaacgagcagcggagatggagagccccgggggccgtggacagacccgagataccccacaaacacgacaaaagtgactgaccaccaaacaaagctcgaggacgacccgaggagacaacgggacgtgcaatgcaacaacactaccgtagcagccaaaagtagagtagggccacccaatgagccaaaagtggacgacggaagccagagacgctgcaaatgcacccaagcggcggcgacatgagagtataatcagaaacacgacaacataagacatacacactagaaagagcactggaagcccacaggaagaacaccatgagtcaaacccctgaacgtgctgggcaacacgtagacacaggagatgtggagaggatccaaccaagctaataactccgcggccgcacttaaaaggaacaccttagccagggcagtagagagagaatagaagtggagacacaacacaggaaacgcgttccacaatggacacatattatagacataccacagaaaagaacccggaagaacaatggagacgagcagtgatagaaggagaaaaaacgcacatatcaaagacgcaccccagcggacacaaaaggacacaggaaacggcataaaaagtatgcgaacgggcgccaacagcggcggacgagacaccttggaaccagggaagagagcaagggaatagcccaaaaataggacggatgcccagtggaaagacatgaccagggaaactgaaggtggagccaagatgtaggaaaaggtgacacaaaggtataagtgattagtgagtatgatgattagaaataaagaaagatgatacaaaaatttgtgttaacattatatagtaacatacttttagtaactaaaactagaaggagcattttaaaaaaaatacaactaaagaattagaaaaaaaataaagccgctagcaataaagatgtggctgaatagaaatg

SEQ ID NO: 518528 - DNA, 1584 bp, Homo sapiens
  misc_feature (989)..(989): n is a, c, g, or t
tagtgccccctcgttttctccgagcacaaaggggcccgcgcgccccaacaaaaaaagggggggagcacctcacagcaaagaagaggagaaaaaaagttgtgtggtgttgtgagaagcagcccgcccagagctgtggtgtcctcgagaaggaaagaaaaagcaatattttggtggttaaagaagaagagaagtgtggggaaaagagcggcccaccccctgcggcctagtataatgaggcggtcggcacaaaaagaatgtatagaagaagaaaaataaaaatgttgggggggaaagaaagagaagacgcgcgcttttctggttgctcaacgcgcccctcagcgggtgatccccccccacaagggaggagaacccgccgccaacacagagatgtgggcgcaactatactcttcggaatatatggaggtttcctatactcaaaaaagagggggttatttccgcttcgtgttgtttttatggaaacaaaggtgggaagagtgtttcttcttggtcctgtggaagaatttgtgcgcccaccgcagaataatggtatatgtgaagaaaagttgttggccacaccatgtttttatgggagaagaaaataattgttctcccacaaccctgtggaagagttttaatcgtctcgaagaaaagaagatttgtgttttcacaacgcggcggttttatataaacacgtttgcgcccgtgtagactaatataactgttttccccacctcgggcacaccatggggaggattctctttatatcccccccgcgtggagacaccacacaaaaaatgtgtgggtgtctcccacatggggtcgcacacaagataatatggggcacacgcacacacaacattggagattttgtatatagcgtctctcacccgtgtgtgaagaatgcttctcaaggaacactcatcgcccgaacatggggtatacacattgcgtttttctgggtctctgtgtttctctgtgtgtgtttgtgngtttttatcagtattaaaaaatacacgcgctcacccaatatctcacgagatatccgtgagaagagcgccttctctaatatgggctcacagcacccacacacacagggtctcgcccacacaatctccggagaagagaagagatgagagtggagagtatcacagtgagaccccgagagagaggggcacagacgcacacaatgagacgttgtagaaaagaaaggtgggtcacacataaaagttgagatgtgccacgagccacgccacattggagaaaagagacacatatgagaaagagggcttgccacacattctatatttatatcctcttccacatagagatgttctttcgcttatagagaaaagtataaaaatgctgagaagaagcccacaagtttgaaattgggagaaagctcactggaggctttacatggtgaaaggcacgtaagtttctgggaaaagcccctcggggaacgaagacaccaggtgctaaaagttgaaacgagactgatggatatgtgaccccccggtcccagaaatctgtttaaagattccagacttccaattagtggccacaattaaaagtgctatttgtgga

SEQ ID NO: 518529 - DNA, 437 bp, Homo sapiens
ccgaggccgtgaagctcgtttagtcaaggacgaggataaggagtggatgcccgacaccaagctggtccgcttgatcaaggacatgaagatcaagtccctgtaggagatctatctcttgtccctgcccattaaggaatcagagatcattgatttgttcctgctggcctatctcaaggatgaggttttgaagattatgccagagcagaagcagacccgtgccggccagcgcaccatgttcaagggatcagttgctatcgaggactacaatggccacgacagcctgattgttaagtgctgcaaggagccggccaccgtcattcgaggagccatcaccctgagcacgctctgcatcgtcccggtgcgcagaggctacgtgcctcacgatacactacgccgacactgtcccttgcagcctgacaggcccgctgtgctctgcc

SEQ ID NO: 518530 - DNA, 604 bp, Homo sapiens
  misc_feature (212)..(212): n is a, c, g, or t
tctacaaaccacaaagacattggaacactatacctattattcggcgcatgagctggagttctaggcacagctctaagcctccttattcgaagccgagctgggcccggccaggaaacctttagaggtaacaaccaatattacaaggttatcgtcacagcccatgcatgtgtaataatcttcttcatagtaatacccatcataatcggaggctntggcaatgaactagttcccctaattaatcggtgcccccgataatgggggttttccccgcattaaaacaaacataaggctttctgatctcttaccttccctcttctccttacttcctggctcggcaatcctggctaatagatggggagcccggaagacacgaaacacggttgtaacaccgggtgtcttatcaccttccctttagtaaggggaaacatatatttccacccccggggagggagctcctgtggtaaaaacaatacaacaacttttattccgttaaaacccaaacaaaggggtgagtcccaacaaaacaaagagggggcagcaacaaataattaacaaaaaaaattaatataataaacaccgcggatttagacaaataaaacaagct

SEQ ID NO: 518531 - DNA, 546 bp, Homo sapiens
cctaccgctttcgctttcccttcgcggtgcccactccactccttgtgcggcgctaggccccccgtcccggtcatggccatgctcagggtcccgcccgaggcccaagcccaggtggatgtgtttcgtgaagacctctgtacccagacagagaacctgctcgggagctatttcccccagaagatttctgagctggatgcatttttaaaggagccagctctcacatgaagcccacttgagcacatctgaaggcccccttggacactccccgtgcctgtatcccgtccagggagaaagagaaagaggagcggaagaaacacgccggagaagggagacacaggatgtaaaagaagaagggggaggatgaagaccaaggtcctccctgttggccccgtgaactgcgatgaaaagatcgtggtccttctgcagcgcttgaagccctgagatccacgggtgtcacttgagcacgctctaacctggtcacccacctggttgcagctgcggatacctcggattgaggatggttaccattttggagtggctgtccag

SEQ ID NO: 518532 - DNA, 226 bp, Homo sapiens
cggtgcttgaatatttgggtttcggttgttccttataagactatggtgagctcagttgattgatattcctgatgcgattaatacggttgtgttaaggagtggaacttctagggaattaagcgggttgatgccggtggggggccagtgccctccttaatgggggggtaggggctaggctgggaggggtaaagggctcagaaaattccggcgaagaaaaaaacttcgg

SEQ ID NO: 518533 - DNA, 1112 bp, Homo sapiens
  misc_feature (1112)..(1112): n is a, c, g, or t
tgctctcgctagtactattggtcatcgagcgaggctagcaggagtcgagaagagtcgcggagatccgaaagcagtcctggatcatgacggggaaatcactcagtcgtacgtaactcagaacatcacgataaaattcagccgggacgtggtagcagggcgcactgtaagtcccgagcgtacttcgggaaggctagaggcaaggagaatggcgcggttgaaacccggagcgatcgcgctggcacgctattggcaggattgaaggcacagaaggaattcagcagcacaacatggcaacatacacaagacccctagggcagcacgaacgacgaaacgcgagacagaccctcgcgagctagctcacacaccacacaagaaaacaaaaacaagacaaacaaaagaaagagagaccagcgaagacgcgaacacaacagcgcgcgacgcgggaccggcccacacacagcagccgacagacacggaaaaaaacaaagcgaggaacacacaagagggaacggaagcacaagcacgaaacggtagggaaaacaacaaagaggagaaaccaacaaagagaaggcaggcacagcaccaccacacggcaggaaaaaaaccaagtgcagggcagaagacatacaaaaaaaggaagtcgacagctccaccaccgcacacacagaggacagaacacagaagcgggccgagaagacgaacgaacgatccacggacggcgccacagagcacggagtgacgacggacagagcgagagaaagaaacgtacatcaaccaccccaaaaagcacaatgagaccacacaagcagcccaaatcccacgacgccagggacggcacgacgcaacacaccacaacgaaagagaaagagcagagacgagaatgaggaagagaagaccacaaacatcacacaaaacagacaagagagaagaaaaacggataggagaagaaacaaaaaaacacaaccaggaggcacaatcacaaacgacaaacgacaaaggagaggagaaacactacaaaaagaacgagaacagacgacaaccagagaccaaaacaagctacacgcaaccataaatcacaacaccaccacgcacgaccaacgcataggagacan

SEQ ID NO: 518534 - DNA, 125 bp, Homo sapiens
tagtcactgatagtacagcatccacaaagcgtggtaatgtcccagccgttaacaaaggaggcacacactcagttcatccccttactgatgtgctagacagagtgtaccagttgtcattatcatcc

SEQ ID NO: 518535 - DNA, 207 bp, Homo sapiens
ctctactttgcgctgtgtagcacaaggcgagcttctttttgctgcatctctcatcatccacttgcccgagtccttgtctctcttgatgtagatctctacacagtcctcgttgctttgcttattatttggttcacctggagcccagttggtggcctctggggtcaaggccttcttggtccctatccatgtccatgtaccattgatctt

SEQ ID NO: 518536 - DNA, 408 bp, Homo sapiens
atgagcagctatccaagtcaagtaaggaagtctaccctaccaagcaggagaggggcgggggaccggcaggctgtgctccagcctcccttctgttctgtatcctatgccgagaggctatagtaaacgcttacgagtatttttttggttatactgccttaacccactgtggtttaggaagttgatccctataaaggtgtgacccgtagccacacattctgtatgtctctggataggtaactgccagccttcatgccctggtaatactgtctcatgggtggcccatgttgctgtgcctccatatacttctagagtgttgcttactgtaagttcataattatttaaaaaatgaaccaaatgggattgtcagtatttctcagcatcccttgagggacttggagaaaaattacc

SEQ ID NO: 518537 - DNA, 226 bp, Homo sapiens
ttatcccaccgccaactgggatttcatctgggccaccctacggtccacatcagatgtgaggaaattgttaacgcgaatgtcaacacttactttaagaaaattggctacaacccctacacagtatcatttgtgccattttctggtttgaatggtgattacatgctggagccaattgctaacatgcctttgttcaaggcatggaaagtcacccgtaaggattgcgatg

SEQ ID NO: 518538 - DNA, 183 bp, Homo sapiens
ggcacttctttacagagtagtaagaacagcacacttcattcatgtccatagaaagctcagattctatctaggctggtgatggaggtggtggtgatagtgaaaataagatagtatataagcacgtattaatggtgaaaatatacaaaaagtctcaaaattatatcagtaattgcattttgaatg

SEQ ID NO: 518539 - DNA, 280 bp, Homo sapiens
ttactttgaaaaactgggagaaactgtcagctgctgaaggaaatacaagggtgaatgggccctaaggagggagccgcaccaaggctttatcacccccttcagggtggccaaactggagccacgccttataggcccagttccaattttgaagggctcttgggggaaagcttaccgtttctaggtgtgaataatccccgaaaaaatgatagatgctgttgtgacatctcggagtgaggatgatgagacaagaaaacaagttcgagacaagaggagaaaaccc

SEQ ID NO: 518540 - DNA, 278 bp, Homo sapiens
atcagctcgaccttcatttaggcaatctccaagcaaactgtctctcccaaacgtgctatgctgacacccaagccttactcccagcccaaaaattctcaagcatgttctgaggaactttaaggttgacgggaaagtcagtgtgaatggagagacggttcatagagaggatgagaaggaaagagagtgtcccacgggtggctacctgcccgactcctgtaaccagtgtcccagaatggtttgaagtgtgtggtcccgaggtgcaccgggtctccactggt

SEQ ID NO: 518541 - DNA, 340 bp, Homo sapiens
tggatgacacaagacattagagagtgtaggtgccaggaacgatcagatgtgtcaccataatatatctagtgatgggcagatgcaagagagtcaaaggtgaccatggggacttaccgagcccctgcctattggccaggcacagtgatatgtcctcggagccatgtgccatggaagccctctcagaggtcgaggggaggcaggtggagacagagcctctgtaggcctttcaagctgtagccccagagcccagaggcagtcgaattcatgtgtgcagtcagagagctcacgcgactgaagcacacgcgactgaagcacacgcgactgatgcacacgcgactga

SEQ ID NO: 518542 - DNA, 486 bp, Homo sapiens
  misc_feature (58)..(58): n is a, c, g, or t
catttatttcattatcttgtacaattttttttgacattgcaacattgtcaaaatagcnatccagaactgggcgtggtggcatatacctgtagtcctagctactcagaaggctgaggcagaaggattgcttgagtacaggagttcaagtttagcctgggcaacatggtaagctccgtcttgtaaaaataggcatccagggctgggcgtggtcgtcacgcctgtcattccagcactttgggagactgaagtgggcagatcacctgagggcaggagttcgagaccagcctgaccaacatagtaaaactccgtctctactacaaatacaaaattagccaggcatggtggcacatgcctgtaatcccagctatcgggaggctgaggcaggagaattgcttgaacccgctggggcggaggttgcagtaagccgagattgtgccattgcattccagcctgggcaacaagagtgaaatccgtctcaaaaaaaaa

SEQ ID NO: 518543 - DNA, 1859 bp, Homo sapiens
  misc_feature (131)..(131): n is a, c, g, or t
tctctatatatgtcgtttgttcggtgtcttttaatttttgtcaattttgctccctgaactcatgtaccacaataagatggcacactcattgctataataaacaacatcacttttgtgttctacttaatatnccaccatctctcgtgtttattgttattttcgttcttcgtctctgaatcatgctcactgcttctaggtgcactatttctcatccactttccctacaggatgttcttgcttgcttcccacacaagtatggtcaaccgtcctgccatcatatatttgtctctttagaatatgacgataatatcgttccctcacgctaggcgggcgagtgtggtgtatttaggaggtagcgtggcttgtcgttggtagtgtttctcatgcaagaaggtcgtgctgggtggggagagtcgctccccaccgcgagcgtgggtggtgactattgttgtggattagcagtcgccgtcccccgtgtgataactatggtatatatatttttgattaataggggggtgtgcctccactacgtgcgacgagtcagagttgtgtctccgtttgatcatataggatatggtggggaacaccacatcggttgtcatctatctagccgttattatattgtatgaatgttcgatgaagtctgttgtatatggcgtgttgacagaatgagttgtcggataaacatggagtatagttgtcgcaagccgccccgtctctcttatagcgggggtctctacatctgtcaactgggcccgaaagatggtggcgtggtccccgtctcctaaagtggcaacatgcttttttattcccgctgtgtgatgagcgtcttttcctcaaggggagacactcgtactatgagtagattctttttgttttttttttcttctagtactgggctagtagataagagaaggagctttagtctatgtatcagcgcgggaagggataaggtgattacacaactacgatggaggctccgcctccgctatattatgatgataagatgatgatggtaagatggtattgggttgtgtccgatatgaggagaacttctcctcgcataagagattagaatattagatggtatgttttatggacgcccctcgtcggtagtatgttgcccacgcacactacacgtcttctctacacaggaggtattgctcttccacgagctgcgtctcacgcggaatgatctacgccgattagagaaagagtggaggagaaaaacacgcggcgaagagagtatgagtgttgtgtgtcgttttgttgtgcgcgcatttgtcacgttgttttgtgcgaacacaacaacacacacgacgacgagcatgcccgccccgacacacacatatatattttgtggggtgaacacacacatgtgtgtgtctgcatgcgcataggagatatatgcacagtgtccactctgagatatgttgtgtgggcacacattcttgggaacactacagctgtctgtcactctgttgtgtgggttgtggtgaagtgtgcacactgaaggcgcacactgtggtggaataacctgttttataactctcttgctctgctctgcacaccaaggagtggctcgtgtgttatagaaaactgttggggagagaaatatgaggtgtggaaccctaggccaattccggagtctccaaagtccgtctatctttactttcgtccgacaccgtatagagaatggtagactgtctgtcgttggtccctgtgtcaaagttgtctggaaccacaggggtcaaaggaaggccccggcctgtagactcctacctggggcccacattttacatttcccttttgtatttttggtcctgtgtaaatgatttaattaagggaactgacctttg

SEQ ID NO: 518544 - DNA, 1113 bp, Homo sapiens
  misc_feature (482)..(482): n is a, c, g, or t
agactgtacataaagacgatggctaataacatcttaagttataggcaatatagttatcgggtaatgttcgggtgggcagctccattaaaaaatatgtgaatgaatctgtgaagctgcaagtaggcgagaagagcgaaaggtcttcttaattgaaccgcctaccttgtagacagtaatttgtacacgtgtatagcttgtgtgttacagcaattttgtttgtagaagttcaaagattcccagtgttgtggtaacagcctagacttttgtaacaagtgtgataatggatagctatatgattgtttccaattttgtaagaagtagaacagagaatattccttgcttgtagcagactggagcttgagcttaaaagctctgcccagtctcttagagttatggtattaaaacagcaaaatctgtaccatgcttaggacgttacttgtcacatgacttcctgtgccttcgaacaaggcactacggaatanctaactacctttaaatacacagtgtacactggagaacaagttatacttttactgacaggtctatctggttgtagttcagatattcggcaaaagttggttatccgagagcattccagagatgtcgaagcaccactgtcttctgtattagtatactacggcgctttagcaaaacgtttcggtgattgttacgtgatggtattcacgggctcaagtttcacagagcattcaggatcaggccgatagcctaaaacagggctatgtctcacattaacgtgtcctccaggagcacaatcctggatcgggaactctgtccccacaaacggggccgaccacacagagactctgctccccgggcaagaccttccgcccgggtgaacccccggacaaggtcgcttctcccccacgacatcacacctcctccggtaaccgcggcgtaaacagaaaccaacgagcgcccaagaagtcacccaaaccaaggcggacgcaatacagcagttcacactgcggcgcgcaaccacgaactaacaacacagccaagaagacagaacaccacgaagcacgcaactaacgaaataagatactgaacagacccaaagacagaacacacaccagagcactgccagtaaaactc

SEQ ID NO: 518545 - DNA, 617 bp, Homo sapiens
ggggttaagccgacgggacggcgggccgtgctaaaaaaggaccggcggtgtatggggcgggggaaagccgccctgaacggggattcacgccaaaaggctcgggggtagctttaatagtggcccaggaaagaccagctcggtcaagaagaggggaaagatgtgcccaacgagcgatgttgtccctgcccccgtgtgtgtataagtggggccaaagaacccccccccccgaaaaagaggaatgggtgcggaaaacgaagccgctgcgatacgccaccctggcctatcaagtagcaaatatatgttggtgccaacattctaaaatttgctagaaaaaaggggtcgaaaaatgggctcttgtcgtggagagagagaccggcaagataccaaaaggagtctgcatgagaagagccacctctgttgacgctccggtataggggcacacagctaaaaattgacccggctgtggtctatgttcagaagccgtgaatagataggtcggcactgttcgcccccctcgaggcgaaaaaacgttgcaggtacatgtccgtacggaccaggtgcaagagtacattcaccccctcttcaattccgaagcagatttggaccccaacatgaca

SEQ ID NO: 518546 - DNA, 919 bp, Homo sapiens
tcgatgcgatcgataatcgttacggccgcgtgatacgctcgcgcgttaccaatgggcagatcagaggcttgtgagcatgcggccatgttgttcacaagggttccacgtggtgacacatggtggatggtgcgaccgaacttgtatcaagcactgtgaacgagtggcgatgcatgatatgccttccggtgtcgattgagcagttccgcgggttcgccgtgtacaaatggacaaaggaggtgccaaagtgattctcggcgggatgccgcttttaaaaaacaatgtggcccgtatgttgtgtgcccccacccgcccaggggtgtcgccattccacacgcaagcggtcataaggggcatcaggaccaacgaaaagtgccgcccggaggccggcacacatgacagttgcgccgacgaatcctcccccggggcccccccgagcagagagatgtgaccacacacgggtgtagcagcacagcgcaagggggggcaaaagcagtgctccctgcggcgtacctcctcagtggcaacaacacgcaggccccaaacaggacaaaacaatggtgtggtggggcaccacgtagaccacttatgtcaccaccatagtatcacagcttcttgtggcccgccacccaactgtgtattgcagtgtgggccgtgcctccgccactacggtctgttttggacactaagtccccccaccacaactatgtggagtcaaaccaataagggtggcccacaccaggcttttttacaatatgaagtaaccctcgtcggatagtataccttcctccgcgacagtcttaatcgtcagtctgactcttagcgcctgaaagacctcccgagcgtctattatcggcaacactaataggggggcccaccccacaaaagaaaccccagagaggaaaaaaacaacaacaaaaca

SEQ ID NO: 518547 - DNA, 1604 bp, Homo sapiens
  misc_feature (1)..(1): n is a, c, g, or t
  misc_feature (378)..(378): n is a, c, g, or t
ngttgtgtgtctctgtgttgctgttgtttgtttgtttgtgtattttattggtggagtgtcgagggtagggtgttgagatgaagagagaatggatagtgaagagcgaagaagagggcaaagagaagagagagaagagaaaacaataatagcatacgatcagatcactgcagttgtgtgggtgtgatggattcagttggtctaggtcagtgcagtggggtgtcgatgctgtgtattgagttagtgtgatgatgtatcgaatttgttatcacacctgttgcagctacatgatgttatgtgcttctgtcgtgagcatcgtcgactgttgtcaggccctgaatgagtaagttaagtagtgccagtgccggtgttgtagcttanggtagagaagaatgagactaggcgtctcgtcgtgtggtgtggggtagctccggctaccagatattaatgttggtatgtggtgtagctcagcccaccaccgtgtgttcgtccgttatagccgactggggggggggcgacatactcatctctcttgtttttgtctttccgccgagggtggggccccctcttccgccctccgcctgggtggttgtgtgatgatgcttctcccggcggcggcgtcgttcgttggtgtcgttatttaatgtcggtgggtggctgcgacagacccgcggggtgtggtttttctccggacagatgtgtgttagtggtgggccgccccccgtttgtgttgtcgctccggctgcttgcaatcacgtgggggtacgaccagttgtgtgcaccacacggggcgtctcgctcgcgcgtttttgtttattgatccagcgcccccccgtgtgtggttcgaccatatgtggcgcgcttggtgaacatagttgtgtgcgatgccccgggcccctcttttaattgctcccctccccccgcgcgtgttgttcacaatggttccacccgcgttacttgatctcccccccctctctttttttaatatagagatgttcaccctcaatatagatcgtccccactatacatacgtcaaggacttctcttggtaacatatataataagcagcgcccccgcacttctatatagttgagatactatagatgcccccagaagatatatagttctcggcgcgtccaccaccatattgttgtctcgcacacagattgcgctgttgcctcccgcgaggttttgtgtctctcacgaacgaataagatatagatgattttgatctctctctaatagacataaagagacatcgcgcgtcttctcgccccccgtgtggcctatatatctgtgtgcccccccctgcccctgtttaaaacacatacacactacgtgcccaacacgatatctttatctcctctttctcactgaggacaccaccccgcgtgtggaagcacacgctcgtgaaagtgtgtcgcgtagatggataattctctactcacacatacatgtggagtatataaaagaacttgtctcctcctttcaccccccttattaaaatttcttctgttcttttctctaattataaggttgttatctctcttttattatgggtcgacagcacaaaagcaatcaatttaaacacaacaataaacacaaaa

SEQ ID NO: 518548 - DNA, 143 bp, Homo sapiens
acagcggaccctagctgattgccattctgtagcatggcacacttatcatatttatgatttttaaaaatatgtgctttttattttcattttttatttgtctttttagggccacactcacggcatatggaggttcctatggcaat

SEQ ID NO: 518549 - DNA, 994 bp, Homo sapiens
cttaaaataacaaaaatgaagcggccgcgcggcggctcacgcctgtcatcccagcactgtgggaggctgaggcgggcggatcacgaggtcaggagttcgacaccagcctgaccaatatggtgaaatcccgtctctacttagaatacaaaattagcggggcgtggtggcgcatgcctgtaatctcagctgctctggaggctgaggcaggagaattgcttgaacctgggaggcagagggggtagcgagccaagattgcaccattgtactccagcctaggcaacaagagcgaaactctcaaaaaaaaaaaaaataaacaatggtgaccttggtttacccaattctacggttaaccttacgtttttaaaggctggatgactttggcttgtcatcctggggccaggggccatgcgtgtcatcctcgttgtattggtccccatgggggtatattgtgctgccaaaggtgagttacggccgaaattattcctggagaagaggcccttaccattgttgcctgatggcccctaaagcaggtgcacctgggcaagcaagagactgtgcgaaggccagcccaaagaattccagagcgtgttgctacaattggcaacctgacggagccacggtgcctaccattcttacctgggtgttcccacccttattgtgcccgggggtccctgggaagctaccttgagaaactactgaaggtcatataacgggcctgggcacaattagctagcggcccttaactcccagggggtattcacatccacgggtggatttcaacacagcgaattttacaagaagcgaggcttccacaagttatggacccgcccggtggtgttcacaactccgggtgaatcccccagccctttgggggaggccccaaggccgggttgtggcaacaccggagaggcgaaaaagttcggaaacacaagctgtggccaaaggttgggaaacccctggtctcatcactacaaaattcacagcaattgggccc

SEQ ID NO: 518550 - DNA, 387 bp, Homo sapiens
cagggttgaaatgaagcgtgttgatgtatagttttgctagatttacgatacctctacctcagtttgtgtgtgagaactggcccgtggggacccatgctgagccttagcttgctagcgattgtctcttcgcttgagcatgggacatgtgaggctgtccttgttttggtctctgttccctacacgctccctacgcactccctattcacatcttagtccatctgcttcaccttgggcctaatgaccactcattccatttagggatgtcttgagcttttttttttaacttgtgcaaaaacacttaacctacattgtgccatcgtaaccttttacaattctacagttctgtagagctcactaccttcactttgttgtgcaacagctcgccag

SEQ ID NO: 518551 - DNA, 189 bp, Homo sapiens
tagagaatgaaactccatctcatacaaataaagaaagaaagaaatgcttcctggtattggaatttactgtcacatttctattgatgatcaaaatgggaccttgattgcaatagcagaacatttaaaactcacaagaacaaaaaaccaaacaccgcatattctcactcataggtgggaattgaacaatga

SEQ ID NO: 518552 - DNA, 132 bp, Homo sapiens
cttgtcggtacaacctttacactacgtgtacggacacgctgacctcactttactagaccggacgacggtggtcacggagttgactatcggagacggactcctacttggattgacgggggccctttgtactga

SEQ ID NO: 518553 - DNA, 763 bp, Homo sapiens
ccttttttgtcactagcgcgccatgtgttggtaacacggaattcggccttatggccgggggggctaatttattttgtgcggagagggcggactgatcgaatgtcctgttgaccattgggctacaataccacctccaccagaggctaacgaactacaattatttcgaacttaactttgcggccaggcaactgagattagttcagacttcatcccttcaaacagctctatttgttttgaaacgaggcttgcaaaattgctccgaaaaagatttacgtgaaagggggcttttctgcccaagtcgcattaacaacttgctatgttagaaaccctgcctcaaacagtgatattgtggaagtcccgcctctagtcgagggtggcagattcaacgagggctacctgtcactcgcataacagcactggcatgactttcccttctcaaaattatgcaccggctttccctttgcacaaattgggcaaattacaaaagaccccgttggctttttattcaaccgtttacccaaatgtattggaatggaatttttcaaggttctttgttaacaaactattgttaacaaacggggaacttccacatcggtcctcagatgggtgacttttggaatctacaaaacagaattacactactcgttcgggaaccgagatttccaaatatgaaacggaggttggcccataagacagcggctctagggtaaaacgggaaaaaccgccactctggcgcctgaccaaacggcagctcaacttttcc

SEQ ID NO: 518554 - DNA, 161 bp, Homo sapiens
attaaagacctgatcactcatccacccattttctcccacggttctcttccagacaccctcccaagactaaatcaggaagaagttaaatccctgaatagaccaataacaggttccgaaattgaggcaataactaatagcctaccaaccaagacaaggtagag

SEQ ID NO: 518555 - DNA, 552 bp, Homo sapiens
  misc_feature (461)..(461): n is a, c, g, or t
gacacaggaaagaagactggccaaggcggactgcagggtgcaggcacagggaccaccacgcctctctacctgtgtgtccacagcctggaggggcagaagcccaggtcaggtcacatgtaaggcaggagcaaggatggactccaggaagaccccgttacagctggctgagatgaattcactaactgcttttgcagaagtctaatgctagaagtgacctttgttttgaaagaataaatgctctggacagacagacacgccacccagacagatgaagctgcagacctgagaaagtggatgtccaaggtcctgccatgatgccccaggacctcacacctccacctggtcagtgacagcacaagatggcctactttggggcactgtgcagctcccagggatggtgggaagtgctgcttattccagagccagctataagaaacactccttcttttttttgagacagnctcactctgttgcccaggctggagtgcagtggtgtgatctcggctcactgcaacctccgcctcctgggttcaagcgattctcatggattct

SEQ ID NO: 518556 - DNA, 194 bp, Homo sapiens
actactgagagctgaggaagtagcgtgagcttctctgtttagactgaagacagcaacaggaatacttctcctccaggcaagtcaggaccagggtgtcagtgcagctatgaaagtggctcttttctgacaaaactatgaaagtatctcgtaacatcaccacacatggcaatcccatacaaccctaagtaaggtct

SEQ ID NO: 518557 - DNA, 572 bp, Homo sapiens
cctcccattccagttcctcagcaggctggtggagcccaggagggaaggacatctaagacaacaataaaacatagcatagcactcagaagaatgccatcccatggagcacaccataattctggaaccaactctcccggatcaggcttccatagctcacgatgctcacgctgggcagccgcaactctactttgcagaccctcaccaacttgcccaaggtcatctcccacggtcttgaagaacatggctctcccacctgaaacagttgatcttctccatcacagcttccttaagcaaaagcaatcctctctttgcttcctcaaggggcagcacaaaggctgttttggctgtgtggaaacagccagccgcattagtcagtcgccactggcgagtgacgtgatagttgacgctggttggggtggtggacagaggagggtcctcttcctcctctttggtctcatctggccctctcaggcacagcatcctgcttatctccctcactgtggatatgcttccagctacgctggtcctttcctctggctcctgtctctacctgtccagctgtgtacaatatg

SEQ ID NO: 518558 - DNA, 530 bp, Homo sapiens
ttcgacggtgtctgtgcaaagagacaatgacataccacatttcacgtagctggcccagtgagtccaaaatcaatcctcatgtaaaccaacatgattaaggggaaagagctgaaatagcagggctcctaggcacctggattcctaagcatttaatttgttgcaaatttcaaacaggggtcccgtgaaaagaagaagtgtgatttttttcagaaactttgtaagttgagcacgttcccctctgctatcaggggaagggctcttaaaagacagccccaatgtcaaaaccttctctccaaaaataccaggttagaagaaaaaaaaaaaaaggcctttcccagggagatggtgagtggcaaaaacgggagaaacaccgggaaacaggaggtgacgacggggagtagtcgaggccatgaggggaccggagaaggggcatgggatggagacgggccaggacgcactgcaacacacccgtggaaccacagcaagggcagtcggatcctgatcctgattctgacaatttggccaggcat

SEQ ID NO: 518559 - DNA, 869 bp, Homo sapiens
tcacgctcgcgcattctccgtcgcagtctctagctgctgctgcaggactgagccgtgcacccggaggagacccccggaggaggcgacaagacttccgcaggtggccagcgagcccaaccccagccctgggtatgcctgcagcagtggaccgaggctgttactgctccctgctggcgaggccgctggtcgctgggccaggctcctgctatgcttgagcaggagtgttcatggaaggaggactagtctcatgatggacctgcgctatttcgctgtgcgcatctgcggtgctgatctgcaagccacatgcaggggctgtgactcggctggcagccctcaccgatccctgtgccactgtccatctacctgctggtcaccgcccgagcctgccgtgtgcttgtgcttggggcgtctccgctgtggctcaactgtggactattccttgtccctgtgggaccgggaggcagcaggtgcatggtgtgctgctggtggaggtgcgcgtacagagagtgaacgaggaccatacccggttaccagcggtgggtacgtgctgcttacccatccgtaggctcaacggagtctccctggctgctgactcgagcttggcctccaaacgattcagggtaatcttatcgacttgtgcacagtccaatgccacggtcactcgaatgactgtcagagcacgcttgtgaagggcgacggtcacacgggcgtcgtcttctcgttttaccgtaaggggcttcatgccgcatatgcattatccccctatactggagtgccgatgaggcccgatgaccggaataggagcccacaattggcacccgcgacacatcaatgcgcacacctggcggcataagccagaacgccgcagc

SEQ ID NO: 518560 - DNA, 648 bp, Homo sapiens
gagttcaggatgtgtggtcttctcttcgactacccagtggtcttggctgttcaaccgtactttctccagaaggatcagatcaattgctgctcagatatttgggttaagcaaccattggtatggagcaaactgcgagcaagcattttgaaacacactggatttccttgaacgcaggcttgaccagacaaactcagacgaactgtaactttatacagaacacgaatgcccattgaactttttctacggggaaacaaactacaaatttctaactttagctgacaggacaaactccaagcacacgatgaacaacggtacacttcttaccacttacgcgcaacacaacatcaaaatgtcattagtgaataacatgcttcatctagcatccatattaatcaaaccatgagcatctaaccccatccttatctataggctagacaccaacgatattctcagccagcctttatcattcctcttactttatccttattatccttaagtattggtggtcacatactattgagtttcttccttaacactgattaacatgctcttacctccctcagaataaaacctggacattacctgactcccagctatactttctccagaacttgcatatctaaacatacactaaaataacagagaaac

SEQ ID NO: 518561 - DNA, 370 bp, Homo sapiens
  misc_feature (48)..(48): n is a, c, g, or t
  misc_feature (88)..(88): n is a, c, g, or t
ccgatggtgacccggttcctgggcccacgctaccgggaactggtcaanaactgggtccccacggcctacacatggggccctgtgggcnccgtggggctggtgtgggccacccattggcggctgatcctggactggggaccttacatcaatggcaagtttaagaaggataattaattaccccaacccttcacagactgctttggtgcctggtggtgctagctcctcccccctcagcacctgctgcatttggagcagccccagcctcaggatggacaaaaggaaacccccagctcagcttcaggctttttatgtttttgaaaacagcttggatattttaatgcccgttgccttaaacctccctgaaacctga

SEQ ID NO: 518562 - DNA, 744 bp, Homo sapiens
gagtagtcctgaagggagacctgctgtgtggagcctcttctgggacccagcatgagtgtggagctgagcaactgaacctgaaactcttccactgtgagtcaaggaggcttttccgcacatgaaggacgctgagcgggaaggactcctctctgcctgcagtcgtagacgagtggaccagcaccaggggctctctagactgcccctcctccatcgccttaccctgactctccaggacagagcagccacgtctgcacaccatcgcccatctttacactcagtatatcagagcacgataactcctatatacatgagggttgcagacgccatacatatgaacttactcagaccacactacttactctagcagaaacatgggagtacctttacagacaagacgatggcctgtgctcaggcagatggcgctcactactctggcaagaacttacaccctgcagaagcggaaggtcctggtgacggtacctggaactcttacatgccattgctcgtaatctgggatcctacaatcaaggactccggactagaaagaatacagatcgggacaaaatgtaggcccaaagggccaacaactgtaacccgaggacccagaaccaaataccaggagcatagaccactgaaaagaaaagcaaaaaccatacgaacaggagaacacctgagagagacaagcataaataccacagaacacagaagaagaaggacaagaacgacaagaaacagagagacagg

SEQ ID NO: 518563 - DNA, 1175 bp, Homo sapiens
aaaatggctgccgggctgtggccgaactacacgccggaggagccgggtgttgcagatgcctggagccgggacgccggtagccagcgcctggccctgcatcatggcgcccacccatggcacactgccgcatcggctgcctgctggtggatggcctgcactggcctgtgctaggattaatcctcctcttctcgtgctagtcctcctgtggctggtggctcgctgctcatcatgctcaagtcagagtggtgcttatactcctacctgtgtaccgagccagagaatgtcaccaatggcacagtgggcggcacagaagagccggggcacgaggaggtgagctggatgaacggctggctcagctgccaggcccaggacgagatgctaaaataaaggcctacactgtgggctccataactagatacagatgccatacacacctgaccccatgggataatcgtcatggaacaaagtatagggcacctgaggaagctcagtgctagactgggacagagccatgcttacgagggaacatgctagcactgattgcgtaacggagcaagtaaaacaaacggctactactacgatgcaacaacttaatacgccctggctctgaactggctaaaggaggggatagaagtatagacccatacaactcaataaaacaaatgccacaaacaatgtaacgagcgaaaccaatacgggatcccacggataaatatgcccttagaaagaattagggggtccaaacgccgtaacctacgaccaaaggacacaccaataaaaccagggaaaatacgaaagatacaaacaacattgaatgcattgggaggacaaccgtagcaacagggacgagtcacatcagcggcagaccaagggcgcgacccgcgacatggagaacccgagggaacaaatgagaaaaaaatacacacacagaacaaggaacgaaacgatagaaaagcatgggagcaccacactagaggaaaaacaaccgaaagaaaccacagggaagaagaccgagaaaggagaaaagaacaggaaagaaaaaaatgaggaacagaaaagaaaacatgacaaagataacaagacagagaacaggaagaaacagagagagaaaaaacaaacaaacaagcagaggaggagaaaacaacgcgaaaaaaaacgagaacagccggaaacca

SEQ ID NO: 518564 - DNA, 905 bp, Homo sapiens
gtctttcccttcgtgtgtgccactgaagatcctggtgtctgccatgggccgccgcccgtcccgttgtaaccggtattgtaagaatcaagccgtacccaaagtctcgcttctgccgaggtgtccctgatgccaagattcgcattcttatgacctggggcggaaaaacggcaaaacgtggatagagtttccgggtttgtgcgtcacatggtgtcacgtagtgaatatgagcatgctgtcctctgaacgtccctggaggctgcccgaatttgtgccaataagtacatggtattacagtttgtggcaaagatggctagccatatccgggtgcggcatcaaccccattccatgtcatccgtatcaacaagatggttgtacctgtgcatgggtgctagacaggcctccaaatcgggctatgcgatggtgccttggcaaagccccagggcactgtggtccacgtggttcacattggtcacgttatcatgtccatccgcaccaagctgcagaacaaggagcatgtgattgaggccctgcgcatgggctagttcaagtcctcctggccgataaaattatccacgtctcaaagaaggtgggcttcaccgaacgttcaagtgctgactgaagtttgaagaatgtggggcgaaaacgcgagtcaatccagatgtttggggtgtcaggtggctcccctgtctggtgccttctggccagtgggggccggggacatgacggctccatgtgttgcgctctaaaatcacataagtcggtcctgtgcaaaagggcacgcagaaaatttggggggcggccaaagattgaacaattggggccgcgaaggaaaagggaggccagacggacggggtccccaaaccggcaaccaaccggtggggaaaaacaccgcccggggactcaat

SEQ ID NO: 518565 - DNA, 670 bp, Homo sapiens
  misc_feature (123)..(124): n is a, c, g, or t
  misc_feature (126)..(126): n is a, c, g, or t
  misc_feature (132)..(132): n is a, c, g, or t
  misc_feature (189)..(191): n is a, c, g, or t
  misc_feature (199)..(200): n is a, c, g, or t
  misc_feature (206)..(206): n is a, c, g, or t
  misc_feature (228)..(228): n is a, c, g, or t
ctgaaagctcgcgatgcctctacacaagtatcccgtgtggctctggaagcggctgcagctgcgggagggcatctgttcccgcctgcccggccactacctgcgctccctggaggaggagcgganncncactcncgtgcactataggcctcatggggccaagttcaagatcaatcccaagaacgggcagcnnnagcgtgtnnaggacntgcccattcccatctactttcnccccgaatcccagcggtggagttgtggtggcggcgagggcgtgtgcatcctgggccgaaatattatgccaactaaggagcaacgtctctccagagaggcgtgaaagaacagtgtggacagccataagctgtgtgagcgagagttctagcagtgaggatcctggagcaagaagttcacaggtgactgtgaggcagtgcggacctctggagcctcatcgatgacggcttacagtgcgctctcgaacttgttacatagctacaagagccacgaaggaggagcctcgtggctccagagttgtgtggactggacctgaaagcagacggggatgctggctcgtcagcgctttggcccggcaaggcacccccgagattgggactcccggcaggaaccccggagctgggcgggtcaggcattctacgagcaagttacaaggtacattggc

SEQ ID NO: 518566 - DNA, 430 bp, Homo sapiens
ggaatacctgtaatcccagcatttgcgaggccaaggcaggtggatcacctgaggtcaggagttcgagaccagcctggctaacatggtgaaaccccgtttctactaaaaatacaaaaaatgagccaggagtggtagtgcatgcctgtaatcctagctacttgggaggctgaggcaggagaaacgcttgaacccggaagagggaggttgcagtgagccaaggtcgcaccattgcactccagattgggcaacaagagcgaaactccatctcaaaaaaaaaaaaaaattagactctatttggtgggttggctcacttttttatgtttccgggtgtttttctttccatccggccttttttacttccatcggggattacttttcttcatcgggagaattctcttaagtatttatttaagtgcccggtcttccacag

SEQ ID NO: 518567 - DNA, 285 bp, Homo sapiens
cgagtagctgggattacaggtgcccgccaccacgcccggctaatttttgtgtttttagtggaaatggggtttcaccatgtttcatcacagcccagccacacaacccatggaggccaggctggtctcgaactcgtgacctcaggtgatctgcccgcctgggcctcccaaagtgctgggattacaggcgtgagccaccatgcctggcccaggaccagtgatttctgatgtcaagaggcagacggttccggggagagatttccagaatgcgagaaacccgtgaatggc

SEQ ID NO: 518568 - DNA, 537 bp, Homo sapiens
  misc_feature (123)..(124): n is a, c, g, or t
  misc_feature (126)..(126): n is a, c, g, or t
  misc_feature (132)..(132): n is a, c, g, or t
  misc_feature (189)..(191): n is a, c, g, or t
  misc_feature (199)..(200): n is a, c, g, or t
  misc_feature (206)..(206): n is a, c, g, or t
  misc_feature (228)..(228): n is a, c, g, or t
  misc_feature (272)..(272): n is a, c, g, or t
  misc_feature (286)..(286): n is a, c, g, or t
  misc_feature (291)..(291): n is a, c, g, or t
  misc_feature (307)..(307): n is a, c, g, or t
  misc_feature (354)..(354): n is a, c, g, or t
  misc_feature (387)..(387): n is a, c, g, or t
  misc_feature (395)..(395): n is a, c, g, or t
  misc_feature (438)..(438): n is a, c, g, or t
  misc_feature (443)..(443): n is a, c, g, or t
  misc_feature (450)..(450): n is a, c, g, or t
  misc_feature (453)..(453): n is a, c, g, or t
  misc_feature (505)..(505): n is a, c, g, or t
ctgaaagctcgcgatgcctctacacaagtatcccgtgtggctctggaagcggctgcagctgcgggagggcatctgttcccgcctgcccggccactacctgcgctccctggaggaggagcgganncncactcncgtgcactataggcctcatggggccaagttcaagatcaatcccaagaacgggcagcnnnagcgtgtnnaggacntgcccattcccatctactttcnccccgaatcccagacagggggttgtagggagacaaaggataaanactaggaaaaatanatgcnaaaaacgacaaaaacnccaagaggatgaagaaagtgtggaagacacagatgtttaagcgaaanttctacagtgagatcctgaacaagaagtacacngtaaatangaccaagcggccccatggaactcatcgatgagactaatggaancaacntttacanccncaagaccccgaagaggacactgtgctccaaatttgggatgaacctgaagcgnaggatgctgctacggcttgacaggaggacccc

SEQ ID NO: 518569 - DNA, 109 bp, Homo sapiens
tcatcggggatcgatcatctgtcatcataactggacttctgctggtcatccacacaacaccaggacttaagacaaagtgggactgatgtcatcttgagactcttcattc

SEQ ID NO: 518570 - DNA, 155 bp, Homo sapiens
  misc_feature (70)..(70): n is a, c, g, or t
acacgctctgggaaaaggtggcacaggggagtcacgtggatggaatttgcaccatcagactggctgtggnccactcatgttaaacagagggcagagaaagggcccaaggaccgcgccctgagtaactccacttgagcggccaaagaggcgaggag

SEQ ID NO: 518571 - DNA, 247 bp, Homo sapiens
gaattccggcttctgggctcgtctgccattgtcttgtggctcattcccgcggtcttgtgcgccttgcccgctgtcttgaggaactacagagacagtgagccttctgtggatgcccccatttgccctctcgtcgaccctcctccagctcagacactggtctgatcagcgtctcctcgccctcggagctgtcggatggcaccttttccgtcatgtcagcctattctagtgccccagtatagccggaatt

SEQ ID NO: 518572 - DNA, 338 bp, Homo sapiens
gaagcattctctctgaccctgttggagcatactgaagaggcttgagaccccctttaggaaagactcccacctcccctgccctggcttcccccaatactcctcagagtccatagcttggctacaaaatattagcatatggtagtggacatccatagtttactgtaagacctaggtctcagtttcccctttcattccactagaattggaagccaaggaccaaatttcctgtttgctccttcataaatccaattaaaacctattggaatgcctcagagcatattacttgagcaagccccttctcacttgtggggtccttgtgttttgtttctggtcgacgc

SEQ ID NO: 518573 - DNA, 446 bp, Homo sapiens
tggaacacattgtaagactcctgtccggacttaagactcttcgctttcactattttcgtaacaggtcaggaaaaattcaaccaccaactcgaaccactccacacaaaaattttctggaaatcaggcaagatgaaaagaacttctacctcctgacattccctatatttccaaagtgacttatgattctcggactttttgacgaaccgactaaactgattatttccgaccagacaatagtctgacatatctccacccttccgatttgactccttaatacagactgtctacccttctttactgacgccaccggaagagtctgggacatcctttccagaaatgaataagtcaactttcacagataaatctgattctccataaaatcaaaggactgagcccgtacaactcatttcgattaaacggtcaggacccacccccgtttaggagct

SEQ ID NO: 518574 - DNA, 110 bp, Homo sapiens
ggttcgcccccttggccgatgggaatggtctgtcccaatctgctccttttttttgtcccccccacgtaactgaaatgctcctttaaataaagcgtttgtgtttcaagtta

SEQ ID NO: 518575 - DNA, 336 bp, Homo sapiens
gggtttgaccccgtcaaggctaccgtcgcggtggacccggaaccggcactaaaggtgggacaaaaggcatgtcttccctttcctgggtgcattgggtttcggatgcaggcaacatctacagtgcagtctgaagagattgcagatctgcaacaggcagttggttgaggaactgggtatctctatcgaggaacttcggcatttcatcgatcaggaactcgagaagatggctctgtacagccacgcaaggagcagctagcagagttagagacatgggtaatacagagagatctcaggtggctcacgttgaccaactctttgatgatgcatccagggcag

SEQ ID NO: 518576 - DNA, 754 bp, Homo sapiens
  misc_feature (197)..(197): n is a, c, g, or t
  misc_feature (299)..(299): n is a, c, g, or t
  misc_feature (305)..(305): n is a, c, g, or t
  misc_feature (329)..(330): n is a, c, g, or t
  misc_feature (332)..(332): n is a, c, g, or t
  misc_feature (338)..(338): n is a, c, g, or t
  misc_feature (341)..(341): n is a, c, g, or t
  misc_feature (344)..(345): n is a, c, g, or t
  misc_feature (355)..(355): n is a, c, g, or t
  misc_feature (368)..(368): n is a, c, g, or t
  misc_feature (374)..(375): n is a, c, g, or t
  misc_feature (398)..(398): n is a, c, g, or t
  misc_feature (400)..(400): n is a, c, g, or t
  misc_feature (416)..(416): n is a, c, g, or t
  misc_feature (430)..(430): n is a, c, g, or t
  misc_feature (436)..(436): n is a, c, g, or t
  misc_feature (457)..(457): n is a, c, g, or t
  misc_feature (470)..(470): n is a, c, g, or t
  misc_feature (497)..(497): n is a, c, g, or t
  misc_feature (499)..(499): n is a, c, g, or t
  misc_feature (503)..(503): n is a, c, g, or t
  misc_feature (522)..(522): n is a, c, g, or t
  misc_feature (541)..(541): n is a, c, g, or t
  misc_feature (753)..(753): n is a, c, g, or t
aaaggagggaacgcagacagctggcagagagagaagttggctagcatggaatcaccagaggagcctggagcatccatggatgagaactactttgtgaactacactttcaaagatcggtcacattcaggccgtgtggctcaaggcatcatgaaactgtgtctagaggaggagctctttgctgatgtcaccatttcggnggaaggccgggagtttcagctccatcggctggtcctctcagctcagagctgcttcttccgatccatgttcacttccaacctgaaggaggcccacaaccgggngattgngctgcaggatgtcagcgagtctgnntnccagcnccnggnngaggagagcnaccaggggacggngaaacnncgagcggaggaggggcaggaaangnaggagggggcagacanggagcagcggacancgcgcngggaggaaggcgcgcgggggngggcccgcacagngcaagggggaaacggccggcaggggangnggcnggcagagcggcacagggancgctgagcgcgagacggcngccaagcactgtgccaagacccacctggcccagctgcagaatacagaggaatttctccacttgccccaccgcttactcacagatatcatctcggatggagttccgtgttctcagaacccaacagaggcaatagaagcctggatcaactttaataaagaggaaagagaggcttttgcagaggggggggggggggggggggggggggggggggng

SEQ ID NO: 518577 - DNA, 325 bp, Homo sapiens
gaccactttcagagataagagtagatagtaagttgccagggttaaggaggatgagggaaaaggagggaagcgagtgtggctataaaagagcgacatgagaaaccctgcagagatggaaatattcagtatcttgagtatattgatgtcaatatcctaattttgttactattgtgttttcaagatgttaccattgagggaaattggtaaagggtataggggatctctgtattatttcctataactgcaagtgaatctacaattatctcaaaataaaaattttaattaattttaagaaatattttccccaaatggtggaagttaagtg

SEQ ID NO: 518578 - DNA, 1372 bp, Homo sapiens
  misc_feature (1)..(1): n is a, c, g, or t
ntgtgtgtgtgtgtctgtcggttccctgcggatgagatgtggagtggagaagggcgctatcttatatcgtgttggctcttgatggggtcatacgccgaatgagctggtgttctcgctgtctgccacacctgttggtttggcttgccgcgattacgttctcacggggttgtcccggcttccggatcctttgtggggccacgataaccgggtgtttctgagatgtgccgctgtggggaagcggttgatatttctgctctcccttggagataggggcgcccctcgggtgatgttcgtgtgtccccggggttgcttgtcacatgtgcgctccgcaagggtggttccccgtgcagaaagtgtggaccctttgtgagtccgtagtttgcccacgcctcgcagctttccagggtctttggggccttgttcccctcgtcgttgtcccgcgtcgtgccggttggccaggtgtttgcccgagattcgggggtctccgcccgggcgcctctttgatcgcctcaggtcttgtccacgtgcctggcggggtcccaagacccggtctaggcactccccgtgtgtgcccgggtcccccgtgccctcgtgggcggcctgatggggttcctggagggcacctgtacccttgccccagggtttgtgtttgtgttcccgggcccttgcgaatcttttgtcgcctgcctgcccggggtctcctccccgggtccccggtccagtgccttgcagcttccacctcgaggcttccggctcggaggacttctccgatgcctttgtggacgatgccttgggccccccaggaccattcttgcgaaagaggcgccctcggcccttcccgggcgctagccccattacccccttttttgccacctccgctcctcttcacccgcctcttccccggggcctgcccccgcccccctcggtcgcggtagcccgcgggtctctctcgcggccgcgttcaccgggatccccctccctttttctgcttcggctcccgccgcacacgcgcgtagagcccaggcacgcagccctaagttggacctcgcttcccccggatgagcagcccgcagggcttgtgacttgggaggagggccacagaagggcccgggagggagcgtttcgcccacgcgcttcgcctgaagtctataaaggatgaccgaatgttgcacgcctggagaggggtggaacgttggacccacactggagaattctttctcgcttgttccaaagaaagaaaggaaggaagggagtccattagcactgtaagaaagtggatgaagcggagaatgggggctttgctccctgaaatagagcacccccctttcctaattaacaaaaatgggacactctttaacaaaaaaaaaaataa

SEQ ID NO: 518579 - DNA, 882 bp, Homo sapiens
gaagaggaggtggagaaggcttgggctcgcgccgctgaagtcggcttacccgcatggccgcactccatgacaacgcgggacgggatcctgcggttggaccccagggcaagcaggagcgagcactggacggaccaccccactcattcactcacgttcacctgatactactcagtcgcgtctcaggccatccgcacaccgaaccaggaacgcaaagtgacgctgactgggacagatcctgtattgaacacctttccacagatgacgatggcgattcatccaaccatgcgaacgatgactggcccatgcaagaggacggcagcgtgtggcatgagccgtcaacgctaagctttacacacccactcaacgctctacgagtttgagcgaactacgtggccaaccctactacaatgcaacaacatcagcatagcgacaggcactcatctgaacagctgcaagatgaagaaacctctcagcccacacagcacgacaggaggtagagcaaggttaaaccccaagtgtcaggaagttcatcagaccctgattctggacccagcacaaaggaagagactccagcagccagagtgcagcagcatgttcagctcttgacacaaatccaccttcttgccacctgcaaccccaatctcgaatccggaggccagtagcaccaggatatgtcttagagagctgggaacctttgctcagagctccatcgcccttcaccatcagtacaacccccaagttcagaccctggtcaacacttgtacttgatgggagctatgcagctgattgcagaattaggacacatgctcggatggactggaggctactaaactggtagcagatggcatgaataccctgatgcaaaacgagctggaactgggc

SEQ ID NO: 518580 - DNA, 411 bp, Homo sapiens
gcttttcagctatgagcagccaaatctgtgtctggttacagtatcctaataagttattctctacaccaagccacctgggtcgagattaaaaggaagaaactaagtcttccagtaaacctatacaactatagggctgaccctaaatttgttagtaagcaatccaatgtaggtagagcagggtcaggtttgatgtgttttggccgacacgaagggcttaggtctcattcgtttacatattagatacaacaactgatggggctgaggctccttatatagcttgcttagtagtagcttatctattggttgagcccagccaaatttaaaggtactgagactaagaaaaaaacaattttttttttttttgagatggagtgtcagtctgttgcccaggctggagcaagactgtgtctc

SEQ ID NO: 518581 - DNA, 583 bp, Homo sapiens
gctggggatgagcgcgagccggaccatgcgtccgggttcgcggcggtgagggtcgcggccggcggccgaggacgcaggtgcgggtcgagagaccggcgcctccctccccgaccgcccgtggactctgagcgcaggtgtttctactctgaccggccgctccacctgggaaagcgccttcaagagctacctctggcggcacctggccctcagctgcagggaaaccgcactcaaacctgccgccgagcccgggattattctgcaaaactcagaggacctggctcttgcccgaggtgccctgaaccattgtgtgaataagctggggaagcctgactggagtgtaatacttaaaaataaacagagtataactgaatctcaattgtaggaaagttacggtacgcgaagattcagcaatactctctagctcttcgcaatcctctcttgctcgtggagatcatttgtacgctcctcagggtataacatagtttggtacgtatcggacggagcagaccaagggatgaacgtctatgtgaattgcaagtataactgttaaaacacaggatcggcgatcagtaggtcaaagatg

SEQ ID NO: 518582 - DNA, 384 bp, Homo sapiens
gctgtggtcgatctagaggtccccccgggaatgagtaaggcctggggctgggggaagaggggagaaagagccagacggtgagtatgccacctgtggaattggggtagagaggcaggctgtaccctttgggccagtgaaccccagcccccagcacccttggaaaggagaaggaatgacggtccgtgatgagcgaagtcacatcccatgggctccatagtcacaggtaacgaaaaatagggggggttcaaagcctcagcaccaaatgcaccccattcgggggctccctcatggtccctcccagccgggacactctcagctgctgaagcagagggggcccagttcaaacccaaattttgggttcgtctggccaaagtcaggggccgc

SEQ ID NO: 518583 - DNA, 246 bp, Homo sapiens
gcgattaggaacgtcactgtattctctccactgtggtgtcacatgcccactctgccctggtgaaataaagaccagacacccaggtggaaggcagcccatggaggtcgaccatgcctctgcctctgataaccaatacgtgactagttggctgtcctctaaattccacagcagggtcacaaactcttagaaccacccatgcggcacgttccacgccatcaatgagcccaagggccagcatctcctgga

SEQ ID NO: 518584 - DNA, 313 bp, Homo sapiens
cccccccctttttttttcccccccctccccccggggacccccccccccgggttttttccccccaaaagaaccccgggggcgccccccccccccccttttttcttgggggggggggggggggtcctttttcccccggggccccccttccccccccggccccttttggggcccccttttacccggtttgggccaaaaaacgggggggggggggggggggttttcccggggtttttttccccccccccccccgggggaatttttttggggggggggtttttttcccccccccccttttttgtttttttttttttta

SEQ ID NO: 518585 - DNA, 176 bp, Homo sapiens
atagctgttctcgaggatcccagagagccagtgtcattcgtgcctacgtgctataaaaggtgtgcaaggtagactgcagaactcagacgacagatagggaagcaatgaagggggcccttttaaggctcccaccatagagactgtggtgctgtacacaggaaagacaaagggaaaca

SEQ ID NO: 518586 - DNA, 352 bp, Homo sapiens
ggtaccctgatgtggtggcacatacctgtagtcccggctgctcgggaggctgaggcgggggatcgcttgagcccaggaggtggacattgcagtgagcagagatcatgccactgtactccagcttgggtgacagagcgagactgcacctcaaaaaaaaaaaaagtatttcaggggatcctagtggccagtttccttggttcgtatacgggctacaacaagtagttttggtggtgattggtggaaacagattctggggagcattatcagagctactcagctttgatgggcacatccatggtggtacatgtaggatcacagtagggagaggggatcctctaaaagtcgcacctgc

SEQ ID NO: 518587 - DNA, 455 bp, Homo sapiens
tttcaaaaaaaaaaaaaaaaagggggcccaaggctttctgccaaaatttttttccaagggttttgggaaggaaaatttccttgttttttcaagtcaggtaactcaaagcaaaaaagtgatccaaatgttgggtttgggtttgccctcccggaatttggccttactgtaaattttttcctgggatttttgctaaaattcaggggtacggggagttcccaattttcctttttgttggcctggaatgcggacacttacttacattttaatgttaactcaacctttggggcctgggatggttgccttaatgctttaatcgttggatcgccccctttccccaaaattataaaaaaatccctaacctttttttagggaaatttttaaagttttacaaaattcaattttgcaattttcaatgtaaaggacctttggatggtttttaaaactttcccaattta

SEQ ID NO: 518588 - DNA, 394 bp, Homo sapiens
cgtatttgttcactcaagagaaagttataagcgtggattcagattatgtgagctgagatccatgtatagtcactgatgatatcatgcattggcatttcatagctattggtggtagtgacagagagtcttatgttgaaccatgggataccattgaatgtatgtgtgaattgtggtatacagctgatactatgatgatatcatgtcaggctctgtgtagtgcagcaactctgtgctaccccatatgtgaatcacagtgtcatcgttaccttagaggcactggcaagttccacgattgcgcatctcactcttatgtgctcatagcttgtgcagatagcttctgatattgtgggaagtcatgaatcattgtttagacattttatactcgggtcgtttg

SEQ ID NO: 518589 - DNA, 247 bp, Homo sapiens
ggatgatgagagtctgaaagagctattcagtcagtttggtaagaccctaagtgtcaaggtgatgagagatcccaatggaaatccaaaggctttggctttgtgagttacgaaaacacgaggatgcaataaggctgtggaagagatgaatggaaaagaaatagtggtaaatcatatttgtaggcgtgcacaaagaagtagacgcagcagagttaaacgaatttgaaccgttgaaccggagagaattagt

SEQ ID NO: 518590 - DNA, 427 bp, Homo sapiens
tcaaaaggtgaactattggacacaaagtttgcatgcagtctctataaactggctgacactggctcgaggtcttcggttgcttatcaggaaagaatttttgtaaggctggtcctttgtccaatcagagctatagtggtttggattgtaaatcaggtttggtaaggttctgacaattttcccaatagctcctatttttagcaaatttagcaagattgtgttttttcttgtagccttaggaatttgcgaagttcccatgccaaccaagccctgaaccctccacccataggtaactttggttttcttaactttagggttcttcttagttgataaaggagcatccattttggtcttccacataacagaacgcaatttgacgagggcggttagtgtgagtaaaatactcaactcttaaaatctgcattttcca

SEQ ID NO: 518591 - DNA, 115 bp, Homo sapiens
cggtccgtgatgttatgcccaacactctctatcattatacatttaatcaacaaatatttatttgagaacctaccatgagctaggcattgttttttggttgttggggataacatca

SEQ ID NO: 518592 - DNA, 869 bp, Homo sapiens
aatactgctattgtagatggactggtgtggttaagtctgtgcactgaggcatgccaggcctgaggttatgctccaggctgacagtgctgatgcccgatggagctcagtgctgccacccactgcttgcattgatcgccaggactggatgggatgctcagtgctgcccacccactgctggcaggatacgccaggactggatgggaatcccgaaactggagatgaacctaccctcggcaactttacaatgactcccttgaccagggtggcagagattaaaaaaccccacgctattaaacaaacatataattgggggtggctattgtgcaccttgaaaaacaccacaaccagcttgaccatgaatggccaaagcccttgcccaaaaccattttgctccccatctccttgggtacagtggaagtgaggaactgtgatgagaatgtgtgaaatgtgacatctaacatttgcatgcagaaggacctggtgggagatgcatctcctatgtaacggaagatctgaatgaaagggaaaagataaatgactgtaaccaaagtgaaccaacagaaaaaaaattaataacacattttcacgataatgtgatccagccgtgttcctgattccgtccgaaaatatactcaggcttgctatatgccggacaccatccctgtccaccacggaggcgatgctacgcgctgtcttgccttggaaatgtccccaatgggctccgcaacgtctcatctctcatggctcggtccaatcagccgacagaggagagtgatctttgctgccatgacatcggggtacatgaaccaactgctgtaggccagatgggttgtgagcagctctgcatagatgatcgtgccagccaaggc

SEQ ID NO: 518593 - DNA, 961 bp, Homo sapiens
ttctgtcactagtatggaatatatccctgagggagagatttggggtataagcttatggacgatctattgcttttcatagtgcagtacgttgggacccagtctaaatcctctgaagcgcctggaatcatcacattctggatctctatcgatcctgcatcaaaggaatcctctttgtagcgaggcggtgaagcattttatattgtgcattaagtgatggatgtataatgaggtggtagaaggatattcaggaatgcctacagagggggacacgtgtggtctctattccaccatggtggtgtacattaagtcctgatggtaggaactctatgccagtggattctagatgcatggtaatatgtggagactatggcgaaaggtggtggtaggaaaaggacgtatgggcttggggatatgtgtggttcgcatgaagaagatatgtggtgagctggcaatagtccaagattggtttttccagtagtaggagcagaagaggagctagaagttaaattggttggagaggaattccagagtgcatctgttccttcagcgtcctgatgttaaggctgagcgtcatcatatggtcgtagttagggatacaagtgagtaaagactatgctagtcgagaggagcatgaggcttgaagagttactgtctgctttaagggaggaacaggagtaggtagtgaggcacatgaattgttccagtggtggaacgaataagtaattggggtgctgtatgggaactccaggttcgtgaagggagggggtactcaaaaaaagaggtggcattggtatgaagtttggagtccagtgctgtgcacaggtctgtctcgtgttgattgggcaaccactggggggttgggacacaaagtgtgggcagtagaagaaagtcaaaggggtgaagacagggaaagtgtatagaaaaaaaaaggggataagggaaaaaaataacacagtgatat

SEQ ID NO: 518594 - DNA, 645 bp, Homo sapiens
  misc_feature (11)..(11): n is a, c, g, or t
  misc_feature (39)..(39): n is a, c, g, or t
  misc_feature (74)..(74): n is a, c, g, or t
  misc_feature (631)..(631): n is a, c, g, or t
  misc_feature (638)..(638): n is a, c, g, or t
accccaggttnttcgcggtatataagagatgtttcgatngctgaaattgggatttcaggctcgtgccacgtcangaggtataggaccttcgacgattttcttagcctgcagactaagggagaaaagctcaatcgttgagcttgtgctcaaattgtctgagtagaacaatcacttgaatcgagtgggagttgatcttccagatgagatagtgatgtttctccaaagtcattaccaccacggtgctagagctttgtgatgaactgtaacatatcagggatagatatgatgatccttgaggtattcacgatgtttgacaccgcaaagtagaaatcaagaaggagcatcaatcgttgatggttggtgaaaccactagtttcaagaagggcaagggcaagaagggacacttcatgaaacggcaaatcagttgctgctccagtgaagaaacccaaggttgaacccaaacccgagactaagttcttctgtaataaagggaacaaccactggagcagagtaccctagatactgtagataagaagctgccagtcgatagatatattggatatgcattatgctaatgtgtactttactagtactcctagtagcaccagggtatttatgataccgcgaaganatcctgnagagccg

SEQ ID NO: 518595 - DNA, 735 bp, Homo sapiens
gctgggtaccagtacaagaggactagaagaggtgtctacccacagtggcgtatatgagtgtaacacaggctgcaaagtgtgaccgcaaatcgatgtgcactaaaccggttggtgcagacatggactacaagttcggctacaagctattcaagactacatgaagcaaggggctgggagtatccgcatgtcgttggatgactagttgcccaaaaggctcgtttagttccgtatactactgcaggtcaaaaatcctgcatcagtatgactttgcatgacaaggagggtgctgagaaagtgggctgatgaagtagctcagcacaattctggtaccatatcgcacgagcggtggaccacatgcattcaataggtgacaccgagtatgaggacgctgactgcaccccctgtttcgcgtctgcaacagcagttggctgtaggaccttgagaaggacctaggagcaacggatggcacacaagacggagtacttagcatgtgaaccacgtggcacgtagttgccagatgagtggattaggcatccaaggaagtgcagtcagacatgtccgtgggcacaccgggacatagacgggaccacccgacgcgacccacgggaacaacgctggctggagggggaccgactgagtggcggcaaccacgagaaccggccaggaagccccagaacgggcccagacacaagaggacatccgggactgcctcgtgaagaaaccaaacaaacacac

SEQ ID NO: 518596 - DNA, 254 bp, Homo sapiens
acagtccaggatccccctgctccgcccctctctgactacctctgataaaattaccaggcacagtggctaatgcatgtaatccgagcatattttgaggtcgtggagggcggaccactagaggacaggatgtcacgatcagcatggacaacacggtgtatctctatgtctactaaaaatacactatgagccgtgggttcctacctacatgcaaaagcagagctaactgtagagcgggagccgcagactggcaagaa

SEQ ID NO: 518597 - DNA, 116 bp, Homo sapiens
gtgctggggtgactctacaggatcttgcgagttaagcgggtagcacaggcctttcgggagggagagaataccaggttgcagagcctgaggcctgtgatcagattgtacgggagctt

SEQ ID NO: 518598 - DNA, 252 bp, Homo sapiens
aacaacaacaacaacaacaaatccctaagataaacagcattagctttaaagcccataatatttggcagagaaaactgctatctgaggctggaaagatggggatgccttgacaaaacatttgtcaaattggtctcctgttatagattcaaaggcagttcatgtacctagtgaacttgcagcttcccaagcaagagattggaaagaagaatattagtagcagtagttatctgctttaggcagtatttgccaaga

SEQ ID NO: 518599 - DNA, 144 bp, Homo sapiens
aggatatataaggaacacgcgactgtctagactcttcaccctacctagccactaggggactcaggcctaggccgcaaacaccccctacactcaggtcccctagtgccgctcagaggtggctcatgggcctattgcactaggcta

SEQ ID NO: 518600 - DNA, 175 bp, Homo sapiens
ctgcccacaagtgttgtggtaaatattagagggagtatagggctgttactagtatgttgagtcctgtaagtaggagagtgatatttgatcagcgacaacgttgtttctagcacagagagttctcccagtacgtttctagtgcggggtaaggcgaggttagcgaggcttgctagaa

SEQ ID NO: 518601 - DNA, 705 bp, Homo sapiens
agcgggatcgcgcacgtccggagccatgccgaccgcaggcgccgtatcgcgctcgtctagcagccccggttacgcggttgcacgtcggccccagccctgaggagccggaccgatgtggaaactgctgcccgccgcgggcccggcaggaggagaaccatacagacttttgacctggcgttgagtacgttgttgggaaggaaaaactgtgccattctgattgaaaatgatcagtcgatcagccgaaatcatgctgtgttaactgactaaccttttctgtaaccaacctggtatagaacaaacattttggacatttctacccgaccccaagtacacaaattgttactagtcaacagcacgatgaaatccctgtcttgacatttccaacacgataattctaagtatggtacctttgttactgacggaacaacatgcagacatggctttttcccgaacctttgaagtcgggggatggtataccttttggacgtgttggaacgtacaattcacgaatagagtatggcagcctttggttgcatgctcttcttgtttagatgtctctgggaaaactgctttaacactcaagctatattgccaccttggaggatttactgtaaacccactcggaccagaccgactgcactcaccttggtccatgggtcatcaagtgaacaggttaccccattttaacacaccaaatcatgtgca

SEQ ID NO: 518602 - DNA, 497 bp, Homo sapiens
  misc_feature (14)..(14): n is a, c, g, or t
  misc_feature (269)..(269): n is a, c, g, or t
acagcattttatanaacttcatgatcaagtaacagcgattacacctataaagaagaaaaaattctacacattcatactttgcaaatgggaagagattcttcaaagcatttccacttttaacaaatgtctacttaaaacctactgtgtgctaagcatttttctaggtgctagggattcagcagagagcaaagcctgctctttcagcggttatcttccaatatgacaaaggctatctagaaattttatttttttttagcttccttcaattntccaaggtcagtggttcccaaccaagggcccacactgtcaggcgtgaaggaccataatgcgaattaattaggcaggatgagatggccaaaagttctgatcctctataaacaatgccaacctgtgtgacataaaatgcacatagggtccctgctgagagatatttgttctaatataaccaggtgctacgggttgttgttctttcttgaattatttttcattctgcgtcg

SEQ ID NO: 518603 - DNA, 945 bp, Homo sapiens
gtgaccaagcgcctgactcaatgctgggaggctctggagcaggccttggacacgcatgatatgcatgcagaatatatggactcataatgtgacatcctgatgtggctagtcgctatggacgcctatacgccgtgtaatgcagtgcttgccttagtatctcatacatgtataagcgttatcctgtgagatataggtcacgtgtcctaagttccaacccatgggagcggatgtgtagcggatcgaattcctgatgtgcccagtgaccacggccagaggtccgtgtgaaatgggcatgaactgctgcaatgctcatgtcctggagcggagaagcaatgtgaccaagcaatgaggacagctggaatcgttacggtctcaccgtcagcgaataccgtattgtgacgcactaacgagctagggcttgggaccctgggacaactgtagtagcagagtatatctttgcagtgggctccgagccatcaaaccgcatagattgaactcatagatggggccgaagggggagcggagattgaggaggcagtacacttcagtagttgctgtcccctgttgttgtctcagattctcatgtctgtctgcgtaaatgctgtgggccaaatggccctgatcgtggaatctagaagtctctgggagtaaggatggtgtggtgcttgagacaaatgactgtccaagggatatgagcttatgagtggagatatgttctgcttgacaagagtccagagaataaaggctggtttgtgatcatatgtatgggtgctagaggtataattgagaaggggataggaagcacttattgagtgtagggcttgtcaaaggtaactggcaatgaggagaagatcgtctggaaaaaaaggtctaagggttgaagaaggggccaaaaggcgcggcaagtgttggcagttacagtcgggaaggggtacgagagggggg

SEQ ID NO: 518604 - DNA, 276 bp, Homo sapiens
tttcccccccctttttttttccccccctttttccccccctttaaaaaaggggaaaaaaccagggttttgggggaaaccctaaaaggttgccttaaaattttttttgttttcccccccccaaccccttagtttaatcctgagggaaaatttttgggcctaaagggttttttttttttccaaggcccccccctgccttttttaaccctcccgggccggggtttaaaaatttttccattaaaaggcgggtaaaaaaacttccaagggggttttagttta

SEQ ID NO: 518605 - DNA, 915 bp, Homo sapiens
ccgcagggagcgaactgggtcgggaaggggggaccccggggagacgccgaggaccggagtggggtccccaccgagagtggatcccgggagggcgcctgtgccccccccttcggaatacgcgggttttagaatctggcgcccccggaatctgggacgtcaaaccggagattctgccccgccgacgtgccacaccgaggcccagacgaaggagagaatccgcttaggacgcggcagcccagaagaaggaagagggaaagccccacatgccccccgggatttgatttgatgatgaggcaactgacaccaagggctcctggttgccggggacgctcccccgggtgctcatgcccggagccagaaacgggagggcccgcctggacaaaggctgtcggacatgaagagacacacagaagctgggggaggcagaatccttcgtaccgggagggacctcttcagcctggagactcggagggaccccaagccctcgcccagccccccactgtcgatcctccgggagtaatctcttccctcggcagcgggaatactgattcccactgctcctgcctctagggtgcaagtgtccgtaacctcgctggagcctgggccctccttccccaggcccgacattgaggaacttgggaagaagagagcaacctccagcttccaaacagcacgttgcgggagaagaggaagagagagtgtgagtgtgtgtgtgtgttttttctattgacaccctgtagagtgtgtgtgtgtgtttttttttgaacacctcatagagagagggtgtgtgttttttattgaacatttatatagagagagtgggtgagtgtgtcgttttttattgaacacctattcagagacctggactgaattttttgagtctgaaataaaagatgcagagctatcattttttta

SEQ ID NO: 518606 - DNA, 300 bp, Homo sapiens
gaagacatgtgaggacctgagagctggcagacgcaacttataaatgcttatagctcttcctgctggaggaggaggtggtggtgtacttgatgtgtggaactgccgactccaacagagctaaagaacacccccaatggctctgccactgctggcactgaagccacctccaacgccaagaccactgccataggagtagctgcttcctccacccaggcctaagccactgccgacaccactggaaccgccatagccactggagacggtggactgcaccacagagatgttgcctttcggagaaga

SEQ ID NO: 518607 - DNA, 305 bp, Homo sapiens
cgtcgtatgtaacacaaactaaacatacactttgccctacctatttcatcaaccaattctaatttccttttggttaagccagtgtttttttttctcctttttccctcttttttttgttttttgggggccaaaaaacccccctttggtttttggcccctttaaaaaaaacgggtttttgggggggggaaattttttgttttttttggggggggtgtaattcgcggggaattttccctcttctcttttccccccccaaaggggggggaaaaagggggtggaccccccgccccggccccttctttttt

SEQ ID NO: 518608 - DNA, 265 bp, Homo sapiens
tataaccacatacgaggacataatcagaaaaaccacattcttcgctatccaggacaacaagcagcactaagtactcccactctactagcagacataacaaaaaacaacataccttcaacacagtgtaaaatatacagaggccagctgcccacaggatgcatgatcctatcaaacacaaccagattgctgctagccctgccaagtacttccaatccctacccaagtcctactgaaatacgggtggtcccaatcagtactcttgacc

SEQ ID NO: 518609 - DNA, 573 bp, Homo sapiens
gtacccgttggaatagcgggtttgcagcaatgtgcatatggattatataactgaagagcagggaaatactaaagtccatcatctgatccacatgcgtgtggagccaggttgtgtaggagcaagacgtggtatgggctatcagttcgggaatctggaaaactagccttagagaagagatgctgtctggtctgtggaggagctgttagttagatgtcttatataagttacctatatgtggaaataatatgtatgggtagatggtacatgcatttgaatatggttcctttctgcggtgattgtgggacgaattactagtgactagttactaactaggtcatcaaggaagtcagttaattaaacatgtcactaaatgcctgagggtgaaatgtcccttcttaaattttaagatgaattagttaaaagatacggcatcgagtctccgttgtgcgaagtaatattgatgtgctaagtcattgccagtatcaattgtctgctgttgtgacgtgctcgtaaatcgtcaaagtctgaattactgtaagctcccacattgcatattatgctgggttaacaatc

SEQ ID NO: 518610 - DNA, 338 bp, Homo sapiens
tcccaggagcttaacatagaggcaggaggattgcttgagtctaagagtttgaggttacagtaagctgtgatcgtgacatggcctccagcctgggtgaccgaatgagaggggtgtaaaaatatgaaattgaggctgagtgtggtagcttgggcctataatctcaacactttgggaagccgaggcgggagggtcacttaaggccaggagttggagaccagcctaggcaacaaagcaagaccccatctctacaaaaaaaaagggagaaaaaaaaaaagagaaggggttaaaataaccaaatatcgggggggcccgcccttttttttcggttggggggtacc

SEQ ID NO: 518611 - DNA, 80 bp, Homo sapiens
aaggctgattacgttcgggaaatgctgaccacgcaggcggagaggttttccaaggaggaggttgaccagatgttcgccgc

SEQ ID NO: 518612 - DNA, 313 bp, Homo sapiens
ggtagcacacctaggtcagttttgcatgtgtaaagccatttaccaagatagttgtaggtaagaagggcagatttattagagaaattgtgaaaatatgttgcagtgggcagctcagcagagaaggggctacctgcaaagaggcaagggctggaggaaagttttatagggtcctgctgaagggtgctacgtgtggaatgaggtcattgtgcccgcaggttgtttgtgattagctgtctctaacaattgttcatacaataattgttcattattgttctcaacttggggctctcccctacctggagacccttcctta

SEQ ID NO: 518613 - DNA, 220 bp, Homo sapiens
ggaaaacctttaaaaaaagggaaaacttccgtggggccctttaaatgtttttctccccgagggggaaataaaaaaaaaccccccccttttgttaaaggtggagaagctggccacaaggagagccagatccacaggctttttaaaaaaatgaaataaggggtctcccctgattatttttttaaagggggtgggtaataaacagggcctgctttccaattta

SEQ ID NO: 518614 - DNA, 524 bp, Homo sapiens
tagtccgtgcgagaataccaaaaaaaaaaaaaaaaaaaaaaaaaaaaaatattttggggggccccggccctgaaaaatttttaaaacatttcggttgggggcgcgggcgcccagtatgggtaggtgacccggcgggccaataggcgggcttccctaagaaagacccggggcaaagagacataggggcgtggggttctctcacaaattaaaaaagcgccgggggggaaaccgaacgccggtgcggagaagcaactctcaaagagtgggggtccggcgaggcgcccctaaccgggcgattcatatccaaaggggagaggtccaagaggagaggcccagaatattaaaattaaacgcgccccggccccgtgattacagcagagcacagaagaccaggtaaagaaagacacacagcacagtacatcgcacaccagataagcaaacagcacaaaccacacgacaagaaacaaaggagagacaacagcgagaggcacaaacaagaacacagcgcgcaacatcagtacaaa

SEQ ID NO: 518615 - DNA, 430 bp, Homo sapiens
ggcctggtactggtccccggacattttggatatgtcgacccacgctgtcagccgggctgcctggccgcgtgacggcaatggtggtgctgcccccgcggtctccgcgctgcactgacaccgcctccgccagtggccggaggcaggagctgcgtctgagcccatggcgaggggacccgccgacagcgaatctaactcaatgacaaccagctaatacggacagcccaagatatccacagcaaaaaacaagtgagaacacgaacctaaaaacatcaggatattaatagagatcagtgactgcatagccaagcgtagcagcgacatacttgagaaacatagggtatcagacagagatatacaatgcaaacgatcactaaattatgaagacatcataacaaagaatagataaagtatgaatagaaaacagcaagat

SEQ ID NO: 518616 - DNA, 181 bp, Homo sapiens
ggggaacagggagttacgattttgagtagtgatagcccctgggttcttatcacatgagtaataagcagctctttcgttagtggaaatgatcgttacacagctctgtcaatatactacaagccattgaactgtacttgaaatgggtgaatatgaattttatctcaataaagcagtgcaaaag

SEQ ID NO: 518617 - DNA, 429 bp, Homo sapiens
attcgcggccgcgtcgacgcacgaatcacatgtctgcaggctatcctatgatcatgtaatggtgcagactcctactctcaatggtcatgaagctccctggccacaagctgagcagtgctgcctgggtcaaaagcaacccccaagaaaggttctactgtgattacccagtaatctgcagaagtacagctggcactggatgctcgggcccagcaatcagatgtcacacctaaatctaggacagatggcaaagctggtagacacacttccacattttcagtctctgtgggaaattaaagctacctgatcacacacacagggagcaccactatgatgatcatagtacctgccacatggagaatgcctttgctgcttggggaccacggaagcaggtaatgcaaaaggacaaaagaggtataatctaggtcgagc

SEQ ID NO: 518618 - DNA, 199 bp, Homo sapiens
gtggatcggccttctgacgacggcaacttctcgctgctcatccgcgcggtggaggagacggacgcgggggctgtacacctgcaacctgcaccatcactaactgccacctctacgagatgcctggcctgtccgcctggaggtcacctgacggcctgtgagtgcttcccctccgtgactaagtaccgaataactcttcata

SEQ ID NO: 518619 - DNA, 169 bp, Homo sapiens
ctcctccgtatattgcctgatgctgaggttgggtatgattgatcacatcacccagtactacacatagtacctaatagtttttcagcccgccctgctctttgtgtgtgtgtgtgtgtgtgtgtgtgtgtgtgtgtgtgtgtgtgtgtgtgtgtgtgtgtgtgtgtgtgtg

SEQ ID NO: 518620 - DNA, 974 bp, Homo sapiens
gcatggtagaaactgaagatttaacagagaactgtgttttacccgagtgccaaaaatgctgtgagcctccttgcacaaaatttataccactttcgcatttttatctatcagtccagatagttgtctcccctccttctcccaggacctctccaccattaaaatgcacaaaccacatggccgatttcaccatttacatttattttcaaaagttactacaaccaaattaacttctacttagaacgaacactgtagacaacattctactaacacgagctactagactcgtgacctaagaaagaaactgaggcaacagaaccaaaccacttgacacttcacctgctacactgggctgactacacgatctgttctcaagctcagctgactaatatagccacttctgggtacttcagctatcagagatcagttctcgctggatttagacagtctcctatctatagcctgactatccttgtccttgaatatggtgtaactgactatcggctctaccagctcttactcgggccacctctaagaaatatctccttggaactacacctatcccgagaaacacagtctcacacgcgctaataccacaactaacttgttacaaccacactgtcactcccggccactgactgtcaggccacaattatgctcccacttttctaccaataattcttcagctaattcacccacccatctattcctcgaagccatccacacgaacttacctggtccatccggaaatcctgttactccttatagtggggaaccacgggcccaaacctacccacgacaggacggttcccctacatcggcgactgccaacaccgaacgcacggacgactcgcggcaggccacgccgagacatgagaaccgctacagacatgcacgccgccccccaacggcccccggtaccactcgaggccaccgcacatcccactgaccaccaccccagctatccgcctcccagg

SEQ ID NO: 518621 - DNA, 272 bp, Homo sapiens
gggggggccctggcccccaggctctcccacgataggccctggggggccctggcccccagtggttatcgtgtgagagcctgggcaggatcgcatcagaaaggtgctgactacactgggttgcccgagacacgtcaacgagcactccaccatccgcattatctagcccgtcacaagcatctctgtgagtgccgctgtcacgtgcgcatcttttgttggcccaacgagaacaaacagttcgaactttcgcaatatagctaacaactataaatcca

SEQ ID NO: 518622 - DNA, 239 bp, Homo sapiens
  misc_feature (172)..(172): n is a, c, g, or t
gaattgggactacaggcgccgccaccatgcccggtaattttttgtatttttagtagagatggggttcactgtgttagccaggatggtctcgatctcctgacctcatgatcctgcctgccttgtgccttcccaaatgtctgggattacagtgtgtgagccaccactgcctggncccgaatattcttggtctatgtatacgaagggtctttacttatataacttcagtttctcactccttg

SEQ ID NO: 518623 - DNA, 212 bp, Homo sapiens
taaacacacaagcacagatgggtgcctgtaatacccgtgagacctgtggactgtaccaacctcaatttcctggtttggagagtgtactatgcttctatgcaggatgtcaccatggggggaagtgggtgaagggtgtatagggactcccggtactttttttttttttgcaacttcctgtagttacttcgaaataaaaacttttaaacgtgaaa

SEQ ID NO: 518624 - DNA, 209 bp, Homo sapiens
acggatggagtcctgggcacagtggtccacacctgtagtccacactttgaggagccaggcaagcagatcacttaagctcagaagtttgagacaagcctgggctggatgacccaacccaatctctacaaaaaatacaaaaattagccgggcatggtggtgcatgcctatagccccagctacctgggaggctggatcactggagcctgaag

SEQ ID NO: 518625 - DNA, 339 bp, Homo sapiens
ttttttttttaccccccccccaataagggcccaggggggggggggtggcccaaggaccggggaaatttaaggcccccgggtttgggttggccttccttcccccttcggggaaacccccctggggggccccccccccccccccgggggcccgccccattgggggaggggtttcgggcccttttttccccggggggggggcgggccccccaggcccttttggaaaaaaagggttccctttttggggttttttttttttaagggcttattttgggtttttttggtttttaacccctttttttttttttcccccccttggggggccccgggttttttaaggga

SEQ ID NO: 518626 - DNA, 357 bp, Homo sapiens
tttcccgccagcctttttttttaggtccccaagggcctccctccctcctcctttttagtgaaactgaaaccaaagggttcacagttagattttccccttgggccacttttttttggggtttggcttgagcatttatgggcagccccaaggtccagtttaagtcccagacagcacaggtcaagcagggggggattgtggagcccctggcaggttggctggggggtgcccccttagcccaaaagcccggccaggtccaggggccgggggtccccctgttaagggccccggccaggcctcactcccccctgaagggactcgagccatgtattcattcagtaaactgacattattttccca

SEQ ID NO: 518627 - DNA, 106 bp, Homo sapiens
  misc_feature (50)..(50): n is a, c, g, or t
  misc_feature (81)..(81): n is a, c, g, or t
  misc_feature (103)..(103): n is a, c, g, or t
gatcgttccttcatgggggtaaagaaaagctggtctggagttcctgaatnttgcattaattgtcctgtttccttgtagttnaataaaaatagaaacctgaatnaaa

SEQ ID NO: 518628 - DNA, 118 bp, Homo sapiens
tggtgaagagaattaattcaaaatacatgtctcatcctcttagtaaaggcagtttagcattcataagaagatgttatttgtaagtaaccatataacaaggcaaaaggctataggtatc

SEQ ID NO: 518629 - DNA, 1197 bp, Homo sapiens
ggagagagagaactagtctcgagttttttgtgtttttttttggcccatctggttaattggtttgccccgcccccgaaaacggagtcttactctggtcggcccagggcgggagttgtagtgggcatatgactcatcgggcctcacttcgcaatctcttgccttcccggggttcaagctttgctccagggttgagatcttagaactccttagaccttcgtgtgatctataccacaccttcgtgactcccagaaaatcgctggagattacaccaggggttgacgccaccgtgtgcccagaccttcaattgtgcatcattatatctcgctttacagcttccccccaagcccccgagagaacaagtgtgccaactattaacacccatcaagaaatccaaagcattcccgcccaaatgtgaccttatagccccacattgtgctatcaaatatacacttccgcgagagtgtgaaaaaatctctcgacgcgacaaaaagcgctccacacaaacggggattccacgagcgcacgggccgctcacaaatcgaggccattcgtggatactattcccccccgtttaattttttcacccccctttcgagtgtctcccttaaagacggagaggacacatgtttcgccctcctttagaaagagagattctgtccaacatttgaaaagcgtcgatcatttttttttctccaaaaaactacacagcaatcttggcgtcgatttaaaacttgtggcctcctccacatactcttttctcaccactgctgcgcgtgtagaaaggaacacccccacaagggtatatgtggaccccctctttatgaggcggctcacttacgaacgagctgtctgagtacgtggctatcccaccacagcattattctttagcttattgggcaataaggcggcccactaagtatccaccaaaaatactctttggggcagcaacaaccgcgcgagggctcaacaccgtgggtaactcccatgtggaaagagggctccttggccaccaacgtacgcacagcacctcctttatagaaccaacctcggagccaagtaaatataccatgaacgcgaataccagctacaatgctggctgtgcagtaccaacattaatgtatcgctatcctatgcacaatcatccggacccatgaaaactcgtgcatgctctcatcagaagacttcgcggtcccagca

SEQ ID NO: 518630 - DNA, 953 bp, Homo sapiens
gctgcgagcggaggagcgcgggacctgcgtgacacgctgacgccttcgagcgcggccggggcccggagcggctgttagcagcccgggtcctgaccccggcccggctcccgtccgggctctgccggcgggcgggcgagctgcgggagacggaccgtggacctggtggaggatgtctcggcaagacagcgcatgcgagggatctggatgagctgcactacacaggacacaagattcagattgtgccgaagaccagagggatagcaagtgcaagtggtcaaatggacccatgaggaagactgagcagactgaatggacctggatgaggacaagttttggaaaagacagggactggaagtacctggcacagacgcagagttccctaacacggaacttgacacagcaatgcccagtacaagagtggctgagagttatatgaaatccaagacctatgtcaaggaggccatgggaaccaaaagaggaagaccaaaaagaaggtcatcagaagcatgcgtatacacgacagtattggcacaaagagcagagagaaaacatgagttgcaccaagacagccttgaaaggggcccgagatggggagaacagaaagatgcacagaaggacacctgctagggcaacagaacaaacctcaaacaccgtgaaggctggaagaaggaactaggcgtgagaacccagaagcgaacgagaagaacaacgaaatacatacattgagaagagaaacaaacaaatggttcattggaggaaaatgagatgagacccgaagaaaatagagaaaaagtggattagcaaagggaaaggacaaagagaaatgagtgtggaacagagataaaaatggaaagtcttaacacaaatagaaagaagggacaaagagaagaaaagagagagggaatacaattgaagaaaaagataaaagaaaaaatgagaaaaagaacacaaaa

SEQ ID NO: 518631 - DNA, 1076 bp, Homo sapiens
aacacagctaaccatataccaatgatggcgcgatgtaacacgagaaatgcacataccataggccacctacagcacctacctgttccagaaaacggccttcgatacgggataatcctatttattaccatcagtaagtttttgttctacttcgcaggatttttctgagccgttttacgcactccgagcctagcccctaccaccccaattagtgagggcacgtggaccgccgaacagtgcaatcacaccgtctagaatcccctagcacagtcccagcgtcctaagagcacatccggtattgacgtcgcactcatggagttagtcaactctagccttgtagcgtcagcacatttaggtcgtcaagtaggatacacatcatacacgaacaaacccgagaagtacattgtccacaggcacttggcgttactttactaattttctactgtgtggtctcgtatgttgtacaccatccttagcatagcccattcaatgcacggtgagcttccggacgttcttaccccctttctacgcaatgtttcctgcacgggctaattcatacagagacttgctaagctactttatggttgtcgtgagagcgcatcgaagcgacgtgttctctaccagagaaacatgtgcaactgatacgaatatgatgtgcgtcttcaaaacatttatcccgtcgagcgtactccatggctgtgtcacgatcgcgtcgacacaacagtaaagtagtcttgtcagcttatctaccatgtctcacagatcatgtcaccctatatggccgtctcgaaaagcacggcacggcacctgagtacgtgggcagcttccttggataacgaagtaggtagggaaatttggaccattagtttttaccttcggtgtagtacgttccttccccaagttcgtcactttctggccttggactgcgggttcctttaaaaagatgaaaagaatcgacacaaccaacaacatctcacacaatgacagtcagaaatcgcacacatcagaacaacaccacttggctctgcgcacctcactcacacacaacgcttacaacacccccacacaagaggtcgccc

SEQ ID NO: 518632 - DNA, 156 bp, Homo sapiens
accagatgcagcaagtcagtctattctcagcttctgtgagttttttttttactttttttaaaagattccacttgtaagtaagatctttggtcgctcggtgccgggcctatttactaaggtcaggccctcagggccctcctatgctgctcaaaagga

SEQ ID NO: 518633 - DNA, 479 bp, Homo sapiens
  misc_feature (101)..(101): n is a, c, g, or t
  misc_feature (103)..(103): n is a, c, g, or t
  misc_feature (109)..(109): n is a, c, g, or t
  misc_feature (129)..(129): n is a, c, g, or t
  misc_feature (213)..(213): n is a, c, g, or t
  misc_feature (231)..(231): n is a, c, g, or t
  misc_feature (233)..(233): n is a, c, g, or t
  misc_feature (249)..(249): n is a, c, g, or t
  misc_feature (358)..(358): n is a, c, g, or t
  misc_feature (428)..(428): n is a, c, g, or t
atgattggataaattgggtcatcttcctttttatgtgaccatattcctaataatgtaggtaagttattgaaaacgtagcagagagcatgcaaaattttgantntgcaancacatggatggggaaaaggntatgtgggaagtgctttgacattagacagacctttgctgatttgccttctagctgtatgattttggagaaattacctaataatntcaaaatagcagaggtantnttaggattaaatgagnttaatctttgtgaaagtgcttctcttgtgacaatttaaaaaatcttttaatttacagtggcaagtaaatatgcttaactgttaaatagataaataatctttctgaatantagggaattgactgaattttggttttgtgttcatgctgattttctttctttctttctttttttgagaccnagttttgttcttgctgcccaggctggagtgcaatggcacaacttggtctca

SEQ ID NO: 518634 - DNA, 408 bp, Homo sapiens
cgtcacaggcaaaggaagggatctcttttgcgcgacctcgtgattgtaattagcagagcgcgaacgagctgaactacacttcggcatactacttaaaagatgcatgtatcatacgtgctttaagcaagtcatgtggccaagcctagcatcatggagccagaaagtatagccttgccgtctgtctccatccatgcatgtatcacacattgatatatctccatgaattcatcagcaacttagcacgtgcatctttcattccagtcttcatcatttctcaccatgacgccatctctcaggcctcaggcagcgaaactgcatttcctttctattacctcaactagcatcggggcatcatttctgataaagcaccacctctagtgagcatcatcttttttgtttgtgtgcact

SEQ ID NO: 518635 - DNA, 342 bp, Homo sapiens
aatacgaaggacttatcaatatcatgaagaattattaatattactgctgttagagaacatgaatgagcctactggtcatagcttgttcctgggttaaaatgcatcggggtagtccgagtaacgtcggggcattccggataggccgagaaagtgttgtgggaagaaagttagatttacgccgatgaatatgatagtgaaatggattttggggtaggtttggtctagggtgtagcctgagaataggggaaatcagtgaatgaagcctcctatgatggcaaatacagctcctattgataggacatagtggaagtgagctacaacgtagtacgtgtcgtgtagtac

SEQ ID NO: 518636 - DNA, 694 bp, Homo sapiens
  misc_feature (355)..(355): n is a, c, g, or t
  misc_feature (694)..(694): n is a, c, g, or t
gatacatgtcattgtacattgctcacagcccatgtgatgaatacgacctagagtgcaccctagcgtatactgtagacagtaggctgaaatgacttgccaatggagattgaacagcgtgatcagatgcactattgtggtgcagcatgacgatagcctgataggatgggcagacgtgttgcaatgcaatctattggaatgctgagtatgctctgagcaatcgttctgcgaacctagaactggtctaaaggatatagttatactataagtgcaaggaatagttcactcatgaagttcattgtgaactgtgactacgaggctgaggttatgactacaactaacatctcacaatagctgngatcactgacgaactcacaggccaaccgtcgtactatcctctggtaatgaaagcctgacatacctgtgtgtcagtgacactgatagcccatgtcacactgtttatttctgacgtgcagctacagttatgttatgacatctacaaagtccgatgcagtttcttcactgctacgatatacacatgatgcaatgtaactagttattgtcataggctagtatggcatggagctgatccagcgataatgtttagaccgtgtagaatgccttagagagattgcgctcagatgactagaagtgcactgctgtcaggcgatatcagtgcacatcatggttggcccgn

SEQ ID NO: 518637 - DNA, 170 bp, Homo sapiens
gaaactacctaaagcaaatgggaaggaagctatatcacatttcgtcattgacacggagattcgggcaagtcaccactacttgccatcttatctataaatgcggtggcatcgacaaaagaaccattgaaaaatttgagaagggggctgtcttagatatggagagggctcca

SEQ ID NO: 518638 - DNA, 219 bp, Homo sapiens
  misc_feature (211)..(211): n is a, c, g, or t
cccctacactaaggctctaaataagaggggaagataaaatcttaagcttcttttttcacctggatctgctgctcctatctaatcctagttttcttctagaccaagagtagaataggttttctataaaaatccaggtagtagatactttaggctttatgggccacagtgtattctatactcaatatatctcagctactaatacactagtagncctgggaa

SEQ ID NO: 518639 - DNA, 88 bp, Homo sapiens
ggatttgctggtgcagtacaactaggcttaatagggacatgaccagttcttatgctaaaatagatgtattttaaaagctaaaggaaaa

SEQ ID NO: 518640 - DNA, 179 bp, Homo sapiens
aggctccagcttaacgatatctggaggtcagcacggtgctcacgtgtcgacggcactctgtccagggaggcatgcaccggagtggtgaatacacgtcgaccaggatccatctatgcgatctcgggccctccgcgcggagctcccgtatccacggagctagaccagggaggcatgcaccg

SEQ ID NO: 518641 - DNA, 1893 bp, Homo sapiens
tccataaaatttttagtttaaaaggggaaataggtaggatgtaccgtggtaagggcgataagtgtggggagaaatggggggggtttggttattgtccaacactggtccatttaatatttacacggtaggtaacaatataggggagtagggtgattagaggtggagtagataagcgcgtaggtagaagtaaagtgtaaagagagggtgagataggcgggctaataaatggggtgagggagcatagatcagagcgctcatagagtgaataagggtgagaatactctacacagataaatgggccccaatattgggggcggcaaaaacacgccggtgtaaaacgcgggaggcggcaagcgcccctccctaaaaggggggaacaaacgcgcacgggtgttcgagtaatcgagcacatcacaacacgggggtgtgttacagactctatgatgtttacacgactttgatgttatcccccccaagatgttgcgcgagcatgacaatacacgtacaatgtaaaagagagcactggtgaggatgcgccttgagagacaatatttctacaactgttagagagtgtctaatgttacagaggagcatattgacgccaggagaccacaactaacacgtaaacagcggagaatacaacactatacttacacacattccagtgttctcaaactacttctacaacagacgactattgcgggtttatactgttgtccaccacgcggtgtcagtagacaccccggtgctacaccacacatcttgggcgctatattcaaatatatcaccaatcgccccctataatgaggcgaggggggatcacaacttaccacggcaacgcaggactagagcaaataccgcactacaaacaagaggaaatactatgcacgcagcagcgagataacaacctataggaggagctatcaagggggagtaatgaacaaaaagcacccacaaaacccttcaccaaaaaagtgagggcccacgaagaacataaataaagcgagcgaggaggaatacaacacaggcgaattatgcggcacaccaagaaaatagtcagcagcagagaaacaaaaaatcgagcggccttataccacccggatacatcaaaaaaggatcagaccagagcggagacaaagacacaagaactccatgcgggggacagtacatcaatgcactgacactagcgaacgaacaaactagcgaggggggcgaaacagaagagagtcgcagtgtaggcgacacaactggttggacgagaacaaaaaacgcaaaacgacccacgaggccccccgcagaaataagttaccaacgaagaaaggaggcgactgccaccacatacgggaggagacaaccccccccccagtgtgaggacgcacccatcacaagcagacggttagtaaacaaagagggggggggaggccataataacccacccaacaaaagaactaatataacatatcgcggcgagataaaacgcccccgaataatcgagcaagccaaccaccacagagccgaaagagaaaggcaacacgtagcaggagtggcggaagcaaaactccatgaggagcaccaaagagcacaacaactcaaagagctcgcccgggggggcgcaacacaacaacactagtgccgcgcaacgaagcacagaagtcgagcccatcaaacagacaaacaacacaataaacacccaagcgcagcagcagcacgcgacgtaagagagaaaaaaacaaacgtagaagagacgaagacacaattaagtagaacatacgaagaagagacacgaacccatacaggcgggaaccaagcagaccaaaataccaaagagacgaagcaaatacatagacaccgaggccagcaccaaaaactaacaaaagcacagcaagcaccacc

SEQ ID NO: 518642 - DNA, 132 bp, Homo sapiens
  misc_feature (78)..(78): n is a, c, g, or t
ccccagcaatgctgggctcagcatgcagcagggcagccaggccgtgttctaggcgcaacacacacaggcacccagttntgctttcacacacacacacacacacaacctcccgggggggcccaggggctcccc

SEQ ID NO: 518643 - DNA, 1126 bp, Homo sapiens
  misc_feature (891)..(891): n is a, c, g, or t
ggcagtctgtctgagggctggccgaagtggctggctcatttaagatgaggcttctgctgacttctcctagtggacggcgtctgcagatggtccggagacgaaggcctcggccaatctggtgctggcgtgtcccaggcgagatgattaaagatgcaggtccagccgacggggcccgctggatcaaagttccagagttggtgtcatcctgaaggttcatgggccgagggtgttccgatggtaggtactatggcgggctttatataggcactagactgggtatccgctagtaactagactctgccactttgaaagggtatgacggaatttagccctccccattcgatagtcaaagtgagttacttacgaacaacacttatgcagtacgtatatacccttgtttcaagttctttcgaaatcggtagtatatgaacttaagggctcttaattaactttgtctgtgcatagggatccctctatgtgcttttcctatttgtgcgattgcatagcctccttagtcgatcgtggcacgtgtgggggccataggaataagtagaatgtgtattgcagtgtgtggatgggttggcttcctttgaaggcaacccctgattgaggaaccagatgtaatgtcgaaccggtgtcattgtgagaattaagcttgccatgttgtatgtacctggtgatgggtcctaacgactgggaaactctggttcaccattttctcaatccatggccaatcaaacttgtgttttcgaaaatttgcgttgaaccacatggtcactcgtggaaagcttcgagctggtggccattttttgggacttccagatcccccattaggcagttcaggatcctatttagggccacccggaacgttgatttcaagacaattggganaaaaccttccttttttgggcgcttttacaggcggaagtcaccttgtgcgcgacggaaggaccacggcggtggaaactagacagccactttacctctgaaggggcgcctgtgggcccttggaacagaaacacgggccaaggcgttgggtgcaagtcaccagagaccaagaaatggcggtttctatggggcgagagagtccgactgtaaccccctcgtggtggaaagagacctctca

SEQ ID NO: 518644 - DNA, 1169 bp, Homo sapiens
attaaacacaatgctaccaccgtacctccctcaccaaagcccataacacagtaacacatacattataacaaaccctggagacaccaataagtgatagcgagatagattcgtgttgcgctgcacttcagttgtccccgcaacaagtccgtaggacctagccgcgccggcaggtacgtgactcagtgctagtgtccccctctattgagtccccatcctccagaagtatcgtcagtcagagcaaccgactaatcaccacctcaagcaatggactaagtcaaagctagaccgtcagataacgaagagtgatagaccgatacacaacactaagaggagcgaacctggatctctgatactagtatccttaatgcagttttgtattagccacgaacgtaagctcctcggactcttgcctcactcatgtacgaccaagcacccaagtatctatagaacctagccatggccgatccccttatgagcgggcgcagggattataggcttgcgctctaagattaacaaatgccctagcccacttcttagcacaaggcagacctacaccccttatccccatactagttattatcgaaaccatcagcctactcattcaaccagatagccctggccgtacgcctaagcgctaacattactggcaggcgcacctagtcatgcacctaatgggaagcgccaccctagcaatatcacgcattaagcttccctctagacttatcatcttcacaattgctaattctactggactatcctagagatcgctgtcgccttaatccaagcctagttgcacactgctagtaaggctctactggacggaaaacactcaaaaaacaagagcgcaaaagtctacacaaagaggcgcgccacaaaaaaacaccacagaaacgacagaacagcggcaccaccctctgataaagaagccacacaaggaggacgacaacaaacagccacgcccgcgccaaaccaaacgcgcgagcgccacagaccacacgcgaactcgagaagaaacaccaatcgggggcgaaatggacacacacgacaaagagcatctgtaaacaaagcagagaaaaaacacgacgccaagccatgaaaaaagacacaaaacagaggggcagttcggaagtccaacacgacacgcgcacaccaatccgcccccgcccgca

SEQ ID NO: 518645 - DNA, 907 bp, Homo sapiens
  misc_feature (887)..(887): n is a, c, g, or t
tcggtttgtgaggtttcttataatcacacgtcaggagtcctccgctgtgtaagatgcaacacacgtgtcaagcacttgggctccttggaaagcaatcgccccattgcccaacggacacgctcgggtgaacccccttcccactaagggacatgacgcaatacacgggggaagcccgcaaattgcgcacgccactgcgcaggagtcttacataagacacatagggaccacgccgtgggaacaggaattaatcatagtcctcaacaagcaagggatatatcatggcgtagtgacacacaatttagtgacacataaagtctataagtgatcgaaacaaacatagctagggaaaactatagtttctcggttatcatcgagagatatgtctacggccgtgggttatcccggggtccccgcgattttttcctccggagacgtttggtgcgcttccctttcagttcttcccaagcggaagtcccccttcccgccggcacactacccaagccgccacagactggggctggagcccctacgcgcacaccacggccgtacctcgccagggccctcacacggtccgcgcaaaccgcgccccacatgaccgtgagggccccctgcgtgcccagcctctcgggaccccagtctgaggctctgcgcagccactacctggtgtacagatgtccccgggacacacgctgaggatgaggccggatagaggcccttgaggatggtagcatggaaggagtgagagggcgacaaaagcgccacctctgtgtggagcctgcaggctggtggctgggactgagccagtgccaggggcatgtattggcctggaggtcggaacactgggattgggggcttggctgccaaccttcctctccagctgacctctntagcctcccgctgcgtcgta

SEQ ID NO: 518646 - DNA, 511 bp, Homo sapiens
  misc_feature (146)..(146): n is a, c, g, or t
gtgaagcaatcctcctccatcagccttcagagtggctgggactgcctgcgcggccaccacacccggctaatcttgtggttttttgtttgttttccgttctgggtttccgtcgggcgcagtggctcaggcctgcaatcccagcactntggaaggcagaggtgggcggatcacccgaggtcggagaccagcctgaccaacatgaagaaatccccgtctctacaagagaaaaagacaaacaaagaaacaaacacaaaaacaagagcgtggtgcgcggggcgccgcgcggggccccacgcaggaaacaaccctctttgaagagaacccatctcgcgtgagaggggggcacgcgggggccccccacgacgagcgaaaagagccacaaccgcgtggcgcaccaacaaggagaggccgcccacaagagggagaaacacccgcggggaacaagagacacaaagagcgacggggggacttctctcaccaccaagtcagagaaaaaagcgcccgcgggagt

SEQ ID NO: 518647 - DNA, 789 bp, Homo sapiens
tcattattaccctcactgtcaacccaacacaggcatgctcataagggaagaatcaatactgtgaaaatgaccatgctgccccaaagtaatctatacattcagcgcaattcccatcaaaatactatcatcattcttcacagaaccagaaaaacaattctaaaatttatatggaaccccaaaagagcccgcataaccaaagcaataccaagcaaaaagaacaaatctggaggcatcacattacccaacttcaaattatgctacaagttaccaaaacagcctggtactggcatgaaaataggcatgtagaccaatggaacagaatagtgaacccagaaataaagccatatatgtacagccaactgatcttcaacaaagcataaaaaaacataaattggggaaaggacatcctattcaataaatggtgctggaaaaaccggcaagccacacgtagaagaatgaaactgtatccccatccctcaccttatacaaaaatcaactcaaaatggatcaaagactaaaatctaagtactgaaaccataaaaattctagaggaagacattgaaaaaactcttctagacattggcttaggcaaagaattcatgactaagatcccaaaagaaaatgcaacaaaaacaaaaataaataaatggaatctaattaactaaaaaaattctgcacagcaaaagaaataatcagcagagtaaaaagaaaactacagagtgggaagtatatattcacaaactatgcagtgacaaaggactaatatccagaatctacaaggactcaagg

SEQ ID NO: 518648 - DNA, 140 bp, Homo sapiens
caaatgatgtcacgcccacgctacttttgtactttttacgtacgacgactaggtttcaccatttggccgggctggtgtcaactcctgacatcaagtgatccacccgccttggcctcccaaagtgcggggattacaggcgt

SEQ ID NO: 518649 - DNA, 525 bp, Homo sapiens
aggagaatggcgtgaacccgggaggtggaggttgcagtgagccgagatagcgccactgcactccagcctgggcgacagagcgagactgtctcaaaaaaaaaaaagaagggaatgtccgggagatgtattggatacccagggtttaaggtaaatttccaccagtataagtcctattggcaactggaaaaatgtggtaggctaaaggtaaaataaccactattagtggaccattatatctcttaagaaaaagggccatatttggctccggcttctggtaaaaatattattggttcggagggggaaatatgggtcgtgtgacctttcacttaattcctactcccttaaggtgagagagacaaaatggacggaagagggaaaaggcgggagtcaactccacaactttgaacatacggagggacttctcggtttggacaacgatttctccaggccacccatgctctaatgcctgggggatcagggacaaccctcttggcacaagctacagcatcagccggtccaggggac

SEQ ID NO: 518650 - DNA, 265 bp, Homo sapiens
tactgccggtgcctctactactggtgatgctagaggtaatgtttttggtaacaggcgcgggtaagatttgccgagttccttttacttttttcaacctttctttatcagcatgcctatcttgggttgacagtgtgggtaatcatcacttgtctggttgattctagatctagcgctgttacttgtcagtacagtgttttaatctgacgcaagcatatacggaggagaatgttatcatataacttatactaacattagttcttctata

SEQ ID NO: 518651 - DNA, 857 bp, Homo sapiens
  misc_feature (36)..(36): n is a, c, g, or t
  misc_feature (61)..(61): n is a, c, g, or t
  misc_feature (72)..(72): n is a, c, g, or t
  misc_feature (90)..(91): n is a, c, g, or t
  misc_feature (96)..(96): n is a, c, g, or t
  misc_feature (100)..(100): n is a, c, g, or t
  misc_feature (102)..(102): n is a, c, g, or t
  misc_feature (104)..(104): n is a, c, g, or t
  misc_feature (112)..(114): n is a, c, g, or t
  misc_feature (124)..(124): n is a, c, g, or t
  misc_feature (132)..(132): n is a, c, g, or t
  misc_feature (163)..(163): n is a, c, g, or t
  misc_feature (172)..(172): n is a, c, g, or t
  misc_feature (176)..(177): n is a, c, g, or t
  misc_feature (181)..(181): n is a, c, g, or t
  misc_feature (187)..(187): n is a, c, g, or t
  misc_feature (216)..(216): n is a, c, g, or t
  misc_feature (220)..(220): n is a, c, g, or t
  misc_feature (278)..(279): n is a, c, g, or t
  misc_feature (303)..(303): n is a, c, g, or t
  misc_feature (312)..(312): n is a, c, g, or t
  misc_feature (317)..(317): n is a, c, g, or t
  misc_feature (321)..(321): n is a, c, g, or t
  misc_feature (492)..(492): n is a, c, g, or t
  misc_feature (852)..(852): n is a, c, g, or t
ggaaatctaccacccagcacatggcaagacccaggncctggccaggcagcgcacacaatangctgggcctgnccaggccgcaggcggggnnttggnggananangatgaaannnaaggttactncaacattnagatatccggttttttcctcttttatctcanctaggttgnaggnnagancaaggnacagagtcttaaaaaagagatcctctccngggntcccatcccaaagggctggggcctaggggagtgtagacagagcaagggaagggaaaannaaaagggacctagtatgtgagtgnatggggggnggggnggcnggtgtgggaagctcccaccttcaaccccgggccttggctactgggacagtgcgggctccagcagcttcaggacaccacccaccaggtgcagggtgccagtgactagcacatggatggcagcagcctcacggagtatgctggccccactgtgagccacagggtgggtgaggngggcctttgggggactaggtagaataaaagataaagaacttggccttggctgatccattgcgaggcatgtgaaatgcagctgaagacgagggagctggcactgcaggtgtggggtgggtggggcgccagaagcagggatgcggacccaccgggctctgggctggggacactccagaggtccgggctggcctgctcttcgtccaggtggttccagtgctgctggtgttccaggcagcggagagggacctggtccagtgtcactgtgaagttctgttggtctgcgttgcctgtggatgacacctctgtcaggttagggcagaagacggcatagtcaaactggcagggctgcagcagcttcancaggg

SEQ ID NO: 518652 - DNA, 439 bp, Homo sapiens
  misc_feature (53)..(53): n is a, c, g, or t
  misc_feature (304)..(304): n is a, c, g, or t
  misc_feature (328)..(328): n is a, c, g, or t
gtgcagtggcgggatctcggctcactgcaagctccacctcccgggctcacgcnattctcctgcctcagcctcccaagtagctgggactacaggcgcccgcacatacgcccggctaattttttgtatttttagtagagacggggtttcaccgttttagccgggatggtctcgatctcctgaccttaagttatccgcctgcctcggcctcccaaagtgctgggattacaggtctgagccacacctggtcccatctgggaattttagatccaagcccagggagccagtgcatgcagcccacactggntgggctgcgttgaatgagtgaatnggccaggccagggtctctgcacaagacgccgaggcagctcccttggctggtctgttctcctgagcgggccttcagcttggaaagcccaggatgggaggaagggggggcagt

SEQ ID NO: 518653 - DNA, 430 bp, Homo sapiens
  misc_feature (1)..(1): n is a, c, g, or t
  misc_feature (64)..(64): n is a, c, g, or t
  misc_feature (75)..(75): n is a, c, g, or t
  misc_feature (79)..(79): n is a, c, g, or t
  misc_feature (101)..(101): n is a, c, g, or t
  misc_feature (143)..(143): n is a, c, g, or t
  misc_feature (162)..(162): n is a, c, g, or t
  misc_feature (165)..(165): n is a, c, g, or t
  misc_feature (182)..(182): n is a, c, g, or t
  misc_feature (193)..(193): n is a, c, g, or t
  misc_feature (200)..(200): n is a, c, g, or t
  misc_feature (204)..(204): n is a, c, g, or t
  misc_feature (210)..(210): n is a, c, g, or t
  misc_feature (223)..(223): n is a, c, g, or t
  misc_feature (229)..(229): n is a, c, g, or t
  misc_feature (233)..(233): n is a, c, g, or t
  misc_feature (251)..(251): n is a, c, g, or t
  misc_feature (264)..(264): n is a, c, g, or t
  misc_feature (279)..(279): n is a, c, g, or t
  misc_feature (285)..(285): n is a, c, g, or t
  misc_feature (288)..(288): n is a, c, g, or t
  misc_feature (298)..(298): n is a, c, g, or t
  misc_feature (324)..(324): n is a, c, g, or t
  misc_feature (356)..(356): n is a, c, g, or t
  misc_feature (358)..(358): n is a, c, g, or t
  misc_feature (373)..(373): n is a, c, g, or t
  misc_feature (397)..(397): n is a, c, g, or t
ngggggttgtgggagtagcagcattggtccccgggttgaaaggtgccctccttaaacctcttgnaaggaaatgtnttgngcagggtagcccgctgggccanatcttcgggggggtccttccgcttgttctgaagcagcttgtntttttttttcatagttttnttngttgctttgttccctgnttgggtacgangtcgggnattntagttngtttttgggttantttggnagtncttgttttctcgttgttnggagttggggttngtattttcttggatngtgaanttngtttgttgcntgggctccacactgagaatgcggaangtgggctagtttttgatagttgctcccgtttnancggacattttttttnccagcaacgcatgatgttccaganggcagaggtaggcggcatccgtttttatagcgt

SEQ ID NO: 518654 - DNA, 305 bp, Homo sapiens
  misc_feature (50)..(51): n is a, c, g, or t
  misc_feature (55)..(55): n is a, c, g, or t
  misc_feature (152)..(153): n is a, c, g, or t
  misc_feature (229)..(229): n is a, c, g, or t
  misc_feature (238)..(238): n is a, c, g, or t
  misc_feature (284)..(284): n is a, c, g, or t
  misc_feature (301)..(301): n is a, c, g, or t
gtcaaaatggcgaaaccccatctctactaaatatacaaaaattagctggnntggnggcgggcgctgtagtcccggctgcctgggaggctgaggcaggagaatcgctggaacccaggaagtggaggctgcagtgagccgagattgtgccactnncttgaggctgggtcacagcgagactgtgtctaaaaaataataataataaaaactggcccacaaacttcctggaganttgaccgtnggctctcctgagtgaataggagctacttccctgctttcgttgcctnaggtttagaggtgggangccc

SEQ ID NO: 518655 - DNA, 339 bp, Homo sapiens
ttcccctagggccccccccccggtttttttttttacacccccccgccccccccccccccatttttacttggttttttgggccaaaaggcccccccggccatttttttttaaaaaaaaaaagcttttatggggcagccaaaccgccccagctttttgtggccccaaagactgggggttccaattttggccccttggaccaatggcccaacccttttttcccccttttccccaaggggggtccccctggaggacttttggggaaaacttgttttcccccttccccccccccttttttttttttttttggaaaaaaaaaaagcctgggtttttcctaaggga

SEQ ID NO: 518656 - DNA, 1067 bp, Homo sapiens
agaaacaaagggaatgatctattgagaggccctctcatcccattcgttgtgatgaagttacgagcaagacgaccattacgcgagctagttcacctgggggactcacgaggattttcccctgaacttgcgtagctgttgatgatatatttccctcaagcttgcctctcaaggcgacaataaatattagttcgtactcactgcatcaaacaacacacaacataaccataaaaaagtcacaaaacgtgttatggacgtggacacttcgcgtccacacgcacaaagttggtaccctaaatcctagtcgagcccgtgagtgagcaaggagagcgtcaactgttgtgaggtaatgagaggtaaacgtgtggacacaacgagtgtcgtctcttcccggagagataaaagccctgcgggtcaagacattcaagagagcgagcgtggagatcttcgaccaaattataaataaagacagcgagcgctcattcgtagcgagaatccaaaaggcaagtgctaattgttcgattaattttacccccagtcgagcctgtggtctaaaagaacacagagaagctaacaatagggctgagtggctttcaattaaacagggcacagagtgggtttctcaccacaagcggagaaggtcactacacaaggtggaataccctacagtggtcaaaaaactccctctgaggaccccccggggggagcagcttggttatttaaccccagatgagacaaggctcaattgcaaactcgttccttagcggcacagttcgaacaccgaggtgcactttgtagcgcaaggggaccagctccctggcagccttgtgaaacacccaaaggttgaggaaagccgaaccaatgtggttttgtaaaaatccgtgggagagtctcggtccggggttaaacgaccacctgaaaaacacacctggtatggaccaacacacacggggttcaaggacaattaacattcgcaaacttcttggttgtcgccccttctgtggaagatctacagaggtggaacagccttatggtgtattatcgactaattcgggtgttttaccacaagc

SEQ ID NO: 518657 - DNA, 300 bp, Homo sapiens
  misc_feature (32)..(32): n is a, c, g, or t
  misc_feature (112)..(112): n is a, c, g, or t
  misc_feature (117)..(117): n is a, c, g, or t
  misc_feature (119)..(119): n is a, c, g, or t
  misc_feature (136)..(138): n is a, c, g, or t
  misc_feature (144)..(144): n is a, c, g, or t
  misc_feature (149)..(149): n is a, c, g, or t
  misc_feature (153)..(153): n is a, c, g, or t
  misc_feature (156)..(156): n is a, c, g, or t
  misc_feature (158)..(159): n is a, c, g, or t
  misc_feature (161)..(161): n is a, c, g, or t
  misc_feature (188)..(188): n is a, c, g, or t
  misc_feature (191)..(192): n is a, c, g, or t
  misc_feature (196)..(196): n is a, c, g, or t
  misc_feature (206)..(206): n is a, c, g, or t
  misc_feature (209)..(209): n is a, c, g, or t
  misc_feature (239)..(239): n is a, c, g, or t
atacttaaagataaatgattagtaaaaaaaanaaaactaacttgtaaaaatcttaaagacattgaatgggttaatgtactgagcagctacggaatgcaaggcactgtaggantaggntnagtatactccccacaannnctcagngtcangcanggnanntnagaaaaaaacccacagccatacactanctnncctntactgagggntgngaggcacaaaatgctaggagactagagaantaagaaatgtcttgacatgaggagaaatcaaggaaagcatggttttagaacatgtgtggga

SEQ ID NO: 518658 - DNA, 1124 bp, Homo sapiens
cggcatgaaaaagtttctggtgaacgatggcacttcttagcatagtccacgcccttatatgaaaagatgcattgtccactttgacagtgatttccccacccgagagcctggttgggcagtccctgagcgccttagccagtagtcgtttcgcgcatcagctagcattagctgccaccagatcctcccgttcgtcctcccatcacgcgtcttcaggagtgtacctggaggcagctatgaaagacgtctttaacgccctaaaaaaagataaagaagaatcaatgaaagaaagggggggccagtccaaaatgtcactccagcaaggcgccacacacacgaccggagacagcactccccgcaggaataatgtgggcaagacggagcagccacacaatgggcgaggacgacaattaaacacgaaatgccgttgcgcacggcgctgttatacaacaccatcaagagccgggaaaagcagggaaaaacaaagggaagcatcagagctcacggcgcaccccccctaaccagtcacctggcgaggagtgcgagccacaataccagctgcactgcaactgctgccgccatcacaccaatgcacaaagcgcaccaacagggctccacatgaaagaccacagtgacaagacgggatacacgccaggacgaacaacaagacgtgcccaccaacccaagaccgcgcatctttgacacgccaagcaccgacacccactgtgaatagactctagcccacgtaagacaacacttgttcattttacatgcaccctatggcatgatcgtgtggaaacaaccaaacttgacctagccatgaacataatacataccgtattcgcccgtctacatacggctagccaacaagatgaaatgactagaccacacagagctccccatccaacacccatgtgaaaagcgcgaaaaaaaaaggaacaacagaaaacacaagcagcggtggagacagcacaaaagggcagagaaacaccggcaggaagacacacagacgcaagcgaaacagcagagcaggacaaggaaccagaacagatgcagagcgacaggacagcgacacgaaaaaccggagcgagaacaaagcaaaaacaagagacaacgcaacaccagac

SEQ ID NO: 518659 - DNA, 446 bp, Homo sapiens
ttagaggacccgtcaaggtggttgtgggtagactggagtgcaatggcacgatctcagctcactgcaacctctgcctcacaggttcaagcgattctcatacctcagcctccctagtagccgggattacaggcatgcaccaccaccacgtccagccaaatttttgtattttcagtagagatggggtttctccatgttggtcaggctggtcttgaactcctgacttcaggtgatccgcccacagcctcccaaagtgctgggattacaggcgtgagccactgcgcccagctggtgtatttactttttagagacggggtctccatatgttgcccaggttggtctcaaactcgagctcccaaagtgctaggattacaggcttgaagtgtatttaatagtgcctgtgtttactgttctctgtcccaatttggcaaattatgcggtcgttctac

SEQ ID NO: 518660 - DNA, 448 bp, Homo sapiens
tagtagccaccatgttggccaggctggtctgaacctcttgacctcaagtgattggcccgcttcagtctcccaaagtgctgggattacaggcgtgagtcgccgcacctggcttaatttgttgattaaaaaatcatttgtgctttttgtgtcctattaagaaatctttgagccaggtatagtggctcatgcctgtaattccagcattttgggagggtgaggcaggaggctcagttgagtccaggagttggagaccagcctaggcaacatagcaagaccctgtctctacgaaaatttaaaaaattagccaggcatggtggctcgagcctgtagttccagctactccagaggctgaggcaggaggatcctttgggtctgggaggttaaggctgcagtttgctgtgattatgccactgcactctagcctgagtgacagtgagaccctgtttcc

SEQ ID NO: 518661 - DNA, 140 bp, Homo sapiens
aaattccaaaaatttgcccggggggggggggcgggccttttgttcccccttgtttggggggtgtgggcgggggattgctttttcctggggggggggggtttccgtggggccaggttgggcccctgcccccccgttcttga

SEQ ID NO: 518662 - DNA, 484 bp, Homo sapiens
  misc_feature (196)..(196): n is a, c, g, or t
gaggagagacgagacgtggggcgcgacgcaccaggacgtccgagagtcagcggggtcgtcacggcggaacgggaggctctggagaacgagcccggcctcaaggacgctgtctggggccgggagccgcaggggggcgccgggtgcagagcacgaaccttccctgtgctcccggcacaagaaaaccccgtgtcgcctngcctgaagggctatagccctacctccggtgagggactcgcgtcgagggggaccaggcggcgggatggatgttgagcagcaggaggaggaagacaacgacgaggaggcggcgcgggcagcagagccgtgcgctcgttctcccagcctgtcttcaggacagccagcagctggacgggctggagcgggcgtgcgtgtggcgcctgggtcctcaatgcgagtgccgaagtccgggcgcgtggcgggcgggaaagccggggcccaaaccaatttctttcccaaagggttcccc

SEQ ID NO: 518663 - DNA, 195 bp, Homo sapiens
acagcctggtcacatggcgaaaccccatttctaataccagtaacaaatataagctgggcgtgtgacaggcgctattatgccagatactcgggaggctgaggcgggagaattgcttgaacctaggaggcggaggttgcagtgagctgagatcgcgccattgcactccagcctgggcaacaagagtgacactctgtc

SEQ ID NO: 518664 - DNA, 669 bp, Homo sapiens
  misc_feature (345)..(345): n is a, c, g, or t
  misc_feature (401)..(401): n is a, c, g, or t
aagggattcctgctggtgctatttgggttgttctagtccacactaccgccagactagattggttgattcaaagctcaccaggggacctcaagggggggaaggaccattaccccgtttaaccactgaagtcatcagtgtgattccagaagaaattaaggggacccccttctccccttccctccccattcccgtctctttcactgcctcatctctgagccccggctaaggattttttccacatcctccctcaaccggatcatcagggtttggttttaaattacctttgttttttttttgtttttttttttgttttgtttttaatttctatttttctggttaactcanaaaccttaaaaatttcttcatttgccactgtcttctctggacactctgctcccttnccctgggctggcaactctatgagcacccacactcctccacgatcatgttctgaatgtcctttttgatgatgttttgaccatcatcatagtacaacatggacttggtcttagcttggtggcacacaacacgatttgaggtttgcaaagggcttttggccccacatgcggtattggtttttaactgttaattgaaaggacattagaacccggccttcttctttttggttcggcactcacccttccatagtttgcatgttacccaaaagga

SEQ ID NO: 518665 - DNA, 1172 bp, Homo sapiens
ggacgaaaccgacggtcttgctttccggtcgccgctgtcgggaatgggctgcagtgctgtctgtgagacccgaggcccggcgagctgaccccggctcgcctttcctgcctagccctcattccacggagcgcggtcgcgcccggtccttgcgcgactgcttcccggcccatggcctgcctggtctggcgctggaggccggagtcccgcggcctgtgctggatccgcagcacacccagtggcggctggatgggctggcctggtggctggcggggcgtgcggtcctagagcgcggcccgggctagtcagggctggctgctaggcggagatggacaaacctggaggaggtgactgggaccaaatgggagcaacagcgcataccacacacaaccccatggcaaccgaagaaattagtaagatgccatcgatacagacaagccatgactgcgtagctactcacgaccgaaaaatatggacgacacgtccaagaggatgcacgagaaacatgggagaccatcatatagacctggaatacaatacgcacacaaaggtagctcagttacaccgtacagtaccatgtgcatgtacgatacattgagagagagagaagtatcccaatgcattggacatacagtggagaccagaactaacgaaatacccgaacgaaattccaccccatacacaatgcacaacacgagcgagaagacaaataacaacgacgatatgcataaccaaatgcacatgtgatggttgaaacggacagacgacatggagacagaccaaagaggagatacgaggaacacgaactactgaacccccgggagacgcaaccacgagatcgaagaataactacaccaaactggaaagccggcggcgcaggcaccagcactacaagccccatgcaccaaaaaaaaaacaaggacgcaatgcgacaatgaacagcagaggacaacagaggagcagaaaggcaagtaaagaacacgaacatcgaccacataagaccagagggagagagaagcgaacatagcacaccacacgagccgacaaaacgagagctacacctagtggagaagcagagatcgaaaagaaccagtaagtggacaagagcgaacggcagcgggcacggcagcgataagcagaataacaccataagggaggacgacaaccacaacgag

SEQ ID NO: 518666 - DNA, 275 bp, Homo sapiens
ccggcggagttcagcgagctgagattgtgctactgcactccagcctgggtgacagcctgggtgacagtgcgagactctgtactaaaaaaaaaaagaaagaagccatgtccatgctgactgaggaaaattacgggcaaggtccaggtgcacatggggaaggtgaggaaggttggtattaggtatttcggtcctatgggtaatattggtaatcatgtatatcttaatatctgcgtaaacttatctttaaatttattaatccaaagccctatagatag

SEQ ID NO: 518667 - DNA, 350 bp, Homo sapiens
gttatgtgttattctacagagtagtgtgctgtgtgcatctcaaagaccgatgacgttatagatcagtctgaacgacgcaatattcatataatttccattccattacatgcctgttgttgaaagattctccaacaatacacagagtctaacacaaaactgcagaatggatgtgctcctcagtaactgtcaccataagagaaccgagatcatatctcatcaatatcccagagactccatggatggctgcagcatggttaatgatacgttccctttctgtcacagaaaactgatgggtgtctgctgctactttatatgtatgtagttgtgtaggcacaactgtaatacaatat

SEQ ID NO: 518668 - DNA, 344 bp, Homo sapiens
ggcacgagcaaggctcgaactgccttggcgtggactcctcagcccccaaggcctgtgccagctggttgatctattgcccagacttcccagtgaccacgctgtgctcggcccgctccattccagactgtccatcgggcttgatcggctggcacacacacacagcctgggtaacgactctgcccactcccaagacgaattcctagcaatgaacaatccccctctagcaacagtccaagtcccagcatagggcatgaatttgctttgggagtgactgaccctgtccccaagggtatttctgaccccagtgcgtgccaagggcagggaggtggtgcctgctgccggcc

SEQ ID NO: 518669 - DNA, 165 bp, Homo sapiens
ctcctcttgttctttcctcttcttcctttcttctcttcttcttctttccttctgctcttctttcttcttccttcttattcttctttcttttctttcttcttccatcttctatcttctttttcttcttctttccccttctgtcagtattctcccagccgtatagta

SEQ ID NO: 518670 - DNA, 337 bp, Homo sapiens
ggtcagcattcagcagcggttcaacccgtgcgctgacagacagccctggtaacccagcagcaccaatagctctggcctgtaaaaatcagactcggaaccgatgtgtgcttttgggaattttaagttgcctggatttcagagactttaagtcagttggttttgattagctgcttggtatgcaataacttgggtggaggccaaacgggtgatcaaagggcttaaaagggaaaatgaatgcttttcattctaaaatccttactcctggtacaatcaaggcagttgccttggttggtttggaagaagttctaaccccgcggctggctgggaaatggctgga

SEQ ID NO: 518671 - DNA, 350 bp, Homo sapiens
ctgtggagcatgcgttactcatgtaaaacaaatctggacagttaaccaatagccaagtgggggaaaatatctgtaaaatcagcactctgtagacagacgtatgcagtacggtaaagcacacagacttgaagtacaaacatctgtgagttcaaatcctgactgctatttactggctgtgtgatcttgggtcatttattgaaacctctctgagccagtttcctcatttgaaaactgtggataataatgtctgtcacctcataggtctgttacagagattaagaagaagatatatatgcagagcacgtagcacagagcctgaaactcagcctcaacaagtcatattcacaccc

SEQ ID NO: 518672 - DNA, 733 bp, Homo sapiens
  misc_feature (672)..(672): n is a, c, g, or t
ctacccaatgtgcttggccgtgtcagatctgtgtagaggacatgtgtgtatttttacctcttcgcttttgctcacacatgagtgggtatttttcttgttcgtttgtttcgttcgttgcgtgtcttttgagagcgcgtctcaccctgtcgcccaggctggggtgcacactggtgcgtcctctgctcactacaggctcccgcttcccacggttgagacgtgagttctcttgcctcgagtcactcccgagatagcttggcattacaggtgccctaccaccgggcccagctaatgttgtaatttttacgtagagacagggttccaccattgttggcctaggctggtcttcaactcctgaccctcaagttgatctgcctcaccttggactccctaagtgctggtattataggcgtgatccaccatgctcaggctctattcaaggtatttcgttaagcaactttaagtttagaggtaagagagaatgaaaatgatcctgaacaactgcaagcaactccacatggcagattcggcaggacactggttaaagaatttatttcttcgtatagtatcactatgttcatggtgcagatactacatacattgtggcactgttagactcgttgagtttctcggggcactccccaatgcgcgtcgggggtcatacaagggactatnactctaccagaattggtgaacttttcttttattcttccccgttcgggcggacttgcactcg

SEQ ID NO: 518673 - DNA, 902 bp, Homo sapiens
agtttcttcaccatggggatgtggtccattggctgcagggagccctgggggctgctgccttggattgctggttgccaacacagacgtgtttctgtccaagccccagaaagcggccctggagtacctggaggatatagagcctgaaaacactggagaagagaatgcaaggactatcaaagcaaaggagctatggaaaaaaaatggagctgtgattatggccagtgtcggaggtcgaggctggtttccgtcgtgtctgagaggaagctgcggatctgtcctcccttgtaaaagcatgttggtaccagcatggtgcagtcctcccatctatgcagatggtaggggagcacatcaggactgaagtgatggatttccagctcttatttcgagacggagtaaatcttcctggtagtgaaaagaaagacacgttctatggtccacaaagcgcggaatgatgatgtttatggcgcattctatccgctcttgggcaagtgtggtacacacgttcttccgagcctggaacggagagcttctctggaaacctggaaggagaaggcttcgatccttgggggagttttcgtggtagggatcaggagagcagggcattcttcttgagcgacgagaaaaagaattcggagacaaagtaaacctactttcatgtctctggaaggtgctaggatgatcaaatcacagacttgggactcagagaacagatgattgtggtgaaactggccaggtcaggataacagggacattcacctggtgttcatgggatgtattggttccactcgtgtccctaaggggtgagaaccattataatctagtcgcagatggtattagtgttaaatctggtcgccactaaggaaatacccaaaaagatgcactgaaatatgggtattaggtaa

SEQ ID NO: 518674 - DNA, 195 bp, Homo sapiens
cagggtttggaaacaaaggtcacattaccagggaccggaggctaggacttgaagataccctttgggaggagacacctgcaacgtttggattggagaagactcagtgaccttctgggatgtcgtttaccctccctgggctgcagcttccttgtttgtagaggaagaggttaaattaaacaatctcttccaggtcaa

SEQ ID NO: 518675 - DNA, 217 bp, Homo sapiens
  misc_feature (48)..(48): n is a, c, g, or t
  misc_feature (118)..(118): n is a, c, g, or t
  misc_feature (181)..(181): n is a, c, g, or t
caggactgggtctgacctggtgggagcacctgcccagaggatgctctntcccaggacggatgggtccctgtgtcctcaggagtggggttgggggacagccttcagcagcagtctcacnccctacctttccccagaacttgcactggggtgggatttggagtgatgggaaggtttttagggnccggggatggatgcttttctaaatgttattacttgt

SEQ ID NO: 518676 - DNA, 360 bp, Homo sapiens
  misc_feature (2)..(2): n is a, c, g, or t
  misc_feature (34)..(34): n is a, c, g, or t
  misc_feature (48)..(48): n is a, c, g, or t
  misc_feature (58)..(58): n is a, c, g, or t
  misc_feature (70)..(70): n is a, c, g, or t
  misc_feature (80)..(81): n is a, c, g, or t
  misc_feature (100)..(100): n is a, c, g, or t
  misc_feature (122)..(122): n is a, c, g, or t
  misc_feature (142)..(142): n is a, c, g, or t
  misc_feature (153)..(153): n is a, c, g, or t
  misc_feature (186)..(186): n is a, c, g, or t
  misc_feature (217)..(219): n is a, c, g, or t
  misc_feature (265)..(265): n is a, c, g, or t
  misc_feature (327)..(327): n is a, c, g, or t
cngacattcagactgagcgtgcctaccaaaagcngccgaccatctttnaaaacaagangagggtcctgcngggagaaacnngcaaggagaagctcccgcngtactacaagaacatcggtctnggcttcacgacacccacggnggctattgacnggcacctacattgacaagaaatgcccttcactngtaatgtgtccattcgacggcggatcctctnnngcgtggtgaccaagatgaagatgcagaggaccattgtcatccgcgngactatctgcactacatccgaagtacaaccgcttcgagaagcgccacaagacatgtctgtanacctgtccccttgcttccgggcgtcagatccgt

SEQ ID NO: 518677 - DNA, 721 bp, Homo sapiens
tggaaaaagtctgggaggccagggggtgggcttgaaaccagcttgggggggttcgatcccttcctttttggtctagattttatgtatacgggttcttcgaatgtgtggtaggggggggggcttccatttagttcacctccagggttaagtggaggggttctctcatacttattataggaaactttctgcgctctcggaaagccgaagggctttcctcaagatctcagttgaaaatttatttaaatatttacgtggcgtgttagagaaaatgtgaatgtgagcccttacgagattagatgaggagttgttccagtggtggggtgtagtgcatgcggcggatagctcgcgagttaagcgtgcggggcttcccgggatgaggccgagaaaagttgttggtgggacagaaaagtttagattttagccccgattgacattattgaatagctgacacagtgggatttgggggcgataaggattggggctcataaggggtgtacgccgtggagaattagggggcaaactccggtgaatgtgagagcctcccttaatgatggcgcaatatacgagcttcctttatggatgaggactatagtggcgaatggtgagtctacaagcgttattaacgtggtccgtggtagtcacagatggctctagagtggactgacgtttgtgcttatataccaatgtgcgcatgtcgaggcgccacctctagcgcgtgcaa

SEQ ID NO: 518678 - DNA, 150 bp, Homo sapiens
attccaaaccagcccccggagaacacatttgactagaatcagagtagaggacatggctgtcgttctagaaaagccagcgatatgaagaatgacaatcccatttcgtctccttcctccgctgcttccaccattacgcaggcctccgtgcct

SEQ ID NO: 518679 - DNA, 359 bp, Homo sapiens
ggggggggtgtatgtctggactcccagaaccctctgttcccactgacccactccagagctgcaacgggcttgcttggtccaggccagcgggagcagggaatgatcgaatgatcgttctaacaaacaggaggaagcacccacccacctcagccagtcctccctccttccctccaaaggggccccggctcaccttctggccctcccatcttgtctataactttaattgccacttttcttaggtgttttttggaaaatgcttctttgacttttgagtaggtccctttccccaatggtcttgcccagctggtacccattggagagcagaaagtcctccatgctgtctagcgccgccttcctat

SEQ ID NO: 518680 - DNA, 281 bp, Homo sapiens
ccgaatgggtctgctgtctgcggcaggtagtcgaagagggtggaggtttcgtcgaagaacaacggcaggtagtactcgataccggcaggtgtaatcccgctgctcaagtcctggaagatcgggcagcgacggaagtcgacatcgaagcgttcacgaacagcgcgccttagaagcgtgttaccgcgttctttttgcaagcgggaattcccagcgccggcagcagcttgatcagagtcgaccttgtcgatggacacgctggttctccgcgatcgaagtgtgcg

SEQ ID NO: 518681 - DNA, 799 bp, Homo sapiens
ccaggcctgagcgaagcccacaaccccgccgggcacatgtgaaaggtatgcctccgtgggacgagccacccgctttcagccctgtgctctggccccagaacggccactcgagaccccgggcttcatccacatccacacctcacacacctgttgtcagcatcgagccaacaccaacctgacaaggttcggagtgatgggggcggccaaggtgacactgggtccaggagctccctggggccctggcctaccactcactggcctcgctccccctgtccccgaatctcagccaccgtgtcactctgtgacctgtcccatggatcctgaaactgcatcttggccctgttgcctgggctgacaggagcattttttttttttccagtaaacaaaacctgaaagcaagcaacaaaacttacacttggtcagagcaagcacaccaaattggccttaactttataaaaggcgggagcaattgggcaaacttttcactcaagggggatgctgtggaaacctgtggcttatgcttctaaagccaccagcaattggtgcctaagcgaaatatttttttcagggaaaataaaaactttagttacagagatttgttatgcttaaggtagatgaaatttagcagggatgctgccttgggtctcgggttaataaaagcttttagggcatatgtttggtaagcaacaaattttgttggtataaaggtcccgggtctctcgcaatactggctgctgatcctagactgagcatggcatttctggatcaaccagatgattaacggtttattacaaaagac

SEQ ID NO: 518682 - DNA, 1015 bp, Homo sapiens
gggagttgatggagctgttgggtggggctcccagggtcgttgcctcccaactagacccatcccctgctggagcattgctgggaccccagtggacctggcccatacttgatggagctgtgtgtgtggcggctcccatgggtggcatgactctggatactaaggacagatgcacgccgtggctgcggcgatatctgtaggggtcgtccgaattactgcattatatgcctagagatatctctggcgcacatgttccatgcatgttgtgtgagaatccgtagtagagagcactctcacgcgtcatcatcagttggcctgttagaaatcactcctactaacgaggtgcatctcgtgttgccatcggcaagcaattgattgggtcgctcgtagctagaagccgcgcgcatggccctagatgagagcatggcgctacacttctaccctgttgggggcttaacgtagttgcgtgccgctggggggtctcgaaactgtgcgcacttggacaccgtcaccaagttcgaaggtgaggctcacgagatgctagctcccattagcgaggtagcgtggaaccccaagatagttatcgcctaaaatggcctgagcgtttgttggctagagagagagggtgccatttatcccccccattagcattaggtagttcacacttgaacaatttgtccgagaggctgtgtgatggcacaatggcctaggaccatcttaacagctaggcgcccggtcaaacggcagttgatccggagttgcagacggcgtatcaagtcaggtgccgagggtagggaaacccaggcccggctcaccgtgttgcagcgttgtcgtgtgcagtgggcggccacgttcgtcagcggggggcacccaggtcgacaaggaatgccgcgagtgctttggcccacgccctgggaagagggaggcgatggcactcacggggatggggctaaccaacggagggggccgaacaggggtctcttgggggagcaggagcgacctgtgaaacactggcacc

SEQ ID NO: 518683 - DNA, 1743 bp, Homo sapiens
  misc_feature (532)..(532): n is a, c, g, or t
  misc_feature (605)..(605): n is a, c, g, or t
  misc_feature (614)..(614): n is a, c, g, or t
  misc_feature (637)..(637): n is a, c, g, or t
  misc_feature (921)..(921): n is a, c, g, or t
  misc_feature (932)..(932): n is a, c, g, or t
  misc_feature (934)..(934): n is a, c, g, or t
  misc_feature (1549)..(1549): n is a, c, g, or t
  misc_feature (1587)..(1587): n is a, c, g, or t
  misc_feature (1689)..(1689): n is a, c, g, or t
  misc_feature (1709)..(1709): n is a, c, g, or t
  misc_feature (1737)..(1737): n is a, c, g, or t
ccccgggctggggccggttcggcctcccgggtggcgcgcgggccgaagaactaggaggaccgccgggccgggccgcttgtcctttggaaaaaccttggcggttcctcctctggtgtccgtggaccccgccgtggcgttctccagggccgcggacctttgcccaccggtcgcgccagctgtcctggagcagaaaggacccccctcctcccggaccgagccccgagccccgagccccatggagcaggcaagcgccggagtcccgaggctaaggcccggccggcgggcgctctggcaccttttcccgcccccgagggtgcctgtccggcccggccgggactggctgggaaaccgaggccggaagaggtcgcagtccagcaaggaatcggggcagctcttccgtggttccttgcagaccccaggtcaggccagaaaacacctctatggcccttccctgtgtccaccacagataggacctcaaaggcctggggtccccaggatggccctcaaaccgactggtgcccttgcaggctgncacctccaagtcctgcttctctctagagatgggcaggagcaccagccctcacctggcaccagcactttactgntggaacatnatatggtctaagaagagattttnccagcaagaggccatctctgcaaatcacctgtgaggcagacctgtggcaattttatgactcagctggcaccgggattgtagctgggttctgccgcttgttgaaacctatcagtgttctccttccctaagtaggacaagaccgtatcctgcctttaaggttaatagaattaacaactgataaactctttggggaagaaaatcttcctgaacagatagcccagggcatctcgacaatcccttaggaagttctctgtttcacttgggtacctttgtccttggacttnggtgatgtggntngaccccagctagagagtgaggggaacaacagcaaaaggcaggacaaagactgactcgtgagaggaggcccaggaacaggggggcatcgtgaatgaggaggacgtgggggcccaagaaagtgagctcttgcgcactcagtcaccagcccccttctggggtccaagctgtgtccccttctctaaagaggtaagccctgagtcatgggaagatggaaaccggggctgatgagacaggatgttttttaagcaccgtggtgtcttgttgacttgcacatgcacgggggtcttgggtaaccacagggctcagggtatttgcaggaacagttcaagtgctcacttgtcttggggctgtttatggggaagtggtttccacagtgagaggacgtgagatattgttgtcaccccggaccacacttagctacttccttctcactaaagctctgtagtcatattttccctggcagagcagaaacttctatgttatcccacagctgttctaacggtgtagacttgacttatgcaatgatgccaggagtcctgagcagcacagcccaacttcaatcacacacagatggacagagctgtattagcaaagcctgagctactgagcgatganagttcagccaggctttcagacatctggtcattcaaganagatatgcgctaaccaaggacctaaagatgtgttaatatgggtgctatatcataaggaccttgaaataaatgttcttagcctttggccaaaaggtccatgtntaggaatctatttttccatngaaattaattcaaatttgggaaaaatgnccatgc

SEQ ID NO: 518684 - DNA, 145 bp, Homo sapiens
tcatcagctcggtaccattcagtagggtgtgtattctgcactccactctaacatgtgcatgtgttaatgttgtggttcctggctggttggccaagaattgaactggcgaaattaacggtattaattgtgggcctccggtctccat

SEQ ID NO: 518685 - DNA, 151 bp, Homo sapiens
  misc_feature (83)..(83): n is a, c, g, or t
  misc_feature (125)..(125): n is a, c, g, or t
atgcagtaaccagattacccccaggccctgatgcagttagtgctggctcccgggctggtgtccttccacccccgcctggcctnacttcccatctcggcattcctgccccctcccatggagtaggnatgaacactggtctgagcactgctgt

SEQ ID NO: 518686 - DNA, 954 bp, Homo sapiens
aaaacacaaaaatcagccggacatggtgggcgggtgcctgtagtcttagctactttggaggctgaggcaggagaatcgtttcaaccctggaggcggaggttgcagtgagccaagattgtattactgtactccagcctgggtgacagagcaagactgtctcaaaaaaaaaaaaaaagaaaaaaaaaaaagtttgaccgtggaggataattgggaaagtactggtacaaaaaaacatagagaaacagaaaaaaattctgggatatccaagagacaacccctcttaagggtgggcaattttccttcttctttttttttaaaagggattgtatttttggtaaatgggttgaagaacatactggtatgtgcagttatgtctctggccttctgggttaaccttcccatatatacatttcggggttaacactggcattaaagctggtatcctttcattcgtcacccatgtcaagcttggttcgggcgtctccaggggttgtggtggggccccggggatctggatcattccagtgagggcctataaaatttcaggagcctccaatggctctgcctttcccaccatggcctcaggtgttcagcaataacccgtgggttcttagaaagtctacaggtactgacagtacaaggggggaggagaaagaggcctgcaatatggccttgaagtcccaggtcgtgccttgtgacctttcaaaatttaatttaataacccaagtcttcaacgtcggcattatgttaaatggagcactccaggggtcccattaatgacttgtttcaccaatttttgagttgccccttaaaacgacaagacataagaaaacgtagttttagaaagtccatagtcaagaggagcggggtacagaaattgacgaagcggccaactgggggggtcccagatgggagcggaaggctctgtagcactgagcaaccattagatttgag

SEQ ID NO: 518687 - DNA, 123 bp, Homo sapiens
ttcttgctatgtcactcagtccacactttctataaattagttgtatatttaaaaaaaaaaaccccccccccccccccccccccccccccctccccccccccccccccccccctccacaaattt

SEQ ID NO: 518688 - DNA, 283 bp, Homo sapiens
cgtcgcttatcttgtgtgagggaggcgaagcttcgaagatcatggagactcactggccctgtgagcgggacaccagccggtgtgctgctggcttgaaaaggagctgggagatggcctgagatgctgggcaaggatgcagaagtagctggacgagtaccaggagcttctggacatcaagctggccctggacatggagatccatgcctaccgcaagctcttggaggtgcgaggaggagaggctacgcctgtcccccagccctacctcgcagcacaacctggtgac

SEQ ID NO: 518689 - DNA, 707 bp, Homo sapiens
gttggattaataagaaagagagtatgccacatagcatatcatacctcttcagtgatgaatgacacaacctactgaataatgggatctagtagaccagcgatgctttgtatattcaaaagtgaagaagacgggagcaggtctatgaaactttgcatagcacagatacaggcgtctacgtagaattccatactatgttatatatgggagcactctgatgactgatgtgatatatacatgcgtacaagtgatgatgcaatctcgctggatatagattgtctagctatcgccggaaaggttggaggtgagaaactctctatattgtgtttttctttatatatagaaagtcgcatttcttattcttgacacatgcactctactgcagattatatcatactttctgccagtatctatctctgatatcatatatgcaccatactatagagaataaatattacagatacgccctgcatatgaaatacgcgctgactgttgatttcgcgaatgtacatgtgtttacgaatgcctgtggtgagcatatagatagtttgactgtgaggagtgacagatggctgaagcgtgtagtataatgaagctactgcgtcagacacagggactatatgagagcccttgttgatgcactgtgacatgagctgtgtattgcagcaacagattcctagctctggtgttattggctcgagagatgtcag

SEQ ID NO: 518690 - DNA, 157 bp, Homo sapiens
aaagaggaggtattgaagactgtgtgttctccaagtggaggcactgtggtctgtgatagagtgggagtcccaatcctttctccggagatgtgctagcttgtgcactctgggcaagtgtctccctctgtctcaggggtctctgtctccctctgcctct

SEQ ID NO: 518691 - DNA, 212 bp, Homo sapiens
cagtctcagacatttatggaggctgaagtgataagattgcttgaagccctagaagttcgagaccaccctgggcgatattacatagacccatctctacgatcgatgaaaactttatccaggctttatggtacatgcctgtggtccctaatactatgatgggaggatcccttcagcatggtgggttgaggctgcaatgagctataattgtgcca

SEQ ID NO: 518692 - DNA, 416 bp, Homo sapiens
gttagtataattaaaaggaaaagcttttatatttttatgcaaggtaaatgtttcctaaatgtcacaaaagtgatagaaaacatagcttttgggatctggtcctgcattagagtttctaattctgagacccaccagcttgtgtttcatcttctttatatcctgtcagaatacatacttaatcatgtgggtatgagaaagatgttgtttaacttgtaccaggtttaaaaaaagaggtttaaaaaatgtctgtgcgtatatatatatatatatatatatatacatatatatatacatatatatatatatatacatatatatatatatatacgtatatatatatatatatatatagcaacttgatgtatagtgtccttgttaccatgtatttttttcattaaaaatcctgcttttttttt

SEQ ID NO: 518693 - DNA, 1479 bp, Homo sapiens
  misc_feature (354)..(354): n is a, c, g, or t
  misc_feature (357)..(357): n is a, c, g, or t
  misc_feature (374)..(374): n is a, c, g, or t
  misc_feature (1401)..(1401): n is a, c, g, or t
gaaccaacgtttgcggaatcatgtagcacgatatatcccgtatacgagcgctggagattagatagaacctaggaggcgtactcagaatagataagctgccgttgaggcgcagagatgttgaatcactttctcacatctcacatgcatgaacgatgagtcccaggaacatgaaggccctcatatggttcgtgcaatgaagtgatcattcaacctagacacactcacactgtctgtcacagggaggcagcccacacagactacagatgccccactaacattcatgacccgagctagtctagagagacactcaggctataagaggacagcacgaaaccctggtgctcactggtatgncanagatactaccgcatggngaagggacttctcagtatgcgatatgacggtggtaccaagagacctatcggcgagggcgcgtcgagataggagtaaagtgcgtagtggtgtcgtgccgcgagaggtcagtacaaggagagttctctaaggtatggcgataacttttttccacaaagtgtctcgcacccaaaggagcaaacacccctttcgtacagtttgcgcgcactttggttaaaaattgtattaaacctagttctcacgatccaataggcaaggccacacaacgtcgggtcattttgggtggcacgacacctaagtggcacacaccacaacgcagtttgtgtccagccagacacgacacgtgtcacaccagtcacaagtttttaaaaaccacagctgctaactcaaggagtcaatgtgcccattgcacaataggcggggggacgctatacccaaaggtgtccacagcagaaaatggcgggttttcccaagaggttcttccccattaccttacccacaaaacttacacgtcgttgcccaccataacagagctccccgcgaggaggaaccattttatgttgaagccgtaggaacattgttgcgcttttccacacaggaggccccaaccaaatataggtggtggcgcccataagtgccttcaatttctaggccgcctttcagttgaggcgaccaagacacaagcgggttcacacctgggtgtacaagggtcatgttgaaccgcgattgaaaaacttatatgggaaattccaacacccgatatcttttcttgcaccggtctcggaacacacttaaaacggtcggcgatgtgtgtcctccaaggagttcttcaaaggagacccaacgtgggaaaccctaggcaccccatggtgttgaacacctagtggccgcgcaaatgagtgcttatggcaaatttcccacattccaagagcaaagggaagtggcagttcgaggtgtgaccctgcccttacaatcgtgggtggtggacacatgctcccatggctagcaagtgggcgacaatgggcctgncgatctaaaaagggacgacaacagggggggtaccacaagcaaaccaacaggttaggatacacgccggacaaagggcga

SEQ ID NO: 518694 - DNA, 132 bp, Homo sapiens
gtcagtatcttacgaggttccccacttgatgccccctgatcttgaattgtggcagcgtgatcagcaaacacagtgtgatgagacgggattgagtgtgggcagctgctgagtgtggaccacactctgtcgtcc

SEQ ID NO: 518695 - DNA, 90 bp, Homo sapiens
ccaccacaccacccctcccccccctcacccccccccccacccccacccatcccactcccaaaccttacggctaggtacgaggcctgggtt

SEQ ID NO: 518696 - DNA, 86 bp, Homo sapiens
ggcttggaaaatgtatgttctttattatagcagattaaaagcttaaaaaatagatggttgtactaactcccttctgtcgtcttctc

SEQ ID NO: 518697 - DNA, 377 bp, Homo sapiens
cgggagtgtagaggacgctcgatcttataagtacggcgacatgttacaaagatcggagaaggaaattatgacaacaataccatctacaatagcatcaagaacaataaaatacttaggaattaaccaaggacgtgagagacttatacaataaaaactataaaacattgctgagagaaaagaaattaaagaaaatataaatggaaacacatcccatgttcatggattggaagacttaatattgttgtactaagattcatgcatgttatgtgtatcaatagttcatccctttttattgctaagtattaccccattgattggatataccacaattttttaatccgttcatcttgttgatggacatttaggttgttttttag

SEQ ID NO: 518698 - DNA, 130 bp, Homo sapiens
tccaaatgggagaattaccttcattcctaaaaagacaatatgtccaatagaagctgtgaaggtatcagagtacacaaggtgtccagtttcagtaccaaagccttctcttttagtgcacgtgagactcaca

SEQ ID NO: 518699 - DNA, 1134 bp, Homo sapiens
tcacggggtgtggagtaggatcaatgaaggagattataccccctttgtcggtggaagacggaggagattcgtgaccgtctgtgtcgaaaccccatcttcgagtgtttttccgcggttagtgtataggaccccctctgtttgttggaatggtgacgtttcccaggctggggcccaacagattgttgccgacggaattgatatgggcgagatgaggtgataaaaaccactgggggggagatggtttgccagtgtgggaacagaaagttagtggtgtgttgagactgtgttggttggtaaggaaattagatcgagaggtcgttgtggtagatgatcgaagtgtggtgtgtgcacagtggtgactggagttttctcacggaagagtgcgcatgggttgtgccgatctgatagggacgaccccgtcttttttgtgcgttgaacaaaattagagcccattgtgcgaatgaccatctattagtgggcaacaaccaggtaatggtgggctaataggtgggcctcaccaccacttggttgttgtaaataaatgtcttgtgcggttttgacatgtatatgtaaagacgtgtgtggtcacacaatgctttttagtgtcgaatcctgccactatatatgccacgtggtgtggccttgtgtttgagaatgtgagaaattgttgtgccgcacttcgaatggcacattgagacaataaaggacaaagttatctcttaatctcctgaggcccacgtataaaccttagtttgttgcacatatattttctgtacaatatttgtcacggtccccacgagtgccacgagaacactgggaagttaagggagaaaatgtgtgatgtttgtgttttgaaattagctcgtcacgaattatcactacacccatgtagccacacaactttttttagaaagagcatttcacttgtgagctgcacaaaattctgagatatttatatttcttgtttttttctttatatgttttgcacgtttaaatatgttgaggccacctggaaaatttgttacacgagttaagtttgttatatggaggtttataaatgtgttgtcattgtctccacttgtctttgtccagagcctattattatggaaaccataaaatttattgtgtccacca

SEQ ID NO: 518700 - DNA, 162 bp, Homo sapiens
  misc_feature (125)..(125): n is a, c, g, or t
cactggcataccctgtatgaaatttcttaaaacggttatattaatgctacatttatggttttcaaaaatatttataagttgaacatctggctgagcatggtggtgcatgcctgttaatgccaacnactttgtagaggccaaggcacggaggatccctatgag

SEQ ID NO: 518701 - DNA, 247 bp, Homo sapiens
gggggggggggggggcccccccccctttcccccaaaaaagggggtttttttgggggggggggtttgggtcccgaaaaaaacccccccctgggtgggggggttccctccccccggggggcccttttttgggggttttttcccaaaaaaaagggggagtgtgcggggccctttttttttaaaaccccccggggggggcccccggccctttttttggggccctttttttttttttttttccccgtttgga

SEQ ID NO: 518702 - DNA, 635 bp, Homo sapiens
  misc_feature (79)..(79): n is a, c, g, or t
  misc_feature (256)..(256): n is a, c, g, or t
  misc_feature (273)..(273): n is a, c, g, or t
  misc_feature (300)..(300): n is a, c, g, or t
  misc_feature (318)..(318): n is a, c, g, or t
  misc_feature (363)..(363): n is a, c, g, or t
  misc_feature (394)..(394): n is a, c, g, or t
  misc_feature (431)..(432): n is a, c, g, or t
  misc_feature (436)..(436): n is a, c, g, or t
  misc_feature (448)..(448): n is a, c, g, or t
  misc_feature (461)..(461): n is a, c, g, or t
  misc_feature (464)..(464): n is a, c, g, or t
  misc_feature (488)..(488): n is a, c, g, or t
  misc_feature (492)..(492): n is a, c, g, or t
  misc_feature (497)..(497): n is a, c, g, or t
gtcctgcaatttaggactgcagatttctgcctgaaatacctgtttcttggggacattccgtcctgatgatttttatttngtgggtttaattttggggggaatgacatgttgggtcttttatacatgaaaattgtgttggacaataatctcacaaaacatattttacatctgaacaaaatgccttttgtttaccgtagcgtatacattggttcgggattggtgtgtcgtgggaattcgttttagccaggtcagtatngatgaggctgatcattnggctctttttttccttccagaagagtngcatcaacaaagttaatngtatttatgtatgtaaatagattttaagcttcattataaaatatngttaatgcctataactttttttcaatttttngtgtgtgttctaaggactttttcttaggtttgtaaannctgnagggaaaaaaangttctttctactngtntattttagactttaaaatgagctncttnttatncactttgtgtaaacagtaatagcatggtccaatttttttaagtcactttttgtcctaggggaaatgatgtggaaaaaagaaaagactgggtaatgggtaatcggtgttaacttcatggaaaattacttcaattgatgc

SEQ ID NO: 518703 - DNA, 678 bp, Homo sapiens
  misc_feature (79)..(79): n is a, c, g, or t
  misc_feature (256)..(256): n is a, c, g, or t
  misc_feature (273)..(273): n is a, c, g, or t
  misc_feature (300)..(300): n is a, c, g, or t
  misc_feature (318)..(318): n is a, c, g, or t
  misc_feature (363)..(363): n is a, c, g, or t
  misc_feature (394)..(394): n is a, c, g, or t
  misc_feature (431)..(432): n is a, c, g, or t
  misc_feature (436)..(436): n is a, c, g, or t
  misc_feature (448)..(448): n is a, c, g, or t
  misc_feature (461)..(461): n is a, c, g, or t
  misc_feature (464)..(464): n is a, c, g, or t
  misc_feature (488)..(488): n is a, c, g, or t
  misc_feature (492)..(492): n is a, c, g, or t
  misc_feature (497)..(497): n is a, c, g, or t
gtcctgcaatttaggactgcagatttctgcctgaaatacctgtttcttggggacattccgtcctgatgatttttatttngtgggtttaattttggggggaatgacatgttgggtcttttatacatgaaaattgtgttggacaataatctcacaaaacatattttacatctgaacaaaatgccttttgtttaccgtagcgtatacattggttcgggattggtgtgtcgtgggaattcgttttagccaggtcagtatngatgaggctgatcattnggctctttttttccttccagaagagtngcatcaacaaagttaatngtatttatgtatgtaaatagattttaagcttcattataaaatatngttaatgcctataactttttttcaatttttngtgtgtgttctaaggactttttcttaggtttgtaaannctgnagggaaaaaaangttctttctactngtntattttagactttaaaatgagctncttnttatncactttgtgtaaacagtaatagcatggtccaatttttttataagttccactttcttcttgttcttagtggggaaatagaaatgtcgcaaataaagagaaaaagaaaatgttgcgttatttgttgtgtattcttggcatgtatcccaaatctaatggaaaaaacataaaactttcaaatgtg

SEQ ID NO: 518704 - DNA, 133 bp, Homo sapiens
  misc_feature (2)..(2): n is a, c, g, or t
cnagaggatccctgacagcacagaggaggggctggcggatatggtggtgttcgctcctcttgcatgtacacctcctctgtgcagtccagctgtccacctcctctgtgctgtccacctcctctgtgctagtcca

SEQ ID NO: 518705 - DNA, 172 bp, Homo sapiens
gggatattgctgcatattgtgcagggaaaagtgagcaggaagaatggcctgcaggcaacaggtcaaagaagaagaacgaaccagaagattaggaggaggaggaggaagaagaagatgaagattaggaggaagaggatgaagatgaagaataaatgggtatcctttaatgatg

SEQ ID NO: 518706 - DNA, 227 bp, Homo sapiens
  misc_feature (134)..(134): n is a, c, g, or t
agcccagcctagtcagggcacagctgccctgctgccacagcaaggaaatgtcctgcatggggcagaggcttccgtgtcctctcccgcaaccccctgcaagaagcgccgactccctgagtctggacctccatccntgttttggtcccctcttttggtcgtgatccccccacccaattgggaagccctaggtgtttcatatgggccaaggccccccttccccttccaag

SEQ ID NO: 518707 - DNA, 724 bp, Homo sapiens
  misc_feature (93)..(93): n is a, c, g, or t
  misc_feature (435)..(435): n is a, c, g, or t
tttcataggcttggtttataagacccgcacctgacttaggtaccatgtattgtgcatatataaatacgctatatgtgcgatatactccgcgcnttaataaccaaagaatattatgtagaagtagggccaacccattccggcttggttctccatatttaaggagggcatgaggcgtcattcaaatacattgaagaagtgtagggggtgggggttctagcttatagggtagtctcaaatatttcgtggtagccaatgagttaagttagtctgaagacctggattttatcatgcagatgacacatcaaggtagcaagttcagagagaatagcttgtaaatgttaatgcaacataggtataatgaagcatgtcccacctcccacttgccatcatggcctgaaccctggaggaagaggaagtccattcagatagtgtggngggccttcgagtgttcattttcatttgcgttcttccccttctggccgagattggccaaaggcaccatcaaaatccagcatattttaattttgtcccacagcgttgctagggtggcatggctccccatctcgggtccatcctatacttccgtggcactccctatggctgaagcccttatgagtcaaaggacttatagccaattgattgttctaggccaggtaaaactggatatggacatgcatttatagcctcttaaaattattattttaagtaaaagccaataagcaaa

SEQ ID NO: 518708 - DNA, 984 bp, Homo sapiens
taatgcaggctgtacgcccggaattttgggatcggactggtgtgctggtctgcagtgattgacctgcgcaatgcatgatgtgctgcagtgtagtgctgggccacctgagtgggtcctggcctgattcctggctggatgcctgcagtgcctgctgccttgcctgagcggtgccccgcaggcctcggccgctggacgtggtggtggtgcacgtggcgtgctgcacggccatctgccagggctggtgccgcaggggattcaaggacaccacccccctgacgagcttctctcggcagatcatgaccgtggttctcaatgtgactgtgaatctgaatgccggaacagctgggggacatctgtgtcggaaatgttgcttgcagccttggtggcctgtgggcaatcattggcaccggaatctggcccaggtttcgtgaggttgagcatccctggaagactgttgcctatttgtcacacattgttcaagtagacaaggtgttactgaacggggggctaacatggcagttgacacatacaataggcaggtggatggaagtcccattgtacccatggcttgacaagcagggaaacccattggaagactattagcttcgcggcctttattgcgagcaagcgagaatggtcccacaacaattgcctgaattccctaatgggcgataaagcctctgacgaactgtgcacatagagaccggataaatgcacagattatccaagccgggcgaaacgaaagagtcgatgagaaaaatagcccttattaaggccccagtgggacattatcccgcaagccagcagacaatgaggcgcggcaatagtaaaggccacaaaaaggaatcgtggagcattgtttacaaaaaagctatgacgagaatatgttgggcctggatagaaacaagccacaagagttcacatctagaatagtaaaagattggtcaacacaacagagggtaatcgattcaagcatgtggacag

SEQ ID NO: 518709 - DNA, 1478 bp, Homo sapiens
  misc_feature (321)..(321): n is a, c, g, or t
  misc_feature (569)..(569): n is a, c, g, or t
  misc_feature (571)..(571): n is a, c, g, or t
gccgactgttacagaatattctcctacctcagactgtagcgattcccgatgaacctgtcagagccttacctactgacggctcaccgatgttctagtaaacgcgcccaccaggaacgcctgcgcaagggatttcatagtcacctaacactgttgaactcactattgcttgccctgagagcagcccatgctccgaggcttgacatagatggtgacgtagagcgcgagaactgaagctgagctagcgcgttgcgttacttcatatgctcagctcactgctagcttagatagccgactgaggtcgaacgggtgttggtttcccancctagtgcgccgtattcaccgtatgaccagaggaccttgacgcgctttctcgccttggtactcggctcccagcatatccacgctcaactcacatggcttaagctgtgattcgccaaggtagggataccttggtgtccttactttcggtccgtagacactgcaccgcagacatgttttctctgagcctttgaaaaacaagtttgtattccctgacacgggctctcgagacataaaaaccacaactgtgntntcgtctctggtcccaggctcactcggtcacacgtttcccaaagcatagacggagttgacactataaccttcgtgtcgatcgtggacagaatggaccgattgtggcaaggcctgttggtactccgacacaatgtccaaggcagcgtgtctcaggagtaaccgaggcaaacggccactgccagacccattggtgtggattgccaccatcggagacgcggattcagttcgacggcgcacagaatagatgtggtgcgcattcgagctgagtaccgtgactggctttctacttgggagacaaagacgcgtgaagcgttggttgttcgaggccccatggccctttggcattgggataactaatacggactgcctttgagggggaggttgcaccccttttccaaaagccattcataaagttacacaccattggccgcacacaagtcgaagcgacattttacccgggaggccccccatcttccggaatgaactccctatgtaattgccaggcgagctgcccttgtgtgcaagaggcgcttagcccgtatttcggctgtccgtggcgcaggtgatagaggccaccccccccgcaattcccttatgtggttccagggcttcagatttggggcccccagtggggtgccttcaaggttttgcccgcccccggctgtgcacaggtgacactttttgtcccctttgtgtgcttaaccaggttgtgtctgtttccccacgtgggcccttcctgtgtcggcctgcgcagaacaatattcttttgcgtgccaccgaacgtccacggtgtgtccgtcgacaagtacccagggatagtgcgtatccgcggcatacggcccgttccccgggcccggagggtgtccccttacccccggccgcggccgtcgcattcggggccagcctct

SEQ ID NO: 518710 - DNA, 245 bp, Homo sapiens
cagatgggtatcgcaaatatgatgtaagaagagagcgtacaagtttaggggctaattttgattttaaaattaatgataaaaatatcatcaaagctggtgctgtttataactggcgagacgattgggacaataggtatagactgagatttaataaagttacacctatctacgacaaaacagatgaaagtcttattactggttacaaagctgatcttagagcacaaaccaaaggtggtatagatact

SEQ ID NO: 518711 - DNA, 426 bp, Homo sapiens
accgaaataagtgcctgagaagccatggaccctccatggtcgagctccctccaccccattatcctgccttcaccgtgctggaagcatcccttggcatctccgaaacaactgcctgggtgcaaacagtgctgcagctattttgttaacttgtgaccccagccaggtggctgcacttctccaggcctcacacttctcatctgcaagactaagacaatgacagctgatctcccgcttaggcaaacatctgtaccttaagggtcacagtcttggccaaacactccccgtgcactgatgctcttacccatgggggcaccaacatcccctcctctggttgcgcttggccaaagctccttgcactgtttggtgtttctctgttgacgggtttgtctccctaccaaaccacgacttcctggaacataaggattg

SEQ ID NO: 518712 - DNA, 236 bp, Homo sapiens
tacctgatagctcaggtgggtcagccccgaggctgtgaagagcccagggccagtagatgccacttttgctccaggaagaatcttcaagtgtgtcctttttattcaaggggctctctgttcagcgaatctctagatgtactagtcacaaatactcgcatttattaaaatgtatccatggtcccacaatccttttacatatttctctccaggagtatcacatttctgagggctctgag

SEQ ID NO: 518713 - DNA, 214 bp, Homo sapiens
  misc_feature (196)..(196): n is a, c, g, or t
ttgccctgacctgtgagaggataagtagtaaggtggtggccagagtggcaccacaatgatgacaataccatctatgagtctgaggagagcagcgaaggcagcaaaacccacaccccgctgctggattttagcttttactcaaggacagagacctttgaagatgagggagcagaaaacagtgtttcgatagccccanacacagattttactggac

SEQ ID NO: 518714 - DNA, 602 bp, Homo sapiens
cgcgtatgtccagcgtggcctccacattcccgcgaggccagcatgagcatcatcgatttctattattacaacgaaggcaagcgagttcgcgaaatcgcgggcgatgagcacgtcaagttgggcgagagtcgctcgggcttctgctggatcgcgcttagcgaacccacccccgaggaactactcgcgatccaaaggacatataatcttcatccgttggcgatcgacaacgcgatgcacccgctgtgcccgcccaagctcgaggtctacaacgatgagttgtacgtcgtcgcgcagaccgccgagctggtcggcggaccggatcagctacggcaagatggcgatcttcaccggtcacaaccaccttatcaccgtgcggcacggcaatgccggagcgctgggcaaacttcgggagcaaactcgaggcaatcgcccgacgcagttcggcaagggtgtcgactatgtgctgcacgcgatcttgcatcggttggtcgaccagtatctgcccatcttcgaaatgatcgaggacgacgtcctggcgatggagcgacgggcgctgcacgatttcctcgggccagaagaggtggcgcgaatctttgaactaa

SEQ ID NO: 518715 - DNA, 168 bp, Homo sapiens
  misc_feature (137)..(137): n is a, c, g, or t
cctgagccagcacccggacagtccaccattgtgacgtggacctccctcccgagccagcacccggacagtccaccattgtgacgtggacctcccccctgagccagtacccggacagtccaccattgtgacgtggaccnccctcccgagccagcacctggacagtccacc

SEQ ID NO: 518716 - DNA, 1247 bp, Homo sapiens
gaagggttcggaatatctccgctcttcatccctcgcgaagatctggaatgacttattctatgtgagctatgaacaccacatgtgttgtacacatccgttgcctctgcgttatggttctagagatagagagactaaatacaatttttcggaagaaccattgtaatatcaaggcacagtatgcgagcctggaatgtactgaatggtaggcgcctttattatgtaccgaattaatagtgcagcattatattgggtgacgatttaatcggcagaacgtggtaagtatgcggaatcccacttatgcctgtgtaagctgaaataatatatgactgtatatctagtcggtgcctatgaagattctagcaacttttcattcatgtaggctctacctgtcatttagttacttctggcatgcatgtccgtgccttagcaggtgcagtccgcgatgcttattccgttgattacttcctgtacgtatatgctttaacttgctgaggaccatatgagggtaggatatatgatgcttttaagaattaccaaagatttgtatagggcaaaaccattgtcttaaagtcgatggtcaaattttttaggacggtgatatcgtcatatccattgcatcaatctttgtgcacaatgccacgttaaaggaagcttggtgatattcgcgtgggacaattttccttccaggacggagaggttcccattacgggggctagggggggaacttttactaccaaggaagcaagtcagggggccagaagttcacacggcggaattggaaggggtgggcagccacggtggtcacactctcgaagcttttctgttgcaatcgcctctaccacagtagtgtgtgattcgcgccatattggagctgcgcgataaaaccggggggagatatccagagacagcgcgttcttgtgcacgaggctgcacacacgcacacacaggtatatacaaccacgtggccccagaggaacatggcgtcggaaaaaaacaccgggaggacgaggtaggcggcagcacatacgaaccacggggtctgagcaacttaggagagaggaagtatgatacagagcacctagagaaaatagccgacacgtaagtaaaacacgacggcagcagaaggaagacatcaccgtgccgaatcagtagtacgtacgcactctgtgtcgcacgcacgatagactcgctgttgtccaccacacactcagcgagagaagaagaaaaggaagaagggagaagaagaa

SEQ ID NO: 518717 - DNA, 100 bp, Homo sapiens
  misc_feature (10)..(10): n is a, c, g, or t
  misc_feature (12)..(12): n is a, c, g, or t
  misc_feature (26)..(26): n is a, c, g, or t
  misc_feature (29)..(29): n is a, c, g, or t
  misc_feature (33)..(33): n is a, c, g, or t
gtttctccantntattataatactcntcnaacnatttccagtttaaagtggttgttttaaacaattttttttccagttaaattgtttttgttggggagaa

SEQ ID NO: 518718 - DNA, 822 bp, Homo sapiens
  misc_feature (163)..(163): n is a, c, g, or t
  misc_feature (470)..(470): n is a, c, g, or t
  misc_feature (487)..(487): n is a, c, g, or t
ttggtttcattttttcggctcctaaaatccattcattcaaaagtcaatatcatctttttaaaaaatgagcctatgtgcctcccctgttaaaaacccttcacacgcttcccactgcatggaacaaaatccaaattcctcactctgcccagaaccccctgcatcncatggctcctattcatctgcccaacctcatctcatactattcttcccctcacacactacactctaatcccaaaggcatccactctgttcctcaagtccaacaaatccttaccacagccaggcctgtgcacttggcagtccctcttcctggaatgctcttctcccagtttttttttttaagcctgctccttctcatccaccagtctcagtgaaatgataccgcctcaaaaaaatattttcttttaacaacctatctaaagtggcctcacttagtatctctttcatcagtctgttgatatacttggatnttgtctatgttcccccnacaaaatataaaagctcaatgagaagcttatctgtcttcttcctcttcttcttcttctttgtttctttctttttctttctttctttttctttctttctttttctttctttcttttttcttttctttgtttgtttttgagatgcagtttcactctcatggcccaggctggagtgcactggtatgatctcagctcaccacaacctctgcctcccaggttcaagcattctcctgctgaatctcagcctcctgagtagctgggattacaagcatgtgccaccatcccggctatttgtatttttagtagagtgggggaccagaactggatcctctagatc

SEQ ID NO: 518719 - DNA, 727 bp, Homo sapiens
cgccaagatgccggcttaccactcttctctcatggatcctgataccaaactcatcggaaacatggcactgttgcctatcagaagctcaattcaaaggacctgcccccagagcagaggcaatgagctggcgatgaacgcacaactgacattgcagcagtatgaaagcttcaagattactttgcactttctgctgtgcgcagaacgcttaacagctcatagacacacgaagctatacacgctaactgctcatcagcactgcctgaaacaccaactgccacgcatatcaagaccctgggacttttgacctctctctcaccccataccgcacacgacacgaacacaccaaacaacatcgcccaaacacacatggctgtcactgacgactctgctctctgggtcacacgaccagtaattccctgggcctcttcgctccgccctagcagccctaccctaccaaccagcctcggctacaaagctattatctcaacgctcattagctcccccactaccaacccgaacagcactgcggtactcctgaaacccctcaacccatgaacccctacacctaacctcgcagctccccctcccctggccccctaatccacaatggtacaactccacccctaccccactcacactcggacactacataacccaatccccccccccccccccaacaacccccaccccccccaacacccacgtccccccccacccgcccccccac

SEQ ID NO: 518720 - DNA, 457 bp, Homo sapiens
  misc_feature (263)..(263): n is a, c, g, or t
  misc_feature (352)..(352): n is a, c, g, or t
  misc_feature (363)..(363): n is a, c, g, or t
  misc_feature (387)..(387): n is a, c, g, or t
  misc_feature (403)..(403): n is a, c, g, or t
  misc_feature (443)..(443): n is a, c, g, or t
  misc_feature (449)..(449): n is a, c, g, or t
gacggagcccgctctatcacccaggctggagtgcagtggcacaatttcggctcactgcaagctccgccccccgggttcatgctgttctcctgcctcagcctcccgagtagctgggactacaggcgcccgccactacacccagctgattttttgtatttttagtagagacggggtttcactgtgttagccaggatggtcttgatctcctgacctcgtgatctgcccgccttggcttcccaaagtgctgggattacaggcgtganatccatgcccggcccagtttcttttaataggatggaaaacttgatggaaacagttgactagtagggtcaaaacagagttttgcaagganttattacaatntggggttacggggacaatttaccngggggcattttccttnaggtttatggatggcttttaggcttaggggtaaaacaggntttaantaggattc

SEQ ID NO: 518721 - DNA, 93 bp, Homo sapiens
tcctccccagcgcacctcaatttatattgctctgaaaagagctttcccaagtatttaaaaaaaaaaccaatttttttaccccccaaaaaaaaa

SEQ ID NO: 518722 - DNA, 233 bp, Homo sapiens
accttctaactgctggccctccagcagctgagccctcgtgtgccatttcaggaagctactttgcccgagatgctgcactattcccaccactacagcaaatccgacacgcacgacccacacgatgtccctggcccgggtgctggtgtgcgatgtcgtcaggggcaatgcctcctttgtccgtccaccggccacggagggctgcgagcacgccttctatgatagctgcgtgaaca

SEQ ID NO: 518723 - DNA, 251 bp, Homo sapiens
cacggggtagtgtgaaatactccagatgcactggagacagtagtgtagagaccaaatggatctctccctctctgacatcagaatcagaatctctggtctaccacttgggttgtgacctacaagttgggggcaaagctctttagctctcataatcagcaggactgatggcggatgctgggcaggcctccctggaggccaagtgttgggctggcatgtccagcaccagataggtgcctatctcacaatatccc

SEQ ID NO: 518724 - DNA, 395 bp, Homo sapiens
atggtactggtacaaaaatagggatatagaccaatggaacagaatagagaacccagaaataaacccaaatacttacagccaactgatctttgataaagcaaacaaaaatataaaagtggggaaaggacacccttttcaacaactagtactgggatagtgggcaagccacatacaggagaatgaaactggatcctcatctctcaccttatacaaaaatcaactcaatgtggagtaaggactttaaacctaagacctgaaactagaaaaatgctgggagataacattggaaaaacccttctagacagtggctcaggcaaggattccataaccaagaaccaaagcaaatactacaaaaacgaagataaatagcggggacctaattaaactgaaatgag

SEQ ID NO: 518725 - DNA, 277 bp, Homo sapiens
  misc_feature (163)..(163): n is a, c, g, or t
  misc_feature (248)..(248): n is a, c, g, or t
ctgcactcacggtgtgtagcagtcagtgtaggcctcgcggaaggggctggcaggcccgtgagttacaggcttcccaggcgtcgagttggtcaggcctgtgtaccacagctggccggctgcgtcccgtcccatggtgcgtgtacttccacgcgtgtggcctgcnctgatggctgtgtggccagcggtgaaccctccagggcacaggtagtcatcgctgacgggtgggcatggtggcagatgactgagcnccatgtctacagctgagtgcttttgaccc

SEQ ID NO: 518726 - DNA, 953 bp, Homo sapiens
aattttattatcgccgcatattatatacccattgaggttataaaattaataactcagtgtaaatataatataaaaaccacttctgggaaaatctttgagacgaggtgacttctaattcgcttcccccgtgaattgtacaccagtcctttaaagctatttatttgttctaggaaaccactctccgtagcccatcctatctatgggagcaccatattgtcgcattcttaatatcgatattttcttattgacctcacccgttggaacttcctgtggtagtaccaacagacaatttgtctcacccaccagtggtgtgatcgttctttataaatgtataaccccgctgtgttccaaccctccccccccccgccctcttcttcaaacctttgtaaactaactaatggaaaggattataaaaaggattactacaatctatcaacgaatagtataaaaacctatcattctctcttgaacaaattattagacgtgatataatcactctacaataactattcaatcttctaaacaactatggagatgtttatttctctatctaagattaacccccaccacccccaaaatggatttcctctgtaataagaattatactcgctgacgcaccaacacccactggatgtctaccctctgtaaagggagacttaaccccacctgactttttaattaaatatgaaaactcaaatgttcctaaaacatcactaattttctcaaacataacatatcgcgcgcgtctttctgatggacccccctattacccgcctcaccgcgattttaacacatctaccgcccagtacgatactctaatccctgactcagctatatttgacagactactacccccctccttaagcggaaccgttccgagctcccccaaatttcagaaggggtgtcaacccttgcatagctatatataacaaacaaaaaaccacccatccatc

SEQ ID NO: 518727 - DNA, 364 bp, Homo sapiens
cacccagattatcgattgcaacgattcgcggcagattcgcgaatttggcgcaaatatagaccatctataaccaggtcgcgcgcgcgaatgataacaccaccaatcaagctggcatcctccgcaacttgcacgcgcacttcccggtcgactccttacttggaaaacccttgcggtttgtctagctgtacattggtacaatgcaaaagcactggtcactacaacgtctaccgatatctctagtacggccttgtacaggtcaaacagagcggcgatctccggcagaagcgggagacggtcgtattcggcaacaacgtatacccgcttatgttccgataaaactaccatccccaccgcaagccgatct

SEQ ID NO: 518728 - DNA, 427 bp, Homo sapiens
gagtgtgcactgcactcatctgatgacagagcgagatctctccagaaaaaaatgcccatgctcatacgagattctggcagtgaactgctccgtatcactggtcccccatgagctctggtctttctttgtagagtcacttatacctactggtcactgaccagggctttctaacaggaggagcaagtcgtatgggagagcctgcacaatgtggatggagacagctgcttttgtgactctgactttcacctgagtcattccctgggcaaggggcctggagcagaaggtgggagtggctccccagaaaagcagctgcaggtagaccaggtgtgtagggcacttaggaaaagtgcagagagcacatgtgcctcagagagctttttactgcatacattttaactgctagaggccatgtgaacccatgcctctc

SEQ ID NO: 518729 - DNA, 201 bp, Homo sapiens
ggtaagagcggtctgactgcacggtggccctgctgctcaggaattcccaccttccatctcaggggacctcagggaaccccaaaggctgctggagaatcagactctggtcccgtcctctccacccacctagaggctacttcacactctctccgctgtcctcacgcctctgccacctccgctccgctcactccctgcaccgat

SEQ ID NO: 518730 - DNA, 259 bp, Homo sapiens
gtcactttctacgcagtattaggattataacaatataaaaaatacatatatggaaaagaaaagaacagatgaaaacgaaacaaattaatgttccagatagaactggagtcacccgttttatttacgttatatatttatacatattcgtatatagtgatacaacacatggtaacgtgtaaaacaacagacacaagaggtaaacaatcttgtattgtcgtagacaattgaagcgttcaactttctcacacaaagatgtgag

SEQ ID NO: 518731 - DNA, 288 bp, Homo sapiens
  misc_feature (22)..(22): n is a, c, g, or t
  misc_feature (118)..(118): n is a, c, g, or t
ttgtggccaagaagttcagggntaatccttcatcttgctgggcactgggccacgggaccagcaggcatcaatatggaaggtaaagaggacccgttttcgggcgttaccgaatacggcngcattaaaacggggcattcacgcaagcggcagcaccgggcattaaacggcaccagatggcgtgccttgatcggttatattcctcgacattcaatcggatgtccgtctttatcgagaaaactgcgcagtgtcatcacgctgccgtcttccgcactctccccttccagacga

SEQ ID NO: 518732 - DNA, 668 bp, Homo sapiens
gcccttatacgaatgtggtatcctggatgcgagcggaacgcggcttaccgtacacgattcccggcgaatctggatgccgatagctttcagttagtctaaggctcttagattgttcccacgctctgcgtgggaacgcctcttgggacgctctgcgtaccgcttctaagggcggacgcagagcgtccagggctgcattcccacgcagagcgtgggaacgatcaggcccctggattctcacccaggggccttttgcattacggcaatgcttacgccgctttggcttccaactggctcaacgaacggttcagcgcactgaacagcgccttgaagctggcggtagtgatgttttcatcgatccccacaccatgcaccgggcgttcgccgttcacgcgcagttcaatataggccgccgccttggcattggtacccgcaccaatcgcgtgctcgttgtagtccatgatctccacgccaatcggcaggccggccaccaaggcttccagcgcaccgttgcctttgcctttccagtgcaggttggtttcgccctgaccccttgccggaaacttcgacctcgacaaagctgttgccgttttcttcctgcaagcgatggctgaccaacgcatacggcgtgttggcttgcaggtattccgctgcggcaggcgtagatctgt

SEQ ID NO: 518733 - DNA, 173 bp, Homo sapiens
aggcagtgctatgacacgtgaaggtgtcataccgggatcacggtctatcgcctcctccacccggtgcaactgctagcaccctcaaagtgctgaccagcacggccaccgacacccacagtcatcagctccagagccactccctcctccagtccagggactgcaaccgcccttcc

SEQ ID NO: 518734 - DNA, 230 bp, Homo sapiens
aggggaattgcaaagtcatgggaaatttaaaaatggggttttaaaaaaacttcccaatggcccccccgggctattttacccgggatttttttggggggtgattgggggtctaccatggtttccctaaatctttttccccccaaggggggaaatttgggaaatcccgggtttgaggggggctaattaggtttttttttaaaccatattaaaagccatacctttccaaccca

SEQ ID NO: 518735 - DNA, 358 bp, Homo sapiens
acagatggtcattattattacttaaagtttgaaatatcttagtgagagcggaggagaccttaaaagaaaaagaagagggaaaatcgtaacttgagaatgtagccccctgacaagcagcataatcacaaaacgagcattcagagttcaagcgttaaacacaggatcacaaaggcctcgcaccccacaccccagacacacggcgcagccttggccctgaatgtggtgctccctctgtcgcccggcctggccgccctcagccctcccccctgctaatgactcctgtccctgcctttcttcagtgtcttcgagagaactctgacgtgaagacgcacgggccttttgaggccgtgatgcgcac

SEQ ID NO: 518736 - DNA, 291 bp, Homo sapiens
atccaaagaattcggcacgagggtgacacgcagcccacggtctgtactgacgcggcctcgcttcttcctctttctcgactccatcttcggcggtagcttggaccgcccgttcaattggcaatatgcagctctttgttccgggcccaggagctctcaacacctcgcagggtaaccgccacagagaacgcgtgtgtgccagagtatacaaggtcaagtgtgagccctaatttgtgggggcaaatatccccgcgcagagatacatgtgtcgtttttcccgtgacgcgggacccc

SEQ ID NO: 518737 - DNA, 686 bp, Homo sapiens
ggctcttgttgcccaggctggtgtgcaatggcgtgatctcggacaccacaacttcacctccccggttcaagcaattctcctgcctcagcctgaagtcgtgatctgcccgcctcggctcccaaagtgcgtgggattacaggcgtcagttaccgtgcctggctctataccagtattttctagttataaaggaggactacattaactcttatggtcagttgttctgaaacgtgaacatttaaaaagcagcctgaaaaataaaaatttataattggcccttgacctcggcaaggaatggcagcatcacgggaaggaaaactactctagaaggccatttaacaagtatgtatttattagaacatgcaaattcatggtgtgtctccatcagtggtcaccttgagggattagcacattctaagtggagagtgtccgtggctccaaccctccagcagtgttctcacccaacaagtgacagtctgacgtggacgtgggacagggaagtcattctaacggagtccaaagtcagtagccgccacaatctggtttataaagtaacgagatccagtgggacaagctattttggtatgccaacctagataggattataacagcaagaagtgatttcttctgggtttatgaatggatcttaggtaattacaaaagggaaatccaagagtggataacacatg

SEQ ID NO: 518738 - DNA, 236 bp, Homo sapiens
  misc_feature (65)..(65): n is a, c, g, or t
taggtcgtctgtggccatccaccatgatcgtttcgccacgatacggtgttctcatcgtgaaccanatgccgtattgtgttctcttcacgaacacgatatagtggggcgcatcggatagtcaaactcggttatccttccgggaccaagatccatgattgtcgtgacccattcgacgtttactcgatcgaggttcagttactgcgtcaactccgcgcgtttttgcctaattggggtac

SEQ ID NO: 518739 - DNA, 399 bp, Homo sapiens
tgcagtgtgttgtcagagtgcagcctattcatttcctagtgcgtagagtggttgggagtccaggattcaaaggctcaggcgtgaactgggtagcagcatttcttacatgtagtgggttctgggagcccagagggcagccatagtgtgccgactccgtggaggaactaactaagcagacccggttcttgccgaagacgctaacagcctaaggtgtacagtgacagggcggatgcgcgctcctctgtcctcgccgttcgaagcggaccatgatcatgtgctgcttgtcaggtccagcggacctggcgtatagtgccttcggcagctggtgggcatgtgcatcccagatggagacctggactcgtgtccagcccgacacaggtacaaccccgaacacgcata

SEQ ID NO: 518740 - DNA, 170 bp, Homo sapiens
  misc_feature (64)..(64): n is a, c, g, or t
  misc_feature (67)..(67): n is a, c, g, or t
  misc_feature (76)..(76): n is a, c, g, or t
  misc_feature (124)..(124): n is a, c, g, or t
  misc_feature (159)..(159): n is a, c, g, or t
  misc_feature (168)..(168): n is a, c, g, or t
ctattagctgggctgaacaatccaacgcctctggctgaattcctttcttcacaatgataggganganccgacatcnaacgcactcaaaaagcgacgctcgcctactgaacgccttggccgctancaacgcagctctattctccttttgttgtgtcttanatcttctcntc

SEQ ID NO: 518741 - DNA, 544 bp, Homo sapiens
  misc_feature (14)..(14): n is a, c, g, or t
  misc_feature (427)..(427): n is a, c, g, or t
cgatggtcctcagncttcaagatatcagggtctcagtgacggaggatagtgtggtggggctcagaagctcatcgaggggaggctgtgtgtgatgaggggatgccttcgggatgccctcatcctcctcggggctgggtgtctccctcaaggccagccagctcctatcgttggtagggtgttgctactcctgccgccggatgcctgggcccggatgctcttctgcttggacttcgttccctcccagggcagtggtgtctccctcctagccggaccacggctctgccaggcaacgggtgtcttttcccttcagcacgtggttggcgcagaggaattcagtcaggtctacctccggggggttccggtaccagtcctcgatcagctcctcaaactcttccaccagcacatcagacggcttctggaggtcagncacctcggcagaagtctcgttccacagctcataggggatgtccatcaccaccttgaccccttggtgtaccaggtggtgtaatgtctcaaaggtctctgacatggcctatgagctgag

SEQ ID NO: 518742 - DNA, 109 bp, Homo sapiens
aggaagctaacctcaccatagagcaggatatcttttccccatgtcctcctctaacatcttacctcctgtactcctgaattctccattatcattctctgatatattctcc

SEQ ID NO: 518743 - DNA, 328 bp, Homo sapiens
ctttccaatccttggggggagaaaaaggatgtctttccggattattttaattaatttttttcataattgagccagacctgtttgttatggcccctaatgctaaataaaactgtggcccttttccccataatttaatttagtggaaaaagaagccaatgctttccctattgtgataagggaacatggggtttttttgggcccccctttagaaccctgttaggggccataccctcccttgatgaaagggcccttcgggcccctgtggtctttttaaaggcttttcctcccctgggctttttaatgggtaattaaagtggggggaaattta

SEQ ID NO: 518744 - DNA, 529 bp, Homo sapiens
gtcggtaccttactctcctcccacctccaagtgcacggattacaggtatgagccaccatgcctggcccctaccctgcctactgagaaccaaaggaaggatccaaattctccttagctcaactcgagccatttcctgattgcttcatcagcgaggagctggttattgggctgtccaggcctcccaagcagcacagaaatgagaaacaggaccttgccctgtcactcaggatggagttcagtggtcctatcatggctcattatagcctcaaactcccaggctcaagcaatcctaccatgtcagccttcccagtagttggaactacagctggatctaccatgaaagacttgtgaatccaggaagagagactgactgggcaacatgttattcaggtacaaaaagatttggactgtaacttaaaaatgatcaaattatgtttcccatgcatcaggtgcaatgggaagctcttctggagagtgagagaagcttccagttaaggtgacattgaagccaagtcctgaaagatgagga

SEQ ID NO: 518745 - DNA, 406 bp, Homo sapiens
tcaggataaaacaaagatgattcttcgcgtactggattggcggtgattaaaagagtcacggaaggcagactgatgaagaagtagagagtaagttgctctccctgcactgtgggtaggagtgcaaatcagtggagcatttctggagaggagtttggcaatatgtaggaatttttacaagttatataccctttggcccagcaatcccccttcatgaatctacctgagggagacaaccatccaaaagtgaaaatatgtgtgcccgaggatgcccactgctgacttgccgccaaaaatccagaacactaaaaacaaccccaaaatcatcactaggagacgctattgctcccaataatcaatacaatttattataatgctctgtactttattagatgtctgtaacataatg

SEQ ID NO: 518746 - DNA, 776 bp, Homo sapiens
  misc_feature (349)..(349): n is a, c, g, or t
agcgggactccaggaagaagccgcaagcagccggtgagtcgactgcacggctgtggtggcggcggcggagactgccggcccggaggtgcgcgctctgctacgtgtgcagaagacaggcgctttcgaggatgatagcggctgtatcgcatgagtcagtctcatacctccgatagtgcgtcaatagagattgatgtacaaggagtccgtcactagcaaaactacttaaggaatcaacgctgaactgtattaagaagtctataaggttggttagtaatatgacctgtaactgtaaggcatcgattcctcgctgtcgaaacataacgttgctgggctgacttgcattatcctngagacgtggtggccagtgtcaagcactttccggagacggagaccacttgacacagagctgtgtccacagaacaaacctgatacttagacatgcgaagcgactgctacacgagacaatcactttctccagctcggtactggtatgactaactcacttcatacataggtaatagagtttagatggacacaagacaaccccagtaggtgacttgaccgactctcctggagaggacgcgagtggacgacatgggagcacccaaaagtcttattcccacagggagtcgcgccccgggggcccccggcaatggttacgggaccgcaccttttaatcgcgaggggaggtcacttcttgcaagagactgtagactcaaatccacaagtgggcaatcccccggatcgcacaggaggggccatgaggcaaaagccgg

SEQ ID NO: 518747 - DNA, 866 bp, Homo sapiens
  misc_feature (541)..(541): n is a, c, g, or t
gattgcttgtcaggcgtggtgttgtagatggtgttgtcgagcgttgggagacatctgtacgtgtgcgagaaagtgatggatgttgccgagaggaagtgtagaaattgaaacttgagtattgatatatctaactactcataatcactatggtaaaggatggcttgttagggacatcccgatgacaagtgttgtgagatcagctgacatgaacaattaagtgctttgattttccatgtaagtgagtattttggatgcctgtattgtaagaggaataggtgctcgaagtccgtgagatggctgtcgaacgttctggtgcaggctagtcgcgatggcttcatcatttaatagggcagtggtcgttggtgctgtattgggaggggtatcgtgtcgcagaatgtgatggagagaacaggaggttttgaggtattagcacaaaggaacttaactgaaggctaaacatcttcgatcctactgaatagatatcttgatggcgacttttacgtaggggttatcttactggtgatatttagcgttgtgtgancatgtgaaactctaatcaaatggcgtaagatgatgggagttaccaagaaattaaaccatagtttgtaaagaattagattatggtttaaaaaccagtagaatttagtatatgttgactcattatagtcgtctcatgttaccaaacaccagtcaacgcgtcgtgaactaagtgctggtccgtatggactaaggggatgataggcctgtcataagaatttctagagaggactgaggttgggcaaaatttcgcttggaaaattatttattcagagcctgtcttgcctttgcatggtgaccattgtccaatgtgatgtccccgcccagca

SEQ ID NO: 518748 - DNA, 214 bp, Homo sapiens
agcgggctatacgggtgttctgctgcagtttagatgcagggcttatgttactaatgtggggtgtttcattgtaatcagagaattctgtctataccctttaacttctgggaatacattcaggtttccttcgtgggctaatgtaagatattagttcagggatatttaaaatgaagctatgttccccacttattagagaaaacttgatacactctta

SEQ ID NO: 518749 - DNA, 895 bp, Homo sapiens
  misc_feature (413)..(413): n is a, c, g, or t
aagctccgtattgacgatactctggggacacagggctgagtctcaagtgatgatagagatgcgaataagggtcggctaggagatgctgggcaagagtagtgtgtgaatagtcaacaatagcgaaatgtgggtgcggcattcggagacgttggagagccccatgtcctggaggaacgttctgaaagttgttggtgggtttctactgaaccacgagaagatgtagtcagaaggctggtataggatttacgaggtcgctggtagttgttaattcaccggacgatggggaactttcaaggaactacatgaacattggcactttaatcagggacaaaattcatccatgacaatgcaaacgttttaagaacaagaagtagcagaagacgagacagctgatattccagcagctacaaaanacagctaaaggaagcagaacaaatactggtaacagctgtttaccaagcgaaggagaaactcaagtcaatagaaaaagcaagaaaaggtgctatctcctctgaagaaataattaagtatgcacataggatcagtgcagtaatgctgtatgtgctccactgacctgggttccagtgggaccccggaggaacctacccaattgatatagaggatgagaaggtgggttaactgcgtcagatgaacaatccgttcaattaatggggtgaatgggcatttaccaggagattgcactttgcgcaggaagatttgcaatgtcttggtccacagtatcccatggcagtcaaatggcctggcggtgattttgtaccccaatcatatggggacttttgtgggcgctctgggttaaaggaaataggtgtgttgattttaagggcctcaccaggaggtggtgttgactcaacattaaatgttggaattgtttacg

SEQ ID NO: 518750 - DNA, 5280 bp, Homo sapiens
  misc_feature (471)..(471): n is a, c, g, or t
  misc_feature (475)..(476): n is a, c, g, or t
  misc_feature (500)..(501): n is a, c, g, or t
  misc_feature (509)..(509): n is a, c, g, or t
  misc_feature (563)..(563): n is a, c, g, or t
  misc_feature (623)..(623): n is a, c, g, or t
  misc_feature (630)..(630): n is a, c, g, or t
ccacccacgactagagagtgctcatgccagcagcttgagccacttagcgctagcacaccagcaacaacaacagttgttacagcaccagttacctcatcttcttggacaagcccatccttctgcttcatataatcagcttggactttatccaattatttggcagtatccaaatggaacacatgcatactcaggacttggtttgccttcttctaagtgggttcacccagaaaatgcagttaatgctgaagcttcattaaggaggaattctcccagtccttggctacatcagcccacccctgtgacctcagcagatggtattggattacttagtcacattcctgtcagaccttccagtgcagagcctcatcggcctcttaaaattacagcccattccagtccaccattgacaaaaactttagtagatcatcataaggaagaattagaaagaaaagcttttatggaaccattacngtcnnttgcatccacatcagccaaaaatnncctggatntaaataggtcacagactggaaaagattgtcacttacataggcattttgtggatncagtattaaatcagttacagaggccaccccaggagactggagagaggttaaacaaatacnaagaggnacacctcgattcttcaagaaagtattgatgttgctccctttacaactaaaatcaagggacttgagggtgagagagagaattattccagagtggcatcatcatcttccagtcctaaaagccatatcatcaaacaagatatggatgtagaacgctcagtatcagatctttataaaatgaagcactcagtgcctcagagtttaccccaaagtaactatttcactacattgtctaatagtgtggtcaatgaaccaccaagatcatacccatccaaagaagtttcaaatatttacggtgataaacagagtaatgcccttgcagcggcagcagctaatcctcaaactctgacttcatttataacatctctttcaaagcctccacctttgattaaacaccaaccagaaagtgaaggtttagtaggcaagataccagaacatcttccacatcagattgcatctcactcagtaacaaccttcagaaatgattgtaggagtcctacccatttgacagtttcttctacaaatacactccgcagtatgcctgcattacatagagcaccagtatttcacccaccaatccatcacagcctggaaagaaaggaaggcagctatagtagtctttcccctccaactttaactccggtgatgccagtaaatgctggtggtaaagttcaagaatcacagaagcctccaactctaatacccgaaccaaaagactcccaggcaaattttaagagttcttcagaacagagtttgacggagatgtggagacctaataataacctcagcaaagagaaaactgaatggcatgtggagaaaagcagcggaaagttacaggctgctatggcatctgtcattgtgcgtccatcttctagtacaaaaactgatagtatgccagcaatgcagttagcttctaaagatcgagttagtgaaagatcttcagctggggcacataaaacagattgcctcaaactagcagaagccggagaaactggaagaatcattttgccaaatgtgaattcagacagtgttcacacaaaatctgaaaaaaactttcaggctgtctcacagggcagtgttcccagttcagtcatgtctgctgtaaatacgatgtgtaataccaaaacggatgtaatcacatctgctgccgatactaccagtgtttccagctggggtggttcagaagtaatttcctctttatcaaataccattttggcctctacatcatcagaatgtgtatcttcaaaaagtgtcagtcagccagtggctcaaaaacaagaatgcaaggtcagcaccacagcaccagttacattagccagtagtaagacaggaagtgttgttcaacccagttctgggttctcaggcacaactgattttatccatttaaaaaagcacaaggcagcattggctgcagctcagtataaaagtagtaatgccagtgagactgaacctaatgctataaaaaatcagacactttcagcctcccttcctctggatagcactgtaatctgtagtacaattaacaaagcaaactctgtaggaaatgggcaagcttcccagacaagtcaaccaaactaccatactaaactgaaaaaggcctggctcaccagacactcagaagaagataaaaatactaataaaatggaaaattcagggaattctgtatcagaaattattaagccatgttctgtcaacttaatagcctctacatctagtgatatacaaaatagtgtagatagtaagatcatagttgataaatatgtaaaagatgataaagtcaacaggagaaaagccaaaagaacttatgaatctggctctgaaagtggagactcagatgaaagtgaaagcaagtcagagcaaaggactaaaagacaacctaagccaacttacaaaaagaagcaaaatgatttgcaaaagagaaaaggtgaaatagaagaagatttgaaacccaatggagttctcagcaggagtgccaaagaaagaagtaaactgaagttgcaaagcaacagtaataccaaaattgcctggaaaagagcagtgagaggagtccgggagatgtgtgatgcatgtgaagcaacattgtttaacattcactgggtctgccaaaaatgtggatttgtggtctgcttagattgttacaaggcaaaggaaaggaagagttctagagataaagaactatatgcttggatgaagtgtgtgaagggacagcctcatgatcacaaacatttaatgccaacccaaattatacctggttctgttttgacagatcttctagatgccatgcacactcttagggaaaaatatggtattaaatcccattgtcattgtactaacaaacagaatttacaagttggaaattttcctacaatgaatggtgtatctcaagttttacagaatgttcttaatcacagtaataaaatttctctgtgcatgcctgagtctcagcagcaaaatactcctccgaagtctgagaaaaatggtggcagcagcccagagagtgatgtaggcacagataacaagttaactcctccagaatcccagtcaccactgcactggttagcagatcttgcagagcaaaaagccagagaggaaaaaaaagaaaacaaagaacttacccttgaaaaccaaattaaagaagaaagagaacaagacaactctgaatctccaaatggcagaacatcacctcttgtgtcccagaataatgaacaaggctcaaccttacgggatttgctgactacaacagctggaaagctacgtgtggggtctacagatgctggcattgcctttgccccagtatattcaatgggagccccaagtagcaaaagtggacggactatgcctaacattcttgatgacataattgcttcagttgttgaaaacaaaattccaccaagtaaaacctccaagataaatgtaaaaccagagcttaaagaagagcctgaagaaagcataatatctgcagtggatgaaaataataaattatacagtgatataccacattcttggatctgtgagaagcatattttatggcttaaggattataagaatagcagtaattggaagcttttcaaagaatgttggaaacaaggacagcctgcagtggtttctggtgtgcataagaaaatgaacattagcctatggaaggcggaatcaattagtcttgattttggagaccaccaagctgatctcctgaactgcaaagatagcatcatttcaaatgccaatgttaaggaattctgggatggttttgaagaagtttcaaaacggcagaaaaacaagagtggagaaacagttgttttaaaattgaaagattggccttcaggagaagacttcaagactatgatgccagcaagatacgaagatcttttaaaaagtctgccattgccagaatattgtaatccagaaggaaaattcaatttggcctctcatttgccaggattttttgtacgtcctgatctaggacccaggttgtgcagtgcctatggtgtagttgctgctaaagatcatgatataggaacaacaaatctccatattgaagtttctgatgttgtaaatatactagtttatgttggcatagcaaaaggaaatggcattctctcaaaagcaggaattctcaagaaatttgaggaagaagatttggatgacattttaaggaaaagattgaaggactcaagtgaaatacctggtgctctgtggcatatttatgctgggaaagatgttgacaagataagggaatttcttcaaaaggtataagttagtttgcaaataatatctcttcccctcaagcaaggacttattcattgttgccgtaccttcacttggcattcaacaatataagaccattacataatttttacttcaaagtagatgggagtttttgttgaaagtcaaaaccctgtttctcttgctcctctttgaaagtctgttaacattttgagggttttgaatggtgatttgttcccagttggtagtgtgcctccattccctgttaataaaagactgatctgttcttgagccagatattagttgggtggcgaaaagtagctatctggagtcgcgggatgtaaaaacaaatatttcatggaaacgtctaaagaaggtaggatctttattttctttgaatctgatagatatttttggctgctgacctagggaatgattctactctatcacatctgatactatgatacttactgagtagactcagattttgagtaatcataccttgactgtagttgtcatatactctgaaagaaatttatatatcaacctgaaataattggttgaaaccctttgctcaggtactttttaaacttcgtaattatggaaatttgttttaagaaatgttcagtgctgatacatcatctttctgaaaggatgtaagttctgtctgtgatcaatgtgaagtaaaagagttacagccttttttgtaccattttatccctgaatacttacctgtattttaatctgaagtatgatcatttgtgccttctaaagcagattatttaactgattaaagagtcccttgaaattgatttttcaagcgttagaaggttagccatgtaaaggtatttatacttacctcaaaaaaggatcaataaatgtttatgaaatccatacatatgaatggtttggcttttggtaaaaaaaaaaa

SEQ ID NO: 518751 - DNA, 813 bp, Homo sapiens
  misc_feature (5)..(5): n is a, c, g, or t
  misc_feature (67)..(67): n is a, c, g, or t
  misc_feature (141)..(141): n is a, c, g, or t
  misc_feature (162)..(162): n is a, c, g, or t
  misc_feature (169)..(169): n is a, c, g, or t
  misc_feature (207)..(207): n is a, c, g, or t
  misc_feature (210)..(210): n is a, c, g, or t
  misc_feature (213)..(213): n is a, c, g, or t
  misc_feature (221)..(221): n is a, c, g, or t
  misc_feature (230)..(230): n is a, c, g, or t
  misc_feature (242)..(242): n is a, c, g, or t
  misc_feature (312)..(312): n is a, c, g, or t
  misc_feature (352)..(352): n is a, c, g, or t
  misc_feature (372)..(372): n is a, c, g, or t
  misc_feature (415)..(415): n is a, c, g, or t
  misc_feature (419)..(419): n is a, c, g, or t
  misc_feature (457)..(457): n is a, c, g, or t
  misc_feature (465)..(465): n is a, c, g, or t
  misc_feature (487)..(487): n is a, c, g, or t
  misc_feature (525)..(525): n is a, c, g, or t
  misc_feature (650)..(650): n is a, c, g, or t
  misc_feature (711)..(711): n is a, c, g, or t
  misc_feature (718)..(718): n is a, c, g, or t
  misc_feature (809)..(809): n is a, c, g, or t
aacanagcagattaggcaatttgttaggtaaattacaaatacattagaaatcatacaaaagtggccnggcagggtggctcacagctgtaatcccagcactttaggaggctgaggtgggcggatcacgaggtcaggagttgngaacagcctggccaatatggngaaaccncatctctactaaaaatacaaaaattagccaggtgtggngcnacncgcctgtngtcgcagcnacttggggggcnggggcaggggaatcgcctgaacctgggaggcggaagttgcagtgagcaagatcatgaaaagcaaaatacncaaggacttttaatataaccaccaacacagtgtgccttcnggccaagcagagtcacttcnggggttcttaaagtatgaatggggtgaaagaatgtgcattccnagcnaaatgccaaattccaaagcctttagtacaaaaacagcngactttcngccaaacaggtcgacttttaanaggggtatgggggcggggcgggggggcgtaggtttggnatcccggcgacttgggaggcggaggggcggccagggttgcgccactgcactacggccggggcgacagagcaagactctcaaaaggaggcatgaaatgcacctcaatcttttgctccaagtctgcnaaagattgtcaaaccctccctgttaaaaaaaaaaatcagtttacctactctcccttctatntaaaggnccctaaaattaaatgtcaatgccaaaatgcgaagtgcagatcgtcttctctccaaataagagttacttggaatccttaacaaatccaaggngaaa

SEQ ID NO: 518752 - DNA, 118 bp, Homo sapiens
tgcatcagtcgtcgtgtatctgaaggcatggtaaatgtagagcaacgtgatgatgaagtgcgaagaacgatggctgcctgaattaatagtagtaaatactatgggtccatgcagtttc

SEQ ID NO: 518753 - DNA, 2811 bp, Homo sapiens
  misc_feature (471)..(471): n is a, c, g, or t
  misc_feature (475)..(476): n is a, c, g, or t
  misc_feature (500)..(501): n is a, c, g, or t
  misc_feature (509)..(509): n is a, c, g, or t
  misc_feature (563)..(563): n is a, c, g, or t
  misc_feature (623)..(623): n is a, c, g, or t
  misc_feature (630)..(630): n is a, c, g, or t
ccacccacgactagagagtgctcatgccagcagcttgagccacttagcgctagcacaccagcaacaacaacagttgttacagcaccagttacctcatcttcttggacaagcccatccttctgcttcatataatcagcttggactttatccaattatttggcagtatccaaatggaacacatgcatactcaggacttggtttgccttcttctaagtgggttcacccagaaaatgcagttaatgctgaagcttcattaaggaggaattctcccagtccttggctacatcagcccacccctgtgacctcagcagatggtattggattacttagtcacattcctgtcagaccttccagtgcagagcctcatcggcctcttaaaattacagcccattccagtccaccattgacaaaaactttagtagatcatcataaggaagaattagaaagaaaagcttttatggaaccattacngtcnnttgcatccacatcagccaaaaatnncctggatntaaataggtcacagactggaaaagattgtcacttacataggcattttgtggatncagtattaaatcagttacagaggccaccccaggagactggagagaggttaaacaaatacnaagaggnacacctcgattcttcaagaaagtattgatgttgctccctttacaactaaaatcaagggacttgagggtgagagagagaattattccagagtggcatcatcatcttccagtcctaaaagccatatcatcaaacaagatatggatgtagaacgctcagtatcagatctttataaaatgaagcactcagtgcctcagagtttaccccaaagtaactatttcactacattgtctaatagtgtggtcaatgaaccaccaagatcatacccatccaaagaagtttcaaatatttacggtgataaacagagtaatgcccttgcagcggcagcagctaatcctcaaactctgacttcatttataacatctctttcaaagcctccacctttgattaaacaccaaccagaaagtgaaggtttagtaggcaagataccagaacatcttccacatcagattgcatctcactcagtaacaaccttcagaaatgattgtaggagtcctacccatttgacagtttcttctacaaatacactccgcagtatgcctgcattacatagagcaccagtatttcacccaccaatccatcacagcctggaaagaaaggaaggcagctatagtagtctttcccctccaactttaactccggtgatgccagtaaatgctggtggtaaagttcaagaatcacagaagcctccaactctaatacccgaaccaaaagactcccaggcaaattttaagagttcttcagaacagagtttgacggagatgtggagacctaataataacctcagcaaagagaaaactgaatggcatgtggagaaaagcagcggaaagttacaggctgctatggcatctgtcattgtgcgtccatcttctagtacaaaaactgatagtatgccagcaatgcagttagcttctaaagatcgagttagtgaaagatcttcagctggggcacataaaacagattgcctcaaactagcagaagccggagaaactggaagaatcattttgccaaatgtgaattcagacagtgttcacacaaaatctgaaaaaaactttcaggctgtctcacagggcagtgttcccagttcagtcatgtctgctgtaaatacgatgtgtaataccaaaacggatgtaatcacatctgctgccgatactaccagtgtttccagctggggtggttcagaagtaatttcctctttatcaaataccattttggcctctacatcatcagaatgtgtatcttcaaaaagtgtcagtcagccagtggctcaaaaacaagaatgcaaggtcagcaccacagcaccagttacattagccagtagtaagacaggaagtgttgttcaacccagttctgggttctcaggcacaactgattttatccatttaaaaaagcacaaggcagcattggctgcagctcagtataaaagtagtaatgccagtgagactgaacctaatgctataaaaaatcagacactttcagcctcccttcctctggatagcactgtaatctgtagtacaattaacaaagcaaactctgtaggaaatgggcaagcttcccagacaagtcaaccaaactaccatactaaactgaaaaaggcctggctcaccagacactcagaagaagataaaaatactaataaaatggaaaattcagggaattctgtatcagaaattattaagccatgttctgtcaacttaatagcctctacatctagtgatatacaaaatagtgtagatagtaagatcatagttgataaatatgtaaaagatgataaagtcaacaggagaaaagccaaaagaacttatgaatctggctctgaaagtggagactcagatgaaagtgaaagcaagtcagagcaaaggactaaaagacaacctaagccaacttacaaaaagaagcaaaatgatttgcaaaagagaaaaggtgaaatagaagaagatttgaaacccaatggagttctcagcaggagtgccaaagaaagaagtaaactgaagttgcaaagcaacagtaatagtaagtcagttactttgttttatctcaggtaaaatgggctgaatgttttagctatactagtgtgctgctttaaagatcagtgagcttaaaggcatcctttgtcttcatttgcgtgccttagctttatgtatatgctcattgatctcatttctacatttcacaagtaagtac

SEQ ID NO: 518754 - DNA, 284 bp, Homo sapiens
attggatatgcggataggggttcagaaaagtaataagtagtacgcccaacgctgacctggaacaaggattccaagaaggggtcctaatgctagtgtgataatgcagttccggagaggattgtggtagcaggaaataatgaagatgttccttttcaagagcagcagatcttgagcttattcagtcaactccctttaaaacgctgggagtgaaaacaccacctcgtgtacttacacttgagtgaaagaccactatattttctggatctagaaagaactcctacaat

SEQ ID NO: 518755 - DNA, 205 bp, Homo sapiens
  misc_feature (21)..(21): n is a, c, g, or t
gtaccccctgccccccctggntgccgttgggggggaaccccaacagggccccgggagggaaccctgcccccaaccccccccagcaagggtgtacagtttcgcccttggaagattgagctggggcccccccagccatccgctttggccagcagaaccagccccaagccagcccctttggtaaataaagcagcatttgggattttta

SEQ ID NO: 518756 - DNA, 2563 bp, Homo sapiens
  misc_feature (471)..(471): n is a, c, g, or t
  misc_feature (475)..(476): n is a, c, g, or t
  misc_feature (500)..(501): n is a, c, g, or t
  misc_feature (509)..(509): n is a, c, g, or t
  misc_feature (563)..(563): n is a, c, g, or t
  misc_feature (623)..(623): n is a, c, g, or t
  misc_feature (630)..(630): n is a, c, g, or t
ccacccacgactagagagtgctcatgccagcagcttgagccacttagcgctagcacaccagcaacaacaacagttgttacagcaccagttacctcatcttcttggacaagcccatccttctgcttcatataatcagcttggactttatccaattatttggcagtatccaaatggaacacatgcatactcaggacttggtttgccttcttctaagtgggttcacccagaaaatgcagttaatgctgaagcttcattaaggaggaattctcccagtccttggctacatcagcccacccctgtgacctcagcagatggtattggattacttagtcacattcctgtcagaccttccagtgcagagcctcatcggcctcttaaaattacagcccattccagtccaccattgacaaaaactttagtagatcatcataaggaagaattagaaagaaaagcttttatggaaccattacngtcnnttgcatccacatcagccaaaaatnncctggatntaaataggtcacagactggaaaagattgtcacttacataggcattttgtggatncagtattaaatcagttacagaggccaccccaggagactggagagaggttaaacaaatacnaagaggnacacctcgattcttcaagaaagtattgatgttgctccctttacaactaaaatcaagggacttgagggtgagagagagaattattccagagtggcatcatcatcttccagtcctaaaagccatatcatcaaacaagatatggatgtagaacgctcagtatcagatctttataaaatgaagcactcagtgcctcagagtttaccccaaagtaactatttcactacattgtctaatagtgtggtcaatgaaccaccaagatcatacccatccaaagaagtttcaaatatttacggtgataaacagagtaatgcccttgcagcggcagcagctaatcctcaaactctgacttcatttataacatctctttcaaagcctccacctttgattaaacaccaaccagaaagtgaaggtttagtaggcaagataccagaacatcttccacatcagattgcatctcactcagtaacaaccttcagaaatgattgtaggagtcctacccatttgacagtttcttctacaaatacactccgcagtatgcctgcattacatagagcaccagtatttcacccaccaatccatcacagcctggaaagaaaggaaggcagctatagtagtctttcccctccaactttaactccggtgatgccagtaaatgctggtggtaaagttcaagaatcacagaagcctccaactctaatacccgaaccaaaagactcccaggcaaattttaagagttcttcagaacagagtttgacggagatgtggagacctaataataacctcagcaaagagaaaactgaatggcatgtggagaaaagcagcggaaagttacaggctgctatggcatctgtcattgtgcgtccatcttctagtacaaaaactgatagtatgccagcaatgcagttagcttctaaagatcgagttagtgaaagatcttcagctggggcacataaaacagattgcctcaaactagcagaagccggagaaactggaagaatcattttgccaaatgtgaattcagacagtgttcacacaaaatctgaaaaaaactttcaggctgtctcacagggcagtgttcccagttcagtcatgtctgctgtaaatacgatgtgtaataccaaaacggatgtaatcacatctgctgccgatactaccagtgtttccagctggggtggttcagaagtaatttcctctttatcaaataccattttggcctctacatcatcagaatgtgtatcttcaaaaagtgtcagtcagccagtggctcaaaaacaagaatgcaaggtcagcaccacagcaccagttacattagccagtagtaagacaggaagtgttgttcaacccagttctgggttctcaggcacaactgattttatccatttaaaaaagcacaaggcagcattggctgcagctcagtataaaagtagtaatgccagtgagactgaacctaatgctataaaaaatcagacactttcagcctcccttcctctggatagcactgtaatctgtagtacaattaacaaagcaaactctgtaggaaatgggcaagcttcccagacaagtcaaccaaactaccatactaaactgaaaaaggcctggctcaccagacactcagaagaagataaaaatactaataaaatggaaaattcagggaattctgtatcagaaattattaagccatgttctgtcaacttaatagcctctacatctagtgatatacaaaatagtgtagatagtaagatcatagttgataaatatgtaaaagatgataaagtcaacaggagaaaagccaaaagaacttatgaatctggctctgaaagtggagactcagatgaaagtgaaagcaagtcagagcaaaggactaaaagacaacctatttcaccttttctcttttgcaaattgttttgcttctttttgtaagttggctgtcgatc

SEQ ID NO: 518757 - DNA, 504 bp, Homo sapiens
ccagatagatggaaacttcatagtggaaggaggtggtgagaaggaagtagtaaactgttaagagcatttcagcattgctgtattgttttaatattctttggctttccaaattattgcagaatgttattttttaactgaagaagctcattcagttgttccattgattctgagaagaaaagatttgttattacaaataaaattgaaatttaactgaacaggatttaccatttccttacttaaattggagtgtctattttaattcatatttcagatttcaaaagaacaaggccttgaagttctaccagaacatgatccaatacgtgaccaaagttggtatgtgaacaaaaagctccgtcaaaggctgcttgaagaatatggagtcagaacctgtactcttattcagttccttggtgatgctattgttttgccagcgggagcacttcatcaggtatatacaaacttatttctaacatattttttactgactgaaagaactagttttga

SEQ ID NO: 518758 - DNA, 5697 bp, Homo sapiens
  misc_feature (471)..(471): n is a, c, g, or t
  misc_feature (475)..(476): n is a, c, g, or t
  misc_feature (500)..(501): n is a, c, g, or t
  misc_feature (509)..(509): n is a, c, g, or t
  misc_feature (563)..(563): n is a, c, g, or t
  misc_feature (623)..(623): n is a, c, g, or t
  misc_feature (630)..(630): n is a, c, g, or t
ccacccacgactagagagtgctcatgccagcagcttgagccacttagcgctagcacaccagcaacaacaacagttgttacagcaccagttacctcatcttcttggacaagcccatccttctgcttcatataatcagcttggactttatccaattatttggcagtatccaaatggaacacatgcatactcaggacttggtttgccttcttctaagtgggttcacccagaaaatgcagttaatgctgaagcttcattaaggaggaattctcccagtccttggctacatcagcccacccctgtgacctcagcagatggtattggattacttagtcacattcctgtcagaccttccagtgcagagcctcatcggcctcttaaaattacagcccattccagtccaccattgacaaaaactttagtagatcatcataaggaagaattagaaagaaaagcttttatggaaccattacngtcnnttgcatccacatcagccaaaaatnncctggatntaaataggtcacagactggaaaagattgtcacttacataggcattttgtggatncagtattaaatcagttacagaggccaccccaggagactggagagaggttaaacaaatacnaagaggnacacctcgattcttcaagaaagtattgatgttgctccctttacaactaaaatcaagggacttgagggtgagagagagaattattccagagtggcatcatcatcttccagtcctaaaagccatatcatcaaacaagatatggatgtagaacgctcagtatcagatctttataaaatgaagcactcagtgcctcagagtttaccccaaagtaactatttcactacattgtctaatagtgtggtcaatgaaccaccaagatcatacccatccaaagaagtttcaaatatttacggtgataaacagagtaatgcccttgcagcggcagcagctaatcctcaaactctgacttcatttataacatctctttcaaagcctccacctttgattaaacaccaaccagaaagtgaaggtttagtaggcaagataccagaacatcttccacatcagattgcatctcactcagtaacaaccttcagaaatgattgtaggagtcctacccatttgacagtttcttctacaaatacactccgcagtatgcctgcattacatagagcaccagtatttcacccaccaatccatcacagcctggaaagaaaggaaggcagctatagtagtctttcccctccaactttaactccggtgatgccagtaaatgctggtggtaaagttcaagaatcacagaagcctccaactctaatacccgaaccaaaagactcccaggcaaattttaagagttcttcagaacagagtttgacggagatgtggagacctaataataacctcagcaaagagaaaactgaatggcatgtggagaaaagcagcggaaagttacaggctgctatggcatctgtcattgtgcgtccatcttctagtacaaaaactgatagtatgccagcaatgcagttagcttctaaagatcgagttagtgaaagatcttcagctggggcacataaaacagattgcctcaaactagcagaagccggagaaactggaagaatcattttgccaaatgtgaattcagacagtgttcacacaaaatctgaaaaaaactttcaggctgtctcacagggcagtgttcccagttcagtcatgtctgctgtaaatacgatgtgtaataccaaaacggatgtaatcacatctgctgccgatactaccagtgtttccagctggggtggttcagaagtaatttcctctttatcaaataccattttggcctctacatcatcagaatgtgtatcttcaaaaagtgtcagtcagccagtggctcaaaaacaagaatgcaaggtcagcaccacagcaccagttacattagccagtagtaagacaggaagtgttgttcaacccagttctgggttctcaggcacaactgattttatccatttaaaaaagcacaaggcagcattggctgcagctcagtataaaagtagtaatgccagtgagactgaacctaatgctataaaaaatcagacactttcagcctcccttcctctggatagcactgtaatctgtagtacaattaacaaagcaaactctgtaggaaatgggcaagcttcccagacaagtcaaccaaactaccatactaaactgaaaaaggcctggctcaccagacactcagaagaagataaaaatactaataaaatggaaaattcagggaattctgtatcagaaattattaagccatgttctgtcaacttaatagcctctacatctagtgatatacaaaatagtgtagatagtaagatcatagttgataaatatgtaaaagatgataaagtcaacaggagaaaagccaaaagaacttatgaatctggctctgaaagtggagactcagatgaaagtgaaagcaagtcagagcaaaggactaaaagacaacctaagccaacttacaaaaagaagcaaaatgatttgcaaaagagaaaaggtgaaatagaagaagatttgaaacccaatggagttctcagcaggagtgccaaagaaagaagtaaactgaagttgcaaagcaacagtaatactggcattcctcgttcagtattgaaagattggcgtaaagtcaagaagctgaagcaaactggggaatcctttttacaggatgactcctgctgtgagatagggcctaatttacaaaagtgtcgagaatgtagacttattcgcagtaaaaaaggagaagaaccagctcactcaccagtattttgtagattttactactttagacggttgtcatttagtaaaaacggagtagttagaatagatggtttctcttctcctgaccaatatgatgatgaagctatgagtttgtggacacatgaaaattttgaagatgatgaactagatatagagacttctaaatatatcttggatataataggtgataagttctgtcaattagtaacatctgaaaaaacagctttgtcctgggtgaaaaaggatgccaaaattgcctggaaaagagcagtgagaggagtccgggagatgtgtgatgcatgtgaagcaacattgtttaacattcactgggtctgccaaaaatgtggatttgtggtctgcttagattgttacaaggcaaaggaaaggaagagttctagagataaagaactatatgcttggatgaagtgtgtgaagggacagcctcatgatcacaaacatttaatgccaacccaaattatacctggttctgttttgacagatcttctagatgccatgcacactcttagggaaaaatatggtattaaatcccattgtcattgtactaacaaacagaatttacaagttggaaattttcctacaatgaatggtgtatctcaagttttacagaatgttcttaatcacagtaataaaatttctctgtgcatgcctgagtctcagcagcaaaatactcctccgaagtctgagaaaaatggtggcagcagcccagagagtgatgtaggcacagataacaagttaactcctccagaatcccagtcaccactgcactggttagcagatcttgcagagcaaaaagccagagaggaaaaaaaagaaaacaaagaacttacccttgaaaaccaaattaaagaagaaagagaacaagacaactctgaatctccaaatggcagaacatcacctcttgtgtcccagaataatgaacaaggctcaaccttacgggatttgctgactacaacagctggaaagctacgtgtggggtctacagatgctggcattgcctttgccccagtatattcaatgggagccccaagtagcaaaagtggacggactatgcctaacattcttgatgacataattgcttcagttgttgaaaacaaaattccaccaagtaaaacctccaagataaatgtaaaaccagagcttaaagaagagcctgaagaaagcataatatctgcagtggatgaaaataataaattatacagtgatataccacattcttggatctgtgagaagcatattttatggcttaaggattataagaatagcagtaattggaagcttttcaaagaatgttggaaacaaggacagcctgcagtggtttctggtgtgcataagaaaatgaacattagcctatggaaggcggaatcaattagtcttgattttggagaccaccaagctgatctcctgaactgcaaagatagcatcatttcaaatgccaatgttaaggaattctgggatggttttgaagaagtttcaaaacggcagaaaaacaagagtggagaaacagttgttttaaaattgaaagattggccttcaggagaagacttcaagactatgatgccagcaagatacgaagatcttttaaaaagtctgccattgccagaatattgtaatccagaaggaaaattcaatttggcctctcatttgccaggattttttgtacgtcctgatctaggacccaggttgtgcagtgcctatggtgtagttgctgctaaagatcatgatataggaacaacaaatctccatattgaagtttctgatgttgtaaatatactagtttatgttggcatagcaaaaggaaatggcattctctcaaaagcaggaattctcaagaaatttgaggaagaagatttggatgacattttaaggaaaagattgaaggactcaagtgaaatacctggtgctctgtggcatatttatgctgggaaagatgttgacaagataagggaatttcttcaaaaggtataagttagtttgcaaataatatctcttcccctcaagcaaggacttattcattgttgccgtaccttcacttggcattcaacaatataagaccattacataatttttacttcaaagtagatgggagtttttgttgaaagtcaaaaccctgtttctcttgctcctctttgaaagtctgttaacattttgagggttttgaatggtgatttgttcccagttggtagtgtgcctccattccctgttaataaaagactgatctgttcttgagccagatattagttgggtggcgaaaagtagctatctggagtcgcgggatgtaaaaacaaatatttcatggaaacgtctaaagaaggtaggatctttattttctttgaatctgatagatatttttggctgctgacctagggaatgattctactctatcacatctgatactatgatacttactgagtagactcagattttgagtaatcataccttgactgtagttgtcatatactctgaaagaaatttatatatcaacctgaaataattggttgaaaccctttgctcaggtactttttaaacttcgtaattatggaaatttgttttaagaaatgttcagtgctgatacatcatctttctgaaaggatgtaagttctgtctgtgatcaatgtgaagtaaaagagttacagccttttttgtaccattttatccctgaatacttacctgtattttaatctgaagtatgatcatttgtgccttctaaagcagattatttaactgattaaagagtcccttgaaattgatttttcaagcgttagaaggttagccatgtaaaggtatttatacttacctcaaaaaaggatcaataaatgtttatgaaatccatacatatgaatggtttggcttttggtaaaaaaaaaaa

SEQ ID NO: 518759 - DNA, 359 bp, Homo sapiens
  misc_feature (310)..(310): n is a, c, g, or t
attttgggtgccgaagtgaagtggcgactatagcaaaccctgtgatctctggctgctgcctcagaagaaacaagagggagggatgaataatgtaaaactctggatcaatattctaattctgagcctctattggaatcagctagcaaccacatatcagcttggtttcaacagtttcccagttcatggtttgtggcaagctggattgagcaagtctgttggcgccattttttcaacagcatgtagtcactttgtgtcttcgtgtcacattttgctaattcttacaatctgtctcgtgattttttggggggcnccatgggggggcaccatgaaccacacctgtacaagatggcaaacttaat

SEQ ID NO: 518760 - DNA, 5591 bp, Homo sapiens
  misc_feature (471)..(471): n is a, c, g, or t
  misc_feature (475)..(476): n is a, c, g, or t
  misc_feature (500)..(501): n is a, c, g, or t
  misc_feature (509)..(509): n is a, c, g, or t
  misc_feature (563)..(563): n is a, c, g, or t
  misc_feature (623)..(623): n is a, c, g, or t
  misc_feature (630)..(630): n is a, c, g, or t
ccacccacgactagagagtgctcatgccagcagcttgagccacttagcgctagcacaccagcaacaacaacagttgttacagcaccagttacctcatcttcttggacaagcccatccttctgcttcatataatcagcttggactttatccaattatttggcagtatccaaatggaacacatgcatactcaggacttggtttgccttcttctaagtgggttcacccagaaaatgcagttaatgctgaagcttcattaaggaggaattctcccagtccttggctacatcagcccacccctgtgacctcagcagatggtattggattacttagtcacattcctgtcagaccttccagtgcagagcctcatcggcctcttaaaattacagcccattccagtccaccattgacaaaaactttagtagatcatcataaggaagaattagaaagaaaagcttttatggaaccattacngtcnnttgcatccacatcagccaaaaatnncctggatntaaataggtcacagactggaaaagattgtcacttacataggcattttgtggatncagtattaaatcagttacagaggccaccccaggagactggagagaggttaaacaaatacnaagaggnacacctcgattcttcaagaaagtattgatgttgctccctttacaactaaaatcaagggacttgagggtgagagagagaattattccagagtggcatcatcatcttccagtcctaaaagccatatcatcaaacaagatatggatgtagaacgctcagtatcagatctttataaaatgaagcactcagtgcctcagagtttaccccaaagtaactatttcactacattgtctaatagtgtggtcaatgaaccaccaagatcatacccatccaaagaagtttcaaatatttacggtgataaacagagtaatgcccttgcagcggcagcagctaatcctcaaactctgacttcatttataacatctctttcaaagcctccacctttgattaaacaccaaccagaaagtgaaggtttagtaggcaagataccagaacatcttccacatcagattgcatctcactcagtaacaaccttcagaaatgattgtaggagtcctacccatttgacagtttcttctacaaatacactccgcagtatgcctgcattacatagagcaccagtatttcacccaccaatccatcacagcctggaaagaaaggaaggcagctatagtagtctttcccctccaactttaactccggtgatgccagtaaatgctggtggtaaagttcaagaatcacagaagcctccaactctaatacccgaaccaaaagactcccaggcaaattttaagagttcttcagaacagagtttgacggagatgtggagacctaataataacctcagcaaagagaaaactgaatggcatgtggagaaaagcagcggaaagttacaggctgctatggcatctgtcattgtgcgtccatcttctagtacaaaaactgatagtatgccagcaatgcagttagcttctaaagatcgagttagtgaaagatcttcagctggggcacataaaacagattgcctcaaactagcagaagccggagaaactggaagaatcattttgccaaatgtgaattcagacagtgttcacacaaaatctgaaaaaaactttcaggctgtctcacagggcagtgttcccagttcagtcatgtctgctgtaaatacgatgtgtaataccaaaacggatgtaatcacatctgctgccgatactaccagtgtttccagctggggtggttcagaagtaatttcctctttatcaaataccattttggcctctacatcatcagaatgtgtatcttcaaaaagtgtcagtcagccagtggctcaaaaacaagaatgcaaggtcagcaccacagcaccagttacattagccagtagtaagacaggaagtgttgttcaacccagttctgggttctcaggcacaactgattttatccatttaaaaaagcacaaggcagcattggctgcagctcagtataaaagtagtaatgccagtgagactgaacctaatgctataaaaaatcagacactttcagcctcccttcctctggatagcactgtaatctgtagtacaattaacaaagcaaactctgtaggaaatgggcaagcttcccagacaagtcaaccaaactaccatactaaactgaaaaaggcctggctcaccagacactcagaagaagataaaaatactaataaaatggaaaattcagggaattctgtatcagaaattattaagccatgttctgtcaacttaatagcctctacatctagtgatatacaaaatagtgtagatagtaagatcatagttgataaatatgtaaaagatgataaagtcaacaggagaaaagccaaaagaacttatgaatctggctctgaaagtggagactcagatgaaagtgaaagcaagtcagagcaaaggactaaaagacaacctaagccaacttacaaaaagaagcaaaatgatttgcaaaagagaaaaggtgaaatagaagaagatttgaaacccaatggagttctcagcaggagtgccaaagaaagaagtaaactgaagttgcaaagcaacagtaatactggcattcctcgttcagtattgaaagattggcgtaaagtcaagaagctgaagcaaactggggaatcctttttacaggatgactcctgctgtgagatagggcctaatttacaaaagtgtcgagaatgtagacttattcgcagtaaaaaaggagaagaaccagctcactcaccagtattttgtagattttactactttagacggttgtcatttagtaaaaacggagtagttagaatagatggtttctcttctcctgaccaatatgatgatgaagctatgagtttgtggacacatgaaaattttgaagatgatgaactagatatagagacttctaaatatatcttggatataataggtgataagttctgtcaattagtaacatctgaaaaaacagctttgtcctgggtgaaaaaggatgccaaaattgcctggaaaagagcagtgagaggagtccgggagatgtgtgatgcatgtgaagcaacattgtttaacattcactgggtctgccaaaaatgtggatttgtggtctgcttagattgttacaaggcaaaggaaaggaagagttctagagataaagaactatatgcttggatgaagtgtgtgaagggacagcctcatgatcacaaacatttaatgccaacccaaattatacctggttctgttttgacagatcttctagatgccatgcacactcttagggaaaaatatggtattaaatcccattgtcattgtactaacaaacagaatttacaagttggaaattttcctacaatgaatggtgtatctcaagttttacagaatgttcttaatcacagtaataaaatttctctgtgcatgcctgagtctcagcagcaaaatactcctccgaagtctgagaaaaatggtggcagcagcccagagagtgatgtaggcacagataacaagttaactcctccagaatcccagtcaccactgcactggttagcagatcttgcagagcaaaaagccagagaggaaaaaaaagaaaacaaagaacttacccttgaaaaccaaattaaagaagaaagagaacaagacaactctgaatctccaaatggcagaacatcacctcttgtgtcccagaataatgaacaaggctcaaccttacgggatttgctgactacaacagctggaaagctacgtgtggggtctacagatgctggcattgcctttgccccagtatattcaatgggagccccaagtagcaaaagtggacggactatgcctaacattcttgatgacataattgcttcagttgttgaaaacaaaattccaccaagtaaaacctccaagataaatgtaaaaccagagcttaaagaagagcctgaagaaagcataatatctgcagtggatgaaaataataaattatacagtgatataccacattcttggatctgtgagaagcatattttatggcttaaggattataagaatagcagtaattggaagcttttcaaagaatgttggaaacaaggacagcctgcagtggtttctggtgtgcataagaaaatgaacattagcctatggaaggcggaatcaattagtcttgattttggagaccaccaagctgatctcctgaactgcaaagatagcatcatttcaaatgccaatgttaaggaattctgggatggttttgaagaagtttcaaaacggcagaaaaacaagagtggagaaacagttgttttaaaattgaaagattggccttcaggagaagacttcaagactatgatgccagcaagatacgaagatcttttaaaaagtctgccattgccagaatattgtaatccagaaggaaaattcaatttggcctctcatttgccaggattttttgtacgtcctgatctaggacccaggttgtgcagtgcctatggtgtagttgctgctaaagatcatgatataggaacaacaaatctccatattgaagtttctgatgttgtaaatatactagtttatgttggcatagcaaaaggaaatggcattctctcaaaagcaggaattctcaagaaatttgaggaagaagatttggatgacattttaaggaaaagattgaaggactcaagtgaaatacctggtgctctgtggcatatttatgctgggaaagatgttgacaagataagggaatttcttcaaaaggtataagttagtttgcaaataatatctcttcccctcaagcaaggacttattcattgttgccgtaccttcacttggcattcaacaatataagaccattacataatttttacttcaaagtagatgggagtttttgttgaaagtcaaaaccctgtttctcttgctcctctttgaaagtctgttaacattttgagggttttgaatggtgatttgttcccagttggtagtgtgcctccattccctgttaataaaagactgatctgttcttgagccagatattagttgggtggcgaaaagtagctatctggagtcgcgggatgtaaaaacaaatatttcatggaaacgtctaaagaaggtaggatctttattttctttgaatctgatagatatttttggctgctgacctagggaatgattctactctatcacatctgatactatgatacttactgagtagactcagattttgagtaatcataccttgactgtagttgtcatatactctgaaagaaatttatatatcaacctgaaataattggttgaaaccctttgctcaggtactttttaaacttcgtaattatggaaatttgttttaagaaatgttcagtgctgatacatcatctttctgaaaggatgtaagttctgtctgtgatcaatgtgaagtaaaagagtcccttgaaattgatttttcaagcgttagaaggttagccatgtaaaggtatttatacttacctcaaaaaaggatcaataaatgtttatgaaatccatacatatgaatggtttggcttttggtaaaaaaaaaaa

SEQ ID NO: 518761 - DNA, 171 bp, Homo sapiens
  misc_feature (72)..(72): n is a, c, g, or t
  misc_feature (87)..(87): n is a, c, g, or t
agatatctactcgccagtggggcatatcaaaacttggagtccctcacctctctaaggttgggcaggtgaccntgaagtgagcacagnctaggctgagctgggactggtacctcctggtcttgatacccccctctgtcttgtgaaggcaggggaaaggtggggtccttggag

SEQ ID NO: 518762 - DNA, 153 bp, Homo sapiens
cgatcataacactgggcctggggtacaggagtgttgcatattccatgaggctggtgtcagggaagcagagactcacagttgccaggttgtccatctctgagccaatttccctccacaacccagtgcttcagtcctccccagtgcttcagcagt

SEQ ID NO: 518763 - DNA, 5029 bp, Homo sapiens
  misc_feature (471)..(471): n is a, c, g, or t
  misc_feature (475)..(476): n is a, c, g, or t
  misc_feature (500)..(501): n is a, c, g, or t
  misc_feature (509)..(509): n is a, c, g, or t
  misc_feature (563)..(563): n is a, c, g, or t
  misc_feature (623)..(623): n is a, c, g, or t
  misc_feature (630)..(630): n is a, c, g, or t
ccacccacgactagagagtgctcatgccagcagcttgagccacttagcgctagcacaccagcaacaacaacagttgttacagcaccagttacctcatcttcttggacaagcccatccttctgcttcatataatcagcttggactttatccaattatttggcagtatccaaatggaacacatgcatactcaggacttggtttgccttcttctaagtgggttcacccagaaaatgcagttaatgctgaagcttcattaaggaggaattctcccagtccttggctacatcagcccacccctgtgacctcagcagatggtattggattacttagtcacattcctgtcagaccttccagtgcagagcctcatcggcctcttaaaattacagcccattccagtccaccattgacaaaaactttagtagatcatcataaggaagaattagaaagaaaagcttttatggaaccattacngtcnnttgcatccacatcagccaaaaatnncctggatntaaataggtcacagactggaaaagattgtcacttacataggcattttgtggatncagtattaaatcagttacagaggccaccccaggagactggagagaggttaaacaaatacnaagaggnacacctcgattcttcaagaaagtattgatgttgctccctttacaactaaaatcaagggacttgagggtgagagagagaattattccagagtggcatcatcatcttccagtcctaaaagccatatcatcaaacaagatatggatgtagaacgctcagtatcagatctttataaaatgaagcactcagtgcctcagagtttaccccaaagtaactatttcactacattgtctaatagtgtggtcaatgaaccaccaagatcatacccatccaaagaagtttcaaatatttacggtgataaacagagtaatgcccttgcagcggcagcagctaatcctcaaactctgacttcatttataacatctctttcaaagcctccacctttgattaaacaccaaccagaaagtgaaggtttagtaggcaagataccagaacatcttccacatcagattgcatctcactcagtaacaaccttcagaaatgattgtaggagtcctacccatttgacagtttcttctacaaatacactccgcagtatgcctgcattacatagagcaccagtatttcacccaccaatccatcacagcctggaaagaaaggaaggcagctatagtagtctttcccctccaactttaactccggtgatgccagtaaatgctggtggtaaagttcaagaatcacagaagcctccaactctaatacccgaaccaaaagactcccaggcaaattttaagagttcttcagaacagagtttgacggagatgtggagacctaataataacctcagcaaagagaaaactgaatggcatgtggagaaaagcagcggaaagttacaggctgctatggcatctgtcattgtgcgtccatcttctagtacaaaaactgatagtatgccagcaatgcagttagcttctaaagatcgagttagtgaaagatcttcagctggggcacataaaacagattgcctcaaactagcagaagccggagaaactggaagaatcattttgccaaatgtgaattcagacagtgttcacacaaaatctgaaaaaaactttcaggctgtctcacagggcagtgttcccagttcagtcatgtctgctgtaaatacgatgtgtaataccaaaacggatgtaatcacatctgctgccgatactaccagtgtttccagctggggtggttcagaagtaatttcctctttatcaaataccattttggcctctacatcatcagaatgtgtatcttcaaaaagtgtcagtcagccagtggctcaaaaacaagaatgcaaggtcagcaccacagcaccagttacattagccagtagtaagacaggaagtgttgttcaacccagttctgggttctcaggcacaactgattttatccatttaaaaaagcacaaggcagcattggctgcagctcagtataaaagtagtaatgccagtgagactgaacctaatgctataaaaaatcagacactttcagcctcccttcctctggatagcactgtaatctgtagtacaattaacaaagcaaactctgtaggaaatgggcaagcttcccagacaagtcaaccaaactaccatactaaactgaaaaaggcctggctcaccagacactcagaagaagataaaaatactaataaaatggaaaattcagggaattctgtatcagaaattattaagccatgttctgtcaacttaatagcctctacatctagtgatatacaaaatagtgtagatagtaagatcatagttgataaatatgtaaaagatgataaagtcaacaggagaaaagccaaaagaacttatgaatctggctctgaaagtggagactcagatgaaagtgaaagcaagtcagagcaaaggactaaaagacaacctaagccaacttacaaaaagaagcaaaatgatttgcaaaagagaaaaggtgaaatagaagaagatttgaaacccaatggagttctcagcaggagtgccaaagaaagaagtaaactgaagttgcaaagcaacagtaatactggcattcctcgttcagtattgaaagattggcgtaaagtcaagaagctgaagcaaactggggaatcctttttacaggatgactcctgctgtgagatagggcctaatttacaaaagtgtcgagaatgtagacttattcgcagtaaaaaaggagaagaaccagctcactcaccagtattttgtagattttactactttagacggttgtcatttagtaaaaacggagtagttagaatagatggtttctcttctcctgaccaatatgatgatgaagctatgagtttgtggacacatgaaaattttgaagatgatgaactagatatagagacttctaaatatatcttggatataataggtgataagttctgtcaattagtaacatctgaaaaaacagctttgtcctgggtgaaaaaggatgccaaaattgcctggaaaagagcagtgagaggagtccgggagatgtgtgatgcatgtgaagcaacattgtttaacattcactgggtctgccaaaaatgtggatttgtggtctgcttagattgttacaaggcaaaggaaaggaagagttctagagataaagaactatatgcttggatgaagtgtgtgaagggacagcctcatgatcacaaacatttaatgccaacccaaattatacctggttctgttttgacagatcttctagatgccatgcacactcttagggaaaaatatggtattaaatcccattgtcattgtactaacaaacagaatttacaagttggaaattttcctacaatgaatggtgtatctcaagttttacagaatgttcttaatcacagtaataaaatttctctgtgcatgcctgagtctcagcagcaaaatactcctccgaagtctgagaaaaatggtggcagcagcccagagagtgatgtaggcacagataacaagttaactcctccagaatcccagtcaccactgcactggttagcagatcttgcagagcaaaaagccagagaggaaaaaaaagaaaacaaagaacttacccttgaaaaccaaattaaagaagaaagagaacaagacaactctgaatctccaaatggcagaacatcacctcttgtgtcccagaataatgaacaaggctcaaccttacgggatttgctgactacaacagctggaaagctacgtgtggggtctacagatgctggcattgcctttgccccagtatattcaatgggagccccaagtagcaaaagtggacggactatgcctaacattcttgatgacataattgcttcagttgttgaaaacaaaattccaccaagtaaaacctccaagataaatgtaaaaccagagcttaaagaagagcctgaagaaagcataatatctgcagtggatgaaaataataaattatacagtgatataccacattcttggatctgtgagaagcatattttatggcttaaggattataagaatagcagtaattggaagcttttcaaagaatgttggaaacaaggacagcctgcagtggtttctggtgtgcataagaaaatgaacattagcctatggaaggcggaatcaattagtcttgattttggagaccaccaagctgatctcctgaactgcaaagatagcatcatttcaaatgccaatgttaaggaattctgggatggttttgaagaagtttcaaaacggcagaaaaacaagagtggagaaacagttgttttaaaattgaaagattggccttcaggagaagacttcaagactatgatgccagcaagatacgaagatcttttaaaaagtctgccattgccagaatattgtaatccagaaggaaaattcaatttggcctctcatttgccaggattttttgtacgtcctgatctaggacccaggttgtgcagtgcctatggtgtagttgctgctaaagatcatgatataggaacaacaaatctccatattgaagtttctgatgttgtaaatatactagtttatgttggcatagcaaaaggaaatggcattctctcaaaagcaggaattctcaagaaatttgaggaagaagatttggatgacattttaaggaaaagattgaaggactcaagtgaaatacctggtgctctgtggcatatttatgctgggaaagatgttgacaagataagggaatttcttcaaaagatttcaaaagaacaaggccttgaagttctaccagaacatgatccaatacgtgaccaaagttggtatgtgaacaaaaagctccgtcaaaggctgcttgaagaatatggagtcagaacctgtactcttattcagttccttggtgatgctattgttttgccagcgggagcacttcatcaggttcagaattttcacagctgtattcaggtaactgaagattttgtgtctccagaacaccgtcg

SEQ ID NO: 518764 - DNA, 4876 bp, Homo sapiens
  misc_feature (471)..(471): n is a, c, g, or t
  misc_feature (475)..(476): n is a, c, g, or t
  misc_feature (500)..(501): n is a, c, g, or t
  misc_feature (509)..(509): n is a, c, g, or t
  misc_feature (563)..(563): n is a, c, g, or t
  misc_feature (623)..(623): n is a, c, g, or t
  misc_feature (630)..(630): n is a, c, g, or t
ccacccacgactagagagtgctcatgccagcagcttgagccacttagcgctagcacaccagcaacaacaacagttgttacagcaccagttacctcatcttcttggacaagcccatccttctgcttcatataatcagcttggactttatccaattatttggcagtatccaaatggaacacatgcatactcaggacttggtttgccttcttctaagtgggttcacccagaaaatgcagttaatgctgaagcttcattaaggaggaattctcccagtccttggctacatcagcccacccctgtgacctcagcagatggtattggattacttagtcacattcctgtcagaccttccagtgcagagcctcatcggcctcttaaaattacagcccattccagtccaccattgacaaaaactttagtagatcatcataaggaagaattagaaagaaaagcttttatggaaccattacngtcnnttgcatccacatcagccaaaaatnncctggatntaaataggtcacagactggaaaagattgtcacttacataggcattttgtggatncagtattaaatcagttacagaggccaccccaggagactggagagaggttaaacaaatacnaagaggnacacctcgattcttcaagaaagtattgatgttgctccctttacaactaaaatcaagggacttgagggtgagagagagaattattccagagtggcatcatcatcttccagtcctaaaagccatatcatcaaacaagatatggatgtagaacgctcagtatcagatctttataaaatgaagcactcagtgcctcagagtttaccccaaagtaactatttcactacattgtctaatagtgtggtcaatgaaccaccaagatcatacccatccaaagaagtttcaaatatttacggtgataaacagagtaatgcccttgcagcggcagcagctaatcctcaaactctgacttcatttataacatctctttcaaagcctccacctttgattaaacaccaaccagaaagtgaaggtttagtaggcaagataccagaacatcttccacatcagattgcatctcactcagtaacaaccttcagaaatgattgtaggagtcctacccatttgacagtttcttctacaaatacactccgcagtatgcctgcattacatagagcaccagtatttcacccaccaatccatcacagcctggaaagaaaggaaggcagctatagtagtctttcccctccaactttaactccggtgatgccagtaaatgctggtggtaaagttcaagaatcacagaagcctccaactctaatacccgaaccaaaagactcccaggcaaattttaagagttcttcagaacagagtttgacggagatgtggagacctaataataacctcagcaaagagaaaactgaatggcatgtggagaaaagcagcggaaagttacaggctgctatggcatctgtcattgtgcgtccatcttctagtacaaaaactgatagtatgccagcaatgcagttagcttctaaagatcgagttagtgaaagatcttcagctggggcacataaaacagattgcctcaaactagcagaagccggagaaactggaagaatcattttgccaaatgtgaattcagacagtgttcacacaaaatctgaaaaaaactttcaggctgtctcacagggcagtgttcccagttcagtcatgtctgctgtaaatacgatgtgtaataccaaaacggatgtaatcacatctgctgccgatactaccagtgtttccagctggggtggttcagaagtaatttcctctttatcaaataccattttggcctctacatcatcagaatgtgtatcttcaaaaagtgtcagtcagccagtggctcaaaaacaagaatgcaaggtcagcaccacagcaccagttacattagccagtagtaagacaggaagtgttgttcaacccagttctgggttctcaggcacaactgattttatccatttaaaaaagcacaaggcagcattggctgcagctcagtataaaagtagtaatgccagtgagactgaacctaatgctataaaaaatcagacactttcagcctcccttcctctggatagcactgtaatctgtagtacaattaacaaagcaaactctgtaggaaatgggcaagcttcccagacaagtcaaccaaactaccatactaaactgaaaaaggcctggctcaccagacactcagaagaagataaaaatactaataaaatggaaaattcagggaattctgtatcagaaattattaagccatgttctgtcaacttaatagcctctacatctagtgatatacaaaatagtgtagatagtaagatcatagttgataaatatgtaaaagatgataaagtcaacaggagaaaagccaaaagaacttatgaatctggctctgaaagtggagactcagatgaaagtgaaagcaagtcagagcaaaggactaaaagacaacctaagccaacttacaaaaagaagcaaaatgatttgcaaaagagaaaaggtgaaatagaagaagatttgaaacccaatggagttctcagcaggagtgccaaagaaagaagtaaactgaagttgcaaagcaacagtaatactggcattcctcgttcagtattgaaagattggcgtaaagtcaagaagctgaagcaaactggggaatcctttttacaggatgactcctgctgtgagatagggcctaatttacaaaagtgtcgagaatgtagacttattcgcagtaaaaaaggagaagaaccagctcactcaccagtattttgtagattttactactttagacggttgtcatttagtaaaaacggagtagttagaatagatggtttctcttctcctgaccaatatgatgatgaagctatgagtttgtggacacatgaaaattttgaagatgatgaactagatatagagacttctaaatatatcttggatataataggtgataagttctgtcaattagtaacatctgaaaaaacagctttgtcctgggtgaaaaaggatgccaaaattgcctggaaaagagcagtgagaggagtccgggagatgtgtgatgcatgtgaagcaacattgtttaacattcactgggtctgccaaaaatgtggatttgtggtctgcttagattgttacaaggcaaaggaaaggaagagttctagagataaagaactatatgcttggatgaagtgtgtgaagggacagcctcatgatcacaaacatttaatgccaacccaaattatacctggttctgttttgacagatcttctagatgccatgcacactcttagggaaaaatatggtattaaatcccattgtcattgtactaacaaacagaatttacaagttggaaattttcctacaatgaatggtgtatctcaagttttacagaatgttcttaatcacagtaataaaatttctctgtgcatgcctgagtctcagcagcaaaatactcctccgaagtctgagaaaaatggtggcagcagcccagagagtgatgtaggcacagataacaagttaactcctccagaatcccagtcaccactgcactggttagcagatcttgcagagcaaaaagccagagaggaaaaaaaagaaaacaaagaacttacccttgaaaaccaaattaaagaagaaagagaacaagacaactctgaatctccaaatggcagaacatcacctcttgtgtcccagaataatgaacaaggctcaaccttacgggatttgctgactacaacagctggaaagctacgtgtggggtctacagatgctggcattgcctttgccccagtatattcaatgggagccccaagtagcaaaagtggacggactatgcctaacattcttgatgacataattgcttcagttgttgaaaacaaaattccaccaagtaaaacctccaagataaatgtaaaaccagagcttaaagaagagcctgaagaaagcataatatctgcagtggatgaaaataataaattatacagtgatataccacattcttggatctgtgagaagcatattttatggcttaaggattataagaatagcagtaattggaagcttttcaaagaatgttggaaacaaggacagcctgcagtggtttctggtgtgcataagaaaatgaacattagcctatggaaggcggaatcaattagtcttgattttggagaccaccaagctgatctcctgaactgcaaagatagcatcatttcaaatgccaatgttaaggaattctgggatggttttgaagaagtttcaaaacggcagaaaaacaagagtggagaaacagttgttttaaaattgaaagattggccttcaggagaagacttcaagactatgatgccagcaagatacgaagatcttttaaaaagtctgccattgccagaatattgtaatccagaaggaaaattcaatttggcctctcatttgccaggattttttgtacgtcctgatctaggacccaggttgtgcagtgcctatggtaggtatatattcacatttctcccatgtaggaattatattggatttttttaaatttttgctcaggccgggcatagtggctcacgcctgcaatcccagcactctttgggaggctaaggcgggtgaatcacgaggtcaggagattgagaccatcctggtcaacatggtgaaaccctgtctctactaaaaaatacaaaaattagccaggtgtggtggcgtgcgcatatagtcccagctactcaggaggctgaggcaggagaattacttgaacccaggaggcgtggaggttgcagtgagctgagattgcactactgcactccagcctgggcaacagagcaagactccgtctc

SEQ ID NO: 518765 - DNA, 2484 bp, Homo sapiens
tacaatgaatggtgtatctcaagtgagtaaaaatctctggttattcaaataaaatctgtggttaaattagtcaactttgatatttatttgaaatttggtttaggacttatgtatgaattaggtttgctgtgtttctgtgtaaattttttgtatctatactactaattgaattattgaagaaagtgtttaaaaatgtaattgttctacctttgtaggttttacagaatgttcttaatcacagtaataaaatttctctgtgcatgcctgagtctcagcagcaaaatactcctccgaagtctgagaaaaatggtggcagcagcccagagagtgatgtaggcacagataacaagttaactcctccagaatcccagtcaccactgcactggttagcagatcttgcagagcaaaaagccagagaggaaaaaaaagaaaacaaagaacttacccttgaaaaccaaattaaagaagaaagagaacaagacaactctgaatctccaaatggcagaacatcacctcttgtgtcccagaataatgaacaaggctcaaccttacgggatttgctgactacaacagctggaaagctacgtgtggggtctacagatgctggcattgcctttgccccagtatattcaatgggagccccaagtagcaaaagtggacggactatgcctaacattcttgatgacataattgcttcagttgttgaaaacaaaattccaccaagtaaaacctccaagataaatgtaaaaccagagcttaaagaagagcctgaagaaagcataatatctgcagtggatgaaaataataaattatacagtgatataccacattcttggatctgtgagaagcatattttatggcttaaggattataagaatagcagtaattggaagcttttcaaagaatgttggaaacaaggacagcctgcagtggtttctggtgtgcataagaaaatgaacattagcctatggaaggcggaatcaattagtcttgattttggagaccaccaagctgatctcctgaactgcaaagatagcatcatttcaaatgccaatgttaaggaattctgggatggttttgaagaagtttcaaaacggcagaaaaacaagagtggagaaacagttgttttaaaattgaaagattggccttcaggagaagacttcaagactatgatgccagcaagatacgaagatcttttaaaaagtctgccattgccagaatattgtaatccagaaggaaaattcaatttggcctctcatttgccaggattttttgtacgtcctgatctaggacccaggttgtgcagtgcctatggtgtagttgctgctaaagatcatgatataggaacaacaaatctccatattgaagtttctgatgttgtaaatatactagtttatgttggcatagcaaaaggaaatggcattctctcaaaagcaggaattctcaagaaatttgaggaagaagatttggatgacattttaaggaaaagattgaaggactcaagtgaaatacctggtgctctgtggcatatttatgctgggaaagatgttgacaagataagggaatttcttcaaaaggtataagttagtttgcaaataatatctcttcccctcaagcaaggacttattcattgttgccgtaccttcacttggcattcaacaatataagaccattacataatttttacttcaaagtagatgggagtttttgttgaaagtcaaaaccctgtttctcttgctcctctttgaaagtctgttaacattttgagggttttgaatggtgatttgttcccagttggtagtgtgcctccattccctgttaataaaagactgatctgttcttgagccagatattagttgggtggcgaaaagtagctatctggagtcgcgggatgtaaaaacaaatatttcatggaaacgtctaaagaaggtaggatctttattttctttgaatctgatagatatttttggctgctgacctagggaatgattctactctatcacatctgatactatgatacttactgagtagactcagattttgagtaatcataccttgactgtagttgtcatatactctgaaagaaatttatatatcaacctgaaataattggttgaaaccctttgctcaggtactttttaaacttcgtaattatggaaatttgttttaagaaatgttcagtgctgatacatcatctttctgaaaggatgtaagttctgtctgtgatcaatgtgaagtaaaagagttacagccttttttgtaccattttatccctgaatacttacctgtattttaatctgaagtatgatcatttgtgccttctaaagcagattatttaactgattaaagagtcccttgaaattgatttttcaagcgttagaaggttagccatgtaaaggtatttatacttacctcaaaaaaggatcaataaatgtttatgaaatccatacatatgaatggtttggcttttggtaaaaaaaaaaa

SEQ ID NO: 518766 - DNA, 205 bp, Homo sapiens
tggcaagcaactcagtattgcgcttttcccgcgccagtcaatgcattctgatgcatctccagccctctagaaatccagacatttactatctcaggtcagtccagccccgtcgtgcagtgattccggagcccggtgtcgcgccgcgcctggcccgcctcactcccccgattttagccaagaaaaccaaacggccacagcctccaga

SEQ ID NO: 518767 - DNA, 2581 bp, Homo sapiens
ggcacgaggttgaataatcaaaactgtaatagatggaagagaatggagaaaaatggaagaaatttaaagggcacaagaaaacctccgttattcccaattataatataaaatattgtaagaaaaaaattttacagcattaacaactagtggtaatctttttattaactaccattttattttgtagttttgacagatcttctagatgccatgcacactcttagggaaaaatatggtattaaatcccattgtcattgtactaacaaacagaatttacaagttggaaattttcctacaatgaatggtgtatctcaagttttacagaatgttcttaatcacagtaataaaatttctctgtgcatgcctgagtctcagcagcaaaatactcctccgaagtctgagaaaaatggtggcagcagcccagagagtgatgtaggcacagataacaagttaactcctccagaatcccagtcaccactgcactggttagcagatcttgcagagcaaaaagccagagaggaaaaaaaagaaaacaaagaacttacccttgaaaaccaaattaaagaagaaagagaacaagacaactctgaatctccaaatggcagaacatcacctcttgtgtcccagaataatgaacaaggctcaaccttacgggatttgctgactacaacagctggaaagctacgtgtggggtctacagatgctggcattgcctttgccccagtatattcaatgggagccccaagtagcaaaagtggacggactatgcctaacattcttgatgacataattgcttcagttgttgaaaacaaaattccaccaagtaaaacctccaagataaatgtaaaaccagagcttaaagaagagcctgaagaaagcataatatctgcagtggatgaaaataataaattatacagtgatataccacattcttggatctgtgagaagcatattttatggcttaaggattataagaatagcagtaattggaagcttttcaaagaatgttggaaacaaggacagcctgcagtggtttctggtgtgcataagaaaatgaacattagcctatggaaggcggaatcaattagtcttgattttggagaccaccaagctgatctcctgaactgcaaagatagcatcatttcaaatgccaatgttaaggaattctgggatggttttgaagaagtttcaaaacggcagaaaaacaagagtggagaaacagttgttttaaaattgaaagattggccttcaggagaagacttcaagactatgatgccagcaagatacgaagatcttttaaaaagtctgccattgccagaatattgtaatccagaaggaaaattcaatttggcctctcatttgccaggattttttgtacgtcctgatctaggacccaggttgtgcagtgcctatggtgtagttgctgctaaagatcatgatataggaacaacaaatctccatattgaagtttctgatgttgtaaatatactagtttatgttggcatagcaaaaggaaatggcattctctcaaaagcaggaattctcaagaaatttgaggaagaagatttggatgacattttaaggaaaagattgaaggactcaagtgaaatacctggtgctctgtggcatatttatgctgggaaagatgttgacaagataagggaatttcttcaaaaggtataagttagtttgcaaataatatctcttcccctcaagcaaggacttattcattgttgccgtaccttcacttggcattcaacaatataagaccattacataatttttacttcaaagtagatgggagtttttgttgaaagtcaaaaccctgtttctcttgctcctctttgaaagtctgttaacattttgagggttttgaatggtgatttgttcccagttggtagtgtgcctccattccctgttaataaaagactgatctgttcttgagccagatattagttgggtggcgaaaagtagctatctggagtcgcgggatgtaaaaacaaatatttcatggaaacgtctaaagaaggtaggatctttattttctttgaatctgatagatatttttggctgctgacctagggaatgattctactctatcacatctgatactatgatacttactgagtagactcagattttgagtaatcataccttgactgtagttgtcatatactctgaaagaaatttatatatcaacctgaaataattggttgaaaccctttgctcaggtactttttaaacttcgtaattatggaaatttgttttaagaaatgttcagtgctgatacatcatctttctgaaaggatgtaagttctgtctgtgatcaatgtgaagtaaaagagttacagccttttttgtaccattttatccctgaatacttacctgtattttaatctgaagtatgatcatttgtgccttctaaagcagattatttaactgattaaagagtcccttgaaattgatttttcaagcgttagaaggttagccatgtaaaggtatttatacttacctcaaaaaaggatcaataaatgtttatgaaatccatacatatgaatggtttggcttttggtaaaaaaaaaaa

SEQ ID NO: 518768 - DNA, 119 bp, Homo sapiens
gaggtgcagtgaggcaagaacggaccactgtactccagcctggtgctcaatcacagttcactaaagccttgagctcctgggctcctgggctcaagcaatcctcccacctcagttttccg

SEQ ID NO: 518769 - DNA, 214 bp, Homo sapiens
atgatccacccgcctctgcctctcaaagtgctgggaatacaggcataagacactgcacccggcctgtttttgttttttagagacaaggtctctgttgccttggctggggtgcagtggtacaatcagctctctgttgcctcctgggctcaagcaattctcctgcctcagccccacaagtagctgggattacagaagtgcactcccacgcccagct

SEQ ID NO: 518770 - DNA, 395 bp, Homo sapiens
tcacccgaggtggcgggtgttggctcccagccgtggtgcccactggcttggcacaggccccggtgcctgctgcccaccgaggcggcgggggccgcgacggccatgctgagcagcatcagccgcgggatgagctcctctttggtctccacgtttggcatggacgagagtgcggtctatagcactgcaagccgctaccttgtcccggtcgttataaaggtcggtctgtccctgcgcacgtactaggatccgatggaagacgcctctatcggctgctgtggggaccatgtgcgccaggttcacccttgctctccctcgcgcacgcttctgtccggccctcccttaattctggggcctccgccgtctcactcacctcttcacagatcctaaccgtcctc

SEQ ID NO: 518771 - DNA, 270 bp, Homo sapiens
catgttgccagtgtgaacgtgagttagcgtatgtcggctcactgcaatctttgctcctggttcaagaaattctcctgcctcagcctcctgagtagctgggattacaggtgcctaccaccatgcccaggtaatttttgtacttttagtaagatgaggcttcaccatgctggccaggttggtctcaaactcctgacctcaagtgatctgcctgtctcgggctcccaaagtgcttagataacaggcatgtagccattgcaacacggtctctca

SEQ ID NO: 518772 - DNA, 126 bp, Homo sapiens
tcagtagcggagcatcagtaagggagttcagtaaagcggagcacgcctgctggaggtatgttagagttgagctccgcttactgatgcccgcttactgaactccgttactgatgctccgcttactga

SEQ ID NO: 518773 - DNA, 920 bp, Homo sapiens
catagtggctcacacctgtaattccagcaccttgggggactgaggtgggcaaatcacttgaccccagaagttcaagacctgcctggacaacatgatgaaaccccgtttctacaaaaaatataaaaactatctgggcttggtggtgtgcccttgtagtcccagctactcagaaggctgaggtgggagggtcacttgagcctgggaggcagagcttgcagtgaaccgagactgtggcactgcactccagtctgtgtcacagagtaagacgccatatctgggaaaaaaaaaaaaagggtgtcggaccttggccttaattaagggtcttaaatctcatttatcaaggcctcttaataggggctgccacaattagaatcacccggggagcctgttaaagtccagttcaggtctaactgggtgtcctgggaggctgggggagggatagcaatcaggagaaattacctaatggtaaattgatggagtggcagggtgcagcaaaccaccattggcacatgttctatcttttgtaacaaaccttgcccgtgtgcatatataccctagaaatttaaagcggtaatatgtaaccgacaattccacaaaagacaacaaaaaaagtgggtctcgtgggcacgcggggggtggccacccctgggactcccgacctttgggggcacagagggggacatggggccaagaataaaacccccggggcacaggggaacccggtctcagcaaaacttacaattcggcaggggggtgcccagagtgcaaaatatggggcagcgagaaccgttactgacaacatggggcggagagacacgcgccaccgacagaccacacgaaagacttaaaacgacacgagtacggtcagactacggcgaggaaggtaacataacgacaacgcggtgagacaagcaagatat

SEQ ID NO: 518774 - DNA, 81 bp, Homo sapiens
gagagagatgaagggtcttactactgtgcctgtgacactactgggggatcctctagctcctgggacacccgacagatgttt

SEQ ID NO: 518775 - DNA, 209 bp, Homo sapiens
agagttcatatgtactattcattctagaacaagtgtcacgggaccagtattgtttacccaattttttatccggacactgaagcttagaggagtgccatgtttcgagtgttattacagagagcaaatggcacagactggatccaagggccatcttcctggacctgaagttcatgctcccagacatcccacccctagctgaactatctcaa

SEQ ID NO: 518776 - DNA, 540 bp, Homo sapiens
  misc_feature (426)..(427): n is a, c, g, or t
  misc_feature (524)..(524): n is a, c, g, or t
cagcagttcaaaagagagtgaaccaggtagacatcaactttcaagatctcaaaaaatattgtcaatgggaaaaaaaccaagttgcactatgataggtatatcgtttataggaaaaacaacttaaacatgtatgtgtttgtgtataaagatataaaaaaggtctagaaggatgtactcccaattcttatctggtgaatggaagaggggacaagtttgtggaggataggtaaaagcattttagattttttggtaatgctcttaaaattgttaagcctttaggattaatgcgtatattgaactacctcaatgttgtactaatttaaacttttaaacattgcttacaaatgtcaataacacctatcaactctaaagttaatgtatgtatacactagaatttttgactttgtttggggttctgaaataatnnaacttatatccccttctgatttctgggttaattcaaagtcttcactgaccagaaggaatgtatctcccaatccttttcctaaaccgaaatagggcanaaactataatttaaag

SEQ ID NO: 518777 - DNA, 249 bp, Homo sapiens
tacccttatggactcatctcacggtttgaagacttcctaggcttgtctatggacctcatcaccaaggattacaaatgcaacgttgagataggtcatttgtatcacaaggtcacttatgaagcacctagaatttttcacttatacgaatatgttctttgggttctgctgtggcccagacagtgttgacttttatattattgtgggtttcgattttttcccccagaaataggttccatttgatgtacccga

SEQ ID NO: 518778 - DNA, 116 bp, Homo sapiens
  misc_feature (59)..(59): n is a, c, g, or t
  misc_feature (77)..(77): n is a, c, g, or t
cggcacgagcggcacgagccaagacacactatcgcgctatgcaggcagactgcctcagnaaactacagcgatatctnaaatccggggtggccatcaggagaacagtgccccccatg

SEQ ID NO: 518779 - DNA, 791 bp, Homo sapiens
  misc_feature (348)..(348): n is a, c, g, or t
  misc_feature (397)..(397): n is a, c, g, or t
  misc_feature (523)..(523): n is a, c, g, or t
  misc_feature (559)..(559): n is a, c, g, or t
  misc_feature (591)..(591): n is a, c, g, or t
  misc_feature (627)..(627): n is a, c, g, or t
  misc_feature (690)..(690): n is a, c, g, or t
  misc_feature (757)..(757): n is a, c, g, or t
ggctgtatgctggagttggtctgtgatttggcgacagactttgacaggtctggagctcagggacatagagtcccccccaaaatccgtcagggtcctcagtgtccagacgtctgccccgaggtgcctgatcctagaaatacagactactgcccccagtgcccgacaagaatccctcgccaacctctaacaggtttggcttcttgttgtttgcgaagccctaggagtgcgtggtgcctatgtgactcgcggagtgttggcacttatagtcgttgagaagcgagttggtcgagtgcgaagcaaacgccagctcgtgacatggcgtgaccacgaccgtggtggagcggtacngtaatggtagcgattccatgtagcacggacaatttcgttacgtgctggntagctaacaacaccgtaaagcacaaacaatcgatggtctataataatagatgtctcatctgttagcgcgcatctcggtgggatagaggaatactttatgccaatctttgggtcgcacccatagatnaacttgcttgttatgctgttgtcggttggctctgcntttattgagaaccgagtaatgcaatatagcantcaccgcaatcatgactgtttagagtactctggtgntcaggtgtctgtgagcgtgcgcagaggtacatacaacggtgcgcgtcccacatggcgcacaanccatatcaagaagcaggcgcgacggccagacgccctggggtggagaggtgcctacgtgcgcatgtgntggaaaccaagacgagcgaaggtctactggggag

SEQ ID NO: 518780 - DNA, 240 bp, Homo sapiens
gattggcaccctccatcgtgtcgtgtgacgcagttgcccagacacaggtctgccctcggcctggtccatcatgaaggcgtttccatctgcaaggatgacgcgggtagcctccccgagagcaggcctgtcccactacccaaggtgggaataaactgtaagctgggctctcttatgttgctatggtctttgatgtgttgacatgttcccagcgagatagtactgcaggggttccggtgatgt

SEQ ID NO: 518781 - DNA, 166 bp, Homo sapiens
  misc_feature (60)..(60): n is a, c, g, or t
  misc_feature (93)..(93): n is a, c, g, or t
  misc_feature (109)..(109): n is a, c, g, or t
  misc_feature (117)..(117): n is a, c, g, or t
  misc_feature (143)..(143): n is a, c, g, or t
atagcttgcaactatactatcacatgggtcggtaagtaaaaataaataaaccaaatttgnctgaggacaggctaagatcaatcttctcatcanaccactttttctctangagcaatntcactctcagttttagggtggacatncttgaatgcctcaaataaaacgt

SEQ ID NO: 518782 - DNA, 1158 bp, Homo sapiens
gctgtgtccggcgatgtgtccgcggtgcacttgtcttcgcttcgtatagctgtctgtttgcacttcgtgattgggaacacgtgggatcatgtccatcatgccgatgggtgagtggtacactggagtgtatcccgtttaccagtgaccgccgagactgttgttctacttgatgggcgtccgaagggaataccagtgacagacgagctaaagtaatagtggcctgacttatgacaacagccgtgcttggagagtctcgcagttacggtctggctagtgctgcaagtattcgtatcaggcagcacgaattgggaggttaggctgcaactatccgtatgaccagttgatttgtaccttagggagatcactgacctggcctgagtgcgtcttggtgccatttcgtgtgcacgaccggtgtcatactatgcgagacgtatatcccgcgtgatgcgccagacatgcgagacacactcggaaagcgctaaggtgcgcaccgaagggcctaaacatatgcggttttatacgcgtaccgtcaacgcctgtattgttccccctatttacgccactgagttcctattgacaggtgcttctgaaattgacttaattagcggagttggtacttggcccaatgttggaggatcctgtgcactcaaatacttactggttgggcacgttggagaagtcccctttccgccgaagagagaaggttcccaaatctcaccgagcctactgttttgccccctgtttgtggcggcacgaattttggcgccccattttagggaactagagacccgggtttgtcttcccaactttaacggcaacgtttcgctttacgagataaccgaaagcacctcggaggcttttggcgacaatgtcggcgaaccgataggcaacatatttgcgtgaagatacatgccgtattaataattcatgggctaactctcgggtgttagcccccccctcgacagaatggctgttggcgccccttttgatctcggagtcaaaacgtgggacaacacacggtcgtcggtgtttggggccgcacacgtgggcatgttggcggcagttttaaacctcgtgggccggtttactctctagtagtaggggggataatttaagaaacaacacaagcgcgttttggggcacatttctcacacgtca

SEQ ID NO: 518783 - DNA, 222 bp, Homo sapiens
  misc_feature (142)..(142): n is a, c, g, or t
agaggatccccgtgcgataatagcgatgctattcatcggcacctcgctattcatcggcacttcgctattcatcggcacctcgctattcatctggcaccacatcacatgtgtccctgacatattaacacggggatgtgcacgnctcatccacatcgtgcccagcacacatcccacgggttgaacacaatgactccagggcagcttttactcatttgcacacct

SEQ ID NO: 518784 - DNA, 465 bp, Homo sapiens
tggctgggcgtggtggctcatgcctataatcccagcactttgggaggccgaggcgggtggatcacttgaggccaggagttccagacaagcctggccaacatgatgaaaccctgtctctactgaaaatacaaaaattagccaggtgtgatggtgggtgcctgtaatcccagctacttgggaggctgaggcaggataattgcttggacctgcgaggtggaggttgcagtgagccaagatcgtaccactgcactccaacctgggtgacagagaccctgtcaacaaaaaaaaaaaggaaagaaagaaagaggaagaaagaagaaaggaaagaaggagaaagaaagaaaagaaagaaagagaaagagagaaagaaaagagaaagaaaaggaaggaaagagaaagagaaagaaaagaaaagagaaaggaaaagaacgaaaaagaaagaaagagacaaagaaagaaagagag

SEQ ID NO: 518785 - DNA, 429 bp, Homo sapiens
ataagctttagtgacatctggacctctggagttaacattagtacattttgaaaacaaattatatggtgaaaagggaaaaggcccatagtaaatgttcatactatgtttcagcaaggactcttttttaggttgtattctatatctgggtttttattttcaccatttttcctttatgtatttattaactatttaaatatatatttaactttaaggaaaggggaaacttttgccaaccaagatcttttgggtaaaagataatatggaacacaataaaataacctagtaactctgatgaggagttaaagtgacaagagagtaaattgatgtgctgaaagcttaaagtgttctgttctcttatcacatctttgataacctgatcctgaatcttctatttcagaccatcaccactatctaattttagaatattct

SEQ ID NO: 518786 - DNA, 130 bp, Homo sapiens
agcgccagttgtcatattgtggtcgtgactgggagacacccttgcggacactcatgaacaggctatcttgcggttgcaagtcaccaatgttctgtctcagcctctgactcaggccactgttaaactagaa

SEQ ID NO: 518787 - DNA, 449 bp, Homo sapiens
  misc_feature (189)..(190): n is a, c, g, or t
taactaaaaacgcatttaagcacttgaaaactgggcctaaagcaagaaatttaattttttcctttggttcaagaaatttcaagaaatccgtgaactacctccccagtctttcctgaaacatcaagatgccgttcctagatataaaacagagacccggctggccgtggtggctaatgcctgtaatccgannggttttggaaaggctgaggctgggaggggggtggggatcacctgaggtcagaagttcaagaccagccctggccaacatggcgaaaccctgtctctactaaaaatacaaatattagccgggcatggtggcaggttcctgtaatcccagctactcgggaggccaagacaggagaatcgcttgaacccgtgaggcggaggttgcagtgagccgagattgggccactacactacagcctgggcaaaagagtgaaactccatct

SEQ ID NO: 518788 - DNA, 760 bp, Homo sapiens
aagagtgactactaagacacggaaggtgcgtgtgtcctgtggggatagtctctcctggtcgacaggcagcttgctatggaggcatccaggtcttggacgtcagtgcttgcgacttcgtcataacttaaaatatcgcctggggaatatccgaagggtctgagacaaatggagatggggttcgtgcgagtcattgacttggactctattcgacggtgacgtccaagcgacagcacagactgttcacgttgacgccgtggggctgaaacgccactaattggccttcgtccacggcacctacgtgagtcgagccctgcgaccttctaatgggacggaatccttgaacggagggagaccatcgcgcctatcattctagagctatctcggccccaagtactccacagatactcttcgttcttgatcaaattaacagcctagtgatcccaaaagattgtttcagattacgctgtttaagacttggagcgacatcacgactctttaacctgccgactgcccagctccgcgcaccaacccatccaggtgggccgggcttacgaagacgactgctcccaccaactcttgcatacgcatggggacaattgcactgcctgggcccaggtgctgtgcagcagcagtcgacggccagtcttgaggggctacccagctactgcgcctccgcaagtgtcgtgacatggcatcccgcttggccatactccccaacggacaaaggaatgccgaataattgccacactggtcgactgtc

SEQ ID NO: 518789 - DNA, 864 bp, Homo sapiens
catccccaagatggctggccgttaagtgacagtctgttgtgcgaacggagaaatgtgccacaggagaattggtgcgtgcggactccagcctgtgtggattcctgatggccgttgtattgtgtgaagcatgtacgattccttacatgaccaccatgccctgcggaactgacgacgtgcacgaatacacgtattacaacgacatgcttggactgaaacatgtacccacgaacgtattaacgttctattggaacctcaaccctttggctcacaaacgataacacgacagtgctaaacacacgcgtccacgactttccctggaagactttacaaccatgaagccttatcggacacacttcctacacaaattaacatttgcaaggacactgaacaacagcaacggaatcgtaccagacccataacgtccaacttgtggatgaacacaaggactattccttttggcctgggccaaggaactccaacccccttgttaattttgcgaacacaccgcctctcaaggtactcccttccccttaaaactgctattaacaaagtagctaggtaccttgtgtggagatatggcgccgtgcgcttaaaatgcgtaaaaattgcgttctggaacattatttcgcatccactctcggcacttgccaacgccttccaaaggggcccatttcagggctgcggggcacagcacagtgaaacgttctgagactaccgaaaagcctgggtccaacacaaaatacgcgacaaatctccgtcgggcactcttcccccccctgggacacgggggcaaacggtaaaacccgtttgtccaacccatatagaccctcgtcgcgaagcaaatttctcaaattatatagtcta

SEQ ID NO: 518790 - DNA, 418 bp, Homo sapiens
caaagaactggttttataggtaccagtacatactggttagcacgatggtcacgttgaaaaactgtaagtcacggacacggggacactctatgtacatttagaactaatctaagttcactttcaaatgacactataccacttaacacgtagtacaattactttataacagaatattcccaattcccttgtcctcttccttattgctgtcattcattttacttatccataagctgtaatcactgacacattgttgctattatttgttttgaacaatctgttgtctgtcagttaggaataagaaaaagatttcatttagccttcatttattccttctgtaatgtgctttctttccttatgtaggtccaaatttctgactgaaatcattttctttctctctaaagattatctgttatcattt

SEQ ID NO: 518791 - DNA, 198 bp, Homo sapiens
cattgcttctctacgtgtgaagtgagcgaactcaccatctatttttccctcctgcctccatccttctaccacataccactctgcacagctatacctttcctcctatagagccaagccttcaaatatttatattctgttcagtaattattaatgagtcatcctcattaatattaattacattaataatttaattttggg

SEQ ID NO: 518792 - DNA, 1540 bp, Homo sapiens
  misc_feature (829)..(829): n is a, c, g, or t
gtgttgtttgcaatcgctcgtgtctccagcaatgggttgttctgtttgccgggagcagcttcgtctgtggtgggtgccgcgaggtggtgctccctctttccctacctcttgtgggggcactctcggggttagtcacacgctctcttccgtggctcgagtgtattgcgccagtttggtcggggcctggagcgttgtggagtacatctccttgtgtgccgaccgctgtgatcggcttccttccccgttttaggccccgccagtgcgccccctggggtggtgaactgcgccccccgcggggggccccacactgtaagcacgtgggtgaccaagcccctccttggaagtccttgttttgcccaactaccaccaagtcctgtgtgaccaaagatgtgggcctgttttccggggtatcttaacctaatttggatactattttttggggtgcccaccggggccttttgggcccccagggacaatcaattctctttgtcccacgttcccacgggcacaatgttgggtcccaccccacgggaatgttgtaaggagttgttcccacagtgttgtcacagtggggagaacacgagtggcgttccacgggaaggaacaccctgtgtgagtgcccaggcgccacattgtgggccccctatatggggttgggttttcccccatggttggcgtgtcacgagttccgtcggccacactttgaggtttgggtacacggtatcccccccgagggagcctctatccacggggccactggccgtggtggcccccgcgagacaccccccgcgtgagtgtctcacacacttctgccctttccacatgtgtntgtggcgctcgcccccgtgagacacagtgcgcccctgagactctgtgtgtgccgcgtgtggttgtgagagcgccttgtgctgttttctccctgttcacagccacgcgtgagacgtgtcccctgtcacacagagacgcgtcacgccgcttgtttgtggtcttgagagaatgtgcttgtgacccacacatatctgccccacacatctacagagatactacacgtgccgcctcacagggtgatgatagacacacacacacgcgtgtgttatacgtgaatgtgtgtgtgtgccctcacgcgagaggagacccgcgccgtgttgccaccttcacaaccacagggcacatggagagtgattatcccgtgcccctcacaagagccccggaaatgtgccctgttcggcgtcctgcttttatatctcccacaaagcacccacccgcacttattccagaaggtggaaggtggaagtcacagacacgcttcacatgaaatgctgtgctctggctaacgcaccaccacacttgggcacagctgaaagccctgccacattttgcacatgaagctgaatcacagccctgtgccaccacacttcgctcttgaaggagctccacggtctggccgggccacccggaggctttttgggctttggacatccccggatagcgtgggccgaggaatggtgggctaagtagtccataataaattaggaccacc

SEQ ID NO: 518793 - DNA, 819 bp, Homo sapiens
ctgtattaagtaatataatgcttagaattaccgtattatagtagttgagggtcatgtaagagggagctggaggaagctacccaggataacagaaagagatgtccagcgtaagcaagaatggtctggcagattacctaggttggagttatctggttcaatatgaaatatgtgaaagtggtaactgtcatcatttgatgcagagtccgggtttctctataataaatcccttatgccaaatgcatgaattgcgagacatttgctacatggcaagcagtgaagcaagtgggtgagtaaaactattttgacgtgggagcgtcttcagataggagtttagtcttgacgaaagtgtccgtggcaggaagttggactccgaggtagggttacacgtatctcctgacgggacctgcactcgcatctgggcatgttgacatttgaggtggcacggcaggatgcctgtcttctaatatatttgggtgagtaactgagaccagccaagggcaggttgaatgcttaaatctgaaatgggattctctggtgactgaagacttttattcgggaaatgataaacttcaaaaaatctctgcatcgcgaactgggatcttccccgcggcttttttcccccaaaagttgtgggggacttttccggggaaagatgagggtagcaaatggcgggggttcgcaaaggggggaagtaccccccgaataaggaacgacgcggaaaaaaacagaccgtttttatcgcgcaacagggggggtaaccagaaataaagccccacgctggggggaggaaccccccacacggataccggggggaaacat

SEQ ID NO: 518794 - DNA, 900 bp, Homo sapiens
ggctttccctagttccagttacaagatggggaaatccttcgccaacttcatgtgcaagaaagactttcatcctgcctccgaaaatcccaatcatccaacacacaagtatggatggcagcaacgagcaaaatcatcatcatgcatcaagcacagcacacaccacagaagcaattgcatgccagccaatatcttcaaagcaacaaagaatcatcatgcataatagcattgcttcatgggcagcatgaacgtgtaacagcaatggccttcaatttccatgtcatgcaagccccgaccaaggcagctcaacaacacagcaaacacgaaagcagcaacaggaaagacacaccagcaaggagcagcacgcgaataacaaatttagcaatggcagcacaaggcagccctcacgcagcaacaaatcatgccgaaacgctgaccatgaacagtcagcagactcagccctcttggtcattcacggttcgacaatgtgcaggtgccattaccatgtctacaaatgggggtccatgtcaaccacagatcgagaatgtcctttgtgggtctttctggaatcaatgcaagttcggttccactgatggctcagggccatcgatgcaccctcggagctaatagcggagatgagacaccagtgggtatgcactggaaacgacaatgtcactggcggagaaacttgaccgcacatgcatccaatcaccaggaggtacatgttggccaggtgacggggcggacagcaaggactcaagcaaagttgcaagtcctgccagacggccacacaacaaccaaaacacaaaaaagcaaacattctccggggagctcagcatccgccgggacgaagcacacaacacgaacagacagccgcgcaaaacagcaagcggacgcagacca

SEQ ID NO: 518795 - DNA, 317 bp, Homo sapiens
ccacaatttgcaattactggctttgcatgttctggtactatctcactctcagtctctccccatgacctgaaactcccacaaaggcaaagatcaccacagtaccgagcactgaagcgttggaactgggcacctactgcaactggagccactgggtgatgaagaatgcatgcacacacagcgaccctgggactctcagcagggccacaaaagcagctggaggatgggttgcaaatatgcatgccatgcagcctgtgcccttgacaaccctggggcccatgttccacaggtgttctacaaagcatcttctgcccggcctg

SEQ ID NO: 518796 - DNA, 447 bp, Homo sapiens
ttctagtacctagaggatcttttcttggacggcgttgcgtagtatggtagtaggcggctgcgcgtgagctgtacttctcttgttgccggggacgcggtctagaggagcgggcccaccagctctctcagtgacgcttgcgccgggggagtggaggggagttggcgcgggaacccagcagtgtgaggcccccaagccgcggggaaagcctcctcggggtcgtggtctttggagacacgcagggagactgcccatggtgacgtcttggggggacgcgtacgggtacgagtagttggactcgtaggaggagcgctctgagttgcagctccggggaggacaggctgcttgccgggctcaggcacaaggggtctctgtagggcctccaggcgtgggcagaactcagcgtggccgtggagggggaccgtttggagctagggaggacgtcttcca

SEQ ID NO: 518797 - DNA, 144 bp, Homo sapiens
  misc_feature (14)..(14): n is a, c, g, or t
aggtcgatcactgnctatgattggactgactggaagtatggacctgtgaatatagattgaaaaataaaaaagaaatgctacaaaaaaaaaaccttagctacttattgtttaattatcaaacctcaccagaacaattccaatttt

SEQ ID NO: 518798 - DNA, 367 bp, Homo sapiens
gtggcagagcaagaccctgtctcaaaaacaaatgatgctttctaacttttttattttcgtgtacccactgatggtaaattaataatttaattggggattgaaaagccatgatttcctaattctgtcaatcggtctgtgtttattagctgtcacttttttttttttttttggaagacagagtttggctctggttccccaggcttggagtgcaagggtgcagactctcggtttgttgaacctttgcctctcgggtcaggcggttctcctgcctcagcctcccaatgtacgctggggattacttggcacctggccaccacggcccagtctaatttgggtgattttggggtaaggagatggggatttcggc

SEQ ID NO: 518799 - DNA, 514 bp, Homo sapiens
catgtcgaccattcaaccttaaaaagagacgctgcttcgccgggcacagtggctctcacctgtaatcccagcactttgggaggccgaggcgggcggatcacgaggtcaggagatcgagaccatcctggctaacacggtgaaaccctatctctactaaaaatacaaaaaattagccaggcgtggtggcgggcacctgcaatcccagctactcgggaggctgaggcaggagaatggcgtgaacccaggaggtggagctggcagtgagccgagattgcaccactgcactctagcctgggcgacagagtgacactccatcctaaaaaaaaaaaaaaaaatttttttttttacacacaaaaaagcccttcagccaggtgtagcattgcagtctacagtgtaggtggaggcttaataagtttagaggctcaagcaaatgattccctcttgagggctacctactagcagcaacggtcagggagaggaggagcatacagtctatgatgtgatcaaggaattc

SEQ ID NO: 518800 - DNA, 347 bp, Homo sapiens
ctccattcctcaaaaaccactctccatcctcacttttttgggctctttgcctcgcctcgagatctaccctctttcccttattctcccttttcgccctcttcctcttaccctcactaaacacctctttcattttttccattccccacacagtcctttatccacctgcatttttagcgaaaacaattaaaacgatttcgccccattgcttctatcaacacaaaccatccatatcatccatttcctttccctggtcttcaggctcccaggaaataaccccagcctttcaaaatcttgtcttaaggcttgtgaggaatcagaactaacccaggactcagtcctgcttcttt

SEQ ID NO: 518801 - DNA, 264 bp, Homo sapiens
cgttgaggtgacatgtgtagtggaaaagataggaaggtagctagggataacaactaatttaatcctggcatatttaaagctgctaaatctggtgctcagagggagtcaaaacagctagtcagtggcagacaggagacgtgaccaaactctggagtctccctagagttcccttcctaggaggcagtggtgctctagtggctcacgtgtgtatctactgcttgtctttcttatattttattttatgggcccagcagttaaaaattt

SEQ ID NO: 518802 - DNA, 110 bp, Homo sapiens
ggctaagttgtggagagagacggtacagcccacagcagtacactggcagcttgcaataccctgggcatgacgtcttcaatgtttttccattcagctcactgataaccttg

SEQ ID NO: 518803 - DNA, 180 bp, Homo sapiens
cacgctccaaccacacttggacctcaccttgactatgtgagactctgtgctagtctacacagcaccagaacaacacgacttggctgtataataacccccatttataatagcctgcatttggaagatgaaaaaaataattgttttccctggcagcatgttaagtccctggttactttatgc

SEQ ID NO: 518804 - DNA, 643 bp, Homo sapiens
  misc_feature (542)..(542): n is a, c, g, or t
  misc_feature (615)..(615): n is a, c, g, or t
aagagcagtaacacaaacagggctgaaacacgccctcctcccgtccccacacccccgcgacttgccatgttgcgggtgatgtgaaggagagaagtgctgtggcccttcagggagcacagacctaggggctccctgagccagggctgtgacaccctctttggggctctgcggtttctggtatcttcaaacttccgggcaccactgcattccccttgtccagacacaggtgcccacagcagaagccgcttgtggttcatcagatccagctgcagacttgcatagaaccggcgcctttgccggcgcctggagctgcctgcccagctgcagcagctggtgtgtccggctctgcgcagtggccaaaccctgcgttcgctcgcctgcacacccctcgctgttccgtgcctggctcaccctcggcaggcgtggaatcctggctggtagcatgagctgagcacagcctgccaggccacgtcagtggaacaagtctggcggggcctgatcaaaactcaggcaaaggcaccactggtcacagagctttctanctggaaaagcaacacctgaaggatcccgtgacacaatcaacctgctaaggagatccctggccaaccctgaaangctgcaggaaactgcctccatccaaggc

SEQ ID NO: 518805 - DNA, 178 bp, Homo sapiens
tcatctagaggacccgtgtcatccccttcgtgtatcatccttccaaagggccagatattacggccttctagcaggatgactttccggcccccccagagctcattgttcataactggcccctctgctagttttgggacttggtacaaggtgacaggtggaggctgcatcttagtgcaga

SEQ ID NO: 518806 - DNA, 372 bp, Homo sapiens
tgcagagatcacatcgataagagtgaaagcaagagagtggggaggtgccaggttctttaaaacaaccagctcttggagaaataaatagaggccgggtgcggtggctcatacctgtaatctcaacactttgggaggccgaggcaggtggatcatttgaggtcaggagtttgagactagtctggccaacatggagaaaccccatctctactaaaaatacaaaaattagctgggcatggcggctggcacctataatcccagctactcaggaggcggaggcagggagaattgcttgaacctgggaggcagaggttgcagtgagccgagatcgcaccactgcactccagcctgggcaacaaaccaagactctgtctc

SEQ ID NO: 518807 - DNA, 185 bp, Homo sapiens
  misc_feature (146)..(146): n is a, c, g, or t
  misc_feature (184)..(184): n is a, c, g, or t
tctaaggatcccctgcggatggggtctgtatgatggcggcctcgttttgcgtgtgactcccagcagccttgcaaatcgggggtccaatttgtactggggaggctgatgatccagcatgagcaggagggtgcacttgacgttgaggntctccaggccgttttacttggaaaagccatctgtctcnc

SEQ ID NO: 518808 - DNA, 198 bp, Homo sapiens
ggcccccctgatcgtgtgccagaccttctgccttcaaacggagcaagttttcttgtggtctgggtcccacttccggttcggagacgaattagtctcaggagtctgttccaatacaatcacctcgtgtgagaaaaaaatggaccactcatccaacagcaagccaagagggagcctgaggaccacccaggtgagtcggtg

SEQ ID NO: 518809 - DNA, 631 bp, Homo sapiens
atatgttgactgtaggatatgaactatatcatagcagactgtccctagcagcatagcaggcaagcaagctccacacagctcgaaacaatttgattggtattgatataaagtagaaaaggcaatatacatatgtgttatctacccatgatggcaaatgtcaccaacataaatctaccataaagacagtagtctgggctggggaggtggatcacacctgcattcccagcactttggtgggctaaggtgggcagaacacttgaggtcaggagtttgagaccagcctgggcaacatggtgaaacccagtctctaaaaaatacaaaaaattagctgggcatgggggcgggcacctgtagtcccagctacccgggaggctaaagtgggaggattgcttgagcccaggagttcaaggttgcggtgagccgagatcacgccattgcactccagcctgggcaacaagagcaaaactccatctcaaggaaagaaagaaaaaaaggcactatatatgccatcaagggtggggtacaggagtacgaggaagtacctgatgttcccggccccgatgcagttgttcacccaacacagtgatggtcgaaacggtgccacaccagttaccacactcagtgctggatc

SEQ ID NO: 518810 - DNA, 189 bp, Homo sapiens
  misc_feature (75)..(75): n is a, c, g, or t
  misc_feature (99)..(99): n is a, c, g, or t
  misc_feature (110)..(110): n is a, c, g, or t
  misc_feature (172)..(172): n is a, c, g, or t
  misc_feature (178)..(178): n is a, c, g, or t
cctctaacattagcagtagaggcaggaatgtgctaacatccctgatgcacaggcatttctcagccaagaatatcnaccaaatgtaatgtctgagatganaaactgctatngaccaaattcactctgatgttcttaaagagataccatgagttgcttacttggagaagctaangacgantaagggcccaa

SEQ ID NO: 518811 - DNA, 100 bp, Homo sapiens
cctgcagctgggcttggctgagttacagagcatcctggacagtctaaagccaactcccgagcatccttcagttcccagcgatatcacctcctccgagaag

SEQ ID NO: 518812 - DNA, 1505 bp, Homo sapiens
tctcatttaactttttaaaatgggtctcaaaattctgtgacaatttttgggctcaagtttgtttcccatttaaaaacgttacgtgatttttaaaaactaattacctttaaaagcgtgccacatcgcaaaaaaagaacaaccaataggtggctccacataaacatttctcctttctcctctcgtgagaggttttacgaagtgccattgtgttactcatttaacccagactctttatcacctacttaaactttaaatgtggccaatttgaaacacaaacgagttctcttgagaaccgtttcttctccacccacgtgtatttaagaagtgtgcggggtggacaggttattatgagggcattaatcttctcaatttgatacgcccttctctgtgggaccctttctctgtggcgcagacacttgtggtgtgcacacttgtgtccgaggctctcccgaagctagacctctcctctgtgtgttcccccactgtgcctatctgtggagtgaacacacccccacaccggacaacactgtgcgtctgtgtctcctacattatttcgagcgaagacgaggacaaaaggcgaaccccccaagagtgtgtgcgcaataggtctcgtgaacgaagaagccctctctcgacaacaccacacatgtggggccttttgccccgagggaaccccatattagtcaaccaaagtgggcccagactaatccactacagaaatttctcagagcacactttgagagcgccattcttttcccaagtcgttgttttcaccccagaaaaagcggggcgacataccagattcctatctatccctacacaagtcttccacggcaacacttttggctgtggccaattgatggaagcccggtggtgtgccaattcccaatcaacaggggggccaataagacgcgggcgcctatattggggcccctggaatgtgttcccgggcgaacatctccccctgaatcctcttggaaacccagcctgtgcttccccattggggcggggccacatttcgcgctgtctcccaggacactgttgtgccccgcaggtaccttctcttgtcactacaccccttcttcttctcccttgtcagccccccattttttctcccgcgaacacagctctcactccaaaggtctctgagcgacatttgccacgcaccttttccttccgcgggtcaagttgttcgtgggccacggtgtgcccaccaaacgcagttgggggaaaaatctaatatcatcagggcagcacgagtaggtaatacaaaaacctttcacggtatactccgtcaagaaggcacgtcgttatttcatgatcagtcatatggagcgtgacccacaatggtggtcgcgacagcaacatgcagaggacacacacgatagagtgaacttctgacacacagacactaggatacttcgttctttcctctcccttctcgtgctcattctcttcagtctctctgctcaccacaccaagaagcacaagcacacgatgcgcaa

SEQ ID NO: 518813 - DNA, 114 bp, Homo sapiens
gtagcttaagcaggcacgtgtatagtagactttggggaccagaagacaaggcaggcaagaactacaggggacggcggacagacgggcgacatcctaatttccaccttgccagga

SEQ ID NO: 518814 - DNA, 366 bp, Homo sapiens
aggcagtctcactttgtcacccaggctggagtacaatggcgtgatctcggcccactgcaacctctgcctcctgggttcaagcaattttcctgcctaagcctcccgagtagctgggagtacaggcacacaccaccacacccagctaatttttgtatttttagtagagatagggtttcaccatgtctcccaggctggtctcaaactcctaacctcaagtgattcgcctgcctctgcctcccaaagtgctgggattacaggtgggagccactacagctggcccagcagctctggtttctgatagacgtgggttgggggcttttattccctagaatcctaaacccttttaatatgcctgggaattcctac

SEQ ID NO: 518815 - DNA, 1231 bp, Homo sapiens
  misc_feature (201)..(201): n is a, c, g, or t
  misc_feature (1001)..(1001): n is a, c, g, or t
agcggagctggttctcgtgtatcgaccggctaacagtcgcgctgtaagtatgcaacgaccctctcctcttctttctccgccatcacgtctcggcagatcggcagaagcgagcggatcacatgcagtgaagtcgctcatctcaccatctcacgtcttgtgccagagctgattggtcccagcattgtccgaactcgcgctgcntgaggacgcctcctacgtgacctgagatagcgactggcaatccgacgccgcctggatgagcgcaagtagctgcccatgtagactagagagaacccgagttggaggagagacgcgatcgaatcgagttcccctttcgacccctagcgctatctcttgtcgaggttcgatcgaccgggagagagctttaggcaccagtctaattcgatgcacacgctgcgaagccattgatagcttttcggtagagatctcttggagaaacctctaccctttccacattggatggtgagcatgtcgcagacatgagtctgacctctacccggaccttgtcctcattctcacaactccctggtggagcctttcacctgttagtccgcccagcgtcctattggagaatggccatgtctggtgcccggaagtgacccttgatggccccgggccagtgagtcctcgagttctgggccccctttgtgtctgagaggaagcaatcccaatatcgcatggtgtctgggccgttttgcgcactcgcgccccattaccgcctgatgccttgagactctgaatagcccagatgacagccagcgagtttccttccccatgagggccctcgtccctgtgggattaccggctgagccggaacacctgtgttggcttgtagggggaggaaatccctgggattaacctgtagggggcgtgtcaaaacccatacttctctgtggttgtccatcctgggaaccccaggttccttccctccaaaggatattggaattctactttgggggcgaaatagcaccatggttccncaaaaggggcgaggggggaaacgctttccgtaccgtgcagctttttaagccccctcatggtgcctgggcccctcccccaaaggagtatgtgtggcgccgatcacaaaggccatggggtgtagagggctctctggaagaggcccgccctttaatccgaagaaagcttgtcccccaatataccgcgtttgcgaaacaccaaacacctccaaagcggagggcgcaaaacgtcg

SEQ ID NO: 518816 - DNA, 484 bp, Homo sapiens
aaatcagttgagataaacaaaagactggaagcaggataaatacagagacaaggatggacagaagggacatgccctactgcaacttgagaagggaaatgtgagaatggagttagtaatagaggggtgggggtggggttgttgccattcccaaagtagaactgagtttgatctaatctgtggtaggagatacaggaattccctagattagtggtaacaggaggactcacgtagatgtgtgtagaattgactgaaatataggagagactagccagtagataagtaacaggtctctatgctcagcttatgtacacaagagatggagcccattaggcctcccctagctctcctgggcctgatggtccacttgcaggtcagtgcctcattaggtacttagtggtctctgtttattatttccatgtcttgggtcttcagccaggagacgatcctttctggagttcctttaagtgggccagtgttcttcgag

SEQ ID NO: 518817 - DNA, 221 bp, Homo sapiens
ttttttgcccccccccgcccgcgttttagggcctcggtccataaaaaaccccccccccctggcccggtggaagggttttttagtccctgcccacaactgtcctccctggtgcaggtggcctggccagccccctggattgggggcgggccaggctgggcccggtcgggggctccgttttggaggtaataaaaaccgaccccccccccaattttgcttgggga

SEQ ID NO: 518818 - DNA, 384 bp, Homo sapiens
cttttgccccttaaaaagccctaaggtgttgtagacaggctgggaaaaaaaacgcatgcccagagggaaatggcttttttttcccccttgagggccctgcttttcccaaagggcatgatgatggttttactcctttggaaggaagcctttaaaaaaattaaaaaaccggttggttttaaaagccccccgaacaaaggggccccttcccaaatatccaactcctttgaaggggaagccccgagtgaaccttagccctgttttttagttggctgttacatgggggcgttttccgaaaagaaggaaaactttcccgggggatccagtggaagtttgtgaatttcctttttccagtccccttcgcttaattaacatgttccagtgcca

SEQ ID NO: 518819 - DNA, 1448 bp, Homo sapiens
ggtctacttcctcctgtttcggcgtccggcggcggcgctgccatcatgaggtaaatcgtgcactttgctggtgcgggtgtccagctgtctggctcatcaaaagtcggacagtcccaagttttggagcagtgtgatctagggaattagagcacggctgtcgaacgcacgggcgaccttactctaggggaacagcgtaccctgctagtgtggtgacgcaatcataccagtgttagcgttagaactagacgtgtcccatcacagtgtcgaggcatacggtcatcggttgccggcgccgtcgctgtgtctcagttcgcgactacttgcgaagcgcctgtggcaggctattggaatcgcctgttgttcagctcgcgggggctcttcggtgggcagatccttgcccgtgtacctgagatcaacgtgtcgaatttatcgaggtttagcatgtctgagtgcctgtaggttgaacgcaatggtgtgggctctaaacgggcgtgaagctaatgatcagggaacggaccgccggaagcctgggtgggacctcaggctgtcgtggaatgtttcgtggacggacacaaggaagggactgggagcaagccttgccgtagcgtgcccatagggacgcgcgttgtattcgggagcaaggcacctcgctaccttctcggttgtgtcgttggggaaagcgtgaagctcggtgctcatcggggacttgtggttgggcccttatcgtggcaatctaggtgacaaacattaactttgtggggcgcattgtgaccggcggttggacctggggttaagctagaggacggccaccctaatcacaagggttcgcatggaaactccacggttttacaacaccttttgctccaagacaaaggtaatgtcgtccaagggtatggcgcttgaaagaaacagcttgagaccagggtttggcacgaacattggttgttgggcatagggagattagttaggggaccttacgacctcgaggttacttggtgagaaggctagtcttggaagtatagcccaccttgtcggcaactaggtgggcacccctaggttcgccaggaggagcttgctcataaccgtggaaagcattcgaggtcgacttggtaagtggctcaaaccttggtaacacttagctaggggagcaacaggcgaacccgttgggccttggggtgacactcgaacacagtgaccctgggatgcaaccggccaaggtacctaaacgtatggaaaggcaccggaaggaatgcaagaggttgcactcgtggaaccggtgggtccccaaccagtgcggggatgaggacccggtaaagtacccgtgaagtggggccaagtacaaagagaccgcgaaccgagaaaagtacagggggaatggacggagaacagcaatacgaacagcagaggtgtgagacgaaaacacacaaagagaggaacgaaacgagcag

SEQ ID NO: 518820 - DNA, 311 bp, Homo sapiens
  misc_feature (17)..(17): n is a, c, g, or t
  misc_feature (68)..(68): n is a, c, g, or t
  misc_feature (131)..(131): n is a, c, g, or t
  misc_feature (136)..(136): n is a, c, g, or t
  misc_feature (167)..(167): n is a, c, g, or t
  misc_feature (217)..(217): n is a, c, g, or t
  misc_feature (259)..(259): n is a, c, g, or t
  misc_feature (266)..(266): n is a, c, g, or t
ctcggtagacctggtgncaccaccaccatgttgggctgtcaagggctggtgtgtactccgggacactnaccttgctagggttttccacccagctttcaccaaggcctcccctgttgtgaagaattccatcncgagntaatcaatggctgttaacacctagcagggantatgccaccaaaacaagagttgggatccggcgtgggagaactggccaagnactcaaagaggcaacattgggaaccattcgatggaatatttntgatcanatgggaaggatggtttgttgctggaggggctgctgttggtcttgg

SEQ ID NO: 518821 - DNA, 95 bp, Homo sapiens
aaccccccttttaaagccggagctatacttttgttttatccccaaatccgttcccttcctaataagtgatttttcccacccaaatgggtttgcca

SEQ ID NO: 518822 - DNA, 173 bp, Homo sapiens
tctactaggcgtacacaaattcccagggcatgtggcgcgtgtctgtagtcccatccactgtgggaaggctgagtgcagcgagagaatggcttgaacctgggaggcagagtgttgcagggagccaagatcgtgccgctgcaccccagcgtgggcgacacagtgagactcgtctc

SEQ ID NO: 518823 - DNA, 413 bp, Homo sapiens
ctcccccagggaccgggggaccccacccatccagggggcaaaaggaattaagtgctttgtgggtttccccccacgcgcctcgccggatttgagggaaaacaaaaccgatcggcggcccctgcgcccttaaatgcatccagcctgggggtgaggtttaggccctggcgaggaaagggggctcctctttgcccccctactagtccccaaagactttaggggggggggattcccctcgggggtttttattttttgaaaagcaacccttttaaaaaatggtcccgtttggggcttttcaaatttttgaggaaattgctttgtattgtatattccaatgatccccccctgaaaaaattgttttccaaaagttttggggggcggtttttttgttattaaacaaaaaatttaaatggtga

SEQ ID NO: 518824 - DNA, 237 bp, Homo sapiens
ggggcttttcccccgggccccccaaactgtttggggccaaaggaattaggattggccccccccaacccgggggggggggtccccaaaaaggttttggggggggggtttcccccatttggttttttttttgggtttctttgggcccggttccccctttttaaattttccccccggcctttggggtgggggctttttcctttttggccggttcaattaaggtttttaatttcctttcca

SEQ ID NO: 518825 - DNA, 222 bp, Homo sapiens
caaaacccttttgaactggctgaggacacggccaggcaggctggccacactgcggaagggcagctggacgcgcggcctctggtcagtcctggccgtgcttgatgagggcttccagcagctcctgcttcttcagcccactcttcagcccgtaagcctggaaggtgtctttcagcatgggcgccgtgaacttgccgagcgtacccttgctgatgtggggatctt

SEQ ID NO: 518826 - DNA, 200 bp, Homo sapiens
tcatagcacatataatttcctcacactgcgattacctcctttataataccaattacagttcactgcagaacctgtattacttttccgatagcataacatattaaagatattctggatcgtctggaaaccatttttttacatatcatcatttgcaaacaactacatttatatggcatgctatttaaacttctaaaactagg

SEQ ID NO: 518827 - DNA, 417 bp, Homo sapiens
gcacgagagggagactgagaagatagcgctgtgagagaagatgatgggtacacgcgacagactgtgcaccatatttctgtgagatagagcgcgagaaaccagatgcccagagacgcaggagccgacacggtaggcctggcgcggtaaggaggcttgcggagcaagaacggcctttcttcacacgagctattccgcgggtttcagaattccatatggcggacttctcttcctctctcttctcctacatttgggtcttctatactcggggtccttggatgcgctatattcctttgtggcttggaacctcttaagcctggcacaaggtactcttttccttgggaggtctgaactttaaataaggtgatggctgtaagaatggcattgcgcaatttgtcatctgggattatatttcatcgg

SEQ ID NO: 518828 - DNA, 137 bp, Homo sapiens
cctattttagaagtttcaatagcagatcattgctgcctgggggacatgacatctattccattgttctctatcttatagaggatatggaggaaacagtagacctaaggaagactgctattgaaacttctaaaactagg

SEQ ID NO: 518829 - DNA, 334 bp, Homo sapiens
gaggacccgtttggggtgcctttcacttctccttcccacaggcaaggtggggaagcagtttggccagccaaggagacccaacttgaagcttatttcctaaatgggtcacctctcaatctggatctttcaaaacttccaaggttcttgtgcaaaaccttaagcaagtgacaatgtccccaatgagactcgccctgaagcagacttggggcctggctttttcaattttccaacctggttcaaggaatgccttgtgggtcattggctctcaagttccaaccttggcattgaaggaaagggaatccctgggccttcttgggcataattccaatccaaa

SEQ ID NO: 518830 - DNA, 307 bp, Homo sapiens
cccccccccccctttttttagggggccccccctggtgttaaacccccccgggggggggggggggggccccccccccccccctgggggggggggggggggggggcaaaaaggggctctggggccccccattttttttttccccccccggggggggggggggcccccccccccccccccccccccggggggggggggtttttggttttttccccctgaaaaacaggggggggcccccctggccccccccccgccccgttttttttttttttttttggggggggggggccggggggttttttttttttga

SEQ ID NO: 518831 - DNA, 469 bp, Homo sapiens
gctgttccgaggtctcgagaggtgggacacgggcgctgcaccatgcctggctaatttttgtatttatagcagagatggggtttcaccgtgttagccaggatggtctcgatctcctgacctcgtgatctgcccacttcggcctcccaaagtgctgggattacaggcgtgagccaccgcgcccggccggaaagtagaatcacttttgtgggtggcccctagaacctgaaagtgaacagtgtaataaaagtttagtgcaggaagaccagaagatacagataaagtaaaagagaagaaacaatgaccagtaattccagatagcctgctcatttatttttggtttggtttcttggttttggagagggagttttggctccggtggcctaggctggagtgcaatggcgcgatctcggcttaccgcaacctctgcttcccaggttcaagtgattctcctgtctcagcgtcccgagaa

SEQ ID NO: 518832 - DNA, 814 bp, Homo sapiens
accacgcgtcgccacgcgtcgcgtgagctgctctttgccctcacgaatcagaggctagtatggcaccatgacttctaggaatccctgtaaagctgttgccatactagcctctgattcgtgagctgctcttgccctcaagtggtcattcagggttcctgacagaactgtgggtaagtacaggagcagtgcaggtgttccaagatgggagcacgtggaatctgctcatgcagtcctccttacacggggcctaacccacaagggccaggtagctagtggaccgagtgcaaggcacagcagtcaggctctgtggtctcaccccctccttaattctcatgcaattcccaagagacaccacttactgggcctgtcctgcagttgaagggacagggtcagattaagtgggtcaccaggctgcaacccacacaactagacagcccaggatctaaacccagtccctgacccctcggtagtccccagcttgtgtatgtggtcagatgtctacttgggaaacaaatgactcagtaatacatagataacatttctagaagtttccttactcctttgaagggctgaactgaggatctgtcttgagttgcaagggtacacatggccagcatccagaagtctggttatgaaccggagcactctcctggagcacatggcactcacctgtgtatcctcagatcaggactgggctgattcgagtcctcccacatgtcctttacttagtctcagggtcctgctcagctcattgctacgttaatacacgacgatctgtgaggtgtggtgaccttaaagcactcgggatcccttt

SEQ ID NO: 518833 - DNA, 87 bp, Homo sapiens
acttgaagggaaggaatcctcacaggtcagtgaagtaggtcaccaaacagttgtgataatcagcaccgagctgcgcgcccggcgtcc

SEQ ID NO: 518834 - DNA, 104 bp, Homo sapiens
tgggcttatggctggctggctggctgcttatttatttatttatttgtttgtattgttgtttgagatggagtcttgctctgttgcccagactggagtgcagcgcc

SEQ ID NO: 518835 - DNA, 141 bp, Homo sapiens
cacgcaccatcctggctagcaaggtgtccgctctgctcctgcatccagcgcaggcatccattgcccactcccgcatcgggctaacaggcttgcccattgttcctgccacagctcacaacgcctctgccagggtcacgcagc

SEQ ID NO: 518836 - DNA, 227 bp, Homo sapiens
caggaaaagggccagggccttgggttttggggattgggcccttaaagggctagttttgtggctgaaaataaagcatgtcccccccccccctggtgttttggcattaaaggttggagttaaaaaaaaccgggttgtgggaggagtaaaccctgggaaagggtgggggggtggcccgctgggagcctgatcctttttacattaattaaccccatgcctgccgggactta

SEQ ID NO: 518837 - DNA, 189 bp, Homo sapiens
atactctcttaatcggtgacactccgctccgagtgttttagtgcagactctgagcaagacatgtgcgcttcaacgtgctcaggtcatccgggggtgccggcaccaagaagcagttccagaaggttctgagcgctggacatcggcccgctccccacaatgaaataaagttattttctacataaaacaaaa

SEQ ID NO: 518838 - DNA, 215 bp, Homo sapiens
ggtgggagcaaaaccaacgcctggctcgggagcagcagcctctggaggtgtccctggccagttgtcccttccatcctgttccacaaggcatgggggaccatctttggccaacttttttttggggcctttttcggcaaaaaggaattgcgcatcctcatggtggccctggatgctccaggaaggaccacgatcctctcaaagagtttaaatctggt

SEQ ID NO: 518839 - DNA, 168 bp, Homo sapiens
gataccgccaatgcagctcctagaagcgcgttttgtgccgtttcggaggaagtctcctaggtgggtccatccctagctggctatgggtgggatactagggccagtgcaaacagggcttcttcatgccaaatcagacttctccgcgaaggagaagacgtttggagttgg

SEQ ID NO: 518840 - DNA, 109 bp, Homo sapiens
gatggcacgtgcagcttctacacggtgagaagcatgcctgcatcccagagcgaggaaggcgcccctgggttgacttacccaagtataaaagtttataattttacagcag

SEQ ID NO: 518841 - DNA, 130 bp, Homo sapiens
tgtgtcatgcactacgggcgtatgagtcagctcccccaagatgagctgcagcccccagagagagctctgactgtcaccaagtaaccaggccccagctccagagccccaactccgcccagcatctccccgc

SEQ ID NO: 518842 - DNA, 657 bp, Homo sapiens
cgttgggcccggcgcgaccgtcaggagcgtaaaagcgcggactagagtgcacagctccgggacgtggatcgaagccggtgcgatggtgcggagagcaggaggaggagcggttcgacgtgctatgttgctggccatggctcagagagatacgagggcggcgtgcaggagccttgtgaagcaccttcttacacgcttccttcgacgcagaacagactttttcattggaggagaagaacgggatggcagagaagattggccaggagagagaatgagtgccagcagaagaaatgccagacgcctaataaaagcatcagatcttgttgagaactcacgtcgtatcatgagaacagcatgggggaaaccatcctggtgattcgagttacctccagctggtactgcctttgacatgtcgggacattacaagttcaagcgttatcacacagacctttcagccaccaaaattcagttggcagagaagacccggcgggagaagagagcccggcaggagggccgagcggtgggagaaggcggaggcgggcggccagattgggcaaggaagccaagtcagagacctcagggccccagatcagggagctaactgatgaagaggcatagaaggctgcgggtaggagattgagccggaaaaaggatgccgag

SEQ ID NO: 518843 - DNA, 253 bp, Homo sapiens
cgccagcagctgtggaaatggtttaacagctggagaatagtaggcgtacattgagcgggactgcgggagtcaagaggcagcccagactgctgacggtagacaggatatccacgccacaaaggtgatgtggagaaaggcaagcagcaagccaccttcggagtcacatggccgaagaaagcaaaaacgaatattgcgggtcaactggcagcggttcaagcggagaccaagcccacttctattttttcacagatac

SEQ ID NO: 518844 - DNA, 115 bp, Homo sapiens
cccaaacccactccaccttactacagagcacctagccaaccattacccaataaaggataggcgatagaaattgaaacctggcgaatagatatagtacccaagggaaagattgaaa

SEQ ID NO: 518845 - DNA, 950 bp, Homo sapiens
tagaccgagcgagactccatctcaaaacaaaaacaaaaatttttttggaaatcccataaaaggacagttaggataaaaggtttgaggttgccttttttactattctcctagcggtctcaatcactaagtcatatatggtgccactggggggtggggctcctttaattacaattactcagtcctagaccgtggtaagggacatctcattaggaagtttgggtctccatcatatatatacaccaattcaatactgccgtgcacttgccgataagtgtcacacccattacaacagaggaagataatctcaacaggggtgcacgataacaaacagaggggcaagaatccagtggacatacgaggggtattcccgctgaaggaacgtgaccccatggttgtgaaccattacaggcttcacctgataaactttggttaaaagataggctggggtagtaggtggctcatcgccttgtaaatcccagcacttgggtgaggtggcatgtgcaacgagcatcgctatgacgcccagcatgttttcgagaccagcctgagcaatcttggggggaaaccccatttctggtgcaaacatcatgacactggcgctgggcacgaatggtgacactcttgttggccccagcatactcgcgacggctgaaacaggaggcacacttcaatgggaggccacacgaaggagcgtaaacatgcaaatgaccccagggggagacaaaacaagacgtgcccaacagccagaagccaaactactacctaaccgcccggtcccccatcatgccctaactaacaggatgtaacccgtccacgcccggcgcaacacatgtgcctctcaagtatacaccgggagaacaggattgcgcacttggacgccgccaaacgccacaaaaggggcaaacgcgcacccataaggatataacggcaaaacgagaacgcacatgcga

SEQ ID NO: 518846 - DNA, 282 bp, Homo sapiens
ctggtaaatggagggttttttacgacagaaggccaaggggggggtgttcggatggagtagggctgtgtgttgcgtggtgagaatggatcacatagtgggcgtcatagctttttacacgagcctcaagagccactggggccctttgtgccagatgagaggtgccgcttctgtgcgagcatgcacacgcgtgggcaggcccagtggcccaccctgagattctcagagtcttttcatgaggcaaatactttttctttaacctcccacgtcttccctcgtgggcgc

SEQ ID NO: 518847 - DNA, 876 bp, Homo sapiens
tctttcattccttcctccctcttgttctctttctttctccctttcattttttttctctttttataaaagcgagcggctctggggggggggtttgggcgctggggccgcccgccgaggtgaggtcgtctcgcctcccgcgcgccgtatgggtttgtcccatccaattggcccctctgctgaagttattgtatctggctctccccccgaggccggggtcgcctcactctggggacgcagcgatctccaagtccagctcaagaacaggcagaagggccccccatttcaatgtcgccccgccggaaaagattttggttctcctctccattcttctcccagagaccagacactcttctcccctcagaggcgcccccccataggtttctctctcccgggctccctataacagcagggggaacgccctcctcctcccccacgggggtgtaagatctcgggccccgggtctcatgtggcgtgaccaatatgtaggcggccatatttatagtgctccccccctcaaaaagaaaaagactctcctgtttgtgccctagcatctccctgtgtgtgtttcaccaacattgtgcaaccatttttttttttaacccccagatctcgcacatctctttaaaatgtgtgtgtgcgccgaggatatttccccacctgtgtgatggccccaggaatctgcggtggtatgtggggcaccccctctgttttattataccctcccagtgtgggggtaattaaccccaccgccgtggtcccccagagggtgcgccactttattcccctcaaccgagggaattttgtggggaagggaaggggcgaaaaggcccccaacggcggaagggttccccctttaaaagattggcccggccggga

SEQ ID NO: 518848 - DNA, 228 bp, Homo sapiens
tatattatgtcagtgctgtaatagcatatcactgctctgttctatcatcagcactctatgccttagatgggaattagtccattacattgaaataattatgggccatagggacttactatggctatttattatttttatctggtttgcagttctttcatttctctcttgctgtcatcttttgttatgtaattgtttttgtagtatatcatctactgattgaaccggata

SEQ ID NO: 518849 - DNA, 155 bp, Homo sapiens
gaaaaaaacaataaaagaaagggtggcaggagaaggacagctccaggagcagctccagtgccctcaaagagtccttaagtgtcaccaatgtggcagccttgaagaggagaagcgcagtgctgcagatccctggaagagcagcctccttctaatat

SEQ ID NO: 518850 - DNA, 441 bp, Homo sapiens
gtcatcgtcccagcttatgaattagaccatgccgacagttagttctcttgtactttagtgttacgtcttgctgagaatgatggttctagtgtctagcatgtccttagcgaggacatgaactcattcttttttttatggctgcatagtattccatggtgtatatgtgccacattttctttatccagtctatcactgatgggcatttgggttgattcccagtctttgctattgtgaacagtgccgcagtaaacgtatgtgtgcacgtgtctttacagtagaatgatttataatcctttgggtatatattcagtaatggcattactgggtcaaatggtatttctagttctagatccttgaggaatcaccacactgtcttccaccatggttgaactaatttacactcacaacaccctaggctcactaaacattctactactcact

SEQ ID NO: 518851 - DNA, 412 bp, Homo sapiens
  misc_feature (249)..(249): n is a, c, g, or t
  misc_feature (302)..(302): n is a, c, g, or t
  misc_feature (317)..(317): n is a, c, g, or t
gttggtgagcataccatgtacatagagtggaagactcaacacagtaaagatgtcaattcttccaaagatttgatgcaattcctatcaaaatcacagcaagatttttttctacgatacagaacacgtgtatgctaaacatttatactgaaaaggacaataggaactagatataacagaacacaattttgaaaacagaaaataaagggggcaatcatacagtgtaccttgatttcaagagcttattatatnagctatagataatacaagacaatatatatatacagctggggagacatacacangatcaatgaaatagnagtagaaaatagcaaaaacagatgaacacgatatgtccaagatgatttttggagagaggtgcaaaaaaaattcaatggagaaaaaataggctttt

SEQ ID NO: 518852 - DNA, 867 bp, Homo sapiens
  misc_feature (291)..(291): n is a, c, g, or t
  misc_feature (332)..(332): n is a, c, g, or t
  misc_feature (587)..(587): n is a, c, g, or t
  misc_feature (604)..(604): n is a, c, g, or t
  misc_feature (613)..(615): n is a, c, g, or t
  misc_feature (632)..(632): n is a, c, g, or t
  misc_feature (641)..(641): n is a, c, g, or t
  misc_feature (647)..(647): n is a, c, g, or t
  misc_feature (656)..(657): n is a, c, g, or t
  misc_feature (669)..(669): n is a, c, g, or t
  misc_feature (687)..(687): n is a, c, g, or t
  misc_feature (705)..(705): n is a, c, g, or t
  misc_feature (739)..(739): n is a, c, g, or t
  misc_feature (771)..(771): n is a, c, g, or t
  misc_feature (782)..(782): n is a, c, g, or t
  misc_feature (788)..(788): n is a, c, g, or t
  misc_feature (806)..(807): n is a, c, g, or t
  misc_feature (867)..(867): n is a, c, g, or t
tacatgattaataaaagtttgctgaacatacaatcttagatcattataaattctttttgaaaggtagactgggtgcagtggctcacgcctgtaatcctgacactttgggaggccatggaaggtaaaaagcttgaactcagaagttcaagaccaccctgggcaacatagtgggattctatttttacaaaaaaatacaaatattagccaggcatggtggtgggcacctatagtcccagatacatgggaggctgaggtggaaggatcacttgagctcagaaggtcgtggctgcngtgagccaagatcgcaccactgcactgcactccagcctggncaacacagcaaaaccctgcctaaacagaacaaaacaaaacaaaaccaaaacacactgatcttataattgagtgataaaactaaaaagtaatgcagcgctgctgcgcgcaagcaaaaatgtaaagcaggagcgcgataatttatgattttattgtgctttgcgctttgtcgcgggcgctttaacatgtttgctgtaatttaaataaaaatgctatttagctttgctgcgcattttaggcaaatggtttgctttagngcaacatagggttggcnctatagtgnnncatatgggttttgctantgttggcanaaggcnctatttgcnnaaagattttagnaaagctttaaataaaagnttaaattttagagagcancttaagataagcttgcgcaaatatgtagtaaaanagaatgcgattgcgcaaattaagaatattttngctaatatcgngcagcngcaatttgcagcaaatgnnatgctgcttaagcgcatatattttaatctgcgtaatttttgctagcaaaattttaatggn

SEQ ID NO: 518853 - DNA, 1674 bp, Homo sapiens
aaatgcattgcttgtaccttcctccttgaatttccctttgatatctgtctgacccactgctgtctgaaaaaaaaaaaaaaaaaaaaaaaaaaaaaaaaaaaaaaaaaaaaaaaaaaaaaaaaaaaaaaaaaaaaaaaaaaaaaaaaaaaaaaaaaacgacgagtgcgtggggcgcgcgcgcgcgcgcgcgccttcgtctctctctctctctctgttgtgtggtgtcccagctctccccgccgcccctccctttttttttccgcgcgtggcggcccctcctctcttgcgttcctctttttttccctccgtgcaggtgctgtcgctcctcgtcttctctctcctaccccaccacctcctctgtctgtgggtgcggtacgacacccgcgcgctgcgcctccagtgtggtcttctctctctctggtctcggcgcgccgccaactcatttcttctctggcgcctgcgtccaaccgtcaggtgaggaggtctctgcatcctcatctctcacactccctatctacatcattacactcactctctttcttggcgatgctacataccacaacacactaactacatcactacatacgttatctcaccacgatctcgagaaagttccccaccacacctctcactactacccattcccttacacgtcattacaatagctagcccgacacctcgtatccatacaccacacttctcacatagtatacttcatatcactcatatttcttcatccatctccatcacacctcaaattccaaacacaaggtacacaaccacctactccactcacaccactaccacacataacaaccccaataacacacccccaccctacacctacactactcccacatactcccaccacaccatactctacacacaacaaaacacacacacactaccagtctaatccacactacattccaccccaaccgacacgaactcaacactacactaccaactaacctcccattaactcaaagtcaacatacaaccaccaatcaccccaagtcaaccacacaacctcacagacactcccaccaccgacacccacactacacaatctcaagcacactaccccccccaccatcaaacacataatcaaccactatatacacacacctctacacatccacttacccaccacactatactctaatctatctctcacgacactaccacaaccatagaatcttaacatccatcacaaatactcatacatctataccacaccctaaactacacatccactccccccgtcctctcacaaccaatccttattcagctcatccaaacttcaacacatctacccatacaatatccaatctctatagcaactcttcacatgtcaacactaaatacaccatcacttacccaccctcacacaacactccaccacaacagaacgatccatacctctaacaaactcttcatctatacaacacatccatcactcaaccatctcaccgctaccacgatccaaaacacacacacaacctcacaatctaaaatcacacacacacatcacatcaataccacacctaccacaccccacaacactcatctccccgaccatctatcacaccacatcctcaacaacaccatatcacacacccaaccacacatcctatcaaaaacactaattccctcccacccaacatgctacac

SEQ ID NO: 518854 - DNA, 130 bp, Homo sapiens
tccttgattgcatttagactgattgcatttatacctttctgcttccggcggcatctaatggtttatatcgggatcgcgatatttcttttcttggtggggctgttatataagtagctcgtctaactgcaat

SEQ ID NO: 518855 - DNA, 215 bp, Homo sapiens
attttacattttcagcaattttttttttaccagtttagtgagcaggactgatatggttgatgctgtgtccaaatctcatgtcgaattgtaatccccacatgttagaagagggacctggtgggatgtgattggatcatggggtggatttcccccttgttgttctcgtgatggtgagtgagttctcatgaggtctggttgtttggggcgtacgggga

SEQ ID NO: 518856 - DNA, 210 bp, Homo sapiens
aattccggctctgtgaggctggatctgggtcaccatcacagggacactttttcacacattttctagggaaccaaccccttattcttgaaacaccttctataaaggaatcatctagaattttgtcttcatataaccagtatcgtaaacctctcgtggctaaaatgaaatcccctttttgcacctgtattccaggctcttttgtgcacggac

SEQ ID NO: 518857 - DNA, 300 bp, Homo sapiens
ggatggtattcagtaagtgacagactaccatcctcagggggtcccatgatccccattcctcctgactgggagaaacctcctagcagtgatcgacagacacctcatacagagagctccaactggcatctggatgggtgccgctctgggacaaagcttccagaggaaggaacaggcagcaatctttgctgtactgcagcctctgctggtgatacccaggcaaacaggatctggagtggacctccagaaaactccaacagacctgcagcagaggggcctgattgttagaaggaaaactaataa

SEQ ID NO: 518858 - DNA, 466 bp, Homo sapiens
cttgggggtttttatcttgctcaccgtggagataagcgtacggattgtctcaccagcgcagagcaaaggtgataatgcctttaggcaacatccgtcatggcacaacaaagctacacagaagtgtccaagcagcgttcatgataagtgttttcccatgaatattggattcatgtgtcccaccggctcagcctccggaggtaacatcatccagccacttatgacgaaggtccagaattatattttaacttgatgttgagcaccttataaaacgttagtatgtgtgttgcagtaattgtaaacataggaggcattttgttgtgttaggccgatctccactgtaaaggtccaagagtcgccagtatgtctgtgaagaaggcattgaaccaaataaaaagcttcccatggaggattgtatagaccttgtaattatatgtcaatatcgtgttaaaataaaatagcacttgct

SEQ ID NO: 518859 - DNA, 187 bp, Homo sapiens
cgtgtacctacatggtatggagtagacatcaacaacaggacattgctgataactttgaagcttttgtgttggagccagctattgtgcggatcaagtgccatgtacccccctggtgtgtaatggtcctccagaatgttgagaatgtttgtggcatcaaagccagcattgtcacacagctggcgtggga

SEQ ID NO: 518860 - DNA, 992 bp, Homo sapiens
atcccttacttcagcaactcaagtctgctaccctaaccacaagattcaagattatccacaccccagcccttaatccccatcccccaaatcactggatcctgcagccccacatcctaaggtggatcccacgcttccctgtgccccctactggatcctggacctctactgtcttaacacatctgggatacccgactacacaactccagtgtaactggagtcccgagatcgacctccaagccacaggagcacggattccctgtacctcaacacgccagacccgtgtcctcccgtcaggcaccagcatccagatgtcctaagtgaaacggctggactcctacgatccaccaaccctcagatacgcccatgcctcgcagcactctggcatgctccaacgctccagcatgactgggattgctggtatgtcgaactaataccttcacctaactggagtccatgactaaccaacgaaatgcctgggatcctgggtacccccaatctactggagtccccagatacccgctcacgtccaactcacgtggcttccgtgcatcggattggaggattacaagtataatcaatataaacctccgacactgaggtctcaagatccttactgctgacatgcacagatcccatgacaattcaatgcactacgcacttccacaccccaaggcacctggatcaccagattcccaagaccttcagaccaccagattcgtggctcctaacaacaagtgcgggggccacagtggcacagacaagtggatcctggcaactgcagctgctggattccagattctgggtacccaatccctctgccagtccctcaaagttgaaaccttaatctcttgaacggcagatcctgatattccaagggaatggaatcacaaagacctggaatccccggttctgatctgaatcattcaagggccgggtcccaatgttcaggccccaagtctcagatctgggcaaacaaagacacagagtatcca

SEQ ID NO: 518861 - DNA, 324 bp, Homo sapiens
atccggttctagaaagcctgttctcatgacccatcctctccttggggacttgttcttcacacagtcccaaccaacccctgttttcctccctttgcagacaaaggagagctgtttgtatggggcaagaacatccgagggtgcctgggaatcggtcgcctggaggaccagtatttcccatggagggtaaggctggccggggaggtcatgagactggatgctaagagtagagtcacctgacgtcactgcagacacctcgcgtgcagatgggccaggacgagggccatgggacctgctcccccttccgggtcctggctgcactcctgc

SEQ ID NO: 518862 - DNA, 1413 bp, Homo sapiens
  misc_feature (1041)..(1041): n is a, c, g, or t
ttttaccgggatcccggctggtccagtcaccgacctgcggctccggggccgcgagggaggaggcgcggggggcgcgaggcgggggcgagcgcttgggactcggcccggctcccggctccgggggttctcgtggccgcggcagcgcggtctctgcggaggcggcgggggcgcggccagccggacctcttcctttccagagcggcccgcggcgcccgttccgcgggaggcgggcgggaggcggacgcggcctaacctcgacgtcgactaccgcgccgcccgcgatgggaagcgccttataaagccgcgcccggccggcccgagccactcgccgccacgccgccccgctgccccgaacgcgggccatacgcagcctccttggagtgacgggccgaccccggacgaccccggccacggacagacccgggacgaccccggccggggcgcgcctcctgcgggcgggcgggcggcggggctggggagcccttggcgggggcatgcgtgcgacatggcctcggcggtgtttgagggcacgtcgctcgtgaacatgttcgtgcgcggctgctgggtgaacggcatccgcaggctcatcgtcagccggcgcggcgacgaagaggagttcttcgagatccgcacggagtggtcggaccgcagcgtgctctacctgcaccgcagcctggcggacctgggccgcctgtggcagcgcctgcgcgacgcctttcccgaggaccggtccgaactggcgcaggggccgctgcggcaaggactggttgccataaaggaagcccacgacatagagaccaggcttaatgaggtggagaagctgctgaagacgatcataagcatgccctgtaaatattctagatcggaagttgtgctcaccttcttcgaaagatctcctctggatcaggtgttaaaaaatgataatgtgcataaaattcaacccagctttcaaagtccagtcaaaatatcagaaatcatgaggtccaatggattttgtttagcaaataccgaaacaatagttattgaccacagtataccaantggaagagaccagcacctgggcgtggacccaacagagcgttattgacgaatggcagtgagttccctcaggagctggaggccgcgggaccgacccaggcaggcctacgttcaccaacctgttcatattaccacctggtcccccttcgagaacgactttgggcgtggacccttctataaggctgcccggcctcagtggttactgcccgtcctggtgtgtccctgtgctggcccaggtccagctgtggccccttgggacccgagttccgggccctggccgggcggtgtctcctgggacacggccctggcgggggcagagccccggtggcggcgcgcgggtggtcccggcggggcccggggtgtcgcttcgtgccc

SEQ ID NO: 518863 - DNA, 271 bp, Homo sapiens
ctcgtgctccacagcctgcaccgcccagggaaggacgggaaacagcacccagaagaagcttcttcccaacaccttcatgatccaggtccagagggcagtgcacagcagatccacggtactctgccccactgagcttgcatatcagacacacattttcacggacgcagggatccgcgccccccgtccggcacgagcatcaccgtatccggcgctgggccggctctgaggcgccaggaccgagggcggagggggcgctgctccccctcggagc

SEQ ID NO: 518864 - DNA, 918 bp, Homo sapiens
  misc_feature (830)..(830): n is a, c, g, or t
ttttaccgggatcccggctggtccagtcaccgacctgcggctccggggccgcgagggaggaggcgcggggggcgcgaggcgggggcgagcgcttgggactcggcccggctcccggctccgggggttctcgtggccgcggcagcgcggtctctgcggaggcggcgggggcgcggccagccggacctcttcctttccagagcggcccgcggcgcccgttccgcgggaggcgggcgggaggcggacgcggcctaacctcgacgtcgactaccgcgccgcccgcgatgggaagcgccttataaagccgcgcccggccggcccgagccactcgccgccacgccgccccgctgccccgaacgcgggccatacgcagcctccttggagtgacgggccgaccccggacgaccccggccacggacagacccgggacgaccccggccggggcgcgcctcctgcgggcgggcgggcggcggggctggggagcccttggcgggggcatgcgtgcgacatggcctcggcggtgtttgagggcacgtcgctcgtgaacatgttcgtgcgcggctgctgggtgaacggcatccgcaggctcatcgtcagccggcgcggcgacgaagaggagttcttcgagatccgcacggagtggtcggaccgcagcgtgctctacctgcaccgcagcctggcggacctgggccgcctgtggcagcgcctgcgcgacgcctttcccgaggaccggtccgaactggcgcaggggccgctgcggcaaggtgcggggccggggacgcgggaggggcgcggggccgaggcagccttgaagtgcacgaaggaggcggggnagagacttcaaccgagattgcgacttctcctttctgcccgccctggacaggggacacttggaccccgcgcccgcagacgaggggtgcc

SEQ ID NO: 518865 - DNA, 370 bp, Homo sapiens
aaaggaactgggggatgtgcagggccccggcagggtggtcaccagcagagccgcccctccctccctggggtttgtcagctaacagagcatttggtggaagaaagacagcccagctcttgccatgattgggagccgcagccctctttagatgaaagggggaatgtgtaaaggagaaattgcctctttataaagagcccagttgtttccttggggccttttttgtttttcagagtcattgccgtcgagtttttgctttttggcccccttttggggtcagcttactgcatgatcaaagatgatgtttccctctttttacttttcctcagaagattgagctgttttttatttggagaataaaatgaagttttga

SEQ ID NO: 518866 - DNA, 2318 bp, Homo sapiens
  misc_feature (582)..(582): n is a, c, g, or t
  misc_feature (588)..(589): n is a, c, g, or t
  misc_feature (591)..(592): n is a, c, g, or t
  misc_feature (600)..(600): n is a, c, g, or t
  misc_feature (604)..(604): n is a, c, g, or t
ggccagaggctgttgaggcgcggaactggaggatggcgctggtggctgttggtgtgctggggctcggttgtggcggcggctgagcgggcctggggctggtggcgagggcactggactggctgtgcgtggctgctcccggaccgtcgcgaagcggcagaagccgaggcggaggtgcccgtggtccagtacgtgtggcgagcgcgctgtccggccgatcgggtcttcgtgtggggcttcatcttctcgcggtggctgctgggcagtgccttcctttgtggtgcccagctctcgaggactcccgggtgccccgttgccggcagctccagacgcagacctgtgagtgatccagacccgtgcctctatcgtctggagctggatcaaaagatttcatctgctgtcttgcagtgtatggattcacatttgctgtcctctaagactgcggatgttaagaaagtcttgggcgtgatgggactcaacaaggattctcagcttgtgatttacacaggagccgtgaaagataatacgaggggctactgagtatgtgttggagcccgttcagccgtctctcttgcctctggacangacctnngnngaccacgngtcngcaggtctcctgcggccgagctcactctcttgtgttgactgacagggaaggagtcttcagcatgggaaacaattcttatgggcaatgtggaagaaaggtggtcgaaaatgaaatttacagtgaaagtcacagagtccacaggatgcaggacttcgatggccaggtggtccaggtcgcctgtggtcaggatcatagtctgttcctgacggataaaggagaagtctattcttgtggatggggtgctgatgggcaaacaggtctgggtcactacaatatcaccagctcgcccaccaagctgggtggagacctggcgggagtgaacgttatccaagttgccacctacggtgattgctgcctggccgtgtccgccgacggaggactttttggttggggaaactcggagtacctgcagctggcctctgtcactgactccacacaggtgaatgtgccccgctgcttacacttctcaggagtggggaaggtgcgacaggctgcatgcggtggcacgggctgtgcagtgttaaacggagaaggacatgtttttgtctggggctatggaattcttgggaaaggtccaaacctagtggaaagtgccgtccctgaaatgattccacccactctctttggcttgacggagttcaacccagaaatccaggtttcccgcatccgatgtggactcagccactttgctgcactgaccaacaaaggagagctgtttgtatggggcaagaacatccgagggtgcctgggaatcggtcgcctggaggaccagtatttcccatggagggtgacgatgcctggggagcctgtggacgtggcatgtggcgtggaccacatggtgaccctggccaagtcattcatctaaacctccctcacctgcttgggcggccccgtcccgggaaccactggcactccttggcagaggccagcgcgtggccagccccccggggttcttggatggtggtggcggaggaccctgcgtgcagtgtgacgctctgtcctgaatcccttagcgggtacctaccaggaggatcagggcaaggtccctctccagctgcaggtgaggcctgcggaactcagcttggatggcagcctttggtgggccgctgtggcccgcacgtctctgttctctccaagtaacatgcgacggtgtctggtgtcacgtctcgcctgagaagcccgtcttaggaaagcttagcttgaacacagtgctcgggaggtttctgctctgtctgtcatggcagtctcttggtttgtgtctggccaaggccatgcgtgtgcctcggaccgagccccagcttaggcgagggagtcaggctggcttcggccctcggttttcattcaggccaccctgctcatggcccttcctggccgcctgccacaccgcaagctcgctggggggacactagaagcaccgtggcctgggattccatctggagctgtccgcaggcaccagccccagcctcccaccacgctcactgcctggcttggaaaagttaagaagcccctcaggaagagaatcgaggctaagttcctctgcgccgagggccccgagcatatccgccaaggctcagctgcagtgccaggcggaggaggaagatccagaaattgtgaacaatgtttgatttagtagcgtgacttgcctttccctttaaaaacatcttttacaaatctgtcttggaataaagtctattttctgccttttggtttttaa

SEQ ID NO: 518867 - DNA, 1049 bp, Homo sapiens
  misc_feature (938)..(938): n is a, c, g, or t
ttttaccgggatcccggctggtccagtcaccgacctgcggctccggggccgcgagggaggaggcgcggggggcgcgaggcgggggcgagcgcttgggactcggcccggctcccggctccgggggttctcgtggccgcggcagcgcggtctctgcggaggcggcgggggcgcggccagccggacctcttcctttccagagcggcccgcggcgcccgttccgcgggaggcgggcgggaggcggacgcggcctaacctcgacgtcgactaccgcgccgcccgcgatgggaagcgccttataaagccgcgcccggccggcccgagccactcgccgccacgccgccccgctgccccgaacgcgggccatacgcagcctccttggagtgacgggccgaccccggacgaccccggccacggacagacccgggacgaccccggccggggcgcgcctcctgcgggcgggcgggcggcggggctggggagcccttggcgggggcatgcgtgcgacatggcctcggcggtgtttgagggcacgtcgctcgtgaacatgttcgtgcgcggctgctgggtgaacggcatccgcaggctcatcgtcagccggcgcggcgacgaagaggagttcttcgagatccgcacggagtggtcggaccgcagcgtgctctacctgcaccgcagcctggcggacctgggccgcctgtggcagcgcctgcgcgacgcctttcccgaggaccggtccgaactggcgcaggggccgctgcggcaagacctattcaacgaatgcttgaaaactgaacaggcttttcccctgcaaaacaaaatcagaccagaacttctgaaaaagttagtctccgtgaccaataatactaggcacgtttgcatcagctcggtcacacaagtgtgggggagacgccagtgtcttgggcacctacttcccatcctgnaaagcgacggatagaacctgtgatgggaagattttgcctgggctctcatggggagatagaaaagccgagcttatgcttgagtatggatgtgcataaagagcccgattgaac

SEQ ID NO: 518868 - DNA, 710 bp, Homo sapiens
ctaaaggggaaggcccctttttattaaactggtacattttactttccttctttcagaatgctaataaaaaactttggtttatacttaaaaaaaaaaaaaaaaacaaaaaaaaaaaaaaaaaaaaaaaaaaaaaaaaaaaaaaaaaaaaaaaaaaaacaaaaaaaaaaaaacaagggggggcgcgccgcgccgaaacatcattcctccctacagggggcgcaccaagatcaaagccgaccccgaccgagtgttttctgtgaaacaacggggcgcccccacaagaggggcgcgcgactaaaatacacaagccagcagcgaaactgcggcggcgggtatataacaacgagcgtgtaggacgtgagaaccagctggcgacagtggaggatcacctatggtggggaaaaagaagacccaccactattccggggggggggcgaacaacaatctggggcggaccacacaccacaccaccagcaagaagaaattatatataagaccatgatacgacgggtgagtaacaaaataataaatattattacagcagtgtgttataatatgggggggtaaacaaaacaagcggggcatagtataatgctgctggccgatctgaagaagagtctgtgtgtctaggagggagtattatttctttgcaagaatgatttttatatatacagaagggggatattgtgtttaaaaaacaagggagagag

SEQ ID NO: 518869 - DNA, 1154 bp, Homo sapiens
aaactcattaaggtgcttcagtgtaggcagggccctggcgcgttttatacaattggcagagctctttggttgtttgattcaacccagaaatccaggtttcccgcatccgatgtggactcagccactttgctgcactgaccaacaaaggagagctgtttgtatggggcaagaacatccgagggtgcctgggaatcggtcgcctggaggaccagtatttcccatggagggtgacgatgcctggggagcctgtggacgtggcatgtggcgtggaccacatggtgaccctggccaagtcattcatctaaacctccctcacctgcttgggcggccccgtcccgggaaccactggcactccttggcagaggccagcgcgtggccagccccccggggttcttggatggtggtggcggaggaccctgcgtgcagtgtgacgctctgtcctgaatcccttagcgggtacctaccaggaggatcagggcaaggtccctctccagctgcaggtgaggcctgcggaactcagcttggatggcagcctttggtgggccgctgtggcccgcacgtctctgttctctccaagtaacatgcgacggtgtctggtgtcacgtctcgcctgagaagcccgtcttaggaaagcttagcttgaacacagtgctcgggaggtttctgctctgtctgtcatggcagtctcttggtttgtgtctggccaaggccatgcgtgtgcctcggaccgagccccagcttaggcgagggagtcaggctggcttcggccctcggttttcattcaggccaccctgctcatggcccttcctggccgcctgccacaccgcaagctcgctggggggacactagaagcaccgtggcctgggattccatctggagctgtccgcaggcaccagccccagcctcccaccacgctcactgcctggcttggaaaagttaagaagcccctcaggaagagaatcgaggctaagttcctctgcgccgagggccccgagcatatccgccaaggctcagctgcagtgccaggcggaggaggaagatccagaaattgtgaacaatgtttgatttagtagcgtgacttgcctttccctttaaaaacatcttttacaaatctgtcttggaataaagtctattttctgccttttggtttttaa

SEQ ID NO: 518870 - DNA, 1493 bp, Homo sapiens
  misc_feature (1121)..(1121): n is a, c, g, or t
ttttaccgggatcccggctggtccagtcaccgacctgcggctccggggccgcgagggaggaggcgcggggggcgcgaggcgggggcgagcgcttgggactcggcccggctcccggctccgggggttctcgtggccgcggcagcgcggtctctgcggaggcggcgggggcgcggccagccggacctcttcctttccagagcggcccgcggcgcccgttccgcgggaggcgggcgggaggcggacgcggcctaacctcgacgtcgactaccgcgccgcccgcgatgggaagcgccttataaagccgcgcccggccggcccgagccactcgccgccacgccgccccgctgccccgaacgcgggccatacgcagcctccttgtgatgttgactgtgtgcctgtacccctgtgactgacccctgtgccacttggacatgaccctgtgtgactgacccctgtggcctgtgtggctgctgcctccttgtcgtgtgctgtgtgctgtgtgctgtgctgtgtggtgcttgtgtgtgatgcctcttgtgctggtgtgtgcatagctgtgctgtacattggccttcggctggttgtttgatgggggcactgtctgcctcctgtgaacaatgttctgtgcgctgtgctgctggtgtcgaacgtgatcctgcagtcctcatcgtcagccggcgcggcgacgaagaggagttcttcgagatccgcacggagtggtcggaccgcagcgtgctctacctgcaccgcagcctggcggacctgggccgcctgtggcagcgcctgcgcgacgcctttcccgaggaccggtccgaactggcgcaggggccgctgcggcaaggactggttgccataaaggaagcccacgacatagagaccaggcttaatgaggtggagaagctgctgaagacgatcataagcatgccctgtaaatattctagatcggaagttgtgctcaccttcttcgaaagatctcctctggatcaggtgttaaaaaatgataatgtgcataaaattcaacccagctttcaaagtccagtcaaaatatcagaaatcatgaggtccaatggattttgtttagcaaataccgaaacaatagttattgaccacagtataccaantggaagagaccagcacctgggcgtggacccaacagagcgttattgacgaatggcagtgagttccctcaggagctggaggccgcgggaccgacccaggcaggcctacgttcaccaacctgttcatattaccacctggtcccccttcgagaacgactttgggcgtggacccttctataaggctgcccggcctcagtggttactgcccgtcctggtgtgtccctgtgctggcccaggtccagctgtggccccttgggacccgagttccgggccctggccgggcggtgtctcctgggacacggccctggcgggggcagagccccggtggcggcgcgcgggtggtcccggcggggcccggggtgtcgcttcgtgccc

SEQ ID NO: 518871 - DNA, 1059 bp, Homo sapiens
gggcatggggtgggggattccatcaaaactgttgtttttttgccccatgatttttctttggtcagtaggagtgctggattggcagtgggctgattattcccctggagctaagctcagcgagcccgaagcggagagactgaggactgactcccttatcctcttcatattctttcattccctagccagattggatttactctctctttctctttttctttgcgacaacggatgtctccgcccctgtccgccagcgctcgggagttgtcgtgggactgatctccgatctcacctcgccaaattctcgtcttcaccggtgttcaagccacattcctccctaccctactacacccctccacgaagtaaacgcctcgcgcgatacaccacagcgcacttgttccccccacacccgccaaagactacactgtctgtggttctttttacagcgctaagaagaagcgctgggttacacccagtgtatgtgccccacgagcattgcgcctccctcagaacattcctcctaatgaacccatcgactagaactctttacgccacagccctatgtgaccaccacacaagaacgcttcatgcaggacgaatgctatacacacgcgagtctagtacgacccccatacctaaccccccaccgcaccccccagtggagcagtacaaaacaccctttcagcgcctgtactaaacagccgtggcacgcgtcaaaccacaacgagggtgatgctacacacacgcatgcgaccacaacacgcgcgctgccggacccggcgcacccactctacgacgacacaagcactagtgagcactactttaaccgaccacgcagacaactgtggcgtcacaccgacccacttacccccccctgaccactgccgcacacaccactacgcgaccgcctagcacgacagcgcaaacctctgcaaacaccggtgcccacctaccaccaacacacacgcgcaactcagaaaccacttcccacggacactcgaccgccccctctacgacagcgtggacagaacaacgaccccttgggcgtaaccactggggcct

SEQ ID NO: 518872 - DNA, 134 bp, Homo sapiens
actgttacacacgcatattgacatcctcccacgtcctcttggcccaccacctctgttcacactggttcttgccactcttactttttcattgcttttctttgcgcccgtgttctgtttcttttctggtggtctcg

SEQ ID NO: 518873 - DNA, 2144 bp, Homo sapiens
  misc_feature (582)..(582): n is a, c, g, or t
  misc_feature (588)..(589): n is a, c, g, or t
  misc_feature (591)..(592): n is a, c, g, or t
  misc_feature (600)..(600): n is a, c, g, or t
  misc_feature (604)..(604): n is a, c, g, or t
ggccagaggctgttgaggcgcggaactggaggatggcgctggtggctgttggtgtgctggggctcggttgtggcggcggctgagcgggcctggggctggtggcgagggcactggactggctgtgcgtggctgctcccggaccgtcgcgaagcggcagaagccgaggcggaggtgcccgtggtccagtacgtgtggcgagcgcgctgtccggccgatcgggtcttcgtgtggggcttcatcttctcgcggtggctgctgggcagtgccttcctttgtggtgcccagctctcgaggactcccgggtgccccgttgccggcagctccagacgcagacctgtgagtgatccagacccgtgcctctatcgtctggagctggatcaaaagatttcatctgctgtcttgcagtgtatggattcacatttgctgtcctctaagactgcggatgttaagaaagtcttgggcgtgatgggactcaacaaggattctcagcttgtgatttacacaggagccgtgaaagataatacgaggggctactgagtatgtgttggagcccgttcagccgtctctcttgcctctggacangacctnngnngaccacgngtcngcaggtctcctgcggccgagctcactctcttgtgttgactgacagggaaggagtcttcagcatgggaaacaattcttatgggcaatgtggaagaaaggtggtcgaaaatgaaatttacagtgaaagtcacagagtccacaggatgcaggacttcgatggccaggtggtccaggtcgcctgtggtcaggatcatagtctgttcctgacggataaaggagaagtctattcttgtggatggggtgctgatgggcaaacaggtctgggtcactacaatatcaccagctcgcccaccaagctgggtggagacctggcgggagtgaacgttatccaagttgccacctacggtgattgctgcctggccgtgtccgccgacggaggactttttggttggggaaactcggagtacctgcagctggcctctgtcactgactccacacaggtgaatgtgccccgctgcttacacttctcaggagtggggaaggtgcgacaggctgcatgcggtggcacgggctgtgcagtgttaaacgacaaaggagagctgtttgtatggggcaagaacatccgagggtgcctgggaatcggtcgcctggaggaccagtatttcccatggagggtgacgatgcctggggagcctgtggacgtggcatgtggcgtggaccacatggtgaccctggccaagtcattcatctaaacctccctcacctgcttgggcggccccgtcccgggaaccactggcactccttggcagaggccagcgcgtggccagccccccggggttcttggatggtggtggcggaggaccctgcgtgcagtgtgacgctctgtcctgaatcccttagcgggtacctaccaggaggatcagggcaaggtccctctccagctgcaggtgaggcctgcggaactcagcttggatggcagcctttggtgggccgctgtggcccgcacgtctctgttctctccaagtaacatgcgacggtgtctggtgtcacgtctcgcctgagaagcccgtcttaggaaagcttagcttgaacacagtgctcgggaggtttctgctctgtctgtcatggcagtctcttggtttgtgtctggccaaggccatgcgtgtgcctcggaccgagccccagcttaggcgagggagtcaggctggcttcggccctcggttttcattcaggccaccctgctcatggcccttcctggccgcctgccacaccgcaagctcgctggggggacactagaagcaccgtggcctgggattccatctggagctgtccgcaggcaccagccccagcctcccaccacgctcactgcctggcttggaaaagttaagaagcccctcaggaagagaatcgaggctaagttcctctgcgccgagggccccgagcatatccgccaaggctcagctgcagtgccaggcggaggaggaagatccagaaattgtgaacaatgtttgatttagtagcgtgacttgcctttccctttaaaaacatcttttacaaatctgtcttggaataaagtctattttctgccttttggtttttaa

SEQ ID NO: 518874 - DNA, 2060 bp, Homo sapiens
  misc_feature (582)..(582): n is a, c, g, or t
  misc_feature (588)..(589): n is a, c, g, or t
  misc_feature (591)..(592): n is a, c, g, or t
  misc_feature (600)..(600): n is a, c, g, or t
  misc_feature (604)..(604): n is a, c, g, or t
ggccagaggctgttgaggcgcggaactggaggatggcgctggtggctgttggtgtgctggggctcggttgtggcggcggctgagcgggcctggggctggtggcgagggcactggactggctgtgcgtggctgctcccggaccgtcgcgaagcggcagaagccgaggcggaggtgcccgtggtccagtacgtgtggcgagcgcgctgtccggccgatcgggtcttcgtgtggggcttcatcttctcgcggtggctgctgggcagtgccttcctttgtggtgcccagctctcgaggactcccgggtgccccgttgccggcagctccagacgcagacctgtgagtgatccagacccgtgcctctatcgtctggagctggatcaaaagatttcatctgctgtcttgcagtgtatggattcacatttgctgtcctctaagactgcggatgttaagaaagtcttgggcgtgatgggactcaacaaggattctcagcttgtgatttacacaggagccgtgaaagataatacgaggggctactgagtatgtgttggagcccgttcagccgtctctcttgcctctggacangacctnngnngaccacgngtcngcaggtctcctgcggccgagctcactctcttgtgttgactgacagggaaggagtcttcagcatgggaaacaattcttatgggcaatgtggaagaaaggtggtcgaaaatgaaatttacagtgaaagtcacagagtccacaggatgcaggacttcgatggccaggtggtccaggtcgcctgtggtcaggatcatagtctgttcctgacggataaaggagaagtctattcttgtggatggggtgctgatgggcaaacaggtctgggtcactacaatatcaccagctcgcccaccaagctgggtggagacctggcgggagtgaacgttatccaagttgccacctacggtgattgctgcctggccgtgtccgccgacggaggactttttggttggggaaactcggagtacctgcagctggcctctgtcactgactccacacaggtgaatgtgccccgctgcttacacttctcaggagtggggaaggtgcgacaggctgcatgcggtggcacgggctgtgcagtgttaaacggggtgacgatgcctggggagcctgtggacgtggcatgtggcgtggaccacatggtgaccctggccaagtcattcatctaaacctccctcacctgcttgggcggccccgtcccgggaaccactggcactccttggcagaggccagcgcgtggccagccccccggggttcttggatggtggtggcggaggaccctgcgtgcagtgtgacgctctgtcctgaatcccttagcgggtacctaccaggaggatcagggcaaggtccctctccagctgcaggtgaggcctgcggaactcagcttggatggcagcctttggtgggccgctgtggcccgcacgtctctgttctctccaagtaacatgcgacggtgtctggtgtcacgtctcgcctgagaagcccgtcttaggaaagcttagcttgaacacagtgctcgggaggtttctgctctgtctgtcatggcagtctcttggtttgtgtctggccaaggccatgcgtgtgcctcggaccgagccccagcttaggcgagggagtcaggctggcttcggccctcggttttcattcaggccaccctgctcatggcccttcctggccgcctgccacaccgcaagctcgctggggggacactagaagcaccgtggcctgggattccatctggagctgtccgcaggcaccagccccagcctcccaccacgctcactgcctggcttggaaaagttaagaagcccctcaggaagagaatcgaggctaagttcctctgcgccgagggccccgagcatatccgccaaggctcagctgcagtgccaggcggaggaggaagatccagaaattgtgaacaatgtttgatttagtagcgtgacttgcctttccctttaaaaacatcttttacaaatctgtcttggaataaagtctattttctgccttttggtttttaa

SEQ ID NO: 518875 - DNA, 252 bp, Homo sapiens
agactaataaaaggagctagctgctctacggcatcttgcttagagtaaacttaacctggctttaagcagtagtactgccccaccaaggtctaaaagcatttttggagctattgcactgtgttctcctactgcaatattttcatatggaagatggtttctcttcatgtagtccttggaattgattctaagggtgatgttcttagcactttaactcctgtcaaatttttttgttctccccttctgtcgtcttct

SEQ ID NO: 518876 - DNA, 1319 bp, Homo sapiens
  misc_feature (313)..(313): n is a, c, g, or t
  misc_feature (361)..(361): n is a, c, g, or t
ctattttctctgaatgtccgttttatcttgcagctatgtgaatgcaccgcctagtcattataaagaagaaagagaatgcagagtgcccctttcctggatgctggattggctatggccctgggcacacctggagttgttgaggatgtccgtttccatggcgaggctatagaacagtgggcgcccttccaacaggctagagcctccatgtctcagtgagggccatcttcttgctcccttgaagcttgggctgtcctctgatgccatgttgtcagcccagacaggcagtgtgatcagggctcctggcaagggtctnttgagacacagccactgcccctgcttggtggtcgtgacttgggacgcngcctgcctgtgactggagctgggggtgacgggtgacgatgcctggggagcctgtggacgtggcatgtggcgtggaccacatggtgaccctggccaagtcattcatctaaacctccctcacctgcttgggcggccccgtcccgggaaccactggcactccttggcagaggccagcgcgtggccagccccccggggttcttggatggtggtggcggaggaccctgcgtgcagtgtgacgctctgtcctgaatcccttagcgggtacctaccaggaggatcagggcaaggtccctctccagctgcaggtgaggcctgcggaactcagcttggatggcagcctttggtgggccgctgtggcccgcacgtctctgttctctccaagtaacatgcgacggtgtctggtgtcacgtctcgcctgagaagcccgtcttaggaaagcttagcttgaacacagtgctcgggaggtttctgctctgtctgtcatggcagtctcttggtttgtgtctggccaaggccatgcgtgtgcctcggaccgagccccagcttaggcgagggagtcaggctggcttcggccctcggttttcattcaggccaccctgctcatggcccttcctggccgcctgccacaccgcaagctcgctggggggacactagaagcaccgtggcctgggattccatctggagctgtccgcaggcaccagccccagcctcccaccacgctcactgcctggcttggaaaagttaagaagcccctcaggaagagaatcgaggctaagttcctctgcgccgagggccccgagcatatccgccaaggctcagctgcagtgccaggcggaggaggaagatccagaaattgtgaacaatgtttgatttagtagcgtgacttgcctttccctttaaaaacatcttttacaaatctgtcttggaataaagtctattttctgccttttggtttttaa

SEQ ID NO: 518877 - DNA, 1011 bp, Homo sapiens
cttcctatgttgcccaggctggtctcgaacttctgcctcaagtggtcttcccaccttggcctcacaaaatgttggaacttctgggtgacgatgcctggggagcctgtggacgtggcatgtggcgtggaccacatggtgaccctggccaagtcattcatctaaacctccctcacctgcttgggcggccccgtcccgggaaccactggcactccttggcagaggccagcgcgtggccagccccccggggttcttggatggtggtggcggaggaccctgcgtgcagtgtgacgctctgtcctgaatcccttagcgggtacctaccaggaggatcagggcaaggtccctctccagctgcaggtgaggcctgcggaactcagcttggatggcagcctttggtgggccgctgtggcccgcacgtctctgttctctccaagtaacatgcgacggtgtctggtgtcacgtctcgcctgagaagcccgtcttaggaaagcttagcttgaacacagtgctcgggaggtttctgctctgtctgtcatggcagtctcttggtttgtgtctggccaaggccatgcgtgtgcctcggaccgagccccagcttaggcgagggagtcaggctggcttcggccctcggttttcattcaggccaccctgctcatggcccttcctggccgcctgccacaccgcaagctcgctggggggacactagaagcaccgtggcctgggattccatctggagctgtccgcaggcaccagccccagcctcccaccacgctcactgcctggcttggaaaagttaagaagcccctcaggaagagaatcgaggctaagttcctctgcgccgagggccccgagcatatccgccaaggctcagctgcagtgccaggcggaggaggaagatccagaaattgtgaacaatgtttgatttagtagcgtgacttgcctttccctttaaaaacatcttttacaaatctgtcttggaataaagtctattttctgccttttggtttttaa

SEQ ID NO: 518878 - DNA, 188 bp, Homo sapiens
tagtcatgtacactgaactgatagacatcactatctttattggaacacacaatttatataacactcttcctctggaataatacactttttagtggacaaataccgagttgctccctctcttctccccaccacacctggcgtgtggtgatggatgactgtggtcccagctactcaggagactgaggtgg

SEQ ID NO: 518879 - DNA, 2655 bp, Homo sapiens
  misc_feature (582)..(582): n is a, c, g, or t
  misc_feature (588)..(589): n is a, c, g, or t
  misc_feature (591)..(592): n is a, c, g, or t
  misc_feature (600)..(600): n is a, c, g, or t
  misc_feature (604)..(604): n is a, c, g, or t
ggccagaggctgttgaggcgcggaactggaggatggcgctggtggctgttggtgtgctggggctcggttgtggcggcggctgagcgggcctggggctggtggcgagggcactggactggctgtgcgtggctgctcccggaccgtcgcgaagcggcagaagccgaggcggaggtgcccgtggtccagtacgtgtggcgagcgcgctgtccggccgatcgggtcttcgtgtggggcttcatcttctcgcggtggctgctgggcagtgccttcctttgtggtgcccagctctcgaggactcccgggtgccccgttgccggcagctccagacgcagacctgtgagtgatccagacccgtgcctctatcgtctggagctggatcaaaagatttcatctgctgtcttgcagtgtatggattcacatttgctgtcctctaagactgcggatgttaagaaagtcttgggcgtgatgggactcaacaaggattctcagcttgtgatttacacaggagccgtgaaagataatacgaggggctactgagtatgtgttggagcccgttcagccgtctctcttgcctctggacangacctnngnngaccacgngtcngcaggtctcctgcggccgagctcactctcttgtgttgactgacagggaaggagtcttcagcatgggaaacaattcttatgggcaatgtggaagaaaggtggtcgaaaatgaaatttacagtgaaagtcacagagtccacaggatgcaggacttcgatggccaggtggtccaggtcgcctgtggtcaggatcatagtctgttcctgacggataaaggagaagtctattcttgtggatggggtgctgatgggcaaacaggtctgggtcactacaatatcaccagctcgcccaccaagctgggtggagacctggcgggagtgaacgttatccaagttgccacctacggtgattgctgcctggccgtgtccgccgacggaggactttttggttggggaaactcggagtacctgcagctggcctctgtcactgactccacacaggtgaatgtgccccgctgcttacacttctcaggagtggggaaggtgcgacaggctgcatgcggtggcacgggctgtgcagtgttaaacggagaaggacatgtttttgtctggggctatggaattcttgggaaaggtccaaacctagtggaaagtgccgtccctgaaatgattccacccactctctttggcttgacggagttcaacccagaaatccaggtttcccgcatccgatgtggactcagccactttgctgcactgaccaacaaaggagagctgtttgtatggggcaagaacatccgagggtgcctgggaatcggtcgcctggaggaccagtatttcccatggagggtgacgatgcctggggagcctgtggacgtggcatgtggcgtggaccacatggtgaccctggccaagtcattcatctaaacctccctcacctgcttgggcggccccgtcccgggaaccactggcactccttggcagaggccagcgcgtggccagccccccggggttcttggatggtggtggcggaggaccctgcgtgcagtgtgacgctctgtcctgaatcccttagcgggtacctaccaggaggatcagggcaaggtccctctccagctgcaggtgaggcctgcggaactcagcttggatggcagcctttggtgggccgctgtggcccgcacgtctctgttctctccaagtaacatgcgacggtgtctggtgtcacgtctcgcctgagaagcccgtcttaggaaagcttagcttgaacacagtgctcgggaggtttctgctctgtctgtcatggcagtctcttggtttgtgtctggccaaggccatgcgtgtgcctcggaccgagccccagcttaggcgagggagtcaggctggcttcggccctcggttttcattcaggccaccctgctcatggcccttcctggccgcctgccacaccgcaagctcgctggggggacactagaagcaccgtggcctgggattccatctggagctgtccgcaggcaccagccccagcctcccaccacgctcactgcctggcttggaaaagttaagaagcccctcaggaagagaatcgaggctaagttcctctgcgccgagggccccgagcatatccgccaaggctcagctgcagtgccaggcggaggaggaagatccagaaattgtgaacaatgtttgatttagtagcgtgacttgcctttccctttaaaaacatcttttacaaatctgtcttggaataaagtctattttctgccttttggtttttaaaaaaaaaaaaaaaaaaaaaaaacaaaaacagaaaaacaaagaaaacaaaacaaaacacacacaacccaccaacacaaacgaaacaagaacaacaaggggggcccccaaaaaaagacaccaggagagaggagcacgaatgggaaagaaacaacagaaacggagacagagagggcaacaagagagaaagcaaaaagaaaggagaggagccgagcacacaaagagacaacacgccgcagagcagcggacgcggcagggccggcaccagacaagaagagaaaaaaaggagaagagaacaaaggcggggcccacgcccgacgcgcaacgaggcgacggggga

SEQ ID NO: 518880 - DNA, 1783 bp, Homo sapiens
  misc_feature (1286)..(1286): n is a, c, g, or t
gcgcaggatccggagtgaccgtaggcaggcatggcgacccagccggcatgtgcatggtcttgaagccactcatttccaactagagggaactggtcatgcaggacgcggttgtgatcgtgatggattctaaccaagaccaggagctcgtcaagatcctgcgagacagtaacgggccggcatagaccgaatggacgtcgcgcagcatcagacctcgcgacgccctgcgattggtgtccccattgccggacccaatcggtgcagcctgtgccccacagggtacagggtgagcacatcacgacacagggtgggcgcagcacgagacccggcaggctttccagcagccagtgagcgtagccttccagaggctggggctcggccaatttcaacagagaaggactgggtagggtcccctgagcacactattactggactagtatatcgtagtgggggaatcgcggaaggggaacgtgccgagactagcaaaggtttcccagcgagccaggtacccatggcctatggggccaaacgggttgtcgacgcctgtcgctttggaacatgtgacgaatacctcggccattccactaaacagcggttcgacttacccgtacattttcccaccgcaaggggaaaaggtccccccttcaggggaacgcgcacccaacaaggaaaaaggggtggcacgtaacctaaggatttccgtagaccgttggacgcagcaatagcctttgcacataggctagtggcaccaccacgccgagtgcgtagtagcccggtgaacacagggattctaggtggcaccgcggtttcccggagaaaaccgggtcattcattagaaagaacacggcgaacgaacaaaggcctccaggaaaggatcacatcacaccctggaacgggacacaggcatgaaatggacaatttttggcgaacaaaggccggctttgccagccattacggttccgttcgccgggctagttgggagccccctggttgggctaccaaagcagccaccccgaggcattcgtatcgggaggcaaataaccggggtgcgcaaaacgacagaggaggccccacagggaggaaaggggcctgagcacagcaacacaacggggcattgggtatggacacacacaggaacaacaacacacactttaacgcagtggccccagttcacctttggtggggaggaacaattttatggggagcacatccaccgtgtgacagtgggcagaagaacacagagcagacgcacgatgagacacgcacaaacacctcaagcgagagggcancaaacctcattgaggagcagagggcgttgcgtagacaaatgacaacaacacaggagggtaacaagaaccacgatgggtgcacgaaggcgggccaaactcaacgggagggattactccggagcaacacacacgaatatgatcggtgggtccacaacagccgtggcaaaaacacgacggacgagaaacccccaatagagggagagacacgagcataaaggcaggacaaagacaccacggataaaaccgcagtacagagcagacacagtgagaacaacagagaaaggaaagcaagacaaggagaacagggaccagagatcagagacaaagacacagcagatcagcgacagaagagcacatcgacaacgagagacgaaagagactgtaaaaacagacaacacagcccgcgaacagatagccaaagaacgatgcaaaagacacaagacagacacagacagaccaagcagcagacagagagaagacagctcaagaaggaaaaa

SEQ ID NO: 518881 - DNA, 852 bp, Homo sapiens
aaaaaagtccaaagtttttaaaaactgaaacatttataaagtaaaaacttaacagtaagctaagtttaatatattattaaagaaaaaaaattgtttttgagatgggatctcgcttgtgcccagatgggagtgcaaggcactaccatggctcactgcaccttcaacctcctggctcaaatgatcctctcacctcagcctcccagtcctcagctgggactgcaggtgtgcgccaccatgcctggctaattttgtattttttgtagagatggggtttgccgcgctccccggactggtcttgaactcctggactcaagtgatctgccgacctcagcatcccaaagtgctgggattgcaggagtgagccaccatgcccagccaagaaaaattgttttaaatttagtgtagcctaagtgttcagtgtttataaagtttataaagtctccagtagtgtacaataatgtcctaggccctcacattcactcatcattcacctccgactcacccagagcaacttccagtcctgtaagccccattcatggttaagtgccctatacaggtgtaccagttttggccttttatacgtgtgttttttattgtaccttctctatgtttagatatagtttcagatactcaaaatacttagcactgtgttataaactggcctacagtattccagtacagtaaacctgcttgtacaggtttgtgggcttaaaaagtaatagggtatatcatatagactatgcttagttagtatgttacaccatctaggtgtttagcgttacaccattcccggttctggagtacattccgggggtccccacggcaggtttctctgaacttttcgggctggga

SEQ ID NO: 518882 - DNA, 2342 bp, Homo sapiens
  misc_feature (582)..(582): n is a, c, g, or t
  misc_feature (588)..(589): n is a, c, g, or t
  misc_feature (591)..(592): n is a, c, g, or t
  misc_feature (600)..(600): n is a, c, g, or t
  misc_feature (604)..(604): n is a, c, g, or t
ggccagaggctgttgaggcgcggaactggaggatggcgctggtggctgttggtgtgctggggctcggttgtggcggcggctgagcgggcctggggctggtggcgagggcactggactggctgtgcgtggctgctcccggaccgtcgcgaagcggcagaagccgaggcggaggtgcccgtggtccagtacgtgtggcgagcgcgctgtccggccgatcgggtcttcgtgtggggcttcatcttctcgcggtggctgctgggcagtgccttcctttgtggtgcccagctctcgaggactcccgggtgccccgttgccggcagctccagacgcagacctgtgagtgatccagacccgtgcctctatcgtctggagctggatcaaaagatttcatctgctgtcttgcagtgtatggattcacatttgctgtcctctaagactgcggatgttaagaaagtcttgggcgtgatgggactcaacaaggattctcagcttgtgatttacacaggagccgtgaaagataatacgaggggctactgagtatgtgttggagcccgttcagccgtctctcttgcctctggacangacctnngnngaccacgngtcngcaggtctcctgcggccgagctcactctcttgtgttgactgacagggaaggagtcttcagcatgggaaacaattcttatgggcaatgtggaagaaaggtggtcgaaaatgaaatttacagtgaaagtcacagagtccacaggatgcaggacttcgatggccaggtggtccaggtcgcctgtggtcaggatcatagtctgttcctgacggataaaggagaagtctattcttgtggatggggtgctgatgggcaaacaggtctgggtcactacaatatcaccagctcgcccaccaagctgggtggagacctggcgggagtgaacgttatccaagttgccacctacggtgattgctgcctggccgtgtccgccgacggaggactttttggttggggaaactcggagtacctgcagctggcctctgtcactgactccacacaggtgaatgtgccccgctgcttacacttctcaggagtggggaaggtgcgacaggctgcatgcggtggcacgggctgtgcagtgttaaacggagaaggacatgtttttgtctggggctatggaattcttgggaaaggtccaaacctagtggaaagtgccgtccctgaaatgattccacccactctctttggcttgacggagttcaacccagaaatccaggtttcccgcatccgatgtggactcagccactttgctgcactgaccaacaaaggagagctgtttgtatggggcaagaacatccgagggtgcctgggaatcggtcgcctggaggaccagtatttcccatggagggtgacgatgcctggggagcctgtggacgtggcatgtggcgtggaccacatggtgaccctggccaagtcattcatctaaacctccctcacctgcttgggcggccccgtcccgggaaccactggcactccttggcagaggccagcgcgtggccagccccccggggttcttggatggtggtggcggaggaccctgcgtgcagtgtgacgctctgtcctgaatcccttagcgggtacctaccaggaggatcagggcaaggtccctctccagctgcaggtgaggcctgcggaactcagcttggatggcagcctttggtgggccgctgtggcccgcacgtctctgttctctccaagtaacatgcgacggtgtctggtgtcacgtctcgcctgagaagcccgtcttaggaaagcttagcttgaacacagtgctcgggaggtttctgctctgtctgtcatggcagtctcttggtttgtgtctggccaaggccatgcgtgtgcctcggaccgagccccagcttaggcgagggagtcaggctggcttcggccctcggttttcattcaggccaccctgctcatggcccttcctggccgcctgccacaccgcaagctcgctggggggacactagaagcaccgtggcctgggattccatctggagctgtccgcaggcaccagccccagcctcccaccacgctcactgcctggcttggaaaagttaagaagcccctcaggaagagaatcgaggctaagttcctctgcgccgagggccccgagcatatccgccaaggctcagctgcagtgccaggcggaggaggaagatccagaaattgtgaacaatgtttgatttagtagcgtgacttgcctttccctttaaaaacatcttttacaatcctttggcgtcccctttaaaaagacaccctaaaagggggggctattttttttttgccctggccccct

SEQ ID NO: 518883 - DNA, 2252 bp, Homo sapiens
  misc_feature (582)..(582): n is a, c, g, or t
  misc_feature (588)..(589): n is a, c, g, or t
  misc_feature (591)..(592): n is a, c, g, or t
  misc_feature (600)..(600): n is a, c, g, or t
  misc_feature (604)..(604): n is a, c, g, or t
ggccagaggctgttgaggcgcggaactggaggatggcgctggtggctgttggtgtgctggggctcggttgtggcggcggctgagcgggcctggggctggtggcgagggcactggactggctgtgcgtggctgctcccggaccgtcgcgaagcggcagaagccgaggcggaggtgcccgtggtccagtacgtgtggcgagcgcgctgtccggccgatcgggtcttcgtgtggggcttcatcttctcgcggtggctgctgggcagtgccttcctttgtggtgcccagctctcgaggactcccgggtgccccgttgccggcagctccagacgcagacctgtgagtgatccagacccgtgcctctatcgtctggagctggatcaaaagatttcatctgctgtcttgcagtgtatggattcacatttgctgtcctctaagactgcggatgttaagaaagtcttgggcgtgatgggactcaacaaggattctcagcttgtgatttacacaggagccgtgaaagataatacgaggggctactgagtatgtgttggagcccgttcagccgtctctcttgcctctggacangacctnngnngaccacgngtcngcaggtctcctgcggccgagctcactctcttgtgttgactgacagggaaggagtcttcagcatgggaaacaattcttatgggcaatgtggaagaaaggtggtcgaaaatgaaatttacagtgaaagtcacagagtccacaggatgcaggacttcgatggccaggtggtccaggtcgcctgtggtcaggatcatagtctgttcctgacggataaaggagaagtctattcttgtggatggggtgctgatgggcaaacaggtctgggtcactacaatatcaccagctcgcccaccaagctgggtggagacctggcgggagtgaacgttatccaagttgccacctacggtgattgctgcctggccgtgtccgccgacggaggactttttggttggggaaactcggagtacctgcagctggcctctgtcactgactccacacaggtgaatgtgccccgctgcttacacttctcaggagtggggaaggtgcgacaggctgcatgcggtggcacgggctgtgcagtgttaaacggagaaggacatgtttttgtctggggctatggaattcttgggaaaggtccaaacctagtggaaagtgccgtccctgaaatgattccacccactctctttggcttgacggagttcaacccagaaatccaggtttcccgcatccgatgtggactcagccactttgctgcactgaccaacaaaggagagctgtttgtatggggcaagaacatccgagggtgcctgggaatcggtcgcctggaggaccagtatttcccatggagggtgacgatgcctggggagcctgtggacgtggcatgtggcgtggaccacatggtgaccctggccaagtcattcatctaaacctccctcacctgcttgggcggccccgtcccgggaaccactggcactccttggcagaggccagcgcgtggccagccccccggggttcttggatggtggtggcggaggaccctgcgtgcagtgtgacgctctgtcctgaatcccttagcgggtacctaccaggaggatcagggcaaggtccctctccagctgcaggtgaggcctgcggaactcagcttggatggcagcctttggtgggccgctgtggcccgcacgtctctgttctctccaagtaacatgcgacggtgtctggtgtcacgtctcgcctgagaagcccgtcttaggaaagcttagcttgaacacagtgctcgggaggtttctgctctgtctgtcatggcagtctcttggtttgtgtctggccaaggccatgcgtgtgcctccctgctcatggcccttcctggccgcctgccacaccgcaagctcgctggggggacactagaagcaccgtggcctgggattccatctggagctgtccgcaggcaccagccccagcctcccaccacgctcactgcctggcttggaaaagttaagaagcccctcaggaagagaatcgaggctaagttcctctgcgccgagggccccgagcatatccgccaaggctcagctgcagtgccaggcggaggaggaagatccagaaattgtgaacaatgtttgatttagtagcgtgacttgcctttccctttaaaaacatcttttacaaatctgtcttggaataaagtctattttctgccttttggtttttaa

SEQ ID NO: 518884 - DNA, 341 bp, Homo sapiens
agtggcttcttgatgatggcggtggaggtggtggttgtagtgtgagggatcccctttaggttatttgggggtatatgtcccctgcttgaaccctgaaggccaggtaatgagccatggccattgtccccagctgaggaccaggtgtctctaaaaacccaaacatcctggagagtatgcgagaacctaccaagaaaaacagtctcattactcatatacagcaggcaaagagacagaaaattaactgaaaagcagtttagagactgggggaggccggatctctagagccatcctgctgagtgccctgtgtgtaagtcctaataaactcacctactcaccaaaaa

SEQ ID NO: 518885 - DNA, 444 bp, Homo sapiens
tatggaagatggactggaacaaggacccagccagttaaggaggcttagaatgctgggagcctgacctctgcctgtggtatcacctctgcctgtgataacagacaaaaccaggaagtgtatttactaaaaagaataaacagtgctcggtgaatggtgagaggaccagagaggaaatgggaataagtaataggcatgtggccagcagaaaaaggagccaatatataagaaagcaacaagtaaactgctcccctcgatggcagtgggaagcctgctgggatggtgggggatcaggaaacttctctagccctggaacactgagagagacagaagtgatcactgctgtgttggaactggggaggggtggggaccaagtgaccgcagatcagaagtcactgaatatcaacgccatggagagagagctggctctttcgttaagagttgcct

SEQ ID NO: 518886 - DNA, 760 bp, Homo sapiens
atcagctgccagcaccgctagaataaagcaggccgaagaaggtggaaggagcagaacttgctgagtctttctggccttcgtcttcctttcgtgctggagcttcctgccctcgaacatcagactccaagttcttcaggttttgaactcttggacttacaccagcggcttgccacatggtctcaggccttcaactacagactgaaggataccctgttggcttccctacttttgcggttttgggactcagactggcttccttgctcctcagtttgcagttggcctatcgtgggacttcaccttgtgatcatgacatctccaagaacttcgttcactgaagtcttaaacccctcacagtgacccatgaggattggaatcagcttctttcaaactcttactattgttgatattttgatcgcttcctatgaatcgtgaatattttaatgacatctaaaatgtgactcctggccgggcacagtggttcacgcctataatcccagcaccttggtaggtcaaggcgagaggatcactttgaggttagaagtttgagaccaacctgaccaacatggtgaaacccctgtctctactaaaaatagtaaaaattagctgggcgtggtggagaatgcctgtaatttgagctatatgggatactcagccaggagaatcgcctgaacctgggaggtggagattgcaggagccgagatcgcgccatgcactccagctgggtaacacagtgaggactccacctcaaacttaatacctc

SEQ ID NO: 518887 - DNA, 124 bp, Homo sapiens
ttgaggactcccagtgaactatttataaggtctaatcagtgattatttttccagctccgtgttgctctaaggaattatttcacacacggaccatctttagctagtttccccagtgtggagagag

SEQ ID NO: 518888 - DNA, 402 bp, Homo sapiens
tcatttataaagtcagcaggatggtctctcaaccaccctgtggtggtgtctaacaaatttatcttgtcatgctcaatgtgtttggcagcacaccgatcggctgggtgctgaaccgcctctctgtaattgtagcatcaaaatgacaacagcagcagagcagcgaatcttgcacatgcccacagcatgtctgtgacaatactccaacaagtaataattagctttttttctcctggcgcctacagtacctgtctaactaaagagttcccaaagtggagggaaaggccatagaatccaggtgtcattcagagccagtccttgctgaaatgtggtcttccagtggaagcacctgtattattgagaggcaaaagtgttgggtgccaagtaacaccaggactagagaga

SEQ ID NO: 518889 - DNA, 441 bp, Homo sapiens
  misc_feature (191)..(191): n is a, c, g, or t
  misc_feature (324)..(324): n is a, c, g, or t
  misc_feature (326)..(326): n is a, c, g, or t
  misc_feature (331)..(331): n is a, c, g, or t
  misc_feature (339)..(339): n is a, c, g, or t
  misc_feature (342)..(342): n is a, c, g, or t
  misc_feature (346)..(346): n is a, c, g, or t
  misc_feature (349)..(350): n is a, c, g, or t
aattggtacctaatttgtgtactcagcaaagccggtgttagttataggtgttaggactctagatcgcacacagacactgtgcgtgggtttgatggggaatgattacaggctggtcgagtcctcctcactgacatcatgtctcatcgacttcccctgttttgaatttgtatcccgtaaatggacagagaganacgcagggttctgccctgggagaatgacagccacagcgctgggtgccgtcaggcggcttcgtgtgcagttagcgtttcacaaactgagaagagtataaaaaagcccaaaccccaaagatttcttatttcaagngnctaantctagaancanagangannagggatataagagctcccctctccacacgacgagagggccctccatgcagggcagctcgcccgccgcctctccggaaggcagcaggttcac

SEQ ID NO: 518890 - DNA, 320 bp, Homo sapiens
aggataaacagacgacgcggagaaccccttttgctaaaaacgctagtacatgaggtaaaaatggggcgcatctaaaaataataagagctacctatggcaaactgacagccaatatcatattgaatgggcaaaaactggaagcattccctttgaaaacgggcacaagacagggatgccctctctcaccactcctattcaacatagtgggggaagatctggccagggcaattaggcaggagaaggaaataaagggtattcaattaggaaaagaggaagtcaaattgtccctgtttgcagatgacatgactgtatatctagaa

SEQ ID NO: 518891 - DNA, 293 bp, Homo sapiens
tatagaggatcccgtcttcttaccctgggttgggaactaggacgaaacaggtgaagcccagaagagaagtaaacacatcctgcagttggaagacagggaggttctagggaacatcaaatgagaatggccaataagtgaaatctgggatctcgtcttagcacaatgtaagccttttctcttcctcataacaagtgcacatcagatgagtcgactcaggatcgcggtagagatagcgatggcgatgtcgtcatcatggtcataagtgtggcctgtgtgcgatggtcatctgcgag

SEQ ID NO: 518892 - DNA, 294 bp, Homo sapiens
ggaggccccaacatgcacctgtgcagccaggacttgagggagcacagtgtggtagaaagcgtggatgccaggcggtcagaagaacttggttgagtctgtctttactgacaggcgttgtcccagggagcaaaatgcacactgtgagctctagtttattcaaatgtaagcaaaggatgatcgaacctgtgccatcttcacaggtttgtgtcaggaccagatgggttgaagtagatgaaagtattatctaaattataaaataccccatcattagtaaaaagagcacgcacttgcata

SEQ ID NO: 518893 - DNA, 1043 bp, Homo sapiens
aataaggctaggtacgaggctgggtgttgaatcggccgagggaaaatacaaaatagggggcaggcacagtggctcatgcctgtaatgccagcacttgggaggccgaggcgggcagatcacgaggtcaggagtttcagaccaatatggtgaaaccccgtctctactaaaattacaaaaaaaattatccaggcgtggtggtgcacgcctgtgatcccagctactcgggaggctggggcgggagaatcacttgaacccaggaggcagaggtggagtgagctgagatcgcgccaccgcactccagcctgggcaacagagcgagactgcatctcaaacaaaaacaagaacaaaaacaaacataaagtggcacagaaaagggaccaagtttaagggaaagggttttaaatgtaatgagacttgcatagttaaggaaaaaaagaggaaaaaaaggaaaaattcccttaaaggggggggggggcccccaaggcctaaagtcccagctttaaggggggctgagggtagaaggggatggaaggacgcctcaggagtccggaagaccagcctggggcaaggggggcggaaacccccggctcttactaaacgaaaattaagctggggttgggggcgcagggccgccgggtagccccagggtaccggggaaacactggcggcccggaaaattgtggaccctgggaagtggggaggtggccggggtgagatcacaccaatgggaccctccaccttcaaggagaatggtgggaccgtggagtggcgttcgcggaggtggggaatcacccaaggactcccgcggggaggggagacggtgccaaaaacaacagagaaaaaattctctcaccggggagggacaaaaaaactcccataacgcttcaccggaaggtgaggactgacccaaaggagtgcaggggggcggccaaggacacacggattcaggactatacggaacgccaccggcgcagaaaggggaagcaaggaggagaacagcggtagcaggagacaagaaggccacggcccgacggcgaaccggt

SEQ ID NO: 518894 - DNA, 1089 bp, Homo sapiens
  misc_feature (51)..(51): n is a, c, g, or t
tgtgtttactccactcaagtcgtggttaagatatgcagtctttcgaggagntctcacaggtggaaattggacgcggcgtgaaacattcctccctcgttgccaatcttccacttacacgaagtgtatatttaccaatctccttgccgcttgggacggtccggtgctccaatgtctttctcggtccctgcaagtaaccggctcgaagtcctctagaggttcagtcgtaaccaacgccctcactgtggaggtccttgcttcccctacatggggcctccatggtgtccatcggcccccaaggtttgctggacaaagctgttctacccccttaggttgctttgggtggtggccaccccttgtgtggcccacaggcacgtgctcctggccaaagtcaccattcatcaaccggggttcctcctctcaaacaatctatatccaatgtctagccccgtgctctatgtaatgggccaggccccacctttctggggaaggccaaggaggacatcgggcaaatatacgggtgcgcattgggtcctgggggcttgcttcctcgcgatcctccgcgtattttacgtgcctcagcctctgtcgacagtgggccttggaccgttaccctctccgaacaatctctcccagttgctccctggctgcccagcgcccatctctgaccataacgacctgatatctttgaggagaggaggcaagggagcgatttagcgggcagaaaggttgagaaagcattatcggctcgggtctcggtgttcgttgcccttcgccgagacgggtcatgtagctgttccagtggtggcacaccagcggcaaggcaaaggggccactacctatgcacgtgcgcccatggtaaaggtggacccgctgccattgtaccacgcacgccctggccatgttccctgctcccacaggaatagaatgggagggagcgtccagaaactttccatcccaaaggcagtctccgtggttgaagctagactggatattttgcctctaagcgctctgacgcccttgtccctctttgagggaggggagctatgctaggacatccaacctgcagggactcgggtggcctgcgctaga

SEQ ID NO: 518895 - DNA, 201 bp, Homo sapiens
  misc_feature (97)..(97): n is a, c, g, or t
  misc_feature (118)..(118): n is a, c, g, or t
  misc_feature (130)..(130): n is a, c, g, or t
  misc_feature (162)..(162): n is a, c, g, or t
cagccaacatggcggcggaacgggcgcgggagcagcaacagtcgcaggagatgatggaggaagaacatgagctgcctgtggacatggaaaccatcancctggacagagatgcagaggntgttgatttgantcactatcgcatagggaagattgaaggatttnaggtactgaagaaagtgaagactctctgcctccgccaaa

SEQ ID NO: 518896 - DNA, 206 bp, Homo sapiens
ccaagatcacgccactgcactccagcctggaaggcagagagagactccgtttcaaaaaagaaaagaattctgggtttgaatcctgcctctccgtctgctagggataatgatttagggcaagttgcttgagctctaatgggcctctgtattcacgtctgtatgatagaggtggtatagtgttccaatgtctttgtggtttgtaaaag

SEQ ID NO: 518897 - DNA, 282 bp, Homo sapiens
tacgttaatatgactagctaacacaatagcttgctagtagagctacctctttacggacaccagttatactccctaatagcccatgtcgaaggccccatcgctgtgtcaatcgtacttgccggagtactcttcaaactagggcggctatagtatactccgcctcacactcattctcaagcccctaacaaaacacattgcctaccccttccttgtactatccctattaggcataattataacccgctccatctgcctcccacaaacagacaggtgcagcgtaga

SEQ ID NO: 518898 - DNA, 453 bp, Homo sapiens
  misc_feature (104)..(104): n is a, c, g, or t
atctagaggatcgcctatgttctcgatccgttacaaaccataagagaataaagagaaataactaaatgcaattagaatcctgaaacagaaaaaggacatcaggngtctctccttccagcacagtacgagggcagagtaggacgtgtagtgctgggagtcatggcaggaaaagcatttagaaagtttcttaggcctgtaatcccaacattttgggaggcaaaggtgggtggatcacttgaggtcgggagttcgtgaccagcctgaccaacatggtgaaaccccgtctctaataaaaatacaaaaaatagctgggcatagtggcgcatgcctgtaattccagctacttgggaggctgaggcaggagaattgcttgaacccaggaggcggaggttgcagtgagctgagatggtgccactgcactccagcctgggtgacagagtaagactccgtctc

SEQ ID NO: 518899 - DNA, 139 bp, Homo sapiens
ccccctggatttggttgagggctcaggacacaggcccagccccccccaggggcctccacaggccgttgcataacagcgatacagtacttaagtgtttgtgtagccaaccaaagaataaatgattcatggttttttttta

SEQ ID NO: 518900 - DNA, 346 bp, Homo sapiens
tccccgcccagggtttgcatttacgacaaggagagagcgaccacgcaccgttaagtccaggcggctattattgggggacatggggctacacgatggcggctggactggaattgacttcctgacctgagatgatccacctgcctcagcttcccaaagggctggaattacaggcgggagccaccatgcccagccccaggaattccttcttaagcatccttaacaaacagttaaccttgacatcacttgcttaccgttgatgataggcacctcattactgcaggaaagggcctttttctaatgcttaatagttggggatattcacttttaaaaaacctttgaattttga

SEQ ID NO: 518901 - DNA, 522 bp, Homo sapiens
tctcatccttctgaatcctctgtcaaactggtatattttccttcaacttttcaatcgttcttgctcttatattcctctagtcctctggcgaacttgctctgttcttgtccttcctttcttccagttccatgttagattcttctacaagttgctctcgtgcctcaacttgggccaggaagtctatgccagcaagaataactctgctactccaggtgagataatttatccatgctaaagactgatgctcttgtatgggctttaggaagatctttcccccgttcctctaattcagctctctccttgtttcttatcgtctacttccatgtcgagctttgtatcgagtgctttcctgtccgcatcactttgtgtttgcttttgaatcatcgtgtgtggggagactgtcgggattccccttctttttctccttgtctctccatgttctccggacttaacctctttatcctcatcttgctctgacccactgatatcagaggctgagatttcctctccttcttcaagctt

SEQ ID NO: 518902 - DNA, 378 bp, Homo sapiens
gaccccggggtccgcccaggggtccgccccgggggccgcctaaatttagactttgccttgggttgggaatttaaatgataggcccctttttttttaaaacccaaaaaaaaataatgaacccccggggatttgtagggtggggggtttttcccttttttccaggggggaggggtcctaaaaccttttccctttgaaggggtttgcaggggtagggggggggtttgtttccaaggttgtttggggtttcataccccccccaatttactccccaatttaaacccgggggggggggcaaacccccaaacgggtttcccttttttttcggggatttgggggtttttcaaagggttttttttttttaagcgggaattttcccca

SEQ ID NO: 518903 - DNA, 456 bp, Homo sapiens
  misc_feature (17)..(17): n is a, c, g, or t
  misc_feature (47)..(47): n is a, c, g, or t
  misc_feature (246)..(246): n is a, c, g, or t
  misc_feature (451)..(451): n is a, c, g, or t
gaactttcacctccccnggttaaaattaaacccctaaaaatttcaancctttttggaaattaggggtaaattggaattattttcctggatttcctataaattatttattatcatactcatacttggtcaggcctctgggcccaagcctgcatgtatacatccagatggcctgaaataactgaagaatcacaaaagaagtgaaaatggccagttcctgccttaactggtgacattaccttgtgaaantccttctcctggctcagaagctcccccgctgagcaccttgtgacccccgtccctgcccaccagagaacaaccccctttgactgtaattgtccactacccacccaaatcctataaaacagccccacccctgtctcccttcactgactcctttttcagactcagcctgcctgcacccaggtgaaataaacagccttgttgctcaacntaaat

SEQ ID NO: 518904 - DNA, 120 bp, Homo sapiens
acgatcagcacgtaccagccacattgattgtggcaattacatcacattcccccagtgatacagccaggagatcccaaataaattcttaaaacagtcttatgactctttaaggtcagaaat

SEQ ID NO: 518905 - DNA, 198 bp, Homo sapiens
catgtgtccgcctctggtctctgtgttctctgccctgcgcagttgttcatcctctgtcgctctgccatgtaccgtagctatcgggagccgcgattgtgcttagtggacagcattcttcaaacatggcctcttttcaacttttgtttcgtaggctttatttttcagcgcctctttcggttcacagcaaaattgagtgaa

SEQ ID NO: 518906 - DNA, 794 bp, Homo sapiens
tcctccatttacctttttaaagggggtctcaaaatcctggggacaaattttggggccaagtggttcccattaaaaaagtcactggtatttaaaaaatctaataacttaaaactggccacacgcaacaaaagagaaaaccaaagtggggcccacaaaacattctccctttccttctggagggtgtacacagatggctattggtgtagtcattacccaggtctttcaatctactaaatcttaatgtgggccacattggaaacacaacatgttctggaaaccgttcttccacccatctggattaaagatgggggggtggcgcaggtgttatcaagggcgataataatcctttaagcgcctatctgagagctattctggggcaggatctgggtggaaccttggccagctccagcagcgccttcttggtccactggtttcggatggtaccccaccgaaatttgggtcggtccacatattcagcgaacagcaagagggacccaagagggggatagccggaagaagctctcaaccacactgtgggctgtgccaggacccatatcaccaaggggcagcatccaccaacaactctcaaagaaattacggcggcctctctctcaagcgtataaccagaaagggggggacaaaaacctttcctaacaagctcagaacaaatctgcagtgcaaggtagaagcccggttcaggaacacaaaatacagggggcaaaacccggggacaaaataggcggaggggcaggaaaacaccgagcacagtgaaaccgctgtccagcgggggcacg

SEQ ID NO: 518907 - DNA, 125 bp, Homo sapiens
tgaggaaaaacaacggtacggatcgtgtaagcggatgacagtaagcatgacgtagcttgtgaaggccggcccacgtgccatcccagggagtcaagaggccccaatgggtttttacttgtttctcg

SEQ ID NO: 518908 - DNA, 670 bp, Homo sapiens
acgctgatctccagacagatgtactcaagaacatcaggtgcattctacctattctggctatagacagagtagttagaaggcaagtaattaaccatagagcagactttgaagaaaatgagattctttgaatttgagacaaagtgctgaaaagtagctctggataatgtatttaggagacataggaaatggctcaacaggaagggtgaaatagccttaccagtctggcctctttaaatttgtttcaagcctgtttcccttcactgatacaaatcttactaactctgcaccttccacagaccctttgttatgtgcagctgtttttgtttgtttttatgaaattcacttgaaacgtcattggacttgaatttatacagtaaaaaatcaattaactagattcttaaattttctcttccactttaaatgaagacacctaacggtttgaaaccttctggctctgaggagaggaagagggtccccagatacaggtttcaattccttaccatttagtctggttccattgatcaggggttcagttttctcaccttaaaataagaggattagaacagataatttctaaaattatttttaccaccccttttctcttttctttctttaattcctgtggcgttctctgcagtttatatgtccctaattttatgaaatacttaag

SEQ ID NO: 518909 - DNA, 313 bp, Homo sapiens
atgatctagaggatccctccctcagctggaacaagagtgagactctatctcaaaaaaaaaaacaaaacaaaaaacaggggaaattaaaccccagccaaaagtgtgtggggttcatctataataagaagcggccctatagttccctccaaaaccattttaaaaacaccccctaaatatttattaatataggcgcgtgcataccttataaattattttattccaaaaagggccccttgaaattccggctaaaagggtcctgtggtaccaggggggccattcaccttcagagagacgcgcttttttttcttggacc

SEQ ID NO: 518910 - DNA, 127 bp, Homo sapiens
ataggatctaacctcaaggaagagacgtgctcccaccaggcagctccagctgttacctgagatagtgaagtgcagcgtcaggagacgattatttaaaccatgcgccttggttttaaatcgttcattc

SEQ ID NO: 518911 - DNA, 502 bp, Homo sapiens
  misc_feature (78)..(78): n is a, c, g, or t
  misc_feature (213)..(213): n is a, c, g, or t
  misc_feature (257)..(258): n is a, c, g, or t
  misc_feature (300)..(300): n is a, c, g, or t
  misc_feature (308)..(308): n is a, c, g, or t
  misc_feature (355)..(355): n is a, c, g, or t
  misc_feature (360)..(360): n is a, c, g, or t
  misc_feature (384)..(384): n is a, c, g, or t
  misc_feature (392)..(392): n is a, c, g, or t
  misc_feature (397)..(397): n is a, c, g, or t
  misc_feature (416)..(416): n is a, c, g, or t
  misc_feature (433)..(433): n is a, c, g, or t
  misc_feature (448)..(448): n is a, c, g, or t
  misc_feature (453)..(453): n is a, c, g, or t
  misc_feature (466)..(466): n is a, c, g, or t
  misc_feature (469)..(469): n is a, c, g, or t
  misc_feature (472)..(472): n is a, c, g, or t
  misc_feature (476)..(476): n is a, c, g, or t
  misc_feature (481)..(481): n is a, c, g, or t
tcagggctttttcaaatggacgccagaggccccaggactccaaaccatgggctctcacctcggcctctcctttggggntgggccctgccagtctctccttcgagctttcccggcacacgtgctttggcctccaggtccgattcctcagggtggccttcaggccattcggcaatgccaacccccccaagtgggtgggacacctaaaccccaacnacgcctatgtcatttggattttaggctcccccaacgaggacccnncggccaaggtggcagtttgttccacgggaggacagttgtttnttttccancctcctggccttcggactttgaatttgggcaggaaaagtcctcagtnccaanaccaggagggggcaatgggcccancctttttntggtnttttatgcaggaagggctncagtgggtcagaacttncaaacccaacttttnttttnagaaactggctgnccnatntttnaaaanaaagtgccctgaaggaagcca

SEQ ID NO: 518912 - DNA, 913 bp, Homo sapiens
catttttctactaaaacaaacacagtttactttaggagagactgcaactagaatcaaaatttgaaactggaagatcttgtttaaaagggttaagttgaggcaagaggaaagccctttctctctcttataaataaggcacaacctcatcggggagctaccagactaggtcatctgtcatggtgaaagaaggagaagacatcgtttttatatttcaggaaattttacataagatgataggaaagcacattctatgctatggtctgaggcaggttactgttatgggggcgatggtgttgaatcgtgaaagggctgcagctgatggtgagtactagaataattatccagttgcatgccatactctcatcatctgccagtgtaaccctgtacatagtatagaaaagcaattagacatagcactatgtggatttaatagtatataaatgtgacattcaatgcaaaacttgtattatatgatattctacaaattcgactatgcgttataccagtataagactagacatgtctggagagcctaataaatgttcagcagactgaggttagttcaccaacagtcttacacaacgcccttgggcccagagcacccatagagaagttattcaggccgggctggagtgacatcacctgtaggacgctttataaaaggtctgaagcccagttacatcctcagacctgagctacaacgcaaatctctggggctcgaaaaccgaagcatgcggaagttgggtaaaacgctacctgagggtcattgcaatgtgcggccaaaagttgagaactactggctagggattagccacgcaggacctgaacctgggcaggaaatctgaggtggtatgtaatctcaggctaaacaagtagacaaaaaacatcaattggcgtgaactaagaacagaag

SEQ ID NO: 518913 - DNA, 148 bp, Homo sapiens
gttggaaggcggttgcagtgcgcttcaatgagcaagggaccaaatgatccggtcaacccaggacgtatttactccagttgcagtggcagcctatgaaccggaggttccagcaaactctagtacctagctctgccggagagggcggatg

SEQ ID NO: 518914 - DNA, 1124 bp, Homo sapiens
  misc_feature (680)..(680): n is a, c, g, or t
  misc_feature (684)..(684): n is a, c, g, or t
gggtccaggcagccgggtcgggccgcgggcccagtgtggggatgcacgcgccgcggggtgggagctggcgccatcgccaaccaagaaacttgcacgtaggccaagtataaggagctgagggacggtcttgaggtgaggaccacgggtacggcgccaggatgtcaaagcagctgggacatgttcaagaccaaccttggaggaatttgcacagctaaacacatggcaggagatccggaaggactccatgcagttccagtgttgcagttccgaggatcactgtgtgcgaaccacttgtgcgtggcagtccagctggctcgtctggagacatgggagtgtctgcggtctggagatggctggtgcgtgggggacgttctagttagcgaactaggtgtctcaacagttactgcgacagtgtgcctgggcgctgcaagcatcgggacatggacggtcattgaatagagcatttgcgcaggacagctacagtcagagcagggtgtgtgcatacgggaatggtggcagaagtattcgcacgcgacggattgtcagctcaagagatgagcctgactcgaggagcctatcacacgaaagctaaaacggcaactgtgtgtcgaccctggggccttttctggggcgatccgagtcgcgcatgttagtgcgtcggagtccaccgtgtcacgccntcantttcgagcgttcctggggtgttcccgagacagtggaacgtcgtctagattgatttgtggagttcgaccaacccgaattgggtgtcatagctaggcgtggggcaagaaggacagaaatggtcgtaaccgatgggaactgcgttccaagggtggtaaggactacacaccaggcgccaggtacctgtcacacatgggtggaagcagcccggagacgcaaggcgacgaaaacagaggttgggctagagaaaaccactcctgcgttaagaagggaaaagggggcttggggccgttgtggtggggacctttaccatgggctcgctcgaagagggaaatggccgcgaacataacttggggtttgaccaagcatacttccttccatttgaacctccttaggatcccaagggaagacttgaccacggctggagggagcgcccgaaggac

SEQ ID NO: 518915 - DNA, 394 bp, Homo sapiens
acagccctgaatgggctaccttcgggctttatctctggcttctgttcctaccagattaaggtaatctctaaggtttcaccatatagaagggtattatctgccatgtagggaatgaaagatgcactttttctaaaatcaccaaagtctttaaacctaccttagccactggcacctaaagccacaaagccttacacatggatttcctcttcacaacttgaggttccctgtacgccatttataagacgggtctcttaaaaaggcacctgtaaaacttaatatatatcagcatcctctgtcactatctgcagtctccatctctgtccagcacacgaggtgctctataaggaaggggtctcagacagtgagcaaaggtcctcgtgccgaattcctgcag

SEQ ID NO: 518916 - DNA, 492 bp, Homo sapiens
catatgtagaaagctgaaactggatcccttccttacaccttatacaaaaatcaattcaagatggattaaaaaacgtggcggtggggggcagttccaagatggccgaattggaacagctccagtctacagctcccagtgtaagctatgcagaagacaggtgatttctgcatttccaactgaggtaccaggttcatctcactggggcttgttggacagtgggtgcagcccaccgagcgtgagccgaagcagggcgaggcatcacctcacctgggaagcacaaggggtcagggaattccctttcctagccaagggaagctgtgacagatggcacctggaaaatcgggtcactcccaccctaatactgcgcttttccaagggtcttagcaaagggcacatcaacagattatatcctgtgcatgactcggagggtaccatgtccatggagcctcgctcattgctgagatctcagacagcactaagcaacatgagtta

SEQ ID NO: 518917 - DNA, 158 bp, Homo sapiens
acagggatattgttgcttctaggttctctcagctgacagtggaagaaaatacttgacctaaagatctacaatggcttgttcaaattagaagaatgttacatgtatatgggttattcattttggcatttgtaacatgcaaaagaataggaaaacaaccc

SEQ ID NO: 518918 - DNA, 330 bp, Homo sapiens
acgcttcaaagtaactattaagagattcacatttgttgggtcctgctcagagcccagaaggacaacagccaagtgtttgggttgcacgtaagggacataaatatataggaagctcacatctctgttttcattcattcttgcttgaggctgtcatgaatcctctggatatccaccagaatgctcatataagtcagtgcatactcttacctgaggtgctttctcttgctcctggcctgagtcacattgcttggaactatggggtggggattaggaagtgagaggttcgaaccgtttctgcctcatggccaagactttgaatggcgtctccgt

SEQ ID NO: 518919 - DNA, 505 bp, Homo sapiens
  misc_feature (146)..(146): n is a, c, g, or t
  misc_feature (159)..(159): n is a, c, g, or t
  misc_feature (177)..(177): n is a, c, g, or t
  misc_feature (240)..(240): n is a, c, g, or t
  misc_feature (252)..(253): n is a, c, g, or t
  misc_feature (256)..(256): n is a, c, g, or t
  misc_feature (259)..(259): n is a, c, g, or t
tatagcaagtagctttacagtacagatcttacaattaagtttgctttgttaaagtgtgtaccattttttctgttggagtaagacaaaaatgtttgacataggttccctagggtacacttgctctagctactttaaaggccactgtngcaagtctacatnttatgctgaatctgcatnctgtcaggcacccatagaaagacctcagtacatgcttgcactctccttgctccctttttccantttcttatgcanntcnttngttgtaatacagaaagcagcatttttaaatgtccgtgttaagaattggccgctggtaccaactcacctctatttggtcagtgtcatagttggaagatttggtttgtgatttcagagaaagcagaaggtacattttgcgaaataagtgtttcagaataaagataatctcacttttaagtgatccattttaaaatttgtaattcaagtaaagttgggggtggttaaacataacgaaacagacaaaaga

SEQ ID NO: 518920 - DNA, 675 bp, Homo sapiens
cggacccccctgttctatccacttacagactttacttcgtgtttcattcttcagcactcagagttctgtgcctaccaaaactatcctcctctgaaaggtgcaaaccatattaaaattgtgctgggcattataacttgtattgaaaagccaaatgcttactacttgagcatattcagagttagtaggaagagactgcctggtgatacacatcaagtttatgtacggggttgattactgaaccctatctcaatgaaaatgaggaaatgaggagtgaccattgtttggataacgcggtgcttcccagaatgcttatagtggttcattcttcccatgaatacacgcaatcctctgaaatcctgatgtgaccttggcatgatttaccaatagcctcttttacatttattttccaagatccagatgctgttctctagtgtgtttgctgagtgtgcaataatatggatcatttattttgaagcagtacttcattacaacactttcttcacagggctttccaaaggaagaaagggctaattatagaaaagaatcttgtctaccatttgtgagggaatatttttgtctgtagatggttggattattttcacattagggaggttcaaataagaagaaagtgctgacgttttctctcctctccaagtatgtggtggtggtcctgca

SEQ ID NO: 518921 - DNA, 147 bp, Homo sapiens
ggatctccatacaagagctgtaatgttcttgtacaccggcttctccaccggcactctgttgtagtacggattgcagtccttccccaagaacgtcaaattccaccacgtgttggcaaccatcggcctccgggttgcagctggacgtgc

SEQ ID NO: 518922 - DNA, 740 bp, Homo sapiens
tagctaggtgagcctggagtaaatcggccgaggctcagcgtcctgttagccgaaggtctgtttcctgctgtgaaatgtcttcctggactggcttcggaccaaccccgacctcatcatcgtgtgtgcgcgagctctcaaagtctgtggaaccgcctgtctgtgttgctgaatctgttgcctgctgctggtgaactccaggagtctggcctggccttgtgtcctgaggtccaagatcttcttgaatggttgtgaactgcctgacctcccctctagccttcgtgctcccatgaggacatggctcttcgtaacctgcccccgctccgagctgcccacatgacgctttaactttgacacggatcggcccctgcatcagcaccttagaggagtcagtggtgcgccatctgcgtgcatccgcagacttagtgtcataatcaatcagcccgacctgacaagggcagacatacctacaggtatcaaccacagaggttggcagtcttcggtcagacattgacaccagtcgtgagcaggagagcctgctgcatcaggcccaggcacagttccgaatggcacagtgaggaagctcgtcggaacaggctcatgagagacatgtgctcagctacgacttcagctcgaagtgtctcagctggagtggcagcctagaacagccaaggcccagtcagcatgtctccctacctcgtccctgacacccaggccctctgcaccatctccctgtcatccgc

SEQ ID NO: 518923 - DNA, 385 bp, Homo sapiens
tgtttgttctgctctcttcatataactagttggcctccccttggcatccccgtaagcatcatatttgtgatcaccttactgtgatgttccatcagcccagtttatgtggcaggtgtctcaggcctattatcacccatcatcatgcttgcaattttccccatcctccatgatccatgcccaacagtatttggtttcgcccgttaagccattctgttttttgttctctatccgcggacctccccattgttacatgtatgggaggacagccagttattagcccttttcccttctttggcccagtagctgccgccttaagcttcccgtcaatcttaatcctaagccagactatctccctaattgaaaccaaaattccctaatgggccta

SEQ ID NO: 518924 - DNA, 156 bp, Homo sapiens
  misc_feature (8)..(8): n is a, c, g, or t
  misc_feature (85)..(85): n is a, c, g, or t
aacagggnctggagcaaaataggaaataacatctttctaaagttaggcttagaaggtctaatccagaactagagagtttctttgngcggaacagagctgattgatacctgggtgctagaccaccatttacaggtatagccaagaaaacagggtata

SEQ ID NO: 518925 - DNA, 393 bp, Homo sapiens
agggaccttatctatctaattcatagctgtagccctagcacctagcacaatgtctggtacataataggtgctcaattaatgtttgttgaatgaatgaaggagcatctagtgttatcactaaagaaagattagaacccagacatgatgttttctcctcactgctgatcttcaggaaattgtgtcatcagatagctgccttttgagtcaatgccagccagtacttgtaaaagagcttcaaaatgtagaacctacaggatctgacttggattcctagggaatgactccagtatacccaagagggagacaaaagaggtacttgacattaagagtttacgtggaaagcttttggaaaatattttaaaaatattaacaattttatttaaattattaaat

SEQ ID NO: 518926 - DNA, 269 bp, Homo sapiens
agcaaagcaaacgactattgtactcggtcctttcccagcttggtgggcggcatatgcctgatgcagggtgatcgtgacagggaagatgttaccagtattacatcctgggttgtgcagacacgacagtatctggaaagagttgacgccgaaaatcgggaaatcagccagaaaaaccagcgtctgactcggctttacaatgcgctcagcctgtgcaaccagtctatcgtgcgcagcagctctgagcaggagctgtttgagccagtacggcg

SEQ ID NO: 518927 - DNA, 165 bp, Homo sapiens
gagcgccagccctacccataaccacaacgtctcaactcacaagatatacggctaccgactcccacagccccgcaatatcttcttgtcctagtgcgattaaacggcgtattccatcagccaaaacttgatatcaaggctggcttcggttcttgttaacacgattgg

SEQ ID NO: 518928 - DNA, 291 bp, Homo sapiens
  misc_feature (136)..(136): n is a, c, g, or t
gaccctggccccacacccctgctccaccagccgtaactagagctttccttggacaagagactcgtttcagtaacttttccctgataagagaccctgaccatagacgggttctggctggtttacagagattgcaccntcatgtgccttcatgtcctgaaagtactttttgaggtataccacctaattgtaatacgcttacatgctgccttcaccccaaggtgaacatgggtcatatgtaacatgcatgtttatccagcacacgtgtccgaataaacatgcatgtatattccg

SEQ ID NO: 518929 - DNA, 230 bp, Homo sapiens
tgtcgtcgctagctaagagaaataaatccagtcgatttttaaagggagatgaggagtgttccagagatagtgacactgagagatatgttttaggaaataaagaccaaagcaagctacttagctaaggaaaactttgtggaacaggtggactttgagacgattgggacaagaaaaggggaagatctttggtgaagaacaaaggtcaaatgagcctgagaaagatggaggtg

SEQ ID NO: 518930 - DNA, 110 bp, Homo sapiens
tgtaagccatgcttttttccttcttttcttttctttctctctctcctctctctcaccttttttccctttctctctctctctttattatctatctgggatggagtctcacc

SEQ ID NO: 518931 - DNA, 265 bp, Homo sapiens
atttgtactaagaagtccactccaaaccatttttttaatgtgtgggcagaaagatcacttgaattttaaactggcatttctctcccgggattttcttatatacccaggataatgatgttaattaccattacagtagacatacttttgagggaagtcatagtatatacaatcttatttgtatatcatagaaattgtttctgatctatagaaactatggagcttttcctacacttcttaggcttatgcagaccactgttcttattgg

SEQ ID NO: 518932 - DNA, 890 bp, Homo sapiens
  misc_feature (50)..(50): n is a, c, g, or t
gctggcgtgcgcggagacgcagagtcttgagcagcgcggcaggcaccatngttcgctgactgcagctccgtctgtgctgcggcctgcatttccgcggtccgttctagtgtgagatcgtggtaagctaccgggctggccggcagtgttcagtgtccgttgctgcagccaagactagtaagcatgatccgctcgactggagatcgaggcggagaaccattactggctgagcatgccctacatgacccgggagcaggagctgcggctacgccgtctggtgctgcaggagggaggccttcgaggccttacacaggcgtgcgcacatttccaagttccccccgtcatagattcattggctggacgcagctcgagcatctcgaatgtcaccatgaaatggtcctaatcctgatgtcgtcagccttggacttttatggatcacggagctgaaccatctttacctggtccttggagacctgagaaaagctgtagcttgtgtgaacaatgagccttttggaccaggtctttcattaaaagacagaacgaaaccattgaagtagtctgcgaattatcggaaatattctagagctctaagatccccccaaatacttgaggagtctagattgcgtgtccttgtggttttcatttagtcctgatacggaagatagggaatttcctcgagtcacaagatgcatattttgacaggaaaagcttgcaatacgagaccacagatgaatttgaaggtcttgtgctttagagtattgagaattactttgattgggggggcgtatatcattgcaacaataaggtttggcttaacctttaagcaattggccccaataaattggaaaggagaatattgagcttttcaggttaaaacatatgtcctaaaaacg

SEQ ID NO: 518933 - DNA, 162 bp, Homo sapiens
agaaacttcaacctggactttgtataatacgttaggtttatttctaacttctaaaatatgtaccgattgggaaacacccagaaaaaatatgagttcaaatgcataaattacagacataaattatcctgtgatctgcgagcagtatccctccccgggatacag

SEQ ID NO: 518934 - DNA, 821 bp, Homo sapiens
gggcctttgtgcggtttccaacatgccggagtggacggtgaggtcgcggctcataacgggggcttctcatacaggcggattatcaagagtgtgtccatgaaagacctcccctaaaacgagtgtgttttgggacaacattacttgggccaaacccaagaagtgcccagtgtccccatttaagaggggaccgtaaagattacaccacaacaccacacgtcttgaatattaacccgcaacaacagccaacacacaacaaaagtagagccacacaacaaaccaccactgtttgtgttgggggaccagccactacggtcgccccacagtagagaagaagaggggttttttaaaaagcacgcaccactctgacggtagtggtgggaccgtcaggtggtaccccaccatgtgaaggaggtaactataggtgccgacaacaacgtgtgttgcccacaaaacaagcggtgtggtttccccaagcaggagagaagaaccaccccggggggggccaacaagtaacacaaacaatggtggcgcacggggagctatctccctcaccccacacgcagaaaataaaaaaaacgaccggccgctgtgggggggcgaggaccaaacaccgcgaggaggcgttctccacaggagacacaaaacattctccacgaagaagatgggaggaacccacagaagggagcgcgacccacaaaacaaacgaggggggggggaccatactaaacacaaccaacgaagcggggggcaaccaccccacaaaaagaagcggagaacgcgccgacagatgaattaacactaacaaaataatataagcacct

SEQ ID NO: 518935 - DNA, 284 bp, Homo sapiens
ggaaaaatacgataagtacacatcagagatcatcacattccagacaaactggagtctccatcacagatcatagagactcatggacacccatggacaatcacttgtagtgatttgtctttgatcgacaacaatcccttcagccttatgaactccatgcagtgatagtccttgtatctcacattcattttcccacaggagattctgaatacacatcttaagatgtacttcctttgcatttcctggtacttcaaatgtgattgtcacaatactctctactctggaaa

SEQ ID NO: 518936 - DNA, 365 bp, Homo sapiens
ggtagaattcttcattctttctccagttccactgcttgcttgaccagccttaaagacacacatacacatttttgtctgggcgcgctggctcacacctggtaatcccaacactttgggaggccaaggcaggcggatcacttgaggtcaggagtttgagaccagcctgaccaacgtggagaaaccccgtctctcctaaaaatacaaaattagccaggcatggtggcacacgcctgtaatcccagctactggagaggctgaggcaggagaatcgcttgaacccgggaggcggaggttgccgtgagctgagatcgcgccactgcactccagcctgggcaacaagagcgaaactctgtctcaaaaaaaaa

SEQ ID NO: 518937 - DNA, 368 bp, Homo sapiens
accgcgcccagccttaaaagccaggtttttagccccttctcccacactggctaacaactgggggggtttgggccaatgcctacctttttttggaccttaatttccccaactggattttgcaagggtcgaattcaatgaattttgacctttttttcaaggttgacaatttgggaatctggactggttatttttttaaaggacaagttgaaattcaaaagggaaaaacccttttaaaatcttagatgcctgggttgaaattatgagaaaatgtaaaaaaaagaatggccctgctaaggaactgggggggcagcccatgtgcctaaaaaagaaaaattaattggggctggaaagtatttgccctgggggta

SEQ ID NO: 518938 - DNA, 255 bp, Homo sapiens
tatggactgctcagtgggttacgatccggcgttgccgtgagctgtggtgcaggtggcagacgcggcgtcggatcctgcgttgctgtggctctggtgtaggccggcagctacagctccaattagacccctagccttggaacttccatatgccgcaggtgcagccctgaagagacagaagaccaaaaaaaaaaaaggaagcagcaaatgtttcactgtaattctaggttctaaggtgacccggaagaagaaaatgat

SEQ ID NO: 518939 - DNA, 211 bp, Homo sapiens
tcaaaccacgcattgtagctcttttagagttcaaaagaagaaatgggctcgaataatcttttgaaacgctaatgtagtctccgccggatagtgcttaaaactattcctctggattcaccatctgttgacatggaaatgtgagagaaaaagtactatgtgaacattgaccaagccagcatttgttttttgcttccttatgtacaatgtgata

SEQ ID NO: 518940 - DNA, 143 bp, Homo sapiens
agagggtgtaaatctcgcgccgggccgtacccatatccgcccccacgagccggctcgtcgggtggctcgtggtggtggtgcatggcgcttggtggagcgatttgtctggttaattccgataacgcaacgagccacacgaagag

SEQ ID NO: 518941 - DNA, 215 bp, Homo sapiens
cttccccaacgaatttattggttgaggaccaaggaatcttgtcaaggaggtaaagaaggcaaacaagattaggaggttgttcctttggtaaataaagaaggtcaagaagaatttacaaataatgacctttccaccaattcagggttttattgggtatacctcaaggaatattttacctcaatgcaattttacctcttattgcctttaatgccttt

SEQ ID NO: 518942 - DNA, 445 bp, Homo sapiens
ccagactgtcacaggttgtcatgtttcattcatattcattgccacaggtctctccccatcacccaggcctttcttcagctctcctcatgtcaatgtctcctctccagtgatgaaaccgaggccaacatcattaccgcctgctatcaatcattcagcctgtactgcgtgctatatcagtctctcctgtctacttgacttatcgcatgttccatttcctattttgagatctgttttagactcaccgcgtgtgcactacctgtgccttcccctgatttatactcctcagtccgtctcagcctgacgaagttgtccatcatagtatcccactagactgagccctttcggtcacattcctgttcgaacatttcaattgaccatgctaagccacagagggagaccccgatctctacgcaattattctgttatatattagctgggggtggtg

SEQ ID NO: 518943 - DNA, 432 bp, Homo sapiens
agtagggcggaggaaacaatcagatatgcagagggatgactgagttctgtcctgtgtccctatgcagctgcagaagataagccatcaatttacattatcatggtgaacttcagcagaactgctttagggtgaagatcttggggaccacaaggaattttcttgtgggcaaaatgtgaggaagttacgtagcttttcatctttgtagctgtcttatttgggaaccaaaatgggagttaggtatgtgtaatccagtttccagcttggcttttacctttggcttagtgaatttggggtcccaagatttcttttccttatatttttgtaacaagagttacagaggtatctcatggacttcattaaaaggttgaacaaacagaccttaaaagagcagataccaggctgggtgacaagagagaaactccatctcaaaaa

SEQ ID NO: 518944 - DNA, 162 bp, Homo sapiens
cacacacatacatgctcactctccctgtacacacacattctccctgtaaacacacactctccctgttcacacaccaagcacacacacaccacacacacgctcacacacgcaaacacccaccaaaaaccaaaaaggttcaaattagaacctttcaccccacac

SEQ ID NO: 518945 - DNA, 96 bp, Homo sapiens
  misc_feature (9)..(9): n is a, c, g, or t
ggcggagancgtccagaacgccgtcaccactcttccggtgaaggcaaaatacgcgtcgacagccagccaaccgaggaggccagttgccacaccgcc

SEQ ID NO: 518946 - DNA, 202 bp, Homo sapiens
  misc_feature (164)..(164): n is a, c, g, or t
gatgtccgcgtgccatgtatgttggacgctgacaaatatttctgtgagtgttgcagagagctgctggacacagtggataactatgcctgtcctccagctggatatagttgtggttggtacttccgcctggaacagcgtggaatgccttgattgatgcagaaaanaaaattaagacttggcccaagaaattgcttttaaaaat

SEQ ID NO: 518947 - DNA, 155 bp, Homo sapiens
atgcgtctcagctcccatcaggttgatgcttctctaggtcttaggagtgatagtcatcgctgtcgaggtgtcatacaccaggttgttgcgaacatactcctagagaaacgcacggggtaccagcccacgactcgaattgaagcagcagggagatg

SEQ ID NO: 518948 - DNA, 134 bp, Homo sapiens
gggaccacacataaggaaatcacaagggtattgattgggggaagtgataagtgtccatgaatcttcacattatgtcagagctgttagtccaagaggacagctctttgcataggaaaaaccttgtagagaagtaa

SEQ ID NO: 518949 - DNA, 370 bp, Homo sapiens
tcgataaggccaacaaaagtatggcaccgtgcatttgtttctagtaaggcctcaggaagcgttccagtgatggctgaagggtgaggggagagtaagtgtgtcaccgtaggtgagacagggagcaagagggaagggaggaagtgccagacctgttaaactaccagccctcacatgaactagaagagcgaggactccctgatcaccatggggaggccaccaagccattcatgagggatccgctcccatgacccaaacaccccccaccaggccccgcctccagcattgggggttacatttcaacatgagatttggaggggacgaacatccaaactgtatgcccagaggtccaggtacctcctccctgtccttg

SEQ ID NO: 518950 - DNA, 230 bp, Homo sapiens
gacattgatggctgctgactgcttagggtggtggttgctgaaggttgggtgacagtggtaatttcagtgatttttgttttgttttgtttctttaagagacagggtctcattctgtcactcaggatggagtgcagtggtacgatcatagttcactgcagccttgacttcccgggctcaagcaatccttctgcctcagtctttccagtagctaggaatatcaagaatcggca

SEQ ID NO: 518951 - DNA, 414 bp, Homo sapiens
  misc_feature (95)..(96): n is a, c, g, or t
  misc_feature (98)..(98): n is a, c, g, or t
  misc_feature (226)..(226): n is a, c, g, or t
tgtgtcttgctggaattggcctcactgtccaagctgagtgcttgcctgtgaggaagcactgcttgggcagaaataaggatggcaggattgcctgnngntagaaatagtgatcatgggatcagaggcagcaggtgaatgtggggtgtgaatatttttgaaggcttggaatgaaatgattcttccagactttagaggatttgtgtctgcagattcttctctaaggttngtgtctcacatagtgagagaatcagccagccagggaaatgggacaggattttgtctctttccccatttcctcttctaatgaactcctacctatgctttatgactgcattaaggggtcacctcctccaggaagcattccctcatctccttacgctggttctgagtgtgtcgttcctgcttgatcccctc

SEQ ID NO: 518952 - DNA, 1439 bp, Homo sapiens
  misc_feature (769)..(769): n is a, c, g, or t
tggggtggaatgttttttaaagtatcttctatgtatgtgggtatggaggaacataattcctggtatttataatagtggtgtatcaacaaaacgtgggtggtgaaataaatggataagcttatatgggcctatgggggctatctcaccccgagggctaaagaaaccctataaataaaactattgggtgtccttttttaaaaaaatatggtagtcctataataaatattatcactatatatttatataagggtgcactatgtgtggatggtgcctaatatacacatatggcgtatgcgcgaatgtgtgtgtggtatggtactcaataccaaggggggtcatacccagggtatatatcctactcacagagtctccacacactatatgtgcggactattatctctatgtgagagtgtgtacagcagaaaccctatgtgtcgccacactaatctctctctctctctctctctacacgctctactatatgtgtgagagatagtgtgtgacacacataaaactatcacactgtgtgtgtaacactcttgggtgagtgtcactactctctctgtgtgtgtcgcccgagagacactgtgtgaggtgaagagtagtagtctctgtgagtggtgtcctcacaactctgagactcctctcacacagagaaagtgagagagcgtctgagagagagacgcccccctcccgggccgtgtggaggagcgtgtgctgtggtcaccaccacgggtcgtcttctcatcagacgggtggtggtcgaggncgcgcctctcttctgtggggaagtgtctctagggtcgccccgtcctgtggtgttggaaggagttggtgttgtcacaacgaaggatatgtggttgtggttattgcggagagagttgctatcatctactactcctcctcattctgctgtggggcggtggaggagtactctcaggggggagagcttctctgccgtggggtggtgctctcctgcgggtggagtccccattagaagaagaatcgttgtgtaaagagccctgctgtcatgcagagacgactatgctcagggtaggagaagaacagacaacggcgctggtcgtacaaaaccaaaagaagcgggcccaagattagaaaacaaggagggacacaagagaggacgaacagaagggtcctcactggtgagacgaacaacagacttatgacgagccaatgaatcgagcggaccgaaaaaccacctgagctatcaccccaaccatggatcgacgttgggtgggcgcccaccacaacgaaagaggaaggaaagacacaataccagcaccatagagagggacagaaaccccaaccaaaaagggaaccacagctatcagaagaaaaacgaaccacataggacacaacaaaacaaacgatcctcacaccacaccaaggaggggggaaagctagtacaaagaacaaac

SEQ ID NO: 518953 - DNA, 1098 bp, Homo sapiens
gtgcgttgaagccggatgaccgcgggtcggccctcagcgaggaccctccgtccccgtgatgccgccggccggagcctgctagcctcttggcggcatgcgccccgcggacaccttgttgccactccgcctcttctcgccctccgagcggagtctcgggctcggtgaccgtcctggtggccattggctcgatacaattgctagtactccaatactgtgtgcagccacgtgtcgaacaatactgagctgcggccatgactatatgcctttggcgtgcgcgtcacaacgaggcatcacctggccacactcagagctcatacccacaggattacgtacaccacgcctttttgctatcatgggtagcaaagtgcctacttaggaccaagctccaattcggaccaatttgaccgtccgtatctccggccggagacttgatgtttgcaaccttggagggaatacagatggaaatgattcacaagggactcgacacatcgtaaggaaatgacaactggagagttatcgatacccaaccacatcgtttcaataggcgatcgccatgggcaaagacaaatagacatcttaccagaaagaacacagaactcgagcggatggatactggacctaagagaaggattaagaagatgccgcgatgcgcgagtcacaccatttgcgaagacgcggagacgacgcactagaacagaggaaccgcaggggacaaagagtgaatcccacaataggggtgagaaaacgaaaaggcgaaggagaacgcacaaacagcaagagaaccgcaaagggcacaaatcacattgggggaagcgacactatgaccatatagcggtcagagttacgagataatacgccaggcgaagttgtccattccgggagatgaccatcagttaccccgctatacacaaaacctgtacacacacacagcaaagaggtaccagtaacgacgatggcaaggacagggcgaaagcttagaggatcgcccacaaccaacatatagagtaacacaaaaaaggggacacgaaaccgacaaacaatggaggagacagcaacaacaagtgtccccccaaaatggaataaacacaccataatagg

SEQ ID NO: 518954 - DNA, 496 bp, Homo sapiens
agaggatcccccggctctgaacttaggatagcagtagcaaattagtgaaagtactaaaagtctctgatagcagaaataatggtgtaagctctctctctctttctcctctctctctctgcctcggctgccagggagggaaggaccccctatccttatgatgactgatttacgttcatgaccgatcccatgctcatgatttggagccctgtgcgtcgctcagatgtgtgctgcaactttgagaagttcctcatatgggccgggggggccgagcctgcctgacgctacagtggcagcctatccgcgaaccatcgaacattgagcgctgacatcaatgcgcctccttgaaatgttgccatctagatgtgaactgctcaagacacagatctcctactccatccagtcctgaggaggcttagggatgcggcatgcctttacaggagacactgctggacctcagcattcccttgataatcagtcccctaagttcagagccagg

SEQ ID NO: 518955 - DNA, 177 bp, Homo sapiens
caaaggtggagtggtcagggcgggctgggcctgggacaggccagaagatgggtcagagtcattctccacacttccaggtctgtagcgcgacgcagtgaggctccgatcccgcccgtaatatgaagtggcagctgcagtaacagcagcagcggctgctgctgcagcagcagatgtggc

SEQ ID NO: 518956 - DNA, 324 bp, Homo sapiens
tatgactgttgcaaatacagaatctattagaaaacagggtcttggaaatgtagaattttggcgcactatgaggaaaaacaagctatctttgtaaagcataattgagtttaatgtaattgttgtaaaaaaaaaagtgtgcttgctctacttaaaattcctcacaatgttgaattttgacctgtattcagaagaattccaaaacaggtcagttaaataaggaaatatagtatttgtcaaaccagtatcagagaaaagttacattaatgtatttgattacttgatctggtatctacttattaatgaataatcaacatttttctagtg

SEQ ID NO: 518957 - DNA, 151 bp, Homo sapiens
  misc_feature (25)..(25): n is a, c, g, or t
  misc_feature (30)..(30): n is a, c, g, or t
  misc_feature (84)..(84): n is a, c, g, or t
  misc_feature (90)..(90): n is a, c, g, or t
agttctccccttggtgggagtaggnggctngtgtcctgcgggggcaactggcaccaccacccaagactgggtaagtgccatttncattgntgaagaaacatcttcccgtaacttaaggttctggaaccttggccggcccagttccagtgca

SEQ ID NO: 518958 - DNA, 373 bp, Homo sapiens
  misc_feature (17)..(17): n is a, c, g, or t
  misc_feature (70)..(70): n is a, c, g, or t
  misc_feature (78)..(78): n is a, c, g, or t
  misc_feature (89)..(89): n is a, c, g, or t
  misc_feature (95)..(95): n is a, c, g, or t
  misc_feature (99)..(99): n is a, c, g, or t
  misc_feature (133)..(133): n is a, c, g, or t
  misc_feature (146)..(146): n is a, c, g, or t
  misc_feature (266)..(266): n is a, c, g, or t
  misc_feature (291)..(291): n is a, c, g, or t
  misc_feature (354)..(354): n is a, c, g, or t
ggccctgcttccggggntcccctctacccctgctttccaacagggtctgacctccagacagtcggttcanagttacangtgctttaggncctccnttgngttcccccaggcccatcccttgcgcagatattcnggggccacctggncaaaccccttgctttttctcattcttggcatccttctttctattgctatgtttgtggatctggggacagagagtagagtctctacctgccagggggaatgggatggaaaggaattgtggntggggggtggggccaagaagggggntggtgatgaggtgccctctattggagccggtcactgcggaatgactcctccacagcaggatcnggctgcagggcacaggggg

SEQ ID NO: 518959 - DNA, 227 bp, Homo sapiens
gctacagactcagaggagggcctgacacagctagtggtggagagaatcccagaacctttcccagatgaagtgatttcaaatacgggaccttgaagttcagtagacggtgactatttccattgtttcacaaggtaggtagatacatgtgtaggctccagatgctgaacaatgcttctggtaaaggcaacagcatgtggtccaggctgtccgaggtgatcagaatatga

SEQ ID NO: 518960 - DNA, 710 bp, Homo sapiens
gccgctccgccgtcgctgtttctctgccggtcgcaatggaatgaagagatctgccgcgctggtcattgacaatgtgctccgtgcatgtgcaaagctggtttttgcttggggacgactgctccccgagccgtgtttccttccatcgtcgtgtgctgccccagacaccatgggcgtcatggtgtggcattggtgccagaaggactcctactgtggtgcgactgatggcccagagcaatgctgtggcatcctgaccctgaagtaccccattgatgcatggcatcgtcaccaacttgggactgacatggatgaagatcttggcaccacaccttctacaacagagctgctgctgtggccccgtgaggagcacccagtgctgctgacctgaggcccccctgaaccccaaggccaacagagagaagatgactcagattatgttttgagaccttcaacatccctggccatgtactgtggccatccagggccgtgctggtccctacatacgcctctgtgggcgcacacttggacataggtcattggactctgggagacggggtcacccacacggtgcccatctacgagggctacgcacctaccccatgcaatcatgcgtctggacctggatggccgggactgactgaatactcatgaagatctcatgaacgaggtaaagttacacacaaaggctaagcgggaatcgtggcgaatcatga

SEQ ID NO: 518961 - DNA, 520 bp, Homo sapiens
gaaggcggagttgtctgtgaccactatgatgacatcgatggcattcctgatgacaaggacaactgcagactggtgccctttcccgaccagaaggactctgacggcgatggtcgaggtgatgcctgcaaagatgattttgaccatgacagtgtgccagacatcgatgacatctgtcctgagaatgttgacatcagtgagaccgacttccgccgattccagatgattcctctggaccccaaagggacatcccaaaatgaccctaactgggttgtacgccatcagggtaaagaactcgtccagactgtcaactgtgatcctggactcgctgtaggttatgatgagtttaatgctgtggacttcagtggcaccttcttcatcaacaccgaaagggacgatgactatgctggatttgtctttggctaccagtccaccagccgcttttatgttgtgatgtggaagcaagtcacccagtcctactgggacaccaaccccacgagggctcagggatactcgggccttt

SEQ ID NO: 518962 - DNA, 188 bp, Homo sapiens
ggggggaaaaaaaaaccccctaaaaaggggggggggggggtttttgaaaaaatcccccttttttttcccggggggggggtttttttttaccccccccccccccgcttggggggggggggggggttttttttttttttgggtttcccccccccccaaaaatttttttttttttttttttttttttcaca

SEQ ID NO: 518963 - DNA, 230 bp, Homo sapiens
agccggcttaagatgaacgaagggatgctctcctggccgctagcgcaaagcctaactagcgatcctctgtaggttggctaacagcggaactaatcaactcccatgggcgatctacagtgccttggctcccacgagagccgtccagtgccggttgtgatgacactgtgtccacagttaaggccaccgccactgctaatctgtgagctccgttcacttaatgccgctagcgc

SEQ ID NO: 518964 - DNA, 910 bp, Homo sapiens
  misc_feature (14)..(15): n is a, c, g, or t
  misc_feature (67)..(67): n is a, c, g, or t
  misc_feature (82)..(82): n is a, c, g, or t
  misc_feature (105)..(105): n is a, c, g, or t
  misc_feature (158)..(158): n is a, c, g, or t
  misc_feature (190)..(190): n is a, c, g, or t
  misc_feature (262)..(263): n is a, c, g, or t
ggcctcctcctgtnncccgcagtcggcgtccagcggctcctgcttgttcgtgtgtgtgtcgttgcanggccttatttcatgnggctcaccgctgaaggttcgacngggcgggtggtacctggtccaccggcgcgggggcagtgattgggccgagcctnatgccctgggtcttttgcagaaaagaggagcngttagttcgttgtgacatgactttgggacggggaacttcaacaggagcttggtaagaggctctctttagctnngctgctaagggtttgcttgacagacaatacagacaggacgacggctggacaaacgcagttgggcccaactaattgcattcagtgcgcagacaggacgagaaggttggtgacagacagcccctcggatgcctctgtggcaagacactagcatgtggtgcgtcaaccaatgctgggaactccccttacacatgggatcctaatcttgtgctaagtctagcacggtttgtgacacagcccatattacatgggattatggtacatttcggattttctgccaggcgtgtgttacagcagtttgcagactatgatgtgtcagattcaggcagttaaggctcgtttggcaaaccagtatatccaggaccaactctacaaactgggatgtggaaggcaggcacaccgatttcttttcaaccaggtccagaacctgggacctgtcctttccatgccttgttgtcttggcccccctctggttcctcgcttagaacccctgggggggggctttaagtccctggttgggaaaggagcggcaaggttgggccccgggggcacaactcgcttcgcgttcccccgcggatgggggcatcccgcaggtgggtcgcccgcgggggccacccctaatgaggccgggcccccatttgtgggcacgc

SEQ ID NO: 518965 - DNA, 666 bp, Homo sapiens
  misc_feature (186)..(186): n is a, c, g, or t
  misc_feature (378)..(378): n is a, c, g, or t
aggctgcagatacagtgaagcaaggtgtgcgaaagcgtagtcatttcctccctacgcccggggagttcgaagtgtccgtgggctggacgagaatcggaactcggagcactgaccgtgacctggcgcatcagccagatgtggctcccacgctgccgaacgactgtagtatcgcgtttactagtgatncaccgggcatccacttgttcaatcaaggcgtgctaactcgactacgttgtgactatccacctacgtactgaactaaccttcttagtggcacaagagacgcgcggtgggtcgcgtcgtaatgtggaggctgacagggcgagcaccatgccgtgacacggagacggcttggagatagatctgttgaagctattngaaccgatgggaccccttcgatcgcgagagatcgtactagatgattccatagagatgggactaatagaccgcggtcccaaccctcgcacagagtgcaatcagtaggcatcccagcattgcagttgaagatgctgcgctgacgaattgcataggtggacttcgatttggttctgtgcttccagagagggagatcaacgactcagagttctttcctgagacatgacgtgtggaagctccggagtttgaactgctacgagcctcggttgccagccagactatctcgtggtg

SEQ ID NO: 518966 - DNA, 309 bp, Homo sapiens
accgcgcccaggctcatctattttcatattaccaatcttctagacaatgatcccggtcatagacaatgatcctggtatatttatgccatatacaatcctttgtaacatatgtattcaagacttacaaagcaagtcaatttttaaatattcagtaaatatagcagaagtggcaaaaaaatagcaaaggggtattggaatactggttttgatgccacccaggggaattataaagcaaatcagggatggttaaatgcaacatcaatccacattggttgtggactttaaggtaaggccaacccgggcccttcc

SEQ ID NO: 518967 - DNA, 92 bp, Homo sapiens
gggccaacatggccgccgccgccgctggagctgaagtgccgccgccgcgggcagccacggggaatccgcccgcatcgccgccctcgccggcc

SEQ ID NO: 518968 - DNA, 123 bp, Homo sapiens
gtcactctagcggatccctgtgctactccacaaacagctcccaaagtgtatgggataacagttgttagccactgcgacggccccagtaatatttaaactagtagacaagtcttggccctaact

SEQ ID NO: 518969 - DNA, 828 bp, Homo sapiens
ttccccaccccgggccggccgccatagccagccctccgtcgacctcttcaccgcaccctcggatgccccaaggccccgccgccgtcagcgcggcgagactacgtggctgtgccgctctcttagtcgccgccatgagaccgcgtccaccttcgcaggtgcgccagaaagtaccaccaggactcagaggccgccatcaaggccgccagatcaaccttggagcctctacgcctcctacgtttacctgtccatgtcttacatactttgaccgcgaatgaatgtgcctttgaaagacttggcaaaattagtttcttcacccaatctcatgaggagagggaaccatgctgagcaaagtgatgaacgctgcagaaaccaaggagggttgcccgcaatcttccttccaggacttattcaaacgaaacccagcaactgtgatgaccctgggagaagcgggcttgaaatgccacatggacgtgtgccttacattttggcaacaccgcactgtgatttcagtcactactgcaacctgcacaacgctgggccactggacaaaaaaatgacccccattgtgtgtgacttcattgtggagacaacatttagcctgacattgagcagtgtggaaatggccatcaacagacatcttgcggtgaccatggttgacccaatttgccgccaaagatgggaaccgcccaaatctggccttggcgggaaatatcctcttttgacacagcacaccctgggagaaccagtgattaatgacacgcttaaggctcgggctaatttccccaataagcgtgggggtgacctccctgggtcaccaaaggcagcctt

SEQ ID NO: 518970 - DNA, 171 bp, Homo sapiens
tggtctgctgagcaggagtagggaaggaggagtacgtgtatgcaaaggttctgctgccccgactgccctcagattcctcgaggctgcacctctgcgggcagctggcggtggctgcaggccaagcccctcacacccgggagatccacacgcgcggtacacacgaaaacccaa

SEQ ID NO: 518971 - DNA, 111 bp, Homo sapiens
tggacagcacaggggaggtggacagcacagaggaggtggacagcacagaggaggtggacagcacgaggagccagtaatggagaaaccctagaaaagatcaccaacagccgt

SEQ ID NO: 518972 - DNA, 108 bp, Homo sapiens
ggtatggaatctatttgccaagtactatgtgactatcattgattgccccagtgctcttggtgaggatgcgctactcagtagacagtcccaccctcacacgaatcttta

SEQ ID NO: 518973 - DNA, 1028 bp, Homo sapiens
atcggccagcttaccttactgcgtcagtagcgggttacgtgattgcaaacgagcaagtttaaaacggagtgggctttgggctgcagagccgcctggcattctgacagctgagcaggaggcagaggtgagagtccaagatggactaaaaatgtcccagcagctgggagcccaacctcggcccaacctcgttgaaaggaggaacattcggtgcagccgtcggaaccttattatttatgaaaggggacagctcacaggattacatttttctaagccaatcctgtgaccatcctccatgaaattctctattttggttgcatgtggtcaaaactgagcctcactgaaacaattgaaaacaaatactcccgacaaatcttaagaatcgttttgaaaatcaaaaggtggggaaaatgttgtggcttctgagctttcttcagcccatattctattattctctgatgttttatggtgtaaaatcatacccattccattatgtattgattgtcaagaaggaagtaggcttttattgctatttttatgtcagtttccatttactgtctcaccacatttattgggttattgcctttgcctttgactcaacaggagctggaagggtaggaatcccaaattctgttgcctaaggcagccagttgtcagaatggactttcctcattttctattatgaggcctgaggaaagacattcagttccaaaggctgtgcctatcctgttaaatagaagagagagggcccggcacggtggctcacgcctgtaatcccagcactttgggaggccgaagggggcgaatcacgaggtcaggagttccagaccagcctggccaacatagtgaaaccccgtgtctactaaagatacaaatattagccgggcgtaatggcgggcgcctgtattcccagctactcgggaggctgaggcaggagaatggcttgaatccgggaggcggaggttgcagtgaaccgaaccgagatcgcgtcgctggactccagcccgggcgacagagtgagactccgtccc

SEQ ID NO: 518974 - DNA, 1656 bp, Homo sapiens
cggctgccattatgcaccgacccccacgagcgccggccctgcctgcccgctattttggttccatctcttctgcatatttatgcttgcctgttacattccctggcctctgagtgtcctttggcagtttccaaagcatttgggcaagaaggagcttgggcagcttcacaacaggtggggacgcgcaggggaggggccgcggccggaccggcagagtttcaagggctggcgcgccggcggactttccacactgtctttcgggactggggttaggagacagcccttggccaccactgtgtccttactttgtcgctttacttggggctggacctcccctttccagctctggcgtgtgaccccgcaacgagcgtggtgtcgagaccaccaccagctggggcggtgggagcgaaggtgccccaggctcggggaaggtggaaaccttttccccgctccccaagtgattgttgcgcgctccggtgaggggacagtggtacctcgatttcccgtgtgccagcttcgggactcagctgtgcttttgtgtctctttgattagcaaaagcaaaacgaattcctccccgaacactaagcttcctggaaacttccctagacctaaacttgagaaccgcatataaatgggccttgagggttctgtcgtcagtagcgggttacgtgattgcaaacgagcaagtttaaaacggagtgggctttgggctgcagagccgcctggcattctgacagctgagcaggaggcagaggtgagagtccaagatggactaaaaatgtcccagcagctgggagcccaacctcggcccaacctcgttgaaaggaggaacattcggtgcagccgtcggaaccttattatttatgaaaggggacagctcacaggattacatttttctaagccaatcctgtgaccatcctccatgaaattctctattttggttgcatgtggtcaaaactgagcctcactgaaacaattgaaaacaaatactcccgacaaatcttaagaatcgttttgaaaatcaaaaggtggggaaaatgttgtggcttctgagctttcttcagcccatattctattattctctgatgttttatggtgtaaaatcatacccattccattatgtattgattgtcaagaaggaagtaggcttttattgctatttttatgtcagtttccatttactgtctcaccacatttattgggttattgcctttgcctttgactcaacaggagctggaagggtaggaatcccaaattctgttgcctaaggcagccagttgtcagaatggactttcctcattttctattatgaggcctgaggaaagacattcagttccaaaggctgtgcctatcctgttaaatagaagagagagggcccggcacggtggctcacgcctgtaatcccagcactttgggaggccgaagggggcgaatcacgaggtcaggagttccagaccagcctggccaacatagtgaaaccccgtgtctactaaagatacaaatattagccgggcgtaatggcgggcgcctgtattcccagctactcgggaggctgaggcaggagaatggcttgaatccgggaggcggaggttgcagtgaaccgaaccgagatcgcgtcgctggactccagcccgggcgacagagtgagactccgtccc

SEQ ID NO: 518975 - DNA, 1471 bp, Homo sapiens
ccccgcatatggcgtttccccgcataaacaacataagcttctgactcttacccccacctgaaccttcaactgcctcggctccagcgccatggcgcccatccaggcaacgttcttcgataaggcgggaaactcggacagatgaacgggccgcaagcagagctcctgggggcagcctcatcaggacactcctgaaaacagacgtgccaagggttgccggtgcccgaagacctgagcgttgagttatgttgctaccacccataacttgacccatacttactcgaacatatcgacccccgggcccagcaaagccatacgaatcacccaaagcaaattgccatgaggcgcccttgccgacccacgtaaaccttggcctacacatacaccgatcgacacctaaaccttgccgtgacgcattatttctacccatctgggtgcggaacgcacatcacacgcccacattgagaccacttcgaattcaaaaaaaggaaaaccatggcccggaggaaggacccacaacaggatagcgaagaatgaggaatccccaatgaaggaggaagcccaaaacattccaaacaaaacgcaaccgcaacacggggccccacttggattcccaatactcatcggagaggagaaaacggaattcccaagcacaaatagcaacacacccacatgggcacatacaggcggaggaccaaacacgacacaaacggactggcgcacaccacacaagatgcccccctcccatggacgccccacagcgcacagacaggcgggcaacccattccagaagtgaacagcccttaacaacgattcgggacaccccccctggccccgagacatacggggagcagagaccaagccaccaccgcccacttaaagccacacagtgcaacccacacacggtaggcgggacacaagggaaccactggggggcgcccaagattcacacaccccgttgacaaccgcccaagcaggagggcaacaacggaatcacagcgaatcccgggacacgccccaacggacaccccaataaaacagcgcggcatacacaacagtccggtaccccaacgcgcacacgcttcaacaacccagacatgcccaacaacacggggcaacacccactggacgaaaaagggacccaacacacgaggggcacatccccaggcttaccaaccacactggcacaaccccccccccataaaacagtggcaaaaaagacgccagccgccttggcgcctacgccaaacgagcacaagggatccacacaaaaccactcatgcgaggaacataacccccctcttggcaggcgccacccacacccacgcaacaaccccaatcaggcaccgcaacacacccccacaccgcccccccccccaaagcacacgcaacaggggagggacacccacccagaacggacgccaacaaaccagcgccatacaccgcaacccccgggccacaccacaaaacaagt

SEQ ID NO: 518976 - DNA, 349 bp, Homo sapiens
ctggctctgtgcagtgtatggccgagtctgtgtggatcggctgtcgcagtggtgaatgactgagagctaagtacacatacgctctgatatagtactcccatgatggcttccagtgacacatgtgctgatagaattctaaacctctggaatttccctgctggcgacttctatggccgttgactgtacagggtaacctgatgccagatgctatgggcgtgatgagacctagagcattgcagcatggaggaaactgtgaggcaccagatcctgtgcttctacaggccatattctgaaaacccctattaggaaaggttggatttggcgtgacttgctttagcaagagtcctgg

SEQ ID NO: 518977 - DNA, 207 bp, Homo sapiens
cccagggtgtgggggccccccgggcccctcccccccccctgggggcttttcccggggcttttttgggggggcccttcaccccttttggggggggggcccccaaattttcgggggcccccccccgggggggggttcctttgccttttgggttttgttgggggcccccccccccggttcctttttggggttttccccccctttttttta

SEQ ID NO: 518978 - DNA, 514 bp, Homo sapiens
taaaaaccccccccaaaaaaggggaaaattaaaaaaattttcaacccctttttaaaaagggccatttgggggggggttttaaacccaagagtgtttttgggtttaagggaaaatattgcggtggggggaaaaacgacaatcggatgagagaatgtgccccccaaatagtgactctgaagcccggggaacacccggggggctacacaaaaatgtgtcacccagaaaacccgcccaggaaagtgtggtgcaggcgacacccagaaagaccactgagcgagggctgtggagagaggagggtctaacacaaaagaaggaccccccacaacaaactgtggtaaaacaagagcaggcggcttgaaacactaaaatgggggccgacggggtggtgttgccaataataaaaacactagtgagtaggccccacagaggattaatgagaaacccccccagagaggccgagaaaaaacagcgagaactttctataaggcggggcgcccctccgagggagataacg

SEQ ID NO: 518979 - DNA, 431 bp, Homo sapiens
ccgcgtggttcttgcgacggagacagtgctgcggaggcattgcgagcgcataagcctgtgctgatgatgaacaagatggaccgcgccctgtggagctgcagtggagcccgaggagctctaacagactttccaggggcatcgtgcagaacgtgaacgtcatcatctccacctacggcgagggcgagagcggccccatgggcaacatcatgatcgatcctgtcctcggtaccgtgggctttgggtctggcctccacgggtgggccttcaccctgaagcagtttgccgagatgtatgtggccaagttcgccgccaagggggagggccagttggggcctgccgagcgggccaagaaagtagaggacatgatgaagaagctgtggggtgacaggtactttgacccagccaacggcaagttctgcaaggcacccacg

SEQ ID NO: 518980 - DNA, 213 bp, Homo sapiens
ctgtcccgctgccactttcctcactgatattgtgaggagggcaaggctcagccgaatttccactaaaaatgccccaggagaataggcaccggctggtttcccaaagggaatgggttttagtgctttctgttttttcttttcctgacagcacaaagaagtaagggcagtttgtggacgggtgttattttaactttctattgtaattgcatgaga

SEQ ID NO: 518981 - DNA, 584 bp, Homo sapiens
tgttacatctatgcattgaaggcatgagactaacaaaacaagaagggcctttatcagacacacacaagcttctgatgacctggattgaagagcagacacaggtgcacacggtgctgtgtacctctcagcaccatgatgatcccaaagcaaaaagtgtgtttgaggtgttgaaagaaaaggctggacctggctgtgatgttggattgactgctagttctgggtggtgtaaacaattcaagaatcgttattcattacataatgggaaagtggtgagtttgtgagtgctgatgtaaaggcagcggaagaattttgggaaactctagataagctgagtctggaggaaaatcacttgccagaacaaattttcaatatggatgaaacctttctattctggaaacagatgcctgaaaggactttgatccatgaggtagaccaaagcaatgccaggcttcaagtcttttagggactggatgacagtcttgcttgggggcaatgttgcaggccacaaattgaacccctttgtgatttggcatgttgagaaccctatgggcttccagcatatcaatacacacacactttgccag

SEQ ID NO: 518982 - DNA, 307 bp, Homo sapiens
ggttggtcgttctacaggttccccccatcacccctggctcatccaccacccctggctaatttttttgtatttttatgtagcagacagtgctttcactcgtgttagccaggatggtctcaatctcctgacctcatgatccacccgtctcggcctcccaaagtgctgggattataggcgtgagctgccgcgcccggctgaagtcactttttcattaaatttttctggttttgaactcctgacctcaaatgatccacccacctctgcctcccaaagtgctgggattacaggcatgagccactgtgcccgg

SEQ ID NO: 518983 - DNA, 321 bp, Homo sapiens
agagaatggccctgggcgttcatcgtgctcaagtcggcagtaacccccgtgtctgcacctttgtctggattcttaatacagatctcaagggccgcctgcccgggtacctcatccaccagagccttcgcgcacaccgatgtttcgaatttgccgtttcaccatgcagacgacgcgagtcgagcgaagcatgggaggcccgaggcgtgaactgtggccccctcccacccctgcgggccagggtcctgtcgccaccacttccagagccagaaagggtgccagttgggcttcgagctgcccacatgggacctgggcccaggctgt

SEQ ID NO: 518984 - DNA, 422 bp, Homo sapiens
catccctcattagaactcccttccattcattcgatacgtaactgatttctattctccattcaaaaccccattctaatatcactctctctgggacgctactctgacttctctgaggcccttccaggctatcatatccttcctgataatggctccttatagcactggccacttatatggaagtggtgcatttgagtctctcccactgcaccatgggtttacaatggaagagtgtgtgtatcattcctctttgtaatcccagctctgtcatcacaagcatggacattcaagcatgtacctggtagttgctcaagctctcatattcatagagcccaaacccaaacctaaaacaagaagcaacagaagaaaataatagaggctcagtctcgaacatccatcagcacaggctaattccttcactaatc

SEQ ID NO: 518985 - DNA, 138 bp, Homo sapiens
cggaagattggactctatctctttttaacagaatttcagcattttaaaaaccaagtgcccgaatgcagagcccacttcctgagaggaccgcgtctccctcctcgaggtgatcaccactgggcaggctgggcacctcca

SEQ ID NO: 518986 - DNA, 222 bp, Homo sapiens
ccgagctcggtaccctcgatagccaataatgacgtagtccgtgggaagcctgtggtttacacttgtatgttgagacgtagatgccgtcgtgaaatggtgaatgggagactcgaagtactctgaggcttgcaggagtggtaaaatagagacccagtaaaagttgtaatgagcagtgcttgaattatttggtcatcggttgttttctatttggcccttatcgag

SEQ ID NO: 518987 - DNA, 189 bp, Homo sapiens
gtagatatggtcctccatggatcaccccagaccagtgtctctgcaatacaaaaacccattcctccctctagaaatggccagaggttgaggcaggagaatcatttgaacccgagaggcgaagtttgcagtgagccgagatggtgccaccgaattcaagcctaggcaacagggtccggagctcgaattcga

SEQ ID NO: 518988 - DNA, 389 bp, Homo sapiens
  misc_feature (128)..(129): n is a, c, g, or t
cagtctcataaaaatatgctttttcagtttttgtcttaaaatatctttatttcatctttttttttggagacagggtctccatctgtcacccaggctggagtgcagtggggcaatttcagttttctctnngcaacccccatcttgtgggtcaagcaattctcttgcctcagcctccccagtagctgggactgtaggggcccgccacccagcccgcttaatttttttgtgttttagtaaaaaggaagttttgccatgttgcccagtgtggtcttgatttcctgagctcaggcagtccccccccctcagcctcccaaagtgctgggattacagatgtgcgcccctgggcccatcttattttcattttttaatggaaatccagtccatcccca

SEQ ID NO: 518989 - DNA, 355 bp, Homo sapiens
  misc_feature (14)..(14): n is a, c, g, or t
  misc_feature (21)..(21): n is a, c, g, or t
  misc_feature (84)..(84): n is a, c, g, or t
  misc_feature (110)..(110): n is a, c, g, or t
  misc_feature (125)..(125): n is a, c, g, or t
attgaagaatgcancttggcnatgttacctacgctagtctcaaaaccccctgggctcaaagcaatcctgctgcctctttctccnaaagtgtggtattacgtgtgtgagcnagcatgcttacctcntttattttaaattattttatttcttgagacagagtcttgctctgtcacccaggctggagtgcagtggtatgatctcggcttactgcaacctccacctcccgggttcaagtgattctcctgcctcaccctcccaaatagctgggattacaggtgcccaccaccatgcctggctaatttttgtagttttaacttttagtagagaccgtgtttcaccatcttggccaggctgg

SEQ ID NO: 518990 - DNA, 888 bp, Homo sapiens
ggcggagctgaccggtggaggttcgaggctctaacggggctttctacaagggattctatcaaatgatgtacatgaaggactcccttacagttgtttctgtgagaataagttggcaaccagaacgccaggtcccatttaatgaagttagattaccagcactcacctgatatatagaaaaggaaacttagtgaaggacgatgaagtagaggtatattcaagagcaaatgaccatagagccatgtgggtggtggcttggctaaatgttcggagtgatgaaaggagaatgttatgtcacttgaatatgctgcttgtgacagctacttacaaatgacaatagtacaacaatttgaagcgtatcttcggtcctgctcgaatgcgaaatatagacaagcttgtcataaggaactaataccttctttaaatgcacagtggatgttcctgaggatttgagtagaaggcagtgtgcgtaactgatataagtgcacatacaacgagttttaagaacacgcagctaggagcatgcatgaactcttctttaaccatccatgaaacaacgacagtctaatgataactgttctgcctagtgaatggctaactgtgatagagagtaaacgatcttaagtgacatgcatttgcgaagtattcggacgaaggttgatgcttatgtccacgaaaactgaaggaggccagttaagccagtttactaattgctcagaaacaacttgcagcaagcttttcatgaggaactcgtcgtgagagaaagatttaatgggcctggcaataggaacacatggtagtaacatccaggcaagctaggaaggttcctggagttaccgccattgagctagatgaacgatactggcacctttcagaatctacgggagacac

SEQ ID NO: 518991 - DNA, 145 bp, Homo sapiens
  misc_feature (20)..(20): n is a, c, g, or t
tgatctagaggatcctcagnctgctccctcttcacatatatatatatatattttttttcaagagtataaatcctccaaaaaaaaaagggaaagtgggttgggattggggcattgtgagctcactacataagcagtgagcaccaaa

SEQ ID NO: 518992 - DNA, 1045 bp, Homo sapiens
  misc_feature (674)..(674): n is a, c, g, or t
ggaagggtgcctgtggaagaagggggcagccctcgacggtggcccttgcagggtaaacacagggacgggccaaccggggggtgagccgggaaggctcaccggacaggcggccaccacctgtctggctacagaacgaacggcaatcattggcgtccccgggtaatgcgggtgggaccccacagggcttcgtcaaggcactggccgcaccagcccccaaggactaccacccaagcccccgtcgccggcacctaggagacccctcagccttccccacaggagggagggagagtggacatcgtggaggattccagagacaaggctcccccaacagtgcgactgaccccggactcagggggccgagagaggcccactcctggtccaaagccagcatcccagctgtaccccgcacgtggacctggggccgttccatccgtggaagatcgtcactgcagatcactggactcaggacctggacagcaagcagatccccacataggacacgaggcagcataggctggggtcccaggtggggccaagaccaggaggtgcggcgtgatcggaacccggccctggcggacggagtacagggtcccaagatcccacactgtatggtcgctggacagtgattctccattctgagccgtgtattcccctctcacctccctcgtccacancgtgggacagggcaggccccatcgctttcctgctgataaccacatggacacatcctgaagtcagcccaggcgtcctgagcatacttggggcacatggacaccatcacaatagtccttcgttccattgcaggtccccatgggtgaaggctttgactgaaaccgagccccccattttgacgtcccattctgcgctcatgccccgttggatgacactgatctgggggcaggggaagagacagggcacagctggccacagggctcagcacactgagcaggctgttccgggccgatggctttagcatcctggacggggagtgtcctgtcagggacagatgtgtcatgcctcatatacagctgccgatccctaccca

SEQ ID NO: 518993 - DNA, 117 bp, Homo sapiens
gcaacacttcgtcacaacgatctgacttcaagaagtgtctggatgccggcgtgtgcagcaacaacttcgtccatcctgatttgacctcaagaagtgtgtggggtttcggcgtgtgca

SEQ ID NO: 518994 - DNA, 316 bp, Homo sapiens
gtttacacacttttactacaagggcattgaagaacaagtgggacaagagcccagacaatgacaatgagatataggagtcaaaggaattgaagagacagtagtataaatgacagataagacaagtcaagaatattcaattcattagtttcctttcaggagacacatcagattactaagacagacctcatacagtccctatggcttcacacagaggatacgttttgagaggctcctcattaggcacttctgttatcatgggcacatcatagagtgtactcacatagcccagatggtatagcctaccactcaggctagc

SEQ ID NO: 518995 - DNA, 875 bp, Homo sapiens
cagcgtgtgttctgtcgcaggtaaaatgtggcccattcgcgcattcgcttggcagtgataattgcaacaagaccgtgggaagccccgttatatgtttggacaaggagttttccctccctaaggggcctctaatactccggcatgtggttgaacggaaattctcggggcgccgccacaggtggtcccccgcggcttaataactactggccaagttcattgttgacgggcctcccgccgcctgctgtttaaaatccagaaatggccgcactttgtcaactcccccatcacggcccgcaaatggcccccctggcacacattgggggccggcgaaaattttccagggccgtatagtggggggccccccccaattgatggtgtatgacatgctggtttgccccggggaacagggtgggcccgcggggttgcatctcccccactttattgggggctgttggcgggtattattccccggatcaccccctggcctgtcgtgccaacacaacaaggccccgttctggcgaggaccgctcttccgccccggcgcgctgtttgggggtcgccgccggcgccccccaggagtgtggagtggttaccccccccccctggcgacggcgcaagcggtctgtgagcgctagttcgccaccaccaacgagtttggagagggggtgtctacgcttgatacagggtccccggggcacaatttttgccccgcaagaatcaaaaaaggggtcttttaaacccactatgccacccaagaaactcgccggtgtgcgcccacactgaacttcatctcatgtgatgttcaccattttgtagagtataaatatagcaatgagatttttccctaaaaaaacatatccagaacgccccacaaa

SEQ ID NO: 518996 - DNA, 181 bp, Homo sapiens
actagacatcgtacacacgacacgtactacgttgtagctcacttccactatgtcctatcaataggagctgtatttgccatcatacggaagcttgcattcactgatttccccatattctcagtgctacatccctacatcaaacctacgctcaaaatccatttcacttatcatattcatccgg

SEQ ID NO: 518997 - DNA, 143 bp, Homo sapiens
  misc_feature (79)..(79): n is a, c, g, or t
gaactcttgtcacatggacttcttgtcatttctcggccgtccgcgcacacaggagacagggcagtgatgctgagcagtngagcaggcctctcgggggtgttccaggtgctcccttctcacttgtattgttaagcatactattt

SEQ ID NO: 518998 - DNA, 377 bp, Homo sapiens
tcccgacgcggactcgacaaacagcagtgagaggcagtcgcgattatagggaacaaaaaaacctaaagtagctaggactgacgaccacaagtcccccacttctctccgacagtcctctgtaagggccaatctgagatttttgtaggctggtatatcactcagtcaacactgggaatacgtgtatcttaagtgcctattatatgtctagcactcagaaggtatattattcgctgtattttacacgctgtattttacttcatcatcacaaggctgatatcatacatgggaaatgtttgacacatgaggaaactgaggccaggcgttggcatgtgctgctctgtgttaccatgtccaatgagctgtcagtggaggtagca

SEQ ID NO: 518999 - DNA, 107 bp, Homo sapiens
atgaagagaggtagggactcatctagaaactcttccctgtcatcttataccgaggcataaatgaactccaccagaggccctgagatcaaagatctcagattctatca

SEQ ID NO: 519000 - DNA, 349 bp, Homo sapiens
tcccattaggtcgcgttctgcgtttttgtgttgctgcttgcagacctggtagctggtttagaattatgtgatgtgcattagagtagattttcgtttagagctgctacatgctacctttgaaaaattacctgcaagctccgactgatctttcaactttcaaagtgattaattacttcaggaacttcttgtggtttctttgtcatttagtgagagcccagccagtctactgtggaaggccatacctccctgaaggttgcctactaagggcaatgttccagtttgttttctctttcagtgtgcttcagtcgcacagttcttcctgtttattctatcatcttttttaccactt

SEQ ID NO: 519001 - DNA, 321 bp, Homo sapiens
  misc_feature (1)..(1): n is a, c, g, or t
  misc_feature (151)..(151): n is a, c, g, or t
nttttttttttcttggttgatttttttattttatttttttagggacagaatctctctatgttgcccaggctggtctccaactcgtgggttcaagcgatcctcctgcctcagtctcccaaagtgctgggatgacaggtgtgggcaaccaccnacgccaaggatctggtttttgaaacgataaataaatttaacaaacctccagcaagaccttgatcccaggaggtcaaggctgcagtgagccgtgcttgtaccactgcactccagcctacggcaacagagcaagacccgcggacagctggagaggccgaggcgctctcgctt

SEQ ID NO: 519002 - DNA, 353 bp, Homo sapiens
gagaatcacttgaacccaggaggcagaggttgcaatgagctgagatcatgccattgcactccagcctgggccacagagtgggaccccgtctccaaaaaagaaaaaaaaaaaaaaggtaaaagatttgcacagtttaagggatgttaaataaataagggtaaaaaaaatgatggggtatatttaattataaacagattttttagctgcccaaaaattactgaaaaaagggaataataaaaaaggctagttggtcccttttaattattttcttgctatagggaagaatgtggatgtgaaacccaagtatttaaagctttttgttcattgcaaaacacctgttcattcaaactttt

SEQ ID NO: 519003 - DNA, 280 bp, Homo sapiens
agcaagagcaggaggattacttgagggtaggagttcaagaccagcttgagcaagacagccagaccctttctctccaaaatcctgtttaaaaaattactgagacatggtggcctttggtcctagatacttgggaggctgaggcaggaggattgcttgagcccaggagctcaagtctacagtgttgtgatcatgcctcagtgcagcgatcatggctcagtgcagcctcaaactcttggggctcaagcagtgctccaaccttcagcctcctggagtagctagg

SEQ ID NO: 519004 - DNA, 555 bp, Homo sapiens
gggacgagcatcctttacattcgtgtaatagaaatacccccaggggtctacatccatgggtcattagcgtcattgtgcagcatttcaggtaccatatcaaccagagcaacatacatgattaagccagcagtaagtgcaaatatccacatagaaacatttgcagcataatgaccaatgaaaattcctgttgccattccaagatacgccagcatggctgagaatgcattataagggagcagccggcttaagggtcatgccagcctttagtagaacagcaaagtcacctaatccatgaggcaactcatgacagaacacagcaacagaagtacttaaaccagttgataagccttcaggtaaaagcagcaccaatggctaggccatcgctgacatggtgcaggccatcacccataagtggcgacgccggcatctttcagctcctcccgagagtagcgctggctgtgactgtgaggatggcggaactggtggtggtgatgatggagaatctcgactgtagccatgatggtggtgattgagatcgtctgactggccgagtgt

SEQ ID NO: 519005 - DNA, 982 bp, Homo sapiens
tgttttattatgattcatcttcagctaatttttagcacagcaagcacagcaacagccatagtgtcctctacaattcaacaacaacttatctctgatatacaaagggatataacatatatacacttaaatagagaaaaagaggttgattgaattggtgcctttgagtgaacccagtttttaaataccgcatgtgtttggttatcgccagtggctttcaagggatgctactatggcatcttgcaccttttactcctctgctttatgaagtttgagttgtatttgtgcatcttaaagtaggttgaggcttgaggctgggctttcagggtttatatagtaaaataggtatggtaatggtataggtaatggtatttctggtacttaaacctgcttgcttcctaccacagattctttattgttcccaaagactacaagaaaaacttttaaaacttggccatttcatctgtttacactcttggccactgattagcagtatttaaatcttgcaagaatatgtggtgctttctttagaaagagaagagtatagcattttctcactgaaaaagtgagagttacgcaatgaagccatgaagggatgctaggatcacttatgggcagtactattataccactactggttctggagccagatgtctactatagtaaggggttccactttaggaatactgggagtgtagggccacttacccgtgtgccctaaataggtagtccaccaatggaaagcacgacgcaaaggagcacatagccactaggttgggggagattacatataacaaagtggaaagtgaattggcaacaatgtgacgattatttgtagacccagtgggatgggtacatgagaatagagaggaacaattttagaatagtaggagatccaagtataacataaatatagaggtggagaacaaaagtatgtgtggggcaaatatagcggaaggagatatgtgcagaagaagaacatatg

SEQ ID NO: 519006 - DNA, 761 bp, Homo sapiens
taaaccccggtcctggggggggtgggggtttaatactaagtggaaatgatttcatttacgggggaaggcccttggtaaattaggccttatttctctgtgtccttccgtacggggaggaatttggaagtgtagatagaacccggaccgggattaccccgggtctggaactcagatcacggtaggactttaatcgttggacacaaacagaacctttaatagcgggctggccaccattggggatgtcctgatccacacatcgaggtctgtaaaccctatggttgatatgggactctagaataggatggccgctgttacccctagggtaactggtcccgtgggccaagtttatgggatcaatggagtatagaagtccgcttggacgggtgaagtctaagcatgtactggctcggaggtggggttctgccccgaggtcgccccaaccgaaattttaaatgcaggttgggaagttaggacctgggggtttggtaggtacggtggcataaagtacatttaaacgcccacagggagtcctccgtcgaccatggcgtgatgctcaagtgcaccagcctactttaacggggacagggtcaatattcacgtggttcaaagtgtcagaagaaaggctgacccctcggggacgccatccaaacaaggtcccaactataagggacaaggagatatgctaccttgaaccggacaggaacccgggcgtaacactggttcctgggccagggagcccaaaagggtcccagaaccgcaaa

SEQ ID NO: 519007 - DNA, 228 bp, Homo sapiens
  misc_feature (36)..(36): n is a, c, g, or t
cttagaggatccggtgttcctttgtctacaaacttntaggagcagtttctgccatgggtcagaagcctggctctcagcaacacagtggctggcacaactatcatggcttccagcttccccccgcccccgatcttcacttcccaatgatggaaactggcccagctgcggaggcttgcttagaaccccttccctgtttagcgtggcactttttttttttttttctttttg

SEQ ID NO: 519008 - DNA, 169 bp, Homo sapiens
acataggatgcaggaactggataaagaaaacacaatcacgtgctagtatgcatacacatatacacacacacccctgagcatcagctcagactgtacatgaatagtatcactgcgcatactcatcataatggaaaaactaccgtgtgtacaccaaggcctgggattaggg

SEQ ID NO: 519009 - DNA, 398 bp, Homo sapiens
  misc_feature (398)..(398): n is a, c, g, or t
tgtaggtgggatgctcgtaaggtgtgtctacgactttgagataatggactcctggccacgccaacccatggcgacattatcaggtttgcgcctctcgctgttgatcaaggaggatgagcttcgagagagcattgagattattaacacagaccatcttggctttctgagggtagccacgctgttttcagtggtccctgggagccagctggagacacggtggcctgggctttattcctaatgtgggcacattccacttccatgagtcttcatatgaacctggcggttgctttgtaacgcaactaaataatgtgatggcatctatattcagttgaagtggtttgatgtgcatgtgtacttcctaaggtgaaatgcatctatatacacgacggctcttcgtn

SEQ ID NO: 519010 - DNA, 988 bp, Homo sapiens
  misc_feature (517)..(517): n is a, c, g, or t
gaacacaaaagtagctgaaagccaggtacaacatacgttagcattggatatatgtagagttcctgtagtagtcacaacaagataaattggtcatgaaagtttgcctagatctatagacttgattacgttaagcgatgttagggtatcgcgatactgcaaatggtagacaatagtgagccccagagtaaatcttcgtgattgttacactggtttatcaagaggatggacttcaaattatggacgagagacggagtctggctctggtcacccaggctggagtgcagtgggcgcaatctcgggtcactgcaagctctgcctcccaagttcatgccattctcctgcctcagcctcccaagtagctggggactacaggcacctggccaccatggcccagctaattctcctattcctttccagtaaagcacgggggtctcaccatggttcacgccaggagggcctcggactctggacctcgggatccggccgacctgggcctcccaaagtggcgtggcacatnaccaggccgtgaagccacgtgcgcccgggcccaagacacgtggaccatctcctccaacaacaaccactcaggcaccatccataccaagtgtgtgcactgagcctctacaggccccggaaactcaccagacaacgcatacggcgagaaattccggacactgaagcgggacactcaaactcagggtggccaatactacgcgtcacattaaagcaaacgggttatattcgccatattcgctcaccgtggagggcggcctctcccgctaacattacggcacattgcctcactcaaaatcgcgggggaacacttgctgtaagggtcccccaagccgttggacaaccacttcaaaacacccctctaaatcaagttgtgaacgcaaaaaacttgctgggatacagagggcaccggtggcatacaacaccgcctcccacaacgcggtccctactttgtcaaccggcggcatatacaggg

SEQ ID NO: 519011 - DNA, 162 bp, Homo sapiens
ctagacccccgttttgcagtgcaagaaacaccgcagagtagcagaatcttccccctcagtgcttgggatctggggtgcagactccactcgctcaggccatggcgaagtagaagccagctgtacagtaccatttccacagcagtcacggcctcttgcttgctt

SEQ ID NO: 519012 - DNA, 1170 bp, Homo sapiens
agtggaggccggagcaggaacaggttgaacagatctaccctcccattagcagagaactactcccaccctggagaccatccgatagaccataaacaatcattcatacaatatacaccatagacaggatgatctccatcataatcttaggggccatcaaatttcagtcacaaaaaaataaatcaaataataaaaaaaccccatgaccaataaccacaataaccaaacaacccctcattcgatctgatccgatccataatacacagaagatcacaaaataaattcactatactacatcccagtcctagctggctggcatcactatactacctaacagaccgacaaacatcaaaacaacaacacatatacttacgaaaccaagaaaagaaagaaaaaagaaacccagtactataccaacacataatcatgaataaattgaggtacaatgaaaagataaaataatcataaataaaatacaagagaatatagaaaataaataatacaaataataaggtaaatataaataaaataagagaaaaaaaagaaaaaaatatgagaaataaaataaggaataggaaaaggagaataaaaaaaaaaaaaaatagagaataaaataagaaataaatgaagaacacaaaaacaacataatataaaaacagcatcggactagacgcatagaaaaagagactactttaaatcagatcctctcttgctctctccaaaacggcgataagatattttagatgaattgcaaagaactaaaacaggacagaacttacttgaacctgttctagattgacagaatatgagcaaataagggtaaattattatcattaacggcaaggctggcactgaacatggacctgactctacaagcaccctattaaaaagaattaattattgaaagacgaaaaaaagaagaaaaaaaaaaaaaaaaaaatgcaaaataataggaagtgatattaggcaaaaaaaaagaaagaaaccattcatgattcccctaatctcaggcattcacccttgacaaactaggccataatcagtcatatatattcatcgggtacttaatttttcccaaacgttatggaacaaaagaaaaagaaaaaaaatagataaccaatataaccacatgaactctatagcgtgggccacatccgtacgcaacttaaatag

SEQ ID NO: 519013 - DNA, 84 bp, Homo sapiens
aacccggcccaattttggttcggtcccaccggggagaaaaaattttttccatgtttttcccttaaaaaccgggggccccctgga

SEQ ID NO: 519014 - DNA, 307 bp, Homo sapiens
  misc_feature (76)..(76): n is a, c, g, or t
  misc_feature (82)..(82): n is a, c, g, or t
  misc_feature (86)..(86): n is a, c, g, or t
  misc_feature (88)..(88): n is a, c, g, or t
  misc_feature (114)..(114): n is a, c, g, or t
  misc_feature (133)..(133): n is a, c, g, or t
  misc_feature (146)..(146): n is a, c, g, or t
  misc_feature (152)..(152): n is a, c, g, or t
  misc_feature (157)..(158): n is a, c, g, or t
  misc_feature (185)..(185): n is a, c, g, or t
  misc_feature (197)..(197): n is a, c, g, or t
  misc_feature (208)..(208): n is a, c, g, or t
  misc_feature (214)..(214): n is a, c, g, or t
  misc_feature (227)..(227): n is a, c, g, or t
  misc_feature (249)..(249): n is a, c, g, or t
  misc_feature (259)..(259): n is a, c, g, or t
ctagtcttcattttataaaagttgttgcctttttaacggagtgtcactttcaaccggcctcccctacccctgctgnccgggnatgnanacatgtcatttgtaaaagcagaaaangttgcatttgttcactttngtaatattgtccngggccntgttnngggtttttggggaaagctgggcatcantgccacatggcntcagggctgcnccacanagaccccacaggncagtgagctctgtcttcccccncctgctagcncatcatctatctaaccggtccttgatttaatcagctctatatatagtt

SEQ ID NO: 519015 - DNA, 80 bp, Homo sapiens
agctcttattgcagacagggccaagcatgtgatactttgtaccgatatgagattgatatgaaataaagttttttaaagat

SEQ ID NO: 519016 - DNA, 625 bp, Homo sapiens
cccgggctgttcccggcttcttccccggtgaggggacccgctttcccccgggcctcggaccagggcccccaggggagactcgccacgctctggaggccccgttgtccccctggcggtcggtttaagtttttggaccaccgcgatgtttatgtgtctctcaaaaagctcgttctctggtctctgtgattaaaccggggccaaaccgaatggtccgcccccagccaacccaccccggtttgccattcttttcggaacatccaaaagtgcccgatccagatgggagtccagttatcggagcctgaccccccgccatagcccaggaacgccagagtgaagtgccccgcgctggaggtcgcacgcgtgcccacgaggaggcccggttggtgcttccctcctcgggctgtgggcaaccatggggcccccccaggttccttggaaggaggccctgagctgggaaggcacccaaaggctgacctatccgagcctcccggaggcccccctgctgggtacccggactcacctctgaccacccggagaaggtaagggccccggtcagcccccaggagcgcgctccacgcgcgtgcaccccgcttccctggtaataaagagctggcatcctttctta

SEQ ID NO: 519017 - DNA, 206 bp, Homo sapiens
tagcatggcacatgaagacgcaaagctagagtctacaagaacgctactatccccatatcatagaagagcttatcaccaatggtactgaacctacgagtacaccgactacggcgagactaatcttcaaactcctacatacttcccccattattcctagaaccaggcgaactgcgactccttgaacgttgacaatcgagctagtactc

SEQ ID NO: 519018 - DNA, 875 bp, Homo sapiens
  misc_feature (97)..(97): n is a, c, g, or t
  misc_feature (115)..(115): n is a, c, g, or t
  misc_feature (148)..(148): n is a, c, g, or t
  misc_feature (157)..(157): n is a, c, g, or t
  misc_feature (255)..(256): n is a, c, g, or t
  misc_feature (297)..(298): n is a, c, g, or t
  misc_feature (318)..(318): n is a, c, g, or t
  misc_feature (322)..(322): n is a, c, g, or t
  misc_feature (332)..(332): n is a, c, g, or t
  misc_feature (363)..(363): n is a, c, g, or t
gagacgcagaggcggacaagatggcggcggcagctgtacagggcgggagaagcggtggtagcggaggctgtagtggggctggtggtgcttccaactncgggacaggaagtggccntagcggcttgttggataagtggcaagatagatnataagcctntaaaaattgacaagtgggatggatcagctgtgaaaaactctttggatgattctgccaaaaaggtacttctggaaaaaatacaaatatgtggagaattnntggtctaattgatggtcgcctcacatctgtacaatctcctnntttctttgccatagtggttngatncgggattatntgcacccctttccagagtccaaaccgttggnctcgtgtgtcatatcctaattggtgatgatggggattctgaccattttatacctcatactaaggagaagacgcctctttctcgttgggccacaaggacgatcctacaggaatggatcctgccgacactgtgacagctgtcctcagtcttacacaggttggactgacaaataaaaccttgaaaggtgaccttcatcaggtggggagcaccaatgcagaagtgcccagcgcgtcccacaggtccacgctaaggttcgaccacaggggcaactggccaggatgacttttgagccgaatatccaggctcctgcaagctgcctcgcagagcaactaggtcaattttacagcaccccttcccggcctggcgacacacaggcgcgcgcgcgcgcgcacaaacgccacagggccccacaaccacaagcctcgcgccggggcccaccacgcggcaaccgtgccaccacagccgccaacccccaccgagccaccgcgcgcccgccgcccagcacatacaccc

SEQ ID NO: 519019 - DNA, 148 bp, Homo sapiens
  misc_feature (5)..(5): n is a, c, g, or t
ctccnatttgctcacagcgcggagcgacgtcttagtctagttgaagtacgcactgggagcaggacgtctaagtctaggaagtgaccgcagtgggcagcaggactgtctgagtctacggaagttgaccgcttgtggggttggagcattt

SEQ ID NO: 519020 - DNA, 903 bp, Homo sapiens
ggtcgtgctgttctacggcaaggcctttcccagtgtccccacgcgaaggcatctgcctgagaggcgcgggtcgaccgcccagagggctgaggaagccggcgccagttcgtgtggctcgggcgccactcagagctatgagctacggcgccccctcccgatgtggacgggtatgacctctctcaatggtggacaagctgacctaccgcaacctcgcccgacacgctgaggcgcgtcttcgagaagtacgggccgcgtcggcgacgtgtacttcccgcggacccgtaaccaaggagtcccgcggcttcgccttcgttcgctttcacgaaagcgcgacgctgaagggaccgctatggatgccactggacgggggccaggtgcttgggacggagcagcagagcttgcggggtgcaaaatggggcgcagctaacggccggcccccgtggagttcgaaaccactagccgcagggggaaccgcacacgcccgacgttacggggggcgtttgatacgagacggccagagagccgaagcccctaggcagaggtaagccagaaggcccgaatccccgaagccgaagccagttcacaaggtctcgacagaccgtatctcgctgtgcaggcccgtctcggaaggttctcgggccccgggacctcgtcctcgaatcatcgggtcggaacctccagggtccagattccgacggagggtccacgtccaggtcctcgtcgggcctccagaactcctcgtccgcggtcacaggccccggtctcgggccagggagtcctcccccatgtgttcagagggatccagtccacgtcggattgagagtcccccgaagttctgaagaggacgagggggcccttacaaaatgtttttggccacgtggtaggggcctggaagggccttgc

SEQ ID NO: 519021 - DNA, 395 bp, Homo sapiens
  misc_feature (1)..(1): n is a, c, g, or t
  misc_feature (393)..(393): n is a, c, g, or t
natgaaatgctttgctacactggatccttttcaacttagcacttacaaatataggtagcttttgcaacactaaactgcattctaataaacagcattcagctaaatgacatgttagttacccccttcctcttccccagttgatgcctcctaagagccgactgctattcttgagaacaaattcctggatactggcattagtgacaaagaagtgtcaggacagtttgccaagaatgttgtttcttcttgtacaacacaaagcaaggaaacctctgtattttatggctttgaggttttaaaaaatgttctgcagtttgattgatatgggcttttaaattcagtgaatcactttcatgaatactgaagtaggtattaatctttcagaactagttaatnca

SEQ ID NO: 519022 - DNA, 158 bp, Homo sapiens
aatcagctcggtccagatatgcagagaacccatcacttcagctactacggggctcatggcatcatcgtggtgtatgacgtcactgaccaggaatcctacgccaacgtgaagcagtggctgcaggagattgaccgctatgccagcgagaacgtcaataa

SEQ ID NO: 519023 - DNA, 339 bp, Homo sapiens
  misc_feature (12)..(12): n is a, c, g, or t
ggcaggagaccngtaggcagaagttgcagtgagctgaaattaaaaaatgccacatgaaataatacagacacaaaaggactgttgctttgggaggctgagatgggaggattgcccgaggccaggagcctgagatcagtgtgggcaacacagcgagataacatctctactcccctctttatgtatttgtttatttatttacatatatatctctatctatctatctatctatcttttttttttttgaggcagaatctcactctgtcacccaggctagagtgcagtggcgcgatctcagctcactgcgctctgcctcctgggttcacaccattctcctgcctc

SEQ ID NO: 519024 - DNA, 118 bp, Homo sapiens
aaaaaagtaaaatgctgcactgcccagcagcccgggttagacgtcctggagccaccttacgacagggctgctcactacctctgctgcggcacttcagctggcagagaggctttcccag

SEQ ID NO: 519025 - DNA, 996 bp, Homo sapiens
gggccccattggcctcagcctttaccatagacatccacaagctggtcctgtctccatccctagtcttccactctggagtctatagccaggtttgtatgtgggggattcagtgtatgcggtacgagtgctcctgaagatagagaagaaaaccccttcttctggtcataagcagagtggcactggagtgaccccgtcaatgagtggacatacattgctgtgtcagtactctgaaccaaaccgatgggtcccagtagcttgttgattcccggttctgagttctccctcctcattccttggttctccgtcagccattgcggttatgggctcggttctgccgtccacgatgatccaggctgatgatggccccggcgctcgaatactgtccctgggtggaggcctctcgtctgatccacgccttgtcttctttgtccctttgtcctccccaggtggtagctcaactctccagacaagttagtatcaaaggcacagcatgtgtgtgcgcttgcgatgcacagcacccaggcatgtgtctagcgtgtcgtcgtgggcgtggccatagaagtgtgccctgctggccaatgtgtaccctgtatgtgccatactgtcgtgcatgtgggaggttacaggttcgaatcctccctggcgtcaacacctggatgctgtggtgaagacatggtacgtacaaaacaaatctgacgcgtgatgtagcacctgaaagagtatcacatctcccggagtgctgtgcaaaattcgcgcttacacaataaaccccttctagtgtgattcgtcatggacataccaaggcctagcgtatgacccaatggactgacaagcaggagttccagactcaacagcgtgggccctatacgcaagagagtacacgcggctatactactcggtcgccgtcaattgtcttatgccatgtctgcacatgagcaatgaacactcgcccccaacagcgagattcggccggctagactcaaccccataccagac

SEQ ID NO: 519026 - DNA, 108 bp, Homo sapiens
  misc_feature (23)..(23): n is a, c, g, or t
  misc_feature (79)..(79): n is a, c, g, or t
cttaggagtggggtggctggaanataagcttcaggtccaggaagatgggtttggagcttatgcttccagccacccactnctgagctgaataaagatgatttaagctta

SEQ ID NO: 519027 - DNA, 154 bp, Homo sapiens
  misc_feature (9)..(9): n is a, c, g, or t
  misc_feature (18)..(18): n is a, c, g, or t
  misc_feature (27)..(27): n is a, c, g, or t
tacccttangaagaacanaggaactcnggaatgaaaaaatactacaaaaattacctaatacattatgaagcattaacaacagaatagtccaagccaaggaaagaatctggagctgaagacagaatcttataatcaacttagacaaagggaaaca

SEQ ID NO: 519028 - DNA, 221 bp, Homo sapiens
cttcgtctaccggactttacggctttttcactccgcagggactgggctactacggactactgctttgtttactacacacggtggtgactgacacggttaccactaacgactggaacttgccacacacgcctcttgaccacattaccgacacgtcctactacgacaagacctgacttactcactgaccggaacgtgtacagacctggacggacactacgaca

SEQ ID NO: 519029 - DNA, 1111 bp, Homo sapiens
tctcagctctcggcgcacggcccagcttccttcgaaagatgtctacgtgttcacgacaactcctggtgcagagcgtcacgcttgcgacgggtgatcacatcttacactcctcgcaatgtgcatagtgggtcgtggtcaaagccttatactaactttgatgctgcagcgggcatgcttgtgagacattggagaacgagccgatcaaggacctagagaggctgtggcatgcaggtcacccattgctcgaacgatcttatgagcgcaaacgcggcagcctaactgtcagcacgcagaccacgggcactagttgggcactatcgacccttaccgagtagtacagggatcgcatgtgccacgacgggaaatcctttgccagtcaggtcagcttgctacacgtcagcacctactcactctgggtcgctaccctgtgcacgtatccggcccgaactctcttcgggtgccccctactttcgcacagcgccaccatcccgtgggtcctccacgcttaattgcatcggcctctctggtagctcttaaacaggcctttcccactgccccgcggcgcctggggaaaccggagctgagtgtactttcgttctctatttggacgtactccattccttgtcttctcaggaccccccacccctcgtgcgcccccttagcccacggcgcatcctattttaagctcgtgcacgcttctccaccccctcgcgccacaagtagtttcttccaatgaccccggccagagcctcgcgtctcgcaagcagtggcaccattctcacttttcgcctgtgcaccaaccacttccttgttgtttgggactttttctccggcgcctcgcccttcgccctttggcctttggccccctgtggcccaatgacgcgcccttcatacacacgcactggtcgtgttcatcggtactttgtgcgcgtccctggggtccgctgtggggccttttcaccttgtacccctgcgttttggagtccccaaagcagcttggccttcccggcgtacttccctcctttagtggagacggcccctcgcgcccgtctgtccccacccgcgtcaccccgcgcccactccgtccgcgcgctttcccccctacgcttgg

SEQ ID NO: 519030 - DNA, 195 bp, Homo sapiens
  misc_feature (48)..(48): n is a, c, g, or t
  misc_feature (141)..(141): n is a, c, g, or t
ctcctggactgccctccagaaggagctctttccctttgagcagagcanagcgggctggggggagaaaagcagctcacactgggtgcctggggtgggggggcaagctgacactgaaaagggttttgcactgttttttttggnttttttggtcttttttggttttttcctttaaaataaaaacaaagaaaagctctg

SEQ ID NO: 519031 - DNA, 165 bp, Homo sapiens
ccccccttgggttcccttccagttttttccccctttttttcccaacccccaaaaaaaaagttaacacccccccctgggaacccaaaaacccccctaaaacccccccgtaaaagggggcccccttatttttcccccccaaacaaaaaaaaatttggttgcccccca

SEQ ID NO: 519032 - DNA, 328 bp, Homo sapiens
  misc_feature (8)..(8): n is a, c, g, or t
  misc_feature (38)..(38): n is a, c, g, or t
  misc_feature (44)..(44): n is a, c, g, or t
  misc_feature (181)..(181): n is a, c, g, or t
  misc_feature (227)..(227): n is a, c, g, or t
  misc_feature (271)..(271): n is a, c, g, or t
cagtatanctgtagagagcacttaccatgaatggagcntgcagnagtagaagttgctctggatgagtcagtgagtgagtggggagtgactgtgaaggtctaagacattactgtacaccactgtagactgccatagccttcacaaatactgaactaaggatatacacagtttataaaaatantattctttcttcaaaaataaattaacctggctgggggtagtggctnacatatggaatcctagcactttgggaggctgaggcgggaggatngcttgagcccgggagttcaagaccagcctgggcaatatagtgagaccctgtctctac

SEQ ID NO: 519033 - DNA, 118 bp, Homo sapiens
attccgggcagcgatggggcaccaaaaatcgccccggtccgacacgaccaaggaaaaccctaccccttcgcctaccaaggaaggccaggggaggttttgccccgccaagccccccaag

SEQ ID NO: 519034 - DNA, 147 bp, Homo sapiens
acgacgggctggtggatgcatctggattgagaacataacacggtgctggatacaacaagaagctgtgcctcagctctggggagatcatcaaggtcacagaggcaatgaccatgatgttcgaggtgcaaagacctggcggtggcttca

SEQ ID NO: 519035 - DNA, 702 bp, Homo sapiens
ctgcagcagtagttcgctcatgtacaccaacgcgttcggagtgttcgcgcacacgcacgctctcatggctgtcacttcccgccccacaaacagtctcgcagcgagagaattcggggggcattcatacaacagcgcgcacagcagagtccccaccccccatgcgtgcttcccgcggcgccctactagattaggcgatggtccacccctccttgtaatacgactggtaaatacacacatcacaaaagatgcgttgggtggtgcctgttactatataagagagcaaatgtttcctggcgtgtgccacagctaacatatagggtagtctgtgctgggggcaaagatatatagtgtggtgtgcagcacagctgagacgcgctcatagatcttaatgaagattatacgcccgtgttttgtgtgagcaaagatatatctttttttgaggaaaggtctctgtctatatttccgtccgccgcatcgtcgcctcgcgtatagacacacaccgctgtgtgatagtgtggccctctcttgaatacgactgtgagagagggtctcttataaactccccaccgggtggagagttgctacctgttccctctctcttgggaaaagtgaggggcgatcatatacaggatgttctcttagaggtctcccactcgtggagggagttagcgagcgccccaccaattagacagaaacagacac

SEQ ID NO: 519036 - DNA, 989 bp, Homo sapiens
gggacgggcggtgctccgccgcggtgccggttgttatcgcttcgcataacctactcaggcagcagctgagaagaagttgagggaaagtgctgctgtggggtctgcagacgcgatcggataacgtgcagccttatagatataacatcgcccccttctgcttcagtgtgagacggccacgttgaagatgctgcgcgcagtgagaaatggttcgaactcgtagcgaaagccaagagggttgcatgtgagcgtgagatcaccaccacttgacacttccatgcctgagcgaacagcacgcagggactgcttgtcaaaaaaaaacacagactctggggggaaaactgcttgctcgcatatcccgcggacgaaatggtgggctgctgttggctcacgccatagggagggacctcaccgtggagaatccagtgtgaacatagcagagatggacctaaaacaccgggccacgccggactagtcgcggggcagaaaggctaaaagccctcactgatgggaacgtattaggcccctttaaccattatcacaagattcttgcgtcgtgaaaaaaggaggctcctcaaaaacgcggggcagttcctcttttcaaccttcatgtgatctgtgggcgcccctttttggggacgggaacctgccgtttgaatgattcctccctggagacagattattgttgaaaaaaccccgctgagacatacgtggccaggaatctggttaggcttgtgaaaaaaaccccacattctgcatgtgtgccaatatatcagcaaaggatgttcaattgagaaatccccaataatagtgccaagggctgtatcttggggaagattgcccaccatatcggtggcagaatagaggctgtaaatgctcgacaggcgcatggtgcaaccacctgagacgagggatgtgtaatataaggtaaaaggaccgctctgggtaaacactggaccactcttggaatgtactagggcctcgacagggat

SEQ ID NO: 519037 - DNA, 251 bp, Homo sapiens
aaatccaatccaaggtttcccaaatcgcccgcacatccaaaggggccttctcccacctacaaaaccaaagagggcttccccaagggggatcaagcaccggaagacacaaacctaaaatgcctaacgctaaaagacccaccaacagagtctaatgcggccccgtccctagaaggagccccgagcctccgacgcctagacccccaaaaccgcgacctaactcgactagatcgagaaacctaaccccccggaat

SEQ ID NO: 519038 - DNA, 190 bp, Homo sapiens
tcgtgagcggttcttaagtctatgtcagtagttcggcagagcaacttcacatagtgctcttcccttcccagccacagcactatcatgtttgtgagcttgagcacgtgtgtgctcgctgccatgtagtcatacacgccagcagcagtgccctttgaccaccaccgtcaaggagagcccgcttcgacagtgc

SEQ ID NO: 519039 - DNA, 371 bp, Homo sapiens
cccttgggggatgggctgattggctttggattgccttgcagtggaatgcagggtaaaagcattgcactctcttctcccattgcattcccctctttttggggatccaagatgtcatataaaaatgggacccttaatttgggggatctgtttttgccttccagctatgcctgcttattaggccctagaaactacatgctctcctggctctgtttctgtaagggctccaccctgaagccagtaatccaatgaagaaacttaaaaattgaaagataaaaaaatcatataactaccggatccccttctgtctgtgtatttatatgtgttgggtgtgtgatgtttatataaaacatgttaatgttcctatttagtga

SEQ ID NO: 519040 - DNA, 395 bp, Homo sapiens
  misc_feature (33)..(33): n is a, c, g, or t
tggcctcctgagtacctcgcttcgggcggtttnatcttcacttcctcatactttcccccatttttcctagaaccgggggacctgggattccttgaggttgccaatggggtagttttcccgtttgaggcccccttttgtttaataattacatcacaaggggtttggcattcatggggtgtccccccattagggttaaaaacagatgcaattccggggggttttaaccaaacccttttccccgctaaccgcccgggggtatattcgggtcaatgttttgaaatttggggggcaaaccccagttttatgcccttggtcctagaattaattcccctaaaaatttttgaaatgggggcggtttttaccctatagccccccctttcccccctttagggcca

SEQ ID NO: 519041 - DNA, 204 bp, Homo sapiens
tagagagtcggcgggaagctggctgcagtgtggagacgcgttggtcatgttggacagccccagcccaggccccgtcaccagttcatgatgcagttacggttcatgagtcatgaagtaaacttggcttgctgccccacagagcgtgactgactggcaaacacacacctttgtcattcctgctcacacatggaacttgatgcctct

SEQ ID NO: 519042 - DNA, 379 bp, Homo sapiens
tgaaacacccccagcgtactgtctaatcaccattctactctctacttctgtgagtatgacttcgttagattccaaatatagtgagtctcagacacctctgacatactgatttcaattcctttggatatatactcagtaatgggattgctggatcatatagtaattctatttttagttttgtgaggagcctctacactgttttacaaaatggctgtatttatagtttcaccagcagtgtataagtgttccatttctctgtgaccttgctaacacttatctttcacctttttgataatagccagtctaacaggtgtgaggtgataccttattgtggctttaatttgcatttctcttatgattagagatgttcagcattctt

SEQ ID NO: 519043 - DNA, 424 bp, Homo sapiens
  misc_feature (66)..(66): n is a, c, g, or t
ctaccaatgaaaatataataaataattattcactacatatgttgaaatgacagataatacaggaanagcaagaagagcagaggcacttagagcctgactatgaggtctgcctagctgcttggcagatagaattctctcatctggccaggcacagtggctcactcctataattccagcactttgggaggccgaggtgggtggactgcttgaactcaggagtttgagactaacctgggcaacatggtgaaaccccatctctaccaaaaatacaaaagttagccgggcatggttgtgcatgcctgtagtcccagcttctcaggaggctgaggtgggaggatggcttgagcccaggaagcagaggttgcagtgaactgagattgcaccactgcatgccttcctgggtgatagagtgagagcttgtcca

SEQ ID NO: 519044 - DNA, 398 bp, Homo sapiens
ggctgatgcatcagagagtggaactgccagcagctaggcctatgtgtctcagaacggctgattaggataagggactagaagtactcccaggtcctttataggtgagggatactttacaggactgggtatgggtcagccagtcgagaaagtagccttcctaggagctttacattggacagctgctgccccaccgatacatcttggcacacaagagttaggccactgtatctgtcctgtcccacacacttgctccagatgatctttaccacatgacacatgaacatacactgtgtacacctggagcccacctgacatggagctttggactgctccacaagtctccagcatgcctttggaagcccttctttatagggaactaaatacagagttaaacaggt

SEQ ID NO: 519045 - DNA, 798 bp, Homo sapiens
  misc_feature (738)..(738): n is a, c, g, or t
  misc_feature (750)..(750): n is a, c, g, or t
agcggggggtgtggtatgcatccgaccgagtcggaccggccagttgggcgcgcttccaggtgtcatcctccacggagggcgccaggctgcgagatggccgccctcagcagtcgcaaggtccggcagcgctagcgcggaggtccggcaccgacgtcagccacctagcgcagccagcgcaatgaaatggcgctgtggtctgccagtcagcgtcacgccgaggaccaacgcgtccacagcttggtaggcagagcaatgattagtgcgccgctgggaacggggctatatcgtgtgctggcttggggtatttctcctggtcagagatacgctacgaaaggaactggagacacgagtgggtccgtacatatgattcttacatacgctgtgtgtgagtgtagcaggagtgatgagtgcggcaagccatctggtcgcaagcatgtgtgatggacgatagatcgagtcacgagtattctgctgtgtctagcctacgattttagcgctctcagtgatgtcctgcatatggtgagactaagcgctgaatctctcctactcgtatgcctaatgcccgatcgtgaacgcctagggcaggtaccgggcttcataccatacaatgcgtgtccctggatgcaaggcttggggtaacatatcattatcgtggctctgcgagcttgttctaccagattggcaatgttttgtggccctaccattgcggcgggttgcacattcagcaatggattgggncctgtgaccatnagagctggaaatcgccaagctcccggacaactgctaaccttctgaccc

SEQ ID NO: 519046 - DNA, 388 bp, Homo sapiens
tagagatggagtctctctattgcccaggttggagggcagtggcacaatctcagctcactgcaacctccacctcccgggttcaagtgattctcctgcttcagcctcccgagtagctgggattacaggtgtgtgccaccatgcccagctatttttgtatttttagtagagtcggggttttaccatgttggccaggctagtctcgaactcctgacctcagctgatccacccactttgggaggtttttataatttaataatattatatttaggtttatttaatattgaataaatgattttatctaatatttgtaataatgaattttgttgaaaaatggaagatagttatgttaaatagggatttaaaaattgatgtgtttttatatgacgtt

SEQ ID NO: 519047 - DNA, 228 bp, Homo sapiens
tgagacaatatatccatcgagcctcttttacaactagtcggacttgtacctgtgggcttcagtgatgggatagtacacttcactcagaggcatttgcatctatacataatttcttaacaagcctctcaaaagtgcatcagtgccttgatgccacctaaggaaattagttaagattgaatctctgaaggctctatgaaaggaatagcatgatgtgctgttagaatcaga

SEQ ID NO: 519048 - DNA, 182 bp, Homo sapiens
tatgagtatctccagtaacttttccaccttttccgaatgtatgtagcaccagcagaattttcaagagctctcaacatctactgtttagagactctactagcctgacgatggcaagtgtggactatagatctttggcgtttctcatggatctacaagtgagtaagcagaagtaagctgtagtc

SEQ ID NO: 519049 - DNA, 199 bp, Homo sapiens
aaggggcatctcggtcatgtagcgtcaccttctgtgttccagcgatccttccttagcctcccgggtagctgggattgaggcatgcgcaccatgccgggctaattttgtattttcagtggagacggggtttcatcatgctggccaggctgttctcaaactcctgacctcaggcgatctgcctgcctccgcctcctaaagt

SEQ ID NO: 519050 - DNA, 138 bp, Homo sapiens
tcatgagtccagccgtacgagacattcctactgtagaatagtgtcagtgttttcctataagctcggtgtaagctattcattatatttgtgcttaaagatgttccttcattcatcaacgtaggggaagtccagagtgcg

SEQ ID NO: 519051 - DNA, 301 bp, Homo sapiens
acacagctataccaacttttccagaagatattggggttcggtgaggtgtaaagaaaaagtgttcatgtaaattctggtaattaaagctgttcagtgtggtatagttgggttgcatctgtagcccttctaaaaattggctatcgattttcttttagcctaaagactttaatatacttcctcctcattctaccctcaggatttggatctttgccccttatgggtatccatcccctttgaaacttcagaaaggcatgttactatactgtaatgttcaactctaaagacatttcctataaggggc

SEQ ID NO: 519052 - DNA, 126 bp, Homo sapiens
gggtcgttttctgagcgcgagtcggctgacacgagagacggtcagtgagcgaggcgcatgctgcgagggaagccagcagtcatcccgggcattgtgaggtacgagctcgaatagaatcatgtctag

SEQ ID NO: 519053 - DNA, 138 bp, Homo sapiens
gatctatgaatgaggaggaaaatagattcgagcgatgttttatctttggtgcagtttgggcacttaaaatgagatctttgtttactggatttgcagcgagaggtgtcagaacaagttaccacagggtcttggtgacgg

SEQ ID NO: 519054 - DNA, 4707 bp, Homo sapiens
  misc_feature (836)..(836): n is a, c, g, or t
  misc_feature (2250)..(2250): n is a, c, g, or t
  misc_feature (3569)..(3569): n is a, c, g, or t
cgacactcttgggtagggtctggataaaaaaaaagtgagcactgcaaatttctagaagaaaacatcaggagaagaaagagagagggggatttattcaaagttgtttccaattccttcaaaacctcaaaccaggtggctatggtatggatgtaaccaagaaaaacaaacgagatggaactgaagtcactgagagaattgtcactgaaacagtaaccacaagacttacatccttaccaccaaaaggcgggaccagcaatggctatgctaaaacagcctctcttggtggagggagccggctggagaaacaaagcctgactcatggcagcagcggctacataaactcaactggaagcacacgaggccatgcctccacctctagttacaggagggctcactcacctgcctccactctgcccaactccccaggctcaacctttgaaaggaaaactcacgttacccgccatgcgtatgaagggagctccagtggcaactcttctccggagtaccctcggaaggaatttgcatcttcttcaaccagaggacggagtcaaacacgagagagtgaaattcgagttcgactgcagagtgcgtccccatccacccgatggacagaattggatgatgttaagcgtttgctcaaggggagtcgatcggcaagtgtgagccccacccggaattcctccaacacactccccatccccaagaaaggcactgtggagaccaaaattgtgacagcgagctcccagtcggtgtcaggcacctacgatgcaacgatcctggatgccaaccttccctcccatgtgtggtcctccaccctgcccgcggggtcctccatngggacctatcacaacaacatgacaacccagagctcatccctcctcaacaccaatgcctactctgcgggatcagtcttcggagttccaaacaacatggcgtcctgctcacccactttgcaccctggactcagcacatcctcctcagtgtttggcatgcagaacaatctggcccccagcttgaccaccctgtcccatggcaccaccaccacttccacagcatatggggtgaagaaaaacatgccccagagtcctgcggctgtgaacactggcgtttccacctccgccgcctgcaccacaagtgtgcagagcgatgaccttttgcacaaggactgcaagttcctgatcctagagaaagacaacacacctgctaagaaggagatggagctgctcatcatgaccaaggacagcgggaaggtctttacagcctcccctgccagcatcgctgcaacttctttttcagaagacaccctaaaaaaagaaaagcaagctgcctacaatgctgactcaggcctaaaagccgaagctaatggagacctgaagactgtgtccacaaagggcaagaccaccactgcagatatccacagctacagcagcagtggtggtggtggcagtggaggaggtggcggtgttggtggcgctggcggcggcccttggggaccagcgccagcctggtgcccctgcggctcctgctgcagctggtggaagtggctgctgggcctgctgctcacctggctgctactcctggggctgctcttcggcctcattgctctggcggaggaggtgaggaagctgaaggcgcgtgtggatgagctggagaggatcaggaggagcatactgccctatggggacagcatggatagaatagaaaaggaccgcctccagggcatggcacccgcggcgggagcagacctggacaaaattgggctgcacagtgacagccaggaggagctctggatgttcgtgaggaagaagctaatgatggaacaggaaaatggaaatctccgaggaagccctggccctaaaggtgacatgggaagtccaggccctaaaggagatcgagggttccctgggactccaggtatccctgggcccttgggccacccaggtccacaaggaccaaagggtcaaaaaggcagcgtgggagatcctggcatggaaggccccatgggccagagagggcgagaaggccccatgggacctcgtggtgaggcagggcctcctggatctggagagaaaggggaaagaggggctgctggtgaaccaggtcctcatggcccacctggtgtcccaggttctgtgggtcccaaaggttccagcggctctcctggcccacagggccctccaggtcctgtaggtctccaagggctccgaggtgaagtaggacttcctggtgtcaaaggtgacaaaggaccantgggaccaccaggacccaaaggtgaccagggtgagaaaggacctcgaggcctcacaggcgagcctggcatgagaggtttgcctggtgctgttggtgagcccggggctaaaggagcaatgggtcctgctggcccagacggacaccaaggcccaagaggtgaacaaggtcttactgggatgcctggaatccgtggcccaccaggaccttctggagacccaggaaagccaggtctcacaggaccccagggacctcagggacttcccggtacccctggccgaccaggaataaaaggtgaaccaggagctccaggcaagatcgtgacttcggaggggtcatcgatgctcactgtcccaggccccccaggacctcctggagccatgggacccccaggacctccaggtgccccaggccctgccggcccagctggtctcccaggacatcaagaagttcttaatttacaaggtcccccaggcccacccggcccacgtgggccaccagggccttccattccaggcccaccaggaccccgaggcccaccaggggagggtttgccaggcccaccaggcccaccaggatcgttcctgtccaactcagaaaccttcctcttcggccccccaggcccacctggccccccaggtcccaagggagaccaaggtcccccaggccccagaggacaccaaggcgagcaaggcctcccaggtttctcaacctcagggtccagttctttcggactcaaccttcagggaccaccaggcccacctggcccccagggaccaaaaggtgacaaaggtgatccgggtgttccaggggctcttggcattcctagtggtccttctgaagggggatcatcaagtaccatgtacgtgtcaggcccgccagggccccctgggccccctgggcctccgggctctatcagcagctctggccaggagattcagcagtacatctctgagtacatgcagagtgacagtattagatcttacctatccggagttcagggtcccccaggcccacctggtcccccaggacctgtcaccaccatcacaggcgagactttcgactactcagagctggcaagccacgttgtgagctacttacggacttcggggtacggtgtcagcttgttctcgtcctccatctcttctgaagacatcctggctgtgctgcagcgggatgacgtgcgtcagtacctacgtcagtacttgatgggccctcggggtccgccagggccaccaggagccagtggagatgggtccctcctgtctttggactatgcagagctgagtagtcgcattctcagctacatgtcgagttctggnatcagcattgggcttcctggtcccccggggccccctggcttgccgggaacctcctatgaggagctcctctccttgctgcgagggtctgaattcagaggcatcgttggacccccaggtcccccgggtccaccagggatcccaggcaatgtgtggtccagcatcagcgtggaggacctctcgtcttacttacatactgccggcttgtcattcatcccaggccctccaggacctcctggtcccccagggcctcgagggcccccgggtgtctcaggagccctggcaacctatgcagctgaaaacagcgacagcttccggagcgagctgatcagctacctcacaagtcctgatgtgcgcagcttcattgttggccccccaggccctcctgggccgcagggaccccctggggacagccgcctcctgtccacggatgcctcccacagtcggggtagcagctcctcctcacacagctcatctgtcaggcggggcagctcctacagctcttccatgagcacaggaggaggtggtgcaggctccctgggtgcaggcggtgcctttggtgaagctgcaggagacaggggtccctatggcactgacatcggcccaggcggaggctatggggcagcagcagaaggcggcatgtatgctggcaatggcggactattgggagctgactttgctggagatctggattacaatgagctggctgtgagggtgtcagagagcatgcagcgtcagggcctactgcaagggatggcctacactgtccagggcccaccaggccagcctgggccacaggggccacccggcatcagcaaggtcttctctgcctacagcaacgtgactgcggacctcatggacttcttccaaacttatggagccattcaaggaccccctgggcaaaaaggagagatgggcactccaggacccaaaggtgacaggggccctgctgggccaccaggtcatcctgggccacctggccctcgaggacacaagggagaaaaaggagacaaaggtgaccaagtctatgctgggcggagaaggagaagaagtattgctgtcaagccgtgagctagccatggcaggacagctcctggaccaggtctcataatgcatgtggcacttaggtccaaggtctcca

SEQ ID NO: 519055 - DNA, 692 bp, Homo sapiens
cgacactcttgggtagggtctggataaaaaaaaagtgagcactgcaaatttctagaagaaaacatcaggagaagaaagagagagggggatttattcaaagttgtttccaattccttcaaaacctcaaaccaggtggctatggtatggatgtaaccaagaaaaacaaacgagatggaactgaagtcactgagagaattgtcactgaaacagtaaccacaagacttacatccttaccaccaaaaggcgggaccagcaatggctatgctaaaacagcctctcttggtggagggagccggctggagaaacaaagcctgactcatggcagcagcggctacataaactcaactggaagcacacgaggccatgcctccacctctagttacaggagggctcactcacctgcctccactctgcccaactccccaggctcaacctttgaaaggaaaactcacgttacccgccatgcgtatgaagggagctccagtggcaactcttctccggagtaccctcggaaggaatttgcatcttcttcaaccagaggacggagtcaaacacgagagagtgaaattcgagttcgactgcagatggagcaggtgagtgaccctcctgtaactagggtgagcatgcctcgtgtgctccagtgagttatgtacgctgctccatgagtcagcttgttctcaccgctcatcccc

SEQ ID NO: 519056 - DNA, 183 bp, Homo sapiens
acaaacacaaaagaacaaacaaaaacaaaaatgaaagacaggattacaagtggagaagatggctcattctccatctgcctgccaatctaggaggttaacctatatgttttcttccctatctctactttttctcattcccccccacatatccctgtacatccttcttctcatcttttctacttt

SEQ ID NO: 519057 - DNA, 393 bp, Homo sapiens
agaggatacactctcgctactgtatcctacaaggagacttgatagaagcacgatgaccaaatctattgactaccttggtagcactgtgtacatatggaagagaatgaattgaattaaaattataatgtttgaattatttctagaaacaactctggaatgcctactatgggttggtgatatataaaatgatggtaaatactgataagaacaatggtgactaacatttgcttgaactatgtatcaagcaccacagtaaactcacatggtgctcacagtgttatgataagaatccccattttatccccattttatggatggggaagcagacacagagtttaagtggcctgcttgagggcatgcagataggatacagtacggagagggtacccagct

SEQ ID NO: 519058 - DNA, 403 bp, Homo sapiens
cgactctagagaccgcgtatcgtacagtattgcatagattagcattcatcgttggttgattactccaattttttatccacagaagcttcatctaataggatctgcaattctctagttctgataatatgaattggctccaggttgccagagcctttcagtctgagaactggttctacagctaactttgtaaagggcttggtgatgagtaagaagttttgggataatgttgtgcccgccatattcattaaatcttgacggatttaacttcatcggaacatgatcaactgcagaactcaacagcgctctcttgcagccttcgtggcttctctccaacccgctatgatggtctgtggatgaatcttttttgcaattaaagattctgcttcccttaataattctgctg

SEQ ID NO: 519059 - DNA, 1418 bp, Homo sapiens
tgctgtgagtctggctgcgtggtgctggcgccatgtgatgtgcctgagcgtgggtcccgatgcgccggcactgcggagctgtagcagccctgggccagactgccggaggagtggctgcgcagtgccttgtgcctgagttctgcggctgctgcactgtgccctgtgcgctgcgctgcttcgggggtccccgaactgttacttgggtgcctgcctcctgcacaatgctggagcacgagtgtttttccgacgcttggcggaacgctgttctggcgatcacttgcaagcttggcacggagggctacacacgacgggcacgcgacgggaccgagcgcacgccccgtgcacgcgctgccgctgcccgccagccacgcccaagctccgtggtcccaccgcgaagctgctgctacaaaggctcgatcagctagagccacgtggacgacggccggggcatccaagggcagcctctaacccccacaaccacgccattcttttcccttctattctgaactcacggtcccttgggaactggttgccccgctcgcttgcggaagcactgccctctgcgcaatgtccagctgccttggcgagcgtcgaatgagagtgcgccgcctgggggccttgcgcctttggcggatcccctggcgctctttgtggccctaagagcgccctcggcacttcgctggaccagccttctcgggaagcgtttcctccagctgtggcttgcaaggccattgtgacctctagggcttcatcgacgtaatggtggtctttggttggcgcccccctttgctgacctttgtccgtttggcgtaaatggccgtgaacggccaacctttggctctgggcgcaacacacggctttccaccacacacacgcgctagtcgcgtaacagtcctccgttaaaccacgatgaacgatcacttcggtgcccccaccgcaactatccgtgcggcggcagacatcctagctgtgccccttcgacaccgtgcgcaacgtgcaaaggccgagacttcggcgcacactggcggcctagtagatttggtcgtctaacacttacactctccaccctgggggacaactcagtcgctacagcgttccaccgacgagctcaatcaccaacatcagtactcaacactttatctcaacatctatcaactaccaggccacctggcatcaaacatcattactgacacacactcacttcctcccatcatcctcaccaccaccatacagatgctcaccaaccacccacccactatcataccatttctcgccgttcatcccatacttcagacgccccgacccacatatcactcaccactgcaatacgacagtctccacctgcataaccaacaccctgcaccatgctcatcattaacatctaccctacaccccgtcaattataacggacctgaact

SEQ ID NO: 519060 - DNA, 1049 bp, Homo sapiens
  misc_feature (1049)..(1049): n is a, c, g, or t
agtggagagagggaaggggagggagaaagtggagggggagggcggagataccaccaccaccaccatcaccaggatgccagacgtgaaagagagggcggcccggaaggagcccggcgcggcagagagcgcctcccgtgaatcccgcgggggaaacacccgggagagcgcgagcagcgcccaggggcaccgatcgtgtaggttcaaccgtcgcccgagcacggccgccctcaccccagggtccgcgcaggggcgcggggtaaagacggcgccacgaggtcccgtgggccacggaggactgcggactggcccgacctcccggtgtccccagccctccgcccgagcgaagctcccctcggtcacgcgtggggcaccgcttccgccatccccgggaaagggccacctcggcgggaccccgagctcgcacaggctaggtatgacggagagagtccatgacgcttccaagcttgattgtcagttggcaagaaaggagtttatcttcaagcagcctgaaaggcaaggtcaaggacaccatgcccagcgacttctgggagcatctgaatgagcagctgtcagccgtgcccccgacttcagctgtgctcttgagcttctgaaggagatcaagagatcctgttggtcctgttggtgcaagggataagccgctggaagaatgagatcgaggaagcttctggacctgggagttccttcaggcagcaggccgaccgggggaacctgaatgtgttcttactctcccagtattatcctcaactgaagggcttgtgtgtggaccaaaacgaaaaacaggcctgtgaccaagactgggaacctttccaaacccgcggacggagacgacaaagggggagatcccaggggttgtgaccaacagaacatgggaacgtggggaatacacaacacaaaaagccccagccccgcgaacgagaaactcgccacaaagaagggggcacaccacagaggccacaaaaacgccaagacgatacaacccagagggtgcaacacgacagaagcacaaatacgctccagacatggaagan

SEQ ID NO: 519061 - DNA, 292 bp, Homo sapiens
gcatacctttcagacagttctttttgatgaattcgcaacgcgccaaagtaaagactaggtaaagtttgtaccccgttcgtcacttaacatcgaaaccgaattaaacacctgctttgggcagttccatgaatacgaaaataagcccgcaaatgaatggcttccgccctccccgtctcaacttttgacacgtttatatgtatataaaaccatacccggcggcgacgacttcgatgcgctgacggcggaacgctatggctggctcaatcgtgcgttaccggatgtcgagctggat

SEQ ID NO: 519062 - DNA, 449 bp, Homo sapiens
  misc_feature (27)..(27): n is a, c, g, or t
  misc_feature (49)..(49): n is a, c, g, or t
  misc_feature (104)..(104): n is a, c, g, or t
ttcactgggagccactttttatgtagnctttggtgaaatccaccaattnggaatttagatgtcacctgagggaatcatccaaatatttttcctcctgatagaanggataaattagacacattctaaatcaatgcatgttcaagcgaattgtttgatttttcaaactcatgtatcaacttaaatgacaaatcggactagataccttcaatatattctggttgtctttcgcttttccaaagtctggatgggagagagtggtaacgtggaggaaaaagttcagaagctgaatgtctttgtgttggggatgtgggtgggtgagcacatttgtgtgtgcaacaaataataagaaattaagataagggaacaacatagtgtacttacaatgtgattaagaaagctggagcttggctttgaagatttgcaaataaaaataaaaggggatggaaaat

SEQ ID NO: 519063 - DNA, 248 bp, Homo sapiens
  misc_feature (147)..(147): n is a, c, g, or t
ggggggggggttttttttttccccccccccccccccccccccggggggggggaaaaattttttgggccccccccccccccttttttttaaaggggggttttttttcctaaggggggggggttgggggggggggggggtttctccccngggggggggtgtttttccttttttggttttttttaaaaaaaatttggggggggggcccggggccctttaaaaccggggggggttttttttttcccccccca

SEQ ID NO: 519064 - DNA, 731 bp, Homo sapiens
  misc_feature (707)..(707): n is a, c, g, or t
ttcgttggtgatcctctcttgtcctcctgttctttcggtttatgcgttattgttggtatgcagcgccattttagaggctaactttcaagcagttggtggtaggtcgctggacaagttcctgtttggctcgtctctgaggagtatcctcgacctccgcttgacacttcggaccctattccccactctggtggggacgccagcagcacctgctcactctcagcgattctgtcttcagccacgacccctctgccatttgggtatccagctccttccccttcgggtctggggtgcagacatgagcaaggctcaaggtctgtgcaggcacataggctggtggccattgggccttggggctcagccacagcatgacacagtgctcagacaattgatagcaatggggcaccaatggcccagagttgctgtgccgtgtcacaagggcagtgcaccattgcaccattggagcatgccagtgcactgtggtccatgatggcccaaatgtcagggttctgctcggcattcttggaccattggcgcattagtccccatcccagggttggacatgagcaaggcatggagagccatgcatatgctaaacctcctgccgtcacacaataccagcaggaggttcagggccatctgaaccccctattccccacaccatcacaacaatgcatgcatgcatgccccagcagtcatgacgggagcantggcacctgaaacccagaggagat

SEQ ID NO: 519065 - DNA, 327 bp, Homo sapiens
ccgcgaatgtgatcctcccggtacgttaatccaagcagctgaatagcccagccttcaattatcaagcgggaagattcgtcgggatgtaagagctcactctcgagcttgcccacactttccacaatcactggatcattaaagccaaactgcaatgaggaagaccttagtgtgtctacgattgtcggctcttgatcgatgatcccgtcatctattagcgtcacgaaatatgaatagtcccctgtgatttttacaaagccatctatttcggagtttgcgggaatgaaaaaaagcctgtctttgaattcaaggctgcggcgcgattgccgg

SEQ ID NO: 519066 - DNA, 372 bp, Homo sapiens
  misc_feature (321)..(321): n is a, c, g, or t
caaatattcagtgtagagaaaacacccggccaagatttacgttgttgttttttttttaattttactctttaattttttttggagacaaggtcttgttctgtcacccaggctagagtgcagtggcttgatcatagcccacagcagcctcaaactcccaggctcaagccatcctcccacctcagcctcccaaatagctgggactatagttgtgcaccattatgcacagctaatttatttttatttttttagagatggggtcttgctatgttggccaggctggtctcaaattccctggcttcaagcaatcctcccacctcaagnctccccaaagcactgggattacaaagcatgagccaccacatctaagtgaga

SEQ ID NO: 519067 - DNA, 393 bp, Homo sapiens
ccgtgctaatcttatatgtgtttttcccatttcagcatgtgtgcaaccaaagtgagcatattggtactgctttaaggattggtgtctctacactatagtacatgttatagcaagtttaattctgttttatcctttcaggaaacagtcttttcagtttctgaagctttaaaaacaactttcttcccactaggtccttgaggctcccaaatgtgcagctcagacttttggtggctttctccaggaaagcacgttccctgacatgaagagttctgaaggctcaattcctctttctagcttcttctgatcctatctaaattgccacctggttatgccctactatctcactagttcattgatgctattaataaaaacataaaaaagaaacaaagaaaa

SEQ ID NO: 519068 - DNA, 268 bp, Homo sapiens
tagctgcattgacatcaacagcgcgagcagcatcagcagcagtagggtaccagttctggcatgtgattcaacggctagtagaggctttcatcgtagtatctctggaagcactgagactgtcccctgggtaggaggttcctctgtagcgagcagctacggtcaggtatcttgagagccctcatggccaacatgctacatggcctgacatcccaaatagtcacagtgccctgggaactcttgtgtatatctctcagacacaggctcatgc

SEQ ID NO: 519069 - DNA, 3231 bp, Homo sapiens
gagagagataggctttccatccatggcagccatttacttttgctctgggagacgtttgtaatagaaaaggcacaactggggtatttattcattccccccgttcctctagtgtttggtggcgttgccgttgcaagtgcgcagggctaaaatgaactggttatcttaggatcatggaaaacctggaatcaaggctcaagaatgccccctattttcgttgtgagaagggaaccgattccaaccctctatgccggaagtgtgagacgtgtgtcttagcctggaagatcttctctaccaaagagtggttctgcaggatcaatgacatatcacagaggaggtttctagttggcattctgaagcagttaaatagcttatatttgttacactatttccaaaatatccttcagaccacacagggaaaggatttcatctataacaggtcccggatcaacctcagcaagaaagaggggaaagttgtgaagtcctccttgaaccaaatgttggataaaacagtagaacagaagatgaaagagatcttgtactggtttgcgaacagcacccagtggaccaaggcgaattatactctcttactgctgcagatgtgcaaccccaaattactgctcactgctgccaatgtgatcagagtcctgtttctgagagaggagaacaatatctcagggctcaatcaagacatcacagatgtgtgtttttcccctgagaaagaccacagctccaagtctgcgacctcacaagtctattggacagccaaaactcagcacacatcccttcctttgtccaaagccccagaaaatgaacacttgcttggggcagcatctaaccctgaggaaccatggaggaattcactccggtgtatatccaaaatgaataggctgttttctggaaaaggagacataaccaagccagggtacgatccctgcaatctattggttgacctggatgacatcagagacctgtcttctgggttcagcaaataccgagacttcatccgttacctgcccatccacctctccaagtacattctaagaatgctggatagacacaccctgaacaagtgcgcctctgtgagccagcactgggccgccatggctcaacaggtcaagatggacttgtcagcgcacggcttcattcagaaccagattaccttcttgcaggggtcctacacaagaggaattgatcctaattatgccaataaggtttctatcccagttcctaaaatggtagatgacgggaagagcatgcgtgtgaaacatccgaagtggaagctgagaacgaagaatgagtacaacctgtggactgcataccagaacgaggaaacgcagcaggtcctgatagaggagagaaatgttttctgtgggacctacaatgttcgcattctctctgacacgtgggttcaaaaccgagtcatccactattccgggggagatctgatagctgtgtcatctaatcgaaagatccatcttctggacatcatacaagtgaaagcgatacccgttgaattccgaggccatgctgggagtgtccgggccctcttcctgtgtgaggaggaaaactttctcctaagcgggagctatgacctaagtatcagatactgggatctgaaaagtggggtttgcacacgaatcttcggtggtcaccaggggactatcacttgcatggacttgtgtaagaacaggctcgtatctggaggaagagattgccaggtaaaagtatgggatgtagacacagggaagtgcctgaagacgtttagacacaaagaccccatcttggccaccaggatcaatgatacctacattgtgagcagctgtgagcgagggctggtgaaagtgtggcacattgccatggcccagttggtaaagactctcagtggccatgagggagccgtgaaatgcctgttctttgaccagtggcatctcctctcaggaagtactgatggcctggtcatggcctggagcatggtggggaagtacgagcgctgcctgatggccttcaagcatcccaagatggtggtcaacacagagagcaatgttctcatgttccagtttgagcacataaagtggcagtatgccgtggaaaaaacgaaacaaaagaagaataaggagaaagaggaggaaaaagaagaaaatagtctcatggaaattctctctaagtgtaatattcaggttcacagcccaagagagtctgtatccagtaaacaaactgtgatccaagagctcctaccaggcaaacctcccaagtcccgagtactcctgaagccggccaagttctcttcagcagtgttaatagaggaacttcaaagtcaaggaaagtcaaaatcaccccgaagagatgcagatgatgtggagaaagcacaaaaacaaggacaattggaaactcctggaaaactgcccagtcacccaaagaaaaagtcttggaaaatccctatgtcacctgaccaattcctcctgactgttagcaccctgcagcacgcccataattccggggaatttgcctatccctgtaggccccaaacagaaattactgatgtctggggaccttcaatttcatacccaaggaaggtcttgaatttcaaaggaaaatcaatccaacgtgcagttgatcggttgagattgagcaatcctcctatagatgtgaaacgaaccagtattccccttgaaatccagaaactgcagcccaacttgaagatctctttgcacagtcctagagtccagtccaccataccccagcccatgattatccgctccaggttctctggcagcttaaagggtggagaccaagtgaccagttcaattgaaagggctgtgtgcagtacgggtcccctgaccagtatgcaggtcattaaaccaaaccgcatgctagctccacaagtgggcacagccaccctgtctcttaagaaagaacggcctcgcatctatacagcccttgatccttttagagtgaacactgagttcgtgctgttgaccgtgaaggaggagaaggagcaccaggaagccaagatgaaggaatatcaggccagggagtccactggagtggttgatccaggaaaagtcagcaaagctgcatggatcaggaagatcaaaggcctgcctattgataatttcacgaagcaagggaaaacagcggcccctgaacttggacaaaatgtatttatctaaaccagccttgggaaattacaatgttttacaataaacagaaagccaagcggaaaaaaaaaaa

SEQ ID NO: 519070 - DNA, 190 bp, Homo sapiens
ttatagaggatccctcgaaagagaagggtggcttggtgatgtctagacccaagagcaggaggtgatgctactgactcaagtcaacacagctcttgataataaagcttcattgctccatatcaatgcctactcactcctcttcgacgctcttcgagactataattcccatataactagttcagataagcat

SEQ ID NO: 519071 - DNA, 180 bp, Homo sapiens
cggacctgcaattagtagtaccaatgcggaggctgacaggtagcgtttatccatgggctccaaatagacgtcagtgctgttggacgtgggagtgccagagtggtacatgtaacgtcaacggaggttggctgaatggaataccacatccatggccatggcaacaaggcttgcccagtggct

SEQ ID NO: 519072 - DNA, 117 bp, Homo sapiens
aaactggattagctgacgtcagctgaccacagacactgaggatgcactgttacatctaaagtcacagtgaccagagagggcgcagtccccactgaacatctggtataatactgaggg

SEQ ID NO: 519073 - DNA, 208 bp, Homo sapiens
tcgtctctacacggatcccctctaaatgctacccgccgggacactgtagctgggttcacgaccgtcgtgacacaggtctagttttacccctacctgatgatgtgttcttgccattgctatcctgctcagttcgacaggaaccgccggttctgacatttggtgtatgtgtcttcgctgaggagccacggggcgaagctaccatctgtgg

SEQ ID NO: 519074 - DNA, 85 bp, Homo sapiens
cgggaccctttttttttccccttaaagaatacccaggaaagaaatataactaaagggaggaaagggcccggtttttttcccccca

SEQ ID NO: 519075 - DNA, 988 bp, Homo sapiens
  misc_feature (600)..(600): n is a, c, g, or t
  misc_feature (619)..(619): n is a, c, g, or t
agcggggggggctgacggtccgcgggcgtaagcggactgcagccgcgatctcctggaggcggcgggatggaggcggcggccgagcctggaaacctggccggcgtcaggcacatcatcctgggtcctctcaggacaaggggggcgttgggaaaagcacgcaatcatccacggagacgtggccctggctacttgctgcctatgctaggctaagtaaggtgggaatcctggatgtggtacctgtgtggccccagttatcccctcgcatgctctggggtcgcatgggacaggggcatgttggctagccagattgcgagctcgcgcgcgtggagcaacccgttgcgttcctgagtaccgtggcagtcagagcaatctcggctctatggtctgtaggcgcgttccctgctggtaggaagtgcggatcgatggccgtgagtgttggatgaggaccctaatgaagaaacgttgcttggagtaaagacgaagtttgtgatccagacctgtgtgccatgggtgggtacgctggaatctacctggttgggtgtgaccacggccgccccgtggggcaacctcccgatgtacgcacaattgggcccatctcantatgaaagctccatgcagntctcgcttaactcatgccacacttgcggggagcctctccgttcggtttcagcactactggctcaccaagagactgagtggtacctggtgtgtggggaaccgttgtaggagcgactgaagtctagtaaccttacatgtaatggcaagacggggcattgctggagttgaatggtgaattcgttggagaaagtatgagcgaggttttcatctggccactacaccttgcaacggaggtgcacccatgcgttctttctccagtggggcgggcggacagagtgaagcttggaccccaggactccgccgtggagtgcccctttcgttatggctcgccgtagccccctgggacctctgcgctccattggaggaaccc

SEQ ID NO: 519076 - DNA, 354 bp, Homo sapiens
gttgagtcacaaatatcacttgtgtccggagtgtgtaggttgcactggtccgagatagtgccactgaactccagcctgggtgacaggtctgttttgagacggagtcttgctctgtcgcccaggctggcacaatctcagctgactacaacctctgcctccaggttcaaacaattctgcttcagcctcccaagtagaggggattacaggcatgcaccaccacgcccggctaatttttgtatttttagtagacacagggtttcaccatgttgcccagtctggtgtcgaactcctgacctcaaatgatccacaaagtgctgggattacaggtatgagccatcacgactagtcctcgtg

SEQ ID NO: 519077 - DNA, 594 bp, Homo sapiens
  misc_feature (573)..(573): n is a, c, g, or t
tctttttttttgggggggagaaaaaaaaaaaccccccccccccccccttgtttgttgtggcccccccccaaaaaaaaaaaaaagaccccccccccccgtctttttttttttttttggggaaaaaaaaaaaaccgcccggttggttttggtttttcccccccaaaaaaaaaaaaaaataaaagtttttttttataataaaaggggcgcccccccccccccggaggtgtttttttttcccccccctggggggaaaaaaaataaaaagggggggcccccccccccccccccctttaggggggggtttttttttttggggggggccccccccaccccccccaaaaaaaaaaaaaagaatcctttttttttatttaaaaaaaacgcgccgggggaaacccttcttcgcaagaaaaatttttggaaaaacctcctcctttttcaaaaaaacccgcgttataaagggggatgtgggggggttttttttttttccctttgggaaaacgagggggtttttcccaaaaaggttttttccacgcatcccttcagtttctgggagaccgatcttgattttccagnaaactgggcacgtcccgcctg

SEQ ID NO: 519078 - DNA, 380 bp, Homo sapiens
gccttggctgactactcgcggagcttaatatggggcactactcgtatcattcaagattaagtcttgggttatttctttgataagaactgaatgtggccgggcgcagtggctcactgcctgtaatcccagcactttgggaggccgaggtggtgtggatcagaaggtcaggagatcgagcacatcctggttaacacggtgaaaccctgtctctactaaaaatacaaaaaattagccgggcgtggttgctgggtgccctgtaatcccagctactcgggaggctgaggcaggagaatggcgtgacaccgggaggtggatgttgcattgagccgagcattggccactgcatccagcctgggcgcaagagcgagatgtctcaaaaa

SEQ ID NO: 519079 - DNA, 300 bp, Homo sapiens
ttttgagacagggtctcaccgtgtttcccgggccagagtgcagaggtacaatcagggatcaatggaacctccatctcccaggtccaagcaaacctcccacctcagcctcccgagtagctgggactaccagtaagcaccaccatgccctgcaaattttttaaacttttatagagaaaaggtcttgctatgttcctcaggctggtcttgaactcctaggctcaagtgatccccttgccttggcctcccaaagcactgggattatagtcacgagccaccatgcccagcctcatcatgtttttt

SEQ ID NO: 519080 - DNA, 425 bp, Homo sapiens
  misc_feature (343)..(343): n is a, c, g, or t
  misc_feature (395)..(395): n is a, c, g, or t
  misc_feature (414)..(414): n is a, c, g, or t
attcggcatgaggggaagtgtttgaaagtcactttgaaagttagttttgggccagcacggtagctcacccttgtaatcccagcactttgggaggctgaggtgggtagattacttgagcccaggaattcaagaccagcctgggcaacatggtgaaaccctgtttctataaaaaataatctgggctttgtagcatatgcctgtggtcccagctactgaggaggctgaggtgggaggattgcttgagcccagggaggcagaggttgcagtgagccaaggtcacgtcactgcactcttagcctggggcaacagagtaaggacaaaaaaatatatatatatttgaaantcaaaggagggcaaatttttgacatgggaaggaagttaacttgccaaaacantagggttttagttaggtantttttattaaa

SEQ ID NO: 519081 - DNA, 203 bp, Homo sapiens
tgatacacctgcatgaaacagaatgttatgatagatcaaattcaaaaaaaattaatatctgtctcaagcagaacgaatggtcagtgttacccagtacactgaagcctgaaggatgatgaagctggtgctctgaaatgatcacggatcaagggcttttttttccaccgtccaagcttctccattatccatttagctaccctaga

SEQ ID NO: 519082 - DNA, 963 bp, Homo sapiens
  misc_feature (76)..(76): n is a, c, g, or t
  misc_feature (156)..(158): n is a, c, g, or t
  misc_feature (163)..(163): n is a, c, g, or t
  misc_feature (165)..(165): n is a, c, g, or t
  misc_feature (171)..(171): n is a, c, g, or t
tagctcgtacccacaccacctgagtctcaccagacgcctcaaccgccttttcatcaatcgcccacaccacctgagncgtaaattatggctgaatcatccgctaccttcacgccaatggcgcctcaatattctttatctgcctcttcctacacatcnnncgagncntatatnacggatcatgactctactcagaaacctgaagacatcggtcattatcctccgtgccttgcaaccatagcaacaggccgttcataggctatgtcctccgcgtgaggccaaatatcattctgaggggccacagtaattacaaacttactatccggcatgcccatacatgggacagacctagattcaagtgaatctgaggaggctactcagtagacagtcccacgcctgcacagcgattctttacctttcacttcagtctatgcccttcattattgcgaggcctagcagacactccacctcctattcttgcgacgaaacgggatcaaagcaacgcccgctaggaatcagcgtcccatggccgataagagatcgaaccgtgtccacccttagctagacaaatcaagagacgccctcgggttacttcgtcttcctggctctccttaatgacattaacgactaattctcaccagagctccgtaggcgaccagacaaattataccctagccaacccttaaaaaccctccccacatcaagcccgagtgatatttcctatgcgctaccacaaattctcgatccgtcctagacaaactaggagggtcctgccctattatatcatctcatctaagaagaatccccatgctcatatattcaacacaagcttatatttcggccataagcatcacttgttgatgctagcgaaaactcccagttactgattgggcaacatttgctaccttcccctgggagtgatccgaatctcaatctatctatcaagttcctggaaaatggggtgac

SEQ ID NO: 519083 - DNA, 817 bp, Homo sapiens
gcggtcgcgttttcccattcagggtttgcaaagtgggccttatatctcgtatactaatttcggctataaccacttatcagtgagtaccaatcatttggagttcttttgtgattgtgttagctcactcaggatgatttcatcttgtaaaaatgtctatcttccaactaaagaaaagtaattgttgcttcttgttatttttgttgttagagttgggattctggtttcttacagctgacttctgttaggtttgttgaaggattactttcttgctttttttagggtgtagtttccatccttgtgttggtgttttccctttattatcctttgaagggctagattcatggaaagatattgtgtgaatttggttttgtcgtggaatactttggtttctccatctatggtaattgagagttttgctgggtatagtagcatttgtcttcccttagtttctctacaacatctgtccaggatcttctggctttcatagtctctggtgagaagtctggagtaattctaataggctggcctttttatattacttgactttttttttccattactgaaagatccggaaccagcaacagacacagaagccctgaaattggcaagatagacgtcagtgttagcagaactagcttcactgatttaaaaaaatagaggtgcacaatgctttggccactccttgaacctgtgtgtctgccaatgttctgaccaggtgtgtgcccattgctgcaccttcattagactctttccttgtacccctcccatacccatttcttgaaaatagacattgtttagatctaataagtcccacctc

SEQ ID NO: 519084 - DNA, 120 bp, Homo sapiens
atacatatacgaacttgagctggtacccccacttcgcgcgtgcggtcttgccggcgtgacgcaccatctctttcagcatcggcacagcgcgtcgccgccttccagcgagaagcgttggcg

SEQ ID NO: 519085 - DNA, 805 bp, Homo sapiens
gcggtcgcgttttcccattcagggtttgcaaagtgggccttatatctcgtatactaatttcggctataaccacttatcagtgagtaccaatcatttggagttcttttgtgattgtgttagctcactcaggatgatttcatcttgtaaaaatgtctatcttccaactaaagaaaagtaattgttgcttcttgttatttttgttgttagagttgggattctggtttcttacagctgacttctgttaggtttgttgaaggattactttcttgctttttttagggtgtagtttccatccttgtgttggtgttttccctttattatcctttgaagggctagattcatggaaagatattgtgtgaatttggttttgtcgtggaatactttggtttctccatctatggtaattgagagttttgctgggtatagtagcatttgtcttcccttagtttctctacaacatctgtccaggatcttctggctttcatagtctctggtgagaagtctggagtaattctaataggctggcctttttatattacttgactttttttttccattactgaaagatccggaaccagcaacagacacagaagccctgaaattggcaagatagacgtcagtgttagcagaactagcttcactgatttaaaaaaatagaggtgcacaatgctttggccactccttgaacctgtgtgtctgccaatgttctgaccattcctttacccgtgtgtgtgcccactgatgaagcccattgccaggtgtttgtgatattggttgctgagaaagagtcagaaaatctccccag

SEQ ID NO: 519086 - DNA, 290 bp, Homo sapiens
cctccttggcagagctcagatgtgctctctctgcatagccctctccctcctagccctcttctttgtgaactccagctgccctgcctcctggactcccagcttctaatcctcaactcttgggactgttgagctctacctgggttctcccttcctgtgctctaggctggaaactcaggacttcggtgggtatttgtaggacttcccttatttgttacctctttctctggagtcactgtctttggccgcctgaggtccagtacctgaaaatcattgttttatatggttagtcc

SEQ ID NO: 519087 - DNA, 934 bp, Homo sapiens
gagaagtggtctatactcgaggagccaggcctcgtctctcatcagccaggccccgaggctcctgccctcccaaagacatgcggtcagctcaagaaagaggcaaagaaacgggagaagcgtagagaaattccaagcagaagcagaagatccaaggagcagcagccacctccaggggagaagaagaccaaaaccagagaagagggagaaacagggatccgtggtggtcagttaccatatgacactcaccgaaccccatcccggggagaaacgaacagatgtcaagtggtccgcatgctcgacgtcgctacagacctcggtatgtcggaggctcgctgtgtaccgcttggctgggatgcatgcagggacttcttcaatgccagagatatgggcgtcctaaatgtgtcagcaggcaaatgccccgacggttgtcttcactgaatgtgcagtgccacccaccaatgtgagcagggctccctgaagctgggccatgctagcgtctaccaatggccagtccgagggactccgcgtgactcgatggcgaccgcatgcgtggggagacctacctgtggggaacccgtggttgtgaccattgcaaggtattgccaaccctaggtggtggtggagaagaagctatggcagtgagcagggtactgtagccggcaccagctgggtccgcgaggcctttctacaggaacgtctgcaatcgtggaaggtggcagaaaggtgaccggatttaccaccagttgaagaacgcttggcagcgtccttggattgggatcggagcctgtgtcactcgtgggaccctgaactctcagcagctgtgacgagaggcctttgtccggcttcaggaggaaggcatcatttatcgcgagtacccgcttgttaactgtggtcctggcaccctcaactccggccatctttgacattgaagtga

SEQ ID NO: 519088 - DNA, 1007 bp, Homo sapiens
  misc_feature (228)..(228): n is a, c, g, or t
atgtcttatcatatagtaaatagcgcatgaccgactgggatgccctgaagcagggcgcggcctcgtcaaacctccgcgtaatgaagcctccgggctcctagctcactgctgatctactgctctacgcgacgtcactaactaacgctacacttcatacttatggccttacaaaaccaacacactaatcgtataccacatagatcgggccgctgattgttagacgacgangtagagcaacaagtgaaccaaggtccaactcaacaagccatccactctggtaacgcgaacatatagggccatatcagactgactgggggataacattctccttagttgatccagcctccatcatatgtgtatgcatcctttccgagaagaatatttgcctagaagcctttattaacaatacgcaagatcatagacactcgcgtacacacctgccatccatagaggaggatcaaccggaccacctctatctgggacatcaacgcacacagtatcaggtctcctccatagtaaagatcctcagctacctcaagactgcatcccagttgtatcatatccgcaatttccatggagataatcgtattggaccctcggaggacatctcccaattaggatctttaagttatgaaattgacaaatacagcaaatgtcgaagaatacaatctcgaaagtgagtgacgtggactatacgaaattcatcagcatgtgtgctcatcaattattcagctcttcctatatccacgaacttccttgacgctacttgtctgaacgtgtcccctatttagacaaattttccagacggtatggtaaccggtatcacactattttgatgtgccacctactgagactgtctgaggtccttttgtcgtcgttactttggcgacctcattatctcgcgtaatctgcttcgctctcgccaacctaaatgatttaggtttattctcaaaaaattcctttgggtttctaaagcagcgacttggtactggcatttcgaccctccg

SEQ ID NO: 519089 - DNA, 1404 bp, Homo sapiens
caggagtttgagaccagcctgaccaacatggtgaaaccccgtctctactaaaaatacaaaaattagcttggcatggtggcgggtacctgtaatcccagctgcttgggagtgtgaggcaggagaatcgcttgaacctgggagaccgaggttgcagtgagctgaaaccgtgccattgcactccagcttaggcaacaagagtgaaactctgtctcaatcaagtccatcaatcaatcaataaaatagaggtcatgctgaaaacaagaaaaaaaaaagaaaacaacggggggaacctagttctctcttcccgaggtggacccataagagaccgggggaaacccggggcaccgctaggagggagacacggactggaatggaccggcccgcgccacgagggggtcgccaaaacattgggagagaaaccgcgggcacaggcacagggtgcgacccaaggggagcccccgcgggatactactcaacacaaatgccgtgttcaccgagaccggaacataaagagtaaccgtgcaaaaacggtggccacatatccccagggtggggagaaataagaagaaggcacctcaatcaccactcccaaacgacaataagggggcaccggacaacatactctcccgcgggcgagcagcggccacaaagggcaggctggacacaaggacattcacccgggaggcgcacactcctgaacagcctacagaagaggccctacagagcgacagattgtggcgcaagaatactccgacacgtggcgaacgacgcccacacgaggaatgtgactcccaccgaggggcataaaaacgccccgcagaaaaacacgggtgagcacccggggggaaagaccccctggtgaacacagagtgggtgggaccacaaggggggacacacagcgccttcacacagcggacatataaacccgagggcaaggaagggtgtacccaacggggtcgagcacgaagagcgacatgagcgacccccgggagaaactggtagttaccaggcaacagaaaaacgcccccacacatactaccctagtgagtaacacaccgggtattatattacgaggcgggcgagacaacactcgtcgcgaaaacgaatgaactccgcccacgagtcccgtagcagaggaaaaccccgccgttaacttcacccagctcccgtctcaccaagggtgagaaatccacacgctgaacacatcgagatagggaacacacgcgtccttgtggccggaaaaatcaccacgagcagtgggtgagagctgggaagcccccaaaaacacccacatcgcgaagaaggcgccacaagaaagaacagagcagggatagtcaccaccgcacctagacgacagcccccaacagggcgagcaagaccacaagggagcacgccaaaaacgag

SEQ ID NO: 519090 - DNA, 315 bp, Homo sapiens
caccactcatacaccgggaggtcctcaaaagaatctggcagccaggatgcatgtggctcatgcctgtaattccatgcacttctgaaggctgaggtgggcggatcacatgaagtcaggagttcaagaccagcctgactaacatggtgaacgcccgtctctactaaaaatacaaaaattagctgggcgtggtggcgggcacatgtaatcccagctaactcaggaggctgaggcaggagaattgcttgaacctgggaggtggaggtagcagttgagctgaggtcgcgccgctacactgcagcctgggtaacagtgaga

SEQ ID NO: 519091 - DNA, 171 bp, Homo sapiens
ccgcgaatttagttagtagtagagatggggtttctccatgttggtcaggctggtcttgaactcctgacctccggtgatccgcccgcctcggcctcccaaagtgctgggattacaggtaagagccactgcacctggctatgcaaagtttttgtcgacgcggccgcgaattta

SEQ ID NO: 519092 - DNA, 760 bp, Homo sapiens
aggaccaggatggctgcatactttggagggctgattctgcacgcctggctggtcgcctgtaccaaggaccgcttctctagttgtcatttaaacatccgagatggataccaccatgcatgatcctacttacaaccataagtttaacccacgaccatattcccataaatagatggtggcatgagcagccactatatcacgttgataaccagagcgcacccttgttgtgtaatacaaaggcataggattttgtccagctttcactagcctagagggtggtcatcactaaccatactgactcggattacatgtgattatgaccactgtgtaccctggacaaggtgccgctgactatatgcatggaaatgccgtgcctaaagctggcaaggcagggcttttggcactttcagctttatcctttgctgctcttccctatccaactatcacgatgcgggcatatgcatagctgcgccatgctaggtagttgtgaccttttcgattaatactttgaagacatgtgaatgcccgtttgtctcagctttgtcatgcgattaagctcacactatggcaaacttaacagctttgcccattgttcgacatgtctcatctgttaacacacgattatgctcagacttaatctttgacgaacaggtttgagagcattatatcataggtaatagactgcgttctatattctgtagagtcatgtgaatgcctgccagctcctatatactcaccacatactaacatggtatatagcctt

SEQ ID NO: 519093 - DNA, 363 bp, Homo sapiens
tgtgagtggaatgtaaccgatgcaggtgcttagacacacagtataggaatacctccaaaattaatatagaaaaccatatgacccaggaataccagtaatgggtgtccacccaaaagaaaggaaagccggctcctgggacagatatttgtacgccctgcacacagcagtgtaatgataaccaaaaggtagaagcaacagaagtgttcatcgactgggtgacttctactaagcagtgtggtccatccatagaatggaatactattcagccttgaaacggaaggaaattctgatgctacaaaatgactgaaccttaagcacattctgctgagtcacatactgtgtgagtccacctagttcaggtcc

SEQ ID NO: 519094 - DNA, 919 bp, Homo sapiens
  misc_feature (231)..(231): n is a, c, g, or t
  misc_feature (237)..(237): n is a, c, g, or t
  misc_feature (239)..(239): n is a, c, g, or t
  misc_feature (243)..(243): n is a, c, g, or t
  misc_feature (249)..(249): n is a, c, g, or t
  misc_feature (253)..(254): n is a, c, g, or t
  misc_feature (259)..(259): n is a, c, g, or t
  misc_feature (274)..(274): n is a, c, g, or t
  misc_feature (277)..(277): n is a, c, g, or t
  misc_feature (280)..(280): n is a, c, g, or t
  misc_feature (283)..(283): n is a, c, g, or t
  misc_feature (289)..(289): n is a, c, g, or t
  misc_feature (292)..(292): n is a, c, g, or t
  misc_feature (294)..(294): n is a, c, g, or t
  misc_feature (300)..(300): n is a, c, g, or t
  misc_feature (303)..(303): n is a, c, g, or t
  misc_feature (308)..(308): n is a, c, g, or t
  misc_feature (330)..(330): n is a, c, g, or t
  misc_feature (334)..(334): n is a, c, g, or t
  misc_feature (336)..(336): n is a, c, g, or t
  misc_feature (354)..(354): n is a, c, g, or t
  misc_feature (362)..(362): n is a, c, g, or t
  misc_feature (375)..(375): n is a, c, g, or t
  misc_feature (380)..(381): n is a, c, g, or t
  misc_feature (545)..(545): n is a, c, g, or t
gaatttgggaaatgaacgaaaacaattcaccagggaacactaggccagtttcgattaattgaccccataaaggaatttgcctcaagccaagaatcggcaaaggcgtcccaggccccggcaaggttacagcttaatcagccaagaagtgccctatggttaacccaccaaccaccaccaacacaggtgccagcttgaagggcggggccttgccacaacaaggacgggtccctnaagcancncttnttccantttnnctggngctggcctcactcangtnatnatnacgtcnccnantggtcnagnccggntagacccgaagatgatcagcangtgncncgccgtgtggtgaagatnttgccagntgggcagggctgntcctnnacctgtggaccctggtagccccactcctcctgcgcaaccgcgacttcagctgaggcagcctcacagcctgccatctggtgcctcctgtcacctgggcgtctcggctcggtgacagccaacctggcccctccccacaaccaatcagccagggtagccccccaccnctgccccagctccaggacctgcccctgagccgggccttctagtcgtagtgccttcagggtccgaggagcatcaggctcctgcagagccccatcccccccgccacacccacacggtggagctgcctcttccttcccctcctccctgttgcccatactcagcatctcggatgaaagggctcccttgtcctcaggctccacgggagcggggctgctggagagagcggggaactcccaccacagtggggcatccggcactgaagccctggtgttcctggtcacgtcccccaggggaccctgcccccttcctggacttcgtgccttactgagtctctaagactttttctaataaacaagccagtgcgtgtaccatgaaa

SEQ ID NO: 519095 - DNA, 747 bp, Homo sapiens
  misc_feature (231)..(231): n is a, c, g, or t
  misc_feature (237)..(237): n is a, c, g, or t
  misc_feature (239)..(239): n is a, c, g, or t
  misc_feature (243)..(243): n is a, c, g, or t
  misc_feature (249)..(249): n is a, c, g, or t
  misc_feature (253)..(254): n is a, c, g, or t
  misc_feature (259)..(259): n is a, c, g, or t
  misc_feature (274)..(274): n is a, c, g, or t
  misc_feature (277)..(277): n is a, c, g, or t
  misc_feature (280)..(280): n is a, c, g, or t
  misc_feature (283)..(283): n is a, c, g, or t
  misc_feature (289)..(289): n is a, c, g, or t
  misc_feature (292)..(292): n is a, c, g, or t
  misc_feature (294)..(294): n is a, c, g, or t
  misc_feature (300)..(300): n is a, c, g, or t
  misc_feature (303)..(303): n is a, c, g, or t
  misc_feature (308)..(308): n is a, c, g, or t
  misc_feature (330)..(330): n is a, c, g, or t
  misc_feature (334)..(334): n is a, c, g, or t
  misc_feature (336)..(336): n is a, c, g, or t
  misc_feature (354)..(354): n is a, c, g, or t
  misc_feature (362)..(362): n is a, c, g, or t
  misc_feature (375)..(375): n is a, c, g, or t
  misc_feature (380)..(381): n is a, c, g, or t
gaatttgggaaatgaacgaaaacaattcaccagggaacactaggccagtttcgattaattgaccccataaaggaatttgcctcaagccaagaatcggcaaaggcgtcccaggccccggcaaggttacagcttaatcagccaagaagtgccctatggttaacccaccaaccaccaccaacacaggtgccagcttgaagggcggggccttgccacaacaaggacgggtccctnaagcancncttnttccantttnnctggngctggcctcactcangtnatnatnacgtcnccnantggtcnagnccggntagacccgaagatgatcagcangtgncncgccgtgtggtgaagatnttgccagntgggcagggctgntcctnnacctgtggacctgcccctgagccgggccttctagtcgtagtgccttcagggtccgaggagcatcaggctcctgcagagccccatcccccccgccacacccacacggtggagctgcctcttccttcccctcctccctgttgcccatactcagcatctcggatgaaagggctcccttgtcctcaggctccacgggagcggggctgctggagagagcggggaactcccaccacagtggggcatccggcactgaagccctggtgttcctggtcacgtcccccaggggaccctgcccccttcctggacttcgtgccttactgagtctctaagactttttctaataaacaagccagtgcgtgtaccatgaaa

SEQ ID NO: 519096 - DNA, 883 bp, Homo sapiens
gctccggacagtatgcttgtggacagctgcaactatgcctgacgctgagctatggccgtggtgtgcatgggtcacgagtgccatgatgtgtcagcctgctgtgcgcatcccgtgattgactcacaggatatcccaaggtggcccgtgatcatattaccgatgagatgtattgttgtcgccgggaattaagtgtggggtccagaggtcctctttgacagggtcactgacgtactgatgggcctcatgtaattagtaagcagaagtgtgttggagctgatgctcgtggtcgataggaagatctcagatggggcagggtaaattaggcctgacctaaggcaaatactgcttggcgtgtagcgtatgcagaatttcctaggctgtacaattgtctcgaggcaaggaagtcagtctatatctactctcaagtacttatgtaggacatttttggtacagcacagctctaattttaaattattggtataaccagttctggggtgtgacctagtttatgttgagaattacgtgttgaaaacccttgtagattctggtaaatgtctgtataaatgtgtagaaataataccgacgcggtgagatatagaaaagaccttagttgtaggtgattaatagaggtctaatgtaacttgtgaagcatggaagtggtttaaatggttaactaagcgggggggtcagaacattgaagtagttatacttttttaaccaatgtttgacattcacatggtaagacatggactggtctactgaaacaagtgttctgagtcaaattcttatatgggggaagtatgaaggacgggatgggaagggaacaatttaaccaagaagggtaagattttatttgagagggttaaaaagagattatcggaag

SEQ ID NO: 519097 - DNA, 759 bp, Homo sapiens
  misc_feature (231)..(231): n is a, c, g, or t
  misc_feature (237)..(237): n is a, c, g, or t
  misc_feature (239)..(239): n is a, c, g, or t
  misc_feature (243)..(243): n is a, c, g, or t
  misc_feature (249)..(249): n is a, c, g, or t
  misc_feature (253)..(254): n is a, c, g, or t
  misc_feature (259)..(259): n is a, c, g, or t
  misc_feature (274)..(274): n is a, c, g, or t
  misc_feature (277)..(277): n is a, c, g, or t
  misc_feature (280)..(280): n is a, c, g, or t
  misc_feature (283)..(283): n is a, c, g, or t
  misc_feature (289)..(289): n is a, c, g, or t
  misc_feature (292)..(292): n is a, c, g, or t
  misc_feature (294)..(294): n is a, c, g, or t
  misc_feature (300)..(300): n is a, c, g, or t
  misc_feature (303)..(303): n is a, c, g, or t
  misc_feature (308)..(308): n is a, c, g, or t
  misc_feature (330)..(330): n is a, c, g, or t
  misc_feature (334)..(334): n is a, c, g, or t
  misc_feature (336)..(336): n is a, c, g, or t
  misc_feature (354)..(354): n is a, c, g, or t
  misc_feature (362)..(362): n is a, c, g, or t
  misc_feature (375)..(375): n is a, c, g, or t
  misc_feature (380)..(381): n is a, c, g, or t
gaatttgggaaatgaacgaaaacaattcaccagggaacactaggccagtttcgattaattgaccccataaaggaatttgcctcaagccaagaatcggcaaaggcgtcccaggccccggcaaggttacagcttaatcagccaagaagtgccctatggttaacccaccaaccaccaccaacacaggtgccagcttgaagggcggggccttgccacaacaaggacgggtccctnaagcancncttnttccantttnnctggngctggcctcactcangtnatnatnacgtcnccnantggtcnagnccggntagacccgaagatgatcagcangtgncncgccgtgtggtgaagatnttgccagntgggcagggctgntcctnnacctgtggaccctggtagccccactcctcctgcgcaaccgcgacttcagctgaggcagcctcacagcctgccatctggtgcctcctgtcacctgggcgtctcggctcggtgacagccaacctgctgcctcttccttcccctcctccctgttgcccatactcagcatctcggatgaaagggctcccttgtcctcaggctccacgggagcggggctgctggagagagcggggaactcccaccacagtggggcatccggcactgaagccctggtgttcctggtcacgtcccccaggggaccctgcccccttcctggacttcgtgccttactgagtctctaagactttttctaataaacaagccagtgcgtgtaccatgaaa

SEQ ID NO: 519098 - DNA, 892 bp, Homo sapiens
  misc_feature (16)..(16): n is a, c, g, or t
  misc_feature (91)..(91): n is a, c, g, or t
  misc_feature (139)..(139): n is a, c, g, or t
  misc_feature (431)..(431): n is a, c, g, or t
  misc_feature (518)..(518): n is a, c, g, or t
  misc_feature (524)..(524): n is a, c, g, or t
  misc_feature (555)..(555): n is a, c, g, or t
  misc_feature (563)..(564): n is a, c, g, or t
  misc_feature (575)..(575): n is a, c, g, or t
  misc_feature (628)..(628): n is a, c, g, or t
  misc_feature (632)..(632): n is a, c, g, or t
  misc_feature (642)..(642): n is a, c, g, or t
  misc_feature (644)..(644): n is a, c, g, or t
  misc_feature (663)..(663): n is a, c, g, or t
  misc_feature (704)..(704): n is a, c, g, or t
  misc_feature (707)..(708): n is a, c, g, or t
  misc_feature (742)..(742): n is a, c, g, or t
  misc_feature (746)..(746): n is a, c, g, or t
  misc_feature (846)..(846): n is a, c, g, or t
ggagtaagaatggctnggaagggatgagcaaaggaagagaaagagaagtgtccaggagggagagaatcctgagagggtcggggagtccgcngaagactacaggcttggacaggtcgccagtagcttatttcgcggcgancaccattccagaggtggcaccggtcggctggcgtccctcttcagttctctggagccccagattcaacccgtgtacgtgcctgtgcctaaacaaaccatcaaaaaaacgaaacggaatgaggaggaagaaagtacatcccagattgaaagaccactttcgcaagaacctgccaaaaaagtgaaagcgaagaagaaacacactaacgcagaaaaaagttggcagacagggaaagcgctctagcgagtgctgatttagaagaagaaattcaccagaaacaagggcagaaacaggnaaacaattctcaacctggtgttaacagtagcacgatagacaaaaatacttgatgacacagaagacacagttgtcagtcaacagaaangacacnattcaaatcaaccaagaagaagagagattcnaagaatgnngagaactgtgnttgtcgggaattctgcctgttaccatgtattaagaagaagctgaagtcgtctnttanagagtatggncnaatagaatctgtacgaatncgtctctgattccagccagagggaacgctatccaaaaagtnggnngcaataaaacgtaaaatcatcctgatcagaaaantatnatgcctatgttgtggttaaggagggagaatgttgccacgccaggcattgaaaagaatggggccccatgcagaaggaattccgattaaaggtgactcgctntgagaactctctaagacaaagacggtttgggaacatccccataaga

SEQ ID NO: 519099 - DNA, 346 bp, Homo sapiens
gaattcccccccccccccccccccccaatttttttatgtgttattaaggagtgatgaaatttcatcctttgggatgtggacatccaattttcctggaaccattgggggaaaagactgttctttcctctattccattagattggaaccctggtcaaaaatcacttgaccctagctacactggtttaatttttcactcagctctattccatagatgaatatatctatccatattccgcgccccacagtcttgattattgtggcttcatagccagtcctgaatttgggaaatatcagttcttccagcttggtctttgggttgattcttgttgtaaagccatatgaatct

SEQ ID NO: 519100 - DNA, 369 bp, Homo sapiens
taaaaagcagcctcctatatttatctagagcactagtacagtcagttgctccatatctgcatccatggattcaagcaaccacagatgaaaaatattcccaaaattaaaaaataaaaatataccaattaaaaaatacaaataaaaaatacagtgtaaacaactatttacatagcattaacattatattaggtattataagcaatctggagagtacttaaagtatacaggaagatgtgtgtaggtcatatgtaaatactacaccattttatagaaagaatctgaggacaggcatagtggcttacacctctttatttagaggcagattctcgctctagtcgcccaggctggagtgcaatggcacaatctcag

SEQ ID NO: 519101 - DNA, 144 bp, Homo sapiens
ctttagggaggagagtgtgaggcagtaggagggccacacccattgttaggcaggagtagggcgatgatgacagaggggggacgatactgcagattcaggataagttcagaggtgaatggcaagacgtgggatcagttggatttg

SEQ ID NO: 519102 - DNA, 253 bp, Homo sapiens
agaagaaggaggttcctgctgtgccagacacccttaagacaaagcgaaggaatttcgcagagctgaagatcaagcgcctcacacagaagtttgcccaaaagatgcttcgcaaggcaaggaggaagcttatctatcacaaagcaaagcactatcacaaggattataggcagatgtacagcactcaaattgcgagtggcgaggatggcaagacaagctggcaacttctatgtacctgcagacccaagtgggcgtt

SEQ ID NO: 519103 - DNA, 1535 bp, Homo sapiens
gaggcactgaggcagccagcgcaaagggctatctgcatgagggggcagcgcggagcttgaggaaaccgcagataacgtcccctcctctattgaaacgatagacgattaatacaactacttaaaaaactattagtcaaatacggtatactaacgatactcgcttagccgctaaacgtacatcaaccagtaactcttacatacgctcaacgatcatcaacgacgaaaactactgacaagactatacgaacgacgctacgcactgacgcgaacggaaaacagactaaccacgcgtacactaaacaccactgaccggacgcgctcagaccactgacacgctcacctacacctggaggtacacaacaaatcgtaacttcaaagacacgacacaattcgacgaagaacagggacactaccacggaccgctccacgaaaaatatacacgtagcacaacaactaccacaccgcgcgacaacactgccatatagcagacgacaatcaaccaacctgacacgcgtagacatagtaaaaacacgagacaacccaagatacaagcataccaaacaaagcatatgataacggactgcacttacaaaagtaaactcagcaagggcagcatcttcctacacacacagcaggactcacacaacacccgaaagaggctgaacaacaacacgaaccccagagaaaacacccacgtgcacgccaagagggaaggacaactcaggcgctgccgcataacaacaacagccccaaagaatataacacagaccaacaataccgatcaaacacgcgccaagacacgcaccaacatcgggacagcaggactacacttaggggacgcccggacacagaaactgaacaccccaacgggcacgcaagcacatcgacacagatacgagcaccgcgtggcaagccacacgctagagcaccaacaacacaccgacaagtctcacacggacaatcggccaacaacacaaaacgaacctacaaccgacaggcacaagcgggcaacacacgtagcacacgccaacccacacaccaaaccatatacagccacaccacaccacaaccagccgcaacagtaaaccccctgacgacgaccagcagccgccgacgccaacaagacacacgacgcacaacaccaacatatccgggcaccagtgacacaccaaaaccaaacacgcagagcgacagcagacgcacacgcaggcaaaatactaggaaacgcataacgcaccacggacaacaagagcaccaggcgaaaacgaagcacaacaaaacacacacacatcgcagcaagaaaacaagagcagtcacgaagcaaacatagccagcacggcaccaacagacgcagtacacaactcaccagacacgaacaacaacaaagccaggcgatcgacgtaatataacagcaacccaaggcaacgaagacgacagccagacaccgaagcaacctacagcagcgacaaatcgcaagcaccgagacctgacgacagcacatcagacaccaacagaactgaagtcgcacacagaat

SEQ ID NO: 519104 - DNA, 200 bp, Homo sapiens
gtgccagaggaaaaggtacaaatatacagcattgaggtgtgagaatcatagaagctactagacaattaagatatctagacacatacagtatcaaattagcaaaagatgcaagggaaagacattgcttttgtattgagacgcatcacatagaaatcactaggtgtccctcaaacaaatttggcggtgcaactactacatag

SEQ ID NO: 519105 - DNA, 857 bp, Homo sapiens
gtatagggtttccttttggagtgatgaaaattttctagaattagatagtggggaaggttactctgcatataccaaaaaccactgacttgtaaattttattctttttaaaaaaactcttatctcatgacagattactgacttgtaagctttaaaagggcatattttatatgaattatgtttcaacaaaaatgtaattaacaaattccatttacaatactcacagacttcattacactcaatatcactcaggttcttgacactgcaaaacctctgtagttcagagttgtaatataagttggtgaaagccatccccaggcagtgccctggaagtattaggaatgtataatccaaggattttgagattgttgcatagcctagctatgcgaagagaatagaaaatattaactctgcttgcaggaagaaaagggcatatcttctattatctatcctaacccacgttattgtatatccatcattacaacatcagactcccaggcctccagaccagaaaactggttctccctgactcctcttcctctatagtcattcaaactctaagacctaagtatctttcttctgtatgctcctcgaatctgtcactttacttctttccaatgttcacgcggggaggatctgcaagaacacggtgtgtgtggtcaaatcaggagcacagccgcagcatgggctgcatctgcggaggtgggggagctgaaggccgaggaatgacgttaccggggatctgcgtcagatagccggggtggatgccggctccagtgttgaggtcactcagaaaaaagagagaaccgcccaagtgggggaaaaatcaaatcctagaaaaagagccataaaaaggatgg

SEQ ID NO: 519106 - DNA, 136 bp, Homo sapiens
  misc_feature (42)..(42): n is a, c, g, or t
caaaccgttaagaaaggatcggatctgcagaagaaacttttnacgctctcatcgagtggacaccttttatcaaagatattatggaggatgctattccgataactagattagattcaaaagaatggccatattgctt

SEQ ID NO: 519107 - DNA, 1324 bp, Homo sapiens
  misc_feature (720)..(720): n is a, c, g, or t
ctgcgcaagggtcggtggcgcacgtgtgaaaccggggaactccatggaagccgagtccggcgactacgaatgttcctgaggtgcccggtccacaggtctactctgccgcgggcggggagtccgctcggatacgcgaaagggggcagcgacgctgcgtcgatgcgacctgatggaggcctaatgtgcgtcgtaccacgggaagcgcagatctgggtgccccgcggtgtactcatgcgtatggacattagtccggggatcacctgtgtgaaacagagcggaccagagcttcctcttacaccttaaccttggtgttgctgggacccagggctgagaggcgcccagagcaacggactgtgatgatgctgtcggatgcacaatctggcttgggacaaagccccgacccttcagagtggcacgttgatgcacgaacgaagaggacggacagatgaaggaggatgacagaagagcggaagatcctcagctggcacgctggccattggttgcccacattgatggctggcttcaaccggaggttcggggtgtcatggctggggtgcaggacgccctgtggttggcgcgtgtgggtcagagaaaggggccaggtgggcggtggtgtgcgctagaggccggtcttctgcagcgtggttggatggagcccccaagggcctggggaggccttgcctccgggattgacgcatggccccaaattggcgcgcccangtgttagtcccttgcggcggggacacaaatagtggcgagggcgctttttgcccttgacatgtgttcacgccccgagtttacctcggttctggcctgctcgaccccgggatgctgcgcagcacgaggctatcgtagccttttgggcaccgctaataggaggaggcgtcctcccatgaggcacgtgtttagtcacccgagggagacaattgatggtggcccaccaacaacgccccgtctggtaggaaaccacatcactgtgtgtgtacccccgaagtgtggaaaaaacagagagtgttttgcttcacatctcctgcgaaaaaaggcgctcgcacctaacgaccaatggtgagaatgactacgtggggtgggcaccacacacacaagaggacggtgtgttgctgtactaaacataacacaccgaagcccaatactaggtgcagaggcaaaagcaaactcaacctctactatcgatggatgaggagaccaccccacatcagtagacgagtacagtaggcgaacttagaataacacattcaagtctaagaagtatataaattgacgtatgactaacagttaatcagcagcacgctgttgttcataacag

SEQ ID NO: 519108 - DNA, 685 bp, Homo sapiens
ttggagggggaatgctggagatggtaaggggtatggagacttatcatataagtaatgctagggtgagtggtaggaagtttttccataggaggtgtatgagtgggccgtagcggaatcgggggtatgctgtccgaatccataaaaccagggaggttaaaagtagggtctgggtgacaaaatatgtggtgtagagttcaggggagagtgcgtcatatgtggtccctaggaagatggtaggggtgagggtgtttattataataagtgttggtgtatcggctatgaagaatagggcgaaggggcctgcggcgtatcgatgttgaagccgtgagactagttcggactcccctttcggcaaggtcgaagggggtccggtggagtctcggctagtggtgggagataacatcatattattggcgccaagggtcatgatgggcaggagtaatcagaggtgtcctggtggtcggcggatacagggtggcgcacgaggtccaaaggacgccacttattagcaatggtcggatcagtcaaaatggatcgcgctagggtcgactcccatatgagcattggtctgggggctactagctcgcagttgccgccgatcagggcgtaatatggacgtttgatggcccaccctgatcagaggattagagcaaacggcgctaggctaacaggtgggcacacatca

SEQ ID NO: 519109 - DNA, 467 bp, Homo sapiens
gaacggacgcgcgacgctggtagacggcgccggcacagcagcgtcaggcccagtgtttcgatgatcatgcaggcgatggcggcggtgaacccgccgaaaccggctgatggctgagatcaacaccaggcgcgagagaataaagcacacaccaaataccgtcaggcaatacgccgcaccggcccagccacgattcaggtaatacagggtgataaaggtcgtcaacgtgccgtagccaatcgaagccaggcgcaggctggcgccgaacggtgcgatacgcccgaacaccgcccaggacggcagccgctcgccacgtacaccggcaccgacggtttattgcggatcagcaccagtcccaacgacgccaacaccgccagggcaagaccgaggctggtgtagccgtaatcagccaccatcaccacgccaagtggcgcaccaatcgcaatcgcgccgtagggcgtccgtagcgg

SEQ ID NO: 519110 - DNA, 291 bp, Homo sapiens
tgacaaattatacttgtacatatttagggggtacaaagtgatgttacgatttatggatacaataaataataaaatcaagttaacataattcatcacttcaaatactttaagttttttgtggtgaaagcatatgaaattaccgtcagcacttttgaaatcgacattattatttactatattcaccgtgctgtacaatatatctcataaaagaaaaccacattcctcctgtctaattgatgttttgtaccctttggtttttcattttctttctggaagttattctcaagtttg

SEQ ID NO: 519111 - DNA, 897 bp, Homo sapiens
gtcacgcttctgaaccaatgactgaatgtcaagatgttcgttaattgctagatgttggtgtcaagaccagctgtcttcagatctattaatgtagggaatttttccctaagatggacaattcctatattgtgactgtggtgaagatccacgtaatctgtgatagggagtgttttctcttgccttatagttgagcgtattgggtttgacagaaagcctcagcagaagagcgttggatgtgagaaatctacgattttcttctacattcattgatgccccgttgtaatgtttgcatacactagaaaatgccttcaatttgtgtttgaccagaatttcgatactggtcagaaattttatactgccaagcgaagaagactcaatttctcagatctataaatgggatacatttgtcatcctctagcaactcctatatagagagttttaactgaatatgttacatataagaattaaattcttctcaaataattcttaagctcagtaatgagcctaacatttactctgcttgggtctctacacatgggatctcagggtataagatgtagcatttcaatgtgtaagatatatgtactaaagcatatgtgtttgctatcttcagtcattaacatccttctttctatgctggtgtagttttgtaagataatatatgcggaatggggcggagataatggtccgaagcaggatcttcatttggtgggcttgggaatttacaggtgtccgttttccaagaggaaaaaactaaacgggttgatgagttaaatgtgaaagggcgcgttgggggtgcaccttttaaaaatgaatccaagaagagaaaaaaattgtgcggccgcaaataaaaggggggcgaaaaaaatgggcagggaaaatttaaacaggggaaag

SEQ ID NO: 519112 - DNA, 953 bp, Homo sapiens
  misc_feature (315)..(315): n is a, c, g, or t
  misc_feature (946)..(946): n is a, c, g, or t
attaatcccctggcccaagccgtcatctactctaccatcttgcgggcacactcatcacagacgctaagctcgcactgatgttgtacctgagtaggcctagaaataaacatgctgtgcttagatgtccagtccgtaagccaaagagagaagtgcaaccccatcgtaccttgcagaaagcatgctcaattctaggaggctatttccgtgcacgcaaggcaagcctgcaggccactaagtgccttcttatatagctagtccgttcttcaacgaatatacgtgctctcggacgaggaagccagtataccaagacttacncaatcaaggactcattcacttaataatttcataactggcatataaggcaatgaacactagtgaatagcccccatttcacttctgaagtgcccagagtgttacccataggtcatccccatctgacaatccggcgctgtcgttcttctgcacatggacaataaactagcccccatctcgaaatcagtataccagaatctctcactcagttaaagtaagccttctcctcatctctcaatcttatccatcagtagcgaggcgagttgaggtggatgtaaggcaaacccagtagcaaaatcttaggatacgcctcaattaccacataggatgaatgtagcagttctaccggtacaacctaacataagcattcctagtttactattatattatctaataatacgattctaatgatcaattaaactcaggagcagagctattatatttgactggagaagtaaatgggaagactttattgcttcagccccttcctagagggggccggaacggtttgccaggcctcggagatcaaaaagttttccccgtggcaacctgttttttaggaatacccacacctttagaaaggggggaacccctctcacttttaaaaacggggccgggggcgcgacggagaaanagcaaaa

SEQ ID NO: 519113 - DNA, 1253 bp, Homo sapiens
gacagcgatgagtcctggaccacagagagtgccatcagctccgaagccatcctcaggctccagtgtgcatgaatggaggggagatgagaagccttattgcctgcccagttcctggatgtaaaaagatgatacaagaatgtgaatggcataaagtatcgatcgctaagaatggtcacaggaacacgatgattcgtgtccgcaaagccattacacaagtgtcggtctgtgggaagagttacaagacttagctccaagggacctgcggatccgacagcaatcaactttccatcccccggctgtcggacgtgacgcattatcatggaagatgcgtgcaactaactagtgctggtcattagagctgatgtcctagaggaaaagtccgctcgaacccgaggcagattggctggaattgttgacaagacagtcacatcactttattatatgcagaggggaagcgaattgcagcgaatccctcttgagaagacaaacaacagaacttgaaatgcagtgctttaaaattctatactagtaattctggacagtgatgtatcttggtagagttaatgatttggtacattggcacgatgctaaatcatcatactccatatttcatggagcttgtgactatacaggtggctagagaagagaaaagctctagagtactatcaggcacattttgccccagaacaaaaattctacactggatggggcactgttgcgcaaatagataacactaagcatagaaagaagactaagcaaactaatagaaaagcacggcaaaatagaccaaaaagacaaaggtcgacaaacaaccacaacaaggaagcagaagagaacagagagaaaacaccgaatacagagagaagaggatcaatagccgaaacgggacactccacggaaagcgcgaaacgaggaacagttcacaccgaaggcaaggaagagggacagaaaaaagagagaacgagcgacacacaaaggaagacacacataaaaaagcagaaagcagaaacacccaggaagtgggggaacacaaagttttaggtgaggagcaagggatagtagtgggaaacaaaaagaggattaagccaaggaagaagaggcagggtataattggagggaagaagagataaatagaaagaaaaaacagaataatgtggaggagtggggacaagacaagaaagaagaaagaaaatgaacggaatgaagtagtgaaagagaaagagggagataaaagatggtggaggggaaataaa

SEQ ID NO: 519114 - DNA, 484 bp, Homo sapiens
  misc_feature (28)..(28): n is a, c, g, or t
  misc_feature (54)..(55): n is a, c, g, or t
  misc_feature (67)..(68): n is a, c, g, or t
  misc_feature (352)..(352): n is a, c, g, or t
  misc_feature (380)..(380): n is a, c, g, or t
  misc_feature (390)..(390): n is a, c, g, or t
  misc_feature (416)..(416): n is a, c, g, or t
  misc_feature (422)..(422): n is a, c, g, or t
  misc_feature (425)..(425): n is a, c, g, or t
  misc_feature (429)..(429): n is a, c, g, or t
  misc_feature (442)..(443): n is a, c, g, or t
  misc_feature (447)..(447): n is a, c, g, or t
gagaatatcccgagggggaaaacgcccnctgatagtaactcatgggactcacgnnacctcctgagtnnccattcactgttatctggctctgagttggtgatcttttatcttgtaggtttggtcgaacgcttctaaaaccttttgctgcaagagaggaatatgtagcatctccgttcagtgtctcctgattgccatcattgtaagatctccaagctgagtctggtgactgagaatcacgccctgcagccaataggtttggagaactttgcactctcttcacagatgttagcgtaacagacatggcggcacgtttgcgagcacacccaccgctatctgtgttcattttcacctnggagagtttgttattaaagtcttcagtnttcctacagncagctgagttcaacagttgctctatncagagnaantagnagtcagtgccctnntacngtaagagaatggtttatgtacccctgtgtgtaaaagt

SEQ ID NO: 519115 - DNA, 140 bp, Homo sapiens
ttacatgatacaatcgagctctgtaccagcagcttgggcccagatttaagattcacaaagctaaagaataaagatggccggacacggtggctcatgcctgtattcccagaactttgggaagctgaggcaggtggatcacc

SEQ ID NO: 519116 - DNA, 385 bp, Homo sapiens
gttgcacagattccttgtagaacaggcgaccatgctgatcagctctggaagtggatgaaacagacgttcccaaagagtataatgctggaacatgcaccttccatgcagatatatgcacactaagctgagaaggagagacgattctagaaacatactgcactagttgagctcgagaaacacatgctcaaggcaacataggagcagctgaaagctgctatggatgattcggcagctttgtgatagaagtgctgcatggctgacaataatgagacctgctttgctcgtgagggtgaaccacttggtgctgaaagtcaagctgacttaggctgatgacatcacattcagcatctcagtctaccatgagaataagagatggagaatggtc

SEQ ID NO: 519117 - DNA, 415 bp, Homo sapiens
  misc_feature (28)..(28): n is a, c, g, or t
  misc_feature (54)..(55): n is a, c, g, or t
  misc_feature (67)..(68): n is a, c, g, or t
  misc_feature (283)..(283): n is a, c, g, or t
  misc_feature (311)..(311): n is a, c, g, or t
  misc_feature (321)..(321): n is a, c, g, or t
  misc_feature (347)..(347): n is a, c, g, or t
  misc_feature (353)..(353): n is a, c, g, or t
  misc_feature (356)..(356): n is a, c, g, or t
  misc_feature (360)..(360): n is a, c, g, or t
  misc_feature (373)..(374): n is a, c, g, or t
  misc_feature (378)..(378): n is a, c, g, or t
gagaatatcccgagggggaaaacgcccnctgatagtaactcatgggactcacgnnacctcctgagtnnccattcactgttatctggctctgagttggtgatcttttatcttgtaggtttggtcgaacgcttctaaaaccttttgctgagtctggtgactgagaatcacgccctgcagccaataggtttggagaactttgcactctcttcacagatgttagcgtaacagacatggcggcacgtttgcgagcacacccaccgctatctgtgttcattttcacctnggagagtttgttattaaagtcttcagtnttcctacagncagctgagttcaacagttgctctatncagagnaantagnagtcagtgccctnntacngtaagagaatggtttatgtacccctgtgtgtaaaagt

SEQ ID NO: 519118 - DNA, 514 bp, Homo sapiens
  misc_feature (328)..(328): n is a, c, g, or t
ctgaacaaagaaaacctgagccggctggtgaattgctcacgggagagggcgaggcacacggcttagtgcgttttagattaaacagcttatcgcaacgtgtaacaacttaacaggccttggaacgggaaggaacaatttgggctttggccttaaactttcccttttccagattctggaggagttttacatttacaaggatggaaccatcaaccttttttagtttcagcacgttattttccgtttttcaaaatttgccaggtcctttaaaattgttctttgacaacaaccccagggtgtgttctggcaccctgtccaaaaaccttttttntggttaactgtggccaaagtcaaacctttttttccaattcgggccaaaatggcccaacctggaaatggggctgttcaaccttaccccgggcaggggggggccttgttgttagggccttttctccctgctgttgttattggtccgtttgtgttttttctaatcagtaataaaggttttaaagtttta

SEQ ID NO: 519119 - DNA, 270 bp, Homo sapiens
taatcttaaacatactatttctaataaatatttatatttttatgaaataaagaggtatgtggaaattaatattggggaaggtggaccgggggaaaggtatccaggggttttacccgccctaactgaaattctcttggaaactgagctaaacctctaatagctgttccccttctattctgaacaactgtctccatttttcaagtgtgagagataagggctaatgatgacatctcatttattttgagtaaacattaaaattgttttacaagt

SEQ ID NO: 519120 - DNA, 118 bp, Homo sapiens
cagcatccttacacagtgtcagcttacataagtacaccggctccggaaacacggtacagaaatggaacttatataaattaaatatcatcagtggttagcaaacctcttatttataagg

SEQ ID NO: 519121 - DNA, 285 bp, Homo sapiens
aagaggcctacagcataccacgcctctttaaacctcgattctttcctaaagacaacttgagccctgccactcagggggagaatcagcagaacctgtaggacctcattcgaaactgacattctccatggtaataaggctcctgtttatttttaaaatttctttttgtttcactggaaaggaaagatgatgctcagatctaaacgttaaaagtgtacaagttgctttgctacaatcaaactaaatctgtacacaaaggatttgatgctttcagaggggggatcctgt

SEQ ID NO: 519122 - DNA, 151 bp, Homo sapiens
gcgtcgacggagagtctcacacacgtatacaagtcctatgtcctggagaaggggtacttagctgtgatagggaaacatttgggtaggagccaggctgaggctggtgataggcgggagcaaggatggggcaaagaactgagaggtggtgttc

SEQ ID NO: 519123 - DNA, 681 bp, Homo sapiens
tcacgccccgctagttttttgtatttttagtagagggagttttgcctgttggccaggctgttctcgaactcctgacctcaagtgatctgcctgccttagcttcccgtgttaagattacatgcgtgagccactgtgcccagccagtacatgatttatagaagacaacttggcaatatctatcaagagtctttaggcagggcgccgcgtgtcaaccctgcatcccagcccttcggctgccctatctggttgagtgctccctccctcgatgacgctcaccttcccccccccgcgctcctcgatccggctatctcctcgcaccgactgctgcacgcccgcagcctcgcccttcctacttccccctacttcccgggcatttgttcgccgccccctaccgcccgcaccgaacctccagcagccttcttcatggtcggcccctctcctccaacatctgcttcgtgctatgcttccactcccttcttcctccacctcttcccctcctctcccacccagctttgctcccccatctctctgtaatgttcactcccccccccaccctcgcacgtcttcgccgcccctcctgcccacactttccgccccacggctgacgcgtccacctcgtgccgccttcctcacagcctctccgtccaccttcgtttcactccgcacgccgcctcccctccc

SEQ ID NO: 519124 - DNA, 125 bp, Homo sapiens
actgttgtttttacccatacaggcttgcacaggagttggatagatggtgagctcagggactgggtgaacatgccccatgtaatacacgggtggtaatagtccctcccatatactcctagccccaa

SEQ ID NO: 519125 - DNA, 742 bp, Homo sapiens
atctcttggggtcagtcgaagattatcagatctcgaaaagaggctgaagatctggagtccggtaaaagctagatgtttattcccatgaaggcattgaagggtaagccgatgggcgcaagtatcacttgctgtgcaatgttatgtcgtgttgtagtatagagctgcacgcgagtgcctataataaaaagcaaggctagtgtgagctgtgacacaactaaagttaactggactagatagggtgataggttgggggggtattaagacatatagcgttggtaataccagtggaaggtgggatgtggcgcaaattttgggcgctaaggttcttcatttaggtgggatgttgatctcgtgtgtgggacttgagaaagccttgggaaaaaactataacgctgaaagattatggagcttaggttgtaggacaagtgtggggcgcatagaaaaaatatccacaggatttttggaatctataaaattactttagtggtattgggacagagaccttagaggtcagtgataatcttgttaaaattctctatcaaacgcgcagtcttgtattggaagcggccttgtgaaaaaaggaataaggaggggtctttgggggattatttggggagttaacaccaagttcaagacgaggaacattatgtcttttgcccaaagtgagtcgaaagaatggaatcgcttaagtttgagttgaaaatccctgtgttggggataattcctggtggaattattccag

SEQ ID NO: 519126 - DNA, 436 bp, Homo sapiens
  misc_feature (382)..(382): n is a, c, g, or t
cacgaaagtaccttcaactccatcatgaagtgtgatgtggacatccgcaaagaccagtacgccaacacagtggggcctggcgtcaccaccatgtaccttgtcattgccgacaggatgcataaggttatcactgccctggcacccagcccaatgaagatcaagatcattgttccttctgagcgcaaaaactccgtgaggatcggtggctccatcctggccatcctgtacaccttccagcagatgtgaattagcaagcagaactatgacgagtccggccccttcattgtccaccgaaaatgtttctaggcggactatgactaatttgcattacaccctttcttgacaaaacctaacttgcgcagcaagatgagattggcatggnttttgttctttttgctttgttacggttttttttttttatggcttgacttgattt

SEQ ID NO: 519127 - DNA, 205 bp, Homo sapiens
gattaaccccctaataaaattaattaaccgctcattcatcgacctccccaccccatccaacatcttcgcatgatgattcttcggctcactccttggcgccttgccttgattcctccaaatctaccacagggctttttccttaggcattgcactacttaccaagacggctcaacccgcctttttcatcaatctgcccacatcactt

SEQ ID NO: 519128 - DNA, 215 bp, Homo sapiens
atccttctcaatctgccataacatgtgcccacacatcttcaactcggaaatgtagcatttcaagctttagtcagggtagattattccttctttactttaacaattctacgttgctgccagaagtcttctcagcatttgttttgaattctgtcttcagtgcatctctcactgcttttgacagatctgggagtctcggatgtagctgagtccagcct

SEQ ID NO: 519129 - DNA, 945 bp, Homo sapiens
tggcaaactctgcctcgcaagcagctgggactacaggcatgctccacggtgcccagttaattttttttgtgttcttagtagagacagggtttcaccatgttggccaggctagtcttgaatttctgacctcaagtgattcatctcccaaagtgctgggattacaggcgtgagccaccacggccggctaatttttgtattttttagtagtgactggtttcgcggtgttgaccaggctggtctcgaactcctgatctcaggcggctcacctgaggtcaggagttggagaccagcctggccaacatgctgaaaccctgtctgtacaaaaatacaaaaatggctgggcatggtggcgcatgcctgtagtcccagctactagagcgactgaggcaggagagttgcttgggcctgggaggcggaggttgcacgggagccaagatggcgccaccgcactccagcctgggtgatagagtgagactccctctcaaaaacaaaacaaaacaaaaaaattagcacaaatgctacattaatgtttgggtggtcagattctactttgcaatctgacagtttgcagatttgcctattagattttgcgggagttttacccactttcttatcctgtgtcattcactgtactaatttctcccttcgctatcttttctccactcatctcggccactttcagtccagcacactttgcgctctctggtttggagggtcacaggcgcttactgtctttctgttccgcttgtgggttttctgcatgccgctcatttctcaccgttcgtgctggattagtgctgtcgcttgcgctacctcgtctccgttgcgccagcgcccttttcgtgcctttccctccgctgttccggacgtttcttgcaccgccatggcctgtctcacgcgcctggcctgcgcgctttcgtgccgctcgcgcttctgcttcgcgcg

SEQ ID NO: 519130 - DNA, 679 bp, Homo sapiens
  misc_feature (472)..(472): n is a, c, g, or t
  misc_feature (515)..(515): n is a, c, g, or t
  misc_feature (526)..(526): n is a, c, g, or t
  misc_feature (528)..(528): n is a, c, g, or t
  misc_feature (531)..(531): n is a, c, g, or t
  misc_feature (645)..(645): n is a, c, g, or t
tttttttttgcttattaacctaagaactgcacaggtattttgcagttcgacttatcaaacctgcccagcgaataccgtcaactgacggattccctttactgcccataaaatcctacgtgcatgagaagaaatcatcttcaggaagcactgggaacaaacgcattcacagtcaaccgaactttcgctgtaaattcactccaaaagcaggtgaaccaaatgctcagaagctgcgagtgaacaaaactgccaatcgtgcaaactttaataaacttttttttttttgaaaagaaaaatccctcccaaattccttcacggggtttcagaagcttcttggagccctttccaccggacaggcactaaccgctatcctacttcaactcggaaagttcttctttccaagtgactaggaagaggtttgtcctggtacttcgctcagcgttactttcaagaaagccggggtctcgggcaagtntcgccggcgcgagctggttccaccgttaccctgacacccgcgnacgcccgtggntntcnttttttcactgtcgacactttgatctttcaggccctgggtctaggtttcccccagaaaaatgaggggcccatgtgacggaaaccaccagatacacttgtttggaagacacatgnccaatgattcacctgttttcccgaatttaaaact

SEQ ID NO: 519131 - DNA, 662 bp, Homo sapiens
  misc_feature (1)..(1): n is a, c, g, or t
  misc_feature (122)..(122): n is a, c, g, or t
  misc_feature (138)..(138): n is a, c, g, or t
  misc_feature (293)..(293): n is a, c, g, or t
ngagttccaccgcggttgcggacggttaaagcccgggcgattccccgggtttcaagaattgcgccacaagggaaatttaagcttagggaacttgggccagggaccgccaaccggtgctggcntttcaagtcgcgggcncaaaaggctgctcgtgattgacccagcttaatttaaaggggtaaaaaggttgggttcaatccaaatgcttctgaaccgtcaaaatggtcttctttgaaaagaaccatcccttctttgggttcaaaaggccaaaattagggcgcaatgatgagagnatgtggtgttctactctgatgtcattcttaagggctaggtatgtccaagatctcttattactgctgttaatgatgattctaatagctaccatttgtcgagtacttattgcatgccagacattgcacaaagcaggttacaccaggtgaagaaatctaggcactgacataaataacttgggatcacactgctaggaagtactggggaagggaattcaaaccatggtttatctgaactatataactgttacatctatttagaagtctgcctttgataaatttgcccaacctttttttagaattcacttacagtttatacctgtgtgaaccctttcattcttttttggtatatgcataatacaagttcattcc

SEQ ID NO: 519132 - DNA, 942 bp, Homo sapiens
gagtcggaaaacatggctgcgagtacctccatggtcccgtgtggctgtgacggggggtgtgacgcctgtcctgtccatcgagacagacgatttctcagtattcgcgagggagaatctaaaaagctaactgtcatgcattattgtcggagccattaccacgggagcaggggcctcactacaaccagctagtcaaatgtgtcgagcgtgcagattggcgtttcgtctcttctccttgacattgccgtctggtccagagctgtcaaccgcactccgtcctattacatgtaggacagaatgcccaggactattggattgcctatagcgcctgagccagaggtcgctactgttgagcgttaataggagtatgatcgggcactcgaacattttcctgtcataggtcctcgctatattaggcaatggaaagaagtcccctaatggtctcttgtcatattgtcatccacaggatcattcttagtcctggtacgagagtaccacaagaaatggcaccgtagtgaaaaacaagttccgagtaagcattgatggctcccccatggggtgaccctagggacttagggtgataggcattttgagagccggcctatccagggggacatcttcgaagcaaggtgagacggcctccacggccccagaaaaagaaccacccaactgcttccgaagcaaactttgggagtagtaactgttgggacccttgtattccctggcatggggtagttggtcgcttgtcgaggaaagctgggtacctttgggtttgaaacaagacgggccaatatgatggtgattatggttgtgagaagcttacctccattgcttttcggtgccattgccatttggcggaagcccatggcttaaaaacctctgagaaccctggcatcactaggaccaaccgaagaattgccgaaggttccctggttctttgggcca

SEQ ID NO: 519133 - DNA, 641 bp, Homo sapiens
  misc_feature (75)..(75): n is a, c, g, or t
ctgctatagaggatccccatgctgtcttcaggatgttgctttacttggaccaaactctggattcacagagatcantgttctcaggacattttgggattgggtggacccatagattcaacttattcaagtatataaaaggttctgctgacattaaattcaaacagggaatctttcccctgtggacttcagtgtgtcaccattttaattggggtctatgacatacagacaggggttcccctgatgggagtcatcaatcaaccttttgtgccacgagatccaaacaccctcaggtggaaaggacagtgctattggggcctttcttacatggggaccaacatgcattcactacagctcaccatctctagaagaaacggcagtgaaacacacactggaaacaccggctctgaggcagcattctcccccagtttttcagccgtaattagtacaagtgaaaaggagactatcaaagctgcattgtcacgtgtgtgtggagatcgcataatttggggcagctggggctggttataagagcctatgtgttgtccaagggctcgttgacatttacatcttttcagaagataccacattcaaatgggactcttgtggtgctcatgccatcctgaagaacagcatgggggtac

SEQ ID NO: 519134 - DNA, 690 bp, Homo sapiens
  misc_feature (46)..(46): n is a, c, g, or t
  misc_feature (70)..(70): n is a, c, g, or t
  misc_feature (80)..(80): n is a, c, g, or t
  misc_feature (103)..(103): n is a, c, g, or t
  misc_feature (121)..(121): n is a, c, g, or t
  misc_feature (124)..(125): n is a, c, g, or t
  misc_feature (132)..(133): n is a, c, g, or t
  misc_feature (219)..(219): n is a, c, g, or t
  misc_feature (229)..(229): n is a, c, g, or t
  misc_feature (279)..(279): n is a, c, g, or t
  misc_feature (284)..(284): n is a, c, g, or t
  misc_feature (294)..(294): n is a, c, g, or t
  misc_feature (377)..(377): n is a, c, g, or t
  misc_feature (405)..(405): n is a, c, g, or t
  misc_feature (416)..(416): n is a, c, g, or t
  misc_feature (461)..(462): n is a, c, g, or t
  misc_feature (567)..(567): n is a, c, g, or t
  misc_feature (612)..(613): n is a, c, g, or t
  misc_feature (617)..(617): n is a, c, g, or t
  misc_feature (630)..(630): n is a, c, g, or t
  misc_feature (688)..(688): n is a, c, g, or t
caaaaatcacaatcacctttaattaaaaagatgaaaacaatcaaanacaaaaaaaaataataaagaaaanaaaaaaactncccgcccctaccacaccccaatnaaaaactaaaaaaaaatnttnnttcaatnncctacgatgtcatggtagtctagaactcctccagtggcactgcagctctggagtggccagctcaccaaagcaccctccacttcacnttggggagangagggatgctggtggttaaggaggttaaaaccattagttccagtaatgcnagttnttaaacatgnacttccttcctttcccccaaggtctgggaccaaggagaaagggaccgaaatgagcccagccatgaggagcaaatcgaggaganaaaatatagcccaaggaggttagaaganttccaatatanctcctccctccacccacctcaaaaaagaaaaaaaggcagtttagnntatttatcacaccaaaaatggttccccctcaggcctgagaaaaagaccaagatgtccagtcttgagggagttctgagaaactcagagctcatctatccttgaaantccattaatttcatctccagggcaatggctaaactaggtaaattnnaatnaaaaaaaaaaatntaaaaactggagatggagagatacagggcgaggacatcaggagggcacccaggcccangg

SEQ ID NO: 519135 - DNA, 195 bp, Homo sapiens
tcaggcatcacgccagtcattttatctccatcatcatccttgtgaagcaatggaagtctggagaggtagaaatgatgaaggcaatctggccacatatcttccttctggatcctgctcatcagggcatgcatctcccatgctgaaggttaccatgggggtcatttgccaacaaattggggagtccgctatctccct

SEQ ID NO: 519136 - DNA, 209 bp, Homo sapiens
catcgcaaatatcgttgcgcttctactcgccgccggaaaaaccaacgtgtaccgaacgggttaataaatcttccggcatcttcaggagagcgattttctcttccatcaatatcctgaaaatcaaagcggtcgagcgtttcctggccgcgatagctgcgcaccgcattaagtgccgtttgcaggaaaaactggttactgacacctggaat

SEQ ID NO: 519137 - DNA, 1067 bp, Homo sapiens
gccgaactggggaggaggcaacgaaatgtggggtgtgtcagaagacggtttactttgccgaagagcgttcagttgcgaaggcaagcagcttccataaatcctgcttcctgtgcatggtctgcgaagaagaatctggacagataccactgtggccgtgcatggtgaggagatttactgcaagtcctgctacggcgaacgaagtatgggccctagaatggctatggctacggcgcagggcgcagtgcaccctcagcagctgacaacgggggagtcgctgcggtatcaagcactgaggaagcccctggccagcaggtcgcaacaacaagcccaatgcactccaatatttgcccatgaagattggtggctccgacgcgctgcccccgatgcagccaggctagtctatgctgcgtgagaaggtgattggtgctgcggaatgtcctggccagtaaggcctgcttctcgatgtgccaagtgtgtgcaatagagccttgacgctcaaccaccctggccaagacaaggcatggcgcatgatttactgcaaaggcactgtcactgctacaaaacttcgggcccaagggctccggcttgtcggtgcaaggagctggggcccttggatccactctgagtgaggccaccatcaccacaccatagccctgaccactcctgcgcttttcatcgccatctcccattcccaccagctttcggagacctcccaggatcatcactctgctcacccctgccaacattatcactaatgactagaacctcggggccatctggctccccaaaggaaaggagaggtcagccagaagtcccacccccacctacacggacacccacaagacctgggaatcccggacaaccacgaagcaagttagcgaaaacctccaagaagataagggagtccaaaagcgaagaaagcaaagcccccctcaccaacacccaggacccacaagaacctccgaacactcaagcacaccacggcaagactgacacagacaaccacctgaaccaaagaaacactgccagacacaaacatagagacacacaagacaaggcagcacaaa

SEQ ID NO: 519138 - DNA, 250 bp, Homo sapiens
gaaaaaaggctacgcgaaagcaggctcttagcgcccatttaggagagggggacaaaagggggaacactacttgatcaatgccaggcgatggagtggaagggcggacggacaaaatttgcagggagacttgcgatggcttgtctaacgcaccaggcgggcaagtacgagatatgaacactggaccagaagatagcagagcggttagaggcaagggttacgtgggaatgcgatggttggtacccgtctcgtt

SEQ ID NO: 519139 - DNA, 110 bp, Homo sapiens
gtatgcataagcgattttaggtctgttgtcgtatgcagatggagcttggtataattatgcctcatagggatagtacaagggaaggggtaggctatgtgttttgtcaggag

SEQ ID NO: 519140 - DNA, 956 bp, Homo sapiens
  misc_feature (624)..(624): n is a, c, g, or t
acgtttaagaagcttcggtatgcgtgatttaacaactatccaaggtgatgagcctgtgggacaaagaccataccaacctctaccagaagcaaaaaaagaaagagttgaaccagcccccagtgaatcatgctaggttatggagattccagctgaaaggacggagatgataaaacagatgaagaagcggaggggccatattcagataatgagtatgttaacgacacaaagggtcttcgaagaatcgctgaagcatgaaatctgtgtaaaaccaccaagaggccggcaaagaggtgcggtacgggtcactaaaatacaaagtgagtgaaacgaccacaagtgtatcaaggagtcatctacacgtcgaaatatcccaagacagattatgctaaatagcatcgagaattcattcggtgctagacgagtgatagtattcaggatttagcgtgagttaacgatgatgatttaagattgtgggccagggatggggtttactttcatgaatttaaattgttttgatttctgtaacaatttggtttcccaaagtattgacgtacgtaaaggcaggttctgcaagatgtactaagatatgtagtattgagaacttcgtcggagctcatcattgtncgtcccggcgtctcaaagtgtccatccaaccaagggccttggagaggttgccctggaagaataatatagaagtggaattgcagctaaaattcgacggggaaatacctttgaaaaggggacgcccttttttaccgggctcacgggataaaactccaagccacttggtcgatgaacccggggttaacccatcccatatagggggtcggaatcccgggaacattagagatcggcctcaaaagtacacgggatgaaataacgacgggcacccacgtgcaaaaaaaaaacggctcacaaacacagacagtcgacataaaaggacacatattgccacg

SEQ ID NO: 519141 - DNA, 348 bp, Homo sapiens
catatgggcaatttcccttggttcctgtggagcatttggctacagacacagaagcaaaagcatttaatcaaagtgtttaagaactgggtttttggctgggtgtggtggctcacacctgtaatgtcagcacttttgggaggtcaaggtagggggatcacttgagcccaggagtttgagactagcctgagcaacatagggaggccctgtctctacaagtaataaaaagcattagacaggtgtgatggcacatgcctgtggtcccagctacttgggaggctgaggcaggagaaccgtctgagtttgggggtcatggctgcagtaagccatggttgtttcactgcactccag

SEQ ID NO: 519142 - DNA, 2087 bp, Homo sapiens
tcgcccgcgcgtgtgtgttttgtgactaatattctacagactcaaatcatcactcatattagctctactttctggtaccattcatgtgttggtatccgtgttgcatgcgctcgtaggtcattacgcctgcttctgctgtctggtcatcaactgcgttgtttttgttcgcgtcctacaccattctctatctgcttgtacttgcatcctaccttttgtcgtctgatctgctcgttgcactgtctgtctgtgtcagtgctgtcttgtgtttgtgtgatgtgtccgccctcattgtcctggcgcacccctcaccaccctgcgtgccgcgctcagcgagttgtgtgcgttgtgagagaattgggtgatcgtacccctatttcgtggggttggtttcaatgtacgttttagtttgcagtatctcttatggctcggtcgtgtctctcagtggcttgttgtgcttgtgttgttggttgcgtcgcgccgtagtgttagtagaattcagtgatcactctggctgttcgttgcttgctatcggttgtgtgctgagtatcggatcgttgctggccgaccgtcgttgtgttgtgtgtctcgtctgctcatcaacttgaggtgggtatggagcgaaactactcaactagttcttcgtttggtagcgtatctactcctcggtcaattgttgtttggggtggtggccgaccagtcgaccttcggctgtggtggtgcgtgttgtagtacattctgagtagagagtgttgtatgtctttttagttattggtattgttcctctttttgtcgcttagtcgatggatcctggcgctcgcacattgctgttttgttgtggtgggtttggtggctagctctccttggttttactacctacacaacggttctgtttgtatgtgttttcttcgttctgcttctttgtgtcgttactcatgcatgtactatcagtgtgtgctggggagtaagttgcgtgtgttgcggtgtggggcagttgtcggcgcgttgcgtggcgtagtctatcactgtgtgccgtcggactgctccccgcacacgtcgctgttggcgctgccttgcctcgtcggccgtcgttagggtgttgttagtgtggctggtgatggttgcctctcgcgtcggatggcggagtgtgtgcggtgttgttcgtactcgtctcttcttctgctgtctgttgtgtgtgcgtgctgcaccctctcgtctccgtcttctgagtcgtcttctgcatcttctgctacggctgtctctgagttttctgtgtgctttgctccttctctgctcgctgctcgcttctcgctgcggtgtgtggtgtgcgtctccctcctctcgctctgcgcccttctctgctgcgctgctgcggtgtgtggtgttatgtgttctgtgtgagatcctgcttctctcgcgtgccgggggtggtgttgtgttttgtttgctctctctcttctcctcgctgtttgttgtgctgtttcgctcctctctctgctcgagtcgtcacgctactcctctgctctctctcgctgtgtgtgggaggcaaccgcgcagagtgtgtgtgtgtgtggtgtgatatacagtagaagataatcaatgagtgggtggcggttctcgcacgctatgacagtgtgagtggtgagaggttgtgagtgaggagttgcgtggtgtgtgtgtacatgggtgagtgttgtgtgtgtgggagtgtgtgttgtttgtgacatcacaccacaccacgcgcgtgcgtggggtgtgtggttgtgtagtatgtgtgtgtgttgtgtgtaatataagtgataaagagagtggatataaataataatagagtctcgctcactccctcatatataaataaacgtgagttgtatataaagagaaccacatgaatgttgacagttgggtcgcatcatcgatacactcgaaggacacccacaccccctgttgtgttgctccacccatgcttgttgcacacacgcacagtgtgtgtgtgtgtcctcccctcgatcttattttgtgtgtgctgtgtgtgtgtgtgtgtgtgtatgctataataaagaggtgtgtgtgttgtgtgtgtctataaatta

SEQ ID NO: 519143 - DNA, 204 bp, Homo sapiens
actcaaccccacattttggccttttctatcccactgggaaagggaggggggggccctgtcccccccttttaaggtcccccaacctgggggggcaaagggattaaatcaaccagggccacttgtaattaaccagccccagggtttccatgttttttaatgggtcctcttttcaagggcgggattaaaaaaagaacgtttgtttta

SEQ ID NO: 519144 - DNA, 700 bp, Homo sapiens
  misc_feature (595)..(595): n is a, c, g, or t
ccgggctgcaggaattgggaccggagggtttgtgggttctttgttacggtatcccgactgtgctctctcgccgttcagggagagatctaaggcgcactggcctaagtgcttagatgtgaaatgcagggacaaggtgagtccaactgtcaacactaaactgaccttctactctgaggcgttgataccttgtcggagagtatgagacatgcctgagccagacacaccaggtgtcttgagaggacatagcctgttaagggagtaaagagagaagccgaggtagtgacacttaacgagaatgaccggttttcatggactctgctccgccatttattgagaccctgacgagtgctggtatttgtcccaacgtcttgtcacggcttatgatgtgcagaacacgctctgatgtgccaacgcaatgcgaagaccttgacagagctcatcaaggatgtctacagtacgtacagcaagattcctgcccacaggaagggtcacatgccctgctaaggcctaaagccggatctagatgatgatgaacatgactatgtacgaatacttgcgcaatttcagcatctaagcgctggagtgaccacgcttnctaactgctgcttctcaggggatacggcaccagtcaaccattttagcctctataagacctcggcaagttcacagctgagcttcagacgggagtagcttgtggcct

SEQ ID NO: 519145 - DNA, 301 bp, Homo sapiens
cgacatgtgatctgggggcgggtaccactacagaagtggaatcgttcaaaggcgctgcgctattgagggcagccagagggtctagggattaactttccgaggtgtcatttagctgggtgagcgaacacagtatgggggaaacacggcacgaaataaaggttgaacgcattaactctggtcgtcaaagtgcttttaggtttggtggtgatctggtgatctaaggatggttgacctggcgacaccaattatattaatgcacttggcatgcaaaccaatgggggtaattttgggcttccaaatt

SEQ ID NO: 519146 - DNA, 977 bp, Homo sapiens
actctcactatttcatatgccaggtgcacgatggggacatatctgcagtcgcagcgacagagggacagaaataatagtgagcaacccaagaagtgtgcctcgctcatggatacttgacaagcagaggccagtatcagtcatggaactgaacattcatcgaggggctccatgtatgcatgtattgactggtacattacaaagtatgtatgtggaatatcgtgtgtcaagctagcagagaaatagagatgtgccgcttagggaattgaattcacctagtcttgagccataagagtagattatcagctcgggtgcagttttgtttctgccatcatgttaggtgatggtgtgtgatgcagagatggctgaatttctattcttgagcttatgtgtgacgtgtatccagatctatgttaggggaacacgattagcaggccagttgtcttctgtgctgatcagcgtggcctggctgtatgcttgggatccctctgttccagagtccatgcgcagagacgctctgacttcgttgaggaatgcaaggaaagagcaccgcagaaagggccttgaatgatcctcatagggcactgcgttccaaatacgatcaacgcagagatgggatgagagggcctggggtctgtctctgacttaagataggcctatcagttgactgtgtcaactcgcttcatgtccgttgcgtcacgattaaaaaccgatagcatggagttctaatgtccgcatggaactgatgtcttgttggcacgacatgttcactacgtccaggtcttgcctttccctcattctggaggccggggttgggccaaggcgtgcccgggaatccgggaaccagctccggtgcgcattcgttcactccacgggtcctgggtaacggcggatcaggggggggcacgggaccgaaggcggactcgggggggcagacacaccggggcgcaaggtgggcggcggtcccaaactccaaaggg

SEQ ID NO: 519147 - DNA, 748 bp, Homo sapiens
aggcacaatgaccatttcctttatattagtaaatttttaagtgaaagcacccttcactatctcttagcctggcaaccttcctccttattgattgacccctgtgcgtttcttcctcttagctacctttgtgttggatgaatttaagcgcgaagtactccaatgcagtgacacactctctgtgcgcactgtccactatttctgggagctctttgataaggacggctggtccctgtgctactcagagtatcgcttccctgaatgaagctcatctcataccttcatgagctgcaactctcatcactggcaatgttccatgcgcaatctggcacagagctgatggaagattgcctgttcgccggtgtcagtcctttttggaacccagatcaatagcggctgccacttctctggccgtctgggtcttccgcggccacgcacgcttgcctttccgctgagctccacgattggcgcgtggatctcaccagtcatacacagtggcggacctctgcctcctggcagcgaggagacccagaccgctggttcgagcagtctttgccttggcagggggccttccagccatgtgggcacgccttcagatcccgggccgatctccccgtgacctctcttgccgtcatcttactggctgcacttgcccttcaaggcgctggcggtccccccagggtgactgtcccttgggctccatgctgcctctgccctctggcccccccccccccgagttggttccctcccg

SEQ ID NO: 519148 - DNA, 250 bp, Homo sapiens
gaccgcgtccgcgcccgcgagcacagaagcctcgtcgctttgccgatacctgcacgtgccgtccacgagccgccgtgcagcctcaccatggtatgatgatatcagtccgggcatacgtcgtgcgacaactggctaccgggacagtgtgcaagggtccaggctgtcgaagtgggcgagcagaatgtcgccaccccggaggcgtactactcccactaaccagttccgtagtggtgtcgtccccaagtgtcac

SEQ ID NO: 519149 - DNA, 440 bp, Homo sapiens
  misc_feature (7)..(7): n is a, c, g, or t
cggaagngcagcgacggaatttgtaggagaggtgcgggctattgatacaaatgtttaagtagagaaagtgtccaaacacctcagcgtttgtgagatcatagagggaagattgagaggaggagtcagaagaccgcgccctaggcctaggggtgtagcaggcagaacatggaccttttcttccccagaagccatggaaggagtaccaacagagatcagggtgaaccgagaagcaggtggttggcagtccacgttagaaagtgcttcaggagtgaccactgtgaccactgctactcaaaggaagatgaggatgagggctaagctggggagttggcaccacggaggccactgatgacccaactgagggccatgttgatgaaatgctgggagctgaagcccgatttaagaaatagtagtggaggctgtacacagtggctcatgcc

SEQ ID NO: 519150 - DNA, 322 bp, Homo sapiens
atgatatggggtactgaacgggtatagggaaggtaggtcatgtctctaagaggggatggcattgatagcaagacccgtagacagagcatgaaaatgttatgtcacttgataatacttagtgcaatttactgttatgaagtgtctgtttgaagttgaaacaagttctaggtaagccctttgttaagcaaccagaaaatagacagggagaaagcagttagactggaatgctgattagagtcattaattagtaccatgaaagtcccgcagagttaccttccattggaaacctagatgactgcagaattaaaggctttggtggggg

SEQ ID NO: 519151 - DNA, 252 bp, Homo sapiens
  misc_feature (18)..(18): n is a, c, g, or t
  misc_feature (40)..(40): n is a, c, g, or t
  misc_feature (50)..(51): n is a, c, g, or t
  misc_feature (132)..(133): n is a, c, g, or t
  misc_feature (139)..(140): n is a, c, g, or t
  misc_feature (165)..(165): n is a, c, g, or t
  misc_feature (175)..(175): n is a, c, g, or t
  misc_feature (186)..(186): n is a, c, g, or t
  misc_feature (188)..(188): n is a, c, g, or t
  misc_feature (192)..(192): n is a, c, g, or t
  misc_feature (194)..(194): n is a, c, g, or t
  misc_feature (199)..(199): n is a, c, g, or t
  misc_feature (201)..(201): n is a, c, g, or t
  misc_feature (209)..(209): n is a, c, g, or t
  misc_feature (222)..(222): n is a, c, g, or t
ctcttcctctataaacangtgaccaattagacgtttccgnaattccatgnnttatgtatagtacactctataaatgtaaatgtaatgcttgtctaaaaggtgcaatttattgtacattgtcccaacaaatgnntactcnnataatcgttatgaacttgaattggnttagtatctngtgtttatgtntnaatnangcctntntgaaatanacaaatgcaactnagaaggtaacaaggtgactgtttttgtgag

SEQ ID NO: 519152 - DNA, 929 bp, Homo sapiens
  misc_feature (929)..(929): n is a, c, g, or t
cgtgacgcgtgggtcgaccacgcgtcggagagcgctgagccgggccgcacccgccgagccgtgtgagtaacctctacctccgtaccttctcgcctgccctctcgagggaccatgcacccatcgctcctcagcggatggtcagtggatgggacgcacactgcaccctgggcgctcacgacgagtggcaggggactgtgtacacagcgtgtcacaccttgaccagcagaagcatctccagggacacctgtgctggcctgagccccgctgcacgcccttgagcacctgagctccagggcgtcccctcggactcaatggagaaaacaacacaccccgaggcacacgtggacacctaggacaccaagtacatctcctggaagggatgctttatagctgagctctggtggatgagaggagctagccttgacaaacaccttgatactgactggacatcgtgtgggccagaggcacgggactggttggctatgaccccgaaaaccagcatggcagcgactaacaccaagttccaggtggcacactggctgggtctgtgtctggcacttgtaactcgggcgctgactcagtcccttacaacgtcatcaagatccgtttccagactttccaggcatgagcgccctgtctcgcacagtgaccccagcgcaaaggtaccatggcattcctccaggcctctacggccagattctgcaggaggacgggtccgaccagctacccgtggcaacaggcacccgttccagctcaagacttcactccatagggctatcgcagcctctgccgaaagccattgcccattcgccccatcgctgccctgcacctaggtccacagaagagaccgccgttagaccgccccgccacatccccatgcacctcagacacagtgtagcccgcacgccgaacctgcccccatacacgan

SEQ ID NO: 519153 - DNA, 813 bp, Homo sapiens
aggagatatcgcacggcggtcggaggcggtacgcgagggagacaagagcactgcgttggacgtattggcgacagctgctggcgtgacacatgactctccttcccccgatagcatcgcgacgatcagtggtcgtcgcagtattacgtggatcgacgctgacccggcgagtatcaccatggccgaccttccggcggtcgcggaggtgatcgcacgcaccggggcaagaatgcttgagcttgctcaggctagtgccgacgctgctgctctcaaactcgtcgatgcccaccggttgttgtgcgctcaccgagaggggccatacggggtagacgagtggtctcagcgcatggttactgtactttcagatgtgttgcctggtgttggccaaggccggtgggttctcggcgaaactgcaatagtaacgcataacctcgcacaattgggagtcaataacggcgattgcggggtcatcgttgaaacaaggcccgtccccacgatagctctaccgggacccggtggagtccccagacggttgccctgttccctcatcccatcgctgcaacccttacaggcgatgacgattcacaaagcgcagggcagccaattcacggacgtaacggtggtcctgccgacacccgactcgcccctcctctctcgtgagttgctctataccgccatcacgcgtgcacgtgaacacctcactgtggatgggcacaacggactcttgtgcaagacggccactggaccgggctactcgatcgacgttctgggaatcagcgccggtgggcaagaaagtcgcacctcccgcctcagaca

SEQ ID NO: 519154 - DNA, 135 bp, Homo sapiens
aggctggtccgacctggagactgtaaggcaggcatgcctacccccaggcactccatgcctggctcagaggcttacaactgaatcaacaaggctcccacggcttcgtgttgtacctcccccctttgaacaggaggc

SEQ ID NO: 519155 - DNA, 119 bp, Homo sapiens
aaatcttctagataagcaagtgagatcctctgtccttaatcatcaatatactcaaatggttctgggggtctggctcttgttcctccttccttatttgggccagtttctcatccttggag

SEQ ID NO: 519156 - DNA, 513 bp, Homo sapiens
ttattcccgttgaagaaccaattaaaaaaaggggggctttttgattttttaggtgcacttgtgccctacaatctgacgagactccaaatacaccaaacaattcatggaccatgaattatgatgacactaaactgaaatattgccaatttcccatttggggcagtgccagagaaggcaacaccgctaccggcgaaactggaacaaggaccatctgaaacgtcactaggatattttctgccctaaggggcaaggcatccaacggggtcctttagcttatgtcctaaacaaaatgcttgatgcaggctggatcaactgtgagcattctttacaactgtcatactaacaccccctaaatcaatgacatacgagcttgggagagaattcttattgaacatggtccatgccacagatgagctgattgagccaaatgcagtgactgttccacacacacctgagggagctgggtactctcaagacattcatcaggcactgacagacgtacagaatatggtg

SEQ ID NO: 519157 - DNA, 478 bp, Homo sapiens
cggaccgaactcgatcaacaatatatttaagatgtacgtcacatatgctgggtgcggtggctcacgcctgtaatctcagcactttgggaggccacggtaggtggatcatgaggtcaagagatcaagaccatcctggcctagacggtgaaaccccgtctctactaaaaataaaacaattagctgggcatggtggcatgtgcctgtagtcccagctactcgggaggctgaggcaggagaatagcttgaactcaggaagcggaggtagcttgaactcagaatagtgccactgcaatccagcctgggtgacagaataggactctgtctcaaaaaaaaaaaaaaaaaaaaaacttttttgacaaaaatggacccagtcccggcccggttgaaaactggtggggaagggcccccaggttttctaacccacaaattattttaatagagccttagaataactctcatgcagggactctcagtgagt

SEQ ID NO: 519158 - DNA, 1699 bp, Homo sapiens
  misc_feature (1003)..(1003): n is a, c, g, or t
ggctagatgatacccaatctatctgtgtccacaggtagaccgaagtcggtacagatgtcttatctcgaagtcgctccctattattaactggtatccatagatcaaccgatcttggacgacattcaggattatctacaccaatcctagctgtcagaaccagactgaattaggttactgattatcaggtcgagggtaggacaaagtagaattcctctctggatactgtacaagttcctcgggataactggtacgtgccgcgtaggccatcctagcacgacgtggccatgatacgcaatcggaaggatgataggggtccgtggatgggtaaggacccttggccacgtcgtacacgaagcacgtcacacgacgtcgcgctttgtcacgcactctaggcaaggctcccggttgcgacgataccttatcgtcaatgcctatacccgagcacgtggcgcgcctatacgtacttcatatagcacaagcgtggagacttggcatatatatggtcccagatcaaggaacggaatcgaggtgctcgacctcgacgctcgaccagaacgtcaacttgtgggcacgcctactacactctgtgcactcgggggacgcgtgcaaagcatcttaacctttacaccaaactgtgccattcactacttcgttaacatagcaataaatcaaggcagaggagtgtgtgcccccttcgatacccaacccgggtcagggcagtgggtccccctgtgaggccctgagccttacgcgagcccccgggacggcgatgggacctcctccggggcgctcccgcatgcacctaatttgagcacaaatctaagccactagcggccaacaattttcacggcacttgattgcttcatcctcgcgccgccacccggtgcacccactgcgtcacatgctcgcgattggtcactgtggcggcttcccaccatttccatggcggccccttttgcgccacctcatggggcaccgttgtggggctccttatcgccctccnccctgtacggcgcaccgccactctcgggggccccctgggcgcactaagcgagggacctgcgttcggccccacctggaggccaccgaaaggaggtacagacaccagggaattccgcaacttccctccacagccgccccaaccttgcactcttggttccgagtaacatctggctccccaaacaaggatagagccaactgacatgcgctaacgtccacccccacagcacgagcccgggcactttgtttcgaccccaacacctgtgtgcgagacaacagacacgacacacgtacagtagggcgtgtcccattgggtccccaatagttagagcaccacaggcgagctcataagggcccccccgttccacacaaagggcaacaaatgtggagaacggcaaccctaatcggcacacacccacgccaccgccacactcacaacacaggcgcgctgcgcagacacctctcgactgcccggaacgagttgagggaaccaacaaagcaacggactagtggtcgaggatcagcacacaacacgcgctctcacacgacgcgcactgcaccggcagccacgcacctgctccctcgtcacaacccacgccgcgaccaacacataccgcgcgcagaccgccacacacgacgccgacgcgacaaccacaatgcccagcaaccgcacacgacccacgcggtcaccgccaccgcc

SEQ ID NO: 519159 - DNA, 295 bp, Homo sapiens
tcgtactctagaggtatccccgccaccaggcgcacttctccagcagaagaggaggatgcggcggtggccatctcctgctcgacgtccacggtcgacgtactcacagcttctcctctgcatgctcgcgcacgatttcccgtctcggaccgtggctggtgcaagctcgctagcctcagctcacgtgatggaatctttcatgacggtagctcggctcaggatcccggaccagcccaggatccagaccgcagagatggcgctgcggggatgcggcgtgaccctcgttagactgggcccc

SEQ ID NO: 519160 - DNA, 482 bp, Homo sapiens
gagagcctgcatggcttcagctgcggcacagcaacgcttcttaatagaacgttcattctccctgtcggtgctgtgctgtacgacccggattcctgggacgaagagaagcaggagtacacgcgcatcagtgagcctgcgcagtaaaacctagcactcccccgccgtcggggaagcgcccacacacatatgcacagaccccgcccgtgcatccagtgctggcggggttcttgcttttgaccagcaactgcccaagcccagcagctttaccttatgctgagtatgacccgcccctttcaacgatgacaggagaaccacatgcatctggcgcccagcaccgcgtgggtttggctgatagcttgcgcagtcgtcattctgtttttcccgctcgccgcgcagctcggcaacctcaaagggaagctgtcgagcttccacacctgggtttgggctatcgctctcttgggcattgtcacggcggtcgacgc

SEQ ID NO: 519161 - DNA, 581 bp, Homo sapiens
acgctgggctcgagtgaactgggccgtgctggagacatgcttgctggggtgctggcggtgtgcgtggactgatgtatgaaaccaagcgtccaacgttccccgctccatcttctggcggctgctgacgagctaggtcctgtaggctggggcttctcgacggagctgacagccagtagaggaaagcagagtccccatcctgccgaaccccgtaagaggcaaggctgcgctcaggcacacacaggcaccgtccgatgacccagcgttgcacggctggcgggaaaccgagctctgagaacacctgctcctggagagctgcaacagtgcagtgggggtggacctgcagggcaccgtgtgcagaggacgcggcggatgcggcagaggcagcgtcttcaagtgtgacctgcagcctgatggggccaggtgggaagcaggcctcctgaagctgaacactcagggccacacgatgctgggccaggacggctgccacttgggctgccccttctcgtctcccctgcaatagccgggccggctcctgccagctctctctctcgacagttccaggctcctaggaagtctgctcg

SEQ ID NO: 519162 - DNA, 145 bp, Homo sapiens
tgtaatcccagctgctggtggggtgggggttttggggtggggggaggtggcgggggtggaatcacttgagcccacccaagagggagctgagaattcgccattgcattttagcctgggtgacagggcaaggtcctgtctcaaaaaa

SEQ ID NO: 519163 - DNA, 164 bp, Homo sapiens
ggagaaaggacattgtaaccataacacactgctggccttgggactcaacaatccttaagtgctccaggtaatgtcaaccacctaatagaaatgtactaaatgatgtgatctagctatacttgaaaaccaaaccacggtatggtaagagtgaaatcctcctctac

SEQ ID NO: 519164 - DNA, 954 bp, Homo sapiens
gccatatagtgttcatcaaacctactaacgtcgtggtagttacacccataattgttgccccgcccaaaattttttgggcccgacagatccgagtatgtcccccccccaactatgggcaaaacagtcaaagatatctacgaaattgcatgttatctctcgcccttccacgattctttcccgccacgatatacgatgctccacctcttgttggtcccccaattaaccgacggcccaacattaattttgtaacgtaaacgggtcctttctcaacgctccgttcctggtttacctcgccctcccctgcctcagacttcatcctgccctccccctgtgtcaacgccagtatagggatccccgatagtaaattttgttaactacttgccgcccctccacgaatgatacccctgtgtctcatccgcggagcgacctattggcgactccaagccatattggattactcctggccacccccgatgtgaataaaccccgaccccctctccagatcctcccgagttagagtttcctcgattccctgtcaaaaaacaaagttctggcgcgaaactgtctaccggtaagaaaactagaaggtgggcgcattccttgccccgcctgttactcttgagcccttgctctcttcgttatcctgcctcacttacatccccgatctacccatatcgcctcaccctccgcacgcacttaatttttctcccccccttaagcccctccccctttatttaggagtccgcgactacgggaaacaactccactctgctttgtaataccccccagcattgacggcacaaccccctaaagaggtcaccccgttatccactcactcagtgacccacaaatctactgcccggtacataatcgacgccccaccgacatcgatatgcttaaataaccacactatttccccctacacccaaaaccctcatgggcccccaacataac

SEQ ID NO: 519165 - DNA, 504 bp, Homo sapiens
  misc_feature (1)..(1): n is a, c, g, or t
  misc_feature (385)..(385): n is a, c, g, or t
ngtttttttcttgtgtggtttgaagtcttattctagctgatcctgggaattcgctcatacactccacaaggatttttataaagagaatattctaaaagcatcctttccctgccccagcttcttacccacagagcaagaatagtattcaatattctaaggctattatatgtcatgatcttttaatctttatttacacttaaatgtttctatacatttttaaagcatgatttaaactttcaaaaatttaaaaattatggtgaaatttacataaagtgcaccaattttaagtgtgcaattcaatggatttacagaatgtgtatgcagccatgttactatcacccacatcaagatagaatatttgcatggtgcagtgacttgtgcctgnagtcccagttactaaggaggctgaggcgggaggatcactggagcccaggaattggaggtggcagtaagctatgatcacaccactgcactccagtccgggagacatagcggacctttctc

SEQ ID NO: 519166 - DNA, 154 bp, Homo sapiens
cagttacccgaagtctagaaattgtgtccgtgtcttctatagatgtaaatatgtgctgtatacacacacatacacacacacataaatatactttagaaatcaacagatgtggcattggtccaggattacaagggttggattctgggcatcctgg

SEQ ID NO: 519167 - DNA, 410 bp, Homo sapiens
cgatatcgctaagcgcgggcaaggctttcaggcaaggtttggatgcttcggtaatcgtgtcggtcatgcgttttctccttagcgatatcggatgacaagaacggggcaaacgggggtatctcgtcggtggaacagatgacctccaccacagagggaccgccatgggccatcgccgcatgcatggcggcctcgaaatcggccaccgtatcggccgaacggcacatcagactcgggaacatcgcggccatcccggcggcgatatgcgagggtgtgaaccggttgaagctgtactttcctccgtaatacagctgctcacgggtgacgcacatggcatgtgcgttgttgttgacaatgacgaatgtcaccggcagccggtgctcgatcgccgtgtgaatctccatgccgtgcat

SEQ ID NO: 519168 - DNA, 599 bp, Homo sapiens
tgagcgggtacgtgtgcttcctggtggcggctgtgagtgagcccgtgagtggacgcagcctgtgttcaatggcagggcgcgtgtgtggtcgagtggaggtgcttgggctaggtacagatcctgattggccatccttcctctgtgcgcacaggagtaagttgtgcaattagatgagatggactgttatgaatcctatcgtcttgttcagtactgagataatacacattagacgctgaagggagtggactatcagatgacgtactaggtcaaactagggttgtacccatatgaggcctgacatatatctggtgaatccaccagttagtgtaacattcataatagggtcatcgaggaggccctattccagagattgaggacaagacagataaataaagaattattgacacgccttgtttatgtgaacgaccatcgttaaacgcatagttatatacataataataccacacgaagaaaatagtatcatagatattaatatacagtctatactgataatactatatatatgaagaaagaataattacatgtcgaaataattcgatactgaacgcggaatgagaagagcacccacagcattaacg

SEQ ID NO: 519169 - DNA, 776 bp, Homo sapiens
gattacagctccaaggggattgtctctgttaggcaggagtgggggtcacaaggtgctcagtgggggagcttttgtagccaggatgagccaggagaaggaatttcacaaggtaatgtcatcagttaaggcaggcacgcgccattttcacttcttttgtgattcttcagttacttcaggccatctggatgcatacatttcaggtcacaggggatatgatggcttagcttgggctcagagacctgatattcctgtcctccagctgtaagagttatccaaagctgggcatctgtgatggtccagggggcttccaaagtcatctggcagcatcagtcgttcagcacgctaagctgagaagatccgatttaaaattggtgagatgttccttgggctggttggtctgaggagcagagatcgtaggtggatcttactcatggagcaaagagcaggaggacaggggattagatctaccaagggaggtccccatggatcgaagtgaatggacaccaaaatacagtaacgcgataggcatggtaagagcccagacactatgtagcgaggccaaaaggaaagaagaacacacattgaggaacagagaagataccaaagaaagcaagcacaagaggcaaaacacaaggacacgaataagctggcatatccacattaaaagccggaaggaagaccagaagcagccacaggcagatggccacacgcgaaaggaggcaggaccggggaacataggcctggcgacaactcagggaacaaatacagggacacca

SEQ ID NO: 519170 - DNA, 111 bp, Homo sapiens
gcggaggttcggtggcactcacttgaccggctctctttgagtttccacaaatacttgtatactggagacgtctttcctttcagacatctgcatagtccacctggtgcctgt

SEQ ID NO: 519171 - DNA, 214 bp, Homo sapiens
gtcatgctgttgttgatttatagaaggtgaatttaatgcaaaagtgggtaacactacattcataacaaagttttaattaaattttatacatttttcatcgccaattatgtcctaattgtatttatggggacatgaaccgcagcacatactgtaaatgtagcagttttctttttatttttatatggcttttctttccttgcaccctggaggttcc

SEQ ID NO: 519172 - DNA, 345 bp, Homo sapiens
taaccctgcgcccatcagaaagggaggagagagagatagagagagtgacagtgaaacaccctaaaggaacagatgcaccttatattcctatgaactgtaaagccagttagaaaagttaacaagtatgaagaatgttagttattctcattaaagacactctactcatagtagtttacatcttctatattgcatgaagaccataactgcctacaggagctaagaaggaggaataagagaaatattaagatggatcacaggcctatgaaagattttcagtcatcaaacttcttcaggtgacctaaaatttatggtgttttttacagcataccatgccctttctggtgt

SEQ ID NO: 519173 - DNA, 656 bp, Homo sapiens
tcaaatgtaaaaaaacaaaccaatttttttaaaaaaaacaaaacaaatttttaaaaaaaagagtgcaaaataaaaaaaaatagggctcttggtaaaaatattccgtctcttcttacccctaccctcttcctccttaaaaaacatttacttctttttgcccccttgccctttttcttttttgcccttttccccttttgcccgtgttcccttttctttgccccttttccccttttccccttttggttcccatttacccgtcccctgttccacatttttcaccttggaaatcctttaactctcccgttttcccctcttttgccccttttccctttttcccctttttcccacttgcccaaaggcccaagggccttccccttttccctttttcattttcctcctcaatgggaatttggaacctttaccttttcattattttccaatttccctttaattttttggctccttttttttctttttgccccaattcccgaatatgcccttattctcttttttaacctcattcccctttatagggttcttccctttttccctttgggcccattttccactttttgggcctctgcctccaaggtttttatgggtttttggggtcccagttccctttagtcccttaactttccttttccggggtctct

SEQ ID NO: 519174 - DNA, 264 bp, Homo sapiens
gctaccccgtaatacataggccatgtaatcaccatcgtcaatgtggtcaatacgcttcatccattctaggtcttcaggattttgatttgctccgggtaataggatacgaggaatttatgccaaagtactgttggtttgattaaatataacagatcgtatttatgccatgaaagttgtcaataaagagcttgttaatgatgattagtatattgattgggtacagacccgagaagcatgtgtattgagcaggtccttcaatcatcc

SEQ ID NO: 519175 - DNA, 455 bp, Homo sapiens
tgggggtaccgagaattttatctgaaaacaaaaacccgggcgacccagggtttacaaacaggattgtggactcgtagcaaaccaaaccaaaccaaaccaaaaagagggaggggggaccggtcgaaaaaaccgagggggggagcgagatcgaggaaggggggccggacaatatttttttcttctccccattttttttaaaaaaccaacacaagaaaacacacagcacacacaaccaacggtttgtccccgagtagaaccataattggggcagactcgaacattctggttcttctctcttccaagagaaaaacaaaacaacaagttaaaattaagggaaagggcgggtttaggaggtggtggcgcccccttaatgagaagccccctttcacgggggcgggcggggtgtaccaaggggggcgcgcccaaaaccgccgggggttttggtcacacacagg

SEQ ID NO: 519176 - DNA, 452 bp, Homo sapiens
agtgatcctcacgtgatgaacatgatcagatttcagtttcccccggaagacagaatggaatttgggagattattcagtaggaacatttgcaaaagctaaggtaggagaatgagggtatgaaccaaggctacagcatggagtggatacatagagaggatatacatattcggtcgggcaaggtcgggcacggtggttcacacctgtagtcccagcactttgggaggccaagacgggtggatcacctgaggtggggagtttgagaccagcctgacaaacatggagaaaccctgtctctactaaaaatacaaaaaaaaaaaaaaaaaaaaaaattagccaggcatggtggcacatgcctgtagtcccagctgcttgggaggttgaggcggaagaatcgcttgaacccaggaggcaaaggttgcagtgagccaagatagcgccattacactccagtc

SEQ ID NO: 519177 - DNA, 338 bp, Homo sapiens
ccccccttgggccccccttttgaacccaggttccccccccaaagggaaccggggaaaaacccttttttccccgggggccccttttaggggttttatccccccaaaaaattatttttttttttttcaaaccggggggggggggtgggggggcttcccccaaaacccggggggtttggttttttttttgggcccccttaaattccccttgggggtgggacccccttgggttatccaaactttttccctttttgccaaatgggcccatttggggggggttttttttaaatgggggggggttgggggttggggttttcctttttttactttggttccccaga

SEQ ID NO: 519178 - DNA, 219 bp, Homo sapiens
ctcatccatagctttggtcactcgagcacactgtattggcacatagtagacagttaagtagggtatgttatttacagacagcaaagagaaagttactgagactgggcgtttgagaaagttacgtggaggaaagggacaagttgaagacccttaagggcctcacagcctagttaagagaattcataaacaggtaagagttaaaagtatatcagcaggcta

SEQ ID NO: 519179 - DNA, 107 bp, Homo sapiens
agagttggaggccaagaaaacatttttatttttttgtttccagcataggaccgtcttattcaagagaccagatgggatggccccaagaatcgggcgggtctcacggg

SEQ ID NO: 519180 - DNA, 108 bp, Homo sapiens
ttttaggcctttttcaaagaaaaacccctttggggaaaaagggaaagggcaaaaaaaatttataaattttccttggcccccgggggaaattaggggtttttccaggga

SEQ ID NO: 519181 - DNA, 444 bp, Homo sapiens
  misc_feature (49)..(49): n is a, c, g, or t
  misc_feature (118)..(118): n is a, c, g, or t
aatcgagctcggccaagttagtcgggacggcaactggaatcaaatgtcntagactttgagtattcctgagcaagtttgatggagatagaattggacaagattttggccattgaataancacatccagagatagaaccacgcgtatcctgatgctatgattaatccctcattcctggccttggggtaaagttcatgagggccagacgctgggggctgtataccattcataaactatctcttaaggctcagggctcactgttaaagggaaatacaagcagtgcttggtctccggtgttgaggaagttaggtggttgtgagagagggggtcttcaaactcagctctgttcctggggtgacagaatttcagggcttttgaaaatcaaatacatttctgttgctcattctgagacgaaaagcgtttacatcccggtcccgacttaactg

SEQ ID NO: 519182 - DNA, 2087 bp, Homo sapiens
ggtggacgccagccgaagcaagcatcgttaaagtctctcttcgagccctgccgtcatgtctaagctcacgagtctccctaaagagcccgaacagctgcaggaagctcttcacttggagggcttgagcctttgcaacacaacctgaatgacgagccctgaggagcccacttttgacgcaaatggaggaagcgcatctacggacctgatgctggataacctgagcagactccagaacacaccaatgccgactccaagaggagctatctggcgctctcagtatcacaagtagtggcccacactgctgcggacgggacgagctgcgacttgtcaaggcctactggaacactgccacaaggcctcaacacaccaaaaggcttgagaacttgggcacaccgaagcctctggcctggcgaaaagcccgagcaccacgcagcaaggccttggaatcattccccatgtgaagccaaacccaagtattcgttcgacaagacggaaccccgaagagcttggccaccccaccgtataacaacctatggccatgccaagcacgaccccacggccattcacctttctgtggggcacctcggaggcgaggcggcccatttatcagcacacggcaacatggcaaaccaagcgctggccaaccagcaaagaaccccatttgcctaggccgcgttttaacaggcaaaggcaaaagtcgttaagatccaactcgtggggaaacacccgacatggcgttacattttgcgcggcaacacaccccgcaaccacatttcctggacaaccacgcgtttttggcaaagactatctggggcagcacaacgtttcccaacgtatggcacagccctatgtgtacaaccccccggggcaaaatgcgggtcccataatgtgattcgacggccagaacaacggcacatacacacacaacacgcggggaggaaccaccaatcgtagaatggcgaccccaattgattgatggcgacattacaagactgccccatctctaccgtggcgaacagcccgcaaaacccaccgcgtaatttggcaacacaatttaccccccctggacagtatagaccagcagaagtttaacaagtgggaaaaagttgtagcggattccaaaacatttatccaagtggacaaccatcaccgtttaagccgcccaaacaatatagacacactttggcgcatcgtgaacacaccagtttgggcagtgacccccgagctcagctaagagaatgcagcacttgtggtactgtggccaacacacgcgcgaccggtagctcaccaggaacatcaaacgtagcaaacgcgcgcccacgcgccgtttggagcgctccaccagcaactacaaacggccgcgagtaactaggcgacacatgcgaaaccattcgggtggggtcccgcttaacgggtcatttgggccccgactttctccagaaaaggttcagaccgcacgacaacgagagacgcacgcccgaacgacagcctaccccgaccacaacggacgggtcactacccgacgagcaaacacaagggaatacttggcgggcagcagctaaccaccggactcatgaggaggggaacaaagaacagacaacgcacgcagtacgaccagtagggaccgacgacatcggagcagcaactaggagcagaactaaccaccaggacatcaggccagcaacaaacgacgacgccaactgcagagcgactagtactagacgtcacagcgcaggcgctcatcggcgcgcaggacaacaacacacgtgtgggtacaaccccacacaaaacagaccggctgctagtcacccgacgcacggcagaaccacgaggaacctggccgaccatcaacacgaatcgggcagacaaccacacagcgcgctacacgcaccaacagacaccaggaccgccaggaacatgacccgcggacacagaggtagcagacatggcgggacgacaacgaccataaatccggcggacgacatgcgaagcacaccaccagcagccaccgaaggagcatcagcagcgatcaatcggtgtgagaacaacggaggcagatcgataggcagggaagaacacacagacat

SEQ ID NO: 519183 - DNA, 743 bp, Homo sapiens
gcctggtgtgattccgtcctgcgcggttgttctcctgtgagcgagcgttctgttgtatctctcagtcacgctctatctgctccgtacactaaggtgtcgtgcctgacatcctcgatgggaagattcgatgggacatggatcatgagccccctgaggccccagaactatcttttcggttgtgaactagaggcctgacaaagattatcgactttaaggtggataagtgatgaaaagtgagcatccagttagtctttaaggaagcggtcaagttctagggcgctgggtgcatacaggcatgacgttgcgacatttgttgacagcgagagtgcatatgtaattatcgaacgtgcatgtccaatataaggtaacatatggcaactttgatgatgtctgtacagccaacggtttcccgttgaggggctttgaaatagtcaccagccagtggtcttaaggtcgaagtgtggttcagggccatgtgcatattagtggacagcacttaggtagctgtggcggcaatgatgcagagtcagaagatgaagaggaggaggatgtgaaactcttaagtatatctggaaaagcggtctggccctggaggtggtagcaaggttccaccatgataaccagtaaaacttgctgctgtagtgcagatgatgacgatgatgatgacgagggtgatgcatgaagatgatgatgatgatgatttggctgattgaggaagttgatgaaaaagcgcagtgagaaat

SEQ ID NO: 519184 - DNA, 100 bp, Homo sapiens
attaacaacctcaggaggagctggacacatcgggggggaacgggtcgctggatcggagtgagaaactgcggactgtggggattcagaacatttgggtgac

SEQ ID NO: 519185 - DNA, 135 bp, Homo sapiens
cgtgctgcaggatctgaaggagataccgccctgcgcccagcacaatgaagatcaatgatatgcacccccagagcgcagttactcggtgtggatcggtggctccatcctggcctcagtgtcacacctttcaagggc

SEQ ID NO: 519186 - DNA, 123 bp, Homo sapiens
ctgatctagaggatccctgacatatctcataagtgtaatactcttactaaccgatagcgcatagtacctgtgagggaaaggtgaaaatgaacccctggaggggagtgaaatagaacctgaaat

SEQ ID NO: 519187 - DNA, 260 bp, Homo sapiens
aaatcgagctcggtaccagtatggagaccaggtctgagccggactagtgacagccctgggcctccccacactccccatggagaagctggcggactctacagtagccccaaggtgctcttgtcttggtccatgggtcctgtgagagtgtgcaggtgcccgatgaccaagactttcgcagcttccggtcagagtgtgaggctgaggtgggctggaacctgacctatagcagggctggggtgtgtgtctggtgtgcagtgctg

SEQ ID NO: 519188 - DNA, 500 bp, Homo sapiens
  misc_feature (263)..(263): n is a, c, g, or t
  misc_feature (278)..(278): n is a, c, g, or t
  misc_feature (309)..(309): n is a, c, g, or t
  misc_feature (315)..(315): n is a, c, g, or t
  misc_feature (359)..(359): n is a, c, g, or t
  misc_feature (366)..(366): n is a, c, g, or t
  misc_feature (374)..(374): n is a, c, g, or t
  misc_feature (390)..(390): n is a, c, g, or t
  misc_feature (407)..(407): n is a, c, g, or t
  misc_feature (410)..(410): n is a, c, g, or t
  misc_feature (422)..(422): n is a, c, g, or t
  misc_feature (430)..(430): n is a, c, g, or t
  misc_feature (473)..(473): n is a, c, g, or t
ttatatattaaaaaatgaaagaataacatttatgcagaggaaaaacaaaaacatccctgaaaatatacacactcatacacacacacgcacaggggaataaaataagaaaaccattttcctcaccatagacttgatcccatccttacaacccatccttctaacttgatgtgtataaaatatgcaaacatttacaaatgttctttgcatttcaaaatactttagtatatcaatatagtagatccagtgggtgggaaagggcattncatgaaaatatgaanaaatagcatatagtttttaacctgcaattgncttagnaacaaaaagtgaattttaatgctgaagataaagtaagctaaagnccagcanaaccttgntattatgcagtctganatagtttatagactganagnacagaatccttntggatccngcatctcttgttccctctgaatcttataaagtggtggcaaganaggggataatctgagaattttgatgtt

SEQ ID NO: 519189 - DNA, 1011 bp, Homo sapiens
agcggaatcgggatgtgaagaatccatcaactcctccactacctggtggtcgcgtagactagacacagtgcgatcgggcggagcgcaaacagagggagggctcacatactttacgactcgctttgagtcgctgttacctcgtactctggcatttgcgttggaatggagctcaccgtggcgggtgcgattaacggttaagctctatgttacgtagaaccacgcggcgatttgtttaacagtccggggtatgcttgagctcgtaagatccccgtgctgagtccggttacctaaacgagtgtttccccgagccagacctcatcggttggaacctctggtctgactgttggggaacccacgtggagagataggccacgcacttcgtttgaccgagcatgagcttgtggtcctcttgaggctcgaacaaacttccttggccctcttcacttcgatcgaattggtcgcctcgcgtcgctcgacaaggctccgaataaaccattgccctgtttcgacaaagtccacgtaacgcgcgctccacaatttttctctcaactaggcagacggagctagagaatgttcgaccacaagggttgtgcgtgcaaggggtgatctttccttctgggagttgctagggcgagttgaggattgatggtcactcattagaaccgggaaagaagggagactttgtatgatccagcgcgcgtcaactttggcaagggtgcgctgccgagggatggccccgctaatggagcaccagtttcctttggtgaggttcgtaccgttgttacgccgtaacccaacaacagaggtggtaaggcctggtgctttattagacaaattggggggggaggcagggcccatgactgtccgagaaggggacacgtgggagcttttccccaaaagtatcgttagaaaactctggtggagtaccttacacttagttcgaccaattcaattgtggataacccgctggtttttcgaaaaagggtccccacccttcgtgatctccaagtg

SEQ ID NO: 519190 - DNA, 316 bp, Homo sapiens
ttttcgcaacgcattcgtttacaacagcaggtcgatcttggcttcagtcgtgccttagagactccgggctcccaggtgtcggaagggcatttgcctttccccttggtcaccttgttcggcgaggaaacaccttcaaaagctctttcaaggacccctaaggttttaggcccattttctggttcaagtttcacttcaaccttgtacttctctgtgataccttgggcccttaaccaaagaaaaacaggacgaatacaacactatttttgtacccatttacaaatcttctaccttaaaacccaaaaaaacaagaaacaca

SEQ ID NO: 519191 - DNA, 332 bp, Homo sapiens
gcgagcgagaggcagccgcgcccgccgccgcccctgctctgtatgccgctctctcccggcgcggccgccgccgatcacagcagcaggagccgccgccgccgcggttgatgtggttgggccggggctgaggaggccgccaagatgccgcagtcaaagtcccggaagatcgcgatcctgggctaccggtctgtggggtcctcattgacgattcaatttgttgaaggccaatttgtggactcctacgatccaaccatagttgtagacacagccgggcaagatgaatattctatctttcctcagacatactccatagatatttggctatttcttgt

SEQ ID NO: 519192 - DNA, 141 bp, Homo sapiens
gctagctgggtgaggtggctcaggctgggcgaggtggctcacaccaggcgaggtggctcacacccctaatcccagcactttgggaggccgagatcatgccattgccctccagcctgggaaacgagagcaaaactccgtctc

SEQ ID NO: 519193 - DNA, 1277 bp, Homo sapiens
ggtagggtgcgtgggttttattacatctttgggttggtggttggaggggtgggtgtggttgctgccggtttgcgtgtgtggcgatatgtgtttgatgtcgtagtggcgcactgtttgtccccccggtggggcccccctgtgtaccacacgtgttgtggtttgggggctacccgggtttgggttgtgggttctcgtcacggggttgcggagtggtccccgcggtgtgaagccttgcttcctcccggacaatagcccccgtttgggagtcagaatggggttttgggtttgagacgtatggtatcacagtggggcttcctgaggggttttatgtgtggggggggcaccaccggtagagtgtgcccactaggggattgttacgttatggcccctggggggcagtttttcgaccgtccgcgtgcccatgaatgctttcggttgtcccccccccgggggtgcctagagtatttttcgtggcgttgccccccccgtcccccgggggagccccttagtgcgaatggatcttgctggcccagtgctttgtggggcccccttgggagtatcgatctttgttccgttttttcgcgcccgttaggttgcgccctggacatggccagtgtgatttagcccaacttgcggatcccactttagaccatctctgacttacccccggaccaccgttattttaccgttttgtgagcgcccaccgtcgccccgtcgatatgcgctgatcccaattaggaggcctcggtgatattggcgcccttcctataggagggcgtctcacatttcacctgagttttccccctagtgttgtcgcacgggttaccaccgccctatgggcgccacagcgctatggccgcccacaagtgtccactcttgcacctgatgttcactatgtgtcactttcccgcggtatatatttataactttcttgtcgccaccacacacacactttttctcgcgcctatattccgcgagaatgtgccccgcagacgcttatactcgcgagtctataccccgcagatgcacataacacccaccactgtataccacatcctattcacattctgtataggctcacttcacttttttcttaccacgcacgtaatatttaataattttcactgagatttgaggaagccttcgctttcgagagcgagaaagtcctatatatgtatgagagaaccctccactaaccctggaggtgaactatatatatggatgccccccccccttccacacattcgaagaacccgtctacattaaatttagaccca

SEQ ID NO: 519194 - DNA, 171 bp, Homo sapiens
ggatttgctggtgcaggacaactaggcttaatagggacatgtcaaatctacttgacaaagactttgaacaactgtcttaaagatgcttagggaactaaagaaaaacgtggggaaagtcaagaacataatgtatgaacaaagtggaaatctcaataaacagaaaacctaaaa

SEQ ID NO: 519195 - DNA, 160 bp, Homo sapiens
ctcttaggatcccgctgatgtgcatcttgacacttgaaggctcttgagtgtctaacaagttgcttcttggctttcctgctgctggatttagtactttaatttggagagttctgctaaatcttttctcactcatccaattttccaaaattgtgttattatt

SEQ ID NO: 519196 - DNA, 1040 bp, Homo sapiens
gaggcattgagggagacagtcgcaggggcttctgctgagggggcaggcgtgagcttgaggaaatcgcagagtcagttttagtctcttggacacagatagatgatgagtacatacgtacttcatgtatataagtcatataggttactactgatattggcttagcgttaagtatgtccaagtgtaatttcaatgagcttatgattgttgagaggatgaagaagatactgtatcgtaacgtgtgagtaaagtagataggacattgagtgaacgtgaataatggaatgatgagcgatttctaaaatacatgacggatggtagagaatgaatgcttctttctattggaggatattaagaattgtacttttaaaaagataaagtagagaagaaagggactatcagagtactccggaatttgaattaagcaaatatgataggggcaatcgtcattgtacagacttaataagtgaagagagtgaacttaaggcagttgaatatgtgaaagtttgtaggacgttgggtatggtcgagtgataataagatgtgaagaggggaatacttgtgcttaatgatgattagagcgcggacaggtgcattcaatgaggacctttgaaatccgatggacaggcacgggtacgaatgtgcagatccattttagaagacgcgtaggttatccgcactttatctaaacagcagcacgaaataatgtgtacaaggatggattgggggaaggtggaagggatgaacataatgtagggagtaaggagtagcatagttacggaatgctggaagaaaaccttgggtgggtaccagaaagtttagcggggtaaatggggcgaaaagtataccagggaatttggttgggagtattcgggggcaacaggtgaagaatagagtttcatagtcagttacgtgtcttagatggcacatacagtgtagttcagatttcaataatcttggacaagggtattggaggcaggacacttaatataatgatcaggggtaggaaacaatagaagaattaagggggaaggaggatcaag

SEQ ID NO: 519197 - DNA, 784 bp, Homo sapiens
acttatgcttctgtggaaatggacagttcacactggcctttctcagaatgtggcactgccactgactaattctgtgaccggggcaccttttataggcctccatcagcctgtgtccccagctgtacaaatgctgaaaggtgaaacctaggcttaaatggcgtttcttgaggaatagaaaagaaaccacgtataaactctctggtacatagtaggtgctcagcgaatgtccatgccctttctctgtggtgctattgctctttgaagttcgagtgctttaccaaggcatttccgtctcattgccgtgacgttgctttatgtccaccatcctgttcaccggtacgtttcggttgagaaagaagaatgcaaggcaccggagggaaagttctggagcagaaaagccttgtttacaaataaacttgggaagctgtctagaggagaacttgtgtgacttgaaatcacattacttaatgttcagtatgatatttgcagtttgttccggttctatttagtagagaaaagtagtttagtccataatgaaaagaatttagaattattttaagaattagcctccagtttatagaatctggattttaatctggccagtaagtatattcgagtaatatgtacatgggtgctaaaacagtgcattatcaggttgcagaaatgtacggtaatctgatatagtcccgggtaacagcctgtaagaacagttattttttcagagatggtttgaaggaggtgggataccaataaatggaataatggctacatgggcggcctgggt

SEQ ID NO: 519198 - DNA, 597 bp, Homo sapiens
acatgggaaagtatctagtggtgtaggataggagacaggattcggaggagcgtaggatatgtatgagttgttgtgtgtccggtgatgggagtgacgaaggagacagactatgtcagagagagcatatgaatgtaaagcgcagggggaggaagtatgaggtagaggatggtcgtggtagtaagctaagatgagatgatggcgaatcaggggtatgtcggttggagtgaaggcggcaggttaatgggtcgagtgattgctgtgcgtggctgtgagtgaggaggtggagggagagttcggagctgtccacgcgcgatcgtgcaaatggtatgcgaagcatactctgtcagttggcgtctgaagaagtgctcatctagcaccatacagatcgactgggacagtgcgaacagaatcacgagacagaaataagcatgatgtgaccacgatacggtcaactaacgagaggaagagagtagatgagggcaatgtgcatatgagagataaagagcagaaaacacattactagcgcatacaactaacagtgagtaagtctgtgatctgcgaccgcatcacgatacctatagcagataccatcacagg

SEQ ID NO: 519199 - DNA, 392 bp, Homo sapiens
ccgcttttttgcaacaaaggaatcccctcccgattattttttggggccaaaccttagaattttaattatggggttatcccccaaaaaaggccccccccggacactattgcccctttttccataaagtgaaaaaaaaaatgtttcccacatatttggggcccccctttaaaaatttttaagccccccacccccccaaattgttaaaaaaaaattcattttggggcccccctttagcaagttaaaacacctgtttagcaagttcaaaaacccccttttaaaacccccaaaaaaaagccccttttttttccctcccacctggggaagggaagggactttccttttttccaacagggaaacctttttggaatcctttggccggggtttgccttttc

SEQ ID NO: 519200 - DNA, 106 bp, Homo sapiens
ttatattggaaaatagatggtacgcgtgccacgtgccggcctcccgctatcgtcacccctgtcccaaacactcgacccaccacttcatcttcaccggcggctgctc

SEQ ID NO: 519201 - DNA, 270 bp, Homo sapiens
ctggcaggctgccagcacatctgggagaagctgtcttctgaggttacgcccctcccctggtgatctttgtctcctttctctgcgtttcataccatgctgtcatatctgtactctgatgtgaaaaggtgctcaaggaagggagagaagcagataaggataccagaggcagctgaagtgtttttaatttaaattatcctcctcctcagcctctggaacctgaggcggctgcttgaacctttggatgctaatgtcgatgcttaagcggatcag

SEQ ID NO: 519202 - DNA, 1042 bp, Homo sapiens
  misc_feature (257)..(257): n is a, c, g, or t
  misc_feature (275)..(275): n is a, c, g, or t
  misc_feature (451)..(451): n is a, c, g, or t
gcgttctgatagcgaacttaaagatgaaaaaccaaagagaccttaagatggagcggcagagactatagggagagggaacgggaatatgaacgagatcaggagcgcatacttcgagaaagagagaggctgaagcggcaagaagaagagcgccgtaggcagaaggagcgctatgagaaagagaagacttttaagagaaaagaagaagaacgccgtaggcagaaggagcgctatgagaaagagaagacttttaagagaanagaagaagaaatgaaaanagagaaagacacacttcgggataaaggaaagaaggctgaaagtacagaatcaataggcagctcagaaaaaactgaacagaaagaagaagtggtcaagagagatcgaataagaaacaaggatcgtccagcgatgcagctttaccaaccaggagctcgaagccgaaatcgactctgtncccctgatgacagcaccaagtctggagattcagcagcagaaaggaagcaggaaagtggtattagccatagaaaagaaggaggagaggagtgatacgtccagatggcttaggtgtcctgacgtctaggcagccaaaagagcacacgtaagcaatccagaggtgccttcaggggcaaagcaatagagagaaagggagccgctgtgctggtggggtacactgccagaggagtaagtcttgtgtccacagcaggaatctgatcagaggttcagaatgggagtacaatttgagtggtttgaatgtgctaaaagttactttacagtgtggaaaggtgaggagtaatgattgaattgcagggggatggaagtgaggatcatacttgaacgagaaacagtgaagtgtttaaatcaagggtgtaaccgattgaattctgatgttggcaaagtcggtgagactgtagaataagtagtaggcgggaagggatgagaggaatacacgggtatgaagcgtggggacactggataaagaaagtagtagaagaattagtggaagacagtgaataagagggaacgtgttatatctgatataggcaat

SEQ ID NO: 519203 - DNA, 118 bp, Homo sapiens
ggcagagagggtctcatctataccgccggcaccacacggtgcccaggatataaacggggactgaagaatcaccttctttgattgagtgagtgagtaacatgaatgaatgggtcacgca

SEQ ID NO: 519204 - DNA, 976 bp, Homo sapiens
  misc_feature (191)..(191): n is a, c, g, or t
  misc_feature (209)..(209): n is a, c, g, or t
  misc_feature (385)..(385): n is a, c, g, or t
gcgttctgatagcgaacttaaagatgaaaaaccaaagagaccttaagatggagcggcagagactatagggagagggaacgggaatatgaacgagatcaggagcgcatacttcgagaaagagagaggctgaagcggcaagaagaagagcgccgtagggagcgctatgagaaagagaagacttttaagagaanagaagaagaaatgaaaanagagaaagacacacttcgggataaaggaaagaaggctgaaagtacagaatcaataggcagctcagaaaaaactgaacagaaagaagaagtggtcaagagagatcgaataagaaacaaggatcgtccagcgatgcagctttaccaaccaggagctcgaagccgaaatcgactctgtncccctgatgacagcaccaagtctggagattcagcagcagaaaggaagcaggaaagtggtattagccatagaaaagaaggaggagaggagtgatacgtccagatggcttaggtgtcctgacgtctaggcagccaaaagagcacacgtaagcaatccagaggtgccttcaggggcaaagcaatagagagaaagggagccgctgtgctggtggggtacactgccagaggagtaagtcttgtgtccacagcaggaatctgatcagaggttcagaatgggagtacaatttgagtggtttgaatgtgctaaaagttactttacagtgtggaaaggtgaggagtaatgattgaattgcagggggatggaagtgaggatcatacttgaacgagaaacagtgaagtgtttaaatcaagggtgtaaccgattgaattctgatgttggcaaagtcggtgagactgtagaataagtagtaggcgggaagggatgagaggaatacacgggtatgaagcgtggggacactggataaagaaagtagtagaagaattagtggaagacagtgaataagagggaacgtgttatatctgatataggcaat

SEQ ID NO: 519205 - DNA, 928 bp, Homo sapiens
agcgggaaattggtgcttctgtggtatacaataatttaacataatataattactgataacgtacactaagtcatatcaaaattataggtgttccagtattttggaacacataccaattaatatatttatatagatacaacccaaagaaagccaaacacaacttcatatataacaaaagcttcctaattgattttaatataccaaataagccaaataatatcattttttacttagagaaaccaagatacaaaaagaaaaagaagataaagacaagaaaagaagaattacaaaaaaaaaagaaacaaagatacaaataaagaaagacgagaatagaaagagagaaatgatgataataccgaaatacgacagaaaagatacaaatgaaggctaaagaaaagaggggtaagaggaatgagtacgaggaacctaagaccaagaaaagaacaaagaaaactaaagcgagaccaaagcaaacgacgagatagatggccaaccacgagagaaaagaatgctaaaaacgaagacgaagatgatactaaaacgagagagacaatgaaaggagacagaaatgagaacaacagcaagagccgaaaaacaccgaaataaaaaatggaacaaaaaatataagaaacgcgcaggaacaaagaaaaagatctccaaaagacgaaatatggagccaggacatgacagcagtaaatgagccagaaagagaagaaaaaccaagtgagcctatagaaaaatcaaaagctaaaaaagaaaatagaagggaccctcggcgtggaaaccagggtcgaaagtaggcgcagattcgaacgaggattgattgtccggaaccagcgagaagaccccaaggtgaatgaaaagtggagcgagcaagggaaaaacgaaggcaaacgggacccaaagaagaaattaacggggcaaggcc

SEQ ID NO: 519206 - DNA, 145 bp, Homo sapiens
ctggctggttggcctagaggatcccctgcgggctttcataacggatttagaatctgtcgacatatgcaccatgaaggcttggagtgaagctcttcctggggacaactgtgggcttcaatgtcaagaatgtgtctgtcagggatgt

SEQ ID NO: 519207 - DNA, 213 bp, Homo sapiens
caaatgttttggcgatgatgcccgcattgaacagggggagtccgtcagaccgtagatcctgcgctggtgccagggaaatctcactatattctaccacctggggaactgcatccactcggcataccactccaactggttctgtagggggcggttactctaccacctttgctccatagtgtgctcctttctgaatgcaaagatcaatgcaccgtg

SEQ ID NO: 519208 - DNA, 121 bp, Homo sapiens
  misc_feature (87)..(87): n is a, c, g, or t
gatgtctcccaggtctgaccatccacgttcattcatttgttggacagaaattaaacatgcatctagcacatgcaatggtgccaagcnttctctagtaggccctaggggtgccacatgtgaa

SEQ ID NO: 519209 - DNA, 1034 bp, Homo sapiens
ggccacacaggcctgcggcggctggctcgtggcccctacgtgtcccgtgctggcggctggagtgagagaacgccaggcggctggcgcgaggatggagagacggaggagtgccgagaccggagctgccgctcgcctgcagtacttacttccccgtgctcagcatgggacaaggttcctagaacggtgacgcgccggacgcgtatgcaaagcttgctgaatccacgttggttgacagctgctggactgacctctctcacgtcgcggccctacggagcaagggcgcacagcctcgctgctgcgctggtgcactcggcgccgcgccttgcgcctgtgcctgcgctgcagccacacgcacattcttgcagcagggctttcacggcatgtcactgctgcttgcaggcttccagcccacatcggaggccgatgctgccacagctgtgacaccttggcacacgccacctcttgagctgggacgccacgctgggatccatggctcccaatgggcaaccccctatctatcactctagcagaagccaccggccctcctggacacagaccacaacgcggactgcgcgcgacacgcaagcgctgcggccgcaatcagcctctattaccaacgcaaactgcgcgtggccctgcctaccttaccaaacaacgcccgccgcgactccccccccgcgcaccccgggccttgacgcgaattccagccgaatttataccaaccgacggcctctcctaaccttgacccctcgaaccttccttccgtgacaccactcacacccacgttcaagtgggctgaccaggtcaccacacagccggtgcagcgggatcgtaacaccccgaacgcacggacgggtggaatcacccccgcgcactcacggcaccctgaacccccttgaacggagcgccccgcacgcggcttcgcaaccggcggcctgagccgcatccgccaacggacacccagccgcgccccctgcaagggctgctcaccgctcgcgcaccagtgcagctcaacgaccgccagttccgaagat

SEQ ID NO: 519210 - DNA, 414 bp, Homo sapiens
aataaaggaatattacaaagggtatagatagaaaagatgcctaagataatgagatgaaagataaacatggagcattgaatatcctcccaggcatgccaccctccaggtaacttgcatgagcttcaactatacagaaactgcccacaccctgttcataagcaagtaaaatatggatacgctcttgttagtgtccggcatacttgcttcaatccatttgaccgctgttgatcaacttacccttgagcccctttttcctgctctaagggatggggctcgggcctaaagtccgcaagcgtctagtcataactggtgaccagcccccatcctgacgctatctaggagctgccagtcatctggcacctcattagcacacaaagagacatcactttggagatgcccaggatcttaggagtt

SEQ ID NO: 519211 - DNA, 217 bp, Homo sapiens
cagatgccagatggagctgtgtggtgggatcatcagctcacgtgctttcctccccttccccggttcatgtgattctcttgcctcagccttctgagtagatgggattacaggcacacgtcatcatcatgcctggctaatttttgtatttttagtagagacggggtttcaccctagttggtcaggctggtctcgaactcctgacctcatgagccacccg

SEQ ID NO: 519212 - DNA, 677 bp, Homo sapiens
  misc_feature (5)..(5): n is a, c, g, or t
  misc_feature (21)..(21): n is a, c, g, or t
  misc_feature (446)..(446): n is a, c, g, or t
  misc_feature (513)..(513): n is a, c, g, or t
  misc_feature (605)..(605): n is a, c, g, or t
tggcntcaaaaagctttattnccattgggtccagggcttgtaaggatagttaaaaaagctgcctattgggcgtggagggagaggcttaggcagaaagccctattacttggcagaggggccctttcagaaagtctcgcgtgggcctcaagaaaggcctctatagctcggtgcttgagaaggtgagccttttcagaagaagaatactcgcccagcccagccttcgcgggccacccaagccgtggtgggaggtgtggctcagggtggtctccacccattctttctgtgaataagccttacacttctcctctcaatcttaggagaaggtggagtgtcctctcagagagaagagctctcacagagaagatgtggggggctcccgggtgcgggcaaagaacaccccagggggcatgtgaaagatatcccaaaaggggcgccgtgggtctcangcttttttctcctcccaggggcccatgtggccagagcttttctcatgtggcgcgtctcgtgggggtntttataccccccaacttcattcttctcaggcgtgggcttctcttggaagtgtctccgtgggaaagaagagacggcggccgcccacgcgtggnttttgcgcttcttcagggagaccgcctgatggcccctcgcgctttcctcccctcggccaatttcgcggaaga

SEQ ID NO: 519213 - DNA, 500 bp, Homo sapiens
  misc_feature (5)..(5): n is a, c, g, or t
  misc_feature (21)..(21): n is a, c, g, or t
tggcntcaaaaagctttattnccattgggtccagggcttgtaaggatagttaaaaaagctgcctattgggcgtggagggagaggcttaggcagaaagccctattacttggcagaggggccctttcagaaagtctcgcgtgggcctcaagaaaggcctctatagctcggtgcttgagaaggtgagccttttcagaagaagaatactcgcccagcccagccttcgcgggccacccaagccgtggtgggaggtgtggctcagggtggtctccacccattctttctgtgaataagccttacacttctcctcatctaggaaagttgagtcatccaggaagtcacagaaatgggggtccgtgcgggcaaaacccagggcatgaaagatccaaaagggcctggtcacgcttatttctccagggccagtggcagctttcacagtggcgtcgggggtttaaccccattcatctatcagctgggattctaggatggtcctgggaaaagac

SEQ ID NO: 519214 - DNA, 209 bp, Homo sapiens
cgggagccttaccctatagataaaaataaaagttatctggacatggtggtgtgtcctgtactcccagctaccaagaggctgcagtggaggacccttgggccgggaggtagaggccacagtgagctatgatcacatcactgcactccagcctgggtgacagagtcagaccctgtctctaaaacagaaacccagaacttactgtgaaatgg

SEQ ID NO: 519215 - DNA, 174 bp, Homo sapiens
caaggacgcatcatgtagtacacttaactgcatttagacatactggagcttttgccctctgaatgtgtgtaagtatgcacattattatgctccgttaagtcagtttactgtcccaacatggtactgaaacacttcagatttttttttttttttttttttggtttttgggaaaaa

SEQ ID NO: 519216 - DNA, 421 bp, Homo sapiens
  misc_feature (259)..(259): n is a, c, g, or t
gattcggcaccatgggagcctggggttctgtccagataggaccagggggctcactttggccaccagttcttcggccagcacctctgccctccagaacctgcagcctggaggggtgaggggacaaccacccctctttcctccaggttggcaggggaacctcttctcccgtctgccctgcgggttgcccgctcctccagagacttgcccaagggccatcacactggctctgggacttgtctgagactctggacccaggagngcaccttgtacatgagagatttgggagtgttgatgtagcagaggtcctgtctgggtgccacggggccagcattttggagggagcttccttccttccttcctggacaggtcgtcatgatggatcactgactgaccgtctgggctcaggctggtgtgggatgca

SEQ ID NO: 519217 - DNA, 890 bp, Homo sapiens
  misc_feature (1)..(1): n is a, c, g, or t
  misc_feature (91)..(91): n is a, c, g, or t
natcttggacgaggcctgcactctcctgatccctgctgccctcgcctctttcatcctggcctttggcaccggagtggagttcgtgcgcttnacctcccttcggccacttcttggagggatcccggagtctggtggtccggatgcccgccagggatggtctggctgccctggcaggagccgacagcattccttgcccccctggcatgggatctggaggctcgctgtcttactgatttgttagtggtcaagtcagcatgcctcatggcagtctgaaagagtgaaggcgtggacttcccggtactttggggtccttcagatggtcatctgtattgtggcctgcactagcctgggccttgcagctggctgatgcaggtactgggacgcccatatccagaaggccctgctgtggtggtgacggctcgtggctgagccactgggccgtcctgggtgccgtctcctcgtgctttgtgctcctagtgtcagtctcctggctccgtcatctttaggcatccttctcgtctttgactatgctgagctcatgggcctcaatgcaggtatcactacctatgttggtggggctggtgcgatgcctctggtcccgtgcagtctccccgggctctcagagctcttctcgccgacctgcgccacccagtgtgtgtggagctgctgacggtgctgtgcggtggtgcctgccctgggctcggaccggctcctccttgctgatcgctccttaccgctctacctgggtcctgggtcgcgggcttgatcgagtactgagctccgatagctccgtggccccgtcgtacggtgatcagtccatctgctctctcggccccgatggggtggcacgctgaggagctcacttctggttctgccctgttcttctctcc

SEQ ID NO: 519218 - DNA, 189 bp, Homo sapiens
caactagactgcagtgtcatgctcgtctgtgtgaagagaccaccaaataggctttgtgtgagcaacagggctgtttatttcacctgggtgcaggcagactggttctgaaaaagaagtcagcaaaaggagatggggtggggcagttttataggcctggggtaagcagtggatagttacagttaaaggtgg

SEQ ID NO: 519219 - DNA, 104 bp, Homo sapiens
gattgggccagaaattaggaagggctgtcactggtcctcagctgctcctggcacctggctcatcttccttccaaatccctcccactgcaaaacctcacccattt

SEQ ID NO: 519220 - DNA, 228 bp, Homo sapiens
  misc_feature (160)..(160): n is a, c, g, or t
  misc_feature (188)..(188): n is a, c, g, or t
cttcctgatcggcgtggtgcccacctatgacagcatcggcatctgggcgccgatcctgctgctgctgttgcgcgtgttccagggcatcggcctgggcggcgaatggggcggcgcggtgctgatggcctacgaatacgccccgcccgaaaagaagggctantacgcctcgctgccgcagatcggcctgncgatcggcctgtgcctggcgtccggcacggtggcgctgct

SEQ ID NO: 519221 - DNA, 868 bp, Homo sapiens
ccaagaaaggttcaaacttttgtggaccacaaatgttcaaatgcccctgccttttttcgtctgaaccaccatatccttgtaaaaaagggtcgtgcccccccgcccggtccactccaaattattgcccccctctttgctataatctgtaacccttctacactctccccccaacgcgtattggttccgccccctacacttgtagtccagtagtcaattcgcacctgacaacccactctgtgttaagcagaacattctgcctcacgcgatgtaaacacaagtcagcacatgggcggcgaggaaatactgcgaggcaaaatatattataacgcccttggtccaccacactttagtacaagatcagccatgcgggaagtgggcgtgtcctcactaaggggggcgatcactctccgtggggtacatgcctccctctctccaaaaaaaggttgctgttttttcatttcatgtggaggcacgctccacgccacacgtggtttgttgctagatatagatgtcgcgagagagttcaatacactgccaagtgcgagcgtgtacaatttggagcacacggtcccccacaaactgcatgctttaataatgtgacacattctgtctccaagacgagcgctgtcacacccccgctattctcccaccttatttatatgttccattcgagtcactcttttcctcgaaaatagcattttttagtttcgtgtagcacatgtcttgctataaacttctttctaaaccacccttgttcaattctctgtttccgcacgccgcatatccgcctcctcacaaccaccgtcgaaccaacaccgtaacaacttctgcttccccataaacaaatgacaattacccccacaaaaca

SEQ ID NO: 519222 - DNA, 619 bp, Homo sapiens
gaattaagggctcaaaaggatggctatattgatagattgcttcaatatgatcagttgactcaagaaataaataaaggagtggtatttcagggctttaaagaaccgaccctccaattccgtccgacctataaatatgattatggcacagataattatgatacttctgaaaaggcgagaactccgtcttggactgatagaatcatatataaaggtgaaaacctgcatccattggcatattcggacgcacctttaaaaataagcgatcataaaccagtttatgctgcatatagggcaaatgtgaaatttgttgacgaaaaagagaagcttaacctagttgagaagctgtatgcagaatataagaatacgcaccccgaagcactaactacaggtcctgacgaactttctcatgcaagaatggaaaaacaaaaggaaagtatacccttagatgcaaccgttcaatcagcgggcataaaactaattgacctagatgatacttcctcgtgcgtttcacctctactttctggtcccagtccccaaccgtctgttgttggccctggaggactcagtaacgtatcacccgataaaagtaagctcaatgtgcttcctccgcctcctccta

SEQ ID NO: 519223 - DNA, 138 bp, Homo sapiens
cgcatgacttcccatttgtcacatccgatgtcgcagtactgcatgatttggcaccatcactggctgcatgcttcatttttatctcactttctcactctggcaaagtgggggctcctctagacgatcgaccatgcacgg

SEQ ID NO: 519224 - DNA, 670 bp, Homo sapiens
aacaagttgaacatttccacatgattacacatgtttatatcacagtattacacattcccacagaatataccttgcagagtgtacacctgtgtcccacactgtaatatcactgttcggccacaatatatgtcaaacttaagcactgcacagttcacaacttttgggaaagtgttatagggaactgtatcacaggtaaccgtgtcacacataaagtgtagctctctgaactggtgtgatcgtgtctctgctgaatggtggtgggaatacctggctccaccacacacacttgttttaattaggctgggtaatgtgcacgaagaccaaagttcacagactaaggaccactcagtcgaatatttgctttgctgccaaagatttaacccaagatttaattatctttgcacacatataaagattttgttccctcccttatagcaatatattcatgacagcccatggttacctacatcagatacacgtaccaccggtgaccaagacatgtgtgccataataccaagtgttcttgggttaaagccaggcgcgctttttaattaatctcttaaagcactgcaattactggcaacacagctggtcttaaacagttttgtgactgcccttttcatccaccacatgactattgcgccctttctagagcacttttgaatatcca

SEQ ID NO: 519225 - DNA, 276 bp, Homo sapiens
  misc_feature (252)..(252): n is a, c, g, or t
  misc_feature (270)..(270): n is a, c, g, or t
gcgaacttcaaaacctgggaggtggctggttcaatagaccatcattttgaaaagaactgaagggcaggaatatgatgattattagtagggtgcctggatatgctagatacaaatcatattaacaatgaaacaatttccttccatcccaagataactggttttggcttggaggcaacagaaagtggatttagaggaatacagagggtcaatggagaaataactctttagtttcttctgaattctagcctgggnagccagcccatgtacganttcccc

SEQ ID NO: 519226 - DNA, 1248 bp, Homo sapiens
ggctgagcatgggagagtgagcttcaggccagagaagccatcaaagggccagtctgcggggccgtccatgcggctgtgcctacttcatacatggcgccgatcaatgcccgagcagtaggcccaagtgtgtcaatcttacacatgcagctctcagcgtcgtcccatggccatgcaatagggtggcacgacgaaggttgctggtcaggggcaggtccgtggcagaccatcaagcacgagcttctacgcgtgtccgctgtggcaacctgagacgggccatactaaagtccggtcacgggacatactaccgaaactgaagatcgtaggggaatttatctattagagcatccaagtaagaacagagacaggaggctgcagtgcactgtgcatgcgaagctagtggatagatcgtgattcacatctatgctggacagagacgagcatggtaggaccctctaacatcacaggtgggcacagaaacgtgtgcccgtggtacacgaggcgaccccaaaccgtgggtgctgcgagctgtatgaaggcgcgctgggagcacattcttctttcgaacgggagcctggagagcgggacgaaagactgtgtccattctacgcgggacctgggccctgacccatggcagtgactacgtggcaaccgcaaggacggacgctgcggcatgtgcaacaagctggtggcactgctggccacgctggaggagcccaggagggcttggagattgccacatggccctagcactcagatcaccctgggggaccggctgaaagagcgcgtgggctaccagcggatggacgcctgcaacacgactgggccatggcgagctgggcagagcattctaactcaagggcctgaacgctctgcactccgccgctggagtaggacgaggaagacctctatacgtgaaggggtccgggggccgagaacaataatcttattacgacctgacaggccccgtgggtgcagcccgggaacaaacaacgatgaacgtagggccagcggtgcgcccctggccaccagaaaggcaacgagagaccctacggcggggggcccccactccaacgccccccgggcagagaagagggacctcacacaagaggacggcagccaagagaatgagaggagaacgcccaaaaaggggaccagagagcccccataggaaagggaggagggaggccacacaggagaagagcagagggcctacagcgcgtcgtccacgcaaagagggagaacgacgga

SEQ ID NO: 519227 - DNA, 283 bp, Homo sapiens
aggatggattttagatcttgtagaaagcaggcacatccatggactgcacagtagtcctcaagaagcagtgatctgctcctccagacatatctgttccaactttatcatctgcaactacacactgtatgtgaagtttgcttaattccgtatcccactggaactagttgtagatgagccccagactgacggtgagtgagggaatgtttgggacacaatggtcttggtgacggcggtatgatgttaatggatagtggggttacagatcgtagtagagagaggaaga

SEQ ID NO: 519228 - DNA, 119 bp, Homo sapiens
cgtaaccaaaagcctggtcgtccaaggcaagagagtaggttaaagtccctggctcggttacaaagctggttgcgtagattcctgtcaagtgctcaggaatatacgctggaatggaattg

SEQ ID NO: 519229 - DNA, 764 bp, Homo sapiens
cggctaggtcgaggctgtgtggtgaatcggccgaggctctcatgaggcacagtccaagccaagcgctcatgttgagccagtgggccagccacagagcacacagagggtttacttttcagtcccctctctctgggttcagcaaccagagtggcatgctgatagtgccccctgcttgacttgtgtgcatgggtgccccgtcctgatgtcatgtgctctcagcatggccaagctgcgaatgctctggtatgaacgatagtgagcgaaacacgattctcactgggaaagtaagcaacgtgtgcaacgaactccatatgtgcctacacctcgagacatggaggccctgttcccctggagtcagggtgaactgctaaagctttgggctgagacctgggatttgcagataccacaacacccctgctgaacacagctgtcctgttcagcaacactaaccgagcattccactatcagccgtaggtgcacgtactaatacgtatagaacgtctgcgcaataagaaacaagaaacagaatttgcagaaccttggaccactcctgtccctgttagctcagctcatcaaagcagcaagtctggctttgctctattcacagaattggaagatgtacactaccaaacactcagtccactgttgagccccagtgctgccaagggacggaaggcctttcttctgtgttaattgcgtagaggctacagggcgaagcctggactaaaggcatcttgtcttttgacgctattcaactcagtaga

SEQ ID NO: 519230 - DNA, 391 bp, Homo sapiens
tcagcccttttctagtttcattttttaggattagaaaagttttttccactcaatagaacaggttccagcctgaggtgtgggaagctgggttgtaatcccttttgcagcctttgtggccctgggcaagctttttccttccacctgttttttttggccacaacaaagcaataaccatccccatccccgtgccctttttttccccccccagcccaggggaagttgagcccccgcagctttcagggtacttcaaaaggaaggtgctacatttgtgtcctgggtgtatgtgtcgtgttttgtgtaaattgtgagccccctgggcagggatccctgtttgcaaacatgttccatgtggcacgcccaggtgtgttaataaacgttctttttcagaaca

SEQ ID NO: 519231 - DNA, 304 bp, Homo sapiens
aggctatggtggataccgaggaggctatggaggacatcgaggaggttacggaggagatcgaggaggttatggaggatatcgaggaggctatggaggagacagaatccgggggggctatggaggagaccgtgttggtggaagtggatccggcggacacctgaagtggaggctatgggacgagacaggaatggtgtcggctctggagagaaaccgaggtggcgacttcggaggatagcgaagcggctatggaggccaaatgggcctaagagcgcactaccgaaatgatgggcagcactcagcttta

SEQ ID NO: 519232 - DNA, 124 bp, Homo sapiens
ctgagggctgcctcaccctgctgctcagactgagccaccgcggctccagcttggagttctggcacttggcattctccacctcggccgtcagcctttggctcatgcggttcagttcattgatctc

SEQ ID NO: 519233 - DNA, 635 bp, Homo sapiens
  misc_feature (431)..(431): n is a, c, g, or t
agtgagaagagaagtttagagaaaaaagagtaaaaagaaatgaacaaagcctccaagaaatatgggactatgtgagaagaccaaatctacatctgattggtgtacctgaaagtgatggggagaatgcaaccaagttggaaagcactcttcaggatatcatccaggagaacttccccaacctagtgaggcaggccaacattcaaattcaggaaatacagagaacaccacaaagatactcctcgagaatagcaattccaagacacataattgtcagattcaccaaaaaaaaaaaaaaaaaaaaaaaaaaaaaaaaggggggggggctcgtgccaaattctgcacgagagacagtctatggtgctagaaacccaccattgcctaatgacctataaggctttgttgtctctgatcttgactaataccatacctanatcacaagtattattactccacatgaaccttcacatttattcactcataatctacttactgcctaaaaactacaaaaccagcctaagaaataccaccattcattacatttacttctacttctcctagattatttactacaaatgtactttggcttaataagggattgatgatacaacatactctaacccaacttggtaaaacca

SEQ ID NO: 519234 - DNA, 604 bp, Homo sapiens
  misc_feature (577)..(577): n is a, c, g, or t
gggggccggttcgaagtcaaagggccacctgtctatgggccgatccctcgtggcaaggttggggcaacccttcggtggcgtctacgtgtggtgggagcctgcagagttgccaccacgggcccctatgactctgaatagccgggcttttggggtcctcgtgacgtcgacccaagcctagaagggtactcgcgcagtgttctccggctgcagctgtaatgcagcagtgctggcgttggacaacaagctactttgatagatggcactcgacttctgcgcctcgcgcagtatggaggcgactgagcacctcgggcatgtaggtcttgactggaactagtgactggaggaccgagtggagcatgcaagctcggttactaccgagaaagagacccacgggtcgttgcgtgtggagaacgacctgaggatcattcctccggccttttgtatttctatatgttgattcatcgattgctgtagacactgctgcggagttagggcgagtccccctccctccctttcccccccaagcacagaggggagaggggcagggaagtggatgtctcctcccctcccacccacnctgttaacccctcggaccccctcccat

SEQ ID NO: 519235 - DNA, 112 bp, Homo sapiens
ggtctcttcctgacgccaaagagagggaagcgaggccggatttccatctctacagagtcatccaaaataaggagggtgccagggtgaagaccgatgggccctttggtggagg

SEQ ID NO: 519236 - DNA, 121 bp, Homo sapiens
cgtcgaggattcgtaaaaacactgtagcacactagtagaaacagatgcccccaaggtttttccatttttctttattatttctcctcctctgggtttttctcacaatctcttggagtgcttt

SEQ ID NO: 519237 - DNA, 426 bp, Homo sapiens
ctggaattctcactgggcctcagccacctccccacggggcagggctggggacctgcagcctgccatgcctgagaccccttggggacctgcagcccaccatgcacgagcccccaccttggtgggctcccgcgcggccggagcctcccccacgggtgctgccccctgctccacggcacctggtcccattgacgcccaagggctgaggagtgcaggagggcagctccacccacggccctggcccgggatccactaggggaagccagctgggctcctgagtctggtggggacttggagaacttttatgtctagctaaaggtttgtaactacaccaatcagcactctgtgtctagctcaaggtttgtaaacacaccaatcagcaccctgtgtctagctcggtttgttgcaccagcgagtgctctctgtctg

SEQ ID NO: 519238 - DNA, 276 bp, Homo sapiens
  misc_feature (3)..(3): n is a, c, g, or t
  misc_feature (31)..(31): n is a, c, g, or t
  misc_feature (44)..(44): n is a, c, g, or t
  misc_feature (95)..(95): n is a, c, g, or t
  misc_feature (101)..(101): n is a, c, g, or t
  misc_feature (134)..(134): n is a, c, g, or t
  misc_feature (235)..(235): n is a, c, g, or t
  misc_feature (246)..(246): n is a, c, g, or t
  misc_feature (268)..(268): n is a, c, g, or t
aantgccaaaaagggaatgtcctgaaaagcnaataaaagtgggnaaccccccaggtttcccccaagtaacgacgtgaaaaaacgacggcaaagtnaattgnaaatacgactaactataggcaaaattgggaccnggccccccctcggagtttttttttttttttttaaaagttcaaaagttttaatccaaatttagacagtgttgagaaaaccaaactttggccatagaaaccanttcctcccggnccgcaatgggaccagaccacgncccctgat

SEQ ID NO: 519239 - DNA, 946 bp, Homo sapiens
gtctgcccagttttcgcgataggctgtctggcgcgcctggcgtgcccgcaggctcccggcgacgccgccttccccgcaggctcccggctcgcgccttccccgtccgtcactgatgtcccaatgagcgaagtgtcggagcatccgccgatggcgccgccaaggacagagccctagaggagatcgtgtcgcggttgtcaagtctaaacctctctgcaacaatgttggtaagtcgaatacgcccgtaacacaacgtgcagcgggcgtaaggactaaatctttcagtactaacactatagttgctacatacaaacaaaaggcgataaagcgtgcgagtctacatagggatataaactatggctctgatagtgagctaacgcaatatactacataagacattacctgcggacaaacggggaaacgaagactgaggagagtccagcctctgactcgaagcaggcagcagaaaggaagccaagtcatgattaataaccgatataccgagtgtcttcatcaagtggtccctgttcatcccctttcgtttgtacgaatccaagcaggaaatatttttatatcaaagcgtagttgctggctaccacttgcacacggttatgtgtctacgcgtagcttcgtacggagaaacaatttttttaaggcaaaggcagcgggcaatccccatccttcaattcccacagttattctctacacggtggtacaaattggcatttaatttgataagtaaagaaagcgttgaaaacactcacattttaggcatggagattaaaggtaaataagatttgtaatatagagttagcaaaagccaagaagtagacttagatggttgagagacatattttggaaagtttactttggggaaaggggcttaccttgaacttggatctcagggggttggttcagagacttaaacagaattgctcacgcagaaatg

SEQ ID NO: 519240 - DNA, 189 bp, Homo sapiens
gatactcctccttagccaagctgctcgtgctgtcttccctcctctactcttggtgctttccctctgaagatctcttaggagtgcaccagtactctcagtccctccggggcagctcttctacctggctgcgtctagtcagccatcttgccccaacatctacttttataaagtcagtctcttggcacacat

SEQ ID NO: 519241 - DNA, 103 bp, Homo sapiens
  misc_feature (103)..(103): n is a, c, g, or t
gattcaggcactatgggtaaatcgagcaataaatacctgtaaaaacgttttagcaaggtcacagacgggtatcaactatccctgttatcgtaaagcaaatcan

SEQ ID NO: 519242 - DNA, 381 bp, Homo sapiens
tcagctatcataacatgtccacatcatcccctcacactgtcggtgatcgtgtgcaagaaactactctctctgctgtagacagtttgcgcatgtggagaatgccagtctcgtcaagacgcgtggcctggagtctcttgcatggtcaggactgtccctccgtacaccagaggactttgtgttccattgcttcccaatgattaattgagagagaaatacaggcgctacctcttcagggactatgtggagagtcattaccagctccagcgtgtgcctggtgcagactgccccatggttattcgggtacaggagcctagagctcgccgggtacagtgcaatcggtgcaacgaggtcttctgtctcaagtgtcgtcagatgtatcac

SEQ ID NO: 519243 - DNA, 922 bp, Homo sapiens
gcaggtgcgacgcacgaaggggatcactgacactacagacccgtgctgtttcgaccgaaacctcagtgatgacagatctggcatctgggagaacagtcggtgctccttgtaacctctagagactggatctggcgagatgatgagcagctcataccatgtctgattcttggattcctgcccacactcgctggggcgagtccctgaggagcttatgtcgagaccactggcttgaccattgttcatgaaggcgtcaccaggacatgtgtgagtgtgacgcataacgaaggatcaccaagtatgggagagaaagcgggtgctgaaagtagggaataggttggtgccaccgtcgtaatgtgtgagtaccgtgtaagagtggtgggggaaacatggtcggcgaggcggaggagtcatagtggctcctttgtgtaatcgatcgcaacagctctttgttctgcgtttgaacttctagtgttcgatgggtattaagtggtcctgtgtgtgtcagtgaccctgtagatctgtattcacgactgcatatctggggttacggttagaattagtgcaaatcttccggtgtttttcgcccagtaagcatatctcctttgaaaatgttcgaccaatttgctagatgataatccgccgggctgacttcccagaaacctgtcactagcggtctgtgtgtgccccgctgattgcatcggatatgtgtgggcttagaggtcgtggcctatggctagtatagcggctcccgatggacagtccgggggcgtggggagacctcttttatgcctggatttccctctgcgcagagggtccttttggcgggcccctttcctctggcgctctggggcagccccggggtggccaatggccagccgatgctgcaccggggctccttccagctcttcgcttgcttgggcag

SEQ ID NO: 519244 - DNA, 152 bp, Homo sapiens
ggttcctacctcaggacctcaatcgataggttcaggtacacagaccaagaagtccaggcagcatgtagccagtgagcttgtcacgtttatctccagaagttaaccaacattaccccaaactaatgatgacaattaccgggaaaacatacgca

SEQ ID NO: 519245 - DNA, 107 bp, Homo sapiens
gggttacgaagaggctcgttaataaaattgtaaaggtaagttgttttttttttccaggaaggcctcaagggtgggagtctctaaggattattttactagtaagatcc

SEQ ID NO: 519246 - DNA, 121 bp, Homo sapiens
agagcgactgagggcgtgtggggtggtcatgggtgcatttctaagtcattttttagtgttttgttaccccgctcttttgcccaggctggagtgcagcagcacgattatggctcactgtagc

SEQ ID NO: 519247 - DNA, 383 bp, Homo sapiens
cagggtacagaaaattttggtttttttttttaaaaaaaccccacaaaggcttttttttggcttttggacaaaaatccggggcatcaaaagttaagccacccccccaaaaaaataaggtccccgccccaagaaaagggtggtttcacagggaaaattgtgccccccaaccttgttaaaaaaaaaaaacggggggacccttcggccagggttggttcataaaacagggctccttgtgcccctggccaaggggtttttttccctgccccccaaattttccacttttgggggtttttattgttataaaacagaaggggctttttgggtttttaaattgattttccgggccgggccctttaaaaaaactaggatacgcctttggtgca

SEQ ID NO: 519248 - DNA, 654 bp, Homo sapiens
  misc_feature (254)..(254): n is a, c, g, or t
  misc_feature (256)..(256): n is a, c, g, or t
  misc_feature (277)..(277): n is a, c, g, or t
  misc_feature (302)..(303): n is a, c, g, or t
  misc_feature (337)..(337): n is a, c, g, or t
  misc_feature (345)..(345): n is a, c, g, or t
  misc_feature (401)..(402): n is a, c, g, or t
  misc_feature (429)..(429): n is a, c, g, or t
  misc_feature (438)..(438): n is a, c, g, or t
gggcttccctactttccccactatgttaacaggtaattctgatttatgcctttagttgacttatttttaacaaaatattagaagttatgctttaaaatgtttaatgtggactgaaattttcatctttgtttgagaatctatgaagtgtatcatatacgtggcctaaagcaaggtgtgtatttgttattctgaaatgtttgcatctggacaaatactaaatatcccagtggccttttttttttttttttaaaccngngtttccatctcatcctttggngcattcctagtaagcaaaaaatttnngttatgccatcttcatattcgaattacagactgnaaaaatanttggccagtttttaaagaagtttagattatgtttccagggaaggacaagtctgacnngtcataggcggatttcttaagaggatnatcgtgttnacaatttcaattctagatcacattttaatatagtgcgtgagtgccaaaaaaaacaaccgggagaaacggcgctttccgggggggggggggaagaaaccttatttttcacactaccaagtagagttcaaacacggttttcctggagaacctttccggcaacgttcaccaggcttcgttttggagccttcggcgcactctattcagaagaggttcatg

SEQ ID NO: 519249 - DNA, 175 bp, Homo sapiens
tagagcatggatgtcaggagtgagaccatgcctctaaaaaagaaaatcataagaaaagagaatagatttactgtttgttaaatggaggtggatcgtcataaagatcttcatccccattgtcttcatgtcaagtagactgaggaggaggaggggtcagttttgttgactagagtgg

SEQ ID NO: 519250 - DNA, 186 bp, Homo sapiens
acattctataattgataactccctgagtctcaagacaccttcctgagtgtgtgctctatacccttacaccctcagtggatgataatctcaagacacctcccgagtgtctggtcactcccctttcaacctcaggtctaccctcagtggatgataatctcaagacaactggcgagtgcttgtctatcc

SEQ ID NO: 519251 - DNA, 418 bp, Homo sapiens
  misc_feature (25)..(25): n is a, c, g, or t
  misc_feature (369)..(369): n is a, c, g, or t
  misc_feature (399)..(399): n is a, c, g, or t
aaaagtaccatgccataccatatantttaaaagaaactcaaacctggtaatgccgttaatattccagagtagagggtaatatgtcacccactgtgagccctcatgccctccctagaagatcacatcttggttcaataacccactggtgtcctggcaccccattttatctcattatagttgacagtgcgctccctgcaaagatctcatgtagttccaaaatctctgaacagcaacaacaatattcagattagaaatgtaagaaacaggcccaggtgtggtggcacgagcctgcagtcccagccactagggaggctgaggcaggacaatcgcttgaacatgggaggcagaggttgcagtgagctgagattngccactgcactccagcctggcaacagtagncactccgtctcaaaaaaaa

SEQ ID NO: 519252 - DNA, 268 bp, Homo sapiens
  misc_feature (5)..(6): n is a, c, g, or t
ggagnnggaaagatggaaacgctggaaatgatactggcgctcactttgccatccgaccaccctcggctcccgagtccacgcgtgcctgtgcctgtgctgtcagacccgcgtcggtcgtaaccctctgtggctcccctgcatcagcaccgtcccaccaccaagttcaccaggttcaccagacacggcctccacaatagccacacccacacctgagctgttctcagtgctggaacttgaccatcctggaacaccctggaagaaaaaggag

SEQ ID NO: 519253 - DNA, 282 bp, Homo sapiens
acccagccatccaagagtggatcaattagttacttcccaggaattgggaaaagagggccatcactttcacaatggctgagctagagacctccccacccccgaaccaagagcggtttggtgaccctatttcccatcatgttgtctgggaaggagagcctgcatacagatacatggcaaagagtggagatgagccatgaggatgcagtcatggcaacatgtgctctcacaggaagctcctcgctacccccagctgctgagcttccttcctccacttccttgttt

SEQ ID NO: 519254 - DNA, 130 bp, Homo sapiens
  misc_feature (27)..(27): n is a, c, g, or t
  misc_feature (75)..(75): n is a, c, g, or t
ccccattctatatcaacgggttacaancgagttctggccttgtctgtggagacggaattacaccttttccccttnctaaaaggtcaaggccttcttggctgatccattctgcctttgtggctgctgcccc

SEQ ID NO: 519255 - DNA, 313 bp, Homo sapiens
  misc_feature (41)..(41): n is a, c, g, or t
  misc_feature (187)..(187): n is a, c, g, or t
  misc_feature (220)..(220): n is a, c, g, or t
  misc_feature (222)..(222): n is a, c, g, or t
attttcggaggtcaaggcaggtgcattgcctgagctcaggngttcaagaccagcctgtgcaacatggtgaaaccccatctctccaaaaatacacagaaattagctgggcatggtggtgcgtgcctgcagtcccagctacttgtggggctgagacggagggatcatttgagcctagggggttgaggcngcagtgagccgtgttcatgccactgcactgagntngattgattccaataaaagcatatatcattgtggtagggtaggtgggtggctggatagggtagcctgggtgacagagtgagtccctgtctcc

SEQ ID NO: 519256 - DNA, 550 bp, Homo sapiens
  misc_feature (52)..(52): n is a, c, g, or t
  misc_feature (109)..(109): n is a, c, g, or t
  misc_feature (123)..(123): n is a, c, g, or t
  misc_feature (136)..(136): n is a, c, g, or t
  misc_feature (226)..(227): n is a, c, g, or t
  misc_feature (259)..(260): n is a, c, g, or t
  misc_feature (269)..(269): n is a, c, g, or t
  misc_feature (315)..(315): n is a, c, g, or t
  misc_feature (317)..(317): n is a, c, g, or t
  misc_feature (337)..(337): n is a, c, g, or t
  misc_feature (340)..(341): n is a, c, g, or t
  misc_feature (345)..(345): n is a, c, g, or t
  misc_feature (356)..(356): n is a, c, g, or t
  misc_feature (360)..(361): n is a, c, g, or t
  misc_feature (363)..(363): n is a, c, g, or t
  misc_feature (370)..(370): n is a, c, g, or t
  misc_feature (375)..(375): n is a, c, g, or t
  misc_feature (377)..(377): n is a, c, g, or t
  misc_feature (382)..(382): n is a, c, g, or t
  misc_feature (406)..(406): n is a, c, g, or t
  misc_feature (416)..(416): n is a, c, g, or t
  misc_feature (419)..(419): n is a, c, g, or t
  misc_feature (454)..(454): n is a, c, g, or t
  misc_feature (461)..(461): n is a, c, g, or t
  misc_feature (490)..(490): n is a, c, g, or t
  misc_feature (545)..(545): n is a, c, g, or t
atggacattttttctagagaaacagatctctgagcgttagaatggaagatantgaaacaagagatttcactttataatttacctttgtcaaactatcccagagcatgtnaattctattatgtnagtattactttgncgatctatataaccaattattaatagaaaacacacatgccaaaaaaccttaaattttgtaatcttcaagtcaatcatcaacttttcttgnntttttgaagacccgaaaagaaaaataatttcnnacaacagcnctcaatatcatcatatgcatttgtaatgtggcacagcaatcttttncntttttttttttttttagttnggnnctcngtcccccaggngggnntncgggggngtgancngggcncaccgcggcctccacctcccaggntcatgtgatngtnctgcctcagcctcccgggtggctgggactactggngcctgcnaccacacccgggtgttttttgtttttttngtagtggggggtgtttcgccatgttgtctctgcgtctggatctcgaaactcccgncgctc

SEQ ID NO: 519257 - DNA, 788 bp, Homo sapiens
  misc_feature (418)..(418): n is a, c, g, or t
ggttggtgaccaggccaatcccttctccacttactataatggttggaagctaaatgtcaccaaggtggcttctccttggctgaggatgatggaaggcgtgcggtgggatttgcgtcctgggttccactaggcccttagtgagggcatgaagagaaatcaatccttctcgccttcttacatcctgtgaggccatatgatcccctcagaaggcacgtgagtgctgccctactcccatggtgcccgtgtctctgtgctgctgtatgtgaaccacccaatgtgagggaactaaacctggcactagtgaactcacatcacaaatgtcaatttatgaataggagcgttaaagtctactcgggaccaaggcaggaagtggggtgtaacaagttgaattaaacgtgcgccaatgccaaccgttgcntccgaggaacaccagtgagaccccacagaatattctcgtgtggaaacacacacagcgggggggagcacatacatacgcgcgcggcgcgccccccgaaataaaaagagagaggcgcgagatatacaaatctccgcgcagaaaaaaagggcgcgcgaggtgggtagagcgcgcgcgcgcgatagaaccaagagacggtggtgcgggaaaaaaaggcaccccaggggggggcagaacaaactctgcggcgcggggcgccaccccccaaataaaaagggagaagcccggaattataaacaagcgccggaataataaagcgcccgaggggttataacccacgacgaacatataaacaagaaccccaggggaaaat

SEQ ID NO: 519258 - DNA, 279 bp, Homo sapiens
gctctccaaacatctatcaagcttgtccaacctccagcccaggaccacatgcagccaaggacggcttggaatacagcccaacacaaattcataaactttcttaaaacattatgagattttttcacattttttttttttagcttatcagccatcgttagtgttcgtatattttatgcttggcccaagacaattcttctcccagtgtggctcagggaagccaaaagattggagacccctgatctaaatactccatgtacgtgaaggtcactttcactgctg

SEQ ID NO: 519259 - DNA, 788 bp, Homo sapiens
agcttacaatctaagcaatgagagtaaaattagaattctaaattctcagacatcgttccctcatgtcgtatgaggtggagagacgagaggaagcaaacgccaaggagccttctaattttgactatatgatcattaactaaaggcagcaagggattgtgaactaatcttagatatgtcaaatgttttcactagaatgcttttggttactaatcaggttttttaatagtattttaaaggttttgcgtatgtcatatatagtatatgcattatgatttctaatagaattagtgtccagtatagacaataggtgcattaggtcagaaagtgtgtttccctctgtgattttatgctcatagccgtagaggtatatgatttgcttgtattcttgtagtatgtctttgagagtaaatgttatcgtttagtctgatatgatggtctctactctgtatgatctcttcctgttcttattttaaatgttcaagtatgggattgggtcttgtgtaagtctggtcgtctttccatattgccacctgtccagtctcgtaacagttaatgtctccaggattccattgatatggatgtccgtttgggagaacataggttatagagttatctaactaaaactattgtggataaggataatatccttatgcatattttgaacgattactcttgattctggctgactggcaagttattaataagtagacattatctatgagaggtcaccagatgtgtaggtatgactcttgtggtttccatttgagaaattttccttcttaggaaga

SEQ ID NO: 519260 - DNA, 141 bp, Homo sapiens
  misc_feature (87)..(87): n is a, c, g, or t
tctcctttgatagggtggagaggtaaggacacttatagtatgttgatagtagaatgatgctagggtgacttcatatgagattgttgngctactgctcgcgtgccgcgatcagtgcgtagttttgagtttgatgctcacctg

SEQ ID NO: 519261 - DNA, 694 bp, Homo sapiens
tcggcgtataccgtatactgagtcctcaagcttcttgagggaaaggacatagataaaatactacttagttgtctagtactagtaccttggatgccgatgggtgactatactaatagtaatagaatagcacagacacagactatgcttcctgcatggtaaggagagacacaaaagatgggaaactgcttttccacaaggaatctccgtagaattcttgcggcgaccagatggtgcataggtctggaaagtctgatctcccttggtcttccatgggatgcttagtagtggaggggagatatagattgtccggccgctttgtgattccatggattgattcagtcttctggatttattttactttaatatttagggtactggagcttttaaaaatgtttggttatcaggtatttttattcatgtgaagtgtctatgattctcttgagataaggttttaagctaaaatgttactccctgtattagtttctgacctctgacagattgacagggactttgctggtgtagtctcagaataggtataataaaccactagagcctatatcagtcgtattagtgtctgacctaatatttggagctatcagtgctatgtcgattaagatgatgactcacgatattgactggtccattcccatttcttttcttcctgaccccatacctaaactttaaatctctgtac

SEQ ID NO: 519262 - DNA, 1935 bp, Homo sapiens
  misc_feature (875)..(875): n is a, c, g, or t
gctcagtaggctgcccaagtgatacaggttttctctactactttttccagaggtgtcccagattttttttatatcctcctactaaagtggtccctaagtggaattcccaaggggtcagataaagttcttgggtggaattcataaaaggtaacgtctaaaaagagttttaacaaaatttttatccataaaaaattggtttttctcaatattcacactgttactgtgtcgaatttggtacactcagggataacatttggctagagaattactaattaatttggtggcaatttcatatgcaaattgtgtgggaaaggatctggtaaacaatctctgtgctaataaaaccttatttggtctctaaccaaggcatataaggtagggattaaggaacaaataccttaaagtgtcacgtgggggtcgcaggcagcaccacgtatgggcccactagtggtctaccattattgtacttaaccctggcccaaaggtgtgccctttgtgtcccctaaaaaagatttacgggtcctcattcaacccacaccacacgagcaacaacgacacaaacaatcagtggggcggcgggcgccatgcggcactcgagaaaaacagttttccaacagccactatcgtggaggggggccccgacgaccccaagtgacactgcagcgacagcgacggggcaacaagctgtgcgcccgacagagaacctcctgggctaagcacaacggcgcggggggtacccccccaaaaaaaaaaagcggggtgggggaacaccgggtgttgtaagaaccacacccgaaggggttccagcggccatacagtgggttccacaaagaggcggcccaggatgcgaaatacatcgcgctggcgaggcagangccaataaacgaggagcggcgggagaaagagaggacaacgggagacaagggagaggccaagagggagacgcagactgcaggagagagcggtgcgagtgcaagaagagcagagcaggcgtagggagggaacagacagccagatacgaagcacaggcagagccgagcagggaagcagagaggcagacagggcgaggagaggaagccagacgagcgcgccacccagcagcgggacaacacaccagacagagcgcgaaggacgatagaaaggaaggacacgcaagggagagaaacgacgcggaggacgagggcgatagaaagaggaggaagaggcaagagcgaggagaaaaaggagaaaggacgaggagaagagaagagagacacgaacgaagcgacgtcgagcagagagagcagacgcgaagatgggcgaaacagagcggagaggacgagggaagaaaggagaaacgacagagccagggagaaagaagcgagcacgagcagagggaggacgacgggacgaaggcgagcaagagacacacagcagacggaagaggaaagaaacacagcgaagcagacagatgcagggacgaggagagagaggatgaagaacgcgagatgcagagagacgaagtgtgaatgaggcggggcgagagggaaggagagggagacggaaggcgcaggaggaggagtgagagggagacgatggaggatggcagggaagagagagagggagcgaggagcagaagggcaaaggacggagggagagcagaggggagaataaactacaactaggaagagccagggaagaaacgaccacgaaagagcaaaggaagcagaggaagagagaggatagcgaccgccacacagaggtcggaggaggcgagacaaaagaggagaagaaagggcgaacagacagagaagcagacagagggagagagagagcagagagaagagaaacaagagagacgagggcaggacaggaagacgagagcatagagagaagaaagcacagagagcaagagacaagctaagagagaaggagtagaacagcggaaagagagag

SEQ ID NO: 519263 - DNA, 351 bp, Homo sapiens
gcacagacagctcagcacagacagcacagacagtacagcacagacagcaaagcacaacacagacagcacagcagagcacagcacagcagagacagcacagcatagcagagacagaacagcacagcacagcacagacagaacagcacagcacaccacagcacagacagaacagcacagacagcacggcacagcacagacagcacagcacagacagcacagtacagcacagcacagcacagacagcacagcacagcacagacagcacaacacagacagcacggcaaagcacagacagcacagcacagacagcacaggtttatccggccgcgaatttagtagtagtagtagacc

SEQ ID NO: 519264 - DNA, 247 bp, Homo sapiens
gtgcctgtataccctgcggagtatgtaggaggctgctaccttcctggagaattcctttatttggctctgcgcgggagcagttacttgaagctctccaggacttgggactgctgcagtctggctctatttcaggccttaagatcccagctcatcactagaggcagccctccatggacccatgaaaactgagatgaggaccttggaactaagggacgggtgaatggcgcgtccaggggtggtaagccag

SEQ ID NO: 519265 - DNA, 257 bp, Homo sapiens
tttcagccaatcccgcagggggcttttctgttgcttccactgggaagaaggcggtgacccccgctcctcccctaaaggggtgggggttttcctcgggccaccctttcctgtgacaattcaccctcacggccccccggatacttttcccccttgggtttcccccaggggggatttgaccttatttttgccaaatacgtagggctcaggtttcccttctagttttactttaaaaaataaaaaaattggggccgggtcca

SEQ ID NO: 519266 - DNA, 213 bp, Homo sapiens
ccaaccaggatggcgcccgcggcctggccgaggtcaagcgccagggtggcctgaccatcgtccaggaccccagtgaggcccatgtctcgaccatgccggccgctgccctggccctgcaccaaccggattacattctccctttgcgcggcatcagccgtctgcttgccgagctggaaggaacccatgttaagtaatattcaagccaagctgctg

SEQ ID NO: 519267 - DNA, 227 bp, Homo sapiens
tccagctaaactttatttgcagggcagcacggtgctcacgtgggggcgtttcttggacaggggggcatgcaccgcagtggtgaatacacgtcgacctgcctccatctaaacaatatttggagatcagcacggatcttatgtagcgacgctacttgtatacagagtcatgcaccgcagtggtgaatacacgtggacctgcagccatgcatgcatgctctgcaactgaa

SEQ ID NO: 519268 - DNA, 136 bp, Homo sapiens
gagagcatggctgtgttgccagtggataggtcacctggtttacgacgatctgtagggcatatggcctgggctaggtgtacggctaattacctgaacatccgacaggtatggacaatgcatcgcatggagcgtactt

SEQ ID NO: 519269 - DNA, 968 bp, Homo sapiens
taacccctctttagttttttgcgctcaaaaaccaatttaaacccccccccattgtaaagggggggcggggaaaaaagcaaaaacgcgaaagccggcctgggaaaccaccagttctggcccccgcgcattttatcgccctggttggggttttgggtgtttccatcctggtccctggtggctggggtgtggatgtgagaggggtgggacgcctccttgggggggcatctgggccattggagcccctttggtgaagattgtcacgaggggatgtgggaagaaggccatctgtccgcgccgggtcttctggggaacggtggtgtttggctccccacaatgtctctgaggcgcggaggggggggtgggcacagggtctctctcaggggttgtccagggagggtgttgctcggagagggccagcaggagagggggcgctcctgggtctgggcctgagtgttggggccggagacgggagaaggggctctgaccctgtggttgtaaccagggggcgtcccatcacggctgggggcagggtgggcccgcttccggaacatttggggaaaaccttccctttttccctcgggagaatttttggcccggcccttaaagacccttgctttgtctcagagggagggtccagaagtctcggggggaccctcttgggggggacaaggtgggggtagaaggccggggaaataggagaacggacaggggggtctgaagccaaaaaaaacaagagaaagttgacagggtctgacacatgaacactgggtgtgtgggccccggacccaggtttttggttatggcataaaagagcacaacgggggccaataggtgcgggacggaccctgcctgggaagttactgcgtccatgtgtcccatatagccctgacaggccagaaatctaaaaccgagattgaccggaaggcgaaacccgggtcatcaaccagctagaaggcctaacgttatgt

SEQ ID NO: 519270 - DNA, 404 bp, Homo sapiens
gagagagagagagagagagagagagagagagagagagagatagagtgagtgagagtgtgacagtgcacatgggtgaccttgcttcaccacattgtttcccatggaattatggttaggctcctttgtgctctactgctacaacaagattttggatggggcacttctttcctcattgaatatccacacagcctgacctctgatatgccttatgagatgcacttgctgaccgttttgccacagccagttgtgctcattctgtctttgtctctggcacctgaccctgactagagccgactatcatctcccctgttggtttgcgtggcagctggacatgacatggatgtgttcagtttgtgcatattctcgcggcttgtcacctcccctactggcttgacatatccgct

SEQ ID NO: 519271 - DNA, 233 bp, Homo sapiens
tgcgattatgagcatgtctggtgttgcggtgccagaggacagtgtgctccctggtgcatcagcctggggtgtcccttcggctgcctgaacacgcccggtacggcatcgcgtgctgcgtgcttggagcttcggaggttctgcgttgcacacagcccggctagttacgccctcgacaggatgcagtttggtgtcccactggccaggaaccagctgattcacaagaagctggcaga

SEQ ID NO: 519272 - DNA, 215 bp, Homo sapiens
actccaccccctgccaggatcaagggatcatcctggtctcaagcaattcttcctggctcaacctcccaagcagtcgggaccacaggtgcatggcaccatactcagctaactctttaaattttttttgttggagactaggtctccatatggttggctccaaggtgagtctcatatattatttacttttttcctttctttttttttttttttttggg

SEQ ID NO: 519273 - DNA, 880 bp, Homo sapiens
  misc_feature (632)..(632): n is a, c, g, or t
cggacgcgtggggttggaaaacacttccatcctgggttcttcctggtccatctccagggccctgaacattctagctattctccgaccttccagactagaacatgtacccttgcttaggtgacacttttgaaactcagcttcatccctcagggagcagttgtcttccttggctttccttctgctctgacagactgccagcaagcctggcctcacacctaacggggaagaactgagacaggaagtatgaaattatcagaaagaaaggacaactataataaactagggcatttttacagtcccatctttgggttacagacattgaccaagcctcactcaagttttattccttagtggggatgaaagggagacaggagaatgagggaagcacgagggaacaggaaggcgtacattgtccaggagtcttccttgtagtcagaactggaatcaagatataatgtggggggaaaagtctatgttatcacttacttggcctcaggaagaggacagttacactttatattccactccattacttgaaaatgaattactccctctgtcttgtagtagatgtgagttctggaataatctaccctgtttgaacccatgggaaacagacaaaagcagactactgnacagctctgccttcctttgcccacatgtcagtttttaccttgtcctgatcttccttcctgcccactcatgtcaggactgtctactcctctggtatggagaggtcctaacctcaactgtgtagctacaatgtattcctactatcaagcgaagtatcgggagaacaaggtggccggatttaagttctgaacatagtgtctagattcgaggtccctcagccaggtcggaagttccttccgtctccaaggga

SEQ ID NO: 519274 - DNA, 360 bp, Homo sapiens
gaagacctgggaccttagctcatgagaaaaaaaaagggtatgaaatatagctgtactcttatgcataaatacacccagctaggaccattactgaccagagaaaaaaatcgtattgaatggccatttccctactatataagatgtactcaatgctgaatttatttaggctacactaaaaaaatgcagtatatttagcttttccactttgcatatatgtttgtagtgctcatagatgatattttaacattgaaaagttagttttaaacttatttttacagtagaagactgtgttcagcctctttttatattcgtacatatgtcttttatgtacatttactgtgcatatgtttctgtagactg

SEQ ID NO: 519275 - DNA, 251 bp, Homo sapiens
  misc_feature (76)..(77): n is a, c, g, or t
  misc_feature (89)..(89): n is a, c, g, or t
  misc_feature (96)..(96): n is a, c, g, or t
tagccaggcatggtggcacatgcctgtagttccagccacttggtgggctgaggcaggatcacttgagctcaggtanntgaggccatagngagttgngattatgccactgcactctggcctagacgacagagcgagaccctgtctcaaaaaaacaaaacaaagaacaacaacaaaaacaacaacaaaattaccaagagctccccgccagccaaaacaaaaaacatcctcaaacagtaaagtccttcatatca

SEQ ID NO: 519276 - DNA, 182 bp, Homo sapiens
tctctcacccatttagatgcctgctgcttgtataccctttggacaccctggggtgaccaaggtttggaaaagccacctgagaccacttcatagcaagggaaggctttaagcagttactagaaagagatggggattatggcccctgtgctcctcacaacctgacatgagctatttaataccac

SEQ ID NO: 519277 - DNA, 175 bp, Homo sapiens
ctagttttagaacgtcaacgagcgagaaaatagcaaaggagcaatagatgcacttcaagacgatattacgagtcagcttgccaggaagtgcaagggtttcgagggagcaagcgggctctcctcactcatggctgccggggggttctggtgctatgtgctatggaaacttctaaaa

SEQ ID NO: 519278 - DNA, 814 bp, Homo sapiens
tggaggttggcagctatttaatttacaagtatacatttaacacaaggaaataaacacggatatactgaagcctagtaaatagtagggtaacaatatgcatcatttggatgattacattattttaaacaacaaactacactgaaaaattaaggccgataaaattctgggtcataatattaagaaatacaatatataaatggaaaatatgatggcttaaaattggaaaagggaagtgaactcattgggacagactcagagttaacataatctgaagggaggggaagctctgacccaaatgatatctttgcaggttaacagaagaaaaaagaagcatagttaatcttcaaggaaaacgggcagttggcttctatcaggtagaatatattcccagtgtcctcaggcttggcagcagaatcacatcaccgagcatgaagactgtgcctgggtgaagctgccccgatccatttatacggcctccaaaataatccttcgaaaaacatccacagaagtcaggatatatctatgagcagaagattccaaaaaagctgcataccagaaattctgccaagagacttacccttctatcataacggatcacccttttccatatgcaggtcttacttattcccaaacaacataataggatattggaccttcccccaacatatccaaaaatttgccagggataacattagttcacttcaacaattggatcgattgtaacagaatacaccaagactatagccataatatatagggcgaatgttgaggaacagaaaactttctctggccggtgtgtttacaatggagatgc

SEQ ID NO: 519279 - DNA, 108 bp, Homo sapiens
ggatatcactgagacttatctgattactatacgttatacctcaacgaaaaacgaaaaacaaaaaagacaagaagcaccaaaaatagactatttatataccaaccggtg

SEQ ID NO: 519280 - DNA, 461 bp, Homo sapiens
caaaaagcctgagtagtaaggcaatcctaaacaaaaagaacaaaggtggaggcatcacattacctaacttcaaactacagggctaccatgaccaaaacagcatggtactggtacaaaagcagacacacagaccagtgggacagaatagagagcccaaaaataaggccacaaacctacagccatctgatcttcaacaaagttgacaaaaacaagcaatggggaaaggtctccctattcaataaatggtgctgggataactggctggccatatgcagaagatcgtaactggaccccttttactatgtacaaaaattaagatggtttaaagagttaaaacccaaaattataaaaatcctgaagataacttaggcaataccattctggacataggaactggcaaatatttcatgatgaagacaccattgcactctagcctggtgaaggagcaagactccatctca
